United States Patent Application Publication US 2007/0214517 A1 - sequence listing, part 79

SEQ ID NO: 102446 - DNA, 1530 bp, Arabidopsis thaliana
  misc_feature (1)..(1530): Ceres Seq. ID no. 13610322
  misc_feature: MA Experiment ID: 108473 Result: Down-regulated in Transcription
  misc_feature: MA Experiment 108473 PARAMETER Experiment Name: At_Drought_Flowers_cDNA_P Parameter: Timepoint (hr) Value: 7 d
  misc_feature: MA Experiment 108473 PARAMETER Experiment Name: At_Drought_Flowers_cDNA_P Parameter: Tissue Value: Flower
  misc_feature: MA Experiment 108473 PARAMETER Experiment Name: At_Drought_Flowers_cDNA_P Parameter: Treatment Value: Drought vs. No Drought
  misc_feature: MA Experiment ID: 108501 Result: Down-regulated in Transcription
  misc_feature: MA Experiment 108501 PARAMETER Experiment Name: At_ap2_floral_buds_cDNA_P Parameter: Plant Line Value: ap2 (Ler.)
  misc_feature: MA Experiment 108501 PARAMETER Experiment Name: At_ap2_floral_buds_cDNA_P Parameter: Tissue Value: Closed Flower
  misc_feature: MA Experiment ID: 108605 Result: Down-regulated in Transcription
  misc_feature: MA Experiment 108605 PARAMETER Experiment Name: At_100uM_ABA_cDNA_P Parameter: Timepoint (hr) Value: 6
  misc_feature: MA Experiment 108605 PARAMETER Experiment Name: At_100uM_ABA_cDNA_P Parameter: Tissue Value: Aerial
  misc_feature: MA Experiment 108605 PARAMETER Experiment Name: At_100uM_ABA_cDNA_P Parameter: Treatment Value: 100uM ABA vs. No Treatment
  misc_feature: MA Experiment ID: 108607 Result: Down-regulated in Transcription
  misc_feature: MA Experiment 108607 PARAMETER Experiment Name: At_100uM_ABA_cDNA_P Parameter: Timepoint (hr) Value: 4
  misc_feature: MA Experiment 108607 PARAMETER Experiment Name: At_100uM_ABA_cDNA_P Parameter: Tissue Value: Aerial
  misc_feature: MA Experiment 108607 PARAMETER Experiment Name: At_100uM_ABA_cDNA_P Parameter: Treatment Value: 100uM ABA vs. No Treatment
  misc_feature: MA Experiment ID: 108609 Result: Down-regulated in Transcription
  misc_feature: MA Experiment 108609 PARAMETER Experiment Name: At_100uM_ABA_cDNA_P Parameter: Timepoint (hr) Value: 24
  misc_feature: MA Experiment 108609 PARAMETER Experiment Name: At_100uM_ABA_cDNA_P Parameter: Tissue Value: Aerial
  misc_feature: MA Experiment 108609 PARAMETER Experiment Name: At_100uM_ABA_cDNA_P Parameter: Treatment Value: 100uM ABA vs. No Treatment
  misc_feature: MA Experiment ID: 20000070 Result: Down-regulated in Transcription
  misc_feature: MA Experiment 20000070 PARAMETER Experiment Name: At_100uM_ABA_Mutants_cDNA_P Parameter: Plant Line Value: CS24
  misc_feature: MA Experiment 20000070 PARAMETER Experiment Name: At_100uM_ABA_Mutants_cDNA_P Parameter: Timepoint (hr) Value: 6
  misc_feature: MA Experiment 20000070 PARAMETER Experiment Name: At_100uM_ABA_Mutants_cDNA_P Parameter: Tissue Value: Aerial
  misc_feature: MA Experiment 20000070 PARAMETER Experiment Name: At_100uM_ABA_Mutants_cDNA_P Parameter: Treatment Value: 100uM ABA vs. No Treatment
  misc_feature: MA Experiment ID: 20000072 Result: Down-regulated in Transcription
  misc_feature: MA Experiment 20000072 PARAMETER Experiment Name: At_100uM_ABA_Mutants_cDNA_P Parameter: Plant Line Value: CS8105
  misc_feature: MA Experiment 20000072 PARAMETER Experiment Name: At_100uM_ABA_Mutants_cDNA_P Parameter: Timepoint (hr) Value: 6
  misc_feature: MA Experiment 20000072 PARAMETER Experiment Name: At_100uM_ABA_Mutants_cDNA_P Parameter: Tissue Value: Aerial
  misc_feature: MA Experiment 20000072 PARAMETER Experiment Name: At_100uM_ABA_Mutants_cDNA_P Parameter: Treatment Value: 100uM ABA vs. No Treatment
  misc_feature: MA Experiment ID: 20000086 Result: Down-regulated in Transcription
  misc_feature: MA Experiment 20000086 PARAMETER Experiment Name: At_100uM_ABA_Mutants_cDNA_P Parameter: Plant Line Value: CS22
  misc_feature: MA Experiment 20000086 PARAMETER Experiment Name: At_100uM_ABA_Mutants_cDNA_P Parameter: Timepoint (hr) Value: 6
  misc_feature: MA Experiment 20000086 PARAMETER Experiment Name: At_100uM_ABA_Mutants_cDNA_P Parameter: Tissue Value: Aerial
  misc_feature: MA Experiment 20000086 PARAMETER Experiment Name: At_100uM_ABA_Mutants_cDNA_P Parameter: Treatment Value: 100uM ABA vs. No Treatment
  misc_feature: MA Experiment ID: 20000087 Result: Down-regulated in Transcription
  misc_feature: MA Experiment 20000087 PARAMETER Experiment Name: At_100uM_ABA_Mutants_cDNA_P Parameter: Plant Line Value: WS
  misc_feature: MA Experiment 20000087 PARAMETER Experiment Name: At_100uM_ABA_Mutants_cDNA_P Parameter: Timepoint (hr) Value: 6
  misc_feature: MA Experiment 20000087 PARAMETER Experiment Name: At_100uM_ABA_Mutants_cDNA_P Parameter: Tissue Value: Aerial
  misc_feature: MA Experiment 20000087 PARAMETER Experiment Name: At_100uM_ABA_Mutants_cDNA_P Parameter: Treatment Value: 100uM ABA vs. No Treatment
  misc_feature: MA Experiment ID: 20000088 Result: Down-regulated in Transcription
  misc_feature: MA Experiment 20000088 PARAMETER Experiment Name: At_100uM_ABA_Mutants_cDNA_P Parameter: Plant Line Value: Landsberg
  misc_feature: MA Experiment 20000088 PARAMETER Experiment Name: At_100uM_ABA_Mutants_cDNA_P Parameter: Timepoint (hr) Value: 6
  misc_feature: MA Experiment 20000088 PARAMETER Experiment Name: At_100uM_ABA_Mutants_cDNA_P Parameter: Tissue Value: Aerial
  misc_feature: MA Experiment 20000088 PARAMETER Experiment Name: At_100uM_ABA_Mutants_cDNA_P Parameter: Treatment Value: 100uM ABA vs. No Treatment
  misc_feature: MA Experiment ID: 20000089 Result: Down-regulated in Transcription
  misc_feature: MA Experiment ID: 20000090 Result: Down-regulated in Transcription
  misc_feature: MA Experiment ID: 20000180 Result: Up-regulated in Transcription
  misc_feature: MA Experiment 20000180 PARAMETER Experiment Name: At_Germinating_Seeds_P Parameter: Age (hr) Value: 24 vs. 0
  misc_feature: MA Experiment 20000180 PARAMETER Experiment Name: At_Germinating_Seeds_P Parameter: Tissue Value: Germinating Seeds
  misc_feature: MA Experiment ID: 20000184 Result: Up-regulated in Transcription
  misc_feature: MA Experiment 20000184 PARAMETER Experiment Name: At_Shoots__P Parameter: Age (day) Value: 7
  misc_feature: MA Experiment 20000184 PARAMETER Experiment Name: At_Shoots__P Parameter: Tissue Value: Shoots vs. Whole Plant
  misc_feature: MA Experiment ID: 20000267 Result: Down-regulated in Transcription
  misc_feature: MA Experiment 20000267 PARAMETER Experiment Name: At_Drought_P Parameter: Age (day) Value: 7
  misc_feature: MA Experiment 20000267 PARAMETER Experiment Name: At_Drought_P Parameter: Organism Value: A. thaliana
  misc_feature: MA Experiment 20000267 PARAMETER Experiment Name: At_Drought_P Parameter: Plant Line Value: WS
  misc_feature: MA Experiment 20000267 PARAMETER Experiment Name: At_Drought_P Parameter: Timepoint (hr) Value: 6
  misc_feature: MA Experiment 20000267 PARAMETER Experiment Name: At_Drought_P Parameter: Tissue Value: Whole Plant
  misc_feature: MA Experiment 20000267 PARAMETER Experiment Name: At_Drought_P Parameter: Treatment Value: Drought vs. No Drought
  misc_feature: MA Experiment ID: 20000286 Result: Up-regulated in Transcription
  misc_feature: MA Experiment 20000286 PARAMETER Experiment Name: At_Open_Flower_P Parameter: Age (day) Value: 21
  misc_feature: MA Experiment 20000286 PARAMETER Experiment Name: At_Open_Flower_P Parameter: Plant Line Value: WS
  misc_feature: MA Experiment 20000286 PARAMETER Experiment Name: At_Open_Flower_P Parameter: Tissue Value: Half Open vs. Whole Plant
  misc_feature: MA Experiment ID: 20000436 Result: Down-regulated in Transcription
  misc_feature: MA Experiment 20000436 PARAMETER Experiment Name: At_Drought_P Parameter: Age (day) Value: 7
  misc_feature: MA Experiment 20000436 PARAMETER Experiment Name: At_Drought_P Parameter: Organism Value: A. thaliana
  misc_feature: MA Experiment 20000436 PARAMETER Experiment Name: At_Drought_P Parameter: Plant Line Value: WS
  misc_feature: MA Experiment 20000436 PARAMETER Experiment Name: At_Drought_P Parameter: Timepoint (hr) Value: 12
  misc_feature: MA Experiment 20000436 PARAMETER Experiment Name: At_Drought_P Parameter: Tissue Value: Whole Plant
  misc_feature: MA Experiment 20000436 PARAMETER Experiment Name: At_Drought_P Parameter: Treatment Value: Drought vs. No Drought
  misc_feature: MA Experiment ID: 20000437 Result: Down-regulated in Transcription
  misc_feature: MA Experiment 20000437 PARAMETER Experiment Name: At_Drought_P Parameter: Age (day) Value: 8
  misc_feature: MA Experiment 20000437 PARAMETER Experiment Name: At_Drought_P Parameter: Organism Value: A. thaliana
  misc_feature: MA Experiment 20000437 PARAMETER Experiment Name: At_Drought_P Parameter: Plant Line Value: WS
  misc_feature: MA Experiment 20000437 PARAMETER Experiment Name: At_Drought_P Parameter: Timepoint (hr) Value: 24
  misc_feature: MA Experiment 20000437 PARAMETER Experiment Name: At_Drought_P Parameter: Tissue Value: Whole Plant
  misc_feature: MA Experiment 20000437 PARAMETER Experiment Name: At_Drought_P Parameter: Treatment Value: Drought vs. No Drought
  misc_feature: MA Experiment ID: 20000438 Result: Up-regulated in Transcription
  misc_feature: MA Experiment 20000438 PARAMETER Experiment Name: At_Shoots__P Parameter: Age (day) Value: 14
  misc_feature: MA Experiment 20000438 PARAMETER Experiment Name: At_Shoots__P Parameter: Tissue Value: Shoots vs. Whole Plant
  misc_feature: MA Experiment ID: 20000453 Result: Down-regulated in Transcription
  misc_feature: MA Experiment 20000453 PARAMETER Experiment Name: At_100uM_ABA_P Parameter: Age (day) Value: 15
  misc_feature: MA Experiment 20000453 PARAMETER Experiment Name: At_100uM_ABA_P Parameter: Organism Value: A. thaliana
  misc_feature: MA Experiment 20000453 PARAMETER Experiment Name: At_100uM_ABA_P Parameter: Plant Line Value: WS
  misc_feature: MA Experiment 20000453 PARAMETER Experiment Name: At_100uM_ABA_P Parameter: Timepoint (hr) Value: 24
  misc_feature: MA Experiment 20000453 PARAMETER Experiment Name: At_100uM_ABA_P Parameter: Tissue Value: Aerial
  misc_feature: MA Experiment 20000453 PARAMETER Experiment Name: At_100uM_ABA_P Parameter: Treatment Value: 100uM ABA vs. No Treatment
  misc_feature: MA Experiment ID: 20000527 Result: Up-regulated in Transcription
  misc_feature: MA Experiment 20000527 PARAMETER Experiment Name: At_10percent_PEG_P Parameter: Age (day) Value: 20
  misc_feature: MA Experiment 20000527 PARAMETER Experiment Name: At_10percent_PEG_P Parameter: Organism Value: A. thaliana
  misc_feature: MA Experiment 20000527 PARAMETER Experiment Name: At_10percent_PEG_P Parameter: Plant Line Value: WS
  misc_feature: MA Experiment 20000527 PARAMETER Experiment Name: At_10percent_PEG_P Parameter: Timepoint (day) Value: 20
  misc_feature: MA Experiment 20000527 PARAMETER Experiment Name: At_10percent_PEG_P Parameter: Tissue Value: Whole Plant
  misc_feature: MA Experiment 20000527 PARAMETER Experiment Name: At_10percent_PEG_P Parameter: Treatment Value: 10percent PEG vs. No Treatment
  misc_feature: MA Experiment ID: 20000794 Result: Up-regulated in Transcription
  misc_feature: MA Experiment 20000794 PARAMETER Experiment Name: At_Petals_P Parameter: Age (day) Value: 23-25 days
  misc_feature: MA Experiment 20000794 PARAMETER Experiment Name: At_Petals_P Parameter: Plant Line Value: WS
  misc_feature: MA Experiment 20000794 PARAMETER Experiment Name: At_Petals_P Parameter: Tissue Value: Petals vs. Whole plant
  misc_feature: MA Experiment ID: 20001248 Result: Down-regulated in Transcription
  misc_feature: MA Experiment 20001248 PARAMETER Experiment Name: At_Far-red-induction_P Parameter: Age (day) Value: 7
  misc_feature: MA Experiment 20001248 PARAMETER Experiment Name: At_Far-red-induction_P Parameter: Light Value: Far-red vs. White
  misc_feature: MA Experiment 20001248 PARAMETER Experiment Name: At_Far-red-induction_P Parameter: Organism Value: A. thaliana
  misc_feature: MA Experiment 20001248 PARAMETER Experiment Name: At_Far-red-induction_P Parameter: Plant Line Value: Columbia
  misc_feature: MA Experiment 20001248 PARAMETER Experiment Name: At_Far-red-induction_P Parameter: Timepoint (hr) Value: 4
  misc_feature: MA Experiment 20001248 PARAMETER Experiment Name: At_Far-red-induction_P Parameter: Tissue Value: Whole Plant
  misc_feature: MA Experiment ID: 20001554 Result: Down-regulated in Transcription
  misc_feature: MA Experiment 20001554 PARAMETER Experiment Name: At_Drought_Soil_Dry_P Parameter: Age (day) Value: 21
  misc_feature: MA Experiment 20001554 PARAMETER Experiment Name: At_Drought_Soil_Dry_P Parameter: Organism Value: A. thaliana
  misc_feature: MA Experiment 20001554 PARAMETER Experiment Name: At_Drought_Soil_Dry_P Parameter: Plant Line Value: WS
  misc_feature: MA Experiment 20001554 PARAMETER Experiment Name: At_Drought_Soil_Dry_P Parameter: Post Timepoint (hr) Value: None
  misc_feature: MA Experiment 20001554 PARAMETER Experiment Name: At_Drought_Soil_Dry_P Parameter: Post-Treatment Value: None
  misc_feature: MA Experiment 20001554 PARAMETER Experiment Name: At_Drought_Soil_Dry_P Parameter: Timepoint (day) Value: 7
  misc_feature: MA Experiment 20001554 PARAMETER Experiment Name: At_Drought_Soil_Dry_P Parameter: Treatment Value: Drought vs. No Drought
  misc_feature: MA Experiment ID: 20001555 Result: Down-regulated in Transcription
  misc_feature: MA Experiment 20001555 PARAMETER Experiment Name: At_Drought_Soil_Dry_P Parameter: Age (day) Value: 24
  misc_feature: MA Experiment 20001555 PARAMETER Experiment Name: At_Drought_Soil_Dry_P Parameter: Organism Value: A. thaliana
  misc_feature: MA Experiment 20001555 PARAMETER Experiment Name: At_Drought_Soil_Dry_P Parameter: Plant Line Value: WS
  misc_feature: MA Experiment 20001555 PARAMETER Experiment Name: At_Drought_Soil_Dry_P Parameter: Post Timepoint (hr) Value: None
  misc_feature: MA Experiment 20001555 PARAMETER Experiment Name: At_Drought_Soil_Dry_P Parameter: Post-Treatment Value: None
  misc_feature: MA Experiment 20001555 PARAMETER Experiment Name: At_Drought_Soil_Dry_P Parameter: Timepoint (day) Value: 10
  misc_feature: MA Experiment 20001555 PARAMETER Experiment Name: At_Drought_Soil_Dry_P Parameter: Treatment Value: Drought vs. No Drought
  misc_feature: MA Experiment ID: 20001556 Result: Down-regulated in Transcription
  misc_feature: MA Experiment 20001556 PARAMETER Experiment Name: At_Drought_Soil_Dry_P Parameter: Age (day) Value: 26
  misc_feature: MA Experiment 20001556 PARAMETER Experiment Name: At_Drought_Soil_Dry_P Parameter: Organism Value: A. thaliana
  misc_feature: MA Experiment 20001556 PARAMETER Experiment Name: At_Drought_Soil_Dry_P Parameter: Plant Line Value: WS
  misc_feature: MA Experiment 20001556 PARAMETER Experiment Name: At_Drought_Soil_Dry_P Parameter: Post Timepoint (hr) Value: None
  misc_feature: MA Experiment 20001556 PARAMETER Experiment Name: At_Drought_Soil_Dry_P Parameter: Post-Treatment Value: None
  misc_feature: MA Experiment 20001556 PARAMETER Experiment Name: At_Drought_Soil_Dry_P Parameter: Timepoint (day) Value: 12
  misc_feature: MA Experiment 20001556 PARAMETER Experiment Name: At_Drought_Soil_Dry_P Parameter: Treatment Value: Drought vs. No Drought
  misc_feature: MA Experiment ID: 20001557 Result: Down-regulated in Transcription
  misc_feature: MA Experiment 20001557 PARAMETER Experiment Name: At_Drought_Soil_Dry_P Parameter: Age (day) Value: 27
  misc_feature: MA Experiment 20001557 PARAMETER Experiment Name: At_Drought_Soil_Dry_P Parameter: Organism Value: A. thaliana
  misc_feature: MA Experiment 20001557 PARAMETER Experiment Name: At_Drought_Soil_Dry_P Parameter: Plant Line Value: WS
  misc_feature: MA Experiment 20001557 PARAMETER Experiment Name: At_Drought_Soil_Dry_P Parameter: Post Timepoint (hr) Value: 3
  misc_feature: MA Experiment 20001557 PARAMETER Experiment Name: At_Drought_Soil_Dry_P Parameter: Post-Treatment Value: Re-Water vs. No Drought
  misc_feature: MA Experiment 20001557 PARAMETER Experiment Name: At_Drought_Soil_Dry_P Parameter: Timepoint (day) Value: 13
  misc_feature: MA Experiment 20001557 PARAMETER Experiment Name: At_Drought_Soil_Dry_P Parameter: Treatment Value: Drought vs. No Drought
  misc_feature: MA Experiment ID: 20001559 Result: Down-regulated in Transcription
  misc_feature: MA Experiment 20001559 PARAMETER Experiment Name: At_Drought_Soil_Dry_P Parameter: Age (day) Value: 28
  misc_feature: MA Experiment 20001559 PARAMETER Experiment Name: At_Drought_Soil_Dry_P Parameter: Organism Value: A. thaliana
  misc_feature: MA Experiment 20001559 PARAMETER Experiment Name: At_Drought_Soil_Dry_P Parameter: Plant Line Value: WS
  misc_feature: MA Experiment 20001559 PARAMETER Experiment Name: At_Drought_Soil_Dry_P Parameter: Post Timepoint (hr) Value: 29
  misc_feature: MA Experiment 20001559 PARAMETER Experiment Name: At_Drought_Soil_Dry_P Parameter: Post-Treatment Value: Re-Water vs. No Drought
  misc_feature: MA Experiment 20001559 PARAMETER Experiment Name: At_Drought_Soil_Dry_P Parameter: Timepoint (day) Value: 14
  misc_feature: MA Experiment 20001559 PARAMETER Experiment Name: At_Drought_Soil_Dry_P Parameter: Treatment Value: Drought vs. No Drought
  misc_feature: MA Experiment ID: 20001910 Result: Down-regulated in Transcription
  misc_feature: MA Experiment 20001910 PARAMETER Experiment Name: At_Drought_Reproduction_P Parameter: Age (day) Value: 37
  misc_feature: MA Experiment 20001910 PARAMETER Experiment Name: At_Drought_Reproduction_P Parameter: Organism Value: A. thaliana
  misc_feature: MA Experiment 20001910 PARAMETER Experiment Name: At_Drought_Reproduction_P Parameter: Plant Line Value: WS
  misc_feature: MA Experiment 20001910 PARAMETER Experiment Name: At_Drought_Reproduction_P Parameter: Timepoint (day) Value: 7
  misc_feature: MA Experiment 20001910 PARAMETER Experiment Name: At_Drought_Reproduction_P Parameter: Tissue Value: Flowers
  misc_feature: MA Experiment 20001910 PARAMETER Experiment Name: At_Drought_Reproduction_P Parameter: Treatment Value: Drought vs. No Drought
attcgcattacgatggtttatgtaaagagattggttatatcaatcttatcaaacccacctctctcgggattattgactcgatttggatatttatacatgtgactatatttagacatacatagatctcagtcctgtatatatagagctacattcataaaagaaagatctaacataacaaaaggaaaaaagcatcaagaacatggcggagactcaaggaaaggtcatcacttgtaaagctgctgtcgtatggggtccaaaagtgccgcttgtaattcaagaaatatgcgtcgatcctcctcagaaaatggaagtccgtgttaaaattctttactcctccatttgccacaccgatctcggatgttggaacggcacgaacgaagctgaacgagcatttccaaggattcttggccatgaagctgtcgggattgtagagagtgttggagaaggagtaaaagatgtgaaagaaggagactacgtgattccgactttcaatggagaatgtggtgaatgtaaagtgtgtaagagagaagaaagtaatctctgtgagcgatatcatgtggatcctatgaagagggtgatggtgaatgatggagggacgagattctcaaccaccataaacaaggacggtggttcgagccaaagccaacctatatatcacttccttaacacctccacgttcaccgaatacactgtcttggactcggcttgcgtcgtcaagatcgatcctaattctcctctcaagcaaatgagcctcttgagttgtggtgtctcaactggggttggagcagcttggaacattgcaaatgtgaaggaaggaaaaagcactgctgtctttggattgggttccgttggactcgctgttgctgaaggtgcaagagctagaggagcttctaggatcattggtgttgatgctaatgcttccaaatttgagaaaggtaaactgatgggagtaacagatttcataaaccctaaagacttaactaagccagtacatcagatgatacgagagataacgggaggaggcgtggactatagctttgaatgtacaggaaacgttgatgttcttcgcgaagcctttttatccactcacgtcggttggggatcgacagtacttgttgggatctatccgacgccaagaacattgcctcttcacccaatggagcttttcgacggccgtagaatcaccggttctgtgtttggtggcttcaagcccaaatctcagcttccaaatttcgcccaacaatgcatgaaaggggttgtgaaattggaaccttttattaccaatgagcttccatttgagaagataaacgatgcgtttcagctgcttcgcgatggaaaatctcttcggtgcattcttcaaatctctaaacttctcaagagatgattctacacattcacaaagtttactacactatatataatttacccaacaaacacttattttactgcattattcagtatattatcttacctataaatgtgtatcatcatcatcaataacgcgattatttgtgctgaaggattatatat

SEQ ID NO: 102447 - protein, 394 aa, Arabidopsis thaliana
  peptide (1)..(394): Ceres Seq. ID no. 13610323
  misc_feature (1)..(394): Homolog of NCBI NO: 18398586 NR Description: alcohol dehydrogenase (ADH), putative
  misc_feature (1)..(394): Homolog of NCBI NO: 21592656 NR Description: alcohol dehydrogenase, putative [Arabidopsis
  misc_feature (79)..(394): Homolog of NCBI NO: 6714279 NR Description: F6N18.16 [Arabidopsis thaliana]
  misc_feature (13)..(62): Homolog of NCBI NO: 6714279 NR Description: F6N18.16 [Arabidopsis thaliana]
  misc_feature (3)..(388): Homolog of NCBI NO: 15217715 NR Description: alcohol dehydrogenase (ADH), putative thaliana] >gi|17529032|gb|AAL38726.1| putative alcohol [Arabidopsis thaliana] >gi|29824177|gb|AAP04049.1| putative
  misc_feature (3)..(388): Homolog of NCBI NO: 25283039 NR Description: alcohol dehydrogenase (EC 1.-.-.-) [similarity] - thaliana >gi|5042408|gb|AAD38247.1|AC006193_3 very similar to
  misc_feature (1)..(386): Homolog of NCBI NO: 7427629 NR Description: alcohol dehydrogenase (EC 1.1.1.1) - potato
  misc_feature (1)..(386): Homolog of NCBI NO: 113365 NR Description: Alcohol dehydrogenase 1 >gi|169467|gb|AAA33806.1|
  misc_feature (2)..(386): Homolog of NCBI NO: 113363 NR Description: ALCOHOL DEHYDROGENASE 1 >gi|279445|pir||DEPJA1
  misc_feature (1)..(386): Homolog of NCBI NO: 113379 NR Description: ALCOHOL DEHYDROGENASE 2 >gi|169469|gb|AAA33807.1|
MAETQGKVITCKAAVVWGPKVPLVIQEICVDPPQKMEVRVKILYSSICHTDLGCWNGTNEAERAFPRILGHEAVGIVESVGEGVKDVKEGDYVIPTFNGECGECKVCKREESNLCERYHVDPMKRVMVNDGGTRFSTTINKDGGSSQSQPIYHFLNTSTFTEYTVLDSACVVKIDPNSPLKQMSLLSCGVSTGVGAAWNIANVKEGKSTAVFGLGSVGLAVAEGARARGASRIIGVDANASKFEKGKLMGVTDFINPKDLTKPVHQMIREITGGGVDYSFECTGNVDVLREAFLSTHVGWGSTVLVGIYPTPRTLPLHPMELFDGRRITGSVFGGFKPKSQLPNFAQQCMKGVVKLEPFITNELPFEKINDAFQLLRDGKSLRCILQISKLLKR

SEQ ID NO: 102448 - protein, 359 aa, Arabidopsis thaliana
  peptide (1)..(359): Ceres Seq. ID no. 13610324
  misc_feature (1)..(359): Homolog of NCBI NO: 18398586 NR Description: alcohol dehydrogenase (ADH), putative
  misc_feature (1)..(359): Homolog of NCBI NO: 21592656 NR Description: alcohol dehydrogenase, putative [Arabidopsis
  misc_feature (44)..(359): Homolog of NCBI NO: 6714279 NR Description: F6N18.16 [Arabidopsis thaliana]
  misc_feature (1)..(27): Homolog of NCBI NO: 6714279 NR Description: F6N18.16 [Arabidopsis thaliana]
  misc_feature (1)..(353): Homolog of NCBI NO: 15217715 NR Description: alcohol dehydrogenase (ADH), putative thaliana] >gi|17529032|gb|AAL38726.1| putative alcohol [Arabidopsis thaliana] >gi|29824177|gb|AAP04049.1| putative
  misc_feature (1)..(353): Homolog of NCBI NO: 25283039 NR Description: alcohol dehydrogenase (EC 1.-.-.-) [similarity] - thaliana >gi|5042408|gb|AAD38247.1|AC006193_3 very similar to
  misc_feature (1)..(351): Homolog of NCBI NO: 7427629 NR Description: alcohol dehydrogenase (EC 1.1.1.1) - potato
  misc_feature (1)..(351): Homolog of NCBI NO: 113365 NR Description: Alcohol dehydrogenase 1 >gi|169467|gb|AAA33806.1|
  misc_feature (1)..(351): Homolog of NCBI NO: 113363 NR Description: ALCOHOL DEHYDROGENASE 1 >gi|279445|pir||DEPJA1
  misc_feature (1)..(351): Homolog of NCBI NO: 113379 NR Description: ALCOHOL DEHYDROGENASE 2 >gi|169469|gb|AAA33807.1|
MEVRVKILYSSICHTDLGCWNGTNEAERAFPRILGHEAVGIVESVGEGVKDVKEGDYVIPTFNGECGECKVCKREESNLCERYHVDPMKRVMVNDGGTRFSTTINKDGGSSQSQPIYHFLNTSTFTEYTVLDSACVVKIDPNSPLKQMSLLSCGVSTGVGAAWNIANVKEGKSTAVFGLGSVGLAVAEGARARGASRIIGVDANASKFEKGKLMGVTDFINPKDLTKPVHQMIREITGGGVDYSFECTGNVDVLREAFLSTHVGWGSTVLVGIYPTPRTLPLHPMELFDGRRITGSVFGGFKPKSQLPNFAQQCMKGVVKLEPFITNELPFEKINDAFQLLRDGKSLRCILQISKLLKR

SEQ ID NO: 102449 - protein, 272 aa, Arabidopsis thaliana
  peptide (1)..(272): Ceres Seq. ID no. 13610325
  misc_feature (1)..(272): Homolog of NCBI NO: 18398586 NR Description: alcohol dehydrogenase (ADH), putative
  misc_feature (1)..(272): Homolog of NCBI NO: 21592656 NR Description: alcohol dehydrogenase, putative [Arabidopsis
  misc_feature (1)..(272): Homolog of NCBI NO: 6714279 NR Description: F6N18.16 [Arabidopsis thaliana]
  misc_feature (1)..(266): Homolog of NCBI NO: 15217715 NR Description: alcohol dehydrogenase (ADH), putative thaliana] >gi|17529032|gb|AAL38726.1| putative alcohol [Arabidopsis thaliana] >gi|29824177|gb|AAP04049.1| putative
  misc_feature (1)..(266): Homolog of NCBI NO: 25283039 NR Description: alcohol dehydrogenase (EC 1.-.-.-) [similarity] - thaliana >gi|5042408|gb|AAD38247.1|AC006193_3 very similar to
  misc_feature (1)..(264): Homolog of NCBI NO: 7427629 NR Description: alcohol dehydrogenase (EC 1.1.1.1) - potato
  misc_feature (1)..(264): Homolog of NCBI NO: 113365 NR Description: Alcohol dehydrogenase 1 >gi|169467|gb|AAA33806.1|
  misc_feature (1)..(264): Homolog of NCBI NO: 113363 NR Description: ALCOHOL DEHYDROGENASE 1 >gi|279445|pir||DEPJA1
  misc_feature (1)..(264): Homolog of NCBI NO: 113379 NR Description: ALCOHOL DEHYDROGENASE 2 >gi|169469|gb|AAA33807.1|
  misc_feature (1)..(264): Homolog of NCBI NO: 113386 NR Description: ALCOHOL DEHYDROGENASE 3 >gi|169471|gb|AAA33808.1|
MKRVMVNDGGTRFSTTINKDGGSSQSQPIYHFLNTSTFTEYTVLDSACVVKIDPNSPLKQMSLLSCGVSTGVGAAWNIANVKEGKSTAVFGLGSVGLAVAEGARARGASRIIGVDANASKFEKGKLMGVTDFINPKDLTKPVHQMIREITGGGVDYSFECTGNVDVLREAFLSTHVGWGSTVLVGIYPTPRTLPLHPMELFDGRRITGSVFGGFKPKSQLPNFAQQCMKGVVKLEPFITNELPFEKINDAFQLLRDGKSLRCILQISKLLKR

SEQ ID NO: 102450 - DNA, 1408 bp, Arabidopsis thaliana
  misc_feature (1)..(1408): Ceres Seq. ID no. 13610326
  misc_feature: MA Experiment ID: 108569 Result: Up-regulated in Transcription
  misc_feature: MA Experiment 108569 PARAMETER Experiment Name: At_0.001%_MeJA__cDNA_P Parameter: Timepoint (hr) Value: 6
  misc_feature: MA Experiment 108569 PARAMETER Experiment Name: At_0.001%_MeJA__cDNA_P Parameter: Tissue Value: Aerial
  misc_feature: MA Experiment 108569 PARAMETER Experiment Name: At_0.001%_MeJA__cDNA_P Parameter: Treatment Value: 0.001% MeJA vs. No Treatment
  misc_feature: MA Experiment ID: 108573 Result: Up-regulated in Transcription
  misc_feature: MA Experiment 108573 PARAMETER Experiment Name: At_Drought_cDNA_P Parameter: Timepoint (hr) Value: 6
  misc_feature: MA Experiment 108573 PARAMETER Experiment Name: At_Drought_cDNA_P Parameter: Tissue Value: Aerial
  misc_feature: MA Experiment 108573 PARAMETER Experiment Name: At_Drought_cDNA_P Parameter: Treatment Value: Drought vs. No Drought
  misc_feature: MA Experiment ID: 108579 Result: Down-regulated in Transcription
  misc_feature: MA Experiment 108579 PARAMETER Experiment Name: At_4deg_Cold_cDNA_P Parameter: Temperature (deg C) Value: 4 vs. 22
  misc_feature: MA Experiment 108579 PARAMETER Experiment Name: At_4deg_Cold_cDNA_P Parameter: Timepoint (hr) Value: 6
  misc_feature: MA Experiment 108579 PARAMETER Experiment Name: At_4deg_Cold_cDNA_P Parameter: Tissue Value: Aerial
  misc_feature: MA Experiment ID: 108585 Result: Up-regulated in Transcription
  misc_feature: MA Experiment 108585 PARAMETER Experiment Name: At_5mM_NaNP_cDNA_P Parameter: Timepoint (hr) Value: 6
  misc_feature: MA Experiment 108585 PARAMETER Experiment Name: At_5mM_NaNP_cDNA_P Parameter: Tissue Value: Aerial
  misc_feature: MA Experiment 108585 PARAMETER Experiment Name: At_5mM_NaNP_cDNA_P Parameter: Treatment Value: null
  misc_feature: MA Experiment ID: 108668 Result: Up-regulated in Transcription
  misc_feature: MA Experiment 108668 PARAMETER Experiment Name: At_2mM_SA_cDNA_P Parameter: Plant Line Value: WS
  misc_feature: MA Experiment 108668 PARAMETER Experiment Name: At_2mM_SA_cDNA_P Parameter: Timepoint (hr) Value: 6
  misc_feature: MA Experiment 108668 PARAMETER Experiment Name: At_2mM_SA_cDNA_P Parameter: Treatment Value: 2mM SA vs. No Treatment
  misc_feature: MA Experiment ID: 20000224 Result: Down-regulated in Transcription
  misc_feature: MA Experiment ID: 20001450 Result: Up-regulated in Transcription
  misc_feature: MA Experiment 20001450 PARAMETER Experiment Name: At_Far-red-induction_P Parameter: Age (day) Value: 7
  misc_feature: MA Experiment 20001450 PARAMETER Experiment Name: At_Far-red-induction_P Parameter: Light Value: Far-red vs. White
  misc_feature: MA Experiment 20001450 PARAMETER Experiment Name: At_Far-red-induction_P Parameter: Organism Value: A. thaliana
  misc_feature: MA Experiment 20001450 PARAMETER Experiment Name: At_Far-red-induction_P Parameter: Plant Line Value: Columbia
  misc_feature: MA Experiment 20001450 PARAMETER Experiment Name: At_Far-red-induction_P Parameter: Timepoint (hr) Value: 8
  misc_feature: MA Experiment 20001450 PARAMETER Experiment Name: At_Far-red-induction_P Parameter: Tissue Value: Whole Plant
  misc_feature: MA Experiment ID: 20001558 Result: Down-regulated in Transcription
  misc_feature: MA Experiment 20001558 PARAMETER Experiment Name: At_Drought_Soil_Dry_P Parameter: Age (day) Value: 27
  misc_feature: MA Experiment 20001558 PARAMETER Experiment Name: At_Drought_Soil_Dry_P Parameter: Organism Value: A. thaliana
  misc_feature: MA Experiment 20001558 PARAMETER Experiment Name: At_Drought_Soil_Dry_P Parameter: Plant Line Value: WS
  misc_feature: MA Experiment 20001558 PARAMETER Experiment Name: At_Drought_Soil_Dry_P Parameter: Post Timepoint (hr) Value: 6
  misc_feature: MA Experiment 20001558 PARAMETER Experiment Name: At_Drought_Soil_Dry_P Parameter: Post-Treatment Value: Re-Water vs. No Drought
  misc_feature: MA Experiment 20001558 PARAMETER Experiment Name: At_Drought_Soil_Dry_P Parameter: Timepoint (day) Value: 13
  misc_feature: MA Experiment 20001558 PARAMETER Experiment Name: At_Drought_Soil_Dry_P Parameter: Treatment Value: Drought vs. No Drought
atgctgattcctctccttttcttcctcaactcataaacccgatcggccgattccttcacaattatccttaaaattttcgattttgattattgggtttctctctgatcatggcggttgttgagactggagcagcagctactgctgctgatgcaggaggagtcgtgatccagccgccgccgtcttcaccaccatcttcaatgactagtcaagattccggcgtttcttccgatgatcagaaccatcactctaggatcgatcaagttctccggcacgatcaaggtctttacagcaagatcgggtcacacgtggcgagatccgacggcgttgacggtggtgagagctttaagcgtgatatgagagagcttcaggagcttttctctaagcttaatcctatggctgaagagtttgttcctccttctctgaataaacaaggaggtaacggtgttaacggtggtttcttcacctctgctggttccttcttccgcaacaatggctttgctggtaccggaaatggcggatacggtaacgaaaacggtggtttccgacggaagaagagttttggtcaagggaaacgaaggatgaatgctcgaacaagcatggctcagcgagaagatgttatccgtagaaccgtctacgtctctgatctcgatcaacaggtcactgaagagcagcttgctggtttgtttgtgagctgtggacaggttgttgactgtcgcatatgcggtgacccaaactcggtccttcggtttgcattcatagagttcactgatgaagagggtgcgatgactgctctaaatttatcggggactatgttgggattctatcctgtgaaagttttaccatccaaaacagctatagcaccggttaacccgacatttttgcctaggactgaagatgagcgtgagatgtgtgcaagaactatctactgtactaacatagacaagaaggtgactcaatcagacgtgaagatcttttttgagtccttctgcggagaggtttatcgcctgaggctgcttggagattatcaacactcgactcgtattgcttttgtagagttcgtaatggcggaaagcgcaatagctgctctcaactgcagtggagttgttcttggttctttacctataagggtgagtccttcaaagacgcctgttcgtccgagatcaccgaggcatccaatgcattgatcttagctttacaggttttcacatatctcatgtctccgcaatatatatatcgctgtgtcgtcttaaaaacagcattacacagacatgtaaagatgtttgtctgcatctctcatctcttgttttcgaaatgtaactctgggatctgatgatgcttctttcttcttcctttacctgagaatcttttgggtaaaaaaaacctcgtagagagtttttatttatctctt

SEQ ID NO: 102451 - protein, 358 aa, Arabidopsis thaliana
  peptide (1)..(358): Ceres Seq. ID no. 13610327
  misc_feature (175)..(243): Pfam Name: RNA recognition motif. (a.k.a. RRM, RBD, or RNP domain) Pfam Description: RNA recognition motif. (a.k.a. RRM, RBD, or RNP
  misc_feature (1)..(358): Homolog of NCBI NO: 15223304 NR Description: RNA-binding protein, putative [Arabidopsis
  misc_feature (33)..(358): Homolog of NCBI NO: 15235177 NR Description: RNA-binding protein RBP37 [Arabidopsis thaliana]
  misc_feature (33)..(358): Homolog of NCBI NO: 1174153 NR Description: RNA-binding protein
  misc_feature (158)..(358): Homolog of NCBI NO: 14030687 NR Description: At1g32790 [Arabidopsis thaliana]
  misc_feature (1)..(354): Homolog of NCBI NO: 15229132 NR Description: RNA-binding protein, putative [Arabidopsis
  misc_feature (82)..(356): Homolog of NCBI NO: 15231858 NR Description: RNA-binding protein, putative [Arabidopsis
  misc_feature (83)..(356): Homolog of NCBI NO: 15220902 NR Description: RNA-binding protein, putative [Arabidopsis
  misc_feature (89)..(341): Homolog of NCBI NO: 8671859 NR Description: Contains similarity to RNA-binding protein from thaliana gi|2129727 and contains RNA recognition PF|00076 domain.
  misc_feature (86)..(349): Homolog of NCBI NO: 15238531 NR Description: RNA-binding protein, putative [Arabidopsis
  misc_feature (79)..(334): Homolog of NCBI NO: 34903832 NR Description: ATT4F9_7(AL049523|pid:g4539439) Arabidopsis
MAVVETGAAATAADAGGVVIQPPPSSPPSSMTSQDSGVSSDDQNHHSRIDQVLRHDQGLYSKIGSHVARSDGVDGGESFKRDMRELQELFSKLNPMAEEFVPPSLNKQGGNGVNGGFFTSAGSFFRNNGFAGTGNGGYGNENGGFRRKKSFGQGKRRMNARTSMAQREDVIRRTVYVSDLDQQVTEEQLAGLFVSCGQVVDCRICGDPNSVLRFAFIEFTDEEGAMTALNLSGTMLGFYPVKVLPSKTAIAPVNPTFLPRTEDEREMCARTIYCTNIDKKVTQSDVKIFFESFCGEVYRLRLLGDYQHSTRIAFVEFVMAESAIAALNCSGVVLGSLPIRVSPSKTPVRPRSPRHPMH

SEQ ID NO: 102452 - protein, 328 aa, Arabidopsis thaliana
  peptide (1)..(328): Ceres Seq. ID no. 13610328
  misc_feature (145)..(213): Pfam Name: RNA recognition motif. (a.k.a. RRM, RBD, or RNP domain) Pfam Description: RNA recognition motif. (a.k.a. RRM, RBD, or RNP
  misc_feature (1)..(328): Homolog of NCBI NO: 15223304 NR Description: RNA-binding protein, putative [Arabidopsis
  misc_feature (3)..(328): Homolog of NCBI NO: 15235177 NR Description: RNA-binding protein RBP37 [Arabidopsis thaliana]
  misc_feature (3)..(328): Homolog of NCBI NO: 1174153 NR Description: RNA-binding protein
  misc_feature (128)..(328): Homolog of NCBI NO: 14030687 NR Description: At1g32790 [Arabidopsis thaliana]
  misc_feature (1)..(324): Homolog of NCBI NO: 15229132 NR Description: RNA-binding protein, putative [Arabidopsis
  misc_feature (52)..(326): Homolog of NCBI NO: 15231858 NR Description: RNA-binding protein, putative [Arabidopsis
  misc_feature (53)..(326): Homolog of NCBI NO: 15220902 NR Description: RNA-binding protein, putative [Arabidopsis
  misc_feature (59)..(311): Homolog of NCBI NO: 8671859 NR Description: Contains similarity to RNA-binding protein from thaliana gi|2129727 and contains RNA recognition PF|00076 domain.
  misc_feature (56)..(319): Homolog of NCBI NO: 15238531 NR Description: RNA-binding protein, putative [Arabidopsis
  misc_feature (49)..(304): Homolog of NCBI NO: 34903832 NR Description: ATT4F9_7(AL049523|pid:g4539439) Arabidopsis
MTSQDSGVSSDDQNHHSRIDQVLRHDQGLYSKIGSHVARSDGVDGGESFKRDMRELQELFSKLNPMAEEFVPPSLNKQGGNGVNGGFFTSAGSFFRNNGFAGTGNGGYGNENGGFRRKKSFGQGKRRMNARTSMAQREDVIRRTVYVSDLDQQVTEEQLAGLFVSCGQVVDCRICGDPNSVLRFAFIEFTDEEGAMTALNLSGTMLGFYPVKVLPSKTAIAPVNPTFLPRTEDEREMCARTIYCTNIDKKVTQSDVKIFFESFCGEVYRLRLLGDYQHSTRIAFVEFVMAESAIAALNCSGVVLGSLPIRVSPSKTPVRPRSPRHPMH

SEQ ID NO: 102453 - protein, 276 aa, Arabidopsis thaliana
  peptide (1)..(276): Ceres Seq. ID no. 13610329
  misc_feature (93)..(161): Pfam Name: RNA recognition motif. (a.k.a. RRM, RBD, or RNP domain) Pfam Description: RNA recognition motif. (a.k.a. RRM, RBD, or RNP
  misc_feature (1)..(276): Homolog of NCBI NO: 15223304 NR Description: RNA-binding protein, putative [Arabidopsis
  misc_feature (1)..(276): Homolog of NCBI NO: 15235177 NR Description: RNA-binding protein RBP37 [Arabidopsis thaliana]
  misc_feature (1)..(276): Homolog of NCBI NO: 1174153 NR Description: RNA-binding protein
  misc_feature (76)..(276): Homolog of NCBI NO: 14030687 NR Description: At1g32790 [Arabidopsis thaliana]
  misc_feature (1)..(272): Homolog of NCBI NO: 15229132 NR Description: RNA-binding protein, putative [Arabidopsis
  misc_feature (1)..(274): Homolog of NCBI NO: 15231858 NR Description: RNA-binding protein, putative [Arabidopsis
  misc_feature (1)..(274): Homolog of NCBI NO: 15220902 NR Description: RNA-binding protein, putative [Arabidopsis
  misc_feature (7)..(259): Homolog of NCBI NO: 8671859 NR Description: Contains similarity to RNA-binding protein from thaliana gi|2129727 and contains RNA recognition PF|00076 domain.
  misc_feature (4)..(267): Homolog of NCBI NO: 15238531 NR Description: RNA-binding protein, putative [Arabidopsis
  misc_feature (1)..(252): Homolog of NCBI NO: 34903832 NR Description: ATT4F9_7(AL049523|pid:g4539439) Arabidopsis
MRELQELFSKLNPMAEEFVPPSLNKQGGNGVNGGFFTSAGSFFRNNGFAGTGNGGYGNENGGFRRKKSFGQGKRRMNARTSMAQREDVIRRTVYVSDLDQQVTEEQLAGLFVSCGQVVDCRICGDPNSVLRFAFIEFTDEEGAMTALNLSGTMLGFYPVKVLPSKTAIAPVNPTFLPRTEDEREMCARTIYCTNIDKKVTQSDVKIFFESFCGEVYRLRLLGDYQHSTRIAFVEFVMAESAIAALNCSGVVLGSLPIRVSPSKTPVRPRSPRHPMH

SEQ ID NO: 102454 - DNA, 1335 bp, Arabidopsis thaliana
  misc_feature (1)..(1335): Ceres Seq. ID no. 13610330
  misc_feature: MA Experiment ID: 108464 Result: Down-regulated in Transcription
  misc_feature: MA Experiment 108464 PARAMETER Experiment Name: At_Germinating_Seeds_cDNA_P Parameter: Age (day) Value: 4 vs. 0
  misc_feature: MA Experiment 108464 PARAMETER Experiment Name: At_Germinating_Seeds_cDNA_P Parameter: Tissue Value: Germinating Seeds
  misc_feature: MA Experiment ID: 108595 Result: Up-regulated in Transcription
  misc_feature: MA Experiment 108595 PARAMETER Experiment Name: At_Ler-pi_Ovule_cDNA_P Parameter: Plant Line Value: null
  misc_feature: MA Experiment ID: 20000184 Result: Down-regulated in Transcription
  misc_feature: MA Experiment 20000184 PARAMETER Experiment Name: At_Shoots__P Parameter: Age (day) Value: 7
  misc_feature: MA Experiment 20000184 PARAMETER Experiment Name: At_Shoots__P Parameter: Tissue Value: Shoots vs. Whole Plant
  misc_feature: MA Experiment ID: 20000234 Result: Up-regulated in Transcription
  misc_feature: MA Experiment 20000234 PARAMETER Experiment Name: At_Siliques_P Parameter: Age (day) Value: 21
  misc_feature: MA Experiment 20000234 PARAMETER Experiment Name: At_Siliques_P Parameter: Organism Value: A. thaliana
  misc_feature: MA Experiment 20000234 PARAMETER Experiment Name: At_Siliques_P Parameter: Plant Line Value: WS
  misc_feature: MA Experiment 20000234 PARAMETER Experiment Name: At_Siliques_P Parameter: Tissue Value: Less Than 5mm Siliques vs. Whole Plant
  misc_feature: MA Experiment ID: 20000495 Result: Up-regulated in Transcription
  misc_feature: MA Experiment 20000495 PARAMETER Experiment Name: At_Guard_Cells_P Parameter: Harvest Date Value: 8/2/2002
  misc_feature: MA Experiment 20000495 PARAMETER Experiment Name: At_Guard_Cells_P Parameter: Organism Value: A. thaliana
  misc_feature: MA Experiment 20000495 PARAMETER Experiment Name: At_Guard_Cells_P Parameter: Tissue Value: Guard Cells vs. Leaves
attaaagagttttttttcgaaaagagttaaagaaaaaatgggaatgggaaggtatcagaaatctgcaacttctggtgtttcagctagatgggtttttgttctctgtatttctagcttccttcttggtgttcttgtcgttaacaggcttttggcaagttttgaaaccgtagatggcattgagagagcttcacctgagcaaaatgatcaatctagatcacttaatcctcttgttgattgtgagagcaaggaaggagacattctatctcgagtttcgcatactcatgatgttatcaagacattagacaagacaatttcttctcttgaggtagaactagctacagctcgagcagcaagatctgatggtagagatggatctccagctgttgcaaaaacagtagcagaccaatcgaagattcggcctcggatgttctttgtgatgggaatcatgactgctttcagtagcagaaaacgaagagactccataagaggaacttggcttcctaaaggggatgaattgaaaagattagagacagagaagggaatcattatgagatttgttataggtcacagttcttctcctggaggagtcttggaccacaccattgaagctgaagaagaacaacacaaagacttctttcgactgaatcacatagaaggttatcatgaattatcatctaaaacccaaatatacttctcatctgctgttgcaaaatgggatgcagacttctacatcaaagtggatgatgatgttcacgtaaatctcggaatgcttggttctacattggttgcatgaagtctggacctgtccttgctcaaaaaggagtcaaataccatgagccagaatattggaagtttggtgaagaaggaaacaaatacttcagacatgcaactggacaaatctatgcaatctccaaagatttagcaacttatatctcagttaaccggcaactacttcacaagtatgcaaatgaagatgtctctttaggttcttggttcattggtctcgatgttgaacatatcgacgatagaagcctctgctgtggaacacctttagattgtgagtggaagggtcaagcaggaaacccttgcgcagcatcgttcgattggagctgtagtggaatctgcaaatccgtagatagaatgcttgaagtacatcaacgttgtggtgaaggcgatggagcaatttggcatagtagtttctaaatattttctctctgtaatgtatagttttcagcttcttcttcttcttatggattattagtctaggttatgattatgattgatgttacatgtttaacattacagacatcatctaaaaggtcccaatttttgcct

SEQ ID NO: 102455 - protein, 263 aa, Arabidopsis thaliana
  peptide (1)..(263): Ceres Seq. ID no. 13610331
  misc_feature (156)..(261): Pfam Name: Galactosyltransferase Pfam Description: Galactosyltransferase
  misc_feature (13)..(261): Homolog of NCBI NO: 15223337 NR Description: galactosyltransferase family [Arabidopsis
  misc_feature (16)..(262): Homolog of NCBI NO: 15220440 NR Description: galactosyltransferase family [Arabidopsis
  misc_feature (21)..(261): Homolog of NCBI NO: 18416895 NR Description: galactosyltransferase family [Arabidopsis
  misc_feature (21)..(261): Homolog of NCBI NO: 7485336 NR Description: hypothetical protein F10M23.280 - Arabidopsis >gi|4455217|emb|CAB36540.1| Avr9 elicitor response like protein thaliana] >gi|7269547|emb|CAB79549.1| Avr9 elicitor response like
  misc_feature (26)..(262): Homolog of NCBI NO: 15225684 NR Description: galactosyltransferase family [Arabidopsis
  misc_feature (27)..(261): Homolog of NCBI NO: 15217544 NR Description: galactosyltransferase family [Arabidopsis
  misc_feature (26)..(261): Homolog of NCBI NO: 4138265 NR Description: Avr9 elicitor response protein [Nicotiana tabacum]
  misc_feature (31)..(261): Homolog of NCBI NO: 34907342 NR Description: putative elicitor response protein [Oryza sativa
  misc_feature (26)..(261): Homolog of NCBI NO: 12323294 NR Description: putative (Avr9) elicitor response protein;
  misc_feature (26)..(261): Homolog of NCBI NO: 30699558 NR Description: Avr9 elicitor response protein -related
LKSFFSKRVKEKMGMGRYQKSATSGVSARWVFVLCISSFLLGVLVVNRLLASFETVDGIERASPEQNDQSRSLNPLVDCESKEGDILSRVSHTHDVIKTLDKTISSLEVELATARAARSDGRDGSPAVAKTVADQSKIRPRMFFVMGIMTAFSSRKRRDSIRGTWLPKGDELKRLETEKGIIMRFVIGHSSSPGGVLDHTIEAEEEQHKDFFRLNHIEGYHELSSKTQIYFSSAVAKWDADFYIKVDDDVHVNLGMLGSTLVA

SEQ ID NO: 102456 - protein, 251 aa, Arabidopsis thaliana
  peptide (1)..(251): Ceres Seq. ID no. 13610332
  misc_feature (144)..(249): Pfam Name: Galactosyltransferase Pfam Description: Galactosyltransferase
  misc_feature (1)..(249): Homolog of NCBI NO: 15223337 NR Description: galactosyltransferase family [Arabidopsis
  misc_feature (4)..(250): Homolog of NCBI NO: 15220440 NR Description: galactosyltransferase family [Arabidopsis
  misc_feature (9)..(249): Homolog of NCBI NO: 18416895 NR Description: galactosyltransferase family [Arabidopsis
  misc_feature (9)..(249): Homolog of NCBI NO: 7485336 NR Description: hypothetical protein F10M23.280 - Arabidopsis >gi|4455217|emb|CAB36540.1| Avr9 elicitor response like protein thaliana] >gi|7269547|emb|CAB79549.1| Avr9 elicitor response like
  misc_feature (14)..(250): Homolog of NCBI NO: 15225684 NR Description: galactosyltransferase family [Arabidopsis
  misc_feature (15)..(249): Homolog of NCBI NO: 15217544 NR Description: galactosyltransferase family [Arabidopsis
  misc_feature (14)..(249): Homolog of NCBI NO: 4138265 NR Description: Avr9 elicitor response protein [Nicotiana tabacum]
  misc_feature (19)..(249): Homolog of NCBI NO: 34907342 NR Description: putative elicitor response protein [Oryza sativa
  misc_feature (14)..(249): Homolog of NCBI NO: 12323294 NR Description: putative (Avr9) elicitor response protein;
  misc_feature (14)..(249): Homolog of NCBI NO: 30699558 NR Description: Avr9 elicitor response protein -related
MGMGRYQKSATSGVSARWVFVLCISSFLLGVLVVNRLLASFETVDGIERASPEQNDQSRSLNPLVDCESKEGDILSRVSHTHDVIKTLDKTISSLEVELATARAARSDGRDGSPAVAKTVADQSKIRPRMFFVMGIMTAFSSRKRRDSIRGTWLPKGDELKRLETEKGIIMRFVIGHSSSPGGVLDHTIEAEEEQHKDFFRLNHIEGYHELSSKTQIYFSSAVAKWDADFYIKVDDDVHVNLGMLGSTLVA

SEQ ID NO: 102457 - protein, 249 aa, Arabidopsis thaliana
  peptide (1)..(249): Ceres Seq. ID no. 13610333
  misc_feature (142)..(247): Pfam Name: Galactosyltransferase Pfam Description: Galactosyltransferase
  misc_feature (1)..(247): Homolog of NCBI NO: 15223337 NR Description: galactosyltransferase family [Arabidopsis
  misc_feature (2)..(248): Homolog of NCBI NO: 15220440 NR Description: galactosyltransferase family [Arabidopsis
  misc_feature (7)..(247): Homolog of NCBI NO: 18416895 NR Description: galactosyltransferase family [Arabidopsis
  misc_feature (7)..(247): Homolog of NCBI NO: 7485336 NR Description: hypothetical protein F10M23.280 - Arabidopsis >gi|4455217|emb|CAB36540.1| Avr9 elicitor response like protein thaliana] >gi|7269547|emb|CAB79549.1| Avr9 elicitor response like
  misc_feature (12)..(248): Homolog of NCBI NO: 15225684 NR Description: galactosyltransferase family [Arabidopsis
  misc_feature (13)..(247): Homolog of NCBI NO: 15217544 NR Description: galactosyltransferase family [Arabidopsis
  misc_feature (12)..(247): Homolog of NCBI NO: 4138265 NR Description: Avr9 elicitor response protein [Nicotiana tabacum]
  misc_feature (17)..(247): Homolog of NCBI NO: 34907342 NR Description: putative elicitor response protein [Oryza sativa
  misc_feature (12)..(247): Homolog of NCBI NO: 12323294 NR Description: putative (Avr9) elicitor response protein;
  misc_feature (12)..(247): Homolog of NCBI NO: 30699558 NR Description: Avr9 elicitor response protein -related
MGRYQKSATSGVSARWVFVLCISSFLLGVLVVNRLLASFETVDGIERASPEQNDQSRSLNPLVDCESKEGDILSRVSHTHDVIKTLDKTISSLEVELATARAARSDGRDGSPAVAKTVADQSKIRPRMFFVMGIMTAFSSRKRRDSIRGTWLPKGDELKRLETEKGIIMRFVIGHSSSPGGVLDHTIEAEEEQHKDFFRLNHIEGYHELSSKTQIYFSSAVAKWDADFYIKVDDDVHVNLGMLGSTLVA

SEQ ID NO: 102458 - DNA, 823 bp, Arabidopsis thaliana
  misc_feature (1)..(823): Ceres Seq. ID no. 13610334
  misc_feature: MA Experiment ID: 108434 Result: Up-regulated in Transcription
  misc_feature: MA Experiment 108434 PARAMETER Experiment Name: At_Root_Tips_cDNA_P Parameter: Tissue Value: Root Tips
  misc_feature: MA Experiment ID: 108463 Result: Down-regulated in Transcription
  misc_feature: MA Experiment 108463 PARAMETER Experiment Name: At_Germinating_Seeds_cDNA_P Parameter: Age (day) Value: 3 vs. 0
  misc_feature: MA Experiment 108463 PARAMETER Experiment Name: At_Germinating_Seeds_cDNA_P Parameter: Tissue Value: Germinating Seeds
  misc_feature: MA Experiment ID: 108464 Result: Down-regulated in Transcription
  misc_feature: MA Experiment 108464 PARAMETER Experiment Name: At_Germinating_Seeds_cDNA_P Parameter: Age (day) Value: 4 vs. 0
  misc_feature: MA Experiment 108464 PARAMETER Experiment Name: At_Germinating_Seeds_cDNA_P Parameter: Tissue Value: Germinating Seeds
  misc_feature: MA Experiment ID: 108561 Result: Down-regulated in Transcription
  misc_feature: MA Experiment 108561 PARAMETER Experiment Name: At_100uM_ABA_cDNA_P Parameter: Timepoint (hr) Value: 6
  misc_feature: MA Experiment 108561 PARAMETER Experiment Name: At_100uM_ABA_cDNA_P Parameter: Tissue Value: Aerial
  misc_feature: MA Experiment 108561 PARAMETER Experiment Name: At_100uM_ABA_cDNA_P Parameter: Treatment Value: 100uM ABA vs. No Treatment
  misc_feature: MA Experiment ID: 108573 Result: Down-regulated in Transcription
  misc_feature: MA Experiment 108573 PARAMETER Experiment Name: At_Drought_cDNA_P Parameter: Timepoint (hr) Value: 6
  misc_feature: MA Experiment 108573 PARAMETER Experiment Name: At_Drought_cDNA_P Parameter: Tissue Value: Aerial
  misc_feature: MA Experiment 108573 PARAMETER Experiment Name: At_Drought_cDNA_P Parameter: Treatment Value: Drought vs. No Drought
  misc_feature: MA Experiment ID: 108577 Result: Down-regulated in Transcription
  misc_feature: MA Experiment 108577 PARAMETER Experiment Name: At_42deg_Heat_cDNA_P Parameter: Temperature (deg C) Value: 42 vs. 22
  misc_feature: MA Experiment 108577 PARAMETER Experiment Name: At_42deg_Heat_cDNA_P Parameter: Timepoint (hr) Value: 6
  misc_feature: MA Experiment 108577 PARAMETER Experiment Name: At_42deg_Heat_cDNA_P Parameter: Tissue Value: Aerial
  misc_feature: MA Experiment ID: 108585 Result: Down-regulated in Transcription
  misc_feature: MA Experiment 108585 PARAMETER Experiment Name: At_5mM_NaNP_cDNA_P Parameter: Timepoint (hr) Value: 6
  misc_feature: MA Experiment 108585 PARAMETER Experiment Name: At_5mM_NaNP_cDNA_P Parameter: Tissue Value: Aerial
  misc_feature: MA Experiment 108585 PARAMETER Experiment Name: At_5mM_NaNP_cDNA_P Parameter: Treatment Value: null
  misc_feature: MA Experiment ID: 108668 Result: Down-regulated in Transcription
  misc_feature: MA Experiment 108668 PARAMETER Experiment Name: At_2mM_SA_cDNA_P Parameter: Plant Line Value: WS
  misc_feature: MA Experiment 108668 PARAMETER Experiment Name: At_2mM_SA_cDNA_P Parameter: Timepoint (hr) Value: 6
  misc_feature: MA Experiment 108668 PARAMETER Experiment Name: At_2mM_SA_cDNA_P Parameter: Treatment Value: 2mM SA vs. No Treatment
  misc_feature: MA Experiment ID: 20000071 Result: Down-regulated in Transcription
  misc_feature: MA Experiment 20000071 PARAMETER Experiment Name: At_100uM_ABA_Mutants_cDNA_P Parameter: Plant Line Value: CS8104
  misc_feature: MA Experiment 20000071 PARAMETER Experiment Name: At_100uM_ABA_Mutants_cDNA_P Parameter: Timepoint (hr) Value: 6
  misc_feature: MA Experiment 20000071 PARAMETER Experiment Name: At_100uM_ABA_Mutants_cDNA_P Parameter: Tissue Value: Aerial
  misc_feature: MA Experiment 20000071 PARAMETER Experiment Name: At_100uM_ABA_Mutants_cDNA_P Parameter: Treatment Value: 100uM ABA vs. No Treatment
  misc_feature: MA Experiment ID: 20000072 Result: Down-regulated in Transcription
  misc_feature: MA Experiment 20000072 PARAMETER Experiment Name: At_100uM_ABA_Mutants_cDNA_P Parameter: Plant Line Value: CS8105
  misc_feature: MA Experiment 20000072 PARAMETER Experiment Name: At_100uM_ABA_Mutants_cDNA_P Parameter: Timepoint (hr) Value: 6
  misc_feature: MA Experiment 20000072 PARAMETER Experiment Name: At_100uM_ABA_Mutants_cDNA_P Parameter: Tissue Value: Aerial
  misc_feature: MA Experiment 20000072 PARAMETER Experiment Name: At_100uM_ABA_Mutants_cDNA_P Parameter: Treatment Value: 100uM ABA vs. No Treatment
  misc_feature: MA Experiment ID: 20000111 Result: Down-regulated in Transcription
  misc_feature: MA Experiment 20000111 PARAMETER Experiment Name: At_42deg_Heat_cDNA_P Parameter: Temperature (deg C) Value: 42 vs. 22
  misc_feature: MA Experiment 20000111 PARAMETER Experiment Name: At_42deg_Heat_cDNA_P Parameter: Timepoint (hr) Value: 6
  misc_feature: MA Experiment 20000111 PARAMETER Experiment Name: At_42deg_Heat_cDNA_P Parameter: Tissue Value: Aerial
  misc_feature: MA Experiment ID: 20000113 Result: Down-regulated in Transcription
  misc_feature: MA Experiment 20000113 PARAMETER Experiment Name: At_42deg_Heat_cDNA_P Parameter: Temperature (deg C) Value: 42 vs. 22
  misc_feature: MA Experiment 20000113 PARAMETER Experiment Name: At_42deg_Heat_cDNA_P Parameter: Timepoint (hr) Value: 8
  misc_feature: MA Experiment 20000113 PARAMETER Experiment Name: At_42deg_Heat_cDNA_P Parameter: Tissue Value: Aerial
  misc_feature: MA Experiment ID: 20000117 Result: Down-regulated in Transcription
  misc_feature: MA Experiment 20000117 PARAMETER Experiment Name: At_100uM_ABA_Mutants_cDNA_P Parameter: Plant Line Value: Columbia
  misc_feature: MA Experiment 20000117 PARAMETER Experiment Name: At_100uM_ABA_Mutants_cDNA_P Parameter: Timepoint (hr) Value: 6
  misc_feature: MA Experiment 20000117 PARAMETER Experiment Name: At_100uM_ABA_Mutants_cDNA_P Parameter: Tissue Value: Aerial
  misc_feature: MA Experiment 20000117 PARAMETER Experiment Name: At_100uM_ABA_Mutants_cDNA_P Parameter: Treatment Value: 100uM ABA vs. No Treatment
  misc_feature: MA Experiment ID: 20000182 Result: Down-regulated in Transcription
  misc_feature: MA Experiment 20000182 PARAMETER Experiment Name: At_2mM_SA_P Parameter: Age (day) Value: 14
  misc_feature: MA Experiment 20000182 PARAMETER Experiment Name: At_2mM_SA_P Parameter: Organism Value: A. thaliana
  misc_feature: MA Experiment 20000182 PARAMETER Experiment Name: At_2mM_SA_P Parameter: Plant Line Value: WS
  misc_feature: MA Experiment 20000182 PARAMETER Experiment Name: At_2mM_SA_P Parameter: Timepoint (hr) Value: 6
  misc_feature: MA Experiment 20000182 PARAMETER Experiment Name: At_2mM_SA_P Parameter: Tissue Value: Aerial
  misc_feature: MA Experiment 20000182 PARAMETER Experiment Name: At_2mM_SA_P Parameter: Treatment Value: 2mM SA vs. No Treatment
  misc_feature: MA Experiment ID: 20000234 Result: Up-regulated in Transcription
  misc_feature: MA Experiment 20000234 PARAMETER Experiment Name: At_Siliques_P Parameter: Age (day) Value: 21
  misc_feature: MA Experiment 20000234 PARAMETER Experiment Name: At_Siliques_P Parameter: Organism Value: A. thaliana
  misc_feature: MA Experiment 20000234 PARAMETER Experiment Name: At_Siliques_P Parameter: Plant Line Value: WS
  misc_feature: MA Experiment 20000234 PARAMETER Experiment Name: At_Siliques_P Parameter: Tissue Value: Less Than 5mm Siliques vs. Whole Plant
  misc_feature: MA Experiment ID: 20000235 Result: Up-regulated in Transcription
  misc_feature: MA Experiment 20000235 PARAMETER Experiment Name: At_Siliques_P Parameter: Age (day) Value: 21
  misc_feature: MA Experiment 20000235 PARAMETER Experiment Name: At_Siliques_P Parameter: Organism Value: A. thaliana
  misc_feature: MA Experiment 20000235 PARAMETER Experiment Name: At_Siliques_P Parameter: Plant Line Value: WS
  misc_feature: MA Experiment 20000235 PARAMETER Experiment Name: At_Siliques_P Parameter: Tissue Value: 5-10mm Siliques vs. Whole Plant
  misc_feature: MA Experiment ID: 20000265 Result: Up-regulated in Transcription
  misc_feature: MA Experiment 20000265 PARAMETER Experiment Name: At_Open_Flower_P Parameter: Age (day) Value: 21
  misc_feature: MA Experiment 20000265 PARAMETER Experiment Name: At_Open_Flower_P Parameter: Plant Line Value: WS
  misc_feature: MA Experiment 20000265 PARAMETER Experiment Name: At_Open_Flower_P Parameter: Tissue Value: Closed Flower vs. Whole Plant
  misc_feature: MA Experiment ID: 20000437 Result: Down-regulated in Transcription
  misc_feature: MA Experiment 20000437 PARAMETER Experiment Name: At_Drought_P Parameter: Age (day) Value: 8
  misc_feature: MA Experiment 20000437 PARAMETER Experiment Name: At_Drought_P Parameter: Organism Value: A. thaliana
  misc_feature: MA Experiment 20000437 PARAMETER Experiment Name: At_Drought_P Parameter: Plant Line Value: WS
  misc_feature: MA Experiment 20000437 PARAMETER Experiment Name: At_Drought_P Parameter: Timepoint (hr) Value: 24
  misc_feature: MA Experiment 20000437 PARAMETER Experiment Name: At_Drought_P Parameter: Tissue Value: Whole Plant
  misc_feature: MA Experiment 20000437 PARAMETER Experiment Name: At_Drought_P Parameter: Treatment Value: Drought vs. No Drought
  misc_feature: MA Experiment ID: 20000495 Result: Down-regulated in Transcription
  misc_feature: MA Experiment 20000495 PARAMETER Experiment Name: At_Guard_Cells_P Parameter: Harvest Date Value: 8/2/2002
  misc_feature: MA Experiment 20000495 PARAMETER Experiment Name: At_Guard_Cells_P Parameter: Organism Value: A. thaliana
  misc_feature: MA Experiment 20000495 PARAMETER Experiment Name: At_Guard_Cells_P Parameter: Tissue Value: Guard Cells vs. Leaves
  misc_feature: MA Experiment ID: 20001248 Result: Down-regulated in Transcription
  misc_feature: MA Experiment 20001248 PARAMETER Experiment Name: At_Far-red-induction_P Parameter: Age (day) Value: 7
  misc_feature: MA Experiment 20001248 PARAMETER Experiment Name: At_Far-red-induction_P Parameter: Light Value: Far-red vs. White
  misc_feature: MA Experiment 20001248 PARAMETER Experiment Name: At_Far-red-induction_P Parameter: Organism Value: A. thaliana
  misc_feature: MA Experiment 20001248 PARAMETER Experiment Name: At_Far-red-induction_P Parameter: Plant Line Value: Columbia
  misc_feature: MA Experiment 20001248 PARAMETER Experiment Name: At_Far-red-induction_P Parameter: Timepoint (hr) Value: 4
  misc_feature: MA Experiment 20001248 PARAMETER Experiment Name: At_Far-red-induction_P Parameter: Tissue Value: Whole Plant
  misc_feature: MA Experiment ID: 20001450 Result: Down-regulated in Transcription
  misc_feature: MA Experiment 20001450 PARAMETER Experiment Name: At_Far-red-induction_P Parameter: Age (day) Value: 7
  misc_feature: MA Experiment 20001450 PARAMETER Experiment Name: At_Far-red-induction_P Parameter: Light Value: Far-red vs. White
  misc_feature: MA Experiment 20001450 PARAMETER Experiment Name: At_Far-red-induction_P Parameter: Organism Value: A. thaliana
  misc_feature: MA Experiment 20001450 PARAMETER Experiment Name: At_Far-red-induction_P Parameter: Plant Line Value: Columbia
  misc_feature: MA Experiment 20001450 PARAMETER Experiment Name: At_Far-red-induction_P Parameter: Timepoint (hr) Value: 8
  misc_feature: MA Experiment 20001450 PARAMETER Experiment Name: At_Far-red-induction_P Parameter: Tissue Value: Whole Plant
  misc_feature: MA Experiment ID: 20001558 Result: Up-regulated in Transcription
  misc_feature: MA Experiment 20001558 PARAMETER Experiment Name: At_Drought_Soil_Dry_P Parameter: Age (day) Value: 27
  misc_feature: MA Experiment 20001558 PARAMETER Experiment Name: At_Drought_Soil_Dry_P Parameter: Organism Value: A. thaliana
  misc_feature: MA Experiment 20001558 PARAMETER Experiment Name: At_Drought_Soil_Dry_P Parameter: Plant Line Value: WS
  misc_feature: MA Experiment 20001558 PARAMETER Experiment Name: At_Drought_Soil_Dry_P Parameter: Post Timepoint (hr) Value: 6
  misc_feature: MA Experiment 20001558 PARAMETER Experiment Name: At_Drought_Soil_Dry_P Parameter: Post-Treatment Value: Re-Water vs. No Drought
  misc_feature: MA Experiment 20001558 PARAMETER Experiment Name: At_Drought_Soil_Dry_P Parameter: Timepoint (day) Value: 13
  misc_feature: MA Experiment 20001558 PARAMETER Experiment Name: At_Drought_Soil_Dry_P Parameter: Treatment Value: Drought vs. No Drought
  misc_feature: MA Experiment ID: 20001560 Result: Up-regulated in Transcription
  misc_feature: MA Experiment 20001560 PARAMETER Experiment Name: At_Drought_Soil_Dry_P Parameter: Age (day) Value: 28
  misc_feature: MA Experiment 20001560 PARAMETER Experiment Name: At_Drought_Soil_Dry_P Parameter: Organism Value: A. thaliana
  misc_feature: MA Experiment 20001560 PARAMETER Experiment Name: At_Drought_Soil_Dry_P Parameter: Plant Line Value: WS
  misc_feature: MA Experiment 20001560 PARAMETER Experiment Name: At_Drought_Soil_Dry_P Parameter: Post Timepoint (hr) Value: None
  misc_feature: MA Experiment 20001560 PARAMETER Experiment Name: At_Drought_Soil_Dry_P Parameter: Post-Treatment Value: None
  misc_feature: MA Experiment 20001560 PARAMETER Experiment Name: At_Drought_Soil_Dry_P Parameter: Timepoint (day) Value: 14
  misc_feature: MA Experiment 20001560 PARAMETER Experiment Name: At_Drought_Soil_Dry_P Parameter: Treatment Value: Drought vs. No Drought
actgttaaggaaggtcttgctgcgctaagaaagaaaagaagaagaaagatgccaggagcaattgtggaggaagagaaatctcagattgaatccatcaaagagcaattgaaactcgagaaggaagatgatgttgttgtggaggatgtgaaagacggagaggaagaagacgatgatgaagacgatgaggacgtcgaagttgaaggggaaggtggaaatgagaatgcaaagcaaagtagaagcgagaagaaaagtcgcaaagctgttctaaagcttggcatgaaacctgtctcagatgtcagcagagtgacaatcaaaagagccaagaatgtgttatttgtcatctcgaagccagatgtttacaagagtcccaatgcagagacttacgtcatttttggagaggccaaggtcgacgatttgagctctcagctacagactcaagctgctcagaggtttaagatgcctgatgtgacatccatgctacctaacgccggttctgaagctaccatggctccactagcagaggaagaagacgaagacgatgttgatgacactggtgttgaagccagagacattgatcttgtcatgacccaagcaggtgtctccaaggccaaagccgtcagtgctctaaaggctaatgatggggatatcgtttcagccattatggaactcactacatagagttgagtagtagagccacctaaattgtgcttttgtttcattgtttcttgtctcagctaccattttctttgaacattattaattatgtctccccttgatttgaagtcattatctgtctactctgatcaaagtatttaatttgcgg

SEQ ID NO: 102459 - protein, 225 aa, Arabidopsis thaliana; identical to SEQ ID NO: 39227
  peptide (1)..(225): Ceres Seq. ID no. 13610335
  misc_feature (79)..(138): Pfam Name: NAC domain Pfam Description: NAC domain
  misc_feature (17)..(225): Homolog of NCBI NO: 18398710 NR Description: expressed protein [Arabidopsis thaliana]
  misc_feature (17)..(225): Homolog of NCBI NO: 21536597 NR Description: putative alpha NAC [Arabidopsis thaliana]
  misc_feature (17)..(225): Homolog of NCBI NO: 15235122 NR Description: alpha NAC -related [Arabidopsis thaliana]
  misc_feature (23)..(225): Homolog of NCBI NO: 13899101 NR Description: alpha NAC-like protein [Arabidopsis thaliana]
  misc_feature (23)..(225): Homolog of NCBI NO: 15229149 NR Description: alpha NAC-related protein [Arabidopsis thaliana]
  misc_feature (20)..(225): Homolog of NCBI NO: 4115918 NR Description: similar to nascent polypeptide associated complex
  misc_feature (20)..(224): Homolog of NCBI NO: 34902238 NR Description: Putative nascent polypeptide associated complex
  misc_feature (17)..(225): Homolog of NCBI NO: 6752882 NR Description: nascent polypeptide associated complex alpha
  misc_feature (17)..(224): Homolog of NCBI NO: 34907258 NR Description: putative nascent polypeptide associated complex
  misc_feature (24)..(225): Homolog of NCBI NO: 15230476 NR Description: nascent polypeptide associated complex alpha -related [Arabidopsis thaliana] nascent polypeptide associated complex alpha chain, putative;

SEQ ID NO: 102460 - protein, 209 aa, Arabidopsis thaliana; identical to SEQ ID NO: 39228
  peptide (1)..(209): Ceres Seq. ID no. 13610336
  misc_feature (63)..(122): Pfam Name: NAC domain Pfam Description: NAC domain
  misc_feature (1)..(209): Homolog of NCBI NO: 18398710 NR Description: expressed protein [Arabidopsis thaliana]
  misc_feature (1)..(209): Homolog of NCBI NO: 21536597 NR Description: putative alpha NAC [Arabidopsis thaliana]
  misc_feature (1)..(209): Homolog of NCBI NO: 15235122 NR Description: alpha NAC -related [Arabidopsis thaliana]
  misc_feature (7)..(209): Homolog of NCBI NO: 13899101 NR Description: alpha NAC-like protein [Arabidopsis thaliana]
  misc_feature (7)..(209): Homolog of NCBI NO: 15229149 NR Description: alpha NAC-related protein [Arabidopsis thaliana]
  misc_feature (4)..(209): Homolog of NCBI NO: 4115918 NR Description: similar to nascent polypeptide associated complex
  misc_feature (4)..(208): Homolog of NCBI NO: 34902238 NR Description: Putative nascent polypeptide associated complex
  misc_feature (1)..(209): Homolog of NCBI NO: 6752882 NR Description: nascent polypeptide associated complex alpha
  misc_feature (1)..(208): Homolog of NCBI NO: 34907258 NR Description: putative nascent polypeptide associated complex
  misc_feature (8)..(209): Homolog of NCBI NO: 15230476 NR Description: nascent polypeptide associated complex alpha -related [Arabidopsis thaliana] nascent polypeptide associated complex alpha chain, putative;

SEQ ID NO: 102461 - protein, 133 aa, Arabidopsis thaliana; identical to SEQ ID NO: 39229
  peptide (1)..(133): Ceres Seq. ID no. 13610337
  misc_feature (1)..(46): Pfam Name: NAC domain Pfam Description: NAC domain
  misc_feature (1)..(133): Homolog of NCBI NO: 18398710 NR Description: expressed protein [Arabidopsis thaliana]
  misc_feature (1)..(133): Homolog of NCBI NO: 21536597 NR Description: putative alpha NAC [Arabidopsis thaliana]
  misc_feature (1)..(133): Homolog of NCBI NO: 15235122 NR Description: alpha NAC -related [Arabidopsis thaliana]
  misc_feature (1)..(133): Homolog of NCBI NO: 13899101 NR Description: alpha NAC-like protein [Arabidopsis thaliana]
  misc_feature (1)..(133): Homolog of NCBI NO: 15229149 NR Description: alpha NAC-related protein [Arabidopsis thaliana]
  misc_feature (1)..(133): Homolog of NCBI NO: 4115918 NR Description: similar to nascent polypeptide associated complex
  misc_feature (1)..(132): Homolog of NCBI NO: 34902238 NR Description: Putative nascent polypeptide associated complex
  misc_feature (1)..(133): Homolog of NCBI NO: 6752882 NR Description: nascent polypeptide associated complex alpha
  misc_feature (1)..(132): Homolog of NCBI NO: 34907258 NR Description: putative nascent polypeptide associated complex
  misc_feature (1)..(133): Homolog of NCBI NO: 15230476 NR Description: nascent polypeptide associated complex alpha -related [Arabidopsis thaliana] nascent polypeptide associated complex alpha chain, putative;

SEQ ID NO: 102462 - DNA, 1688 bp, Arabidopsis thaliana
  misc_feature (1)..(1688): Ceres Seq. ID no. 13610341
  misc_feature: MA Experiment ID: 108434 Result: Up-regulated in Transcription
  misc_feature: MA Experiment 108434 PARAMETER Experiment Name: At_Root_Tips_cDNA_P Parameter: Tissue Value: Root Tips
  misc_feature: MA Experiment ID: 108469 Result: Up-regulated in Transcription
  misc_feature: MA Experiment ID: 108569 Result: Up-regulated in Transcription
  misc_feature: MA Experiment 108569 PARAMETER Experiment Name: At_0.001%_MeJA__cDNA_P Parameter: Timepoint (hr) Value: 6
  misc_feature: MA Experiment 108569 PARAMETER Experiment Name: At_0.001%_MeJA__cDNA_P Parameter: Tissue Value: Aerial
  misc_feature: MA Experiment 108569 PARAMETER Experiment Name: At_0.001%_MeJA__cDNA_P Parameter: Treatment Value: 0.001% MeJA vs. No Treatment
  misc_feature: MA Experiment ID: 108573 Result: Up-regulated in Transcription
  misc_feature: MA Experiment 108573 PARAMETER Experiment Name: At_Drought_cDNA_P Parameter: Timepoint (hr) Value: 6
  misc_feature: MA Experiment 108573 PARAMETER Experiment Name: At_Drought_cDNA_P Parameter: Tissue Value: Aerial
  misc_feature: MA Experiment 108573 PARAMETER Experiment Name: At_Drought_cDNA_P Parameter: Treatment Value: Drought vs. No Drought
  misc_feature: MA Experiment ID: 108585 Result: Up-regulated in Transcription
  misc_feature: MA Experiment 108585 PARAMETER Experiment Name: At_5mM_NaNP_cDNA_P Parameter: Timepoint (hr) Value: 6
  misc_feature: MA Experiment 108585 PARAMETER Experiment Name: At_5mM_NaNP_cDNA_P Parameter: Tissue Value: Aerial
  misc_feature: MA Experiment 108585 PARAMETER Experiment Name: At_5mM_NaNP_cDNA_P Parameter: Treatment Value: null
  misc_feature: MA Experiment ID: 20000087 Result: Down-regulated in Transcription
  misc_feature: MA Experiment 20000087 PARAMETER Experiment Name: At_100uM_ABA_Mutants_cDNA_P Parameter: Plant Line Value: WS
  misc_feature: MA Experiment 20000087 PARAMETER Experiment Name: At_100uM_ABA_Mutants_cDNA_P Parameter: Timepoint (hr) Value: 6
  misc_feature: MA Experiment 20000087 PARAMETER Experiment Name: At_100uM_ABA_Mutants_cDNA_P Parameter: Tissue Value: Aerial
  misc_feature: MA Experiment 20000087 PARAMETER Experiment Name: At_100uM_ABA_Mutants_cDNA_P Parameter: Treatment Value: 100uM ABA vs. No Treatment
  misc_feature: MA Experiment ID: 20000180 Result: Up-regulated in Transcription
  misc_feature: MA Experiment 20000180 PARAMETER Experiment Name: At_Germinating_Seeds_P Parameter: Age (hr) Value: 24 vs. 0
  misc_feature: MA Experiment 20000180 PARAMETER Experiment Name: At_Germinating_Seeds_P Parameter: Tissue Value: Germinating Seeds
  misc_feature: MA Experiment ID: 20000234 Result: Up-regulated in Transcription
  misc_feature: MA Experiment 20000234 PARAMETER Experiment Name: At_Siliques_P Parameter: Age (day) Value: 21
  misc_feature: MA Experiment 20000234 PARAMETER Experiment Name: At_Siliques_P Parameter: Organism Value: A. thaliana
  misc_feature: MA Experiment 20000234 PARAMETER Experiment Name: At_Siliques_P Parameter: Plant Line Value: WS
  misc_feature: MA Experiment 20000234 PARAMETER Experiment Name: At_Siliques_P Parameter: Tissue Value: Less Than 5mm Siliques vs. Whole Plant
  misc_feature: MA Experiment ID: 20000495 Result: Up-regulated in Transcription
  misc_feature: MA Experiment 20000495 PARAMETER Experiment Name: At_Guard_Cells_P Parameter: Harvest Date Value: 8/2/2002
  misc_feature: MA Experiment 20000495 PARAMETER Experiment Name: At_Guard_Cells_P Parameter: Organism Value: A. thaliana
  misc_feature: MA Experiment 20000495 PARAMETER Experiment Name: At_Guard_Cells_P Parameter: Tissue Value: Guard Cells vs. Leaves
  misc_feature: MA Experiment ID: 20001557 Result: Up-regulated in Transcription
  misc_feature: MA Experiment 20001557 PARAMETER Experiment Name: At_Drought_Soil_Dry_P Parameter: Age (day) Value: 27
  misc_feature: MA Experiment 20001557 PARAMETER Experiment Name: At_Drought_Soil_Dry_P Parameter: Organism Value: A. thaliana
  misc_feature: MA Experiment 20001557 PARAMETER Experiment Name: At_Drought_Soil_Dry_P Parameter: Plant Line Value: WS
  misc_feature: MA Experiment 20001557 PARAMETER Experiment Name: At_Drought_Soil_Dry_P Parameter: Post Timepoint (hr) Value: 3
  misc_feature: MA Experiment 20001557 PARAMETER Experiment Name: At_Drought_Soil_Dry_P Parameter: Post-Treatment Value: Re-Water vs. No Drought
  misc_feature: MA Experiment 20001557 PARAMETER Experiment Name: At_Drought_Soil_Dry_P Parameter: Timepoint (day) Value: 13
  misc_feature: MA Experiment 20001557 PARAMETER Experiment Name: At_Drought_Soil_Dry_P Parameter: Treatment Value: Drought vs. No Drought
  misc_feature: MA Experiment ID: 20001560 Result: Up-regulated in Transcription
  misc_feature: MA Experiment 20001560 PARAMETER Experiment Name: At_Drought_Soil_Dry_P Parameter: Age (day) Value: 28
  misc_feature: MA Experiment 20001560 PARAMETER Experiment Name: At_Drought_Soil_Dry_P Parameter: Organism Value: A. thaliana
  misc_feature: MA Experiment 20001560 PARAMETER Experiment Name: At_Drought_Soil_Dry_P Parameter: Plant Line Value: WS
  misc_feature: MA Experiment 20001560 PARAMETER Experiment Name: At_Drought_Soil_Dry_P Parameter: Post Timepoint (hr) Value: None
  misc_feature: MA Experiment 20001560 PARAMETER Experiment Name: At_Drought_Soil_Dry_P Parameter: Post-Treatment Value: None
  misc_feature: MA Experiment 20001560 PARAMETER Experiment Name: At_Drought_Soil_Dry_P Parameter: Timepoint (day) Value: 14
  misc_feature: MA Experiment 20001560 PARAMETER Experiment Name: At_Drought_Soil_Dry_P Parameter: Treatment Value: Drought vs. No Drought
  misc_feature: MA Experiment ID: 20001911 Result: Down-regulated in Transcription
  misc_feature: MA Experiment 20001911 PARAMETER Experiment Name: At_Drought_Reproduction_P Parameter: Age (day) Value: 40
  misc_feature: MA Experiment 20001911 PARAMETER Experiment Name: At_Drought_Reproduction_P Parameter: Organism Value: A. thaliana
  misc_feature: MA Experiment 20001911 PARAMETER Experiment Name: At_Drought_Reproduction_P Parameter: Plant Line Value: WS
  misc_feature: MA Experiment 20001911 PARAMETER Experiment Name: At_Drought_Reproduction_P Parameter: Timepoint (day) Value: 10
  misc_feature: MA Experiment 20001911 PARAMETER Experiment Name: At_Drought_Reproduction_P Parameter: Tissue Value: Flowers
  misc_feature: MA Experiment 20001911 PARAMETER Experiment Name: At_Drought_Reproduction_P Parameter: Treatment Value: Drought vs. No Drought
aatcaaaaacgaaaaaaaacaaaaaaaaaactttgaatccgtttgttgcttcttcgcaacgttctctctcaaactcgcagagtaacagattcgataatgggaggaggatttagagttttgcatttggtgaggccattcttggcttttcttccagaagtgcaaagtgctgacaggaagattccatttagagagaaagtgatctacactgtcatctccctcttcattttccttgtttgtagtcagcttcctctctatgggatccattctaccaccggtgctgatccgttctattggatgcgtgtcattctcgcatcgaatcgtggaacggtgatggagcttggtattactcctattgtcacatctggattagtgatgcaactcttagcagggtcaaagattattgaggttgacaacaatgttcgtgaggatcgtgctctcttgaatggtgctcagaagcttctttggattctgagtgctattggtgaggctgttgcatatgttctttcgggaatgtatggtcctgttggtcaacttggtgttggaaatgctattctgatcatcctccagcttttctttgctggaatcatcgttatctgtcttgacgagcttcttcagaagggatatggtcttggctctggaatctctcttttcatagcaaccaatatctgtgaaagcattatctggaaagcatttagccccacgacaatcaacactggtcgtggagctgagtttgaaggcgctgtgattgcgttgttccatatgctgataactaagtccaataaggttgctgcgctcagacaagctttttaccggcagaaccttccaaatgttaccaacttgcttgcaacagtgttgatcttcttgattgttatatacttccaaggcttccgtgttgtgttgcccgtgaggtcaaagagtgctcgtggccaacagggttcatacccgatcaagctgttctacacctccaacatgccaatcattctccagtctgctctcgtctcaaacctctacttcatctctcagcttctctacaggaaattcagtggaaatttctttgtgaacctattgggacagtggaaagaatcagagtacagtggacaatctataccagttagtggtcttgcatatttgatcacagctccggcaagttttgccgatatggcagctcatccattccatgctctgttctatatcgtcttcatgctcactgcttgtgccctattctcaaaaacatggattgaagtctccgggtcttctgctagagatgtagctaagcagctaaaggaacaacaaatggtgatgccgggacacagagagtccaacttacaaaaggagctgaaccggtacatcccaacagcggctgcatttggaggagtgtgcatcggtgcgctcactgttttggctgatttcatgggagccattgggtcggggactggaatcttacttgcagtcacaatcatatatcagtattttgaaacctttgagaaggaaaaagccagcgagcttggtttctttggattctgattgtttctagtcatataaaggggtaaattttgctaagactagtgagaaatttgaaagcctaattaagaagtagctttcctcttatgtgttcattcaaaggttcaatagacgattaaaagagcattttggtagacactttttgattaaccaacagatttttctct

SEQ ID NO: 102463 - protein, 475 aa, Arabidopsis thaliana
  peptide (1)..(475): Ceres Seq. ID no. 13610342
  misc_feature (77)..(461): Pfam Name: eubacterial secY protein Pfam Description: eubacterial secY protein
  misc_feature (1)..(475): Homolog of NCBI NO: 15218887 NR Description: flower pigmentation protein ATAN11 [Arabidopsis
  misc_feature (1)..(475): Homolog of NCBI NO: 20260296 NR Description: putative protein transport protein SEC61 alpha
  misc_feature (1)..(475): Homolog of NCBI NO: 15226261 NR Description: protein transport protein SEC61 alpha subunit [Arabidopsis thaliana] >gi|7446500|pir||T02313 endoplasmic
  misc_feature (1)..(475): Homolog of NCBI NO: 21593089 NR Description: putative protein transport protein SEC61 alpha
  misc_feature (1)..(475): Homolog of NCBI NO: 6581004 NR Description: putative integral membrane protein [Phaseolus
  misc_feature (1)..(475): Homolog of NCBI NO: 8886324 NR Description: Sec61p [Triticum aestivum]
  misc_feature (1)..(475): Homolog of NCBI NO: 15375074 NR Description: Sec61 alpha subunit [Hordeum vulgare]
  misc_feature (1)..(474): Homolog of NCBI NO: 15219158 NR Description: protein transport protein sec61 alpha subunit [Arabidopsis thaliana] >gi|25307853|pir||B96816 hypothetical
  misc_feature (6)..(470): Homolog of NCBI NO: 23619385 NR Description: Pfsec61 [Plasmodium falciparum 3D7]
  misc_feature (4)..(475): Homolog of NCBI NO: 23429003 NR Description: Sec61-alpha [Pagothenia borchgrevinki]
MGGGFRVLHLVRPFLAFLPEVQSADRKIPFREKVIYTVISLFIFLVCSQLPLYGIHSTTGADPFYWMRVILASNRGTVMELGITPIVTSGLVMQLLAGSKIIEVDNNVREDRALLNGAQKLLWILSAIGEAVAYVLSGMYGPVGQLGVGNAILIILQLFFAGIIVICLDELLQKGYGLGSGISLFIATNICESIIWKAFSPTTINTGRGAEFEGAVIALFHMLITKSNKVAALRQAFYRQNLPNVTNLLATVLIFLIVIYFQGFRVVLPVRSKSARGQQGSYPIKLFYTSNMPIILQSALVSNLYFISQLLYRKFSGNFFVNLLGQWKESEYSGQSIPVSGLAYLITAPASFADMAAHPFHALFYIVFMLTACALFSKTWIEVSGSSARDVAKQLKEQQMVMPGHRESNLQKELNRYIPTAAAFGGVCIGALTVLADFMGAIGSGTGILLAVTIIYQYFETFEKEKASELGFFGF

SEQ ID NO: 102464 - protein, 409 aa, Arabidopsis thaliana
  peptide (1)..(409): Ceres Seq. ID no. 13610343
  misc_feature (11)..(395): Pfam Name: eubacterial secY protein Pfam Description: eubacterial secY protein
  misc_feature (1)..(409): Homolog of NCBI NO: 15218887 NR Description: flower pigmentation protein ATAN11 [Arabidopsis
  misc_feature (1)..(409): Homolog of NCBI NO: 20260296 NR Description: putative protein transport protein SEC61 alpha
  misc_feature (1)..(409): Homolog of NCBI NO: 15226261 NR Description: protein transport protein SEC61 alpha subunit [Arabidopsis thaliana] >gi|7446500|pir||T02313 endoplasmic
  misc_feature (1)..(409): Homolog of NCBI NO: 21593089 NR Description: putative protein transport protein SEC61 alpha
  misc_feature (1)..(409): Homolog of NCBI NO: 6581004 NR Description: putative integral membrane protein [Phaseolus
  misc_feature (1)..(409): Homolog of NCBI NO: 8886324 NR Description: Sec61p [Triticum aestivum]
  misc_feature (1)..(409): Homolog of NCBI NO: 15375074 NR Description: Sec61 alpha subunit [Hordeum vulgare]
  misc_feature (1)..(408): Homolog of NCBI NO: 15219158 NR Description: protein transport protein sec61 alpha subunit [Arabidopsis thaliana] >gi|25307853|pir||B96816 hypothetical
  misc_feature (1)..(404): Homolog of NCBI NO: 23619385 NR Description: Pfsec61 [Plasmodium falciparum 3D7]
  misc_feature (1)..(409): Homolog of NCBI NO: 23429003 NR Description: Sec61-alpha [Pagothenia borchgrevinki]
MRVILASNRGTVMELGITPIVTSGLVMQLLAGSKIIEVDNNVREDRALLNGAQKLLWILSAIGEAVAYVLSGMYGPVGQLGVGNAILIILQLFFAGIIVICLDELLQKGYGLGSGISLFIATNICESIIWKAFSPTTINTGRGAEFEGAVIALFHMLITKSNKVAALRQAFYRQNLPNVTNLLATVLIFLIVIYFQGFRVVLPVRSKSARGQQGSYPIKLFYTSNMPIILQSALVSNLYFISQLLYRKFSGNFFVNLLGQWKESEYSGQSIPVSGLAYLITAPASFADMAAHPFHALFYIVFMLTACALFSKTWIEVSGSSARDVAKQLKEQQMVMPGHRESNLQKELNRYIPTAAAFGGVCIGALTVLADFMGAIGSGTGILLAVTIIYQYFETFEKEKASELGFFGF

SEQ ID NO: 102465 - protein, 397 aa, Arabidopsis thaliana
  peptide (1)..(397): Ceres Seq. ID no. 13610344
  misc_feature (1)..(383): Pfam Name: eubacterial secY protein Pfam Description: eubacterial secY protein
  misc_feature (1)..(397): Homolog of NCBI NO: 15218887 NR Description: flower pigmentation protein ATAN11 [Arabidopsis
  misc_feature (1)..(397): Homolog of NCBI NO: 20260296 NR Description: putative protein transport protein SEC61 alpha
  misc_feature (1)..(397): Homolog of NCBI NO: 15226261 NR Description: protein transport protein SEC61 alpha subunit [Arabidopsis thaliana] >gi|7446500|pir||T02313 endoplasmic
  misc_feature (1)..(397): Homolog of NCBI NO: 21593089 NR Description: putative protein transport protein SEC61 alpha
  misc_feature (1)..(397): Homolog of NCBI NO: 6581004 NR Description: putative integral membrane protein [Phaseolus
  misc_feature (1)..(397): Homolog of NCBI NO: 8886324 NR Description: Sec61p [Triticum aestivum]
  misc_feature (1)..(397): Homolog of NCBI NO: 15375074 NR Description: Sec61 alpha subunit [Hordeum vulgare]
  misc_feature (1)..(396): Homolog of NCBI NO: 15219158 NR Description: protein transport protein sec61 alpha subunit [Arabidopsis thaliana] >gi|25307853|pir||B96816 hypothetical
  misc_feature (1)..(392): Homolog of NCBI NO: 23619385 NR Description: Pfsec61 [Plasmodium falciparum 3D7]
  misc_feature (1)..(397): Homolog of NCBI NO: 23429003 NR Description: Sec61-alpha [Pagothenia borchgrevinki]
MELGITPIVTSGLVMQLLAGSKIIEVDNNVREDRALLNGAQKLLWILSAIGEAVAYVLSGMYGPVGQLGVGNAILIILQLFFAGIIVICLDELLQKGYGLGSGISLFIATNICESIIWKAFSPTTINTGRGAEFEGAVIALFHMLITKSNKVAALRQAFYRQNLPNVTNLLATVLIFLIVIYFQGFRVVLPVRSKSARGQQGSYPIKLFYTSNMPIILQSALVSNLYFISQLLYRKFSGNFFVNLLGQWKESEYSGQSIPVSGLAYLITAPASFADMAAHPFHALFYIVFMLTACALFSKTWIEVSGSSARDVAKQLKEQQMVMPGHRESNLQKELNRYIPTAAAFGGVCIGALTVLADFMGAIGSGTGILLAVTIIYQYFETFEKEKASELGFFGF

SEQ ID NO: 102466 - DNA, 902 bp, Arabidopsis thaliana
  misc_feature (1)..(902): Ceres Seq. ID no. 13610377
  misc_feature: MA Experiment ID: 108474 Result: Down-regulated in Transcription
  misc_feature: MA Experiment 108474 PARAMETER Experiment Name: At_Drought_Flowers_cDNA_P Parameter: Timepoint (hr) Value: null
  misc_feature: MA Experiment 108474 PARAMETER Experiment Name: At_Drought_Flowers_cDNA_P Parameter: Treatment Value: Drought vs. No Drought
  misc_feature: MA Experiment ID: 20000264 Result: Up-regulated in Transcription
  misc_feature: MA Experiment 20000264 PARAMETER Experiment Name: At_Open_Flower_P Parameter: Age (day) Value: 21
  misc_feature: MA Experiment 20000264 PARAMETER Experiment Name: At_Open_Flower_P Parameter: Plant Line Value: WS
  misc_feature: MA Experiment 20000264 PARAMETER Experiment Name: At_Open_Flower_P Parameter: Tissue Value: Open Flower vs. Whole Plant
  misc_feature: MA Experiment ID: 20000265 Result: Up-regulated in Transcription
  misc_feature: MA Experiment 20000265 PARAMETER Experiment Name: At_Open_Flower_P Parameter: Age (day) Value: 21
  misc_feature: MA Experiment 20000265 PARAMETER Experiment Name: At_Open_Flower_P Parameter: Plant Line Value: WS
  misc_feature: MA Experiment 20000265 PARAMETER Experiment Name: At_Open_Flower_P Parameter: Tissue Value: Closed Flower vs. Whole Plant
  misc_feature: MA Experiment ID: 20000286 Result: Up-regulated in Transcription
  misc_feature: MA Experiment 20000286 PARAMETER Experiment Name: At_Open_Flower_P Parameter: Age (day) Value: 21
  misc_feature: MA Experiment 20000286 PARAMETER Experiment Name: At_Open_Flower_P Parameter: Plant Line Value: WS
  misc_feature: MA Experiment 20000286 PARAMETER Experiment Name: At_Open_Flower_P Parameter: Tissue Value: Half Open vs. Whole Plant
  misc_feature: MA Experiment ID: 20000794 Result: Up-regulated in Transcription
  misc_feature: MA Experiment 20000794 PARAMETER Experiment Name: At_Petals_P Parameter: Age (day) Value: 23-25 days
  misc_feature: MA Experiment 20000794 PARAMETER Experiment Name: At_Petals_P Parameter: Plant Line Value: WS
  misc_feature: MA Experiment 20000794 PARAMETER Experiment Name: At_Petals_P Parameter: Tissue Value: Petals vs. Whole plant
  misc_feature: MA Experiment ID: 20001760 Result: Up-regulated in Transcription
  misc_feature: MA Experiment 20001760 PARAMETER Experiment Name: At_50mM_NH4NO3_L-to-H_P Parameter: Timepoint (hr) Value: 2
  misc_feature: MA Experiment 20001760 PARAMETER Experiment Name: At_50mM_NH4NO3_L-to-H_P Parameter: Tissue Value: Siliques
  misc_feature: MA Experiment 20001760 PARAMETER Experiment Name: At_50mM_NH4NO3_L-to-H_P Parameter: Treatment Value: 50mM NH4NO3 vs 100mM Mannitol
  misc_feature: MA Experiment ID: 20001761 Result: Up-regulated in Transcription
  misc_feature: MA Experiment 20001761 PARAMETER Experiment Name: At_50mM_NH4NO3_L-to-H_P Parameter: Timepoint (hr) Value: 4
  misc_feature: MA Experiment 20001761 PARAMETER Experiment Name: At_50mM_NH4NO3_L-to-H_P Parameter: Tissue Value: Siliques
  misc_feature: MA Experiment 20001761 PARAMETER Experiment Name: At_50mM_NH4NO3_L-to-H_P Parameter: Treatment Value: 50mM NH4NO3 vs 100mM Mannitol
  misc_feature: MA Experiment ID: 20001909 Result: Up-regulated in Transcription
  misc_feature: MA Experiment 20001909 PARAMETER Experiment Name: At_Drought_Reproduction_P Parameter: Age (day) Value: 35
  misc_feature: MA Experiment 20001909 PARAMETER Experiment Name: At_Drought_Reproduction_P Parameter: Organism Value: A. thaliana
  misc_feature: MA Experiment 20001909 PARAMETER Experiment Name: At_Drought_Reproduction_P Parameter: Plant Line Value: WS
  misc_feature: MA Experiment 20001909 PARAMETER Experiment Name: At_Drought_Reproduction_P Parameter: Timepoint (day) Value: 5
  misc_feature: MA Experiment 20001909 PARAMETER Experiment Name: At_Drought_Reproduction_P Parameter: Tissue Value: Flowers
  misc_feature: MA Experiment 20001909 PARAMETER Experiment Name: At_Drought_Reproduction_P Parameter: Treatment Value: Drought vs. No Drought
aattcaaagcagtcaactagcaagagaaagagagaaaagtgaagatgttcctcaaggttcatgaaattgcttttctctttggtctcttaggcaacattgtgtcttttggggtgttcttgtcaccagtgccaacgttttatgggatatacaagaagaaatcatcaaaagggtttcagtcgataccgtacatatgtgcactagcaagtgcaactcttcttctctactacggaatcatgaagacacatgcttatctgatcattagtattaacacctttggatgtttcattgaaatctcctacttgtttctctatatcctttatgcaccaagagaggccaagatatccacgttgaagttgatagtgatatgcaacatcggtggacttggtctcttaattcttctagttaatcttttggttccaaaacaacaccgcgtctcgaccgttggatgggtttgtgctgcctacagtctcgcagtctttgcttctcccttaagcgtcatgaggaaggttataaagacaaagagtgtggaatacatgccgtttcttctctccttgtctctcactcttaacgccgtcatgtggttcttttatggacttcttatcaaagacaagttcattgctatgccaaacattctcggttttctattcggtgtagctcagatgatactatacatgatgtatcaaggttccacgaaaacggatttgccaacagagaaccaactagcaaataaaaccgatgttaacgaagtcccgatcgtggccgttgaattgcctgatgtgggatcagacaatgttgaaggatcggtgaggccaatgaagtgaagggcaaacatgcatggggaagatgtatgggagacgacatgttatcgtatgttggaataataaactttaatttctatgttt

SEQ ID NO: 102467 - protein, 258 aa, Arabidopsis thaliana
  peptide (1)..(258): Ceres Seq. ID no. 13610378
  misc_feature (10)..(97): Pfam Name: MtN3/saliva family Pfam Description: MtN3/saliva family
  misc_feature (1)..(258): Homolog of NCBI NO: 15225014 NR Description: nodulin MtN3 family protein [Arabidopsis thaliana]
  misc_feature (1)..(258): Homolog of NCBI NO: 21554178 NR Description: similar to MtN3 protein [Arabidopsis thaliana]
  misc_feature (3)..(249): Homolog of NCBI NO: 11345413 NR Description: NEC1 [Petunia x hybrida]
  misc_feature (9)..(225): Homolog of NCBI NO: 14715258 NR Description: N3 like protein [Medicago truncatula]
  misc_feature (9)..(247): Homolog of NCBI NO: 15229019 NR Description: nodulin MtN3 family protein [Arabidopsis thaliana]
  misc_feature (9)..(247): Homolog of NCBI NO: 15237803 NR Description: nodulin MtN3 family protein [Arabidopsis thaliana]
  misc_feature (1)..(225): Homolog of NCBI NO: 1619602 NR Description: MtN3 [Medicago truncatula]
  misc_feature (6)..(258): Homolog of NCBI NO: 15240040 NR Description: nodulin MtN3 family protein [Arabidopsis thaliana]
  misc_feature (6)..(258): Homolog of NCBI NO: 21593422 NR Description: senescence-associated protein (SAG29)
  misc_feature (1)..(258): Homolog of NCBI NO: 15234863 NR Description: nodulin MtN3 family protein [Arabidopsis thaliana]
MFLKVHEIAFLFGLLGNIVSFGVFLSPVPTFYGIYKKKSSKGFQSIPYICALASATLLLYYGIMKTHAYLIISINTFGCFIEISYLFLYILYAPREAKISTLKLIVICNIGGLGLLILLVNLLVPKQHRVSTVGWVCAAYSLAVFASPLSVMRKVIKTKSVEYMPFLLSLSLTLNAVMWFFYGLLIKDKFIAMPNILGFLFGVAQMILYMMYQGSTKTDLPTENQLANKTDVNEVPIVAVELPDVGSDNVEGSVRPMK

SEQ ID NO: 102468 - protein, 195 aa, Arabidopsis thaliana; identical to SEQ ID NO: 34807
  peptide (1)..(195): Ceres Seq. ID no. 13610379
  misc_feature (1)..(195): Homolog of NCBI NO: 15225014 NR Description: nodulin MtN3 family protein [Arabidopsis thaliana]
  misc_feature (1)..(195): Homolog of NCBI NO: 21554178 NR Description: similar to MtN3 protein [Arabidopsis thaliana]
  misc_feature (1)..(186): Homolog of NCBI NO: 11345413 NR Description: NEC1 [Petunia x hybrida]
  misc_feature (1)..(162): Homolog of NCBI NO: 14715258 NR Description: N3 like protein [Medicago truncatula]
  misc_feature (1)..(184): Homolog of NCBI NO: 15229019 NR Description: nodulin MtN3 family protein [Arabidopsis thaliana]
  misc_feature (1)..(184): Homolog of NCBI NO: 15237803 NR Description: nodulin MtN3 family protein [Arabidopsis thaliana]
  misc_feature (1)..(162): Homolog of NCBI NO: 1619602 NR Description: MtN3 [Medicago truncatula]
  misc_feature (1)..(195): Homolog of NCBI NO: 15240040 NR Description: nodulin MtN3 family protein [Arabidopsis thaliana]
  misc_feature (1)..(195): Homolog of NCBI NO: 21593422 NR Description: senescence-associated protein (SAG29)
  misc_feature (1)..(195): Homolog of NCBI NO: 15234863 NR Description: nodulin MtN3 family protein [Arabidopsis thaliana]

SEQ ID NO: 102469 - DNA, 1643 bp, Arabidopsis thaliana
  misc_feature (1)..(1643): Ceres Seq. ID no. 13610380
  misc_feature: MA Experiment ID: 108488 Result: Down-regulated in Transcription
  misc_feature: MA Experiment ID: 108561 Result: Up-regulated in Transcription
  misc_feature: MA Experiment 108561 PARAMETER Experiment Name: At_100uM_ABA_cDNA_P Parameter: Timepoint (hr) Value: 6
  misc_feature: MA Experiment 108561 PARAMETER Experiment Name: At_100uM_ABA_cDNA_P Parameter: Tissue Value: Aerial
  misc_feature: MA Experiment 108561 PARAMETER Experiment Name: At_100uM_ABA_cDNA_P Parameter: Treatment Value: 100uM ABA vs. No Treatment
  misc_feature: MA Experiment ID: 108572 Result: Up-regulated in Transcription
  misc_feature: MA Experiment 108572 PARAMETER Experiment Name: At_Drought_cDNA_P Parameter: Timepoint (hr) Value: 1
  misc_feature: MA Experiment 108572 PARAMETER Experiment Name: At_Drought_cDNA_P Parameter: Tissue Value: Aerial
  misc_feature: MA Experiment 108572 PARAMETER Experiment Name: At_Drought_cDNA_P Parameter: Treatment Value: Drought vs. No Drought
  misc_feature: MA Experiment ID: 108573 Result: Up-regulated in Transcription
  misc_feature: MA Experiment 108573 PARAMETER Experiment Name: At_Drought_cDNA_P Parameter: Timepoint (hr) Value: 6
  misc_feature: MA Experiment 108573 PARAMETER Experiment Name: At_Drought_cDNA_P Parameter: Tissue Value: Aerial
  misc_feature: MA Experiment 108573 PARAMETER Experiment Name: At_Drought_cDNA_P Parameter: Treatment Value: Drought vs. No Drought
  misc_feature: MA Experiment ID: 108585 Result: Up-regulated in Transcription
  misc_feature: MA Experiment 108585 PARAMETER Experiment Name: At_5mM_NaNP_cDNA_P Parameter: Timepoint (hr) Value: 6
  misc_feature: MA Experiment 108585 PARAMETER Experiment Name: At_5mM_NaNP_cDNA_P Parameter: Tissue Value: Aerial
  misc_feature: MA Experiment 108585 PARAMETER Experiment Name: At_5mM_NaNP_cDNA_P Parameter: Treatment Value: null
  misc_feature: MA Experiment ID: 108605 Result: Up-regulated in Transcription
  misc_feature: MA Experiment 108605 PARAMETER Experiment Name: At_100uM_ABA_cDNA_P Parameter: Timepoint (hr) Value: 6
  misc_feature: MA Experiment 108605 PARAMETER Experiment Name: At_100uM_ABA_cDNA_P Parameter: Tissue Value: Aerial
  misc_feature: MA Experiment 108605 PARAMETER Experiment Name: At_100uM_ABA_cDNA_P Parameter: Treatment Value: 100uM ABA vs. No Treatment
  misc_feature: MA Experiment ID: 108607 Result: Up-regulated in Transcription
  misc_feature: MA Experiment 108607 PARAMETER Experiment Name: At_100uM_ABA_cDNA_P Parameter: Timepoint (hr) Value: 4
  misc_feature: MA Experiment 108607 PARAMETER Experiment Name: At_100uM_ABA_cDNA_P Parameter: Tissue Value: Aerial
  misc_feature: MA Experiment 108607 PARAMETER Experiment Name: At_100uM_ABA_cDNA_P Parameter: Treatment Value: 100uM ABA vs. No Treatment
  misc_feature: MA Experiment ID: 20000069 Result: Up-regulated in Transcription
  misc_feature: MA Experiment 20000069 PARAMETER Experiment Name: At_100uM_ABA_Mutants_cDNA_P Parameter: Plant Line Value: CS23
  misc_feature: MA Experiment 20000069 PARAMETER Experiment Name: At_100uM_ABA_Mutants_cDNA_P Parameter: Timepoint (hr) Value: 6
  misc_feature: MA Experiment 20000069 PARAMETER Experiment Name: At_100uM_ABA_Mutants_cDNA_P Parameter: Tissue Value: Aerial
  misc_feature: MA Experiment 20000069 PARAMETER Experiment Name: At_100uM_ABA_Mutants_cDNA_P Parameter: Treatment Value: 100uM ABA vs. No Treatment
  misc_feature: MA Experiment ID: 20000070 Result: Up-regulated in Transcription
  misc_feature: MA Experiment 20000070 PARAMETER Experiment Name: At_100uM_ABA_Mutants_cDNA_P Parameter: Plant Line Value: CS24
  misc_feature: MA Experiment 20000070 PARAMETER Experiment Name: At_100uM_ABA_Mutants_cDNA_P Parameter: Timepoint (hr) Value: 6
  misc_feature: MA Experiment 20000070 PARAMETER Experiment Name: At_100uM_ABA_Mutants_cDNA_P Parameter: Tissue Value: Aerial
  misc_feature: MA Experiment 20000070 PARAMETER Experiment Name: At_100uM_ABA_Mutants_cDNA_P Parameter: Treatment Value: 100uM ABA vs. No Treatment
  misc_feature: MA Experiment ID: 20000071 Result: Up-regulated in Transcription
  misc_feature: MA Experiment 20000071 PARAMETER Experiment Name: At_100uM_ABA_Mutants_cDNA_P Parameter: Plant Line Value: CS8104
  misc_feature: MA Experiment 20000071 PARAMETER Experiment Name: At_100uM_ABA_Mutants_cDNA_P Parameter: Timepoint (hr) Value: 6
  misc_feature: MA Experiment 20000071 PARAMETER Experiment Name: At_100uM_ABA_Mutants_cDNA_P Parameter: Tissue Value: Aerial
  misc_feature: MA Experiment 20000071 PARAMETER Experiment Name: At_100uM_ABA_Mutants_cDNA_P Parameter: Treatment Value: 100uM ABA vs. No Treatment
  misc_feature: MA Experiment ID: 20000087 Result: Up-regulated in Transcription
  misc_feature: MA Experiment 20000087 PARAMETER Experiment Name: At_100uM_ABA_Mutants_cDNA_P Parameter: Plant Line Value: WS
  misc_feature: MA Experiment 20000087 PARAMETER Experiment Name: At_100uM_ABA_Mutants_cDNA_P Parameter: Timepoint (hr) Value: 6
  misc_feature: MA Experiment 20000087 PARAMETER Experiment Name: At_100uM_ABA_Mutants_cDNA_P Parameter: Tissue Value: Aerial
  misc_feature: MA Experiment 20000087 PARAMETER Experiment Name: At_100uM_ABA_Mutants_cDNA_P Parameter: Treatment Value: 100uM ABA vs. No Treatment
  misc_feature: MA Experiment ID: 20000169 Result: Up-regulated in Transcription
  misc_feature: MA Experiment 20000169 PARAMETER Experiment Name: At_100uM_ABA_P Parameter: Age (day) Value: 14
  misc_feature: MA Experiment 20000169 PARAMETER Experiment Name: At_100uM_ABA_P Parameter: Organism Value: A. thaliana
  misc_feature: MA Experiment 20000169 PARAMETER Experiment Name: At_100uM_ABA_P Parameter: Plant Line Value: WS
  misc_feature: MA Experiment 20000169 PARAMETER Experiment Name: At_100uM_ABA_P Parameter: Timepoint (hr) Value: 6
  misc_feature: MA Experiment 20000169 PARAMETER Experiment Name: At_100uM_ABA_P Parameter: Tissue Value: Aerial
  misc_feature: MA Experiment 20000169 PARAMETER Experiment Name: At_100uM_ABA_P Parameter: Treatment Value: 100uM ABA vs. No Treatment
  misc_feature: MA Experiment ID: 20000436 Result: Up-regulated in Transcription
  misc_feature: MA Experiment 20000436 PARAMETER Experiment Name: At_Drought_P Parameter: Age (day) Value: 7
  misc_feature: MA Experiment 20000436 PARAMETER Experiment Name: At_Drought_P Parameter: Organism Value: A. thaliana
  misc_feature: MA Experiment 20000436 PARAMETER Experiment Name: At_Drought_P Parameter: Plant Line Value: WS
  misc_feature: MA Experiment 20000436 PARAMETER Experiment Name: At_Drought_P Parameter: Timepoint (hr) Value: 12
  misc_feature: MA Experiment 20000436 PARAMETER Experiment Name: At_Drought_P Parameter: Tissue Value: Whole Plant
  misc_feature: MA Experiment 20000436 PARAMETER Experiment Name: At_Drought_P Parameter: Treatment Value: Drought vs. No Drought
  misc_feature: MA Experiment ID: 20000437 Result: Up-regulated in Transcription
  misc_feature: MA Experiment 20000437 PARAMETER Experiment Name: At_Drought_P Parameter: Age (day) Value: 8
  misc_feature: MA Experiment 20000437 PARAMETER Experiment Name: At_Drought_P Parameter: Organism Value: A. thaliana
  misc_feature: MA Experiment 20000437 PARAMETER Experiment Name: At_Drought_P Parameter: Plant Line Value: WS
  misc_feature: MA Experiment 20000437 PARAMETER Experiment Name: At_Drought_P Parameter: Timepoint (hr) Value: 24
  misc_feature: MA Experiment 20000437 PARAMETER Experiment Name: At_Drought_P Parameter: Tissue Value: Whole Plant
  misc_feature: MA Experiment 20000437 PARAMETER Experiment Name: At_Drought_P Parameter: Treatment Value: Drought vs. No Drought
  misc_feature: MA Experiment ID: 20000495 Result: Up-regulated in Transcription
  misc_feature: MA Experiment 20000495 PARAMETER Experiment Name: At_Guard_Cells_P Parameter: Harvest Date Value: 8/2/2002
  misc_feature: MA Experiment 20000495 PARAMETER Experiment Name: At_Guard_Cells_P Parameter: Organism Value: A. thaliana
  misc_feature: MA Experiment 20000495 PARAMETER Experiment Name: At_Guard_Cells_P Parameter: Tissue Value: Guard Cells vs. Leaves
  misc_feature: MA Experiment ID: 20000794 Result: Up-regulated in Transcription
  misc_feature: MA Experiment 20000794 PARAMETER Experiment Name: At_Petals_P Parameter: Age (day) Value: 23-25 days
  misc_feature: MA Experiment 20000794 PARAMETER Experiment Name: At_Petals_P Parameter: Plant Line Value: WS
  misc_feature: MA Experiment 20000794 PARAMETER Experiment Name: At_Petals_P Parameter: Tissue Value: Petals vs. Whole plant
  misc_feature: MA Experiment ID: 20001554 Result: Up-regulated in Transcription
  misc_feature: MA Experiment 20001554 PARAMETER Experiment Name: At_Drought_Soil_Dry_P Parameter: Age (day) Value: 21
  misc_feature: MA Experiment 20001554 PARAMETER Experiment Name: At_Drought_Soil_Dry_P Parameter: Organism Value: A. thaliana
  misc_feature: MA Experiment 20001554 PARAMETER Experiment Name: At_Drought_Soil_Dry_P Parameter: Plant Line Value: WS
  misc_feature: MA Experiment 20001554 PARAMETER Experiment Name: At_Drought_Soil_Dry_P Parameter: Post Timepoint (hr) Value: None
  misc_feature: MA Experiment 20001554 PARAMETER Experiment Name: At_Drought_Soil_Dry_P Parameter: Post-Treatment Value: None
  misc_feature: MA Experiment 20001554 PARAMETER Experiment Name: At_Drought_Soil_Dry_P Parameter: Timepoint (day) Value: 7
  misc_feature: MA Experiment 20001554 PARAMETER Experiment Name: At_Drought_Soil_Dry_P Parameter: Treatment Value: Drought vs. No Drought
  misc_feature: MA Experiment ID: 20001555 Result: Up-regulated in Transcription
  misc_feature: MA Experiment 20001555 PARAMETER Experiment Name: At_Drought_Soil_Dry_P Parameter: Age (day) Value: 24
  misc_feature: MA Experiment 20001555 PARAMETER Experiment Name: At_Drought_Soil_Dry_P Parameter: Organism Value: A. thaliana
  misc_feature: MA Experiment 20001555 PARAMETER Experiment Name: At_Drought_Soil_Dry_P Parameter: Plant Line Value: WS
  misc_feature: MA Experiment 20001555 PARAMETER Experiment Name: At_Drought_Soil_Dry_P Parameter: Post Timepoint (hr) Value: None
  misc_feature: MA Experiment 20001555 PARAMETER Experiment Name: At_Drought_Soil_Dry_P Parameter: Post-Treatment Value: None
  misc_feature: MA Experiment 20001555 PARAMETER Experiment Name: At_Drought_Soil_Dry_P Parameter: Timepoint (day) Value: 10
  misc_feature: MA Experiment 20001555 PARAMETER Experiment Name: At_Drought_Soil_Dry_P Parameter: Treatment Value: Drought vs. No Drought
  misc_feature: MA Experiment ID: 20001911 Result: Up-regulated in Transcription
  misc_feature: MA Experiment 20001911 PARAMETER Experiment Name: At_Drought_Reproduction_P Parameter: Age (day) Value: 40
  misc_feature: MA Experiment 20001911 PARAMETER Experiment Name: At_Drought_Reproduction_P Parameter: Organism Value: A. thaliana
  misc_feature: MA Experiment 20001911 PARAMETER Experiment Name: At_Drought_Reproduction_P Parameter: Plant Line Value: WS
  misc_feature: MA Experiment 20001911 PARAMETER Experiment Name: At_Drought_Reproduction_P Parameter: Timepoint (day) Value: 10
  misc_feature: MA Experiment 20001911 PARAMETER Experiment Name: At_Drought_Reproduction_P Parameter: Tissue Value: Flowers
  misc_feature: MA Experiment 20001911 PARAMETER Experiment Name: At_Drought_Reproduction_P Parameter: Treatment Value: Drought vs. No Drought
aaagaaaaaaaaaagaaagctttttgggaacataaacaccatcgaaggagggtgggaggtgttttatgttcatgggtggagcttcttggccaacctgaccccattcatcatatcattacccactttcttctcctaaattattctctcttatctctctctctctctttttattttctttctttcttaattcatctaaactctctctgcttttgcttttcgtaattccttacatttcactcaatattaatccccagaatctccgatccacccacaaatttagcaattttctgagatttgatcatttgggtcaccaaaaaatcttgtctttttgatctgggtttaacgccaataacatatgggaaacattagcagcagcggtggtgaaggtagacgccgtcgacggcgaaaccatacggcggctccaccaccacctcctcctcctccttcttcttctcttcctccaccacctctacctacagaaatccaagctaatcccatcgttttcgctgccgttactccctatcctaatcctaatcctaatccggtttaccagtaccctgcttcttactaccaccatcctcccccgggagccatgcctcttccgccgtacgaccaccacctccaacatcatccaccgcatccttaccacaaccactcttgggctcccgtggcgatggccagatacccttatgctggtcacatgatggctcaaccgactccttacgttgaacaccagaaagccgtcacgattcgtaacgacgttaatctcaagaaggagtctcttaggcttgaacccgacccggataatccgggtcgctttctcgtctcctttacgtttgatgcaaccgtctccggaaggattagtgtcattttctttgctaaagaatccgaagattgcaaactcacagcgacaaaggaagatatactgccacctatcactctagatttcgagaaaggacttggtcagaagtttaaacaatcatctggttctggtatagacttttcggtctttgaggacgttgagctgttcaaagcggccgcagacacagagatctatccattagcggttaaggcagaagcagctccctcaggtggtgagaatgaagaagaagaaaggtcggggtcgaagaatgcgcagattactcaagcggtttatgagaaggataaaggagagattaagattagagtggtgaagcagatactatgggttaatggaacgagatatgagttgcaggagatttatgggattgggaatacagttgagggggatgatgattcagctgatgatgctaatgatcctggtaaagaatgtgttatatgtttgtctgaaccacgagacaccactgttcttccatgtcgacatatgtgtatgtgtagcggatgtgctaaggtattgaggtttcagacaaatcgatgccccatttgcaggcaacctgttgaaaggcttttggagataaaagttcacggtaacaacggaagcgggaataacaccggacagggagaaacagttgaacaagagtagctaaacacggccgagtatggattgaaatgccatcgaaatattagtagtatatgcatgtttgatccttgtatgttaacaacaaaatgtgtgattgtcaattcataatatagagattacgaaa

SEQ ID NO: 102470 - protein, 388 aa, Arabidopsis thaliana; identical to SEQ ID NO: 24646
  peptide (1)..(388): Ceres Seq. ID no. 13610381
  misc_feature (319)..(357): Pfam Name: Zinc finger, C3HC4 type (RING finger) Pfam Description: Zinc finger, C3HC4 type (RING finger)
  misc_feature (1)..(388): Homolog of NCBI NO: 18398633 NR Description: putative RING zinc finger protein [Arabidopsis >gi|6681341|gb|AAF23258.1|AC015985_16 putative RING zinc finger [Arabidopsis thaliana] >gi|6682260|gb|AAF23312.1|AC016661_37
  misc_feature (1)..(337): Homolog of NCBI NO: 30681003 NR Description: putative RING zinc finger protein [Arabidopsis
  misc_feature (32)..(371): Homolog of NCBI NO: 15242675 NR Description: expressed protein [Arabidopsis thaliana]
  misc_feature (32)..(371): Homolog of NCBI NO: 21618140 NR Description: putative RING zinc finger protein [Arabidopsis
  misc_feature (32)..(371): Homolog of NCBI NO: 26449588 NR Description: unknown protein [Arabidopsis thaliana]
  misc_feature (21)..(374): Homolog of NCBI NO: 37532246 NR Description: putative hydroxyproline-rich glycoprotein [Oryza
  misc_feature (84)..(373): Homolog of NCBI NO: 15231808 NR Description: expressed protein [Arabidopsis thaliana]
  misc_feature (12)..(373): Homolog of NCBI NO: 15239642 NR Description: expressed protein [Arabidopsis thaliana]
  misc_feature (12)..(373): Homolog of NCBI NO: 21928149 NR Description: AT5g19080/T16G12_120 [Arabidopsis thaliana]
  misc_feature (6)..(373): Homolog of NCBI NO: 6862918 NR Description: putative RING zinc finger protein [Arabidopsis

SEQ ID NO: 102471 - protein, 309 aa, Arabidopsis thaliana; identical to SEQ ID NO: 24647
  peptide (1)..(309): Ceres Seq. ID no. 13610382
  misc_feature (240)..(278): Pfam Name: Zinc finger, C3HC4 type (RING finger) Pfam Description: Zinc finger, C3HC4 type (RING finger)
  misc_feature (1)..(309): Homolog of NCBI NO: 18398633 NR Description: putative RING zinc finger protein [Arabidopsis >gi|6681341|gb|AAF23258.1|AC015985_16 putative RING zinc finger [Arabidopsis thaliana] >gi|6682260|gb|AAF23312.1|AC016661_37
  misc_feature (1)..(258): Homolog of NCBI NO: 30681003 NR Description: putative RING zinc finger protein [Arabidopsis
  misc_feature (1)..(292): Homolog of NCBI NO: 15242675 NR Description: expressed protein [Arabidopsis thaliana]
  misc_feature (1)..(292): Homolog of NCBI NO: 21618140 NR Description: putative RING zinc finger protein [Arabidopsis
  misc_feature (1)..(292): Homolog of NCBI NO: 26449588 NR Description: unknown protein [Arabidopsis thaliana]
  misc_feature (1)..(295): Homolog of NCBI NO: 37532246 NR Description: putative hydroxyproline-rich glycoprotein [Oryza
  misc_feature (5)..(294): Homolog of NCBI NO: 15231808 NR Description: expressed protein [Arabidopsis thaliana]
  misc_feature (1)..(294): Homolog of NCBI NO: 15239642 NR Description: expressed protein [Arabidopsis thaliana]
  misc_feature (1)..(294): Homolog of NCBI NO: 21928149 NR Description: AT5g19080/T16G12_120 [Arabidopsis thaliana]
  misc_feature (1)..(294): Homolog of NCBI NO: 6862918 NR Description: putative RING zinc finger protein [Arabidopsis

SEQ ID NO: 102472 - protein, 282 aa, Arabidopsis thaliana; identical to SEQ ID NO: 24648
  peptide (1)..(282): Ceres Seq. ID no. 13610383
  misc_feature (213)..(251): Pfam Name: Zinc finger, C3HC4 type (RING finger) Pfam Description: Zinc finger, C3HC4 type (RING finger)
  misc_feature (1)..(282): Homolog of NCBI NO: 18398633 NR Description: putative RING zinc finger protein [Arabidopsis >gi|6681341|gb|AAF23258.1|AC015985_16 putative RING zinc finger [Arabidopsis thaliana] >gi|6682260|gb|AAF23312.1|AC016661_37
  misc_feature (1)..(231): Homolog of NCBI NO: 30681003 NR Description: putative RING zinc finger protein [Arabidopsis
  misc_feature (1)..(265): Homolog of NCBI NO: 15242675 NR Description: expressed protein [Arabidopsis thaliana]
  misc_feature (1)..(265): Homolog of NCBI NO: 21618140 NR Description: putative RING zinc finger protein [Arabidopsis
  misc_feature (1)..(265): Homolog of NCBI NO: 26449588 NR Description: unknown protein [Arabidopsis thaliana]
  misc_feature (1)..(268): Homolog of NCBI NO: 37532246 NR Description: putative hydroxyproline-rich glycoprotein [Oryza
  misc_feature (1)..(267): Homolog of NCBI NO: 15231808 NR Description: expressed protein [Arabidopsis thaliana]
  misc_feature (1)..(267): Homolog of NCBI NO: 15239642 NR Description: expressed protein [Arabidopsis thaliana]
  misc_feature (1)..(267): Homolog of NCBI NO: 21928149 NR Description: AT5g19080/T16G12_120 [Arabidopsis thaliana]
  misc_feature (1)..(267): Homolog of NCBI NO: 6862918 NR Description: putative RING zinc finger protein [Arabidopsis

SEQ ID NO: 102473 - DNA, 826 bp, Arabidopsis thaliana
  misc_feature (1)..(826): Ceres Seq. ID no. 13610384
  misc_feature: MA Experiment ID: 20000495 Result: Down-regulated in Transcription
  misc_feature: MA Experiment 20000495 PARAMETER Experiment Name: At_Guard_Cells_P Parameter: Harvest Date Value: 8/2/2002
  misc_feature: MA Experiment 20000495 PARAMETER Experiment Name: At_Guard_Cells_P Parameter: Organism Value: A. thaliana
  misc_feature: MA Experiment 20000495 PARAMETER Experiment Name: At_Guard_Cells_P Parameter: Tissue Value: Guard Cells vs. Leaves
gaaacagcgaaaggagctctctctcactccgaggcgatttcttctgtctcgacgatcttgcgcttttcacatttgaatcctccaatccattacttcttctccgatcttttattccggtacatctcaagtcttacaacaatgtctcctgattcttgtcctttggtaaagaacattcttcttctagactctgaaggaaagcgtgtggctgtcaagtattactcggatgactggccaactaatgccgccaagttaagttttgagaagtatgtattctcaaagacctctaagaccaatgctcgtacagaagctgagatcacactgttggacagcaatattattgtctataagtttgcccaggaccttcacttctttgttactggaggtgaaaatgaaaacgagctcatcttagcttctgttcttcaaggcttttttgatgctgttgcacttcttctgaggagcaatgtggaaaagatggaagcccttgagaacttggatctcatctttctatgccttgatgaaatggtcgatcaaggggtggttcttgaaacggatccaaacgtcattgcggggaaagtagcaatgcagagcacagaagctagtggttcactctctgaacagacactaacacaagcgctagcaacagctcgggagcatctggcaagaagtctgcttacatgagttccatcatggcgacacaataatagaagcatggacttcaatttctatgttgagcaactttttatttttgagtctttcggtttgaaagtctctaataattgaattctgcaaacaaactcttaaagtttggtagtaaaggtttgattat

SEQ ID NO: 102474 - protein, 225 aa, Arabidopsis thaliana
  peptide (1)..(225): Ceres Seq. ID no. 13610385
  misc_feature (54)..(199): Pfam Name: Clathrin adaptor complex small chain Pfam Description: Clathrin adaptor complex small chain
  misc_feature (47)..(225): Homolog of NCBI NO: 30681014 NR Description: coatomer zeta subunit (zeta-coat protein) [Arabidopsis thaliana] >gi|27754542|gb|AAO22718.1| putative
  misc_feature (50)..(225): Homolog of NCBI NO: 7259346 NR Description: nonclathrin coat protein zeta1-COP [Brassica rapa]
  misc_feature (50)..(225): Homolog of NCBI NO: 18413126 NR Description: coatomer protein -related [Arabidopsis thaliana]
  misc_feature (50)..(225): Homolog of NCBI NO: 18491175 NR Description: putative coatomer protein [Arabidopsis thaliana]
  misc_feature (50)..(225): Homolog of NCBI NO: 21553419 NR Description: putative coatomer protein [Arabidopsis thaliana]
  misc_feature (47)..(209): Homolog of NCBI NO: 6681338 NR Description: putative coatomer zeta subunit (zeta-coat [Arabidopsis thaliana] >gi|6682256|gb|AAF23308.1|AC016661_33
  misc_feature (50)..(224): Homolog of NCBI NO: 7259352 NR Description: nonclathrin coat protein zeta1-COP [Lycopersicon
ETAKGALSHSEAISSVSTILRFSHLNPPIHYFFSDLLFRYISSLTTMSPDSCPLVKNILLLDSEGKRVAVKYYSDDWPTNAAKLSFEKYVFSKTSKTNARTEAEITLLDSNIIVYKFAQDLHFFVTGGENENELILASVLQGFFDAVALLLRSNVEKMEALENLDLIFLCLDEMVDQGVVLETDPNVIAGKVAMQSTEASGSLSEQTLTQALATAREHLARSLLT

SEQ ID NO: 102475 - protein, 179 aa, Arabidopsis thaliana
  peptide (1)..(179): Ceres Seq. ID no. 13610386
  misc_feature (8)..(153): Pfam Name: Clathrin adaptor complex small chain Pfam Description: Clathrin adaptor complex small chain
  misc_feature (1)..(179): Homolog of NCBI NO: 30681014 NR Description: coatomer zeta subunit (zeta-coat protein) [Arabidopsis thaliana] >gi|27754542|gb|AAO22718.1| putative
  misc_feature (4)..(179): Homolog of NCBI NO: 7259346 NR Description: nonclathrin coat protein zeta1-COP [Brassica rapa]
  misc_feature (4)..(179): Homolog of NCBI NO: 18413126 NR Description: coatomer protein -related [Arabidopsis thaliana]
  misc_feature (4)..(179): Homolog of NCBI NO: 18491175 NR Description: putative coatomer protein [Arabidopsis thaliana]
  misc_feature (4)..(179): Homolog of NCBI NO: 21553419 NR Description: putative coatomer protein [Arabidopsis thaliana]
  misc_feature (1)..(163): Homolog of NCBI NO: 6681338 NR Description: putative coatomer zeta subunit (zeta-coat [Arabidopsis thaliana] >gi|6682256|gb|AAF23308.1|AC016661_33
  misc_feature (4)..(178): Homolog of NCBI NO: 7259352 NR Description: nonclathrin coat protein zeta1-COP [Lycopersicon
MSPDSCPLVKNILLLDSEGKRVAVKYYSDDWPTNAAKLSFEKYVFSKTSKTNARTEAEITLLDSNIIVYKFAQDLHFFVTGGENENELILASVLQGFFDAVALLLRSNVEKMEALENLDLIFLCLDEMVDQGVVLETDPNVIAGKVAMQSTEASGSLSEQTLTQALATAREHLARSLLT

SEQ ID NO: 102476 - DNA, 1032 bp, Arabidopsis thaliana
  misc_feature (1)..(1032): Ceres Seq. ID no. 13610395
  misc_feature: MA Experiment ID: 20000184 Result: Down-regulated in Transcription
  misc_feature: MA Experiment 20000184 PARAMETER Experiment Name: At_Shoots__P Parameter: Age (day) Value: 7
  misc_feature: MA Experiment 20000184 PARAMETER Experiment Name: At_Shoots__P Parameter: Tissue Value: Shoots vs. Whole Plant
aagtacattatcatcatttcaagaaacagagagagactaatggcgcaaaaaccacgaacggtgatctgcgtcggagacatccatggatacatatcaaagctcaataacctctggcttaatctccaatctgccatcgacccatcagatttcagctcagctctcgtcatattccttggcgattactgcgatcgtggaccggagactcgaaaagtcatcgatttcttaatctctctgccggagaaacatcccgatcaaactcatgtctttctcgccgggaaccatgactttgccttctctgggttcttaggtttgttgcctcgtccttcagatggatctgatttgaaggatacgtggaaggagtactcaaaaagtgaggagacagaaggatggtatacaggtgaagggttcgaagatatgcatcttcaaggtagaagatgggctggtaaaattaaggctacgttcaattctgtgaaagggatggcttataaaggatcgatttacgatgctggatcgacttttgaatcttatggcgttccacatggatcttctgatttgatgaaggcagtacctgagagtcacaagaagttcttgaccaatatggtatgggttcatgaagaggacgatgtttgtatagaaacagaggaagggcttaagcattgtaagttgatcgccgtacatgctggtttagagaaagggaataacgtagaagaacaactgaagcttttgagagctaaagacactagcatctcaaaaatacaacatctaagtggtaggaaaaacgtttgggacatcccacaggagctggatgataaacatactgttgttgttagcgggcaccatggaaaacttcacatcgatggtatgagattgatcatcgatgaaggcggtggattcccggataaaccagtggcagcaattgttcttccttccaagaagattatccgtgacaccgataatttgtctagttaagtttttctcatctactattgtaccaaagtcaattttgatttcaaaataaatgtagtaaggttt

SEQ ID NO: 102477 - protein, 322 aa, Arabidopsis thaliana; identical to SEQ ID NO: 38450
  peptide (1)..(322): Ceres Seq. ID no. 13610396
  misc_feature (19)..(283): Pfam Name: Calcineurin-like phosphoesterase Pfam Description: Calcineurin-like phosphoesterase
  misc_feature (14)..(322): Homolog of NCBI NO: 18398699 NR Description: calcineurin-like phosphoesterase family thaliana] >gi|6143879|gb|AAF04426.1|AC010927_19 unknown protein thaliana] >gi|23297516|gb|AAN12986.1| unknown protein
  misc_feature (14)..(322): Homolog of NCBI NO: 21618122 NR Description: unknown [Arabidopsis thaliana]
  misc_feature (13)..(322): Homolog of NCBI NO: 18398696 NR Description: calcineurin-like phosphoesterase family thaliana] >gi|21553642|gb|AAM62735.1| unknown [Arabidopsis
  misc_feature (14)..(322): Homolog of NCBI NO: 6143880 NR Description: unknown protein [Arabidopsis thaliana]
  misc_feature (18)..(322): Homolog of NCBI NO: 38347604 NR Description: OSJNBa0042I15.17 [Oryza sativa (japonica
  misc_feature (172)..(322): Homolog of NCBI NO: 19424085 NR Description: unknown protein [Arabidopsis thaliana]
  misc_feature (24)..(108): Homolog of NCBI NO: 13475753 NR Description: serine/threonine protein phosphatase loti] >gi|14026509|dbj|BAB53106.1| serine/threonine protein

SEQ ID NO: 102478 - protein, 309 aa, Arabidopsis thaliana; identical to SEQ ID NO: 38451
  peptide (1)..(309): Ceres Seq. ID no. 13610397
  misc_feature (6)..(270): Pfam Name: Calcineurin-like phosphoesterase Pfam Description: Calcineurin-like phosphoesterase
  misc_feature (1)..(309): Homolog of NCBI NO: 18398699 NR Description: calcineurin-like phosphoesterase family thaliana] >gi|6143879|gb|AAF04426.1|AC010927_19 unknown protein thaliana] >gi|23297516|gb|AAN12986.1| unknown protein
  misc_feature (1)..(309): Homolog of NCBI NO: 21618122 NR Description: unknown [Arabidopsis thaliana]
  misc_feature (1)..(309): Homolog of NCBI NO: 18398696 NR Description: calcineurin-like phosphoesterase family thaliana] >gi|21553642|gb|AAM62735.1| unknown [Arabidopsis
  misc_feature (1)..(309): Homolog of NCBI NO: 6143880 NR Description: unknown protein [Arabidopsis thaliana]
  misc_feature (5)..(309): Homolog of NCBI NO: 38347604 NR Description: OSJNBa0042I15.17 [Oryza sativa (japonica
  misc_feature (159)..(309): Homolog of NCBI NO: 19424085 NR Description: unknown protein [Arabidopsis thaliana]
  misc_feature (11)..(95): Homolog of NCBI NO: 13475753 NR Description: serine/threonine protein phosphatase loti] >gi|14026509|dbj|BAB53106.1| serine/threonine protein

SEQ ID NO: 102479 - protein, 184 aa, Arabidopsis thaliana; identical to SEQ ID NO: 38452
  peptide (1)..(184): Ceres Seq. ID no. 13610398
  misc_feature (1)..(145): Pfam Name: Calcineurin-like phosphoesterase Pfam Description: Calcineurin-like phosphoesterase
  misc_feature (1)..(184): Homolog of NCBI NO: 18398699 NR Description: calcineurin-like phosphoesterase family thaliana] >gi|6143879|gb|AAF04426.1|AC010927_19 unknown protein thaliana] >gi|23297516|gb|AAN12986.1| unknown protein
  misc_feature (1)..(184): Homolog of NCBI NO: 21618122 NR Description: unknown [Arabidopsis thaliana]
  misc_feature (1)..(184): Homolog of NCBI NO: 18398696 NR Description: calcineurin-like phosphoesterase family thaliana] >gi|21553642|gb|AAM62735.1| unknown [Arabidopsis
  misc_feature (1)..(184): Homolog of NCBI NO: 6143880 NR Description: unknown protein [Arabidopsis thaliana]
  misc_feature (1)..(184): Homolog of NCBI NO: 38347604 NR Description: OSJNBa0042I15.17 [Oryza sativa (japonica
  misc_feature (34)..(184): Homolog of NCBI NO: 19424085 NR Description: unknown protein [Arabidopsis thaliana]

SEQ ID NO: 102480 - DNA, 641 bp, Arabidopsis thaliana
  misc_feature (1)..(641): Ceres Seq. ID no. 13610410
  misc_feature: MA Experiment ID: 108463 Result: Up-regulated in Transcription
  misc_feature: MA Experiment 108463 PARAMETER Experiment Name: At_Germinating_Seeds_cDNA_P Parameter: Age (day) Value: 3 vs. 0
  misc_feature: MA Experiment 108463 PARAMETER Experiment Name: At_Germinating_Seeds_cDNA_P Parameter: Tissue Value: Germinating Seeds
  misc_feature: MA Experiment ID: 108464 Result: Up-regulated in Transcription
  misc_feature: MA Experiment 108464 PARAMETER Experiment Name: At_Germinating_Seeds_cDNA_P Parameter: Age (day) Value: 4 vs. 0
  misc_feature: MA Experiment 108464 PARAMETER Experiment Name: At_Germinating_Seeds_cDNA_P Parameter: Tissue Value: Germinating Seeds
  misc_feature: MA Experiment ID: 108594 Result: Down-regulated in Transcription
  misc_feature: MA Experiment 108594 PARAMETER Experiment Name: At_Ler-rhl_Root_cDNA_P Parameter: Plant Line Value: null
  misc_feature: MA Experiment ID: 108595 Result: Up-regulated in Transcription
  misc_feature: MA Experiment 108595 PARAMETER Experiment Name: At_Ler-pi_Ovule_cDNA_P Parameter: Plant Line Value: null
  misc_feature: MA Experiment ID: 20000314 Result: Down-regulated in Transcription
  misc_feature: MA Experiment 20000314 PARAMETER Experiment Name: At_14day_Shoots-Roots_Sub_P Parameter: Age (day) Value: 14
  misc_feature: MA Experiment 20000314 PARAMETER Experiment Name: At_14day_Shoots-Roots_Sub_P Parameter: Organism Value: A. thaliana
  misc_feature: MA Experiment 20000314 PARAMETER Experiment Name: At_14day_Shoots-Roots_Sub_P Parameter: Plant Line Value: WS
  misc_feature: MA Experiment 20000314 PARAMETER Experiment Name: At_14day_Shoots-Roots_Sub_P Parameter: Tissue Value: Roots vs. Whole Plant
  misc_feature: MA Experiment ID: 20000327 Result: Down-regulated in Transcription
  misc_feature: MA Experiment 20000327 PARAMETER Experiment Name: At_42deg_Heat_Sub_P Parameter: Age (day) Value: 14
  misc_feature: MA Experiment 20000327 PARAMETER Experiment Name: At_42deg_Heat_Sub_P Parameter: Organism Value: A. thaliana
  misc_feature: MA Experiment 20000327 PARAMETER Experiment Name: At_42deg_Heat_Sub_P Parameter: Plant Line Value: WS
  misc_feature: MA Experiment 20000327 PARAMETER Experiment Name: At_42deg_Heat_Sub_P Parameter: Temperature (deg C) Value: 42 vs. 22
  misc_feature: MA Experiment 20000327 PARAMETER Experiment Name: At_42deg_Heat_Sub_P Parameter: Timepoint (hr) Value: 1
  misc_feature: MA Experiment 20000327 PARAMETER Experiment Name: At_42deg_Heat_Sub_P Parameter: Tissue Value: Aerial
  misc_feature: MA Experiment ID: 20000328 Result: Down-regulated in Transcription
  misc_feature: MA Experiment 20000328 PARAMETER Experiment Name: At_42deg_Heat_Sub_P Parameter: Age (day) Value: 14
  misc_feature: MA Experiment 20000328 PARAMETER Experiment Name: At_42deg_Heat_Sub_P Parameter: Organism Value: A. thaliana
  misc_feature: MA Experiment 20000328 PARAMETER Experiment Name: At_42deg_Heat_Sub_P Parameter: Plant Line Value: WS
  misc_feature: MA Experiment 20000328 PARAMETER Experiment Name: At_42deg_Heat_Sub_P Parameter: Temperature (deg C) Value: 42 vs. 22
  misc_feature: MA Experiment 20000328 PARAMETER Experiment Name: At_42deg_Heat_Sub_P Parameter: Timepoint (hr) Value: 6
  misc_feature: MA Experiment 20000328 PARAMETER Experiment Name: At_42deg_Heat_Sub_P Parameter: Tissue Value: Aerial
  misc_feature: MA Experiment ID: 20000349 Result: Up-regulated in Transcription
  misc_feature: MA Experiment 20000349 PARAMETER Experiment Name: At_100uM_ABA_Sub_P Parameter: Age (day) Value: 14
  misc_feature: MA Experiment 20000349 PARAMETER Experiment Name: At_100uM_ABA_Sub_P Parameter: Organism Value: A. thaliana
  misc_feature: MA Experiment 20000349 PARAMETER Experiment Name: At_100uM_ABA_Sub_P Parameter: Plant Line Value: WS
  misc_feature: MA Experiment 20000349 PARAMETER Experiment Name: At_100uM_ABA_Sub_P Parameter: Timepoint (hr) Value: 6
  misc_feature: MA Experiment 20000349 PARAMETER Experiment Name: At_100uM_ABA_Sub_P Parameter: Tissue Value: Aerial
  misc_feature: MA Experiment 20000349 PARAMETER Experiment Name: At_100uM_ABA_Sub_P Parameter: Treatment Value: 100uM ABA vs. No Treatment
  misc_feature: MA Experiment ID: 20000440 Result: Down-regulated in Transcription
  misc_feature: MA Experiment 20000440 PARAMETER Experiment Name: At_Closed-Flower__Sub_P Parameter: Tissue Value: Closed Flower vs. Whole Plant
aaattcacactatgaaactcgccaaactaattccaaaacgtttcttcatcagatccaaagatcgttccactgtctctaagtcccccacggctttttccttcggatccgcttcctcatcttccggccaagactgtaaaaactccggtggtgatggcggtggcggttccgttaccccgactagcattctcccggaggttccttctccttattcctacgtcgagattctccaagcgtttaagttgatagacagagacaacgacggagctgtctctagacacgatcttgagtcgttacttagccggctaggtcctgatcctttgacggaggaggagatcaacgttatgcttaaagaggtggactgcgacggcgacggtacgatccgtcttgaagagcttgcgagtcgtgtagtctctttagatccggctcgtgactcgactgagctgaaggagactttcgagttctttgacgcggatcgtgacggtttgatctcggctgatgagcttctacgagttttctcgaccatcggagatgaacggtgcacgttagatgattgtaagcgtatgatagcagatgttgatgaggacggtgatggttttgtgtgcttcactgagttctcacgaatgatggatctccagcgttga

SEQ ID NO: 102481 - protein, 212 aa, Arabidopsis thaliana
  peptide (1)..(212): Ceres Seq. ID no. 13610411
  misc_feature (183)..(211): Pfam Name: EF hand Pfam Description: EF hand
  misc_feature (4)..(212): Homolog of NCBI NO: 15228219 NR Description: calmodulin, putative [Arabidopsis thaliana]
  misc_feature (4)..(208): Homolog of NCBI NO: 15227349 NR Description: calmodulin, putative [Arabidopsis thaliana]
  misc_feature (4)..(208): Homolog of NCBI NO: 21536925 NR Description: calmodulin-like protein [Arabidopsis thaliana]
  misc_feature (4)..(208): Homolog of NCBI NO: 322474 NR Description: calmodulin-related protein (clone PM129) - thaliana >gi|16213|emb|CAA48190.1| calmodulin like protein
  misc_feature (70)..(208): Homolog of NCBI NO: 21618074 NR Description: calmodulin-related protein [Arabidopsis thaliana]
  misc_feature (70)..(208): Homolog of NCBI NO: 18408502 NR Description: calmodulin-related protein, putative [Arabidopsis
  misc_feature (26)..(208): Homolog of NCBI NO: 19386815 NR Description: B1147A04.10 [Oryza sativa (japonica
  misc_feature (6)..(208): Homolog of NCBI NO: 28301674 NR Description: calcium-binding protein [Lotus japonicus]
  misc_feature (72)..(208): Homolog of NCBI NO: 14625425 NR Description: calmodulin NtCaM13 [Nicotiana tabacum]
  misc_feature (62)..(208): Homolog of NCBI NO: 7441485 NR Description: calmodulin - soybean >gi|170076|gb|AAA34015.1|
IHTMKLAKLIPKRFFIRSKDRSTVSKSPTAFSFGSASSSSGQDCKNSGGDGGGGSVTPTSILPEVPSPYSYVEILQAFKLIDRDNDGAVSRHDLESLLSRLGPDPLTEEEINVMLKEVDCDGDGTIRLEELASRVVSLDPARDSTELKETFEFFDADRDGLISADELLRVFSTIGDERCTLDDCKRMIADVDEDGDGFVCFTEFSRMMDLQR

SEQ ID NO: 102482 - protein, 209 aa, Arabidopsis thaliana
  peptide (1)..(209): Ceres Seq. ID no. 13610412
  misc_feature (180)..(208): Pfam Name: EF hand Pfam Description: EF hand
  misc_feature (1)..(209): Homolog of NCBI NO: 15228219 NR Description: calmodulin, putative [Arabidopsis thaliana]
  misc_feature (1)..(205): Homolog of NCBI NO: 15227349 NR Description: calmodulin, putative [Arabidopsis thaliana]
  misc_feature (1)..(205): Homolog of NCBI NO: 21536925 NR Description: calmodulin-like protein [Arabidopsis thaliana]
  misc_feature (1)..(205): Homolog of NCBI NO: 322474 NR Description: calmodulin-related protein (clone PM129) - thaliana >gi|16213|emb|CAA48190.1| calmodulin like protein
  misc_feature (67)..(205): Homolog of NCBI NO: 21618074 NR Description: calmodulin-related protein [Arabidopsis thaliana]
  misc_feature (67)..(205): Homolog of NCBI NO: 18408502 NR Description: calmodulin-related protein, putative [Arabidopsis
  misc_feature (23)..(205): Homolog of NCBI NO: 19386815 NR Description: B1147A04.10 [Oryza sativa (japonica
  misc_feature (3)..(205): Homolog of NCBI NO: 28301674 NR Description: calcium-binding protein [Lotus japonicus]
  misc_feature (69)..(205): Homolog of NCBI NO: 14625425 NR Description: calmodulin NtCaM13 [Nicotiana tabacum]
  misc_feature (59)..(205): Homolog of NCBI NO: 7441485 NR Description: calmodulin - soybean >gi|170076|gb|AAA34015.1|
MKLAKLIPKRFFIRSKDRSTVSKSPTAFSFGSASSSSGQDCKNSGGDGGGGSVTPTSILPEVPSPYSYVEILQAFKLIDRDNDGAVSRHDLESLLSRLGPDPLTEEEINVMLKEVDCDGDGTIRLEELASRVVSLDPARDSTELKETFEFFDADRDGLISADELLRVFSTIGDERCTLDDCKRMIADVDEDGDGFVCFTEFSRMMDLQR

SEQ ID NO: 102483 - DNA, 1126 bp, Arabidopsis thaliana
  misc_feature (1)..(1126): Ceres Seq. ID no. 13610421
  misc_feature: MA Experiment ID: 108461 Result: Up-regulated in Transcription
  misc_feature: MA Experiment 108461 PARAMETER Experiment Name: At_Germinating_Seeds_cDNA_P Parameter: Age (day) Value: 1 vs. 0
  misc_feature: MA Experiment 108461 PARAMETER Experiment Name: At_Germinating_Seeds_cDNA_P Parameter: Tissue Value: Germinating Seeds
  misc_feature: MA Experiment ID: 108462 Result: Up-regulated in Transcription
  misc_feature: MA Experiment 108462 PARAMETER Experiment Name: At_Germinating_Seeds_cDNA_P Parameter: Age (day) Value: 2 vs. 0
  misc_feature: MA Experiment 108462 PARAMETER Experiment Name: At_Germinating_Seeds_cDNA_P Parameter: Tissue Value: Germinating Seeds
  misc_feature: MA Experiment ID: 108463 Result: Up-regulated in Transcription
  misc_feature: MA Experiment 108463 PARAMETER Experiment Name: At_Germinating_Seeds_cDNA_P Parameter: Age (day) Value: 3 vs. 0
  misc_feature: MA Experiment 108463 PARAMETER Experiment Name: At_Germinating_Seeds_cDNA_P Parameter: Tissue Value: Germinating Seeds
  misc_feature: MA Experiment ID: 20000112 Result: Down-regulated in Transcription
  misc_feature: MA Experiment 20000112 PARAMETER Experiment Name: At_42deg_Heat_cDNA_P Parameter: Temperature (deg C) Value: 42 vs. 22
  misc_feature: MA Experiment 20000112 PARAMETER Experiment Name: At_42deg_Heat_cDNA_P Parameter: Timepoint (hr) Value: 2
  misc_feature: MA Experiment 20000112 PARAMETER Experiment Name: At_42deg_Heat_cDNA_P Parameter: Tissue Value: Aerial
  misc_feature: MA Experiment ID: 20000113 Result: Down-regulated in Transcription
  misc_feature: MA Experiment 20000113 PARAMETER Experiment Name: At_42deg_Heat_cDNA_P Parameter: Temperature (deg C) Value: 42 vs. 22
  misc_feature: MA Experiment 20000113 PARAMETER Experiment Name: At_42deg_Heat_cDNA_P Parameter: Timepoint (hr) Value: 8
  misc_feature: MA Experiment 20000113 PARAMETER Experiment Name: At_42deg_Heat_cDNA_P Parameter: Tissue Value: Aerial
  misc_feature: MA Experiment ID: 20000171 Result: Down-regulated in Transcription
  misc_feature: MA Experiment 20000171 PARAMETER Experiment Name: At_42deg_Heat_P Parameter: Age (day) Value: 14
  misc_feature: MA Experiment 20000171 PARAMETER Experiment Name: At_42deg_Heat_P Parameter: Organism Value: A. thaliana
  misc_feature: MA Experiment 20000171 PARAMETER Experiment Name: At_42deg_Heat_P Parameter: Plant Line Value: WS
  misc_feature: MA Experiment 20000171 PARAMETER Experiment Name: At_42deg_Heat_P Parameter: Temperature (deg C) Value: 42 vs. 22
  misc_feature: MA Experiment 20000171 PARAMETER Experiment Name: At_42deg_Heat_P Parameter: Timepoint (hr) Value: 1
  misc_feature: MA Experiment 20000171 PARAMETER Experiment Name: At_42deg_Heat_P Parameter: Tissue Value: Aerial
  misc_feature: MA Experiment ID: 20000173 Result: Down-regulated in Transcription
  misc_feature: MA Experiment 20000173 PARAMETER Experiment Name: At_42deg_Heat_P Parameter: Age (day) Value: 14
  misc_feature: MA Experiment 20000173 PARAMETER Experiment Name: At_42deg_Heat_P Parameter: Organism Value: A. thaliana
  misc_feature: MA Experiment 20000173 PARAMETER Experiment Name: At_42deg_Heat_P Parameter: Plant Line Value: WS
  misc_feature: MA Experiment 20000173 PARAMETER Experiment Name: At_42deg_Heat_P Parameter: Temperature (deg C) Value: 42 vs. 22
  misc_feature: MA Experiment 20000173 PARAMETER Experiment Name: At_42deg_Heat_P Parameter: Timepoint (hr) Value: 6
  misc_feature: MA Experiment 20000173 PARAMETER Experiment Name: At_42deg_Heat_P Parameter: Tissue Value: Aerial
  misc_feature: MA Experiment ID: 20000179 Result: Up-regulated in Transcription
  misc_feature: MA Experiment 20000179 PARAMETER Experiment Name: At_Germinating_Seeds_P Parameter: Age (hr) Value: 6 vs. 0
  misc_feature: MA Experiment 20000179 PARAMETER Experiment Name: At_Germinating_Seeds_P Parameter: Tissue Value: Germinating Seeds
  misc_feature: MA Experiment ID: 20000180 Result: Up-regulated in Transcription
  misc_feature: MA Experiment 20000180 PARAMETER Experiment Name: At_Germinating_Seeds_P Parameter: Age (hr) Value: 24 vs. 0
  misc_feature: MA Experiment 20000180 PARAMETER Experiment Name: At_Germinating_Seeds_P Parameter: Tissue Value: Germinating Seeds
  misc_feature: MA Experiment ID: 20000211 Result: Up-regulated in Transcription
  misc_feature: MA Experiment 20000211 PARAMETER Experiment Name: At_0.001percent_MeJA__P Parameter: Age (day) Value: 14
  misc_feature: MA Experiment 20000211 PARAMETER Experiment Name: At_0.001percent_MeJA__P Parameter: Organism Value: A. thaliana
  misc_feature: MA Experiment 20000211 PARAMETER Experiment Name: At_0.001percent_MeJA__P Parameter: Plant Line Value: WS
  misc_feature: MA Experiment 20000211 PARAMETER Experiment Name: At_0.001percent_MeJA__P Parameter: Timepoint (hr) Value: 1
  misc_feature: MA Experiment 20000211 PARAMETER Experiment Name: At_0.001percent_MeJA__P Parameter: Tissue Value: Aerial
  misc_feature: MA Experiment 20000211 PARAMETER Experiment Name: At_0.001percent_MeJA__P Parameter: Treatment Value: 0.001percent MeJA vs. No Treatment
  misc_feature: MA Experiment ID: 20000224 Result: Down-regulated in Transcription
  misc_feature: MA Experiment ID: 20000227 Result: Down-regulated in Transcription
  misc_feature: MA Experiment 20000227 PARAMETER Experiment Name: At_Root-Tips-vs-Tops_P Parameter: Tissue Value: Root Tips vs. Root Tops
  misc_feature: MA Experiment ID: 20000234 Result: Down-regulated in Transcription
  misc_feature: MA Experiment 20000234 PARAMETER Experiment Name: At_Siliques_P Parameter: Age (day) Value: 21
  misc_feature: MA Experiment 20000234 PARAMETER Experiment Name: At_Siliques_P Parameter: Organism Value: A. thaliana
  misc_feature: MA Experiment 20000234 PARAMETER Experiment Name: At_Siliques_P Parameter: Plant Line Value: WS
  misc_feature: MA Experiment 20000234 PARAMETER Experiment Name: At_Siliques_P Parameter: Tissue Value: Less Than 5mm Siliques vs. Whole Plant
  misc_feature: MA Experiment ID: 20001556 Result: Down-regulated in Transcription
  misc_feature: MA Experiment 20001556 PARAMETER Experiment Name: At_Drought_Soil_Dry_P Parameter: Age (day) Value: 26
  misc_feature: MA Experiment 20001556 PARAMETER Experiment Name: At_Drought_Soil_Dry_P Parameter: Organism Value: A. thaliana
  misc_feature: MA Experiment 20001556 PARAMETER Experiment Name: At_Drought_Soil_Dry_P Parameter: Plant Line Value: WS
  misc_feature: MA Experiment 20001556 PARAMETER Experiment Name: At_Drought_Soil_Dry_P Parameter: Post Timepoint (hr) Value: None
  misc_feature: MA Experiment 20001556 PARAMETER Experiment Name: At_Drought_Soil_Dry_P Parameter: Post-Treatment Value: None
  misc_feature: MA Experiment 20001556 PARAMETER Experiment Name: At_Drought_Soil_Dry_P Parameter: Timepoint (day) Value: 12
  misc_feature: MA Experiment 20001556 PARAMETER Experiment Name: At_Drought_Soil_Dry_P Parameter: Treatment Value: Drought vs. No Drought
  misc_feature: MA Experiment ID: 20001557 Result: Down-regulated in Transcription
  misc_feature: MA Experiment 20001557 PARAMETER Experiment Name: At_Drought_Soil_Dry_P Parameter: Age (day) Value: 27
  misc_feature: MA Experiment 20001557 PARAMETER Experiment Name: At_Drought_Soil_Dry_P Parameter: Organism Value: A. thaliana
  misc_feature: MA Experiment 20001557 PARAMETER Experiment Name: At_Drought_Soil_Dry_P Parameter: Plant Line Value: WS
  misc_feature: MA Experiment 20001557 PARAMETER Experiment Name: At_Drought_Soil_Dry_P Parameter: Post Timepoint (hr) Value: 3
  misc_feature: MA Experiment 20001557 PARAMETER Experiment Name: At_Drought_Soil_Dry_P Parameter: Post-Treatment Value: Re-Water vs. No Drought
  misc_feature: MA Experiment 20001557 PARAMETER Experiment Name: At_Drought_Soil_Dry_P Parameter: Timepoint (day) Value: 13
  misc_feature: MA Experiment 20001557 PARAMETER Experiment Name: At_Drought_Soil_Dry_P Parameter: Treatment Value: Drought vs. No Drought
  misc_feature: MA Experiment ID: 20001559 Result: Down-regulated in Transcription
  misc_feature: MA Experiment 20001559 PARAMETER Experiment Name: At_Drought_Soil_Dry_P Parameter: Age (day) Value: 28
  misc_feature: MA Experiment 20001559 PARAMETER Experiment Name: At_Drought_Soil_Dry_P Parameter: Organism Value: A. thaliana
  misc_feature: MA Experiment 20001559 PARAMETER Experiment Name: At_Drought_Soil_Dry_P Parameter: Plant Line Value: WS
  misc_feature: MA Experiment 20001559 PARAMETER Experiment Name: At_Drought_Soil_Dry_P Parameter: Post Timepoint (hr) Value: 29
  misc_feature: MA Experiment 20001559 PARAMETER Experiment Name: At_Drought_Soil_Dry_P Parameter: Post-Treatment Value: Re-Water vs. No Drought
  misc_feature: MA Experiment 20001559 PARAMETER Experiment Name: At_Drought_Soil_Dry_P Parameter: Timepoint (day) Value: 14
  misc_feature: MA Experiment 20001559 PARAMETER Experiment Name: At_Drought_Soil_Dry_P Parameter: Treatment Value: Drought vs. No Drought
acattttgaaaaaaacatttttttgtaattcaattattcgacacaaccaatcccatctcttgtttcacttccgccctccatctttcttcgtgattgagagaatcttcaacgaaagaaagcaactttttttgggtgaaattcacagaacaaccaaggtttttcttcttcttcttcttctccagttcctacagaatcatgcctgacaagaacatcgtagaggacgttatcggtgatttggtggataacttcacggagactgttcagaagaacaaacatggttcctccttcttcgaacaagaagattccgtcagttctcgtttcaaccgtttgtttgatcgccagaagccaattcatcatgtcttaggcggtggcaaatctgctgatgtgttgttatggaggaacaagaagatctctgcaagtgttttgatgggagctaccgcaatttgggtgctttttgaatggatcaatttccatttcctgtctctcgtttgctatgccctcttgcttggtatgattgcacaattcgtttggtctaacgcctctggattcttaaaccgctcacagtctagagtgcctcgcctagttcttccaaaggatttctttgctgaagtcggtgtggccgttggaaaagaagttaaccgcggtttgttgtttcttcaggacttggcttgtaaagggaatttgaaacagttcctcatggctgtaatcggactatgggtagctgcaatggtcgggagctgttgcaatttcctaactgttttgtatatcgggtttgttggggcacacacaatgccggttctgtatgagagatacgaagacgaagtggatggttttatggattctatgatcatgaagtttcatagtcattacaagaagcttgatactgggtttctcagtagaatcccaagtggaaagtttggattaaagaagcgtgagtgactaaatcactcaagcattttcttattttaccttgtttgttgttagaacaatatggattatggtttgctaaatgaatgttttgagaatattattcattcatgtagattttgtgtatttccttactaaacaataccttgtccatgtatttgtcaataccttggttaataagagaatcatcatatctgtc

SEQ ID NO: 102484 - protein, 247 aa, Arabidopsis thaliana; identical to SEQ ID NO: 29724
  peptide (1)..(247): Ceres Seq. ID no. 13610422
  misc_feature (1)..(247): Homolog of NCBI NO: 30681227 NR Description: expressed protein [Arabidopsis thaliana]
  misc_feature (1)..(247): Homolog of NCBI NO: 18398810 NR Description: expressed protein [Arabidopsis thaliana] expressed protein [Arabidopsis thaliana] unknown protein [Arabidopsis thaliana]
  misc_feature (4)..(247): Homolog of NCBI NO: 34897094 NR Description: unknown protein [Oryza sativa (japonica
  misc_feature (1)..(247): Homolog of NCBI NO: 34899590 NR Description: hypothetical protein~similar to Oryza sativa
  misc_feature (4)..(245): Homolog of NCBI NO: 34909318 NR Description: OSJNBb0021A09.5 [Oryza sativa (japonica
  misc_feature (44)..(245): Homolog of NCBI NO: 34904202 NR Description: P0492F05.25 [Oryza sativa (japonica
  misc_feature (14)..(246): Homolog of NCBI NO: 18406991 NR Description: expressed protein [Arabidopsis thaliana]
  misc_feature (23)..(247): Homolog of NCBI NO: 15236556 NR Description: expressed protein [Arabidopsis thaliana]
  misc_feature (4)..(245): Homolog of NCBI NO: 15238125 NR Description: expressed protein [Arabidopsis thaliana] contains similarity to 24 kDa seed maturation [Arabidopsis thaliana] >gi|14334530|gb|AAK59673.1| unknown
  misc_feature (12)..(247): Homolog of NCBI NO: 15237093 NR Description: expressed protein [Arabidopsis thaliana]

SEQ ID NO: 102485 - protein, 170 aa, Arabidopsis thaliana; identical to SEQ ID NO: 29725
  peptide (1)..(170): Ceres Seq. ID no. 13610423
  misc_feature (1)..(170): Homolog of NCBI NO: 30681227 NR Description: expressed protein [Arabidopsis thaliana]
  misc_feature (1)..(170): Homolog of NCBI NO: 18398810 NR Description: expressed protein [Arabidopsis thaliana] expressed protein [Arabidopsis thaliana] unknown protein [Arabidopsis thaliana]
  misc_feature (1)..(170): Homolog of NCBI NO: 34897094 NR Description: unknown protein [Oryza sativa (japonica
  misc_feature (1)..(170): Homolog of NCBI NO: 34899590 NR Description: hypothetical protein~similar to Oryza sativa
  misc_feature (1)..(168): Homolog of NCBI NO: 34909318 NR Description: OSJNBb0021A09.5 [Oryza sativa (japonica
  misc_feature (1)..(168): Homolog of NCBI NO: 34904202 NR Description: P0492F05.25 [Oryza sativa (japonica
  misc_feature (1)..(169): Homolog of NCBI NO: 18406991 NR Description: expressed protein [Arabidopsis thaliana]
  misc_feature (1)..(170): Homolog of NCBI NO: 15236556 NR Description: expressed protein [Arabidopsis thaliana]
  misc_feature (1)..(168): Homolog of NCBI NO: 15238125 NR Description: expressed protein [Arabidopsis thaliana] contains similarity to 24 kDa seed maturation [Arabidopsis thaliana] >gi|14334530|gb|AAK59673.1| unknown
  misc_feature (1)..(170): Homolog of NCBI NO: 15237093 NR Description: expressed protein [Arabidopsis thaliana]

SEQ ID NO: 102486 - protein, 142 aa, Arabidopsis thaliana; identical to SEQ ID NO: 29726
  peptide (1)..(142): Ceres Seq. ID no. 13610424
  misc_feature (1)..(142): Homolog of NCBI NO: 30681227 NR Description: expressed protein [Arabidopsis thaliana]
  misc_feature (1)..(142): Homolog of NCBI NO: 18398810 NR Description: expressed protein [Arabidopsis thaliana] expressed protein [Arabidopsis thaliana] unknown protein [Arabidopsis thaliana]
  misc_feature (1)..(142): Homolog of NCBI NO: 34897094 NR Description: unknown protein [Oryza sativa (japonica
  misc_feature (1)..(142): Homolog of NCBI NO: 34899590 NR Description: hypothetical protein~similar to Oryza sativa
  misc_feature (1)..(140): Homolog of NCBI NO: 34909318 NR Description: OSJNBb0021A09.5 [Oryza sativa (japonica
  misc_feature (1)..(140): Homolog of NCBI NO: 34904202 NR Description: P0492F05.25 [Oryza sativa (japonica
  misc_feature (1)..(141): Homolog of NCBI NO: 18406991 NR Description: expressed protein [Arabidopsis thaliana]
  misc_feature (1)..(142): Homolog of NCBI NO: 15236556 NR Description: expressed protein [Arabidopsis thaliana]
  misc_feature (1)..(140): Homolog of NCBI NO: 15238125 NR Description: expressed protein [Arabidopsis thaliana] contains similarity to 24 kDa seed maturation [Arabidopsis thaliana] >gi|14334530|gb|AAK59673.1| unknown
  misc_feature (1)..(142): Homolog of NCBI NO: 15237093 NR Description: expressed protein [Arabidopsis thaliana]

SEQ ID NO: 102487 - DNA, 1630 bp, Arabidopsis thaliana
  misc_feature (1)..(1630): Ceres Seq. ID no. 13610428
  misc_feature: MA Experiment ID: 108461 Result: Down-regulated in Transcription
  misc_feature: MA Experiment 108461 PARAMETER Experiment Name: At_Germinating_Seeds_cDNA_P Parameter: Age (day) Value: 1 vs. 0
  misc_feature: MA Experiment 108461 PARAMETER Experiment Name: At_Germinating_Seeds_cDNA_P Parameter: Tissue Value: Germinating Seeds
  misc_feature: MA Experiment ID: 108462 Result: Down-regulated in Transcription
  misc_feature: MA Experiment 108462 PARAMETER Experiment Name: At_Germinating_Seeds_cDNA_P Parameter: Age (day) Value: 2 vs. 0
  misc_feature: MA Experiment 108462 PARAMETER Experiment Name: At_Germinating_Seeds_cDNA_P Parameter: Tissue Value: Germinating Seeds
  misc_feature: MA Experiment ID: 108573 Result: Up-regulated in Transcription
  misc_feature: MA Experiment 108573 PARAMETER Experiment Name: At_Drought_cDNA_P Parameter: Timepoint (hr) Value: 6
  misc_feature: MA Experiment 108573 PARAMETER Experiment Name: At_Drought_cDNA_P Parameter: Tissue Value: Aerial
  misc_feature: MA Experiment 108573 PARAMETER Experiment Name: At_Drought_cDNA_P Parameter: Treatment Value: Drought vs. No Drought
  misc_feature: MA Experiment ID: 108585 Result: Up-regulated in Transcription
  misc_feature: MA Experiment 108585 PARAMETER Experiment Name: At_5mM_NaNP_cDNA_P Parameter: Timepoint (hr) Value: 6
  misc_feature: MA Experiment 108585 PARAMETER Experiment Name: At_5mM_NaNP_cDNA_P Parameter: Tissue Value: Aerial
  misc_feature: MA Experiment 108585 PARAMETER Experiment Name: At_5mM_NaNP_cDNA_P Parameter: Treatment Value: null
aaacctagaaacaaatacggtcttttttttttctttttatgggtcgcgaatctctggctgttgtgtcctcgccgccatcggcgactgcgcccagtactgctgtgtcggctacctcgcttgctcctggctttcgatttcatccgactgatgaggaactcgtgagctattacttgaagaggaaggttctgggtaaacctgtacgcttcgatgcgattggagaggtagatatctacaagcatgagccctgggatttagcagtgttttcgaagttgaaaactcgggaccaagaatggtacttcttcagtgcgttagataagaagtacggtaatggtgctaggatgaatcgagcaactaacaaagggtactggaaagcaactggaaaagacagagaaatccgccgggatattcagttgctcggtatgaaaaagacgcttgttttccacagcgggcgtgctccagacggccttcggactaattgggtcatgcacgagtatcgccttgtggaatatgaaactgaaactaacggaagcctgctgcaggatgcatatgtgttgtgcagagtgtttcacaagaataacattgggccaccaagtgggaacagatatgcgccattcatggaagaagaatgggctgatggtggaggagctctgattccaggaatagacgttagggtcagggtagaggctctaccacaagccaatggaaacaaccagatggaccaggaaatgcattcagcaagcaaggatctcattaacatcaacgagctaccgagagatgctactccaatggacatcgaacctaaccaacagaatcatcatgagagtgccttcaagccacaggagagtaacaaccatagtggttatgaagaagatgaggacacactcaaacgcgagcacgcagaagaagatgagcgtcctccttctctatgcattctcaacaaagaagctccactacctctcctgcaatacaaacgtagacgccaaaacgagtccaacaacaactcaagcaggaacacacaggaccattgttcgtccacaataacaaccgtcgacaatacaaccaccttaatctcatcatctgctgctgctgctaccaacactgccatctctgcattgcttgagttctcacttatgggtatctccgacaagaaagaaaaccagcagaaagaggaaacttctcctcctagtccaattgcatctcctgaagagaaggttaatgatctccagaaggaggttcaccagatgtctgttgaaagagaaactttcaagcttgagatgatgagtgcagaggctatgatcagcattctccagtcaagaatcgatgcgctgcgtcaggagaacgaggaacttaagaagaagaacgccagtggacaagctagttaaaccaccgcaacatctctccaggtgtcttcttcttcttcttcttcttctttgcctcttagctgtaatcttcttaatagtatgagctatggatgtagcttcttcagacggatcagaaaccttatgaatctctgttgtaaaattaggataaaacggaacggagccaaccaactaggtctttttattttatccttttttactttggatgtttctgcatcttttgggaacattttcaggctgatccattgtcg

SEQ ID NO: 102488 - protein, 447 aa, Arabidopsis thaliana; identical to SEQ ID NO: 42227
  peptide (1)..(447): Ceres Seq. ID no. 13610429
  misc_feature (27)..(155): Pfam Name: No apical meristem (NAM) protein Pfam Description: No apical meristem (NAM) protein
  misc_feature (1)..(447): Homolog of NCBI NO: 18398891 NR Description: expressed protein [Arabidopsis thaliana]
  misc_feature (1)..(445): Homolog of NCBI NO: 30681347 NR Description: expressed protein [Arabidopsis thaliana]
  misc_feature (1)..(234): Homolog of NCBI NO: 18398893 NR Description: expressed protein [Arabidopsis thaliana]
  misc_feature (1)..(320): Homolog of NCBI NO: 21105736 NR Description: nam-like protein 4 [Petunia x hybrida]
  misc_feature (14)..(320): Homolog of NCBI NO: 21105744 NR Description: nam-like protein 8 [Petunia x hybrida]
  misc_feature (23)..(273): Homolog of NCBI NO: 15237699 NR Description: NAC2 protein [Arabidopsis thaliana]
  misc_feature (23)..(215): Homolog of NCBI NO: 21105746 NR Description: nam-like protein 9 [Petunia x hybrida]
  misc_feature (23)..(273): Homolog of NCBI NO: 6456751 NR Description: NAC2 [Arabidopsis thaliana]
  misc_feature (23)..(199): Homolog of NCBI NO: 8567779 NR Description: NAC, putative [Arabidopsis thaliana]
  misc_feature (23)..(199): Homolog of NCBI NO: 18398895 NR Description: expressed protein [Arabidopsis thaliana] unknown protein [Arabidopsis thaliana]

SEQ ID NO: 102489 - protein, 347 aa, Arabidopsis thaliana; identical to SEQ ID NO: 42228
  peptide (1)..(347): Ceres Seq. ID no. 13610430
  misc_feature (1)..(55): Pfam Name: No apical meristem (NAM) protein Pfam Description: No apical meristem (NAM) protein
  misc_feature (1)..(347): Homolog of NCBI NO: 18398891 NR Description: expressed protein [Arabidopsis thaliana]
  misc_feature (1)..(345): Homolog of NCBI NO: 30681347 NR Description: expressed protein [Arabidopsis thaliana]
  misc_feature (1)..(134): Homolog of NCBI NO: 18398893 NR Description: expressed protein [Arabidopsis thaliana]
  misc_feature (1)..(220): Homolog of NCBI NO: 21105736 NR Description: nam-like protein 4 [Petunia x hybrida]
  misc_feature (1)..(220): Homolog of NCBI NO: 21105744 NR Description: nam-like protein 8 [Petunia x hybrida]
  misc_feature (1)..(173): Homolog of NCBI NO: 15237699 NR Description: NAC2 protein [Arabidopsis thaliana]
  misc_feature (1)..(115): Homolog of NCBI NO: 21105746 NR Description: nam-like protein 9 [Petunia x hybrida]
  misc_feature (1)..(173): Homolog of NCBI NO: 6456751 NR Description: NAC2 [Arabidopsis thaliana]
  misc_feature (1)..(99): Homolog of NCBI NO: 8567779 NR Description: NAC, putative [Arabidopsis thaliana]
  misc_feature (1)..(99): Homolog of NCBI NO: 18398895 NR Description: expressed protein [Arabidopsis thaliana] unknown protein [Arabidopsis thaliana]

SEQ ID NO: 102490 - protein, 320 aa, Arabidopsis thaliana; identical to SEQ ID NO: 42229
  peptide (1)..(320): Ceres Seq. ID no. 13610431
  misc_feature (1)..(320): Homolog of NCBI NO: 18398891 NR Description: expressed protein [Arabidopsis thaliana]
  misc_feature (1)..(318): Homolog of NCBI NO: 30681347 NR Description: expressed protein [Arabidopsis thaliana]
  misc_feature (1)..(107): Homolog of NCBI NO: 18398893 NR Description: expressed protein [Arabidopsis thaliana]
  misc_feature (1)..(193): Homolog of NCBI NO: 21105736 NR Description: nam-like protein 4 [Petunia x hybrida]
  misc_feature (1)..(193): Homolog of NCBI NO: 21105744 NR Description: nam-like protein 8 [Petunia x hybrida]
  misc_feature (1)..(146): Homolog of NCBI NO: 15237699 NR Description: NAC2 protein [Arabidopsis thaliana]
  misc_feature (1)..(88): Homolog of NCBI NO: 21105746 NR Description: nam-like protein 9 [Petunia x hybrida]
  misc_feature (1)..(146): Homolog of NCBI NO: 6456751 NR Description: NAC2 [Arabidopsis thaliana]
  misc_feature (1)..(72): Homolog of NCBI NO: 8567779 NR Description: NAC, putative [Arabidopsis thaliana]
  misc_feature (1)..(72): Homolog of NCBI NO: 18398895 NR Description: expressed protein [Arabidopsis thaliana] unknown protein [Arabidopsis thaliana]

SEQ ID NO: 102491 - DNA, 1871 bp, Arabidopsis thaliana
  misc_feature (1)..(1871): Ceres Seq. ID no. 13610432
  misc_feature: MA Experiment ID: 108434 Result: Down-regulated in Transcription
  misc_feature: MA Experiment 108434 PARAMETER Experiment Name: At_Root_Tips_cDNA_P Parameter: Tissue Value: Root Tips
  misc_feature: MA Experiment ID: 108461 Result: Down-regulated in Transcription
  misc_feature: MA Experiment 108461 PARAMETER Experiment Name: At_Germinating_Seeds_cDNA_P Parameter: Age (day) Value: 1 vs. 0
  misc_feature: MA Experiment 108461 PARAMETER Experiment Name: At_Germinating_Seeds_cDNA_P Parameter: Tissue Value: Germinating Seeds
  misc_feature: MA Experiment ID: 108462 Result: Down-regulated in Transcription
  misc_feature: MA Experiment 108462 PARAMETER Experiment Name: At_Germinating_Seeds_cDNA_P Parameter: Age (day) Value: 2 vs. 0
  misc_feature: MA Experiment 108462 PARAMETER Experiment Name: At_Germinating_Seeds_cDNA_P Parameter: Tissue Value: Germinating Seeds
  misc_feature: MA Experiment ID: 108488 Result: Down-regulated in Transcription
  misc_feature: MA Experiment ID: 108573 Result: Up-regulated in Transcription
  misc_feature: MA Experiment 108573 PARAMETER Experiment Name: At_Drought_cDNA_P Parameter: Timepoint (hr) Value: 6
  misc_feature: MA Experiment 108573 PARAMETER Experiment Name: At_Drought_cDNA_P Parameter: Tissue Value: Aerial
  misc_feature: MA Experiment 108573 PARAMETER Experiment Name: At_Drought_cDNA_P Parameter: Treatment Value: Drought vs. No Drought
  misc_feature: MA Experiment ID: 108585 Result: Up-regulated in Transcription
  misc_feature: MA Experiment 108585 PARAMETER Experiment Name: At_5mM_NaNP_cDNA_P Parameter: Timepoint (hr) Value: 6
  misc_feature: MA Experiment 108585 PARAMETER Experiment Name: At_5mM_NaNP_cDNA_P Parameter: Tissue Value: Aerial
  misc_feature: MA Experiment 108585 PARAMETER Experiment Name: At_5mM_NaNP_cDNA_P Parameter: Treatment Value: null
  misc_feature: MA Experiment ID: 108594 Result: Down-regulated in Transcription
  misc_feature: MA Experiment 108594 PARAMETER Experiment Name: At_Ler-rhl_Root_cDNA_P Parameter: Plant Line Value: null
  misc_feature: MA Experiment ID: 108607 Result: Up-regulated in Transcription
  misc_feature: MA Experiment 108607 PARAMETER Experiment Name: At_100uM_ABA_cDNA_P Parameter: Timepoint (hr) Value: 4
  misc_feature: MA Experiment 108607 PARAMETER Experiment Name: At_100uM_ABA_cDNA_P Parameter: Tissue Value: Aerial
  misc_feature: MA Experiment 108607 PARAMETER Experiment Name: At_100uM_ABA_cDNA_P Parameter: Treatment Value: 100uM ABA vs. No Treatment
  misc_feature: MA Experiment ID: 108668 Result: Up-regulated in Transcription
  misc_feature: MA Experiment 108668 PARAMETER Experiment Name: At_2mM_SA_cDNA_P Parameter: Plant Line Value: WS
  misc_feature: MA Experiment 108668 PARAMETER Experiment Name: At_2mM_SA_cDNA_P Parameter: Timepoint (hr) Value: 6
  misc_feature: MA Experiment 108668 PARAMETER Experiment Name: At_2mM_SA_cDNA_P Parameter: Treatment Value: 2mM SA vs. No Treatment
  misc_feature: MA Experiment ID: 20000069 Result: Up-regulated in Transcription
  misc_feature: MA Experiment 20000069 PARAMETER Experiment Name: At_100uM_ABA_Mutants_cDNA_P Parameter: Plant Line Value: CS23
  misc_feature: MA Experiment 20000069 PARAMETER Experiment Name: At_100uM_ABA_Mutants_cDNA_P Parameter: Timepoint (hr) Value: 6
  misc_feature: MA Experiment 20000069 PARAMETER Experiment Name: At_100uM_ABA_Mutants_cDNA_P Parameter: Tissue Value: Aerial
  misc_feature: MA Experiment 20000069 PARAMETER Experiment Name: At_100uM_ABA_Mutants_cDNA_P Parameter: Treatment Value: 100uM ABA vs. No Treatment
  misc_feature: MA Experiment ID: 20000070 Result: Up-regulated in Transcription
  misc_feature: MA Experiment 20000070 PARAMETER Experiment Name: At_100uM_ABA_Mutants_cDNA_P Parameter: Plant Line Value: CS24
  misc_feature: MA Experiment 20000070 PARAMETER Experiment Name: At_100uM_ABA_Mutants_cDNA_P Parameter: Timepoint (hr) Value: 6
  misc_feature: MA Experiment 20000070 PARAMETER Experiment Name: At_100uM_ABA_Mutants_cDNA_P Parameter: Tissue Value: Aerial
  misc_feature: MA Experiment 20000070 PARAMETER Experiment Name: At_100uM_ABA_Mutants_cDNA_P Parameter: Treatment Value: 100uM ABA vs. No Treatment
  misc_feature: MA Experiment ID: 20000071 Result: Up-regulated in Transcription
  misc_feature: MA Experiment 20000071 PARAMETER Experiment Name: At_100uM_ABA_Mutants_cDNA_P Parameter: Plant Line Value: CS8104
  misc_feature: MA Experiment 20000071 PARAMETER Experiment Name: At_100uM_ABA_Mutants_cDNA_P Parameter: Timepoint (hr) Value: 6
  misc_feature: MA Experiment 20000071 PARAMETER Experiment Name: At_100uM_ABA_Mutants_cDNA_P Parameter: Tissue Value: Aerial
  misc_feature: MA Experiment 20000071 PARAMETER Experiment Name: At_100uM_ABA_Mutants_cDNA_P Parameter: Treatment Value: 100uM ABA vs. No Treatment
  misc_feature: MA Experiment ID: 20000086 Result: Up-regulated in Transcription
  misc_feature: MA Experiment 20000086 PARAMETER Experiment Name: At_100uM_ABA_Mutants_cDNA_P Parameter: Plant Line Value: CS22
  misc_feature: MA Experiment 20000086 PARAMETER Experiment Name: At_100uM_ABA_Mutants_cDNA_P Parameter: Timepoint (hr) Value: 6
  misc_feature: MA Experiment 20000086 PARAMETER Experiment Name: At_100uM_ABA_Mutants_cDNA_P Parameter: Tissue Value: Aerial
  misc_feature: MA Experiment 20000086 PARAMETER Experiment Name: At_100uM_ABA_Mutants_cDNA_P Parameter: Treatment Value: 100uM ABA vs. No Treatment
  misc_feature: MA Experiment ID: 20000088 Result: Up-regulated in Transcription
  misc_feature: MA Experiment 20000088 PARAMETER Experiment Name: At_100uM_ABA_Mutants_cDNA_P Parameter: Plant Line Value: Landsberg
  misc_feature: MA Experiment 20000088 PARAMETER Experiment Name: At_100uM_ABA_Mutants_cDNA_P Parameter: Timepoint (hr) Value: 6
  misc_feature: MA Experiment 20000088 PARAMETER Experiment Name: At_100uM_ABA_Mutants_cDNA_P Parameter: Tissue Value: Aerial
  misc_feature: MA Experiment 20000088 PARAMETER Experiment Name: At_100uM_ABA_Mutants_cDNA_P Parameter: Treatment Value: 100uM ABA vs. No Treatment
  misc_feature: MA Experiment ID: 20000093 Result: Up-regulated in Transcription
  misc_feature: MA Experiment 20000093 PARAMETER Experiment Name: At_42deg_Heat_cDNA_P Parameter: Temperature (deg C) Value: 42 vs. 22
  misc_feature: MA Experiment 20000093 PARAMETER Experiment Name: At_42deg_Heat_cDNA_P Parameter: Timepoint (hr) Value: 0.5
  misc_feature: MA Experiment 20000093 PARAMETER Experiment Name: At_42deg_Heat_cDNA_P Parameter: Tissue Value: Aerial
  misc_feature: MA Experiment ID: 20000117 Result: Up-regulated in Transcription
  misc_feature: MA Experiment 20000117 PARAMETER Experiment Name: At_100uM_ABA_Mutants_cDNA_P Parameter: Plant Line Value: Columbia
  misc_feature: MA Experiment 20000117 PARAMETER Experiment Name: At_100uM_ABA_Mutants_cDNA_P Parameter: Timepoint (hr) Value: 6
  misc_feature: MA Experiment 20000117 PARAMETER Experiment Name: At_100uM_ABA_Mutants_cDNA_P Parameter: Tissue Value: Aerial
  misc_feature: MA Experiment 20000117 PARAMETER Experiment Name: At_100uM_ABA_Mutants_cDNA_P Parameter: Treatment Value: 100uM ABA vs. No Treatment
  misc_feature: MA Experiment ID: 20000180 Result: Down-regulated in Transcription
  misc_feature: MA Experiment 20000180 PARAMETER Experiment Name: At_Germinating_Seeds_P Parameter: Age (hr) Value: 24 vs. 0
  misc_feature: MA Experiment 20000180 PARAMETER Experiment Name: At_Germinating_Seeds_P Parameter: Tissue Value: Germinating Seeds
  misc_feature: MA Experiment ID: 20000182 Result: Up-regulated in Transcription
  misc_feature: MA Experiment 20000182 PARAMETER Experiment Name: At_2mM_SA_P Parameter: Age (day) Value: 14
  misc_feature: MA Experiment 20000182 PARAMETER Experiment Name: At_2mM_SA_P Parameter: Organism Value: A. thaliana
  misc_feature: MA Experiment 20000182 PARAMETER Experiment Name: At_2mM_SA_P Parameter: Plant Line Value: WS
  misc_feature: MA Experiment 20000182 PARAMETER Experiment Name: At_2mM_SA_P Parameter: Timepoint (hr) Value: 6
  misc_feature: MA Experiment 20000182 PARAMETER Experiment Name: At_2mM_SA_P Parameter: Tissue Value: Aerial
  misc_feature: MA Experiment 20000182 PARAMETER Experiment Name: At_2mM_SA_P Parameter: Treatment Value: 2mM SA vs. No Treatment
  misc_feature: MA Experiment ID: 20000184 Result: Down-regulated in Transcription
  misc_feature: MA Experiment 20000184 PARAMETER Experiment Name: At_Shoots__P Parameter: Age (day) Value: 7
  misc_feature: MA Experiment 20000184 PARAMETER Experiment Name: At_Shoots__P Parameter: Tissue Value: Shoots vs. Whole Plant
  misc_feature: MA Experiment ID: 20000185 Result: Up-regulated in Transcription
  misc_feature: MA Experiment 20000185 PARAMETER Experiment Name: At_Roots__P Parameter: Age (day) Value: 7 vs. 21
  misc_feature: MA Experiment 20000185 PARAMETER Experiment Name: At_Roots__P Parameter: Organism Value: A. thaliana
  misc_feature: MA Experiment 20000185 PARAMETER Experiment Name: At_Roots__P Parameter: Tissue Value: Roots vs. Whole Plant
  misc_feature: MA Experiment ID: 20000234 Result: Down-regulated in Transcription
  misc_feature: MA Experiment 20000234 PARAMETER Experiment Name: At_Siliques_P Parameter: Age (day) Value: 21
  misc_feature: MA Experiment 20000234 PARAMETER Experiment Name: At_Siliques_P Parameter: Organism Value: A. thaliana
  misc_feature: MA Experiment 20000234 PARAMETER Experiment Name: At_Siliques_P Parameter: Plant Line Value: WS
  misc_feature: MA Experiment 20000234 PARAMETER Experiment Name: At_Siliques_P Parameter: Tissue Value: Less Than 5mm Siliques vs. Whole Plant
  misc_feature: MA Experiment ID: 20000235 Result: Down-regulated in Transcription
  misc_feature: MA Experiment 20000235 PARAMETER Experiment Name: At_Siliques_P Parameter: Age (day) Value: 21
  misc_feature: MA Experiment 20000235 PARAMETER Experiment Name: At_Siliques_P Parameter: Organism Value: A. thaliana
  misc_feature: MA Experiment 20000235 PARAMETER Experiment Name: At_Siliques_P Parameter: Plant Line Value: WS
  misc_feature: MA Experiment 20000235 PARAMETER Experiment Name: At_Siliques_P Parameter: Tissue Value: 5-10mm Siliques vs. Whole Plant
  misc_feature: MA Experiment ID: 20001757 Result: Down-regulated in Transcription
  misc_feature: MA Experiment 20001757 PARAMETER Experiment Name: At_50mM_NH4NO3_L-to-H_P Parameter: Timepoint (hr) Value: 6
  misc_feature: MA Experiment 20001757 PARAMETER Experiment Name: At_50mM_NH4NO3_L-to-H_P Parameter: Tissue Value: Leaf
  misc_feature: MA Experiment 20001757 PARAMETER Experiment Name: At_50mM_NH4NO3_L-to-H_P Parameter: Treatment Value: 50mM NH4NO3 vs 100mM Mannitol
  misc_feature: MA Experiment ID: 20001905 Result: Up-regulated in Transcription
  misc_feature: MA Experiment 20001905 PARAMETER Experiment Name: At_Drought_Reproduction_P Parameter: Age (day) Value: 40
  misc_feature: MA Experiment 20001905 PARAMETER Experiment Name: At_Drought_Reproduction_P Parameter: Organism Value: A. thaliana
  misc_feature: MA Experiment 20001905 PARAMETER Experiment Name: At_Drought_Reproduction_P Parameter: Plant Line Value: WS
  misc_feature: MA Experiment 20001905 PARAMETER Experiment Name: At_Drought_Reproduction_P Parameter: Timepoint (day) Value: 10
  misc_feature: MA Experiment 20001905 PARAMETER Experiment Name: At_Drought_Reproduction_P Parameter: Tissue Value: Rosettes
  misc_feature: MA Experiment 20001905 PARAMETER Experiment Name: At_Drought_Reproduction_P Parameter: Treatment Value: Drought vs. No Drought
ttatttcgaaatcattgttttgctctttcttttgattcgaattcgacagaacagctcttttaagttattcataaaccttgtgtttgagttttggtccatcgagtatatgggtcgtggctcagtaacatcgctcgctcctgggtttcgttttcatcccacagacgaagaactcgttcgttactatctgaaacgaaagatctgcaataaaccttttaagttcgatgctatctctgttaccgatgtatacaaatctgagccttgggatctcccagacaagtcgaggctgaaaagtagagacttggagtggtacttcttcagtatgcttgataagaagtatagaaatggatcaaagacgaatcgtgcgactgagatgggatattggaagactacagggaaagatcgagagattcttaatggttcaaaagtcgttgggatgaagaagactcttgtttatcacaaaggtcgagctcctcgtggcgaaagaaccaattgggttatgcatgagtatcggttggttgatcaagaccttgataaaactggtgttcaccaagatgcgtttgtgctttgtaggatttttcagaagagtggctccggacctaaaaatggagagcagtacggtgctccgtttgttgaggaggagtgggaggaggaggatgatatgacatttgtacctgaccaagaagatcttggaagtgaagatcatgtttatgtccatatggatgacattgatcagaagtctgaaaactttgtggtctatgatgccattcctattccgttaaactttattcacggggagtcgagcaataatgttgaaacaaactactcagactccataaactatatacaacaaacaggaaactatatggactctggtggctactttgagcaaccagcagaatcttatgagaaagatcagaagcctatcatccgtgaccgtgatggtagccttcaaaatgaaggaattggatgtggggtccaggacaagcactcggaaactttgcaatcttctgacaacatctttgggactgatacatcatgctacaatgattttccagttgagagcaactatttgattggtgaggcgtttctggatccgaacagtaatcttctggagaatgatggtctgtacctggaaacaaatgatctcagtagtactcagcaagatggtttcgactttgaagattatcttaccttctttgatgaaacttttgatccttcgcaactgatgggaaatgaagatgtttttttcgatcaagaagagctctttcaagaggttgagactaaggaactagagaaagaggagacttcaagaagcaaacatgtggtggaagaaaaggaaaaggatgaagcatcttgttcaaaacaagttgatgcagatgcaacagagtttgagccagattacaagtacccgttactaaagaaggcaagccacatgttgggtgctattcctgctccgcttgcaaatgcttctgagttccctacaaaggatgcagctatccggttacacgcagcacaatcatcaggttcagttcatgtaaccgcaggtatgatcacgatatcagacagcaacatgggctggtcatacggcaaaaacgagaaccttgacttgatcctttctttggggttggtccaagggaataccgcccccgaaaaatcagggaatagttcagcatgggcaatgttaatattcatgtgtttctgggttcttctactctcagttagtttcaaagtgagcattttggtctcttccaggtgataggtaaccctttcttgttcaaacaagacttttgtgtttgtacattgatatagatgaacttgcagtgttcaatgttttattctctaataatattgaataaaccccatattctatc

SEQ ID NO: 102492 - protein, 584 aa, Arabidopsis thaliana; identical to SEQ ID NO: 24536
  peptide (1)..(584): Ceres Seq. ID no. 13610433
  misc_feature (44)..(172): Pfam Name: No apical meristem (NAM) protein Pfam Description: No apical meristem (NAM) protein
  misc_feature (36)..(584): Homolog of NCBI NO: 18398895 NR Description: expressed protein [Arabidopsis thaliana] unknown protein [Arabidopsis thaliana]
  misc_feature (36)..(584): Homolog of NCBI NO: 21593389 NR Description: NAC, putative [Arabidopsis thaliana]
  misc_feature (36)..(584): Homolog of NCBI NO: 8567779 NR Description: NAC, putative [Arabidopsis thaliana]
  misc_feature (36)..(581): Homolog of NCBI NO: 15237699 NR Description: NAC2 protein [Arabidopsis thaliana]
  misc_feature (36)..(581): Homolog of NCBI NO: 6456751 NR Description: NAC2 [Arabidopsis thaliana]
  misc_feature (227)..(584): Homolog of NCBI NO: 15237699 NR Description: NAC2 protein [Arabidopsis thaliana]
  misc_feature (38)..(340): Homolog of NCBI NO: 21105746 NR Description: nam-like protein 9 [Petunia x hybrida]
  misc_feature (355)..(512): Homolog of NCBI NO: 21105746 NR Description: nam-like protein 9 [Petunia x hybrida]
  misc_feature (213)..(556): Homolog of NCBI NO: 28188643 NR Description: unknown protein [Arabidopsis lyrata] unknown protein [Arabidopsis lyrata] >gi|28188647|gb|AAN46249.1|
  misc_feature (213)..(556): Homolog of NCBI NO: 28188649 NR Description: unknown protein [Arabidopsis lyrata]

SEQ ID NO: 102493 - protein, 549 aa, Arabidopsis thaliana; identical to SEQ ID NO: 24537
  peptide (1)..(549): Ceres Seq. ID no. 13610434
  misc_feature (9)..(137): Pfam Name: No apical meristem (NAM) protein Pfam Description: No apical meristem (NAM) protein
  misc_feature (1)..(549): Homolog of NCBI NO: 18398895 NR Description: expressed protein [Arabidopsis thaliana] unknown protein [Arabidopsis thaliana]
  misc_feature (1)..(549): Homolog of NCBI NO: 21593389 NR Description: NAC, putative [Arabidopsis thaliana]
  misc_feature (1)..(549): Homolog of NCBI NO: 8567779 NR Description: NAC, putative [Arabidopsis thaliana]
  misc_feature (1)..(546): Homolog of NCBI NO: 15237699 NR Description: NAC2 protein [Arabidopsis thaliana]
  misc_feature (1)..(546): Homolog of NCBI NO: 6456751 NR Description: NAC2 [Arabidopsis thaliana]
  misc_feature (192)..(549): Homolog of NCBI NO: 15237699 NR Description: NAC2 protein [Arabidopsis thaliana]
  misc_feature (3)..(305): Homolog of NCBI NO: 21105746 NR Description: nam-like protein 9 [Petunia x hybrida]
  misc_feature (320)..(477): Homolog of NCBI NO: 21105746 NR Description: nam-like protein 9 [Petunia x hybrida]
  misc_feature (178)..(521): Homolog of NCBI NO: 28188643 NR Description: unknown protein [Arabidopsis lyrata] unknown protein [Arabidopsis lyrata] >gi|28188647|gb|AAN46249.1|
  misc_feature (178)..(521): Homolog of NCBI NO: 28188649 NR Description: unknown protein [Arabidopsis lyrata]

SEQ ID NO: 102494 - protein, 478 aa, Arabidopsis thaliana; identical to SEQ ID NO: 24538
  peptide (1)..(478): Ceres Seq. ID no. 13610435
  misc_feature (1)..(66): Pfam Name: No apical meristem (NAM) protein Pfam Description: No apical meristem (NAM) protein
  misc_feature (1)..(478): Homolog of NCBI NO: 18398895 NR Description: expressed protein [Arabidopsis thaliana] unknown protein [Arabidopsis thaliana]
  misc_feature (1)..(478): Homolog of NCBI NO: 21593389 NR Description: NAC, putative [Arabidopsis thaliana]
  misc_feature (1)..(478): Homolog of NCBI NO: 8567779 NR Description: NAC, putative [Arabidopsis thaliana]
  misc_feature (1)..(475): Homolog of NCBI NO: 15237699 NR Description: NAC2 protein [Arabidopsis thaliana]
  misc_feature (1)..(475): Homolog of NCBI NO: 6456751 NR Description: NAC2 [Arabidopsis thaliana]
  misc_feature (121)..(478): Homolog of NCBI NO: 15237699 NR Description: NAC2 protein [Arabidopsis thaliana]
  misc_feature (1)..(234): Homolog of NCBI NO: 21105746 NR Description: nam-like protein 9 [Petunia x hybrida]
  misc_feature (249)..(406): Homolog of NCBI NO: 21105746 NR Description: nam-like protein 9 [Petunia x hybrida]
  misc_feature (107)..(450): Homolog of NCBI NO: 28188643 NR Description: unknown protein [Arabidopsis lyrata] unknown protein [Arabidopsis lyrata] >gi|28188647|gb|AAN46249.1|
  misc_feature (107)..(450): Homolog of NCBI NO: 28188649 NR Description: unknown protein [Arabidopsis lyrata]

SEQ ID NO: 102495 - DNA, 1280 bp, Arabidopsis thaliana
  misc_feature (1)..(1280): Ceres Seq. ID no. 13610447
  misc_feature: MA Experiment ID: 108576 Result: Down-regulated in Transcription
  misc_feature: MA Experiment 108576 PARAMETER Experiment Name: At_42deg_Heat_cDNA_P Parameter: Temperature (deg C) Value: 42 vs. 22
  misc_feature: MA Experiment 108576 PARAMETER Experiment Name: At_42deg_Heat_cDNA_P Parameter: Timepoint (hr) Value: 1
  misc_feature: MA Experiment 108576 PARAMETER Experiment Name: At_42deg_Heat_cDNA_P Parameter: Tissue Value: Aerial
  misc_feature: MA Experiment ID: 108595 Result: Down-regulated in Transcription
  misc_feature: MA Experiment 108595 PARAMETER Experiment Name: At_Ler-pi_Ovule_cDNA_P Parameter: Plant Line Value: null
  misc_feature: MA Experiment ID: 20000069 Result: Up-regulated in Transcription
  misc_feature: MA Experiment 20000069 PARAMETER Experiment Name: At_100uM_ABA_Mutants_cDNA_P Parameter: Plant Line Value: CS23
  misc_feature: MA Experiment 20000069 PARAMETER Experiment Name: At_100uM_ABA_Mutants_cDNA_P Parameter: Timepoint (hr) Value: 6
  misc_feature: MA Experiment 20000069 PARAMETER Experiment Name: At_100uM_ABA_Mutants_cDNA_P Parameter: Tissue Value: Aerial
  misc_feature: MA Experiment 20000069 PARAMETER Experiment Name: At_100uM_ABA_Mutants_cDNA_P Parameter: Treatment Value: 100uM ABA vs. No Treatment
  misc_feature: MA Experiment ID: 20000089 Result: Up-regulated in Transcription
  misc_feature: MA Experiment ID: 20000113 Result: Down-regulated in Transcription
  misc_feature: MA Experiment 20000113 PARAMETER Experiment Name: At_42deg_Heat_cDNA_P Parameter: Temperature (deg C) Value: 42 vs. 22
  misc_feature: MA Experiment 20000113 PARAMETER Experiment Name: At_42deg_Heat_cDNA_P Parameter: Timepoint (hr) Value: 8
  misc_feature: MA Experiment 20000113 PARAMETER Experiment Name: At_42deg_Heat_cDNA_P Parameter: Tissue Value: Aerial
  misc_feature: MA Experiment ID: 20000166 Result: Down-regulated in Transcription
  misc_feature: MA Experiment 20000166 PARAMETER Experiment Name: At_100uM_ABA_P Parameter: Age (day) Value: 14
  misc_feature: MA Experiment 20000166 PARAMETER Experiment Name: At_100uM_ABA_P Parameter: Organism Value: A. thaliana
  misc_feature: MA Experiment 20000166 PARAMETER Experiment Name: At_100uM_ABA_P Parameter: Plant Line Value: WS
  misc_feature: MA Experiment 20000166 PARAMETER Experiment Name: At_100uM_ABA_P Parameter: Timepoint (hr) Value: 1
  misc_feature: MA Experiment 20000166 PARAMETER Experiment Name: At_100uM_ABA_P Parameter: Tissue Value: Aerial
  misc_feature: MA Experiment 20000166 PARAMETER Experiment Name: At_100uM_ABA_P Parameter: Treatment Value: 100uM ABA vs. No Treatment
  misc_feature: MA Experiment ID: 20000173 Result: Down-regulated in Transcription
  misc_feature: MA Experiment 20000173 PARAMETER Experiment Name: At_42deg_Heat_P Parameter: Age (day) Value: 14
  misc_feature: MA Experiment 20000173 PARAMETER Experiment Name: At_42deg_Heat_P Parameter: Organism Value: A. thaliana
  misc_feature: MA Experiment 20000173 PARAMETER Experiment Name: At_42deg_Heat_P Parameter: Plant Line Value: WS
  misc_feature: MA Experiment 20000173 PARAMETER Experiment Name: At_42deg_Heat_P Parameter: Temperature (deg C) Value: 42 vs. 22
  misc_feature: MA Experiment 20000173 PARAMETER Experiment Name: At_42deg_Heat_P Parameter: Timepoint (hr) Value: 6
  misc_feature: MA Experiment 20000173 PARAMETER Experiment Name: At_42deg_Heat_P Parameter: Tissue Value: Aerial
  misc_feature: MA Experiment ID: 20000184 Result: Down-regulated in Transcription
  misc_feature: MA Experiment 20000184 PARAMETER Experiment Name: At_Shoots__P Parameter: Age (day) Value: 7
  misc_feature: MA Experiment 20000184 PARAMETER Experiment Name: At_Shoots__P Parameter: Tissue Value: Shoots vs. Whole Plant
  misc_feature: MA Experiment ID: 20000234 Result: Down-regulated in Transcription
  misc_feature: MA Experiment 20000234 PARAMETER Experiment Name: At_Siliques_P Parameter: Age (day) Value: 21
  misc_feature: MA Experiment 20000234 PARAMETER Experiment Name: At_Siliques_P Parameter: Organism Value: A. thaliana
  misc_feature: MA Experiment 20000234 PARAMETER Experiment Name: At_Siliques_P Parameter: Plant Line Value: WS
  misc_feature: MA Experiment 20000234 PARAMETER Experiment Name: At_Siliques_P Parameter: Tissue Value: Less Than 5mm Siliques vs. Whole Plant
  misc_feature: MA Experiment ID: 20001248 Result: Up-regulated in Transcription
  misc_feature: MA Experiment 20001248 PARAMETER Experiment Name: At_Far-red-induction_P Parameter: Age (day) Value: 7
  misc_feature: MA Experiment 20001248 PARAMETER Experiment Name: At_Far-red-induction_P Parameter: Light Value: Far-red vs. White
  misc_feature: MA Experiment 20001248 PARAMETER Experiment Name: At_Far-red-induction_P Parameter: Organism Value: A. thaliana
  misc_feature: MA Experiment 20001248 PARAMETER Experiment Name: At_Far-red-induction_P Parameter: Plant Line Value: Columbia
  misc_feature: MA Experiment 20001248 PARAMETER Experiment Name: At_Far-red-induction_P Parameter: Timepoint (hr) Value: 4
  misc_feature: MA Experiment 20001248 PARAMETER Experiment Name: At_Far-red-induction_P Parameter: Tissue Value: Whole Plant
  misc_feature: MA Experiment ID: 20001555 Result: Down-regulated in Transcription
  misc_feature: MA Experiment 20001555 PARAMETER Experiment Name: At_Drought_Soil_Dry_P Parameter: Age (day) Value: 24
  misc_feature: MA Experiment 20001555 PARAMETER Experiment Name: At_Drought_Soil_Dry_P Parameter: Organism Value: A. thaliana
  misc_feature: MA Experiment 20001555 PARAMETER Experiment Name: At_Drought_Soil_Dry_P Parameter: Plant Line Value: WS
  misc_feature: MA Experiment 20001555 PARAMETER Experiment Name: At_Drought_Soil_Dry_P Parameter: Post Timepoint (hr) Value: None
  misc_feature: MA Experiment 20001555 PARAMETER Experiment Name: At_Drought_Soil_Dry_P Parameter: Post-Treatment Value: None
  misc_feature: MA Experiment 20001555 PARAMETER Experiment Name: At_Drought_Soil_Dry_P Parameter: Timepoint (day) Value: 10
  misc_feature: MA Experiment 20001555 PARAMETER Experiment Name: At_Drought_Soil_Dry_P Parameter: Treatment Value: Drought vs. No Drought
  misc_feature: MA Experiment ID: 20001556 Result: Down-regulated in Transcription
  misc_feature: MA Experiment 20001556 PARAMETER Experiment Name: At_Drought_Soil_Dry_P Parameter: Age (day) Value: 26
  misc_feature: MA Experiment 20001556 PARAMETER Experiment Name: At_Drought_Soil_Dry_P Parameter: Organism Value: A. thaliana
  misc_feature: MA Experiment 20001556 PARAMETER Experiment Name: At_Drought_Soil_Dry_P Parameter: Plant Line Value: WS
  misc_feature: MA Experiment 20001556 PARAMETER Experiment Name: At_Drought_Soil_Dry_P Parameter: Post Timepoint (hr) Value: None
  misc_feature: MA Experiment 20001556 PARAMETER Experiment Name: At_Drought_Soil_Dry_P Parameter: Post-Treatment Value: None
  misc_feature: MA Experiment 20001556 PARAMETER Experiment Name: At_Drought_Soil_Dry_P Parameter: Timepoint (day) Value: 12
  misc_feature: MA Experiment 20001556 PARAMETER Experiment Name: At_Drought_Soil_Dry_P Parameter: Treatment Value: Drought vs. No Drought
  misc_feature: MA Experiment ID: 20001557 Result: Down-regulated in Transcription
  misc_feature: MA Experiment 20001557 PARAMETER Experiment Name: At_Drought_Soil_Dry_P Parameter: Age (day) Value: 27
  misc_feature: MA Experiment 20001557 PARAMETER Experiment Name: At_Drought_Soil_Dry_P Parameter: Organism Value: A. thaliana
  misc_feature: MA Experiment 20001557 PARAMETER Experiment Name: At_Drought_Soil_Dry_P Parameter: Plant Line Value: WS
  misc_feature: MA Experiment 20001557 PARAMETER Experiment Name: At_Drought_Soil_Dry_P Parameter: Post Timepoint (hr) Value: 3
  misc_feature: MA Experiment 20001557 PARAMETER Experiment Name: At_Drought_Soil_Dry_P Parameter: Post-Treatment Value: Re-Water vs. No Drought
  misc_feature: MA Experiment 20001557 PARAMETER Experiment Name: At_Drought_Soil_Dry_P Parameter: Timepoint (day) Value: 13
  misc_feature: MA Experiment 20001557 PARAMETER Experiment Name: At_Drought_Soil_Dry_P Parameter: Treatment Value: Drought vs. No Drought
  misc_feature: MA Experiment ID: 20001560 Result: Down-regulated in Transcription
  misc_feature: MA Experiment 20001560 PARAMETER Experiment Name: At_Drought_Soil_Dry_P Parameter: Age (day) Value: 28
  misc_feature: MA Experiment 20001560 PARAMETER Experiment Name: At_Drought_Soil_Dry_P Parameter: Organism Value: A. thaliana
  misc_feature: MA Experiment 20001560 PARAMETER Experiment Name: At_Drought_Soil_Dry_P Parameter: Plant Line Value: WS
  misc_feature: MA Experiment 20001560 PARAMETER Experiment Name: At_Drought_Soil_Dry_P Parameter: Post Timepoint (hr) Value: None
  misc_feature: MA Experiment 20001560 PARAMETER Experiment Name: At_Drought_Soil_Dry_P Parameter: Post-Treatment Value: None
  misc_feature: MA Experiment 20001560 PARAMETER Experiment Name: At_Drought_Soil_Dry_P Parameter: Timepoint (day) Value: 14
  misc_feature: MA Experiment 20001560 PARAMETER Experiment Name: At_Drought_Soil_Dry_P Parameter: Treatment Value: Drought vs. No Drought
  misc_feature: MA Experiment ID: 20001904 Result: Down-regulated in Transcription
  misc_feature: MA Experiment 20001904 PARAMETER Experiment Name: At_Drought_Reproduction_P Parameter: Age (day) Value: 37
  misc_feature: MA Experiment 20001904 PARAMETER Experiment Name: At_Drought_Reproduction_P Parameter: Organism Value: A. thaliana
  misc_feature: MA Experiment 20001904 PARAMETER Experiment Name: At_Drought_Reproduction_P Parameter: Plant Line Value: WS
  misc_feature: MA Experiment 20001904 PARAMETER Experiment Name: At_Drought_Reproduction_P Parameter: Timepoint (day) Value: 7
  misc_feature: MA Experiment 20001904 PARAMETER Experiment Name: At_Drought_Reproduction_P Parameter: Tissue Value: Rosettes
  misc_feature: MA Experiment 20001904 PARAMETER Experiment Name: At_Drought_Reproduction_P Parameter: Treatment Value: Drought vs. No Drought
  misc_feature: MA Experiment ID: 20001905 Result: Down-regulated in Transcription
  misc_feature: MA Experiment 20001905 PARAMETER Experiment Name: At_Drought_Reproduction_P Parameter: Age (day) Value: 40
  misc_feature: MA Experiment 20001905 PARAMETER Experiment Name: At_Drought_Reproduction_P Parameter: Organism Value: A. thaliana
  misc_feature: MA Experiment 20001905 PARAMETER Experiment Name: At_Drought_Reproduction_P Parameter: Plant Line Value: WS
  misc_feature: MA Experiment 20001905 PARAMETER Experiment Name: At_Drought_Reproduction_P Parameter: Timepoint (day) Value: 10
  misc_feature: MA Experiment 20001905 PARAMETER Experiment Name: At_Drought_Reproduction_P Parameter: Tissue Value: Rosettes
  misc_feature: MA Experiment 20001905 PARAMETER Experiment Name: At_Drought_Reproduction_P Parameter: Treatment Value: Drought vs. No Drought
  misc_feature: MA Experiment ID: 20001906 Result: Down-regulated in Transcription
  misc_feature: MA Experiment 20001906 PARAMETER Experiment Name: At_Drought_Reproduction_P Parameter: Age (day) Value: 35
  misc_feature: MA Experiment 20001906 PARAMETER Experiment Name: At_Drought_Reproduction_P Parameter: Organism Value: A. thaliana
  misc_feature: MA Experiment 20001906 PARAMETER Experiment Name: At_Drought_Reproduction_P Parameter: Plant Line Value: WS
  misc_feature: MA Experiment 20001906 PARAMETER Experiment Name: At_Drought_Reproduction_P Parameter: Timepoint (day) Value: 5
  misc_feature: MA Experiment 20001906 PARAMETER Experiment Name: At_Drought_Reproduction_P Parameter: Tissue Value: Siliques
  misc_feature: MA Experiment 20001906 PARAMETER Experiment Name: At_Drought_Reproduction_P Parameter: Treatment Value: Drought vs. No Drought
  misc_feature: MA Experiment ID: 20001907 Result: Down-regulated in Transcription
  misc_feature: MA Experiment 20001907 PARAMETER Experiment Name: At_Drought_Reproduction_P Parameter: Age (day) Value: 37
  misc_feature: MA Experiment 20001907 PARAMETER Experiment Name: At_Drought_Reproduction_P Parameter: Organism Value: A. thaliana
  misc_feature: MA Experiment 20001907 PARAMETER Experiment Name: At_Drought_Reproduction_P Parameter: Plant Line Value: WS
  misc_feature: MA Experiment 20001907 PARAMETER Experiment Name: At_Drought_Reproduction_P Parameter: Timepoint (day) Value: 7
  misc_feature: MA Experiment 20001907 PARAMETER Experiment Name: At_Drought_Reproduction_P Parameter: Tissue Value: Siliques
  misc_feature: MA Experiment 20001907 PARAMETER Experiment Name: At_Drought_Reproduction_P Parameter: Treatment Value: Drought vs. No Drought
  misc_feature: MA Experiment ID: 20001911 Result: Down-regulated in Transcription
  misc_feature: MA Experiment 20001911 PARAMETER Experiment Name: At_Drought_Reproduction_P Parameter: Age (day) Value: 40
  misc_feature: MA Experiment 20001911 PARAMETER Experiment Name: At_Drought_Reproduction_P Parameter: Organism Value: A. thaliana
  misc_feature: MA Experiment 20001911 PARAMETER Experiment Name: At_Drought_Reproduction_P Parameter: Plant Line Value: WS
  misc_feature: MA Experiment 20001911 PARAMETER Experiment Name: At_Drought_Reproduction_P Parameter: Timepoint (day) Value: 10
  misc_feature: MA Experiment 20001911 PARAMETER Experiment Name: At_Drought_Reproduction_P Parameter: Tissue Value: Flowers
  misc_feature: MA Experiment 20001911 PARAMETER Experiment Name: At_Drought_Reproduction_P Parameter: Treatment Value: Drought vs. No Drought
atcttttatttttcttttagaaaccaaacttttcagatttctctctctccatttggcgatagaagaagtcatgtaccaatcatcatcctccacgtcatcatcatcgcagagatcatcgcttcccggcggcggaggactgatccgttacggctcagctccgggatcgtttctaaactctgtggttgacgaagtcatcggaggaggctcatcaaacgctcgtgacttcaccggctatcaaccgtcgtcggataacttcatcggtaactttttcaccggagctgctgactcatcctcgctgagatccgattcgacgacttgtggagtcaacaactcatccgacggacagaaacagctaggcaataacaataataataatagtaataaagatatcttcctcgacagatcctacggtggattcaacgagatctcgcaacaacacaagagcaacgacatcggaggaggaaacagctcaggatcttactctctcgctagacaacgtagctctcccgccgatttcttcacctacctcgcctcagataaaaacaatttctcgttgaaccaaccaaccagtgattatagtccgcaaggagggtctaatgggggacgaggacattccagattgaagtctcagctaagcttcacgaatcacgactctctggctcggatcaacgaggtcaatgagaccccagtccacgacggttcaggccattcgttttctgcggctagctttggtgcagccactactgattcttgggatgacggttccggttcgatagggtttaccgtgactaggcccagtaaacgatccaaggacatggactctggtctcttttcgcagtatagtcttccttcagacacttcaatgaactacatggataacttcatgcagcttccagaagattctgtaccctgcaaaatccgggccaaacgcggctgcgccacccatcctagaagcatcgctgagcgggagaggagaacgagaataagtgggaagctaaagaagctacaagatcttgtccccaacatggataagcaaacaagctattcagacatgctggatttagctgtacaacacatcaaaggccttcagcatcaacttcagaatttgaaaaaagatcaagagaattgcacgtgtgggtgcagtgagaaaccaagctagctcaaacccaaaggtagggtcatcctaattttatttgcattgttccgattttatcatatgagagaattagagaagatgtaaataaaatagattatattaaatgtctaatcctcttataatt

SEQ ID NO: 102496 - protein, 385 aa, Arabidopsis thaliana; identical to SEQ ID NO: 35004
  peptide (1)..(385): Ceres Seq. ID no. 13610448
  misc_feature (315)..(363): Pfam Name: Helix-loop-helix DNA-binding domain Pfam Description: Helix-loop-helix DNA-binding domain
  misc_feature (24)..(385): Homolog of NCBI NO: 18390573 NR Description: bHLH protein [Arabidopsis thaliana]
  misc_feature (24)..(385): Homolog of NCBI NO: 21554238 NR Description: Contains similarity to bHLH transcription factor
  misc_feature (24)..(344): Homolog of NCBI NO: 25406865 NR Description: hypothetical protein [imported] - Arabidopsis >gi|6850309|gb|AAF29386.1|AC009999_6 Contains similarity to bHLH
  misc_feature (149)..(367): Homolog of NCBI NO: 15224227 NR Description: bHLH protein [Arabidopsis thaliana]
  misc_feature (177)..(382): Homolog of NCBI NO: 38345229 NR Description: OSJNBa0084K20.3 [Oryza sativa (japonica
  misc_feature (223)..(378): Homolog of NCBI NO: 34907702 NR Description: P0035F12.11 [Oryza sativa (japonica
  misc_feature (152)..(383): Homolog of NCBI NO: 15219606 NR Description: bHLH protein [Arabidopsis thaliana]
  misc_feature (107)..(385): Homolog of NCBI NO: 15227914 NR Description: bHLH protein family [Arabidopsis thaliana]
  misc_feature (275)..(383): Homolog of NCBI NO: 19401700 NR Description: transcription factor RAU1 [Oryza sativa]
  misc_feature (152)..(378): Homolog of NCBI NO: 15233768 NR Description: bHLH protein family [Arabidopsis thaliana]

SEQ ID NO: 102497 - protein, 362 aa, Arabidopsis thaliana; identical to SEQ ID NO: 35005
  peptide (1)..(362): Ceres Seq. ID no. 13610449
  misc_feature (292)..(340): Pfam Name: Helix-loop-helix DNA-binding domain Pfam Description: Helix-loop-helix DNA-binding domain
  misc_feature (1)..(362): Homolog of NCBI NO: 18390573 NR Description: bHLH protein [Arabidopsis thaliana]
  misc_feature (1)..(362): Homolog of NCBI NO: 21554238 NR Description: Contains similarity to bHLH transcription factor
  misc_feature (1)..(321): Homolog of NCBI NO: 25406865 NR Description: hypothetical protein [imported] - Arabidopsis >gi|6850309|gb|AAF29386.1|AC009999_6 Contains similarity to bHLH
  misc_feature (126)..(344): Homolog of NCBI NO: 15224227 NR Description: bHLH protein [Arabidopsis thaliana]
  misc_feature (154)..(359): Homolog of NCBI NO: 38345229 NR Description: OSJNBa0084K20.3 [Oryza sativa (japonica
  misc_feature (200)..(355): Homolog of NCBI NO: 34907702 NR Description: P0035F12.11 [Oryza sativa (japonica
  misc_feature (129)..(360): Homolog of NCBI NO: 15219606 NR Description: bHLH protein [Arabidopsis thaliana]
  misc_feature (84)..(362): Homolog of NCBI NO: 15227914 NR Description: bHLH protein family [Arabidopsis thaliana]
  misc_feature (252)..(360): Homolog of NCBI NO: 19401700 NR Description: transcription factor RAU1 [Oryza sativa]
  misc_feature (129)..(355): Homolog of NCBI NO: 15233768 NR Description: bHLH protein family [Arabidopsis thaliana]

SEQ ID NO: 102498 - DNA, 796 bp, Arabidopsis thaliana
  misc_feature (1)..(796): Ceres Seq. ID no. 13610458
  misc_feature: MA Experiment ID: 108595 Result: Up-regulated in Transcription
  misc_feature: MA Experiment 108595 PARAMETER Experiment Name: At_Ler-pi_Ovule_cDNA_P Parameter: Plant Line Value: null
  misc_feature: MA Experiment ID: 108609 Result: Up-regulated in Transcription
  misc_feature: MA Experiment 108609 PARAMETER Experiment Name: At_100uM_ABA_cDNA_P Parameter: Timepoint (hr) Value: 24
  misc_feature: MA Experiment 108609 PARAMETER Experiment Name: At_100uM_ABA_cDNA_P Parameter: Tissue Value: Aerial
  misc_feature: MA Experiment 108609 PARAMETER Experiment Name: At_100uM_ABA_cDNA_P Parameter: Treatment Value: 100uM ABA vs. No Treatment
  misc_feature: MA Experiment ID: 20000069 Result: Up-regulated in Transcription
  misc_feature: MA Experiment 20000069 PARAMETER Experiment Name: At_100uM_ABA_Mutants_cDNA_P Parameter: Plant Line Value: CS23
  misc_feature: MA Experiment 20000069 PARAMETER Experiment Name: At_100uM_ABA_Mutants_cDNA_P Parameter: Timepoint (hr) Value: 6
  misc_feature: MA Experiment 20000069 PARAMETER Experiment Name: At_100uM_ABA_Mutants_cDNA_P Parameter: Tissue Value: Aerial
  misc_feature: MA Experiment 20000069 PARAMETER Experiment Name: At_100uM_ABA_Mutants_cDNA_P Parameter: Treatment Value: 100uM ABA vs. No Treatment
  misc_feature: MA Experiment ID: 20000184 Result: Down-regulated in Transcription
  misc_feature: MA Experiment 20000184 PARAMETER Experiment Name: At_Shoots__P Parameter: Age (day) Value: 7
  misc_feature: MA Experiment 20000184 PARAMETER Experiment Name: At_Shoots__P Parameter: Tissue Value: Shoots vs. Whole Plant
  misc_feature: MA Experiment ID: 20000185 Result: Down-regulated in Transcription
  misc_feature: MA Experiment 20000185 PARAMETER Experiment Name: At_Roots__P Parameter: Age (day) Value: 7 vs. 21
  misc_feature: MA Experiment 20000185 PARAMETER Experiment Name: At_Roots__P Parameter: Organism Value: A. thaliana
  misc_feature: MA Experiment 20000185 PARAMETER Experiment Name: At_Roots__P Parameter: Tissue Value: Roots vs. Whole Plant
  misc_feature: MA Experiment ID: 20000265 Result: Up-regulated in Transcription
  misc_feature: MA Experiment 20000265 PARAMETER Experiment Name: At_Open_Flower_P Parameter: Age (day) Value: 21
  misc_feature: MA Experiment 20000265 PARAMETER Experiment Name: At_Open_Flower_P Parameter: Plant Line Value: WS
  misc_feature: MA Experiment 20000265 PARAMETER Experiment Name: At_Open_Flower_P Parameter: Tissue Value: Closed Flower vs. Whole Plant
  misc_feature: MA Experiment ID: 20000438 Result: Down-regulated in Transcription
  misc_feature: MA Experiment 20000438 PARAMETER Experiment Name: At_Shoots__P Parameter: Age (day) Value: 14
  misc_feature: MA Experiment 20000438 PARAMETER Experiment Name: At_Shoots__P Parameter: Tissue Value: Shoots vs. Whole Plant
  misc_feature: MA Experiment ID: 20000439 Result: Down-regulated in Transcription
  misc_feature: MA Experiment 20000439 PARAMETER Experiment Name: At_Roots__P Parameter: Age (day) Value: 14 vs. 21
  misc_feature: MA Experiment 20000439 PARAMETER Experiment Name: At_Roots__P Parameter: Organism Value: A. thaliana
  misc_feature: MA Experiment 20000439 PARAMETER Experiment Name: At_Roots__P Parameter: Tissue Value: Roots vs. Whole Plant
  misc_feature: MA Experiment ID: 20000453 Result: Up-regulated in Transcription
  misc_feature: MA Experiment 20000453 PARAMETER Experiment Name: At_100uM_ABA_P Parameter: Age (day) Value: 15
  misc_feature: MA Experiment 20000453 PARAMETER Experiment Name: At_100uM_ABA_P Parameter: Organism Value: A. thaliana
  misc_feature: MA Experiment 20000453 PARAMETER Experiment Name: At_100uM_ABA_P Parameter: Plant Line Value: WS
  misc_feature: MA Experiment 20000453 PARAMETER Experiment Name: At_100uM_ABA_P Parameter: Timepoint (hr) Value: 24
  misc_feature: MA Experiment 20000453 PARAMETER Experiment Name: At_100uM_ABA_P Parameter: Tissue Value: Aerial
  misc_feature: MA Experiment 20000453 PARAMETER Experiment Name: At_100uM_ABA_P Parameter: Treatment Value: 100uM ABA vs. No Treatment
  misc_feature: MA Experiment ID: 20000456 Result: Down-regulated in Transcription
  misc_feature: MA Experiment 20000456 PARAMETER Experiment Name: At_100uM_BA_P Parameter: Age (day) Value: 14
  misc_feature: MA Experiment 20000456 PARAMETER Experiment Name: At_100uM_BA_P Parameter: Organism Value: A. thaliana
  misc_feature: MA Experiment 20000456 PARAMETER Experiment Name: At_100uM_BA_P Parameter: Plant Line Value: WS
  misc_feature: MA Experiment 20000456 PARAMETER Experiment Name: At_100uM_BA_P Parameter: Timepoint (hr) Value: 6
  misc_feature: MA Experiment 20000456 PARAMETER Experiment Name: At_100uM_BA_P Parameter: Tissue Value: Aerial
  misc_feature: MA Experiment 20000456 PARAMETER Experiment Name: At_100uM_BA_P Parameter: Treatment Value: 100uM BA vs. No Treatment
  misc_feature: MA Experiment ID: 20000573 Result: Down-regulated in Transcription
  misc_feature: MA Experiment 20000573 PARAMETER Experiment Name: At_100uM_ABA_Mutants__P Parameter: Organism Value: A. thaliana
  misc_feature: MA Experiment 20000573 PARAMETER Experiment Name: At_100uM_ABA_Mutants__P Parameter: Plant Line Value: CS22 vs. Ler wt
  misc_feature: MA Experiment 20000573 PARAMETER Experiment Name: At_100uM_ABA_Mutants__P Parameter: Timepoint (hr) Value: N/A
  misc_feature: MA Experiment 20000573 PARAMETER Experiment Name: At_100uM_ABA_Mutants__P Parameter: Tissue Value: Whole Plant
  misc_feature: MA Experiment 20000573 PARAMETER Experiment Name: At_100uM_ABA_Mutants__P Parameter: Treatment Value: None
  misc_feature: MA Experiment ID: 20000574 Result: Down-regulated in Transcription
  misc_feature: MA Experiment 20000574 PARAMETER Experiment Name: At_100uM_ABA_Mutants__P Parameter: Organism Value: A. thaliana
  misc_feature: MA Experiment 20000574 PARAMETER Experiment Name: At_100uM_ABA_Mutants__P Parameter: Plant Line Value: CS23 vs. Ler wt
  misc_feature: MA Experiment 20000574 PARAMETER Experiment Name: At_100uM_ABA_Mutants__P Parameter: Timepoint (hr) Value: N/A
  misc_feature: MA Experiment 20000574 PARAMETER Experiment Name: At_100uM_ABA_Mutants__P Parameter: Tissue Value: Whole Plant
  misc_feature: MA Experiment 20000574 PARAMETER Experiment Name: At_100uM_ABA_Mutants__P Parameter: Treatment Value: None
  misc_feature: MA Experiment ID: 20000794 Result: Down-regulated in Transcription
  misc_feature: MA Experiment 20000794 PARAMETER Experiment Name: At_Petals_P Parameter: Age (day) Value: 23-25 days
  misc_feature: MA Experiment 20000794 PARAMETER Experiment Name: At_Petals_P Parameter: Plant Line Value: WS
  misc_feature: MA Experiment 20000794 PARAMETER Experiment Name: At_Petals_P Parameter: Tissue Value: Petals vs. Whole plant
  misc_feature: MA Experiment ID: 20001554 Result: Up-regulated in Transcription
  misc_feature: MA Experiment 20001554 PARAMETER Experiment Name: At_Drought_Soil_Dry_P Parameter: Age (day) Value: 21
  misc_feature: MA Experiment 20001554 PARAMETER Experiment Name: At_Drought_Soil_Dry_P Parameter: Organism Value: A. thaliana
  misc_feature: MA Experiment 20001554 PARAMETER Experiment Name: At_Drought_Soil_Dry_P Parameter: Plant Line Value: WS
  misc_feature: MA Experiment 20001554 PARAMETER Experiment Name: At_Drought_Soil_Dry_P Parameter: Post Timepoint (hr) Value: None
  misc_feature: MA Experiment 20001554 PARAMETER Experiment Name: At_Drought_Soil_Dry_P Parameter: Post-Treatment Value: None
  misc_feature: MA Experiment 20001554 PARAMETER Experiment Name: At_Drought_Soil_Dry_P Parameter: Timepoint (day) Value: 7
  misc_feature: MA Experiment 20001554 PARAMETER Experiment Name: At_Drought_Soil_Dry_P Parameter: Treatment Value: Drought vs. No Drought
  misc_feature: MA Experiment ID: 20001555 Result: Up-regulated in Transcription
  misc_feature: MA Experiment 20001555 PARAMETER Experiment Name: At_Drought_Soil_Dry_P Parameter: Age (day) Value: 24
  misc_feature: MA Experiment 20001555 PARAMETER Experiment Name: At_Drought_Soil_Dry_P Parameter: Organism Value: A. thaliana
  misc_feature: MA Experiment 20001555 PARAMETER Experiment Name: At_Drought_Soil_Dry_P Parameter: Plant Line Value: WS
  misc_feature: MA Experiment 20001555 PARAMETER Experiment Name: At_Drought_Soil_Dry_P Parameter: Post Timepoint (hr) Value: None
  misc_feature: MA Experiment 20001555 PARAMETER Experiment Name: At_Drought_Soil_Dry_P Parameter: Post-Treatment Value: None
  misc_feature: MA Experiment 20001555 PARAMETER Experiment Name: At_Drought_Soil_Dry_P Parameter: Timepoint (day) Value: 10
  misc_feature: MA Experiment 20001555 PARAMETER Experiment Name: At_Drought_Soil_Dry_P Parameter: Treatment Value: Drought vs. No Drought
  misc_feature: MA Experiment ID: 20001557 Result: Down-regulated in Transcription
  misc_feature: MA Experiment 20001557 PARAMETER Experiment Name: At_Drought_Soil_Dry_P Parameter: Age (day) Value: 27
  misc_feature: MA Experiment 20001557 PARAMETER Experiment Name: At_Drought_Soil_Dry_P Parameter: Organism Value: A. thaliana
  misc_feature: MA Experiment 20001557 PARAMETER Experiment Name: At_Drought_Soil_Dry_P Parameter: Plant Line Value: WS
  misc_feature: MA Experiment 20001557 PARAMETER Experiment Name: At_Drought_Soil_Dry_P Parameter: Post Timepoint (hr) Value: 3
  misc_feature: MA Experiment 20001557 PARAMETER Experiment Name: At_Drought_Soil_Dry_P Parameter: Post-Treatment Value: Re-Water vs. No Drought
  misc_feature: MA Experiment 20001557 PARAMETER Experiment Name: At_Drought_Soil_Dry_P Parameter: Timepoint (day) Value: 13
  misc_feature: MA Experiment 20001557 PARAMETER Experiment Name: At_Drought_Soil_Dry_P Parameter: Treatment Value: Drought vs. No Drought
  misc_feature: MA Experiment ID: 20001559 Result: Up-regulated in Transcription
  misc_feature: MA Experiment 20001559 PARAMETER Experiment Name: At_Drought_Soil_Dry_P Parameter: Age (day) Value: 28
  misc_feature: MA Experiment 20001559 PARAMETER Experiment Name: At_Drought_Soil_Dry_P Parameter: Organism Value: A. thaliana
  misc_feature: MA Experiment 20001559 PARAMETER Experiment Name: At_Drought_Soil_Dry_P Parameter: Plant Line Value: WS
  misc_feature: MA Experiment 20001559 PARAMETER Experiment Name: At_Drought_Soil_Dry_P Parameter: Post Timepoint (hr) Value: 29
  misc_feature: MA Experiment 20001559 PARAMETER Experiment Name: At_Drought_Soil_Dry_P Parameter: Post-Treatment Value: Re-Water vs. No Drought
  misc_feature: MA Experiment 20001559 PARAMETER Experiment Name: At_Drought_Soil_Dry_P Parameter: Timepoint (day) Value: 14
  misc_feature: MA Experiment 20001559 PARAMETER Experiment Name: At_Drought_Soil_Dry_P Parameter: Treatment Value: Drought vs. No Drought
aacctattagagtttccttcctccaacaaaccatctttataagactccaaaatggagggtaagagatcacaaggacaaggttacatgaaaaagaagtcttaccttgtggaagaagatatggagactgatacggatgaagaagaggaagtaggtagggatagagttagagggtctagaggtagcatcaatcgtggtggctcgttgcggctttgccaagtagatagatgcacagctgatatgaaagaggcaaaactgtatcaccggagacacaaagtgtgtgaagttcatgcaaaggcatcttctgtctttctctcaggacttaaccaacgcttttgtcaacaatgcagtaggtttcatgacctccaagagtttgatgaagctaagagaagttgcaggaggcgcttagctggacacaatgagcgaagaaggaagagctctggtgagagtacttatggagaaggatcaggtcggagaggaatcaatggtcaggtggtgatgcagaatcaagaaagatcaagggtagagatgacacttcctatgccaaactcatcattcaagcgaccacagattagatagagaagctgtctgctctctctcttctgtcatctaaacttctctcttagaatcctaaaattgtggtatctaacaatgttatagagaaataaataactaccactctctctagtactctctaatgttatcagctatatgcaaacgctaagactatacttgaaccttgagtgttatcttgtatgtttcaaagatatggctaatgatatgtgtaatacttctacct

SEQ ID NO: 102499 - protein, 174 aa, Arabidopsis thaliana; identical to SEQ ID NO: 28853
  peptide (1)..(174): Ceres Seq. ID no. 13610459
  misc_feature (53)..(131): Pfam Name: SBP domain Pfam Description: SBP domain
  misc_feature (1)..(174): Homolog of NCBI NO: 15219210 NR Description: transcription factor -related [Arabidopsis
  misc_feature (8)..(174): Homolog of NCBI NO: 25456654 NR Description: squamosa promoter binding protein 4 [imported] - thaliana (fragment) >gi|5931661|emb|CAB56584.1| squamosa promoter
  misc_feature (1)..(174): Homolog of NCBI NO: 15232541 NR Description: squamosa promoter binding protein-related 5 thaliana] >gi|25456656|pir||T52607 squamosa promoter binding
  misc_feature (1)..(129): Homolog of NCBI NO: 25456671 NR Description: squamosa promoter binding protein-like 5 - Arabidopsis thaliana (fragment) >gi|6006431|emb|CAB56772.1|
  misc_feature (1)..(138): Homolog of NCBI NO: 30577628 NR Description: squamosa promoter binding like-protein [Betula
  misc_feature (1)..(129): Homolog of NCBI NO: 18403387 NR Description: squamosa-promoter binding protein -related thaliana] >gi|25456648|pir||T52597 squamosa promoter binding
  misc_feature (1)..(129): Homolog of NCBI NO: 25408313 NR Description: probable squamosa-promoter binding protein - Arabidopsis thaliana >gi|8439261|emb|CAB94233.1| Squamosa
  misc_feature (1)..(129): Homolog of NCBI NO: 21618221 NR Description: putative squamosa-promoter binding protein
  misc_feature (6)..(132): Homolog of NCBI NO: 6094239 NR Description: SQUAMOSA-PROMOTER BINDING PROTEIN 1
  misc_feature (39)..(136): Homolog of NCBI NO: 34394700 NR Description: putative squamosa-promoter binding protein [Oryza

SEQ ID NO: 102500 - protein, 163 aa, Arabidopsis thaliana; identical to SEQ ID NO: 28854
  peptide (1)..(163): Ceres Seq. ID no. 13610460
  misc_feature (42)..(120): Pfam Name: SBP domain Pfam Description: SBP domain
  misc_feature (1)..(163): Homolog of NCBI NO: 15219210 NR Description: transcription factor -related [Arabidopsis
  misc_feature (1)..(163): Homolog of NCBI NO: 25456654 NR Description: squamosa promoter binding protein 4 [imported] - thaliana (fragment) >gi|5931661|emb|CAB56584.1| squamosa promoter
  misc_feature (1)..(163): Homolog of NCBI NO: 15232541 NR Description: squamosa promoter binding protein-related 5 thaliana] >gi|25456656|pir||T52607 squamosa promoter binding
  misc_feature (1)..(118): Homolog of NCBI NO: 25456671 NR Description: squamosa promoter binding protein-like 5 - Arabidopsis thaliana (fragment) >gi|6006431|emb|CAB56772.1|
  misc_feature (1)..(127): Homolog of NCBI NO: 30577628 NR Description: squamosa promoter binding like-protein [Betula
  misc_feature (1)..(118): Homolog of NCBI NO: 18403387 NR Description: squamosa-promoter binding protein -related thaliana] >gi|25456648|pir||T52597 squamosa promoter binding
  misc_feature (1)..(118): Homolog of NCBI NO: 25408313 NR Description: probable squamosa-promoter binding protein - Arabidopsis thaliana >gi|8439261|emb|CAB94233.1| Squamosa
  misc_feature (1)..(118): Homolog of NCBI NO: 21618221 NR Description: putative squamosa-promoter binding protein
  misc_feature (1)..(121): Homolog of NCBI NO: 6094239 NR Description: SQUAMOSA-PROMOTER BINDING PROTEIN 1
  misc_feature (28)..(125): Homolog of NCBI NO: 34394700 NR Description: putative squamosa-promoter binding protein [Oryza

SEQ ID NO: 102501 - protein, 152 aa, Arabidopsis thaliana; identical to SEQ ID NO: 28855
  peptide (1)..(152): Ceres Seq. ID no. 13610461
  misc_feature (31)..(109): Pfam Name: SBP domain Pfam Description: SBP domain
  misc_feature (1)..(152): Homolog of NCBI NO: 15219210 NR Description: transcription factor -related [Arabidopsis
  misc_feature (1)..(152): Homolog of NCBI NO: 25456654 NR Description: squamosa promoter binding protein 4 [imported] - thaliana (fragment) >gi|5931661|emb|CAB56584.1| squamosa promoter
  misc_feature (1)..(152): Homolog of NCBI NO: 15232541 NR Description: squamosa promoter binding protein-related 5 thaliana] >gi|25456656|pir||T52607 squamosa promoter binding
  misc_feature (1)..(107): Homolog of NCBI NO: 25456671 NR Description: squamosa promoter binding protein-like 5 - Arabidopsis thaliana (fragment) >gi|6006431|emb|CAB56772.1|
  misc_feature (1)..(116): Homolog of NCBI NO: 30577628 NR Description: squamosa promoter binding like-protein [Betula
  misc_feature (1)..(107): Homolog of NCBI NO: 18403387 NR Description: squamosa-promoter binding protein -related thaliana] >gi|25456648|pir||T52597 squamosa promoter binding
  misc_feature (1)..(107): Homolog of NCBI NO: 25408313 NR Description: probable squamosa-promoter binding protein - Arabidopsis thaliana >gi|8439261|emb|CAB94233.1| Squamosa
  misc_feature (1)..(107): Homolog of NCBI NO: 21618221 NR Description: putative squamosa-promoter binding protein
  misc_feature (1)..(110): Homolog of NCBI NO: 6094239 NR Description: SQUAMOSA-PROMOTER BINDING PROTEIN 1
  misc_feature (17)..(114): Homolog of NCBI NO: 34394700 NR Description: putative squamosa-promoter binding protein [Oryza

SEQ ID NO: 102502 - DNA, 1462 bp, Arabidopsis thaliana
  misc_feature (1)..(1462): Ceres Seq. ID no. 13610517
  misc_feature: MA Experiment ID: 108488 Result: Down-regulated in Transcription
  misc_feature: MA Experiment ID: 20000111 Result: Down-regulated in Transcription
  misc_feature: MA Experiment 20000111 PARAMETER Experiment Name: At_42deg_Heat_cDNA_P Parameter: Temperature (deg C) Value: 42 vs. 22
  misc_feature: MA Experiment 20000111 PARAMETER Experiment Name: At_42deg_Heat_cDNA_P Parameter: Timepoint (hr) Value: 6
  misc_feature: MA Experiment 20000111 PARAMETER Experiment Name: At_42deg_Heat_cDNA_P Parameter: Tissue Value: Aerial
  misc_feature: MA Experiment ID: 20000173 Result: Down-regulated in Transcription
  misc_feature: MA Experiment 20000173 PARAMETER Experiment Name: At_42deg_Heat_P Parameter: Age (day) Value: 14
  misc_feature: MA Experiment 20000173 PARAMETER Experiment Name: At_42deg_Heat_P Parameter: Organism Value: A. thaliana
  misc_feature: MA Experiment 20000173 PARAMETER Experiment Name: At_42deg_Heat_P Parameter: Plant Line Value: WS
  misc_feature: MA Experiment 20000173 PARAMETER Experiment Name: At_42deg_Heat_P Parameter: Temperature (deg C) Value: 42 vs. 22
  misc_feature: MA Experiment 20000173 PARAMETER Experiment Name: At_42deg_Heat_P Parameter: Timepoint (hr) Value: 6
  misc_feature: MA Experiment 20000173 PARAMETER Experiment Name: At_42deg_Heat_P Parameter: Tissue Value: Aerial
  misc_feature: MA Experiment ID: 20000180 Result: Up-regulated in Transcription
  misc_feature: MA Experiment 20000180 PARAMETER Experiment Name: At_Germinating_Seeds_P Parameter: Age (hr) Value: 24 vs. 0
  misc_feature: MA Experiment 20000180 PARAMETER Experiment Name: At_Germinating_Seeds_P Parameter: Tissue Value: Germinating Seeds
  misc_feature: MA Experiment ID: 20000184 Result: Down-regulated in Transcription
  misc_feature: MA Experiment 20000184 PARAMETER Experiment Name: At_Shoots__P Parameter: Age (day) Value: 7
  misc_feature: MA Experiment 20000184 PARAMETER Experiment Name: At_Shoots__P Parameter: Tissue Value: Shoots vs. Whole Plant
  misc_feature: MA Experiment ID: 20000224 Result: Up-regulated in Transcription
  misc_feature: MA Experiment ID: 20000438 Result: Down-regulated in Transcription
  misc_feature: MA Experiment 20000438 PARAMETER Experiment Name: At_Shoots__P Parameter: Age (day) Value: 14
  misc_feature: MA Experiment 20000438 PARAMETER Experiment Name: At_Shoots__P Parameter: Tissue Value: Shoots vs. Whole Plant
  misc_feature: MA Experiment ID: 20001904 Result: Up-regulated in Transcription
  misc_feature: MA Experiment 20001904 PARAMETER Experiment Name: At_Drought_Reproduction_P Parameter: Age (day) Value: 37
  misc_feature: MA Experiment 20001904 PARAMETER Experiment Name: At_Drought_Reproduction_P Parameter: Organism Value: A. thaliana
  misc_feature: MA Experiment 20001904 PARAMETER Experiment Name: At_Drought_Reproduction_P Parameter: Plant Line Value: WS
  misc_feature: MA Experiment 20001904 PARAMETER Experiment Name: At_Drought_Reproduction_P Parameter: Timepoint (day) Value: 7
  misc_feature: MA Experiment 20001904 PARAMETER Experiment Name: At_Drought_Reproduction_P Parameter: Tissue Value: Rosettes
  misc_feature: MA Experiment 20001904 PARAMETER Experiment Name: At_Drought_Reproduction_P Parameter: Treatment Value: Drought vs. No Drought
  misc_feature: MA Experiment ID: 20001905 Result: Up-regulated in Transcription
  misc_feature: MA Experiment 20001905 PARAMETER Experiment Name: At_Drought_Reproduction_P Parameter: Age (day) Value: 40
  misc_feature: MA Experiment 20001905 PARAMETER Experiment Name: At_Drought_Reproduction_P Parameter: Organism Value: A. thaliana
  misc_feature: MA Experiment 20001905 PARAMETER Experiment Name: At_Drought_Reproduction_P Parameter: Plant Line Value: WS
  misc_feature: MA Experiment 20001905 PARAMETER Experiment Name: At_Drought_Reproduction_P Parameter: Timepoint (day) Value: 10
  misc_feature: MA Experiment 20001905 PARAMETER Experiment Name: At_Drought_Reproduction_P Parameter: Tissue Value: Rosettes
  misc_feature: MA Experiment 20001905 PARAMETER Experiment Name: At_Drought_Reproduction_P Parameter: Treatment Value: Drought vs. No Drought
aagggaaacaaaaataaattcctcgagagatagaagtaaaaaaaaaagaaggggattttcgcatttgccctgagcgaaagagagagaatgtatttgacgagttccaggagaaatcagagctagagaaatctagtggtaatggggagagaacttgtagacaaacacatggataagaaagcgaatagtttgacagctagctcgacgggatcttcagatgataataaagtcccaagtccgtctactaatgaagctgcagaggtgaaagaatgcaccgagcagaatttggttgcggatgatgctcgtttgaggcaacaagggataactgagacacctggatcccataaatcttctgttaaacctcgtgttactgcgaaaacaactgttccaaagccgttttccctgtcggctgaaaagcctagaagagcagcggttgataataattcattaggaaatggtgctagccataactcttcttcagcatcaagagtttcacagctaaactctcctttaccaactaggaggataccagatcataagatgcaccatgatgaagaagatagtttttctgttgcttcctcatcagctacatccataagaagttttaaacccaagataacgattggagttgctccaacatttagtagcacatcgcgactggagagacgaagagagttttaccagaagttagaggaaaaacagaaagcacttgaagcagagaaaagagaaaacgagaaaaggcttaaggaagagcaagaagcagtcactaagcaacttaggaagaacatggcttacaaagctaatccggtaccaagtttctaccaagagggtcctccaccgaaacaaccattgaaaaagtttccattgactcggcctaagtcaccaaaccttaaccgtagaaagagctgcagcgacacagttaacgcatcatatcaggaagtgaaggggaagcattgtgctcgacatcgtcacagtgtaggtggttgcaaggatgaagtcaaaacgaacagtgtcccaaggacaccaaatagcagcagcaaagatcagatgagaaagtccaaaaagggaacaccaaagtctgaagaagtacatgaaatgtttaatagtggccatgatggagagactggtgagaatggcgttggtgttgtggaggagtgaagcttcgcgtagttgtagtttcgttttgactaactttggtgaatgagaaaaacaagaaaaatggtgagaagcaactgcaaggagaagaacaggttttagagtgaaagaacaagtttaaagtttgtttgtttgtttgttgtctaatgttctgcagattgattgttctaaatttgattgctaaaatcagctgctctattttcgtatgatcttttcttatctgtttgacaattaatgtgaaatgtatattaaagttgttgttgtatggatcccaaattcccaattattataactagattaatggttaagc

SEQ ID NO: 102503 - protein, 338 aa, Arabidopsis thaliana; identical to SEQ ID NO: 42191
  peptide (1)..(338): Ceres Seq. ID no. 13610518
  misc_feature (1)..(338): Homolog of NCBI NO: 18404945 NR Description: expressed protein [Arabidopsis thaliana] At1g54460/F20D21_28 [Arabidopsis thaliana]
  misc_feature (1)..(338): Homolog of NCBI NO: 21553401 NR Description: unknown [Arabidopsis thaliana]
  misc_feature (162)..(338): Homolog of NCBI NO: 25405735 NR Description: hypothetical protein F20D21.28 [imported] - thaliana >gi|4585989|gb|AAD25625.1|AC005287_27 Hypothetical
  misc_feature (1)..(128): Homolog of NCBI NO: 25405735 NR Description: hypothetical protein F20D21.28 [imported] - thaliana >gi|4585989|gb|AAD25625.1|AC005287_27 Hypothetical
  misc_feature (7)..(293): Homolog of NCBI NO: 34897180 NR Description: unknown protein [Oryza sativa (japonica
  misc_feature (87)..(318): Homolog of NCBI NO: 30679219 NR Description: expressed protein [Arabidopsis thaliana]
  misc_feature (87)..(318): Homolog of NCBI NO: 6175167 NR Description: unknown protein [Arabidopsis thaliana]
  misc_feature (87)..(318): Homolog of NCBI NO: 21618286 NR Description: unknown [Arabidopsis thaliana]
  misc_feature (87)..(318): Homolog of NCBI NO: 18396961 NR Description: expressed protein [Arabidopsis thaliana]
  misc_feature (57)..(313): Homolog of NCBI NO: 34393229 NR Description: putative seed specific protein [Oryza sativa

SEQ ID NO: 102504 - protein, 329 aa, Arabidopsis thaliana; identical to SEQ ID NO: 42192
  peptide (1)..(329): Ceres Seq. ID no. 13610519
  misc_feature (1)..(329): Homolog of NCBI NO: 18404945 NR Description: expressed protein [Arabidopsis thaliana] At1g54460/F20D21_28 [Arabidopsis thaliana]
  misc_feature (1)..(329): Homolog of NCBI NO: 21553401 NR Description: unknown [Arabidopsis thaliana]
  misc_feature (153)..(329): Homolog of NCBI NO: 25405735 NR Description: hypothetical protein F20D21.28 [imported] - thaliana >gi|4585989|gb|AAD25625.1|AC005287_27 Hypothetical
  misc_feature (1)..(119): Homolog of NCBI NO: 25405735 NR Description: hypothetical protein F20D21.28 [imported] - thaliana >gi|4585989|gb|AAD25625.1|AC005287_27 Hypothetical
  misc_feature (1)..(284): Homolog of NCBI NO: 34897180 NR Description: unknown protein [Oryza sativa (japonica
  misc_feature (78)..(309): Homolog of NCBI NO: 30679219 NR Description: expressed protein [Arabidopsis thaliana]
  misc_feature (78)..(309): Homolog of NCBI NO: 6175167 NR Description: unknown protein [Arabidopsis thaliana]
  misc_feature (78)..(309): Homolog of NCBI NO: 18396961 NR Description: expressed protein [Arabidopsis thaliana]
  misc_feature (78)..(309): Homolog of NCBI NO: 21618286 NR Description: unknown [Arabidopsis thaliana]
  misc_feature (48)..(304): Homolog of NCBI NO: 34393229 NR Description: putative seed specific protein [Oryza sativa

SEQ ID NO: 102505 - protein, 205 aa, Arabidopsis thaliana; identical to SEQ ID NO: 42193
  peptide (1)..(205): Ceres Seq. ID no. 13610520
  misc_feature (1)..(205): Homolog of NCBI NO: 18404945 NR Description: expressed protein [Arabidopsis thaliana] At1g54460/F20D21_28 [Arabidopsis thaliana]
  misc_feature (1)..(205): Homolog of NCBI NO: 21553401 NR Description: unknown [Arabidopsis thaliana]
  misc_feature (29)..(205): Homolog of NCBI NO: 25405735 NR Description: hypothetical protein F20D21.28 [imported] - thaliana >gi|4585989|gb|AAD25625.1|AC005287_27 Hypothetical
  misc_feature (1)..(160): Homolog of NCBI NO: 34897180 NR Description: unknown protein [Oryza sativa (japonica
  misc_feature (1)..(185): Homolog of NCBI NO: 30679219 NR Description: expressed protein [Arabidopsis thaliana]
  misc_feature (1)..(185): Homolog of NCBI NO: 6175167 NR Description: unknown protein [Arabidopsis thaliana]
  misc_feature (1)..(185): Homolog of NCBI NO: 18396961 NR Description: expressed protein [Arabidopsis thaliana]
  misc_feature (1)..(185): Homolog of NCBI NO: 21618286 NR Description: unknown [Arabidopsis thaliana]
  misc_feature (1)..(180): Homolog of NCBI NO: 34393229 NR Description: putative seed specific protein [Oryza sativa
  misc_feature (1)..(133): Homolog of NCBI NO: 28453880 NR Description: WAVE-DAMPENED2 [Arabidopsis thaliana]

SEQ ID NO: 102506 - DNA, 790 bp, Arabidopsis thaliana
  misc_feature (1)..(790): Ceres Seq. ID no. 13610543
  misc_feature: MA Experiment ID: 108573 Result: Up-regulated in Transcription
  misc_feature: MA Experiment 108573 PARAMETER Experiment Name: At_Drought_cDNA_P Parameter: Timepoint (hr) Value: 6
  misc_feature: MA Experiment 108573 PARAMETER Experiment Name: At_Drought_cDNA_P Parameter: Tissue Value: Aerial
  misc_feature: MA Experiment 108573 PARAMETER Experiment Name: At_Drought_cDNA_P Parameter: Treatment Value: Drought vs. No Drought
  misc_feature: MA Experiment ID: 108579 Result: Down-regulated in Transcription
  misc_feature: MA Experiment 108579 PARAMETER Experiment Name: At_4deg_Cold_cDNA_P Parameter: Temperature (deg C) Value: 4 vs. 22
  misc_feature: MA Experiment 108579 PARAMETER Experiment Name: At_4deg_Cold_cDNA_P Parameter: Timepoint (hr) Value: 6
  misc_feature: MA Experiment 108579 PARAMETER Experiment Name: At_4deg_Cold_cDNA_P Parameter: Tissue Value: Aerial
  misc_feature: MA Experiment ID: 108585 Result: Up-regulated in Transcription
  misc_feature: MA Experiment 108585 PARAMETER Experiment Name: At_5mM_NaNP_cDNA_P Parameter: Timepoint (hr) Value: 6
  misc_feature: MA Experiment 108585 PARAMETER Experiment Name: At_5mM_NaNP_cDNA_P Parameter: Tissue Value: Aerial
  misc_feature: MA Experiment 108585 PARAMETER Experiment Name: At_5mM_NaNP_cDNA_P Parameter: Treatment Value: null
  misc_feature: MA Experiment ID: 108594 Result: Down-regulated in Transcription
  misc_feature: MA Experiment 108594 PARAMETER Experiment Name: At_Ler-rhl_Root_cDNA_P Parameter: Plant Line Value: null
  misc_feature: MA Experiment ID: 108668 Result: Up-regulated in Transcription
  misc_feature: MA Experiment 108668 PARAMETER Experiment Name: At_2mM_SA_cDNA_P Parameter: Plant Line Value: WS
  misc_feature: MA Experiment 108668 PARAMETER Experiment Name: At_2mM_SA_cDNA_P Parameter: Timepoint (hr) Value: 6
  misc_feature: MA Experiment 108668 PARAMETER Experiment Name: At_2mM_SA_cDNA_P Parameter: Treatment Value: 2mM SA vs. No Treatment
  misc_feature: MA Experiment ID: 20000182 Result: Up-regulated in Transcription
  misc_feature: MA Experiment 20000182 PARAMETER Experiment Name: At_2mM_SA_P Parameter: Age (day) Value: 14
  misc_feature: MA Experiment 20000182 PARAMETER Experiment Name: At_2mM_SA_P Parameter: Organism Value: A. thaliana
  misc_feature: MA Experiment 20000182 PARAMETER Experiment Name: At_2mM_SA_P Parameter: Plant Line Value: WS
  misc_feature: MA Experiment 20000182 PARAMETER Experiment Name: At_2mM_SA_P Parameter: Timepoint (hr) Value: 6
  misc_feature: MA Experiment 20000182 PARAMETER Experiment Name: At_2mM_SA_P Parameter: Tissue Value: Aerial
  misc_feature: MA Experiment 20000182 PARAMETER Experiment Name: At_2mM_SA_P Parameter: Treatment Value: 2mM SA vs. No Treatment
  misc_feature: MA Experiment ID: 20000234 Result: Down-regulated in Transcription
  misc_feature: MA Experiment 20000234 PARAMETER Experiment Name: At_Siliques_P Parameter: Age (day) Value: 21
  misc_feature: MA Experiment 20000234 PARAMETER Experiment Name: At_Siliques_P Parameter: Organism Value: A. thaliana
  misc_feature: MA Experiment 20000234 PARAMETER Experiment Name: At_Siliques_P Parameter: Plant Line Value: WS
  misc_feature: MA Experiment 20000234 PARAMETER Experiment Name: At_Siliques_P Parameter: Tissue Value: Less Than 5mm Siliques vs. Whole Plant
  misc_feature: MA Experiment ID: 20000235 Result: Down-regulated in Transcription
  misc_feature: MA Experiment 20000235 PARAMETER Experiment Name: At_Siliques_P Parameter: Age (day) Value: 21
  misc_feature: MA Experiment 20000235 PARAMETER Experiment Name: At_Siliques_P Parameter: Organism Value: A. thaliana
  misc_feature: MA Experiment 20000235 PARAMETER Experiment Name: At_Siliques_P Parameter: Plant Line Value: WS
  misc_feature: MA Experiment 20000235 PARAMETER Experiment Name: At_Siliques_P Parameter: Tissue Value: 5-10mm Siliques vs. Whole Plant
  misc_feature: MA Experiment ID: 20000265 Result: Down-regulated in Transcription
  misc_feature: MA Experiment 20000265 PARAMETER Experiment Name: At_Open_Flower_P Parameter: Age (day) Value: 21
  misc_feature: MA Experiment 20000265 PARAMETER Experiment Name: At_Open_Flower_P Parameter: Plant Line Value: WS
  misc_feature: MA Experiment 20000265 PARAMETER Experiment Name: At_Open_Flower_P Parameter: Tissue Value: Closed Flower vs. Whole Plant
  misc_feature: MA Experiment ID: 20000286 Result: Down-regulated in Transcription
  misc_feature: MA Experiment 20000286 PARAMETER Experiment Name: At_Open_Flower_P Parameter: Age (day) Value: 21
  misc_feature: MA Experiment 20000286 PARAMETER Experiment Name: At_Open_Flower_P Parameter: Plant Line Value: WS
  misc_feature: MA Experiment 20000286 PARAMETER Experiment Name: At_Open_Flower_P Parameter: Tissue Value: Half Open vs. Whole Plant
  misc_feature: MA Experiment ID: 20001248 Result: Up-regulated in Transcription
  misc_feature: MA Experiment 20001248 PARAMETER Experiment Name: At_Far-red-induction_P Parameter: Age (day) Value: 7
  misc_feature: MA Experiment 20001248 PARAMETER Experiment Name: At_Far-red-induction_P Parameter: Light Value: Far-red vs. White
  misc_feature: MA Experiment 20001248 PARAMETER Experiment Name: At_Far-red-induction_P Parameter: Organism Value: A. thaliana
  misc_feature: MA Experiment 20001248 PARAMETER Experiment Name: At_Far-red-induction_P Parameter: Plant Line Value: Columbia
  misc_feature: MA Experiment 20001248 PARAMETER Experiment Name: At_Far-red-induction_P Parameter: Timepoint (hr) Value: 4
  misc_feature: MA Experiment 20001248 PARAMETER Experiment Name: At_Far-red-induction_P Parameter: Tissue Value: Whole Plant
  misc_feature: MA Experiment ID: 20001450 Result: Up-regulated in Transcription
  misc_feature: MA Experiment 20001450 PARAMETER Experiment Name: At_Far-red-induction_P Parameter: Age (day) Value: 7
  misc_feature: MA Experiment 20001450 PARAMETER Experiment Name: At_Far-red-induction_P Parameter: Light Value: Far-red vs. White
  misc_feature: MA Experiment 20001450 PARAMETER Experiment Name: At_Far-red-induction_P Parameter: Organism Value: A. thaliana
  misc_feature: MA Experiment 20001450 PARAMETER Experiment Name: At_Far-red-induction_P Parameter: Plant Line Value: Columbia
  misc_feature: MA Experiment 20001450 PARAMETER Experiment Name: At_Far-red-induction_P Parameter: Timepoint (hr) Value: 8
  misc_feature: MA Experiment 20001450 PARAMETER Experiment Name: At_Far-red-induction_P Parameter: Tissue Value: Whole Plant
  misc_feature: MA Experiment ID: 20001451 Result: Up-regulated in Transcription
  misc_feature: MA Experiment 20001451 PARAMETER Experiment Name: At_Far-red-induction_P Parameter: Age (day) Value: 7
  misc_feature: MA Experiment 20001451 PARAMETER Experiment Name: At_Far-red-induction_P Parameter: Light Value: Far-red vs. White
  misc_feature: MA Experiment 20001451 PARAMETER Experiment Name: At_Far-red-induction_P Parameter: Organism Value: A. thaliana
  misc_feature: MA Experiment 20001451 PARAMETER Experiment Name: At_Far-red-induction_P Parameter: Plant Line Value: Columbia
  misc_feature: MA Experiment 20001451 PARAMETER Experiment Name: At_Far-red-induction_P Parameter: Timepoint (hr) Value: 24
  misc_feature: MA Experiment 20001451 PARAMETER Experiment Name: At_Far-red-induction_P Parameter: Tissue Value: Whole Plant
  misc_feature: MA Experiment ID: 20001557 Result: Down-regulated in Transcription
  misc_feature: MA Experiment 20001557 PARAMETER Experiment Name: At_Drought_Soil_Dry_P Parameter: Age (day) Value: 27
  misc_feature: MA Experiment 20001557 PARAMETER Experiment Name: At_Drought_Soil_Dry_P Parameter: Organism Value: A. thaliana
  misc_feature: MA Experiment 20001557 PARAMETER Experiment Name: At_Drought_Soil_Dry_P Parameter: Plant Line Value: WS
  misc_feature: MA Experiment 20001557 PARAMETER Experiment Name: At_Drought_Soil_Dry_P Parameter: Post Timepoint (hr) Value: 3
  misc_feature: MA Experiment 20001557 PARAMETER Experiment Name: At_Drought_Soil_Dry_P Parameter: Post-Treatment Value: Re-Water vs. No Drought
  misc_feature: MA Experiment 20001557 PARAMETER Experiment Name: At_Drought_Soil_Dry_P Parameter: Timepoint (day) Value: 13
  misc_feature: MA Experiment 20001557 PARAMETER Experiment Name: At_Drought_Soil_Dry_P Parameter: Treatment Value: Drought vs. No Drought
  misc_feature: MA Experiment ID: 20001560 Result: Down-regulated in Transcription
  misc_feature: MA Experiment 20001560 PARAMETER Experiment Name: At_Drought_Soil_Dry_P Parameter: Age (day) Value: 28
  misc_feature: MA Experiment 20001560 PARAMETER Experiment Name: At_Drought_Soil_Dry_P Parameter: Organism Value: A. thaliana
  misc_feature: MA Experiment 20001560 PARAMETER Experiment Name: At_Drought_Soil_Dry_P Parameter: Plant Line Value: WS
  misc_feature: MA Experiment 20001560 PARAMETER Experiment Name: At_Drought_Soil_Dry_P Parameter: Post Timepoint (hr) Value: None
  misc_feature: MA Experiment 20001560 PARAMETER Experiment Name: At_Drought_Soil_Dry_P Parameter: Post-Treatment Value: None
  misc_feature: MA Experiment 20001560 PARAMETER Experiment Name: At_Drought_Soil_Dry_P Parameter: Timepoint (day) Value: 14
  misc_feature: MA Experiment 20001560 PARAMETER Experiment Name: At_Drought_Soil_Dry_P Parameter: Treatment Value: Drought vs. No Drought
aagtctcttttctcctcgtctctgcctagccgataaattcgccgttctccatcggtaaacgcagctgaggagctagataattctctgatatctgcgttacgccggtgtggaagcaaaatttaggttaatcggatctcaattatggacgaagaggcagcaaaacctagagactccaccgtgaatcagcaacatcaatactattacggaacgtttcaaggcgttgcgaattttcctactcctactccaccaccgcaatttatgcaaccacagcatccgattactacgtttcctggacatgcttaccaaaatctccaaggtcatggtggtggtgtgaattatgctcaaggattcccagttgttgttcctgattatacagtggttgaggtgagaccaatgatagagcatgaacttccttgttgtggcttgggcatgggctggtttctgtttatcatgggcttcttgttcggtgggatcccttggtacctcggtgcttttattgttctagtcacatctgttgatcaccgcgagaaagctggttacgttgcctgttcaatcgcatccgttgtctatttgattgccgtcatgctcgggatgactggggatattaacatctggtgaaactactccccagccaaaaccaaactcaatcttgtatatatatctacatatatactcgaaaacgtagatatatatcaatatcatttacaccagttattgctgattttagtgagttacagaagggaaatatttgtaactttgtgttgaattttatatcataactaaatattgt

SEQ ID NO: 102507 - protein, 158 aa, Arabidopsis thaliana
  peptide (1)..(158): Ceres Seq. ID no. 13610544
  misc_feature (1)..(158): Homolog of NCBI NO: 18397305 NR Description: expressed protein [Arabidopsis thaliana]
  misc_feature (1)..(158): Homolog of NCBI NO: 21593837 NR Description: 60S ribosomal protein L18A, putative [Arabidopsis
  misc_feature (1)..(145): Homolog of NCBI NO: 25518134 NR Description: probable 60S ribosomal protein L18A - Arabidopsis >gi|12324168|gb|AAG52055.1|AC022455_9 60S ribosomal protein L18A,
  misc_feature (14)..(158): Homolog of NCBI NO: 18394436 NR Description: expressed protein [Arabidopsis thaliana]
  misc_feature (21)..(158): Homolog of NCBI NO: 21554011 NR Description: unknown [Arabidopsis thaliana]
  misc_feature (21)..(158): Homolog of NCBI NO: 18404524 NR Description: expressed protein [Arabidopsis thaliana]
  misc_feature (43)..(158): Homolog of NCBI NO: 18400450 NR Description: expressed protein [Arabidopsis thaliana]
  misc_feature (43)..(158): Homolog of NCBI NO: 21554784 NR Description: unknown [Arabidopsis thaliana]
MDEEAAKPRDSTVNQQHQYYYGTFQGVANFPTPTPPPQFMQPQHPITTFPGHAYQNLQGHGGGVNYAQGFPVVVPDYTVVEVRPMIEHELPCCGLGMGWFLFIMGFLFGGIPWYLGAFIVLVTSVDHREKAGYVACSIASVVYLIAVMLGMTGDINIW

SEQ ID NO: 102508 - protein, 119 aa, Arabidopsis thaliana; identical to SEQ ID NO: 27008
  peptide (1)..(119): Ceres Seq. ID no. 13610545
  misc_feature (1)..(119): Homolog of NCBI NO: 18397305 NR Description: expressed protein [Arabidopsis thaliana]
  misc_feature (1)..(119): Homolog of NCBI NO: 21593837 NR Description: 60S ribosomal protein L18A, putative [Arabidopsis
  misc_feature (1)..(106): Homolog of NCBI NO: 25518134 NR Description: probable 60S ribosomal protein L18A - Arabidopsis >gi|12324168|gb|AAG52055.1|AC022455_9 60S ribosomal protein L18A,
  misc_feature (1)..(119): Homolog of NCBI NO: 18394436 NR Description: expressed protein [Arabidopsis thaliana]
  misc_feature (1)..(119): Homolog of NCBI NO: 21554011 NR Description: unknown [Arabidopsis thaliana]
  misc_feature (1)..(119): Homolog of NCBI NO: 18404524 NR Description: expressed protein [Arabidopsis thaliana]
  misc_feature (4)..(119): Homolog of NCBI NO: 18400450 NR Description: expressed protein [Arabidopsis thaliana]
  misc_feature (4)..(119): Homolog of NCBI NO: 21554784 NR Description: unknown [Arabidopsis thaliana]

SEQ ID NO: 102509 - DNA, 849 bp, Arabidopsis thaliana
  misc_feature (1)..(849): Ceres Seq. ID no. 13610546
  misc_feature: MA Experiment ID: 108434 Result: Down-regulated in Transcription
  misc_feature: MA Experiment 108434 PARAMETER Experiment Name: At_Root_Tips_cDNA_P Parameter: Tissue Value: Root Tips
  misc_feature: MA Experiment ID: 108461 Result: Up-regulated in Transcription
  misc_feature: MA Experiment 108461 PARAMETER Experiment Name: At_Germinating_Seeds_cDNA_P Parameter: Age (day) Value: 1 vs. 0
  misc_feature: MA Experiment 108461 PARAMETER Experiment Name: At_Germinating_Seeds_cDNA_P Parameter: Tissue Value: Germinating Seeds
  misc_feature: MA Experiment ID: 108462 Result: Up-regulated in Transcription
  misc_feature: MA Experiment 108462 PARAMETER Experiment Name: At_Germinating_Seeds_cDNA_P Parameter: Age (day) Value: 2 vs. 0
  misc_feature: MA Experiment 108462 PARAMETER Experiment Name: At_Germinating_Seeds_cDNA_P Parameter: Tissue Value: Germinating Seeds
  misc_feature: MA Experiment ID: 108464 Result: Up-regulated in Transcription
  misc_feature: MA Experiment 108464 PARAMETER Experiment Name: At_Germinating_Seeds_cDNA_P Parameter: Age (day) Value: 4 vs. 0
  misc_feature: MA Experiment 108464 PARAMETER Experiment Name: At_Germinating_Seeds_cDNA_P Parameter: Tissue Value: Germinating Seeds
  misc_feature: MA Experiment ID: 108579 Result: Down-regulated in Transcription
  misc_feature: MA Experiment 108579 PARAMETER Experiment Name: At_4deg_Cold_cDNA_P Parameter: Temperature (deg C) Value: 4 vs. 22
  misc_feature: MA Experiment 108579 PARAMETER Experiment Name: At_4deg_Cold_cDNA_P Parameter: Timepoint (hr) Value: 6
  misc_feature: MA Experiment 108579 PARAMETER Experiment Name: At_4deg_Cold_cDNA_P Parameter: Tissue Value: Aerial
  misc_feature: MA Experiment ID: 20000070 Result: Down-regulated in Transcription
  misc_feature: MA Experiment 20000070 PARAMETER Experiment Name: At_100uM_ABA_Mutants_cDNA_P Parameter: Plant Line Value: CS24
  misc_feature: MA Experiment 20000070 PARAMETER Experiment Name: At_100uM_ABA_Mutants_cDNA_P Parameter: Timepoint (hr) Value: 6
  misc_feature: MA Experiment 20000070 PARAMETER Experiment Name: At_100uM_ABA_Mutants_cDNA_P Parameter: Tissue Value: Aerial
  misc_feature: MA Experiment 20000070 PARAMETER Experiment Name: At_100uM_ABA_Mutants_cDNA_P Parameter: Treatment Value: 100uM ABA vs. No Treatment
  misc_feature: MA Experiment ID: 20000180 Result: Up-regulated in Transcription
  misc_feature: MA Experiment 20000180 PARAMETER Experiment Name: At_Germinating_Seeds_P Parameter: Age (hr) Value: 24 vs. 0
  misc_feature: MA Experiment 20000180 PARAMETER Experiment Name: At_Germinating_Seeds_P Parameter: Tissue Value: Germinating Seeds
  misc_feature: MA Experiment ID: 20000185 Result: Up-regulated in Transcription
  misc_feature: MA Experiment 20000185 PARAMETER Experiment Name: At_Roots__P Parameter: Age (day) Value: 7 vs. 21
  misc_feature: MA Experiment 20000185 PARAMETER Experiment Name: At_Roots__P Parameter: Organism Value: A. thaliana
  misc_feature: MA Experiment 20000185 PARAMETER Experiment Name: At_Roots__P Parameter: Tissue Value: Roots vs. Whole Plant
  misc_feature: MA Experiment ID: 20000224 Result: Down-regulated in Transcription
  misc_feature: MA Experiment ID: 20000227 Result: Down-regulated in Transcription
  misc_feature: MA Experiment 20000227 PARAMETER Experiment Name: At_Root-Tips-vs-Tops_P Parameter: Tissue Value: Root Tips vs. Root Tops
  misc_feature: MA Experiment ID: 20000439 Result: Up-regulated in Transcription
  misc_feature: MA Experiment 20000439 PARAMETER Experiment Name: At_Roots__P Parameter: Age (day) Value: 14 vs. 21
  misc_feature: MA Experiment 20000439 PARAMETER Experiment Name: At_Roots__P Parameter: Organism Value: A. thaliana
  misc_feature: MA Experiment 20000439 PARAMETER Experiment Name: At_Roots__P Parameter: Tissue Value: Roots vs. Whole Plant
  misc_feature: MA Experiment ID: 20000452 Result: Down-regulated in Transcription
  misc_feature: MA Experiment 20000452 PARAMETER Experiment Name: At_CS6879_Shoots-Roots_P Parameter: Age (day) Value: 14
  misc_feature: MA Experiment 20000452 PARAMETER Experiment Name: At_CS6879_Shoots-Roots_P Parameter: Organism Value: A. thaliana
  misc_feature: MA Experiment 20000452 PARAMETER Experiment Name: At_CS6879_Shoots-Roots_P Parameter: Plant Line Value: CS6879 vs. WS
  misc_feature: MA Experiment 20000452 PARAMETER Experiment Name: At_CS6879_Shoots-Roots_P Parameter: Tissue Value: Shoots
acacacacacacatgttcttcgttgctgcttcgttgggttaaaaacttttcttttgtttcttgctttttgcaaagtcaaagataacaaataaataagaaaaatggagaatctaccacctggttatcgtcccaatgttggtgtttgtctaatcaactcggataatctggtatttgtagcttctagattgaatgttccaggagcatggcagatgccacagggaggcattgaagatggggaggatccaaagtcagcagccatgagagagttacaagaagaaactggtgttgtttcagctgaaatcgtctctgaggtcccaaattggttgacatatgattttccaccagcagtaaaagcaaaagttaaccgtctttggggcggtgaatggcatggtcaagctcagaaatggtatttagtgagactgaggaacgatgaggacgagaaagagatcaatctagcgaacaacgaagcggattcagagtttgcggagtggaaatgggcgaagccagaagaagtggtagagcaagcagtggattacaaaaggccaacctatgaagaagtcatcaagacttttggttcgttcttaaacgacacaggaagagctgctaaatgtaaatcagccaagtggtgatataagataccaagaaccaatgtttgtctttttattttttttgttaactgttgtttttctttttttgggcggttctttttagtagaacccttttggaatgcaaaagctttctctaggggttttttactttcatttttgtaaattggttattggtacgtagaaagtttttttgttttattttaacatgggggtcattgtaataaagtcgttgtctggattc

SEQ ID NO: 102510 - protein, 175 aa, Arabidopsis thaliana; identical to SEQ ID NO: 23110
  peptide (1)..(175): Ceres Seq. ID no. 13610547
  misc_feature (8)..(156): Pfam Name: NUDIX domain Pfam Description: NUDIX domain
  misc_feature (1)..(175): Homolog of NCBI NO: 15220667 NR Description: diadenosine 5',5'''-P1,P4-tetraphosphate
  misc_feature (1)..(161): Homolog of NCBI NO: 15228345 NR Description: diadenosine 5',5'''-P1,P4-tetraphosphate putative [Arabidopsis thaliana]
  misc_feature (1)..(161): Homolog of NCBI NO: 1888557 NR Description: diadenosine 5',5'''-P1,P4-tetraphosphate
  misc_feature (1)..(161): Homolog of NCBI NO: 14488439 NR Description: Chain A, Solution Structure Of The Nudix Enzyme Tetraphosphate Hydrolase From Lupinus Angustifolius L. Chain A, Solution Structure Of The Nudix Enzyme Diadenosine
  misc_feature (1)..(168): Homolog of NCBI NO: 7489414 NR Description: probable bis(5'-nucleosyl)-tetraphosphatase
  misc_feature (1)..(163): Homolog of NCBI NO: 15240003 NR Description: diadenosine 5',5'''-P1,P4-tetraphosphate
  misc_feature (1)..(161): Homolog of NCBI NO: 8567796 NR Description: diadenosine 5',5'''-P1,P4-tetraphosphate
  misc_feature (1)..(157): Homolog of NCBI NO: 22959957 NR Description: hypothetical protein [Rhodobacter sphaeroides]
  misc_feature (8)..(160): Homolog of NCBI NO: 22967686 NR Description: hypothetical protein [Rhodospirillum rubrum]
  misc_feature (8)..(157): Homolog of NCBI NO: 23015122 NR Description: hypothetical protein [Magnetospirillum

SEQ ID NO: 102511 - protein, 139 aa, Arabidopsis thaliana; identical to SEQ ID NO: 23111
  peptide (1)..(139): Ceres Seq. ID no. 13610548
  misc_feature (1)..(120): Pfam Name: NUDIX domain Pfam Description: NUDIX domain
  misc_feature (1)..(139): Homolog of NCBI NO: 15220667 NR Description: diadenosine 5',5'''-P1,P4-tetraphosphate
  misc_feature (1)..(125): Homolog of NCBI NO: 15228345 NR Description: diadenosine 5',5'''-P1,P4-tetraphosphate putative [Arabidopsis thaliana]
  misc_feature (1)..(125): Homolog of NCBI NO: 1888557 NR Description: diadenosine 5',5'''-P1,P4-tetraphosphate
  misc_feature (1)..(125): Homolog of NCBI NO: 14488439 NR Description: Chain A, Solution Structure Of The Nudix Enzyme Tetraphosphate Hydrolase From Lupinus Angustifolius L. Chain A, Solution Structure Of The Nudix Enzyme Diadenosine
  misc_feature (1)..(132): Homolog of NCBI NO: 7489414 NR Description: probable bis(5'-nucleosyl)-tetraphosphatase
  misc_feature (1)..(127): Homolog of NCBI NO: 15240003 NR Description: diadenosine 5',5'''-P1,P4-tetraphosphate
  misc_feature (1)..(125): Homolog of NCBI NO: 8567796 NR Description: diadenosine 5',5'''-P1,P4-tetraphosphate
  misc_feature (1)..(121): Homolog of NCBI NO: 22959957 NR Description: hypothetical protein [Rhodobacter sphaeroides]
  misc_feature (1)..(124): Homolog of NCBI NO: 22967686 NR Description: hypothetical protein [Rhodospirillum rubrum]
  misc_feature (1)..(121): Homolog of NCBI NO: 23015122 NR Description: hypothetical protein [Magnetospirillum

SEQ ID NO: 102512 - protein, 123 aa, Arabidopsis thaliana; identical to SEQ ID NO: 23112
  peptide (1)..(123): Ceres Seq. ID no. 13610549
  misc_feature (1)..(104): Pfam Name: NUDIX domain Pfam Description: NUDIX domain
  misc_feature (1)..(123): Homolog of NCBI NO: 15220667 NR Description: diadenosine 5',5'''-P1,P4-tetraphosphate
  misc_feature (1)..(109): Homolog of NCBI NO: 15228345 NR Description: diadenosine 5',5'''-P1,P4-tetraphosphate putative [Arabidopsis thaliana]
  misc_feature (1)..(109): Homolog of NCBI NO: 1888557 NR Description: diadenosine 5',5'''-P1,P4-tetraphosphate
  misc_feature (1)..(109): Homolog of NCBI NO: 14488439 NR Description: Chain A, Solution Structure Of The Nudix Enzyme Tetraphosphate Hydrolase From Lupinus Angustifolius L. Chain A, Solution Structure Of The Nudix Enzyme Diadenosine
  misc_feature (1)..(116): Homolog of NCBI NO: 7489414 NR Description: probable bis(5'-nucleosyl)-tetraphosphatase
  misc_feature (1)..(111): Homolog of NCBI NO: 15240003 NR Description: diadenosine 5',5'''-P1,P4-tetraphosphate
  misc_feature (1)..(109): Homolog of NCBI NO: 8567796 NR Description: diadenosine 5',5'''-P1,P4-tetraphosphate
  misc_feature (1)..(105): Homolog of NCBI NO: 22959957 NR Description: hypothetical protein [Rhodobacter sphaeroides]
  misc_feature (1)..(108): Homolog of NCBI NO: 22967686 NR Description: hypothetical protein [Rhodospirillum rubrum]
  misc_feature (1)..(105): Homolog of NCBI NO: 23015122 NR Description: hypothetical protein [Magnetospirillum

SEQ ID NO: 102513 - DNA, 1563 bp, Arabidopsis thaliana
  misc_feature (1)..(1563): Ceres Seq. ID no. 13610550
  misc_feature: MA Experiment ID: 108434 Result: Up-regulated in Transcription
  misc_feature: MA Experiment 108434 PARAMETER Experiment Name: At_Root_Tips_cDNA_P Parameter: Tissue Value: Root Tips
  misc_feature: MA Experiment ID: 108461 Result: Up-regulated in Transcription
  misc_feature: MA Experiment 108461 PARAMETER Experiment Name: At_Germinating_Seeds_cDNA_P Parameter: Age (day) Value: 1 vs. 0
  misc_feature: MA Experiment 108461 PARAMETER Experiment Name: At_Germinating_Seeds_cDNA_P Parameter: Tissue Value: Germinating Seeds
  misc_feature: MA Experiment ID: 108462 Result: Up-regulated in Transcription
  misc_feature: MA Experiment 108462 PARAMETER Experiment Name: At_Germinating_Seeds_cDNA_P Parameter: Age (day) Value: 2 vs. 0
  misc_feature: MA Experiment 108462 PARAMETER Experiment Name: At_Germinating_Seeds_cDNA_P Parameter: Tissue Value: Germinating Seeds
  misc_feature: MA Experiment ID: 108463 Result: Up-regulated in Transcription
  misc_feature: MA Experiment 108463 PARAMETER Experiment Name: At_Germinating_Seeds_cDNA_P Parameter: Age (day) Value: 3 vs. 0
  misc_feature: MA Experiment 108463 PARAMETER Experiment Name: At_Germinating_Seeds_cDNA_P Parameter: Tissue Value: Germinating Seeds
  misc_feature: MA Experiment ID: 108464 Result: Up-regulated in Transcription
  misc_feature: MA Experiment 108464 PARAMETER Experiment Name: At_Germinating_Seeds_cDNA_P Parameter: Age (day) Value: 4 vs. 0
  misc_feature: MA Experiment 108464 PARAMETER Experiment Name: At_Germinating_Seeds_cDNA_P Parameter: Tissue Value: Germinating Seeds
  misc_feature: MA Experiment ID: 108569 Result: Up-regulated in Transcription
  misc_feature: MA Experiment 108569 PARAMETER Experiment Name: At_0.001%_MeJA__cDNA_P Parameter: Timepoint (hr) Value: 6
  misc_feature: MA Experiment 108569 PARAMETER Experiment Name: At_0.001%_MeJA__cDNA_P Parameter: Tissue Value: Aerial
  misc_feature: MA Experiment 108569 PARAMETER Experiment Name: At_0.001%_MeJA__cDNA_P Parameter: Treatment Value: 0.001% MeJA vs. No Treatment
  misc_feature: MA Experiment ID: 108573 Result: Up-regulated in Transcription
  misc_feature: MA Experiment 108573 PARAMETER Experiment Name: At_Drought_cDNA_P Parameter: Timepoint (hr) Value: 6
  misc_feature: MA Experiment 108573 PARAMETER Experiment Name: At_Drought_cDNA_P Parameter: Tissue Value: Aerial
  misc_feature: MA Experiment 108573 PARAMETER Experiment Name: At_Drought_cDNA_P Parameter: Treatment Value: Drought vs. No Drought
  misc_feature: MA Experiment ID: 108595 Result: Down-regulated in Transcription
  misc_feature: MA Experiment 108595 PARAMETER Experiment Name: At_Ler-pi_Ovule_cDNA_P Parameter: Plant Line Value: null
  misc_feature: MA Experiment ID: 20000069 Result: Down-regulated in Transcription
  misc_feature: MA Experiment 20000069 PARAMETER Experiment Name: At_100uM_ABA_Mutants_cDNA_P Parameter: Plant Line Value: CS23
  misc_feature: MA Experiment 20000069 PARAMETER Experiment Name: At_100uM_ABA_Mutants_cDNA_P Parameter: Timepoint (hr) Value: 6
  misc_feature: MA Experiment 20000069 PARAMETER Experiment Name: At_100uM_ABA_Mutants_cDNA_P Parameter: Tissue Value: Aerial
  misc_feature: MA Experiment 20000069 PARAMETER Experiment Name: At_100uM_ABA_Mutants_cDNA_P Parameter: Treatment Value: 100uM ABA vs. No Treatment
  misc_feature: MA Experiment ID: 20000087 Result: Down-regulated in Transcription
  misc_feature: MA Experiment 20000087 PARAMETER Experiment Name: At_100uM_ABA_Mutants_cDNA_P Parameter: Plant Line Value: WS
  misc_feature: MA Experiment 20000087 PARAMETER Experiment Name: At_100uM_ABA_Mutants_cDNA_P Parameter: Timepoint (hr) Value: 6
  misc_feature: MA Experiment 20000087 PARAMETER Experiment Name: At_100uM_ABA_Mutants_cDNA_P Parameter: Tissue Value: Aerial
  misc_feature: MA Experiment 20000087 PARAMETER Experiment Name: At_100uM_ABA_Mutants_cDNA_P Parameter: Treatment Value: 100uM ABA vs. No Treatment
  misc_feature: MA Experiment ID: 20000089 Result: Down-regulated in Transcription
  misc_feature: MA Experiment ID: 20000179 Result: Up-regulated in Transcription
  misc_feature: MA Experiment 20000179 PARAMETER Experiment Name: At_Germinating_Seeds_P Parameter: Age (hr) Value: 6 vs. 0
  misc_feature: MA Experiment 20000179 PARAMETER Experiment Name: At_Germinating_Seeds_P Parameter: Tissue Value: Germinating Seeds
  misc_feature: MA Experiment ID: 20000180 Result: Up-regulated in Transcription
  misc_feature: MA Experiment 20000180 PARAMETER Experiment Name: At_Germinating_Seeds_P Parameter: Age (hr) Value: 24 vs. 0
  misc_feature: MA Experiment 20000180 PARAMETER Experiment Name: At_Germinating_Seeds_P Parameter: Tissue Value: Germinating Seeds
  misc_feature: MA Experiment ID: 20000184 Result: Up-regulated in Transcription
  misc_feature: MA Experiment 20000184 PARAMETER Experiment Name: At_Shoots__P Parameter: Age (day) Value: 7
  misc_feature: MA Experiment 20000184 PARAMETER Experiment Name: At_Shoots__P Parameter: Tissue Value: Shoots vs. Whole Plant
  misc_feature: MA Experiment ID: 20000224 Result: Down-regulated in Transcription
  misc_feature: MA Experiment ID: 20000227 Result: Up-regulated in Transcription
  misc_feature: MA Experiment 20000227 PARAMETER Experiment Name: At_Root-Tips-vs-Tops_P Parameter: Tissue Value: Root Tips vs. Root Tops
aatttaattcgatttcgacaatttcatttaattcttcgatttctccgcttgtcactgtttcgtatcgccattttctgtttgcatacacttgtatatatttatattaacagtccaaaattcttcgaaattgtcccgagctttgagcatataaaaaatgtcttcgataatccatggagctggagctgctacgacgacgttatcgacgtttaattccgtcgattccaagaaactcttcgttgctccttctcgcacaaatctttcagtgaggagccagagatatatagtggctggatctgatgcgagtaagaagagctttggttctggacttagagttcgtcactctcagaaattgattccaaatgctgttgcgacgaaggaggcggatacgtctgcgagcactggacatgaactattgcttttcgaggctcttcaggaaggtctggaagaagagatggacagagatccacatgtatgtgttatgggtgaagatgttggccattacggaggttcctacaaggtaaccaaaggccttgctgataaatttggtgacctcagggttctcgacactcctatttgtgaaaatgcattcaccggtatgggcattggagctgccatgactggtctaagacccgttattgaaggtatgaacatgggtttcctcctcctcgccttcaaccaaatctccaacaactgtggaatgcttcactacacatccggtggtcagtttacgatcccggttgtcatccgtggacctggtggagtgggacgccagcttggtgctgagcattcacagaggttagaatcttactttcagtccatccctgggatccagatggttgcttgctcaactccttacaacgccaaagggttgatgaaagccgcaataagaagcgagaaccctgtgattctgttcgaacacgtgctgctttacaatctcaaggagaaaatcccggatgaagattacgtctgtaaccttgaagaagctgagatggtcagacctggcgagcacattaccatcctcacttactcgcgaatgaggtaccatgtgatgcaggcagcaaaaactctggtgaacaaagggtatgaccccgaggttatcgacatcaggtcactgaaaccgttcgaccttcacacaattggaaactcggtgaagaaaacacatcgggttttgatcgtggaggagtgtatgagaaccggtgggattggggcaagtcttacagctgccatcaacgagaactttcatgactacttagatgctccggtgatgtgtttatcttctcaagacgttcctacaccttacgctggtacactggaggagtggaccgtggttcaaccggctcagatcgtgaccgctgtcgagcagctttgccagtaaattcatatttatccgatgaaccattatttatcatttacctctccatttcctttctctgtagcttagttcttaaagaatttgtctaagatggtttgtttttgttaaagtttgtctcctttgttgtgtcttttaatatggtttgtaactcagaatgtttgtttgttaattttatctcccactttctttta

SEQ ID NO: 102514 - protein, 406 aa, Arabidopsis thaliana
  peptide (1)..(406): Ceres Seq. ID no. 13610551
  misc_feature (275)..(397): Pfam Name: Transketolase, C-terminal domain Pfam Description: Transketolase, C-terminal domain
  misc_feature (1)..(406): Homolog of NCBI NO: 15220670 NR Description: pyruvate dehydrogenase E1 beta subunit -related thaliana] >gi|25284456|pir||C86425 probable pyruvate
  misc_feature (1)..(406): Homolog of NCBI NO: 2454184 NR Description: pyruvate dehydrogenase E1 beta subunit thaliana] >gi|21593321|gb|AAM65270.1| pyruvate dehydrogenase E1
  misc_feature (1)..(406): Homolog of NCBI NO: 15226781 NR Description: pyruvate dehydrogenase E1 beta subunit -related thaliana] >gi|25284457|pir||E84758 probable pyruvate
  misc_feature (1)..(406): Homolog of NCBI NO: 21593379 NR Description: putative pyruvate dehydrogenase E1 beta subunit
  misc_feature (120)..(406): Homolog of NCBI NO: 2982328 NR Description: pyruvate dehydrogenase E1 beta subunit [Picea
  misc_feature (85)..(406): Homolog of NCBI NO: 22711921 NR Description: pyruvate dehydrogenase E1 component beta subunit globosum] >gi|22416925|gb|AAM96525.1| beta subunit of pyruvate
  misc_feature (85)..(406): Homolog of NCBI NO: 22297748 NR Description: pyruvate dehydrogenase E1 component beta subunit
  misc_feature (85)..(404): Homolog of NCBI NO: 17227618 NR Description: pyruvate dehydrogenase E1 beta subunit [Nostoc
  misc_feature (85)..(404): Homolog of NCBI NO: 23041427 NR Description: hypothetical protein [Trichodesmium erythraeum
  misc_feature (85)..(404): Homolog of NCBI NO: 16330037 NR Description: pyruvate dehydrogenase E1 beta subunit sp. PCC 6803] >gi|7431577|pir||S77342 probable pyruvate
MSSIIHGAGAATTTLSTFNSVDSKKLFVAPSRTNLSVRSQRYIVAGSDASKKSFGSGLRVRHSQKLIPNAVATKEADTSASTGHELLLFEALQEGLEEEMDRDPHVCVMGEDVGHYGGSYKVTKGLADKFGDLRVLDTPICENAFTGMGIGAAMTGLRPVIEGMNMGFLLLAFNQISNNCGMLHYTSGGQFTIPVVIRGPGGVGRQLGAEHSQRLESYFQSIPGIQMVACSTPYNAKGLMKAAIRSENPVILFEHVLLYNLKEKIPDEDYVCNLEEAEMVRPGEHITILTYSRMRYHVMQAAKTLVNKGYDPEVIDIRSLKPFDLHTIGNSVKKTHRVLIVEECMRTGGIGASLTAAINENFHDYLDAPVMCLSSQDVPTPYAGTLEEWTVVQPAQIVTAVEQLCQ

SEQ ID NO: 102515 - protein, 307 aa, Arabidopsis thaliana
  peptide (1)..(307): Ceres Seq. ID no. 13610552
  misc_feature (176)..(298): Pfam Name: Transketolase, C-terminal domain Pfam Description: Transketolase, C-terminal domain
  misc_feature (1)..(307): Homolog of NCBI NO: 15220670 NR Description: pyruvate dehydrogenase E1 beta subunit -related thaliana] >gi|25284456|pir||C86425 probable pyruvate
  misc_feature (1)..(307): Homolog of NCBI NO: 2454184 NR Description: pyruvate dehydrogenase E1 beta subunit thaliana] >gi|21593321|gb|AAM65270.1| pyruvate dehydrogenase E1
  misc_feature (1)..(307): Homolog of NCBI NO: 15226781 NR Description: pyruvate dehydrogenase E1 beta subunit -related thaliana] >gi|25284457|pir||E84758 probable pyruvate
  misc_feature (1)..(307): Homolog of NCBI NO: 21593379 NR Description: putative pyruvate dehydrogenase E1 beta subunit
  misc_feature (21)..(307): Homolog of NCBI NO: 2982328 NR Description: pyruvate dehydrogenase E1 beta subunit [Picea
  misc_feature (1)..(307): Homolog of NCBI NO: 22711921 NR Description: pyruvate dehydrogenase E1 component beta subunit globosum] >gi|22416925|gb|AAM96525.1| beta subunit of pyruvate
  misc_feature (1)..(307): Homolog of NCBI NO: 22297748 NR Description: pyruvate dehydrogenase E1 component beta subunit
  misc_feature (1)..(305): Homolog of NCBI NO: 17227618 NR Description: pyruvate dehydrogenase E1 beta subunit [Nostoc
  misc_feature (1)..(305): Homolog of NCBI NO: 23041427 NR Description: hypothetical protein [Trichodesmium erythraeum
  misc_feature (1)..(305): Homolog of NCBI NO: 16330037 NR Description: pyruvate dehydrogenase E1 beta subunit sp. PCC 6803] >gi|7431577|pir||S77342 probable pyruvate
MDRDPHVCVMGEDVGHYGGSYKVTKGLADKFGDLRVLDTPICENAFTGMGIGAAMTGLRPVIEGMNMGFLLLAFNQISNNCGMLHYTSGGQFTIPVVIRGPGGVGRQLGAEHSQRLESYFQSIPGIQMVACSTPYNAKGLMKAAIRSENPVILFEHVLLYNLKEKIPDEDYVCNLEEAEMVRPGEHITILTYSRMRYHVMQAAKTLVNKGYDPEVIDIRSLKPFDLHTIGNSVKKTHRVLIVEECMRTGGIGASLTAAINENFHDYLDAPVMCLSSQDVPTPYAGTLEEWTVVQPAQIVTAVEQLCQ

SEQ ID NO: 102516 - protein, 298 aa, Arabidopsis thaliana
  peptide (1)..(298): Ceres Seq. ID no. 13610553
  misc_feature (167)..(289): Pfam Name: Transketolase, C-terminal domain Pfam Description: Transketolase, C-terminal domain
  misc_feature (1)..(298): Homolog of NCBI NO: 15220670 NR Description: pyruvate dehydrogenase E1 beta subunit -related thaliana] >gi|25284456|pir||C86425 probable pyruvate
  misc_feature (1)..(298): Homolog of NCBI NO: 2454184 NR Description: pyruvate dehydrogenase E1 beta subunit thaliana] >gi|21593321|gb|AAM65270.1| pyruvate dehydrogenase E1
  misc_feature (1)..(298): Homolog of NCBI NO: 15226781 NR Description: pyruvate dehydrogenase E1 beta subunit -related thaliana] >gi|25284457|pir||E84758 probable pyruvate
  misc_feature (1)..(298): Homolog of NCBI NO: 21593379 NR Description: putative pyruvate dehydrogenase E1 beta subunit
  misc_feature (12)..(298): Homolog of NCBI NO: 2982328 NR Description: pyruvate dehydrogenase E1 beta subunit [Picea
  misc_feature (1)..(298): Homolog of NCBI NO: 22711921 NR Description: pyruvate dehydrogenase E1 component beta subunit globosum] >gi|22416925|gb|AAM96525.1| beta subunit of pyruvate
  misc_feature (1)..(298): Homolog of NCBI NO: 22297748 NR Description: pyruvate dehydrogenase E1 component beta subunit
  misc_feature (1)..(296): Homolog of NCBI NO: 17227618 NR Description: pyruvate dehydrogenase E1 beta subunit [Nostoc
  misc_feature (1)..(296): Homolog of NCBI NO: 23041427 NR Description: hypothetical protein [Trichodesmium erythraeum
  misc_feature (1)..(296): Homolog of NCBI NO: 16330037 NR Description: pyruvate dehydrogenase E1 beta subunit sp. PCC 6803] >gi|7431577|pir||S77342 probable pyruvate
MGEDVGHYGGSYKVTKGLADKFGDLRVLDTPICENAFTGMGIGAAMTGLRPVIEGMNMGFLLLAFNQISNNCGMLHYTSGGQFTIPVVIRGPGGVGRQLGAEHSQRLESYFQSIPGIQMVACSTPYNAKGLMKAAIRSENPVILFEHVLLYNLKEKIPDEDYVCNLEEAEMVRPGEHITILTYSRMRYHVMQAAKTLVNKGYDPEVIDIRSLKPFDLHTIGNSVKKTHRVLIVEECMRTGGIGASLTAAINENFHDYLDAPVMCLSSQDVPTPYAGTLEEWTVVQPAQIVTAVEQLCQ

SEQ ID NO: 102517 - DNA, 1444 bp, Arabidopsis thaliana
  misc_feature (1)..(1444): Ceres Seq. ID no. 13610566
  misc_feature: MA Experiment ID: 108462 Result: Up-regulated in Transcription
  misc_feature: MA Experiment 108462 PARAMETER Experiment Name: At_Germinating_Seeds_cDNA_P Parameter: Age (day) Value: 2 vs. 0
  misc_feature: MA Experiment 108462 PARAMETER Experiment Name: At_Germinating_Seeds_cDNA_P Parameter: Tissue Value: Germinating Seeds
  misc_feature: MA Experiment ID: 108464 Result: Up-regulated in Transcription
  misc_feature: MA Experiment 108464 PARAMETER Experiment Name: At_Germinating_Seeds_cDNA_P Parameter: Age (day) Value: 4 vs. 0
  misc_feature: MA Experiment 108464 PARAMETER Experiment Name: At_Germinating_Seeds_cDNA_P Parameter: Tissue Value: Germinating Seeds
  misc_feature: MA Experiment ID: 108488 Result: Up-regulated in Transcription
  misc_feature: MA Experiment ID: 108489 Result: Up-regulated in Transcription
  misc_feature: MA Experiment ID: 108594 Result: Down-regulated in Transcription
  misc_feature: MA Experiment 108594 PARAMETER Experiment Name: At_Ler-rhl_Root_cDNA_P Parameter: Plant Line Value: null
  misc_feature: MA Experiment ID: 20000111 Result: Down-regulated in Transcription
  misc_feature: MA Experiment 20000111 PARAMETER Experiment Name: At_42deg_Heat_cDNA_P Parameter: Temperature (deg C) Value: 42 vs. 22
  misc_feature: MA Experiment 20000111 PARAMETER Experiment Name: At_42deg_Heat_cDNA_P Parameter: Timepoint (hr) Value: 6
  misc_feature: MA Experiment 20000111 PARAMETER Experiment Name: At_42deg_Heat_cDNA_P Parameter: Tissue Value: Aerial
  misc_feature: MA Experiment ID: 20000113 Result: Down-regulated in Transcription
  misc_feature: MA Experiment 20000113 PARAMETER Experiment Name: At_42deg_Heat_cDNA_P Parameter: Temperature (deg C) Value: 42 vs. 22
  misc_feature: MA Experiment 20000113 PARAMETER Experiment Name: At_42deg_Heat_cDNA_P Parameter: Timepoint (hr) Value: 8
  misc_feature: MA Experiment 20000113 PARAMETER Experiment Name: At_42deg_Heat_cDNA_P Parameter: Tissue Value: Aerial
  misc_feature: MA Experiment ID: 20000306 Result: Up-regulated in Transcription
  misc_feature: MA Experiment 20000306 PARAMETER Experiment Name: At_Germinating_Seeds_Sub_P Parameter: Age (hr) Value: 6 vs. 0
  misc_feature: MA Experiment 20000306 PARAMETER Experiment Name: At_Germinating_Seeds_Sub_P Parameter: Organism Value: A. thaliana
  misc_feature: MA Experiment 20000306 PARAMETER Experiment Name: At_Germinating_Seeds_Sub_P Parameter: Plant Line Value: WS
  misc_feature: MA Experiment 20000306 PARAMETER Experiment Name: At_Germinating_Seeds_Sub_P Parameter: Tissue Value: Germinating Seeds
  misc_feature: MA Experiment ID: 20000307 Result: Up-regulated in Transcription
  misc_feature: MA Experiment 20000307 PARAMETER Experiment Name: At_Germinating_Seeds_Sub_P Parameter: Age (hr) Value: 24 vs. 0
  misc_feature: MA Experiment 20000307 PARAMETER Experiment Name: At_Germinating_Seeds_Sub_P Parameter: Organism Value: A. thaliana
  misc_feature: MA Experiment 20000307 PARAMETER Experiment Name: At_Germinating_Seeds_Sub_P Parameter: Plant Line Value: WS
  misc_feature: MA Experiment 20000307 PARAMETER Experiment Name: At_Germinating_Seeds_Sub_P Parameter: Tissue Value: Germinating Seeds
  misc_feature: MA Experiment ID: 20000314 Result: Up-regulated in Transcription
  misc_feature: MA Experiment 20000314 PARAMETER Experiment Name: At_14day_Shoots-Roots_Sub_P Parameter: Age (day) Value: 14
  misc_feature: MA Experiment 20000314 PARAMETER Experiment Name: At_14day_Shoots-Roots_Sub_P Parameter: Organism Value: A. thaliana
  misc_feature: MA Experiment 20000314 PARAMETER Experiment Name: At_14day_Shoots-Roots_Sub_P Parameter: Plant Line Value: WS
  misc_feature: MA Experiment 20000314 PARAMETER Experiment Name: At_14day_Shoots-Roots_Sub_P Parameter: Tissue Value: Roots vs. Whole Plant
  misc_feature: MA Experiment ID: 20000327 Result: Down-regulated in Transcription
  misc_feature: MA Experiment 20000327 PARAMETER Experiment Name: At_42deg_Heat_Sub_P Parameter: Age (day) Value: 14
  misc_feature: MA Experiment 20000327 PARAMETER Experiment Name: At_42deg_Heat_Sub_P Parameter: Organism Value: A. thaliana
  misc_feature: MA Experiment 20000327 PARAMETER Experiment Name: At_42deg_Heat_Sub_P Parameter: Plant Line Value: WS
  misc_feature: MA Experiment 20000327 PARAMETER Experiment Name: At_42deg_Heat_Sub_P Parameter: Temperature (deg C) Value: 42 vs. 22
  misc_feature: MA Experiment 20000327 PARAMETER Experiment Name: At_42deg_Heat_Sub_P Parameter: Timepoint (hr) Value: 1
  misc_feature: MA Experiment 20000327 PARAMETER Experiment Name: At_42deg_Heat_Sub_P Parameter: Tissue Value: Aerial
  misc_feature: MA Experiment ID: 20001806 Result: Up-regulated in Transcription
  misc_feature: MA Experiment 20001806 PARAMETER Experiment Name: At_50mM_NH4NO3_L-to-H_Sub_P Parameter: Timepoint (hr) Value: 4
  misc_feature: MA Experiment 20001806 PARAMETER Experiment Name: At_50mM_NH4NO3_L-to-H_Sub_P Parameter: Tissue Value: Leaf
  misc_feature: MA Experiment 20001806 PARAMETER Experiment Name: At_50mM_NH4NO3_L-to-H_Sub_P Parameter: Treatment Value: 50mM NH4NO3 vs 100mM Mannitol
  misc_feature: MA Experiment ID: 20001807 Result: Up-regulated in Transcription
  misc_feature: MA Experiment 20001807 PARAMETER Experiment Name: At_50mM_NH4NO3_L-to-H_Sub_P Parameter: Timepoint (hr) Value: 6
  misc_feature: MA Experiment 20001807 PARAMETER Experiment Name: At_50mM_NH4NO3_L-to-H_Sub_P Parameter: Tissue Value: Leaf
  misc_feature: MA Experiment 20001807 PARAMETER Experiment Name: At_50mM_NH4NO3_L-to-H_Sub_P Parameter: Treatment Value: 50mM NH4NO3 vs 100mM Mannitol
gaggagattcaaaggatcgtgttgcttactgtatttaaaaaccctagagttcatcatcatcttcctctcattattgattgctctaatcaggttccgacgagactaataatcctttctcagatcgataacaatgtctcactctgctgtttctcaggctggtgctgtctcagtttcaattgaaaaccaacgttctcttagaagatccgtcttcaagcagaacaatagcataagcttcaacagcaagtcatggtcatcttctttagcattgaaccagaagacaacaagcataagagatgggaaacggtacccgagcacgacaatatgtatgtcggttcaacaaacaagtagttccaaggttactgtctctcctatagagttggaagaccctaaggatcctcctttgaacttgtacaaacccaaggagtcttacaccgctaagattgtctctgtggagcgagtagttggcccgaaagcccctggagaaacttgtcatatcgtcatcgatcatgatggtaaccttccttactgggaaggacagagttacggtgtgattcctccaggtgagaacccgaagaaaccgggagcgccacacaatgtgcgcctttactcaattgcatcaacaaggtacggagatttctttgacggtaaaacagcgagtttgtgtgtacgtagagctgtttattacgaccctgagactggaaaagaagatccttcaaagaacggagtctgcagcaacttcctatgtgattcaaagcccggtgacaagattcaaatcaccggtccatctgggaaggtaatgctattacccgagagtgatccaaacgcgacacacataatgatagccacgggaacaggagtggctccatacagaggctacttacgtcgaatgttcatggaaaacgtcccaaacaagacatttagcggcttagcttggctcttcttaggcgtggccaacaccgatagccttctctatgacgaagagtttaccaagtacctaaaagaccatccagacaactttaggttcgacaaggcattgagcagagaggagaagaacaagaaaggtggaaagatgtacgtgcaggacaagattgaagaatatagtgatgagatcttcaagcttttggacaatggagctcatatttacttctgtgggcttaaaggaatgatgcctgggattcaagatacacttaagagagttgcagaagagagaggtgagagctgggacttgaagctttctcagctcaggaagaacaagcagtggcacgttgaagtctattgagctctttatttgtatttgctgtttttgatttttgatttaagaatcgtaataaatttgaatttggtgtttttctacttttcaaacatgatatgatgataatatctgaaatttgttggttttgagaagagaatattctcagagaataatcaatatatcatttatgta

SEQ ID NO: 102518 - protein, 382 aa, Arabidopsis thaliana; identical to SEQ ID NO: 25345
  peptide (1)..(382): Ceres Seq. ID no. 13610567
  misc_feature (231)..(352): Pfam Name: Oxidoreductase NAD-binding domain Pfam Description: Oxidoreductase NAD-binding domain
  misc_feature (1)..(382): Homolog of NCBI NO: 30691910 NR Description: ferredoxin--NADP(+) reductase (adrenodoxin putative [Arabidopsis thaliana] >gi|25285861|pir||B86430
  misc_feature (1)..(382): Homolog of NCBI NO: 18397542 NR Description: ferredoxin--NADP(+) reductase (adrenodoxin
  misc_feature (1)..(382): Homolog of NCBI NO: 21593597 NR Description: ferrodoxin NADP oxidoreductase, putative
  misc_feature (1)..(382): Homolog of NCBI NO: 7433380 NR Description: ferredoxin-NADP reductase (EC 1.18.1.2) - garden (fragment) >gi|1480347|emb|CAA67796.1| ferrodoxin NADP
  misc_feature (1)..(382): Homolog of NCBI NO: 3913648 NR Description: Ferredoxin--NADP reductase, root isozyme,
  misc_feature (24)..(382): Homolog of NCBI NO: 18412939 NR Description: ferredoxin--NADP(+) reductase (adrenodoxin
  misc_feature (1)..(382): Homolog of NCBI NO: 3913650 NR Description: Ferredoxin--NADP reductase, root-type isozyme,
  misc_feature (29)..(382): Homolog of NCBI NO: 25285860 NR Description: ferredoxin-NADP+ reductase-like protein
  misc_feature (24)..(382): Homolog of NCBI NO: 21592875 NR Description: ferredoxin--NADP+ reductase-like protein
  misc_feature (24)..(382): Homolog of NCBI NO: 22530948 NR Description: ferredoxin--NADP+ reductase-like protein

SEQ ID NO: 102519 - protein, 317 aa, Arabidopsis thaliana; identical to SEQ ID NO: 25346
  peptide (1)..(317): Ceres Seq. ID no. 13610568
  misc_feature (166)..(287): Pfam Name: Oxidoreductase NAD-binding domain Pfam Description: Oxidoreductase NAD-binding domain
  misc_feature (1)..(317): Homolog of NCBI NO: 30691910 NR Description: ferredoxin--NADP(+) reductase (adrenodoxin putative [Arabidopsis thaliana] >gi|25285861|pir||B86430
  misc_feature (1)..(317): Homolog of NCBI NO: 18397542 NR Description: ferredoxin--NADP(+) reductase (adrenodoxin
  misc_feature (1)..(317): Homolog of NCBI NO: 21593597 NR Description: ferrodoxin NADP oxidoreductase, putative
  misc_feature (1)..(317): Homolog of NCBI NO: 7433380 NR Description: ferredoxin-NADP reductase (EC 1.18.1.2) - garden (fragment) >gi|1480347|emb|CAA67796.1| ferrodoxin NADP
  misc_feature (1)..(317): Homolog of NCBI NO: 3913648 NR Description: Ferredoxin--NADP reductase, root isozyme,
  misc_feature (1)..(317): Homolog of NCBI NO: 18412939 NR Description: ferredoxin--NADP(+) reductase (adrenodoxin
  misc_feature (1)..(317): Homolog of NCBI NO: 3913650 NR Description: Ferredoxin--NADP reductase, root-type isozyme,
  misc_feature (1)..(317): Homolog of NCBI NO: 25285860 NR Description: ferredoxin-NADP+ reductase-like protein
  misc_feature (1)..(317): Homolog of NCBI NO: 21592875 NR Description: ferredoxin--NADP+ reductase-like protein
  misc_feature (1)..(317): Homolog of NCBI NO: 22530948 NR Description: ferredoxin--NADP+ reductase-like protein

SEQ ID NO: 102520 - DNA, 1519 bp, Arabidopsis thaliana
  misc_feature (1)..(1519): Ceres Seq. ID no. 13610569
  misc_feature: MA Experiment ID: 108461 Result: Up-regulated in Transcription
  misc_feature: MA Experiment 108461 PARAMETER Experiment Name: At_Germinating_Seeds_cDNA_P Parameter: Age (day) Value: 1 vs. 0
  misc_feature: MA Experiment 108461 PARAMETER Experiment Name: At_Germinating_Seeds_cDNA_P Parameter: Tissue Value: Germinating Seeds
  misc_feature: MA Experiment ID: 20000306 Result: Up-regulated in Transcription
  misc_feature: MA Experiment 20000306 PARAMETER Experiment Name: At_Germinating_Seeds_Sub_P Parameter: Age (hr) Value: 6 vs. 0
  misc_feature: MA Experiment 20000306 PARAMETER Experiment Name: At_Germinating_Seeds_Sub_P Parameter: Organism Value: A. thaliana
  misc_feature: MA Experiment 20000306 PARAMETER Experiment Name: At_Germinating_Seeds_Sub_P Parameter: Plant Line Value: WS
  misc_feature: MA Experiment 20000306 PARAMETER Experiment Name: At_Germinating_Seeds_Sub_P Parameter: Tissue Value: Germinating Seeds
  misc_feature: MA Experiment ID: 20000307 Result: Up-regulated in Transcription
  misc_feature: MA Experiment 20000307 PARAMETER Experiment Name: At_Germinating_Seeds_Sub_P Parameter: Age (hr) Value: 24 vs. 0
  misc_feature: MA Experiment 20000307 PARAMETER Experiment Name: At_Germinating_Seeds_Sub_P Parameter: Organism Value: A. thaliana
  misc_feature: MA Experiment 20000307 PARAMETER Experiment Name: At_Germinating_Seeds_Sub_P Parameter: Plant Line Value: WS
  misc_feature: MA Experiment 20000307 PARAMETER Experiment Name: At_Germinating_Seeds_Sub_P Parameter: Tissue Value: Germinating Seeds
  misc_feature: MA Experiment ID: 20000314 Result: Down-regulated in Transcription
  misc_feature: MA Experiment 20000314 PARAMETER Experiment Name: At_14day_Shoots-Roots_Sub_P Parameter: Age (day) Value: 14
  misc_feature: MA Experiment 20000314 PARAMETER Experiment Name: At_14day_Shoots-Roots_Sub_P Parameter: Organism Value: A. thaliana
  misc_feature: MA Experiment 20000314 PARAMETER Experiment Name: At_14day_Shoots-Roots_Sub_P Parameter: Plant Line Value: WS
  misc_feature: MA Experiment 20000314 PARAMETER Experiment Name: At_14day_Shoots-Roots_Sub_P Parameter: Tissue Value: Roots vs. Whole Plant
  misc_feature: MA Experiment ID: 20000327 Result: Down-regulated in Transcription
  misc_feature: MA Experiment 20000327 PARAMETER Experiment Name: At_42deg_Heat_Sub_P Parameter: Age (day) Value: 14
  misc_feature: MA Experiment 20000327 PARAMETER Experiment Name: At_42deg_Heat_Sub_P Parameter: Organism Value: A. thaliana
  misc_feature: MA Experiment 20000327 PARAMETER Experiment Name: At_42deg_Heat_Sub_P Parameter: Plant Line Value: WS
  misc_feature: MA Experiment 20000327 PARAMETER Experiment Name: At_42deg_Heat_Sub_P Parameter: Temperature (deg C) Value: 42 vs. 22
  misc_feature: MA Experiment 20000327 PARAMETER Experiment Name: At_42deg_Heat_Sub_P Parameter: Timepoint (hr) Value: 1
  misc_feature: MA Experiment 20000327 PARAMETER Experiment Name: At_42deg_Heat_Sub_P Parameter: Tissue Value: Aerial
ttatcattcactcacgacactaaccatgaccaaattctccgagccaatcagagactcccacgtggcagttctcgcgtttttccccgttggcgctcatgccggtcctctcttagccgtcactcgccgtctcgccgccgcttctccctccaccatcttttctttcttcaacaccgcaagatcaaacgcgtcgttgttctcctctgatcatcccgagaacatcaaggtccacgacgtctctgacggtgttccggagggaaccatgctcgggaatccactggagatggtcgagctgtttctcgaagcggctccacgtattttccggagcgaaatcgcggcggcagagatagaagttggaaagaaagtgacatgcatgctaacagatgccttcttctggttcgcagcggacatagcggctgagctgaacgcgacttgggttgccttctgggccggcggagcaaactcactctgtgctcatctctacactgatctcatcagagaaaccatcggtctcaaagatgtgagtatggaagagacattagggtttataccaggaatggagaattacagagttaaagatataccagaggaagttgtatttgaagatttggactctgttttcccaaaggctttataccaaatgagtcttgctttacctcgtgcctctgctgttttcatcagttcctttgaagagttagaacctacattgaactataacctaagatccaaacttaaacgtttcttgaacatcgcccctctcacgttattatcttctacatcggagaaagagatgcgtgatcctcatggctgctttgcttggatggggaagagatcagctgcttctgtagcgtacattagcttcggcaccgtcatggaacctcctcctgaagagcttgtggcgatagcacaagggttggaatcaagcaaagtgccgtttgtttggtcgctgaaggagaagaacatggttcatctaccaaaagggtttttggatcggacaagagagcaagggatagtggttccttgggctccacaagtggaactgctgaaacacgaggcaatgggtgtgaatgtgacacattgtggatggaactcagtgttggagagtgtgtcggcaggtgtaccgatgatcggcagaccgattttggcggataataggctcaacggaagagcagtggaggttgtgtggaaggttggagtgatgatggataatggagtcttcacgaaagaaggatttgagaagtgtttgaatgatgtttttgttcatgatgatggtaagacgatgaaggctaatgccaagaagcttaaagaaaaactccaagaagatttctccatgaaaggaagctctttagagaatttcaaaatattgttggacgaaattgtgaaagtttaggttgtttacaacataattgaagactataaatgtgatttcaaaattaacaaaatcatagtcaaataagtgtgtgcctattctattttgtcaaagtaagagtgtatggatctattctatttcaaagggttgttg

SEQ ID NO: 102521 - protein, 461 aa, Arabidopsis thaliana
  peptide (1)..(461): Ceres Seq. ID no. 13610570
  misc_feature (34)..(460): Pfam Name: UDP-glucoronosyl and UDP-glucosyl transferase Pfam Description: UDP-glucoronosyl and UDP-glucosyl transferase
  misc_feature (9)..(461): Homolog of NCBI NO: 18397552 NR Description: glycosyltransferase family [Arabidopsis thaliana]
  misc_feature (9)..(461): Homolog of NCBI NO: 21593372 NR Description: UDP glucose:flavonoid 3-o-glucosyltransferase,
  misc_feature (9)..(461): Homolog of NCBI NO: 15237899 NR Description: glycosyltransferase family [Arabidopsis thaliana]
  misc_feature (9)..(459): Homolog of NCBI NO: 15237895 NR Description: glycosyltransferase family [Arabidopsis thaliana]
  misc_feature (18)..(461): Homolog of NCBI NO: 30686181 NR Description: glycosyltransferase family [Arabidopsis thaliana]
  misc_feature (36)..(461): Homolog of NCBI NO: 11358642 NR Description: probable flavonol 3-O-glucosyltransferase (EC
  misc_feature (13)..(460): Homolog of NCBI NO: 13620861 NR Description: UDP-glucose:flavonoid 3-O-glucosyltransferase
  misc_feature (13)..(460): Homolog of NCBI NO: 13620869 NR Description: UDP-glucose:flavonoid 3-O-glucosyltransferase
  misc_feature (13)..(460): Homolog of NCBI NO: 13620855 NR Description: UDP-glucose:flavonoid 3-O-glucosyltransferase
  misc_feature (13)..(460): Homolog of NCBI NO: 13620857 NR Description: UDP-glucose:flavonoid 3-O-glucosyltransferase
YHSLTTLTMTKFSEPIRDSHVAVLAFFPVGAHAGPLLAVTRRLAAASPSTIFSFFNTARSNASLFSSDHPENIKVHDVSDGVPEGTMLGNPLEMVELFLEAAPRIFRSEIAAAEIEVGKKVTCMLTDAFFWFAADIAAELNATWVAFWAGGANSLCAHLYTDLIRETIGLKDVSMEETLGFIPGMENYRVKDIPEEVVFEDLDSVFPKALYQMSLALPRASAVFISSFEELEPTLNYNLRSKLKRFLNIAPLTLLSSTSEKEMRDPHGCFAWMGKRSAASVAYISFGTVMEPPPEELVAIAQGLESSKVPFVWSLKEKNMVHLPKGFLDRTREQGIVVPWAPQVELLKHEAMGVNVTHCGWNSVLESVSAGVPMIGRPILADNRLNGRAVEVVWKVGVMMDNGVFTKEGFEKCLNDVFVHDDGKTMKANAKKLKEKLQEDFSMKGSSLENFKILLDEIVKV

SEQ ID NO: 102522 - protein, 453 aa, Arabidopsis thaliana; identical to SEQ ID NO: 24482
  peptide (1)..(453): Ceres Seq. ID no. 13610571
  misc_feature (26)..(452): Pfam Name: UDP-glucoronosyl and UDP-glucosyl transferase Pfam Description: UDP-glucoronosyl and UDP-glucosyl transferase
  misc_feature (1)..(453): Homolog of NCBI NO: 18397552 NR Description: glycosyltransferase family [Arabidopsis thaliana]
  misc_feature (1)..(453): Homolog of NCBI NO: 21593372 NR Description: UDP glucose:flavonoid 3-o-glucosyltransferase,
  misc_feature (1)..(453): Homolog of NCBI NO: 15237899 NR Description: glycosyltransferase family [Arabidopsis thaliana]
  misc_feature (1)..(451): Homolog of NCBI NO: 15237895 NR Description: glycosyltransferase family [Arabidopsis thaliana]
  misc_feature (10)..(453): Homolog of NCBI NO: 30686181 NR Description: glycosyltransferase family [Arabidopsis thaliana]
  misc_feature (28)..(453): Homolog of NCBI NO: 11358642 NR Description: probable flavonol 3-O-glucosyltransferase (EC
  misc_feature (5)..(452): Homolog of NCBI NO: 13620861 NR Description: UDP-glucose:flavonoid 3-O-glucosyltransferase
  misc_feature (5)..(452): Homolog of NCBI NO: 13620869 NR Description: UDP-glucose:flavonoid 3-O-glucosyltransferase
  misc_feature (5)..(452): Homolog of NCBI NO: 13620855 NR Description: UDP-glucose:flavonoid 3-O-glucosyltransferase
  misc_feature (5)..(452): Homolog of NCBI NO: 13620857 NR Description: UDP-glucose:flavonoid 3-O-glucosyltransferase

SEQ ID NO: 102523 - protein, 375 aa, Arabidopsis thaliana; identical to SEQ ID NO: 24483
  peptide (1)..(375): Ceres Seq. ID no. 13610572
  misc_feature (1)..(374): Pfam Name: UDP-glucoronosyl and UDP-glucosyl transferase Pfam Description: UDP-glucoronosyl and UDP-glucosyl transferase
  misc_feature (1)..(375): Homolog of NCBI NO: 18397552 NR Description: glycosyltransferase family [Arabidopsis thaliana]
  misc_feature (1)..(375): Homolog of NCBI NO: 21593372 NR Description: UDP glucose:flavonoid 3-o-glucosyltransferase,
  misc_feature (1)..(375): Homolog of NCBI NO: 15237899 NR Description: glycosyltransferase family [Arabidopsis thaliana]
  misc_feature (1)..(373): Homolog of NCBI NO: 15237895 NR Description: glycosyltransferase family [Arabidopsis thaliana]
  misc_feature (1)..(375): Homolog of NCBI NO: 30686181 NR Description: glycosyltransferase family [Arabidopsis thaliana]
  misc_feature (1)..(375): Homolog of NCBI NO: 11358642 NR Description: probable flavonol 3-O-glucosyltransferase (EC
  misc_feature (1)..(374): Homolog of NCBI NO: 13620861 NR Description: UDP-glucose:flavonoid 3-O-glucosyltransferase
  misc_feature (1)..(374): Homolog of NCBI NO: 13620869 NR Description: UDP-glucose:flavonoid 3-O-glucosyltransferase
  misc_feature (1)..(374): Homolog of NCBI NO: 13620855 NR Description: UDP-glucose:flavonoid 3-O-glucosyltransferase
  misc_feature (1)..(374): Homolog of NCBI NO: 13620857 NR Description: UDP-glucose:flavonoid 3-O-glucosyltransferase

SEQ ID NO: 102524 - DNA, 1420 bp, Arabidopsis thaliana
  misc_feature (1)..(1420): Ceres Seq. ID no. 13610588
  misc_feature: MA Experiment ID: 108501 Result: Up-regulated in Transcription
  misc_feature: MA Experiment 108501 PARAMETER Experiment Name: At_ap2_floral_buds_cDNA_P Parameter: Plant Line Value: ap2 (Ler.)
  misc_feature: MA Experiment 108501 PARAMETER Experiment Name: At_ap2_floral_buds_cDNA_P Parameter: Tissue Value: Closed Flower
  misc_feature: MA Experiment ID: 108595 Result: Up-regulated in Transcription
  misc_feature: MA Experiment 108595 PARAMETER Experiment Name: At_Ler-pi_Ovule_cDNA_P Parameter: Plant Line Value: null
  misc_feature: MA Experiment ID: 20000185 Result: Up-regulated in Transcription
  misc_feature: MA Experiment 20000185 PARAMETER Experiment Name: At_Roots__P Parameter: Age (day) Value: 7 vs. 21
  misc_feature: MA Experiment 20000185 PARAMETER Experiment Name: At_Roots__P Parameter: Organism Value: A. thaliana
  misc_feature: MA Experiment 20000185 PARAMETER Experiment Name: At_Roots__P Parameter: Tissue Value: Roots vs. Whole Plant
  misc_feature: MA Experiment ID: 20000227 Result: Down-regulated in Transcription
  misc_feature: MA Experiment 20000227 PARAMETER Experiment Name: At_Root-Tips-vs-Tops_P Parameter: Tissue Value: Root Tips vs. Root Tops
  misc_feature: MA Experiment ID: 20000439 Result: Up-regulated in Transcription
  misc_feature: MA Experiment 20000439 PARAMETER Experiment Name: At_Roots__P Parameter: Age (day) Value: 14 vs. 21
  misc_feature: MA Experiment 20000439 PARAMETER Experiment Name: At_Roots__P Parameter: Organism Value: A. thaliana
  misc_feature: MA Experiment 20000439 PARAMETER Experiment Name: At_Roots__P Parameter: Tissue Value: Roots vs. Whole Plant
  misc_feature: MA Experiment ID: 20000451 Result: Up-regulated in Transcription
  misc_feature: MA Experiment 20000451 PARAMETER Experiment Name: At_CS6879_Shoots-Roots_P Parameter: Age (day) Value: 14
  misc_feature: MA Experiment 20000451 PARAMETER Experiment Name: At_CS6879_Shoots-Roots_P Parameter: Organism Value: A. thaliana
  misc_feature: MA Experiment 20000451 PARAMETER Experiment Name: At_CS6879_Shoots-Roots_P Parameter: Plant Line Value: CS6879 vs. WS
  misc_feature: MA Experiment 20000451 PARAMETER Experiment Name: At_CS6879_Shoots-Roots_P Parameter: Tissue Value: Roots
  misc_feature: MA Experiment ID: 20000794 Result: Down-regulated in Transcription
  misc_feature: MA Experiment 20000794 PARAMETER Experiment Name: At_Petals_P Parameter: Age (day) Value: 23-25 days
  misc_feature: MA Experiment 20000794 PARAMETER Experiment Name: At_Petals_P Parameter: Plant Line Value: WS
  misc_feature: MA Experiment 20000794 PARAMETER Experiment Name: At_Petals_P Parameter: Tissue Value: Petals vs. Whole plant
  misc_feature: MA Experiment ID: 20001451 Result: Up-regulated in Transcription
  misc_feature: MA Experiment 20001451 PARAMETER Experiment Name: At_Far-red-induction_P Parameter: Age (day) Value: 7
  misc_feature: MA Experiment 20001451 PARAMETER Experiment Name: At_Far-red-induction_P Parameter: Light Value: Far-red vs. White
  misc_feature: MA Experiment 20001451 PARAMETER Experiment Name: At_Far-red-induction_P Parameter: Organism Value: A. thaliana
  misc_feature: MA Experiment 20001451 PARAMETER Experiment Name: At_Far-red-induction_P Parameter: Plant Line Value: Columbia
  misc_feature: MA Experiment 20001451 PARAMETER Experiment Name: At_Far-red-induction_P Parameter: Timepoint (hr) Value: 24
  misc_feature: MA Experiment 20001451 PARAMETER Experiment Name: At_Far-red-induction_P Parameter: Tissue Value: Whole Plant
  misc_feature: MA Experiment ID: 20001905 Result: Down-regulated in Transcription
  misc_feature: MA Experiment 20001905 PARAMETER Experiment Name: At_Drought_Reproduction_P Parameter: Age (day) Value: 40
  misc_feature: MA Experiment 20001905 PARAMETER Experiment Name: At_Drought_Reproduction_P Parameter: Organism Value: A. thaliana
  misc_feature: MA Experiment 20001905 PARAMETER Experiment Name: At_Drought_Reproduction_P Parameter: Plant Line Value: WS
  misc_feature: MA Experiment 20001905 PARAMETER Experiment Name: At_Drought_Reproduction_P Parameter: Timepoint (day) Value: 10
  misc_feature: MA Experiment 20001905 PARAMETER Experiment Name: At_Drought_Reproduction_P Parameter: Tissue Value: Rosettes
  misc_feature: MA Experiment 20001905 PARAMETER Experiment Name: At_Drought_Reproduction_P Parameter: Treatment Value: Drought vs. No Drought
gtattgtgttgttggagactgaaccatcaacgctttttcgacacttcttcttcttcctcctttctctcttcatgcaaaatcacagttacaagaaataaacaaaagattataaatcaaaacataaagagacaaaaatgagtgatggtcgagttaacgcagatcctcaacaagaagagaacatggttaaaccaccggttaagagatctctcactctcctcatcgtgacttacttttttctcttcttcggctctatcgcttcgagccttctcgcgaagtactatttcgtctacggtggctcgagccggtgggtctccacgtgggttcaatctgctggcttccctctcctcctcatcctaatctacttccctcactacgttctcaaaaccaccactcgccgtcctttcacgcgcttcacgctccgccatctcatcttctccgtgttgatcgggcttgttctcggtttcaacaacttcctcttctcatggggaacctcgtaccttccggtgtccacgtcatcgcttctcctctcgacacaactcgtcttcactctcattttgtctaggatcatagtgaaacagaagatcactttctcaaacctcaactgcgttgtcctgttgacgttaagctctgttttgttggctcttgattcgagtaaagataaaccgtccggtttaaccaaaaccaagtatttcatcgggtatgtatccacgatcggagccggtttactcttcgctctttacctccccgtgacggagaagctataccgtaccgtttattgttacgcgatggtcatggaggtgcaactggtgatggaattcgcagcgacggttttcgcgacaatcggtatggcttgcgaaggcgggtttaaggaaatggttaaggaagcgaaccatgttttcaccaaaggaccaacattttattggacgtttgcgatactagcaaatgtggtgacgtggcagctctctttcgcagccacgtcagggatggtttacttgacgtcaggtatcaccggaggtatctgcatgacggcgttgctcgcgatgaatgtgataggaggtgtggtggcttacggtgacgtgtttggtggagtgaagattgtgtcgacggtgctatgtatttggggattctcatcttacacatacgggatgtatatgaagatgaagaaggaggagaaggagaagggagaatattccggcgtaaagacgacggaagacagcggagagatggaggtggaaatgggaaatgttaaagatgacgtggcggcggcggatgatagggcttgaagatatctgtgtgattgagacggccgttatgattattattaggaaggaagccaacaaaaaaaaaaaaagtagtagtatctttttgtgttctttctttttctcaccttatgtttttttagtaatgcatttgcttttgt

SEQ ID NO: 102525 - protein, 382 aa, Arabidopsis thaliana; identical to SEQ ID NO: 40365
  peptide (1)..(382): Ceres Seq. ID no. 13610589
  misc_feature (171)..(352): Pfam Name: Domain of unknown function, DUF250 Pfam Description: Domain of unknown function, DUF250
  misc_feature (1)..(382): Homolog of NCBI NO: 18397682 NR Description: purine permease-related [Arabidopsis thaliana] T17H7.15 [Arabidopsis thaliana] >gi|21536872|gb|AAM61204.1| [Arabidopsis thaliana] >gi|28393519|gb|AAO42180.1| unknown
  misc_feature (22)..(344): Homolog of NCBI NO: 34911172 NR Description: putative purine permease [Oryza sativa (japonica group)] >gi|20161112|dbj|BAB90042.1| putative purine permease
  misc_feature (27)..(344): Homolog of NCBI NO: 15217873 NR Description: purine permease [Arabidopsis thaliana]
  misc_feature (27)..(344): Homolog of NCBI NO: 7620007 NR Description: purine permease [Arabidopsis thaliana]
  misc_feature (27)..(361): Homolog of NCBI NO: 15217872 NR Description: purine permease, putative [Arabidopsis thaliana]
  misc_feature (21)..(351): Homolog of NCBI NO: 30685825 NR Description: purine permease family [Arabidopsis thaliana]
  misc_feature (27)..(351): Homolog of NCBI NO: 25350217 NR Description: hypothetical protein At2g33750 [imported] - thaliana >gi|1707019|gb|AAC69140.1| hypothetical protein
  misc_feature (27)..(336): Homolog of NCBI NO: 15219436 NR Description: purine permease family [Arabidopsis thaliana]
  misc_feature (27)..(347): Homolog of NCBI NO: 38344290 NR Description: OSJNBa0013K16.22 [Oryza sativa (japonica
  misc_feature (27)..(378): Homolog of NCBI NO: 38605752 NR Description: OSJNBb0016D16.5 [Oryza sativa (japonica

SEQ ID NO: 102526 - protein, 367 aa, Arabidopsis thaliana; identical to SEQ ID NO: 40366
  peptide (1)..(367): Ceres Seq. ID no. 13610590
  misc_feature (156)..(337): Pfam Name: Domain of unknown function, DUF250 Pfam Description: Domain of unknown function, DUF250
  misc_feature (1)..(367): Homolog of NCBI NO: 18397682 NR Description: purine permease-related [Arabidopsis thaliana] T17H7.15 [Arabidopsis thaliana] >gi|21536872|gb|AAM61204.1| [Arabidopsis thaliana] >gi|28393519|gb|AAO42180.1| unknown
  misc_feature (7)..(329): Homolog of NCBI NO: 34911172 NR Description: putative purine permease [Oryza sativa (japonica group)] >gi|20161112|dbj|BAB90042.1| putative purine permease
  misc_feature (12)..(329): Homolog of NCBI NO: 15217873 NR Description: purine permease [Arabidopsis thaliana]
  misc_feature (12)..(329): Homolog of NCBI NO: 7620007 NR Description: purine permease [Arabidopsis thaliana]
  misc_feature (12)..(346): Homolog of NCBI NO: 15217872 NR Description: purine permease, putative [Arabidopsis thaliana]
  misc_feature (6)..(336): Homolog of NCBI NO: 30685825 NR Description: purine permease family [Arabidopsis thaliana]
  misc_feature (12)..(336): Homolog of NCBI NO: 25350217 NR Description: hypothetical protein At2g33750 [imported] - thaliana >gi|1707019|gb|AAC69140.1| hypothetical protein
  misc_feature (12)..(321): Homolog of NCBI NO: 15219436 NR Description: purine permease family [Arabidopsis thaliana]
  misc_feature (12)..(332): Homolog of NCBI NO: 38344290 NR Description: OSJNBa0013K16.22 [Oryza sativa (japonica
  misc_feature (12)..(363): Homolog of NCBI NO: 38605752 NR Description: OSJNBb0016D16.5 [Oryza sativa (japonica

SEQ ID NO: 102527 - DNA, 1221 bp, Arabidopsis thaliana
  misc_feature (1)..(1221): Ceres Seq. ID no. 13610591
  misc_feature: MA Experiment ID: 108461 Result: Up-regulated in Transcription
  misc_feature: MA Experiment 108461 PARAMETER Experiment Name: At_Germinating_Seeds_cDNA_P Parameter: Age (day) Value: 1 vs. 0
  misc_feature: MA Experiment 108461 PARAMETER Experiment Name: At_Germinating_Seeds_cDNA_P Parameter: Tissue Value: Germinating Seeds
  misc_feature: MA Experiment ID: 108462 Result: Up-regulated in Transcription
  misc_feature: MA Experiment 108462 PARAMETER Experiment Name: At_Germinating_Seeds_cDNA_P Parameter: Age (day) Value: 2 vs. 0
  misc_feature: MA Experiment 108462 PARAMETER Experiment Name: At_Germinating_Seeds_cDNA_P Parameter: Tissue Value: Germinating Seeds
  misc_feature: MA Experiment ID: 108463 Result: Up-regulated in Transcription
  misc_feature: MA Experiment 108463 PARAMETER Experiment Name: At_Germinating_Seeds_cDNA_P Parameter: Age (day) Value: 3 vs. 0
  misc_feature: MA Experiment 108463 PARAMETER Experiment Name: At_Germinating_Seeds_cDNA_P Parameter: Tissue Value: Germinating Seeds
  misc_feature: MA Experiment ID: 108464 Result: Up-regulated in Transcription
  misc_feature: MA Experiment 108464 PARAMETER Experiment Name: At_Germinating_Seeds_cDNA_P Parameter: Age (day) Value: 4 vs. 0
  misc_feature: MA Experiment 108464 PARAMETER Experiment Name: At_Germinating_Seeds_cDNA_P Parameter: Tissue Value: Germinating Seeds
  misc_feature: MA Experiment ID: 108594 Result: Down-regulated in Transcription
  misc_feature: MA Experiment 108594 PARAMETER Experiment Name: At_Ler-rhl_Root_cDNA_P Parameter: Plant Line Value: null
  misc_feature: MA Experiment ID: 20000180 Result: Up-regulated in Transcription
  misc_feature: MA Experiment 20000180 PARAMETER Experiment Name: At_Germinating_Seeds_P Parameter: Age (hr) Value: 24 vs. 0
  misc_feature: MA Experiment 20000180 PARAMETER Experiment Name: At_Germinating_Seeds_P Parameter: Tissue Value: Germinating Seeds
  misc_feature: MA Experiment ID: 20000185 Result: Up-regulated in Transcription
  misc_feature: MA Experiment 20000185 PARAMETER Experiment Name: At_Roots__P Parameter: Age (day) Value: 7 vs. 21
  misc_feature: MA Experiment 20000185 PARAMETER Experiment Name: At_Roots__P Parameter: Organism Value: A. thaliana
  misc_feature: MA Experiment 20000185 PARAMETER Experiment Name: At_Roots__P Parameter: Tissue Value: Roots vs. Whole Plant
  misc_feature: MA Experiment ID: 20000439 Result: Up-regulated in Transcription
  misc_feature: MA Experiment 20000439 PARAMETER Experiment Name: At_Roots__P Parameter: Age (day) Value: 14 vs. 21
  misc_feature: MA Experiment 20000439 PARAMETER Experiment Name: At_Roots__P Parameter: Organism Value: A. thaliana
  misc_feature: MA Experiment 20000439 PARAMETER Experiment Name: At_Roots__P Parameter: Tissue Value: Roots vs. Whole Plant
  misc_feature: MA Experiment ID: 20000527 Result: Down-regulated in Transcription
  misc_feature: MA Experiment 20000527 PARAMETER Experiment Name: At_10percent_PEG_P Parameter: Age (day) Value: 20
  misc_feature: MA Experiment 20000527 PARAMETER Experiment Name: At_10percent_PEG_P Parameter: Organism Value: A. thaliana
  misc_feature: MA Experiment 20000527 PARAMETER Experiment Name: At_10percent_PEG_P Parameter: Plant Line Value: WS
  misc_feature: MA Experiment 20000527 PARAMETER Experiment Name: At_10percent_PEG_P Parameter: Timepoint (day) Value: 20
  misc_feature: MA Experiment 20000527 PARAMETER Experiment Name: At_10percent_PEG_P Parameter: Tissue Value: Whole Plant
  misc_feature: MA Experiment 20000527 PARAMETER Experiment Name: At_10percent_PEG_P Parameter: Treatment Value: 10percent PEG vs. No Treatment
  misc_feature: MA Experiment ID: 20001450 Result: Down-regulated in Transcription
  misc_feature: MA Experiment 20001450 PARAMETER Experiment Name: At_Far-red-induction_P Parameter: Age (day) Value: 7
  misc_feature: MA Experiment 20001450 PARAMETER Experiment Name: At_Far-red-induction_P Parameter: Light Value: Far-red vs. White
  misc_feature: MA Experiment 20001450 PARAMETER Experiment Name: At_Far-red-induction_P Parameter: Organism Value: A. thaliana
  misc_feature: MA Experiment 20001450 PARAMETER Experiment Name: At_Far-red-induction_P Parameter: Plant Line Value: Columbia
  misc_feature: MA Experiment 20001450 PARAMETER Experiment Name: At_Far-red-induction_P Parameter: Timepoint (hr) Value: 8
  misc_feature: MA Experiment 20001450 PARAMETER Experiment Name: At_Far-red-induction_P Parameter: Tissue Value: Whole Plant
aaattcatcaaagccaatcaaattgagagagatatcaagaaagcaaaataatgaagttggccgtggtctcagtcgttgtcatactcggagttctcgtggcttggccggtatcggctggccgaaaagacttacctggagcgggaggatacggaggcgatgacgatgatgatacaaagtcattgttccctttggacaacctattatcgttgaattattatgataggatttgtccagattttgagaaaatcgttgttacgaaagtgagggaatggactaagagtgactcttcccttggtcccgccctcctccgccttatcttccacgattgtggcgtcacgggatgtgatgcgtctgttcttctagactacgaagggacagagagaagatctccggctagcaaaacactaagaggcttcgagctaattgacgatatcaagtccgagatggagaaatcatgccccggcaaagtatcctgcgccgacatcctaacatcagccagccgtgccgccaccgtccaacttggtggtccttactggcccaacgtctacggtcgtcgtgactccaaacactcttacgctagagacgtagagaaagtcccttcaggccgtcgtgatgttaccgcccttctcgaaacgtttcagtcatacggtctcaacgtcctcgacctagttgtcctttccggggcccacaccatcggaaaagcgtcctgtggcaccatccagtcgaggctttacaactacaacgcaaccagtggttcagatccttcgattgacgcaaaatacgctgattacttgcaacgcaggtgtcgctgggcctctgagaccgtcgatctcgaccctgtaactccagcagtgttcgataatcagtactacattaatcttcagaagcatatgggagttttgtcgactgatcaggagcttgttaaggacccaaggactgctccgcttgtaaagactttcgcagagcaatcacctcagatattcagacagcagtttgctgtgtccatggctaagctggtcaacgttggagttctcactggtgaagatcgtgtcggagagatcaggaaggtttgcagcaaatctaactccagagcttactaaattataatcatcatccctcatgagaaggatcttttgtttcttgaaataatttcttgtttggtttttgagctcttttctattgcaattttgtaatttgttgtatgaacaagaacaaaaactg

SEQ ID NO: 102528 - protein, 349 aa, Arabidopsis thaliana
  peptide (1)..(349): Ceres Seq. ID no. 13610592
  misc_feature (67)..(306): Pfam Name: Peroxidase Pfam Description: Peroxidase
  misc_feature (1)..(349): Homolog of NCBI NO: 15221535 NR Description: cationic peroxidase, putative [Arabidopsis >gi|25453222|sp|Q9SY33|PER7_ARATH Peroxidase 7 precursor (Atperox (ATP30) >gi|4926834|gb|AAD32944.1|AC004135_19 T17H7.19
  misc_feature (51)..(349): Homolog of NCBI NO: 34394588 NR Description: putative peroxidase prx15 precursor [Oryza sativa
  misc_feature (47)..(341): Homolog of NCBI NO: 30694586 NR Description: peroxidase, putative [Arabidopsis thaliana]
  misc_feature (47)..(341): Homolog of NCBI NO: 1546702 NR Description: peroxidase; peroxidase ATP5a [Arabidopsis
  misc_feature (53)..(345): Homolog of NCBI NO: 129808 NR Description: Cationic peroxidase 2 precursor (PNPC2)
  misc_feature (53)..(345): Homolog of NCBI NO: 18558997 NR Description: bacterial-induced peroxidase [Gossypium hirsutum]
  misc_feature (51)..(345): Homolog of NCBI NO: 1546692 NR Description: peroxidase; peroxidase ATP19a [Arabidopsis
  misc_feature (51)..(345): Homolog of NCBI NO: 15237128 NR Description: peroxidase, putative [Arabidopsis thaliana]
  misc_feature (55)..(346): Homolog of NCBI NO: 15234394 NR Description: peroxidase, putative [Arabidopsis thaliana]
  misc_feature (55)..(346): Homolog of NCBI NO: 7453855 NR Description: peroxidase prx15 precursor [Spinacia oleracea]
MKLAVVSVVVILGVLVAWPVSAGRKDLPGAGGYGGDDDDDTKSLFPLDNLLSLNYYDRICPDFEKIVVTKVREWTKSDSSLGPALLRLIFHDCGVTGCDASVLLDYEGTERRSPASKTLRGFELIDDIKSEMEKSCPGKVSCADILTSASRAATVQLGGPYWPNVYGRRDSKHSYARDVEKVPSGRRDVTALLETFQSYGLNVLDLVVLSGAHTIGKASCGTIQSRLYNYNATSGSDPSIDAKYADYLQRRCRWASETVDLDPVTPAVFDNQYYINLQKHMGVLSTDQELVKDPRTAPLVKTFAEQSPQIFRQQFAVSMAKLVNVGVLTGEDRVGEIRKVCSKSNSRAY

SEQ ID NO: 102529 - protein, 218 aa, Arabidopsis thaliana
  peptide (1)..(218): Ceres Seq. ID no. 13610593
  misc_feature (1)..(175): Pfam Name: Peroxidase Pfam Description: Peroxidase
  misc_feature (1)..(218): Homolog of NCBI NO: 15221535 NR Description: cationic peroxidase, putative [Arabidopsis >gi|25453222|sp|Q9SY33|PER7_ARATH Peroxidase 7 precursor (Atperox (ATP30) >gi|4926834|gb|AAD32944.1|AC004135_19 T17H7.19
  misc_feature (1)..(218): Homolog of NCBI NO: 34394588 NR Description: putative peroxidase prx15 precursor [Oryza sativa
  misc_feature (1)..(210): Homolog of NCBI NO: 30694586 NR Description: peroxidase, putative [Arabidopsis thaliana]
  misc_feature (1)..(210): Homolog of NCBI NO: 1546702 NR Description: peroxidase; peroxidase ATP5a [Arabidopsis
  misc_feature (1)..(214): Homolog of NCBI NO: 129808 NR Description: Cationic peroxidase 2 precursor (PNPC2)
  misc_feature (1)..(214): Homolog of NCBI NO: 18558997 NR Description: bacterial-induced peroxidase [Gossypium hirsutum]
  misc_feature (1)..(214): Homolog of NCBI NO: 1546692 NR Description: peroxidase; peroxidase ATP19a [Arabidopsis
  misc_feature (1)..(214): Homolog of NCBI NO: 15237128 NR Description: peroxidase, putative [Arabidopsis thaliana]
  misc_feature (1)..(215): Homolog of NCBI NO: 15234394 NR Description: peroxidase, putative [Arabidopsis thaliana]
  misc_feature (1)..(215): Homolog of NCBI NO: 7453855 NR Description: peroxidase prx15 precursor [Spinacia oleracea]
MEKSCPGKVSCADILTSASRAATVQLGGPYWPNVYGRRDSKHSYARDVEKVPSGRRDVTALLETFQSYGLNVLDLVVLSGAHTIGKASCGTIQSRLYNYNATSGSDPSIDAKYADYLQRRCRWASETVDLDPVTPAVFDNQYYINLQKHMGVLSTDQELVKDPRTAPLVKTFAEQSPQIFRQQFAVSMAKLVNVGVLTGEDRVGEIRKVCSKSNSRAY

SEQ ID NO: 102530 - DNA, 1328 bp, Arabidopsis thaliana
  misc_feature (1)..(1328): Ceres Seq. ID no. 13610602
  misc_feature: MA Experiment ID: 20000265 Result: Up-regulated in Transcription
  misc_feature: MA Experiment 20000265 PARAMETER Experiment Name: At_Open_Flower_P Parameter: Age (day) Value: 21
  misc_feature: MA Experiment 20000265 PARAMETER Experiment Name: At_Open_Flower_P Parameter: Plant Line Value: WS
  misc_feature: MA Experiment 20000265 PARAMETER Experiment Name: At_Open_Flower_P Parameter: Tissue Value: Closed Flower vs. Whole Plant
  misc_feature: MA Experiment ID: 20000286 Result: Up-regulated in Transcription
  misc_feature: MA Experiment 20000286 PARAMETER Experiment Name: At_Open_Flower_P Parameter: Age (day) Value: 21
  misc_feature: MA Experiment 20000286 PARAMETER Experiment Name: At_Open_Flower_P Parameter: Plant Line Value: WS
  misc_feature: MA Experiment 20000286 PARAMETER Experiment Name: At_Open_Flower_P Parameter: Tissue Value: Half Open vs. Whole Plant
  misc_feature: MA Experiment ID: 20001910 Result: Down-regulated in Transcription
  misc_feature: MA Experiment 20001910 PARAMETER Experiment Name: At_Drought_Reproduction_P Parameter: Age (day) Value: 37
  misc_feature: MA Experiment 20001910 PARAMETER Experiment Name: At_Drought_Reproduction_P Parameter: Organism Value: A. thaliana
  misc_feature: MA Experiment 20001910 PARAMETER Experiment Name: At_Drought_Reproduction_P Parameter: Plant Line Value: WS
  misc_feature: MA Experiment 20001910 PARAMETER Experiment Name: At_Drought_Reproduction_P Parameter: Timepoint (day) Value: 7
  misc_feature: MA Experiment 20001910 PARAMETER Experiment Name: At_Drought_Reproduction_P Parameter: Tissue Value: Flowers
  misc_feature: MA Experiment 20001910 PARAMETER Experiment Name: At_Drought_Reproduction_P Parameter: Treatment Value: Drought vs. No Drought
cttctcgcatcttatatgaaacacattcactctccaaaataatctatacttttcctacatattctcttgacgatcatgagactgatttcgtgaaaatatcgtcattatatcaaattagaagttgatggaaaacatgggggattcgagcatagggccgggccatccgcatctccctcccgggtttcggtttcacccgactgatgaggaactagtagttcattacctcaagaagaaagcagattctgttccacttccagtctcaatcatcgcagagattgatctttacaagtttgatccttgggagcttccaagcaaggcgagttttggagagcacgagtggtacttctttagtcctcgggatcggaagtatccaaatggggttaggccaaaccgggcagcaacttccggttattggaaagcaacgggaaccgataaaccgatatttacgtgcaatagtcacaaggttggtgtcaagaaagcgcttgttttttacggtggaaagcctcctaaagggataaaaacagattggatcatgcatgaatatcgcctcactgatggtaaccttagcactgcggctaagccgcctgacttaaccacgacaaggaaaaactcactacggctagacgattgggttctatgtaggatctataagaagaatagttcacaaagaccaacaatggagagagtattacttagagaggatctaatggaaggcatgctctcaaaatcatctgctaattcttcttctacatcagtactagacaacaacgacaacaataataacaataacgaagaacactttttcgacggtatggtcgtttcttcagacaaacgttccttgtgtggtcaataccgaatgggccacgaggcctcaggatcatcttcattcggatctttcttatcgagcaagaggtttcatcatacaggtgatctcaacaatgataactacaatgtctcttttgtttcgatgcttagtgagattcctcagagttcggggtttcatgcaaatggtgttatggatacgacgtcgtctctagctgatcatggggttttaagacaggcgtttcagcttcctaacatgaactggcactcataatctatatagatatatatgtgtgtatcatatatgtatctatgcaggcctaatatagtttacacataaatcatctgggaatatatatatacaagtacgcggtcttacaaatgtatacgtatctgtttaattacgtcaagaaaaagtgtatacgtttctttttactcaatggctgcaaagatgtgtactaataacagaagctgattaataaaaaatataaaagtatattttttcc

SEQ ID NO: 102531 - protein, 323 aa, Arabidopsis thaliana; identical to SEQ ID NO: 24690
  peptide (1)..(323): Ceres Seq. ID no. 13610603
  misc_feature (16)..(143): Pfam Name: No apical meristem (NAM) protein Pfam Description: No apical meristem (NAM) protein
  misc_feature (1)..(323): Homolog of NCBI NO: 18407026 NR Description: No apical meristem (NAM) protein family thaliana] >gi|26450820|dbj|BAC42518.1| unknown protein thaliana] >gi|30725366|gb|AAP37705.1| At1g61110 [Arabidopsis
  misc_feature (1)..(323): Homolog of NCBI NO: 21593425 NR Description: NAM protein, putative [Arabidopsis thaliana]
  misc_feature (4)..(267): Homolog of NCBI NO: 25352286 NR Description: hypothetical protein F11P17.16 [imported] - thaliana >gi|2443890|gb|AAB71483.1| similar to NAM
  misc_feature (1)..(180): Homolog of NCBI NO: 15219110 NR Description: No apical meristem (NAM) protein family
  misc_feature (1)..(180): Homolog of NCBI NO: 20466640 NR Description: NAM-like protein [Arabidopsis thaliana]
  misc_feature (1)..(229): Homolog of NCBI NO: 15232606 NR Description: No apical meristem (NAM) protein family thaliana] >gi|7021736|gb|AAF35417.1| putative jasmonic acid
  misc_feature (1)..(180): Homolog of NCBI NO: 21554226 NR Description: NAM-like protein [Arabidopsis thaliana]
  misc_feature (11)..(206): Homolog of NCBI NO: 34899790 NR Description: OJ1773_H01.21 [Oryza sativa (japonica >gi|24417196|dbj|BAC22555.1| putative OsNAC5 protein [Oryza
  misc_feature (16)..(183): Homolog of NCBI NO: 34902154 NR Description: Putative NAM (no apical meristem) protein [Oryza
  misc_feature (16)..(196): Homolog of NCBI NO: 18409291 NR Description: No apical meristem (NAM) protein family

SEQ ID NO: 102532 - protein, 320 aa, Arabidopsis thaliana; identical to SEQ ID NO: 24691
  peptide (1)..(320): Ceres Seq. ID no. 13610604
  misc_feature (13)..(140): Pfam Name: No apical meristem (NAM) protein Pfam Description: No apical meristem (NAM) protein
  misc_feature (1)..(320): Homolog of NCBI NO: 18407026 NR Description: No apical meristem (NAM) protein family thaliana] >gi|26450820|dbj|BAC42518.1| unknown protein thaliana] >gi|30725366|gb|AAP37705.1| At1g61110 [Arabidopsis
  misc_feature (1)..(320): Homolog of NCBI NO: 21593425 NR Description: NAM protein, putative [Arabidopsis thaliana]
  misc_feature (1)..(264): Homolog of NCBI NO: 25352286 NR Description: hypothetical protein F11P17.16 [imported] - thaliana >gi|2443890|gb|AAB71483.1| similar to NAM
  misc_feature (1)..(177): Homolog of NCBI NO: 15219110 NR Description: No apical meristem (NAM) protein family
  misc_feature (1)..(177): Homolog of NCBI NO: 20466640 NR Description: NAM-like protein [Arabidopsis thaliana]
  misc_feature (1)..(226): Homolog of NCBI NO: 15232606 NR Description: No apical meristem (NAM) protein family thaliana] >gi|7021736|gb|AAF35417.1| putative jasmonic acid
  misc_feature (1)..(177): Homolog of NCBI NO: 21554226 NR Description: NAM-like protein [Arabidopsis thaliana]
  misc_feature (8)..(203): Homolog of NCBI NO: 34899790 NR Description: OJ1773_H01.21 [Oryza sativa (japonica >gi|24417196|dbj|BAC22555.1| putative OsNAC5 protein [Oryza
  misc_feature (13)..(180): Homolog of NCBI NO: 34902154 NR Description: Putative NAM (no apical meristem) protein [Oryza
  misc_feature (13)..(193): Homolog of NCBI NO: 18409291 NR Description: No apical meristem (NAM) protein family

SEQ ID NO: 102533 - protein, 187 aa, Arabidopsis thaliana; identical to SEQ ID NO: 24692
  peptide (1)..(187): Ceres Seq. ID no. 13610605
  misc_feature (1)..(187): Homolog of NCBI NO: 18407026 NR Description: No apical meristem (NAM) protein family thaliana] >gi|26450820|dbj|BAC42518.1| unknown protein thaliana] >gi|30725366|gb|AAP37705.1| At1g61110 [Arabidopsis
  misc_feature (1)..(187): Homolog of NCBI NO: 21593425 NR Description: NAM protein, putative [Arabidopsis thaliana]
  misc_feature (1)..(131): Homolog of NCBI NO: 25352286 NR Description: hypothetical protein F11P17.16 [imported] - thaliana >gi|2443890|gb|AAB71483.1| similar to NAM
  misc_feature (1)..(44): Homolog of NCBI NO: 15219110 NR Description: No apical meristem (NAM) protein family
  misc_feature (1)..(44): Homolog of NCBI NO: 20466640 NR Description: NAM-like protein [Arabidopsis thaliana]
  misc_feature (1)..(93): Homolog of NCBI NO: 15232606 NR Description: No apical meristem (NAM) protein family thaliana] >gi|7021736|gb|AAF35417.1| putative jasmonic acid
  misc_feature (1)..(44): Homolog of NCBI NO: 21554226 NR Description: NAM-like protein [Arabidopsis thaliana]
  misc_feature (1)..(70): Homolog of NCBI NO: 34899790 NR Description: OJ1773_H01.21 [Oryza sativa (japonica >gi|24417196|dbj|BAC22555.1| putative OsNAC5 protein [Oryza
  misc_feature (1)..(47): Homolog of NCBI NO: 34902154 NR Description: Putative NAM (no apical meristem) protein [Oryza
  misc_feature (1)..(60): Homolog of NCBI NO: 18409291 NR Description: No apical meristem (NAM) protein family

SEQ ID NO: 102534 - DNA, 946 bp, Arabidopsis thaliana
  misc_feature (1)..(946): Ceres Seq. ID no. 13610606
  misc_feature: MA Experiment ID: 108434 Result: Up-regulated in Transcription
  misc_feature: MA Experiment 108434 PARAMETER Experiment Name: At_Root_Tips_cDNA_P Parameter: Tissue Value: Root Tips
  misc_feature: MA Experiment ID: 108594 Result: Down-regulated in Transcription
  misc_feature: MA Experiment 108594 PARAMETER Experiment Name: At_Ler-rhl_Root_cDNA_P Parameter: Plant Line Value: null
  misc_feature: MA Experiment ID: 108595 Result: Down-regulated in Transcription
  misc_feature: MA Experiment 108595 PARAMETER Experiment Name: At_Ler-pi_Ovule_cDNA_P Parameter: Plant Line Value: null
  misc_feature: MA Experiment ID: 20000495 Result: Down-regulated in Transcription
  misc_feature: MA Experiment 20000495 PARAMETER Experiment Name: At_Guard_Cells_P Parameter: Harvest Date Value: 8/2/2002
  misc_feature: MA Experiment 20000495 PARAMETER Experiment Name: At_Guard_Cells_P Parameter: Organism Value: A. thaliana
  misc_feature: MA Experiment 20000495 PARAMETER Experiment Name: At_Guard_Cells_P Parameter: Tissue Value: Guard Cells vs. Leaves
aaacctccaacttttttttgttttatcagattgtaaatttagggaagagactttcgcaagcaatctagaagcaaatcgatcgccaaatctccggattatttgcaagaatcgttcccagataatcttccccagattctccacttctccaggtattaatttcgtattgagtggattagattagatttcaagatatgagagcctcactggcgttctaatgtcactgtttcgtatttttatcaatcagcttgaagaagacgacgaagatatggctacttcgaagaaaatgatcacacgtgaagaatgggagaagaaactaaatgctgtgaagcttaggaaagaagatatgaatactttggtgatgaattttcttgtgactgaaggatatgttgaagctgctgagaaattccaaagggagtctggaaccaaaccagagatagatcttgcgaccattactgatcgaatggctgttaaaaaggctgttcaaaacggaaatgtcgaggatgcgattgaaaaagttaatgatttgaatcctgagatactagacacgaatccggagctcttttttcatcttcagcagcaaaggttgatagaattaattcgacaagggaagacagaagaggccttagagtttgctcaggaggaacttgcaccacgtggcgaagaaaaccaagcgtttctggaagaattggaaaaaactgtagccctacttgtttttgacgatgcctctacctgcccggttaaagagcttcttgatctttcccaccgtcttaagacagcaagtgaagtaaatgcagcgattcttacaagccagagccacgaaaaagatcctaaacttccaagcttgttgaagatgttgatttgggctcaaactcaactggacgagaaagcagtgtatccgcacattaatgatttgtctaccggtaagctcgaagacccgtcagaatga

SEQ ID NO: 102535 - protein, 243 aa, Arabidopsis thaliana
  peptide (1)..(243): Ceres Seq. ID no. 13610607
  misc_feature (1)..(243): Homolog of NCBI NO: 15219873 NR Description: expressed protein [Arabidopsis thaliana]
  misc_feature (1)..(235): Homolog of NCBI NO: 25404311 NR Description: hypothetical protein F11P17.12 [imported] - thaliana >gi|2443886|gb|AAB71479.1| Unknown protein [Arabidopsis
  misc_feature (18)..(238): Homolog of NCBI NO: 30681030 NR Description: expressed protein [Arabidopsis thaliana]
  misc_feature (25)..(241): Homolog of NCBI NO: 20863687 NR Description: RIKEN cDNA 2310003C23 [Mus musculus] similar to RIKEN cDNA 2310003C23 [Mus musculus] [Rattus >gi|28201785|sp|Q9D7M1|CT11_MOUSE Protein C20orf11 homolog
  misc_feature (10)..(238): Homolog of NCBI NO: 26451919 NR Description: unknown protein [Arabidopsis thaliana]
  misc_feature (25)..(241): Homolog of NCBI NO: 8923557 NR Description: chromosome 20 open reading frame 11; two hybrid protein 1 [Homo sapiens] >gi|28201788|sp|Q9NWU2|CT11_HUMAN C20orf11 >gi|7020818|dbj|BAA91285.1| unnamed protein product
  misc_feature (18)..(241): Homolog of NCBI NO: 37748055 NR Description: Unknown (protein for MGC:73100) [Danio rerio]
  misc_feature (25)..(241): Homolog of NCBI NO: 21594655 NR Description: chromosome 20 open reading frame 11 [Homo sapiens]
  misc_feature (25)..(239): Homolog of NCBI NO: 24643081 NR Description: CG6617-PA [Drosophila melanogaster]
  misc_feature (20)..(203): Homolog of NCBI NO: 7487558 NR Description: hypothetical protein T30A10.60 - Arabidopsis >gi|5881775|emb|CAB55693.1| putative protein [Arabidopsis >gi|7267572|emb|CAB78053.1| putative protein [Arabidopsis
MSLFRIFINQLEEDDEDMATSKKMITREEWEKKLNAVKLRKEDMNTLVMNFLVTEGYVEAAEKFQRESGTKPEIDLATITDRMAVKKAVQNGNVEDAIEKVNDLNPEILDTNPELFFHLQQQRLIELIRQGKTEEALEFAQEELAPRGEENQAFLEELEKTVALLVFDDASTCPVKELLDLSHRLKTASEVNAAILTSQSHEKDPKLPSLLKMLIWAQTQLDEKAVYPHINDLSTGKLEDPSE

SEQ ID NO: 102536 - protein, 226 aa, Arabidopsis thaliana; identical to SEQ ID NO: 73145
  peptide (1)..(226): Ceres Seq. ID no. 13610608
  misc_feature (1)..(226): Homolog of NCBI NO: 15219873 NR Description: expressed protein [Arabidopsis thaliana]
  misc_feature (1)..(218): Homolog of NCBI NO: 25404311 NR Description: hypothetical protein F11P17.12 [imported] - thaliana >gi|2443886|gb|AAB71479.1| Unknown protein [Arabidopsis
  misc_feature (1)..(221): Homolog of NCBI NO: 30681030 NR Description: expressed protein [Arabidopsis thaliana]
  misc_feature (8)..(224): Homolog of NCBI NO: 20863687 NR Description: RIKEN cDNA 2310003C23 [Mus musculus] similar to RIKEN cDNA 2310003C23 [Mus musculus] [Rattus >gi|28201785|sp|Q9D7M1|CT11_MOUSE Protein C20orf11 homolog
  misc_feature (1)..(221): Homolog of NCBI NO: 26451919 NR Description: unknown protein [Arabidopsis thaliana]
  misc_feature (8)..(224): Homolog of NCBI NO: 8923557 NR Description: chromosome 20 open reading frame 11; two hybrid protein 1 [Homo sapiens] >gi|28201788|sp|Q9NWU2|CT11_HUMAN C20orf11 >gi|7020818|dbj|BAA91285.1| unnamed protein product
  misc_feature (1)..(224): Homolog of NCBI NO: 37748055 NR Description: Unknown (protein for MGC:73100) [Danio rerio]
  misc_feature (8)..(224): Homolog of NCBI NO: 21594655 NR Description: chromosome 20 open reading frame 11 [Homo sapiens]
  misc_feature (8)..(222): Homolog of NCBI NO: 24643081 NR Description: CG6617-PA [Drosophila melanogaster]
  misc_feature (3)..(186): Homolog of NCBI NO: 7487558 NR Description: hypothetical protein T30A10.60 - Arabidopsis >gi|5881775|emb|CAB55693.1| putative protein [Arabidopsis >gi|7267572|emb|CAB78053.1| putative protein [Arabidopsis

SEQ ID NO: 102537 - protein, 220 aa, Arabidopsis thaliana; identical to SEQ ID NO: 73146
  peptide (1)..(220): Ceres Seq. ID no. 13610609
  misc_feature (1)..(220): Homolog of NCBI NO: 15219873 NR Description: expressed protein [Arabidopsis thaliana]
  misc_feature (1)..(212): Homolog of NCBI NO: 25404311 NR Description: hypothetical protein F11P17.12 [imported] - thaliana >gi|2443886|gb|AAB71479.1| Unknown protein [Arabidopsis
  misc_feature (1)..(215): Homolog of NCBI NO: 30681030 NR Description: expressed protein [Arabidopsis thaliana]
  misc_feature (2)..(218): Homolog of NCBI NO: 20863687 NR Description: RIKEN cDNA 2310003C23 [Mus musculus] similar to RIKEN cDNA 2310003C23 [Mus musculus] [Rattus >gi|28201785|sp|Q9D7M1|CT11_MOUSE Protein C20orf11 homolog
  misc_feature (1)..(215): Homolog of NCBI NO: 26451919 NR Description: unknown protein [Arabidopsis thaliana]
  misc_feature (2)..(218): Homolog of NCBI NO: 8923557 NR Description: chromosome 20 open reading frame 11; two hybrid protein 1 [Homo sapiens] >gi|28201788|sp|Q9NWU2|CT11_HUMAN C20orf11 >gi|7020818|dbj|BAA91285.1| unnamed protein product
  misc_feature (1)..(218): Homolog of NCBI NO: 37748055 NR Description: Unknown (protein for MGC:73100) [Danio rerio]
  misc_feature (2)..(218): Homolog of NCBI NO: 21594655 NR Description: chromosome 20 open reading frame 11 [Homo sapiens]
  misc_feature (2)..(216): Homolog of NCBI NO: 24643081 NR Description: CG6617-PA [Drosophila melanogaster]
  misc_feature (1)..(180): Homolog of NCBI NO: 7487558 NR Description: hypothetical protein T30A10.60 - Arabidopsis >gi|5881775|emb|CAB55693.1| putative protein [Arabidopsis >gi|7267572|emb|CAB78053.1| putative protein [Arabidopsis

SEQ ID NO: 102538 - DNA, 1502 bp, Arabidopsis thaliana
  misc_feature (1)..(1502): Ceres Seq. ID no. 13610614
  misc_feature: MA Experiment ID: 108434 Result: Down-regulated in Transcription
  misc_feature: MA Experiment 108434 PARAMETER Experiment Name: At_Root_Tips_cDNA_P Parameter: Tissue Value: Root Tips
  misc_feature: MA Experiment ID: 108464 Result: Up-regulated in Transcription
  misc_feature: MA Experiment 108464 PARAMETER Experiment Name: At_Germinating_Seeds_cDNA_P Parameter: Age (day) Value: 4 vs. 0
  misc_feature: MA Experiment 108464 PARAMETER Experiment Name: At_Germinating_Seeds_cDNA_P Parameter: Tissue Value: Germinating Seeds
  misc_feature: MA Experiment ID: 108576 Result: Up-regulated in Transcription
  misc_feature: MA Experiment 108576 PARAMETER Experiment Name: At_42deg_Heat_cDNA_P Parameter: Temperature (deg C) Value: 42 vs. 22
  misc_feature: MA Experiment 108576 PARAMETER Experiment Name: At_42deg_Heat_cDNA_P Parameter: Timepoint (hr) Value: 1
  misc_feature: MA Experiment 108576 PARAMETER Experiment Name: At_42deg_Heat_cDNA_P Parameter: Tissue Value: Aerial
  misc_feature: MA Experiment ID: 108609 Result: Up-regulated in Transcription
  misc_feature: MA Experiment 108609 PARAMETER Experiment Name: At_100uM_ABA_cDNA_P Parameter: Timepoint (hr) Value: 24
  misc_feature: MA Experiment 108609 PARAMETER Experiment Name: At_100uM_ABA_cDNA_P Parameter: Tissue Value: Aerial
  misc_feature: MA Experiment 108609 PARAMETER Experiment Name: At_100uM_ABA_cDNA_P Parameter: Treatment Value: 100uM ABA vs. No Treatment
  misc_feature: MA Experiment ID: 20000068 Result: Down-regulated in Transcription
  misc_feature: MA Experiment ID: 20000093 Result: Up-regulated in Transcription
  misc_feature: MA Experiment 20000093 PARAMETER Experiment Name: At_42deg_Heat_cDNA_P Parameter: Temperature (deg C) Value: 42 vs. 22
  misc_feature: MA Experiment 20000093 PARAMETER Experiment Name: At_42deg_Heat_cDNA_P Parameter: Timepoint (hr) Value: 0.5
  misc_feature: MA Experiment 20000093 PARAMETER Experiment Name: At_42deg_Heat_cDNA_P Parameter: Tissue Value: Aerial
  misc_feature: MA Experiment ID: 20000113 Result: Up-regulated in Transcription
  misc_feature: MA Experiment 20000113 PARAMETER Experiment Name: At_42deg_Heat_cDNA_P Parameter: Temperature (deg C) Value: 42 vs. 22
  misc_feature: MA Experiment 20000113 PARAMETER Experiment Name: At_42deg_Heat_cDNA_P Parameter: Timepoint (hr) Value: 8
  misc_feature: MA Experiment 20000113 PARAMETER Experiment Name: At_42deg_Heat_cDNA_P Parameter: Tissue Value: Aerial
  misc_feature: MA Experiment ID: 20000173 Result: Up-regulated in Transcription
  misc_feature: MA Experiment 20000173 PARAMETER Experiment Name: At_42deg_Heat_P Parameter: Age (day) Value: 14
  misc_feature: MA Experiment 20000173 PARAMETER Experiment Name: At_42deg_Heat_P Parameter: Organism Value: A. thaliana
  misc_feature: MA Experiment 20000173 PARAMETER Experiment Name: At_42deg_Heat_P Parameter: Plant Line Value: WS
  misc_feature: MA Experiment 20000173 PARAMETER Experiment Name: At_42deg_Heat_P Parameter: Temperature (deg C) Value: 42 vs. 22
  misc_feature: MA Experiment 20000173 PARAMETER Experiment Name: At_42deg_Heat_P Parameter: Timepoint (hr) Value: 6
  misc_feature: MA Experiment 20000173 PARAMETER Experiment Name: At_42deg_Heat_P Parameter: Tissue Value: Aerial
  misc_feature: MA Experiment ID: 20000224 Result: Down-regulated in Transcription
  misc_feature: MA Experiment ID: 20000443 Result: Up-regulated in Transcription
  misc_feature: MA Experiment 20000443 PARAMETER Experiment Name: At_1uM_BR-BRZ__P Parameter: Tissue Value: Shoot Apices
  misc_feature: MA Experiment 20000443 PARAMETER Experiment Name: At_1uM_BR-BRZ__P Parameter: Treatment Value: 1uM BRZ vs. No Treatment
  misc_feature: MA Experiment ID: 20001451 Result: Up-regulated in Transcription
  misc_feature: MA Experiment 20001451 PARAMETER Experiment Name: At_Far-red-induction_P Parameter: Age (day) Value: 7
  misc_feature: MA Experiment 20001451 PARAMETER Experiment Name: At_Far-red-induction_P Parameter: Light Value: Far-red vs. White
  misc_feature: MA Experiment 20001451 PARAMETER Experiment Name: At_Far-red-induction_P Parameter: Organism Value: A. thaliana
  misc_feature: MA Experiment 20001451 PARAMETER Experiment Name: At_Far-red-induction_P Parameter: Plant Line Value: Columbia
  misc_feature: MA Experiment 20001451 PARAMETER Experiment Name: At_Far-red-induction_P Parameter: Timepoint (hr) Value: 24
  misc_feature: MA Experiment 20001451 PARAMETER Experiment Name: At_Far-red-induction_P Parameter: Tissue Value: Whole Plant
cttctctttcctctctctcacacacatcttcgagaagtttccgccggcgggagagatcaaagacaactgctgatcagaaatcagagatcagagatatgaacattctcttctccagattctcctttttgcttctgtttctctgttcttggaccagtttcactttcaccacaacagaagcttatgatgcacttgatccatatggaaacattactataaaatgggatattatgagctggactggtgatggttatgtggctgttgtaacaatctttaatttccaacaataccgtcacattgaggcgccggggtggcaattaggatggagttggatgaagaaggaagtaatttggagtatggttggtggtcaagcaacagaacaaggagattgttctaagtttaagggtaacattcctcattgctgcaagaaaactccggctatcgttgatttgttaccgggaactccttataaccaacagatatcaaactgttgtagaggcggtgtgattagcgcgtgggcgcaagaccccgcaaccgcgatttcttcgtttcagattagtgttggccagtctggaacaactaatactacggttagagcacctaggaatataactttgaaggctccaggacctggttacacttgcgggcctgcaaaactcgttaagccgagtagattcatttccgcggataaacgaagaaagactcagtctttgcttacatggaacattacttgcacatattcgcagtttctagcacggaaaactccgacttgttgtgtctcactctcagccttctacaatgaaactatagtaccatgtccaacttgttcttgtggatgtcaaaatagttctcaagctggtacatgtgttgaccctaaaatagcttcagtagtaccagccttagggaagaacaacctcgaacctctcttgcaatgtacgcaacatatgtgtcccattcgagttcattggcatgtaaaaactagctacaaagagtactggagagtgaaggttgccatcacaaactttaactacaatatgaactactctcagtggaacttagtcgttcagcatcccaacttcgacaatctcactaagcttttcagtttcaactacaaaccgcttaatccttacttgaacataaatgacacggccatgctatggggaatcaagttctacaatgattttttaagccaagctggtccagtaggcaatgtacagtcagagcttctcttccaaaagaacccattggagttcacattcgagaaaggatgggcgtttccgaggcgcatatacttcaacggtgataactgcgttatgccacctccagactcttatccatggcttccaaacgctagtccaaacattgcaacctcgccatttgtcatacttctcatcactttcttatctgttttgattcttatgtaaatggatatctatatactgtcatggacatgtttggtgatgtttacattataagtgagtgtgttattaggaaatcattctttg

SEQ ID NO: 102539 - protein, 472 aa, Arabidopsis thaliana
  peptide (1)..(472): Ceres Seq. ID no. 13610615
  misc_feature (83)..(247): Pfam Name: Phytochelatin synthetase-like conserved region Pfam Description: Phytochelatin synthetase-like conserved region
  misc_feature (32)..(472): Homolog of NCBI NO: 18406342 NR Description: phytochelatin synthetase-related protein
  misc_feature (32)..(472): Homolog of NCBI NO: 21618129 NR Description: phytochelatin synthetase-like protein
  misc_feature (32)..(472): Homolog of NCBI NO: 13477083 NR Description: phytochelatin synthetase-like protein
  misc_feature (32)..(291): Homolog of NCBI NO: 10092257 NR Description: unknown protein; 31818-33764 [Arabidopsis
  misc_feature (305)..(472): Homolog of NCBI NO: 10092257 NR Description: unknown protein; 31818-33764 [Arabidopsis
  misc_feature (35)..(466): Homolog of NCBI NO: 15232863 NR Description: predicted GPI-anchored protein [Arabidopsis >gi|6041808|gb|AAF02128.1|AC009755_21 unknown protein
  misc_feature (35)..(470): Homolog of NCBI NO: 21553837 NR Description: phytochelatin synthetase-like protein
  misc_feature (35)..(470): Homolog of NCBI NO: 18424412 NR Description: phytochelatin synthetase - like protein
  misc_feature (32)..(468): Homolog of NCBI NO: 34394569 NR Description: putative phytochelatin synthetase [Oryza sativa
  misc_feature (55)..(465): Homolog of NCBI NO: 30090026 NR Description: phytochelatin synthetase-like protein 2 [Sorghum
SLSSLSHTSSRSFRRRERSKTTADQKSEIRDMNILFSRFSFLLLFLCSWTSFTFTTTEAYDALDPYGNITIKWDIMSWTGDGYVAVVTIFNFQQYRHIEAPGWQLGWSWMKKEVIWSMVGGQATEQGDCSKFKGNIPHCCKKTPAIVDLLPGTPYNQQISNCCRGGVISAWAQDPATAISSFQISVGQSGTTNTTVRAPRNITLKAPGPGYTCGPAKLVKPSRFISADKRRKTQSLLTWNITCTYSQFLARKTPTCCVSLSAFYNETIVPCPTCSCGCQNSSQAGTCVDPKIASVVPALGKNNLEPLLQCTQHMCPIRVHWHVKTSYKEYWRVKVAITNFNYNMNYSQWNLVVQHPNFDNLTKLFSFNYKPLNPYLNINDTAMLWGIKFYNDFLSQAGPVGNVQSELLFQKNPLEFTFEKGWAFPRRIYFNGDNCVMPPPDSYPWLPNASPNIATSPFVILLITFLSVLILM

SEQ ID NO: 102540 - protein, 441 aa, Arabidopsis thaliana
  peptide (1)..(441): Ceres Seq. ID no. 13610616
  misc_feature (52)..(216): Pfam Name: Phytochelatin synthetase-like conserved region Pfam Description: Phytochelatin synthetase-like conserved region
  misc_feature (1)..(441): Homolog of NCBI NO: 18406342 NR Description: phytochelatin synthetase-related protein
  misc_feature (1)..(441): Homolog of NCBI NO: 21618129 NR Description: phytochelatin synthetase-like protein
  misc_feature (1)..(441): Homolog of NCBI NO: 13477083 NR Description: phytochelatin synthetase-like protein
  misc_feature (1)..(260): Homolog of NCBI NO: 10092257 NR Description: unknown protein; 31818-33764 [Arabidopsis
  misc_feature (274)..(441): Homolog of NCBI NO: 10092257 NR Description: unknown protein; 31818-33764 [Arabidopsis
  misc_feature (4)..(435): Homolog of NCBI NO: 15232863 NR Description: predicted GPI-anchored protein [Arabidopsis >gi|6041808|gb|AAF02128.1|AC009755_21 unknown protein
  misc_feature (4)..(439): Homolog of NCBI NO: 21553837 NR Description: phytochelatin synthetase-like protein
  misc_feature (4)..(439): Homolog of NCBI NO: 18424412 NR Description: phytochelatin synthetase - like protein
  misc_feature (1)..(437): Homolog of NCBI NO: 34394569 NR Description: putative phytochelatin synthetase [Oryza sativa
  misc_feature (24)..(434): Homolog of NCBI NO: 30090026 NR Description: phytochelatin synthetase-like protein 2 [Sorghum
MNILFSRFSFLLLFLCSWTSFTFTTTEAYDALDPYGNITIKWDIMSWTGDGYVAVVTIFNFQQYRHIEAPGWQLGWSWMKKEVIWSMVGGQATEQGDCSKFKGNIPHCCKKTPAIVDLLPGTPYNQQISNCCRGGVISAWAQDPATAISSFQISVGQSGTTNTTVRAPRNITLKAPGPGYTCGPAKLVKPSRFISADKRRKTQSLLTWNITCTYSQFLARKTPTCCVSLSAFYNETIVPCPTCSCGCQNSSQAGTCVDPKIASVVPALGKNNLEPLLQCTQHMCPIRVHWHVKTSYKEYWRVKVAITNFNYNMNYSQWNLVVQHPNFDNLTKLFSFNYKPLNPYLNINDTAMLWGIKFYNDFLSQAGPVGNVQSELLFQKNPLEFTFEKGWAFPRRIYFNGDNCVMPPPDSYPWLPNASPNIATSPFVILLITFLSVLILM

SEQ ID NO: 102541 - protein, 397 aa, Arabidopsis thaliana
  peptide (1)..(397): Ceres Seq. ID no. 13610617
  misc_feature (8)..(172): Pfam Name: Phytochelatin synthetase-like conserved region Pfam Description: Phytochelatin synthetase-like conserved region
  misc_feature (1)..(397): Homolog of NCBI NO: 18406342 NR Description: phytochelatin synthetase-related protein
  misc_feature (1)..(397): Homolog of NCBI NO: 21618129 NR Description: phytochelatin synthetase-like protein
  misc_feature (1)..(397): Homolog of NCBI NO: 13477083 NR Description: phytochelatin synthetase-like protein
  misc_feature (1)..(216): Homolog of NCBI NO: 10092257 NR Description: unknown protein; 31818-33764 [Arabidopsis
  misc_feature (230)..(397): Homolog of NCBI NO: 10092257 NR Description: unknown protein; 31818-33764 [Arabidopsis
  misc_feature (1)..(391): Homolog of NCBI NO: 15232863 NR Description: predicted GPI-anchored protein [Arabidopsis >gi|6041808|gb|AAF02128.1|AC009755_21 unknown protein
  misc_feature (1)..(395): Homolog of NCBI NO: 21553837 NR Description: phytochelatin synthetase-like protein
  misc_feature (1)..(395): Homolog of NCBI NO: 18424412 NR Description: phytochelatin synthetase - like protein
  misc_feature (1)..(393): Homolog of NCBI NO: 34394569 NR Description: putative phytochelatin synthetase [Oryza sativa
  misc_feature (1)..(390): Homolog of NCBI NO: 30090026 NR Description: phytochelatin synthetase-like protein 2 [Sorghum
MSWTGDGYVAVVTIFNFQQYRHIEAPGWQLGWSWMKKEVIWSMVGGQATEQGDCSKFKGNIPHCCKKTPAIVDLLPGTPYNQQISNCCRGGVISAWAQDPATAISSFQISVGQSGTTNTTVRAPRNITLKAPGPGYTCGPAKLVKPSRFISADKRRKTQSLLTWNITCTYSQFLARKTPTCCVSLSAFYNETIVPCPTCSCGCQNSSQAGTCVDPKIASVVPALGKNNLEPLLQCTQHMCPIRVHWHVKTSYKEYWRVKVAITNFNYNMNYSQWNLVVQHPNFDNLTKLFSFNYKPLNPYLNINDTAMLWGIKFYNDFLSQAGPVGNVQSELLFQKNPLEFTFEKGWAFPRRIYFNGDNCVMPPPDSYPWLPNASPNIATSPFVILLITFLSVLILM

SEQ ID NO: 102542 - DNA, 1134 bp, Arabidopsis thaliana
  misc_feature (1)..(1134): Ceres Seq. ID no. 13610663
  misc_feature: MA Experiment ID: 108434 Result: Down-regulated in Transcription
  misc_feature: MA Experiment 108434 PARAMETER Experiment Name: At_Root_Tips_cDNA_P Parameter: Tissue Value: Root Tips
  misc_feature: MA Experiment ID: 108461 Result: Down-regulated in Transcription
  misc_feature: MA Experiment 108461 PARAMETER Experiment Name: At_Germinating_Seeds_cDNA_P Parameter: Age (day) Value: 1 vs. 0
  misc_feature: MA Experiment 108461 PARAMETER Experiment Name: At_Germinating_Seeds_cDNA_P Parameter: Tissue Value: Germinating Seeds
  misc_feature: MA Experiment ID: 108462 Result: Down-regulated in Transcription
  misc_feature: MA Experiment 108462 PARAMETER Experiment Name: At_Germinating_Seeds_cDNA_P Parameter: Age (day) Value: 2 vs. 0
  misc_feature: MA Experiment 108462 PARAMETER Experiment Name: At_Germinating_Seeds_cDNA_P Parameter: Tissue Value: Germinating Seeds
  misc_feature: MA Experiment ID: 108463 Result: Down-regulated in Transcription
  misc_feature: MA Experiment 108463 PARAMETER Experiment Name: At_Germinating_Seeds_cDNA_P Parameter: Age (day) Value: 3 vs. 0
  misc_feature: MA Experiment 108463 PARAMETER Experiment Name: At_Germinating_Seeds_cDNA_P Parameter: Tissue Value: Germinating Seeds
  misc_feature: MA Experiment ID: 108464 Result: Down-regulated in Transcription
  misc_feature: MA Experiment 108464 PARAMETER Experiment Name: At_Germinating_Seeds_cDNA_P Parameter: Age (day) Value: 4 vs. 0
  misc_feature: MA Experiment 108464 PARAMETER Experiment Name: At_Germinating_Seeds_cDNA_P Parameter: Tissue Value: Germinating Seeds
  misc_feature: MA Experiment ID: 108579 Result: Up-regulated in Transcription
  misc_feature: MA Experiment 108579 PARAMETER Experiment Name: At_4deg_Cold_cDNA_P Parameter: Temperature (deg C) Value: 4 vs. 22
  misc_feature: MA Experiment 108579 PARAMETER Experiment Name: At_4deg_Cold_cDNA_P Parameter: Timepoint (hr) Value: 6
  misc_feature: MA Experiment 108579 PARAMETER Experiment Name: At_4deg_Cold_cDNA_P Parameter: Tissue Value: Aerial
  misc_feature: MA Experiment ID: 108585 Result: Up-regulated in Transcription
  misc_feature: MA Experiment 108585 PARAMETER Experiment Name: At_5mM_NaNP_cDNA_P Parameter: Timepoint (hr) Value: 6
  misc_feature: MA Experiment 108585 PARAMETER Experiment Name: At_5mM_NaNP_cDNA_P Parameter: Tissue Value: Aerial
  misc_feature: MA Experiment 108585 PARAMETER Experiment Name: At_5mM_NaNP_cDNA_P Parameter: Treatment Value: null
  misc_feature: MA Experiment ID: 108667 Result: Up-regulated in Transcription
  misc_feature: MA Experiment 108667 PARAMETER Experiment Name: At_2mM_SA_cDNA_P Parameter: Plant Line Value: WS
  misc_feature: MA Experiment 108667 PARAMETER Experiment Name: At_2mM_SA_cDNA_P Parameter: Timepoint (hr) Value: 1
  misc_feature: MA Experiment 108667 PARAMETER Experiment Name: At_2mM_SA_cDNA_P Parameter: Treatment Value: 2mM SA vs. No Treatment
  misc_feature: MA Experiment ID: 108668 Result: Up-regulated in Transcription
  misc_feature: MA Experiment 108668 PARAMETER Experiment Name: At_2mM_SA_cDNA_P Parameter: Plant Line Value: WS
  misc_feature: MA Experiment 108668 PARAMETER Experiment Name: At_2mM_SA_cDNA_P Parameter: Timepoint (hr) Value: 6
  misc_feature: MA Experiment 108668 PARAMETER Experiment Name: At_2mM_SA_cDNA_P Parameter: Treatment Value: 2mM SA vs. No Treatment
  misc_feature: MA Experiment ID: 20000111 Result: Up-regulated in Transcription
  misc_feature: MA Experiment 20000111 PARAMETER Experiment Name: At_42deg_Heat_cDNA_P Parameter: Temperature (deg C) Value: 42 vs. 22
  misc_feature: MA Experiment 20000111 PARAMETER Experiment Name: At_42deg_Heat_cDNA_P Parameter: Timepoint (hr) Value: 6
  misc_feature: MA Experiment 20000111 PARAMETER Experiment Name: At_42deg_Heat_cDNA_P Parameter: Tissue Value: Aerial
  misc_feature: MA Experiment ID: 20000112 Result: Up-regulated in Transcription
  misc_feature: MA Experiment 20000112 PARAMETER Experiment Name: At_42deg_Heat_cDNA_P Parameter: Temperature (deg C) Value: 42 vs. 22
  misc_feature: MA Experiment 20000112 PARAMETER Experiment Name: At_42deg_Heat_cDNA_P Parameter: Timepoint (hr) Value: 2
  misc_feature: MA Experiment 20000112 PARAMETER Experiment Name: At_42deg_Heat_cDNA_P Parameter: Tissue Value: Aerial
  misc_feature: MA Experiment ID: 20000113 Result: Up-regulated in Transcription
  misc_feature: MA Experiment 20000113 PARAMETER Experiment Name: At_42deg_Heat_cDNA_P Parameter: Temperature (deg C) Value: 42 vs. 22
  misc_feature: MA Experiment 20000113 PARAMETER Experiment Name: At_42deg_Heat_cDNA_P Parameter: Timepoint (hr) Value: 8
  misc_feature: MA Experiment 20000113 PARAMETER Experiment Name: At_42deg_Heat_cDNA_P Parameter: Tissue Value: Aerial
  misc_feature: MA Experiment ID: 20000144 Result: Up-regulated in Transcription
  misc_feature: MA Experiment 20000144 PARAMETER Experiment Name: At_42deg_Heat_cDNA_P Parameter: Temperature (deg C) Value: 42 vs. 22
  misc_feature: MA Experiment 20000144 PARAMETER Experiment Name: At_42deg_Heat_cDNA_P Parameter: Timepoint (hr) Value: 1
  misc_feature: MA Experiment 20000144 PARAMETER Experiment Name: At_42deg_Heat_cDNA_P Parameter: Tissue Value: Aerial
  misc_feature: MA Experiment ID: 20000173 Result: Up-regulated in Transcription
  misc_feature: MA Experiment 20000173 PARAMETER Experiment Name: At_42deg_Heat_P Parameter: Age (day) Value: 14
  misc_feature: MA Experiment 20000173 PARAMETER Experiment Name: At_42deg_Heat_P Parameter: Organism Value: A. thaliana
  misc_feature: MA Experiment 20000173 PARAMETER Experiment Name: At_42deg_Heat_P Parameter: Plant Line Value: WS
  misc_feature: MA Experiment 20000173 PARAMETER Experiment Name: At_42deg_Heat_P Parameter: Temperature (deg C) Value: 42 vs. 22
  misc_feature: MA Experiment 20000173 PARAMETER Experiment Name: At_42deg_Heat_P Parameter: Timepoint (hr) Value: 6
  misc_feature: MA Experiment 20000173 PARAMETER Experiment Name: At_42deg_Heat_P Parameter: Tissue Value: Aerial
  misc_feature: MA Experiment ID: 20000179 Result: Down-regulated in Transcription
  misc_feature: MA Experiment 20000179 PARAMETER Experiment Name: At_Germinating_Seeds_P Parameter: Age (hr) Value: 6 vs. 0
  misc_feature: MA Experiment 20000179 PARAMETER Experiment Name: At_Germinating_Seeds_P Parameter: Tissue Value: Germinating Seeds
  misc_feature: MA Experiment ID: 20000182 Result: Up-regulated in Transcription
  misc_feature: MA Experiment 20000182 PARAMETER Experiment Name: At_2mM_SA_P Parameter: Age (day) Value: 14
  misc_feature: MA Experiment 20000182 PARAMETER Experiment Name: At_2mM_SA_P Parameter: Organism Value: A. thaliana
  misc_feature: MA Experiment 20000182 PARAMETER Experiment Name: At_2mM_SA_P Parameter: Plant Line Value: WS
  misc_feature: MA Experiment 20000182 PARAMETER Experiment Name: At_2mM_SA_P Parameter: Timepoint (hr) Value: 6
  misc_feature: MA Experiment 20000182 PARAMETER Experiment Name: At_2mM_SA_P Parameter: Tissue Value: Aerial
  misc_feature: MA Experiment 20000182 PARAMETER Experiment Name: At_2mM_SA_P Parameter: Treatment Value: 2mM SA vs. No Treatment
  misc_feature: MA Experiment ID: 20000213 Result: Up-regulated in Transcription
  misc_feature: MA Experiment 20000213 PARAMETER Experiment Name: At_4deg_Cold_P Parameter: Timepoint (hr) Value: 2
  misc_feature: MA Experiment ID: 20000224 Result: Down-regulated in Transcription
  misc_feature: MA Experiment ID: 20000437 Result: Up-regulated in Transcription
  misc_feature: MA Experiment 20000437 PARAMETER Experiment Name: At_Drought_P Parameter: Age (day) Value: 8
  misc_feature: MA Experiment 20000437 PARAMETER Experiment Name: At_Drought_P Parameter: Organism Value: A. thaliana
  misc_feature: MA Experiment 20000437 PARAMETER Experiment Name: At_Drought_P Parameter: Plant Line Value: WS
  misc_feature: MA Experiment 20000437 PARAMETER Experiment Name: At_Drought_P Parameter: Timepoint (hr) Value: 24
  misc_feature: MA Experiment 20000437 PARAMETER Experiment Name: At_Drought_P Parameter: Tissue Value: Whole Plant
  misc_feature: MA Experiment 20000437 PARAMETER Experiment Name: At_Drought_P Parameter: Treatment Value: Drought vs. No Drought
  misc_feature: MA Experiment ID: 20000438 Result: Down-regulated in Transcription
  misc_feature: MA Experiment 20000438 PARAMETER Experiment Name: At_Shoots__P Parameter: Age (day) Value: 14
  misc_feature: MA Experiment 20000438 PARAMETER Experiment Name: At_Shoots__P Parameter: Tissue Value: Shoots vs. Whole Plant
  misc_feature: MA Experiment ID: 20000439 Result: Down-regulated in Transcription
  misc_feature: MA Experiment 20000439 PARAMETER Experiment Name: At_Roots__P Parameter: Age (day) Value: 14 vs. 21
  misc_feature: MA Experiment 20000439 PARAMETER Experiment Name: At_Roots__P Parameter: Organism Value: A. thaliana
  misc_feature: MA Experiment 20000439 PARAMETER Experiment Name: At_Roots__P Parameter: Tissue Value: Roots vs. Whole Plant
  misc_feature: MA Experiment ID: 20001557 Result: Up-regulated in Transcription
  misc_feature: MA Experiment 20001557 PARAMETER Experiment Name: At_Drought_Soil_Dry_P Parameter: Age (day) Value: 27
  misc_feature: MA Experiment 20001557 PARAMETER Experiment Name: At_Drought_Soil_Dry_P Parameter: Organism Value: A. thaliana
  misc_feature: MA Experiment 20001557 PARAMETER Experiment Name: At_Drought_Soil_Dry_P Parameter: Plant Line Value: WS
  misc_feature: MA Experiment 20001557 PARAMETER Experiment Name: At_Drought_Soil_Dry_P Parameter: Post Timepoint (hr) Value: 3
  misc_feature: MA Experiment 20001557 PARAMETER Experiment Name: At_Drought_Soil_Dry_P Parameter: Post-Treatment Value: Re-Water vs. No Drought
  misc_feature: MA Experiment 20001557 PARAMETER Experiment Name: At_Drought_Soil_Dry_P Parameter: Timepoint (day) Value: 13
  misc_feature: MA Experiment 20001557 PARAMETER Experiment Name: At_Drought_Soil_Dry_P Parameter: Treatment Value: Drought vs. No Drought
  misc_feature: MA Experiment ID: 20001905 Result: Up-regulated in Transcription
  misc_feature: MA Experiment 20001905 PARAMETER Experiment Name: At_Drought_Reproduction_P Parameter: Age (day) Value: 40
  misc_feature: MA Experiment 20001905 PARAMETER Experiment Name: At_Drought_Reproduction_P Parameter: Organism Value: A. thaliana
  misc_feature: MA Experiment 20001905 PARAMETER Experiment Name: At_Drought_Reproduction_P Parameter: Plant Line Value: WS
  misc_feature: MA Experiment 20001905 PARAMETER Experiment Name: At_Drought_Reproduction_P Parameter: Timepoint (day) Value: 10
  misc_feature: MA Experiment 20001905 PARAMETER Experiment Name: At_Drought_Reproduction_P Parameter: Tissue Value: Rosettes
  misc_feature: MA Experiment 20001905 PARAMETER Experiment Name: At_Drought_Reproduction_P Parameter: Treatment Value: Drought vs. No Drought
agaaccaaggaaaaggaaagagtcggcgaaaaagatataaaaaagccagcgagagagacaaagggtttttgagtatctcgcgaggttttacatagatttctccattatggattcgatgatgaatcagaagactgttttggctgtgacggatgatgtggtgttacctgttagctctgttttagctataatgaaagagcttggaaaggaagtgattgagagttttgatcctctgattattactcaagcatccacaataaatcagtttcctttggatgcttcctctgtggaggcggtattagccatttccaaaacatctgatttcccaagtgataaaatatgtggtgagttctcaagaatcttgaagcctggcggcacggtttctgtgtgcaaagttttggagggtgaaacgggagaaattcaacagaccattcaaaggagagtgacattggctggttttcttgagccacagtgtcttgatttgaaatcaattaaattgtctacgttcagtttatcctttgggattaaggcaaagaaaccttcttggaagattggttcatcatttgctctcaaaaagcctgtaacaaatctctttaagattgatctagatgacgacgtggatcttattgatgaagattctcttttaacagaggaggacttgatgaagccacagcttcctgttgccagcggttgtgagaccactaaaaaagcttgcaagaactgcgtctgtggtagagctgaaattgaggagaaagctgtgaagctgggcctcacagaggatcaaatcgagaatccacaatcatcatgcggcagctgtgggctcggtgatgccttccgctgcggtacatgcccttacaagggtctgccacccttcaaattaggcgagaaggtaaccctatctcaaaacttccttgaagctgacatataagcatgtgaaaggcatcttcatacatgggtgtttctcgccgaggccaaaaccttttgctaatcgcagagtagtttcatcatttactttgtgccctttcgtataatttgtttgttggtacttcttttattttgtggctctaaaagcttgtagaatattgtttgggttgcccacaaagcacacaccttagtatcaatgaagaacggttttgc

SEQ ID NO: 102543 - protein, 272 aa, Arabidopsis thaliana; identical to SEQ ID NO: 27277
  peptide (1)..(272): Ceres Seq. ID no. 13610664
  misc_feature (114)..(265): Pfam Name: Protein of unknown function (DUF689) Pfam Description: Protein of unknown function (DUF689)
  misc_feature (1)..(272): Homolog of NCBI NO: 18418605 NR Description: expressed protein [Arabidopsis thaliana] AT5g18400/F20L16_120 [Arabidopsis thaliana] unknown protein [Arabidopsis thaliana]
  misc_feature (4)..(272): Homolog of NCBI NO: 30686798 NR Description: expressed protein [Arabidopsis thaliana]
  misc_feature (4)..(272): Homolog of NCBI NO: 19424097 NR Description: unknown protein [Arabidopsis thaliana]
  misc_feature (11)..(272): Homolog of NCBI NO: 38344920 NR Description: OSJNBa0018M05.11 [Oryza sativa (japonica
  misc_feature (5)..(272): Homolog of NCBI NO: 2293332 NR Description: unknown [Dictyostelium discoideum]
  misc_feature (111)..(272): Homolog of NCBI NO: 17933742 NR Description: lethal (2) 35Bg CG4180-PA [Drosophila
  misc_feature (13)..(272): Homolog of NCBI NO: 29841358 NR Description: hypothetical protein in Schizosaccharomyces similar to NC_003423 conserved hypothetical protein in
  misc_feature (131)..(268): Homolog of NCBI NO: 3252825 NR Description: Unknown gene product [Homo sapiens] CUA001 [Homo sapiens] >gi|12803485|gb|AAH02568.1|AAH02568 protein [Homo sapiens] >gi|18848226|gb|AAH24196.1| hypothetical
  misc_feature (169)..(264): Homolog of NCBI NO: 17555168 NR Description: Lethal 35Bg like (25.6 kD) [Caenorhabditis >gi|1176624|sp|P41847|YO97_CAEEL HYPOTHETICAL 25.6 KD PROTEIN IN CHROMOSOME III >gi|7508020|pir||T16907 hypothetical
  misc_feature (167)..(268): Homolog of NCBI NO: 7959722 NR Description: PRO0915 [Homo sapiens]

SEQ ID NO: 102544 - protein, 269 aa, Arabidopsis thaliana; identical to SEQ ID NO: 27278
  peptide (1)..(269): Ceres Seq. ID no. 13610665
  misc_feature (111)..(262): Pfam Name: Protein of unknown function (DUF689) Pfam Description: Protein of unknown function (DUF689)
  misc_feature (1)..(269): Homolog of NCBI NO: 18418605 NR Description: expressed protein [Arabidopsis thaliana] AT5g18400/F20L16_120 [Arabidopsis thaliana] unknown protein [Arabidopsis thaliana]
  misc_feature (1)..(269): Homolog of NCBI NO: 30686798 NR Description: expressed protein [Arabidopsis thaliana]
  misc_feature (1)..(269): Homolog of NCBI NO: 19424097 NR Description: unknown protein [Arabidopsis thaliana]
  misc_feature (8)..(269): Homolog of NCBI NO: 38344920 NR Description: OSJNBa0018M05.11 [Oryza sativa (japonica
  misc_feature (2)..(269): Homolog of NCBI NO: 2293332 NR Description: unknown [Dictyostelium discoideum]
  misc_feature (108)..(269): Homolog of NCBI NO: 17933742 NR Description: lethal (2) 35Bg CG4180-PA [Drosophila
  misc_feature (10)..(269): Homolog of NCBI NO: 29841358 NR Description: hypothetical protein in Schizosaccharomyces similar to NC_003423 conserved hypothetical protein in
  misc_feature (128)..(265): Homolog of NCBI NO: 3252825 NR Description: Unknown gene product [Homo sapiens] CUA001 [Homo sapiens] >gi|12803485|gb|AAH02568.1|AAH02568 protein [Homo sapiens] >gi|18848226|gb|AAH24196.1| hypothetical
  misc_feature (166)..(261): Homolog of NCBI NO: 17555168 NR Description: Lethal 35Bg like (25.6 kD) [Caenorhabditis >gi|1176624|sp|P41847|YO97_CAEEL HYPOTHETICAL 25.6 KD PROTEIN IN CHROMOSOME III >gi|7508020|pir||T16907 hypothetical
  misc_feature (164)..(265): Homolog of NCBI NO: 7959722 NR Description: PRO0915 [Homo sapiens]

SEQ ID NO: 102545 - protein, 268 aa, Arabidopsis thaliana; identical to SEQ ID NO: 36494
  peptide (1)..(268): Ceres Seq. ID no. 13610666
  misc_feature (110)..(261): Pfam Name: Protein of unknown function (DUF689) Pfam Description: Protein of unknown function (DUF689)
  misc_feature (1)..(268): Homolog of NCBI NO: 18418605 NR Description: expressed protein [Arabidopsis thaliana] AT5g18400/F20L16_120 [Arabidopsis thaliana] unknown protein [Arabidopsis thaliana]
  misc_feature (1)..(268): Homolog of NCBI NO: 30686798 NR Description: expressed protein [Arabidopsis thaliana]
  misc_feature (1)..(268): Homolog of NCBI NO: 19424097 NR Description: unknown protein [Arabidopsis thaliana]
  misc_feature (7)..(268): Homolog of NCBI NO: 38344920 NR Description: OSJNBa0018M05.11 [Oryza sativa (japonica
  misc_feature (1)..(268): Homolog of NCBI NO: 2293332 NR Description: unknown [Dictyostelium discoideum]
  misc_feature (107)..(268): Homolog of NCBI NO: 17933742 NR Description: lethal (2) 35Bg CG4180-PA [Drosophila
  misc_feature (9)..(268): Homolog of NCBI NO: 29841358 NR Description: hypothetical protein in Schizosaccharomyces similar to NC_003423 conserved hypothetical protein in
  misc_feature (127)..(264): Homolog of NCBI NO: 3252825 NR Description: Unknown gene product [Homo sapiens] CUA001 [Homo sapiens] >gi|12803485|gb|AAH02568.1|AAH02568 protein [Homo sapiens] >gi|18848226|gb|AAH24196.1| hypothetical
  misc_feature (165)..(260): Homolog of NCBI NO: 17555168 NR Description: Lethal 35Bg like (25.6 kD) [Caenorhabditis >gi|1176624|sp|P41847|YO97_CAEEL HYPOTHETICAL 25.6 KD PROTEIN IN CHROMOSOME III >gi|7508020|pir||T16907 hypothetical
  misc_feature (163)..(264): Homolog of NCBI NO: 7959722 NR Description: PRO0915 [Homo sapiens]

SEQ ID NO: 102546 - DNA, 1170 bp, Arabidopsis thaliana
  misc_feature (1)..(1170): Ceres Seq. ID no. 13610679
  misc_feature: MA Experiment ID: 108461 Result: Down-regulated in Transcription
  misc_feature: MA Experiment 108461 PARAMETER Experiment Name: At_Germinating_Seeds_cDNA_P Parameter: Age (day) Value: 1 vs. 0
  misc_feature: MA Experiment 108461 PARAMETER Experiment Name: At_Germinating_Seeds_cDNA_P Parameter: Tissue Value: Germinating Seeds
  misc_feature: MA Experiment ID: 108462 Result: Down-regulated in Transcription
  misc_feature: MA Experiment 108462 PARAMETER Experiment Name: At_Germinating_Seeds_cDNA_P Parameter: Age (day) Value: 2 vs. 0
  misc_feature: MA Experiment 108462 PARAMETER Experiment Name: At_Germinating_Seeds_cDNA_P Parameter: Tissue Value: Germinating Seeds
  misc_feature: MA Experiment ID: 108463 Result: Down-regulated in Transcription
  misc_feature: MA Experiment 108463 PARAMETER Experiment Name: At_Germinating_Seeds_cDNA_P Parameter: Age (day) Value: 3 vs. 0
  misc_feature: MA Experiment 108463 PARAMETER Experiment Name: At_Germinating_Seeds_cDNA_P Parameter: Tissue Value: Germinating Seeds
  misc_feature: MA Experiment ID: 108464 Result: Down-regulated in Transcription
  misc_feature: MA Experiment 108464 PARAMETER Experiment Name: At_Germinating_Seeds_cDNA_P Parameter: Age (day) Value: 4 vs. 0
  misc_feature: MA Experiment 108464 PARAMETER Experiment Name: At_Germinating_Seeds_cDNA_P Parameter: Tissue Value: Germinating Seeds
  misc_feature: MA Experiment ID: 108488 Result: Down-regulated in Transcription
  misc_feature: MA Experiment ID: 20000306 Result: Down-regulated in Transcription
  misc_feature: MA Experiment 20000306 PARAMETER Experiment Name: At_Germinating_Seeds_Sub_P Parameter: Age (hr) Value: 6 vs. 0
  misc_feature: MA Experiment 20000306 PARAMETER Experiment Name: At_Germinating_Seeds_Sub_P Parameter: Organism Value: A. thaliana
  misc_feature: MA Experiment 20000306 PARAMETER Experiment Name: At_Germinating_Seeds_Sub_P Parameter: Plant Line Value: WS
  misc_feature: MA Experiment 20000306 PARAMETER Experiment Name: At_Germinating_Seeds_Sub_P Parameter: Tissue Value: Germinating Seeds
  misc_feature: MA Experiment ID: 20000307 Result: Down-regulated in Transcription
  misc_feature: MA Experiment 20000307 PARAMETER Experiment Name: At_Germinating_Seeds_Sub_P Parameter: Age (hr) Value: 24 vs. 0
  misc_feature: MA Experiment 20000307 PARAMETER Experiment Name: At_Germinating_Seeds_Sub_P Parameter: Organism Value: A. thaliana
  misc_feature: MA Experiment 20000307 PARAMETER Experiment Name: At_Germinating_Seeds_Sub_P Parameter: Plant Line Value: WS
  misc_feature: MA Experiment 20000307 PARAMETER Experiment Name: At_Germinating_Seeds_Sub_P Parameter: Tissue Value: Germinating Seeds
  misc_feature: MA Experiment ID: 20000329 Result: Up-regulated in Transcription
  misc_feature: MA Experiment 20000329 PARAMETER Experiment Name: At_4deg_Cold_Sub_P Parameter: Age (day) Value: 14
  misc_feature: MA Experiment 20000329 PARAMETER Experiment Name: At_4deg_Cold_Sub_P Parameter: Organism Value: A. thaliana
  misc_feature: MA Experiment 20000329 PARAMETER Experiment Name: At_4deg_Cold_Sub_P Parameter: Plant Line Value: WS
  misc_feature: MA Experiment 20000329 PARAMETER Experiment Name: At_4deg_Cold_Sub_P Parameter: Temperature (deg C) Value: 4 vs. 22
  misc_feature: MA Experiment 20000329 PARAMETER Experiment Name: At_4deg_Cold_Sub_P Parameter: Timepoint (hr) Value: 6
  misc_feature: MA Experiment 20000329 PARAMETER Experiment Name: At_4deg_Cold_Sub_P Parameter: Tissue Value: Aerial
aaggtagaagacgatatccgctctgaagcagaagaaaaggtaattctgaatgtctggaagaaaccggattcacagagatatccgagacagctatcatgatcatcgtgatttacctccggagagaccttttctccgaggccctccattgttacaacctccaccaccatctttgttagaagatcttcagatacaggagggtgaaatcagaaggcaggatgctgaaatcagaaggcttttgagtgataatcatggactagctgacgaccgaatggttctggagagagaactcgttgctgctaaagaagagcttcaccgaatgaatctgatgatttctgatcttcgtgctgagcaagatctgcaattgagggagtttagtgagaaaaggcataaacttgagggggatgttcgcgctatggagtcgtataagaaggaggcttcacagttgcgtggtgaagttcagaagctggatgagattaaacgtgaattaagtggaaatgttcagttgcttaggaaagatttggctaaattgcaatcagataacaagcagattcctggtatgagagctgaggttaaagacctgcagaaggagcttatgcatgctagagatgcaattgaatatgagaagaaggaaaagtttgagcttatggagcagcggcagacaatggaaaagaacatggtttctatggcgcgtgaagttgaaaagctacgcgcagaacttgctactgttgatagtaggccgtggggttttggtggatcgtatgggatgaattacaacaatatggacggcactttccgtggctcgtatggcgaaaacgatacttatttgggatcttcggaaaggagtcaatattacagccatgggtctggctcgcagaagaaacctcgtttggatcgtcattgaaatctaaaatgatctgtggaaaaagaatgaggtgacgactaaatagcccacttctcaatactcctctggttgtttgtgggtatgcatctactctaaatctaaatgttagttcttctgcttttttaataaggcgttatagttatgtaacttagatggctttttttctttctttctttttagccaagcttagatggctaatctatttcgtatgtttcaataatttgacgatttggttcttcttgcttgctattaattgtgttctattatcc

SEQ ID NO: 102547 - protein, 283 aa, Arabidopsis thaliana; identical to SEQ ID NO: 41524
  peptide (1)..(283): Ceres Seq. ID no. 13610680
  misc_feature (40)..(229): Pfam Name: Myosin tail Pfam Description: Myosin tail
  misc_feature (1)..(283): Homolog of NCBI NO: 18405242 NR Description: myosin -related [Arabidopsis thaliana]
  misc_feature (1)..(266): Homolog of NCBI NO: 25405799 NR Description: myosin-like protein, 97843-94399 [imported] -
  misc_feature (1)..(261): Homolog of NCBI NO: 38175471 NR Description: myosin-like protein [Oryza sativa (japonica
  misc_feature (22)..(248): Homolog of NCBI NO: 9294396 NR Description: gb|AAD10662.1~gene_id:MIE1.26~similar to unknown
  misc_feature (22)..(248): Homolog of NCBI NO: 18400511 NR Description: expressed protein [Arabidopsis thaliana] unknown protein [Arabidopsis thaliana]
  misc_feature (15)..(278): Homolog of NCBI NO: 33146484 NR Description: myosin-like protein [Oryza sativa (japonica
  misc_feature (13)..(242): Homolog of NCBI NO: 25404669 NR Description: hypothetical protein F5A8.8 [imported] - thaliana >gi|4204281|gb|AAD10662.1| Hypothetical protein
  misc_feature (13)..(242): Homolog of NCBI NO: 30697468 NR Description: expressed protein [Arabidopsis thaliana]
  misc_feature (20)..(272): Homolog of NCBI NO: 28876008 NR Description: hypothetical protein [Oryza sativa (japonica
  misc_feature (45)..(229): Homolog of NCBI NO: 38605778 NR Description: OSJNBa0044K18.21 [Oryza sativa (japonica

SEQ ID NO: 102548 - protein, 210 aa, Arabidopsis thaliana; identical to SEQ ID NO: 41525
  peptide (1)..(210): Ceres Seq. ID no. 13610681
  misc_feature (1)..(156): Pfam Name: Myosin tail Pfam Description: Myosin tail
  misc_feature (1)..(210): Homolog of NCBI NO: 18405242 NR Description: myosin -related [Arabidopsis thaliana]
  misc_feature (1)..(193): Homolog of NCBI NO: 25405799 NR Description: myosin-like protein, 97843-94399 [imported] -
  misc_feature (1)..(188): Homolog of NCBI NO: 38175471 NR Description: myosin-like protein [Oryza sativa (japonica
  misc_feature (1)..(175): Homolog of NCBI NO: 9294396 NR Description: gb|AAD10662.1~gene_id:MIE1.26~similar to unknown
  misc_feature (1)..(175): Homolog of NCBI NO: 18400511 NR Description: expressed protein [Arabidopsis thaliana] unknown protein [Arabidopsis thaliana]
  misc_feature (1)..(205): Homolog of NCBI NO: 33146484 NR Description: myosin-like protein [Oryza sativa (japonica
  misc_feature (1)..(169): Homolog of NCBI NO: 25404669 NR Description: hypothetical protein F5A8.8 [imported] - thaliana >gi|4204281|gb|AAD10662.1| Hypothetical protein
  misc_feature (1)..(169): Homolog of NCBI NO: 30697468 NR Description: expressed protein [Arabidopsis thaliana]
  misc_feature (1)..(199): Homolog of NCBI NO: 28876008 NR Description: hypothetical protein [Oryza sativa (japonica
  misc_feature (1)..(156): Homolog of NCBI NO: 38605778 NR Description: OSJNBa0044K18.21 [Oryza sativa (japonica

SEQ ID NO: 102549 - protein, 194 aa, Arabidopsis thaliana; identical to SEQ ID NO: 41526
  peptide (1)..(194): Ceres Seq. ID no. 13610682
  misc_feature (1)..(140): Pfam Name: Myosin tail Pfam Description: Myosin tail
  misc_feature (1)..(194): Homolog of NCBI NO: 18405242 NR Description: myosin -related [Arabidopsis thaliana]
  misc_feature (1)..(177): Homolog of NCBI NO: 25405799 NR Description: myosin-like protein, 97843-94399 [imported] -
  misc_feature (1)..(172): Homolog of NCBI NO: 38175471 NR Description: myosin-like protein [Oryza sativa (japonica
  misc_feature (1)..(159): Homolog of NCBI NO: 9294396 NR Description: gb|AAD10662.1~gene_id:MIE1.26~similar to unknown
  misc_feature (1)..(159): Homolog of NCBI NO: 18400511 NR Description: expressed protein [Arabidopsis thaliana] unknown protein [Arabidopsis thaliana]
  misc_feature (1)..(189): Homolog of NCBI NO: 33146484 NR Description: myosin-like protein [Oryza sativa (japonica
  misc_feature (1)..(153): Homolog of NCBI NO: 25404669 NR Description: hypothetical protein F5A8.8 [imported] - thaliana >gi|4204281|gb|AAD10662.1| Hypothetical protein
  misc_feature (1)..(153): Homolog of NCBI NO: 30697468 NR Description: expressed protein [Arabidopsis thaliana]
  misc_feature (1)..(183): Homolog of NCBI NO: 28876008 NR Description: hypothetical protein [Oryza sativa (japonica
  misc_feature (1)..(140): Homolog of NCBI NO: 38605778 NR Description: OSJNBa0044K18.21 [Oryza sativa (japonica

SEQ ID NO: 102550 - DNA, 1266 bp, Arabidopsis thaliana
  misc_feature (1)..(1266): Ceres Seq. ID no. 13610683
  misc_feature: MA Experiment ID: 108462 Result: Down-regulated in Transcription
  misc_feature: MA Experiment 108462 PARAMETER Experiment Name: At_Germinating_Seeds_cDNA_P Parameter: Age (day) Value: 2 vs. 0
  misc_feature: MA Experiment 108462 PARAMETER Experiment Name: At_Germinating_Seeds_cDNA_P Parameter: Tissue Value: Germinating Seeds
  misc_feature: MA Experiment ID: 108569 Result: Down-regulated in Transcription
  misc_feature: MA Experiment 108569 PARAMETER Experiment Name: At_0.001%_MeJA__cDNA_P Parameter: Timepoint (hr) Value: 6
  misc_feature: MA Experiment 108569 PARAMETER Experiment Name: At_0.001%_MeJA__cDNA_P Parameter: Tissue Value: Aerial
  misc_feature: MA Experiment 108569 PARAMETER Experiment Name: At_0.001%_MeJA__cDNA_P Parameter: Treatment Value: 0.001% MeJA vs. No Treatment
  misc_feature: MA Experiment ID: 20000184 Result: Down-regulated in Transcription
  misc_feature: MA Experiment 20000184 PARAMETER Experiment Name: At_Shoots__P Parameter: Age (day) Value: 7
  misc_feature: MA Experiment 20000184 PARAMETER Experiment Name: At_Shoots__P Parameter: Tissue Value: Shoots vs. Whole Plant
  misc_feature: MA Experiment ID: 20000794 Result: Up-regulated in Transcription
  misc_feature: MA Experiment 20000794 PARAMETER Experiment Name: At_Petals_P Parameter: Age (day) Value: 23-25 days
  misc_feature: MA Experiment 20000794 PARAMETER Experiment Name: At_Petals_P Parameter: Plant Line Value: WS
  misc_feature: MA Experiment 20000794 PARAMETER Experiment Name: At_Petals_P Parameter: Tissue Value: Petals vs. Whole plant
gtattggactaatttagtagactgctccctgaaatattgattttctcatgctaacaaaggcagacgaacagaagggtttggaggataaatgtgctaaacagatggcggaaattaaatctctcaaggctctaattgagaaactactcaaagaaaaactacagctgcaaaatctagcaagcatctgtacgcgtgaatgtaatgatgacaggggactggcagaaatcaaggattcacaacggaaagcccaagctcaggctgaagagctgaaaaacgttttggatgaacactttcttgaattgagagtgaaagcggctcatgagactgagagtgcttgccaagaaaggcttgctaccgccaaggctgaaattgctgaattgaggactcagttagatctttctgagagggaggttttggaacttaaggagggtattaaagttaaagagcaggaggcagaggcatccattgctgaaatggagactataggtcaagcctatgaagacatgcagacacagaaccaacatttgttgcagcaggtggctgagcgggacgattataatatcaagcttgtttccgaaagtgtcaagacaaagcatgcttacaacactcacttatctgagaagcaagtaatggaaaagcagctccatcaggttaatgcatccgtagagaattttaaagcaaggattgcacataatgaggaacagatgaaaggctgtttttctgaggcttataaattgattcaagaagatcgtcacctcgttatcagcctcgaaaccaccaaatgggaagtagctgatgctgacaaggaattcagatggctcaagtcggccgtgtcttcatccgaaaaggaatatgaacagatcagtaggaggacagacgacatcaaactggaactggatgatgaaaggagggagaagaagaagcttgaggaagagcttatggagttgaacaaagagcttgaagagttgggttctgagagtgtagaagctgcaattgtgaggctccaggaagaagttaagaattgcaaaaacatcctcaaatgtggtgtatgttttgatcggcctaaagaggtggtaattgtgaaatgttatcatctgttctgccagcaatgcatccaacgtagcttagagatccgacaccggaaatgtccaggctgcggtaccgcctttggccagaatgacgtccggcttgtcaaaatgtaactcaaaacattcacacaaatgcactatgtgttggtacataacaaacttaattaaggtccacacagtc

SEQ ID NO: 102551 - protein, 383 aa, Arabidopsis thaliana
  peptide (1)..(383): Ceres Seq. ID no. 13610684
  misc_feature (331)..(369): Pfam Name: Zinc finger, C3HC4 type (RING finger) Pfam Description: Zinc finger, C3HC4 type (RING finger)
  misc_feature (1)..(383): Homolog of NCBI NO: 18405292 NR Description: zinc finger (C3HC4-type RING finger) protein
  misc_feature (4)..(383): Homolog of NCBI NO: 25405809 NR Description: unknown protein, 71207-66119 [imported] -
  misc_feature (19)..(383): Homolog of NCBI NO: 21553880 NR Description: unknown [Arabidopsis thaliana]
  misc_feature (29)..(383): Homolog of NCBI NO: 37536934 NR Description: unknown protein [Oryza sativa (japonica
  misc_feature (1)..(379): Homolog of NCBI NO: 7486945 NR Description: hypothetical protein At2g44950 [imported] - thaliana >gi|20196921|gb|AAM14834.1| unknown protein [Arabidopsis
  misc_feature (1)..(379): Homolog of NCBI NO: 30689877 NR Description: zinc finger (C3HC4-type RING finger) protein [Arabidopsis thaliana] >gi|19698951|gb|AAL91211.1| unknown
  misc_feature (7)..(377): Homolog of NCBI NO: 33284892 NR Description: SI:bZ1C10.1.2 (novel ring finger protein) [Danio
  misc_feature (2)..(381): Homolog of NCBI NO: 26335243 NR Description: unnamed protein product [Mus musculus]
  misc_feature (2)..(377): Homolog of NCBI NO: 28175093 NR Description: Similar to ring finger protein 40 [Homo sapiens]
  misc_feature (2)..(377): Homolog of NCBI NO: 34364873 NR Description: hypothetical protein [Homo sapiens]
MLTKADEQKGLEDKCAKQMAEIKSLKALIEKLLKEKLQLQNLASICTRECNDDRGLAEIKDSQRKAQAQAEELKNVLDEHFLELRVKAAHETESACQERLATAKAEIAELRTQLDLSEREVLELKEGIKVKEQEAEASIAEMETIGQAYEDMQTQNQHLLQQVAERDDYNIKLVSESVKTKHAYNTHLSEKQVMEKQLHQVNASVENFKARIAHNEEQMKGCFSEAYKLIQEDRHLVISLETTKWEVADADKEFRWLKSAVSSSEKEYEQISRRTDDIKLELDDERREKKKLEEELMELNKELEELGSESVEAAIVRLQEEVKNCKNILKCGVCFDRPKEVVIVKCYHLFCQQCIQRSLEIRHRKCPGCGTAFGQNDVRLVKM

SEQ ID NO: 102552 - protein, 365 aa, Arabidopsis thaliana
  peptide (1)..(365): Ceres Seq. ID no. 13610685
  misc_feature (313)..(351): Pfam Name: Zinc finger, C3HC4 type (RING finger) Pfam Description: Zinc finger, C3HC4 type (RING finger)
  misc_feature (1)..(365): Homolog of NCBI NO: 18405292 NR Description: zinc finger (C3HC4-type RING finger) protein
  misc_feature (1)..(365): Homolog of NCBI NO: 25405809 NR Description: unknown protein, 71207-66119 [imported] -
  misc_feature (1)..(365): Homolog of NCBI NO: 21553880 NR Description: unknown [Arabidopsis thaliana]
  misc_feature (11)..(365): Homolog of NCBI NO: 37536934 NR Description: unknown protein [Oryza sativa (japonica
  misc_feature (1)..(361): Homolog of NCBI NO: 7486945 NR Description: hypothetical protein At2g44950 [imported] - thaliana >gi|20196921|gb|AAM14834.1| unknown protein [Arabidopsis
  misc_feature (1)..(361): Homolog of NCBI NO: 30689877 NR Description: zinc finger (C3HC4-type RING finger) protein [Arabidopsis thaliana] >gi|19698951|gb|AAL91211.1| unknown
  misc_feature (1)..(359): Homolog of NCBI NO: 33284892 NR Description: SI:bZ1C10.1.2 (novel ring finger protein) [Danio
  misc_feature (1)..(363): Homolog of NCBI NO: 26335243 NR Description: unnamed protein product [Mus musculus]
  misc_feature (1)..(359): Homolog of NCBI NO: 28175093 NR Description: Similar to ring finger protein 40 [Homo sapiens]
  misc_feature (1)..(359): Homolog of NCBI NO: 34364873 NR Description: hypothetical protein [Homo sapiens]
MAEIKSLKALIEKLLKEKLQLQNLASICTRECNDDRGLAEIKDSQRKAQAQAEELKNVLDEHFLELRVKAAHETESACQERLATAKAEIAELRTQLDLSEREVLELKEGIKVKEQEAEASIAEMETIGQAYEDMQTQNQHLLQQVAERDDYNIKLVSESVKTKHAYNTHLSEKQVMEKQLHQVNASVENFKARIAHNEEQMKGCFSEAYKLIQEDRHLVISLETTKWEVADADKEFRWLKSAVSSSEKEYEQISRRTDDIKLELDDERREKKKLEEELMELNKELEELGSESVEAAIVRLQEEVKNCKNILKCGVCFDRPKEVVIVKCYHLFCQQCIQRSLEIRHRKCPGCGTAFGQNDVRLVKM

SEQ ID NO: 102553 - protein, 242 aa, Arabidopsis thaliana
  peptide (1)..(242): Ceres Seq. ID no. 13610686
  misc_feature (190)..(228): Pfam Name: Zinc finger, C3HC4 type (RING finger) Pfam Description: Zinc finger, C3HC4 type (RING finger)
  misc_feature (1)..(242): Homolog of NCBI NO: 18405292 NR Description: zinc finger (C3HC4-type RING finger) protein
  misc_feature (1)..(242): Homolog of NCBI NO: 25405809 NR Description: unknown protein, 71207-66119 [imported] -
  misc_feature (1)..(242): Homolog of NCBI NO: 21553880 NR Description: unknown [Arabidopsis thaliana]
  misc_feature (1)..(242): Homolog of NCBI NO: 37536934 NR Description: unknown protein [Oryza sativa (japonica
  misc_feature (1)..(238): Homolog of NCBI NO: 7486945 NR Description: hypothetical protein At2g44950 [imported] - thaliana >gi|20196921|gb|AAM14834.1| unknown protein [Arabidopsis
  misc_feature (1)..(238): Homolog of NCBI NO: 30689877 NR Description: zinc finger (C3HC4-type RING finger) protein [Arabidopsis thaliana] >gi|19698951|gb|AAL91211.1| unknown
  misc_feature (1)..(236): Homolog of NCBI NO: 33284892 NR Description: SI:bZ1C10.1.2 (novel ring finger protein) [Danio
  misc_feature (1)..(240): Homolog of NCBI NO: 26335243 NR Description: unnamed protein product [Mus musculus]
  misc_feature (1)..(236): Homolog of NCBI NO: 28175093 NR Description: Similar to ring finger protein 40 [Homo sapiens]
  misc_feature (1)..(236): Homolog of NCBI NO: 34364873 NR Description: hypothetical protein [Homo sapiens]
METIGQAYEDMQTQNQHLLQQVAERDDYNIKLVSESVKTKHAYNTHLSEKQVMEKQLHQVNASVENFKARIAHNEEQMKGCFSEAYKLIQEDRHLVISLETTKWEVADADKEFRWLKSAVSSSEKEYEQISRRTDDIKLELDDERREKKKLEEELMELNKELEELGSESVEAAIVRLQEEVKNCKNILKCGVCFDRPKEVVIVKCYHLFCQQCIQRSLEIRHRKCPGCGTAFGQNDVRLVKM

SEQ ID NO: 102554 - DNA, 639 bp, Arabidopsis thaliana
  misc_feature (1)..(639): Ceres Seq. ID no. 13610687
  misc_feature: MA Experiment ID: 108434 Result: Up-regulated in Transcription
  misc_feature: MA Experiment 108434 PARAMETER Experiment Name: At_Root_Tips_cDNA_P Parameter: Tissue Value: Root Tips
  misc_feature: MA Experiment ID: 108462 Result: Up-regulated in Transcription
  misc_feature: MA Experiment 108462 PARAMETER Experiment Name: At_Germinating_Seeds_cDNA_P Parameter: Age (day) Value: 2 vs. 0
  misc_feature: MA Experiment 108462 PARAMETER Experiment Name: At_Germinating_Seeds_cDNA_P Parameter: Tissue Value: Germinating Seeds
  misc_feature: MA Experiment ID: 108572 Result: Down-regulated in Transcription
  misc_feature: MA Experiment 108572 PARAMETER Experiment Name: At_Drought_cDNA_P Parameter: Timepoint (hr) Value: 1
  misc_feature: MA Experiment 108572 PARAMETER Experiment Name: At_Drought_cDNA_P Parameter: Tissue Value: Aerial
  misc_feature: MA Experiment 108572 PARAMETER Experiment Name: At_Drought_cDNA_P Parameter: Treatment Value: Drought vs. No Drought
  misc_feature: MA Experiment ID: 108573 Result: Down-regulated in Transcription
  misc_feature: MA Experiment 108573 PARAMETER Experiment Name: At_Drought_cDNA_P Parameter: Timepoint (hr) Value: 6
  misc_feature: MA Experiment 108573 PARAMETER Experiment Name: At_Drought_cDNA_P Parameter: Tissue Value: Aerial
  misc_feature: MA Experiment 108573 PARAMETER Experiment Name: At_Drought_cDNA_P Parameter: Treatment Value: Drought vs. No Drought
  misc_feature: MA Experiment ID: 108576 Result: Down-regulated in Transcription
  misc_feature: MA Experiment 108576 PARAMETER Experiment Name: At_42deg_Heat_cDNA_P Parameter: Temperature (deg C) Value: 42 vs. 22
  misc_feature: MA Experiment 108576 PARAMETER Experiment Name: At_42deg_Heat_cDNA_P Parameter: Timepoint (hr) Value: 1
  misc_feature: MA Experiment 108576 PARAMETER Experiment Name: At_42deg_Heat_cDNA_P Parameter: Tissue Value: Aerial
  misc_feature: MA Experiment ID: 108577 Result: Down-regulated in Transcription
  misc_feature: MA Experiment 108577 PARAMETER Experiment Name: At_42deg_Heat_cDNA_P Parameter: Temperature (deg C) Value: 42 vs. 22
  misc_feature: MA Experiment 108577 PARAMETER Experiment Name: At_42deg_Heat_cDNA_P Parameter: Timepoint (hr) Value: 6
  misc_feature: MA Experiment 108577 PARAMETER Experiment Name: At_42deg_Heat_cDNA_P Parameter: Tissue Value: Aerial
  misc_feature: MA Experiment ID: 108579 Result: Up-regulated in Transcription
  misc_feature: MA Experiment 108579 PARAMETER Experiment Name: At_4deg_Cold_cDNA_P Parameter: Temperature (deg C) Value: 4 vs. 22
  misc_feature: MA Experiment 108579 PARAMETER Experiment Name: At_4deg_Cold_cDNA_P Parameter: Timepoint (hr) Value: 6
  misc_feature: MA Experiment 108579 PARAMETER Experiment Name: At_4deg_Cold_cDNA_P Parameter: Tissue Value: Aerial
  misc_feature: MA Experiment ID: 20000093 Result: Down-regulated in Transcription
  misc_feature: MA Experiment 20000093 PARAMETER Experiment Name: At_42deg_Heat_cDNA_P Parameter: Temperature (deg C) Value: 42 vs. 22
  misc_feature: MA Experiment 20000093 PARAMETER Experiment Name: At_42deg_Heat_cDNA_P Parameter: Timepoint (hr) Value: 0.5
  misc_feature: MA Experiment 20000093 PARAMETER Experiment Name: At_42deg_Heat_cDNA_P Parameter: Tissue Value: Aerial
  misc_feature: MA Experiment ID: 20000111 Result: Down-regulated in Transcription
  misc_feature: MA Experiment 20000111 PARAMETER Experiment Name: At_42deg_Heat_cDNA_P Parameter: Temperature (deg C) Value: 42 vs. 22
  misc_feature: MA Experiment 20000111 PARAMETER Experiment Name: At_42deg_Heat_cDNA_P Parameter: Timepoint (hr) Value: 6
  misc_feature: MA Experiment 20000111 PARAMETER Experiment Name: At_42deg_Heat_cDNA_P Parameter: Tissue Value: Aerial
  misc_feature: MA Experiment ID: 20000113 Result: Down-regulated in Transcription
  misc_feature: MA Experiment 20000113 PARAMETER Experiment Name: At_42deg_Heat_cDNA_P Parameter: Temperature (deg C) Value: 42 vs. 22
  misc_feature: MA Experiment 20000113 PARAMETER Experiment Name: At_42deg_Heat_cDNA_P Parameter: Timepoint (hr) Value: 8
  misc_feature: MA Experiment 20000113 PARAMETER Experiment Name: At_42deg_Heat_cDNA_P Parameter: Tissue Value: Aerial
  misc_feature: MA Experiment ID: 20000144 Result: Down-regulated in Transcription
  misc_feature: MA Experiment 20000144 PARAMETER Experiment Name: At_42deg_Heat_cDNA_P Parameter: Temperature (deg C) Value: 42 vs. 22
  misc_feature: MA Experiment 20000144 PARAMETER Experiment Name: At_42deg_Heat_cDNA_P Parameter: Timepoint (hr) Value: 1
  misc_feature: MA Experiment 20000144 PARAMETER Experiment Name: At_42deg_Heat_cDNA_P Parameter: Tissue Value: Aerial
  misc_feature: MA Experiment ID: 20000171 Result: Down-regulated in Transcription
  misc_feature: MA Experiment 20000171 PARAMETER Experiment Name: At_42deg_Heat_P Parameter: Age (day) Value: 14
  misc_feature: MA Experiment 20000171 PARAMETER Experiment Name: At_42deg_Heat_P Parameter: Organism Value: A. thaliana
  misc_feature: MA Experiment 20000171 PARAMETER Experiment Name: At_42deg_Heat_P Parameter: Plant Line Value: WS
  misc_feature: MA Experiment 20000171 PARAMETER Experiment Name: At_42deg_Heat_P Parameter: Temperature (deg C) Value: 42 vs. 22
  misc_feature: MA Experiment 20000171 PARAMETER Experiment Name: At_42deg_Heat_P Parameter: Timepoint (hr) Value: 1
  misc_feature: MA Experiment 20000171 PARAMETER Experiment Name: At_42deg_Heat_P Parameter: Tissue Value: Aerial
  misc_feature: MA Experiment ID: 20000173 Result: Down-regulated in Transcription
  misc_feature: MA Experiment 20000173 PARAMETER Experiment Name: At_42deg_Heat_P Parameter: Age (day) Value: 14
  misc_feature: MA Experiment 20000173 PARAMETER Experiment Name: At_42deg_Heat_P Parameter: Organism Value: A. thaliana
  misc_feature: MA Experiment 20000173 PARAMETER Experiment Name: At_42deg_Heat_P Parameter: Plant Line Value: WS
  misc_feature: MA Experiment 20000173 PARAMETER Experiment Name: At_42deg_Heat_P Parameter: Temperature (deg C) Value: 42 vs. 22
  misc_feature: MA Experiment 20000173 PARAMETER Experiment Name: At_42deg_Heat_P Parameter: Timepoint (hr) Value: 6
  misc_feature: MA Experiment 20000173 PARAMETER Experiment Name: At_42deg_Heat_P Parameter: Tissue Value: Aerial
  misc_feature: MA Experiment ID: 20000179 Result: Up-regulated in Transcription
  misc_feature: MA Experiment 20000179 PARAMETER Experiment Name: At_Germinating_Seeds_P Parameter: Age (hr) Value: 6 vs. 0
  misc_feature: MA Experiment 20000179 PARAMETER Experiment Name: At_Germinating_Seeds_P Parameter: Tissue Value: Germinating Seeds
  misc_feature: MA Experiment ID: 20000180 Result: Up-regulated in Transcription
  misc_feature: MA Experiment 20000180 PARAMETER Experiment Name: At_Germinating_Seeds_P Parameter: Age (hr) Value: 24 vs. 0
  misc_feature: MA Experiment 20000180 PARAMETER Experiment Name: At_Germinating_Seeds_P Parameter: Tissue Value: Germinating Seeds
  misc_feature: MA Experiment ID: 20000185 Result: Up-regulated in Transcription
  misc_feature: MA Experiment 20000185 PARAMETER Experiment Name: At_Roots__P Parameter: Age (day) Value: 7 vs. 21
  misc_feature: MA Experiment 20000185 PARAMETER Experiment Name: At_Roots__P Parameter: Organism Value: A. thaliana
  misc_feature: MA Experiment 20000185 PARAMETER Experiment Name: At_Roots__P Parameter: Tissue Value: Roots vs. Whole Plant
  misc_feature: MA Experiment ID: 20000234 Result: Up-regulated in Transcription
  misc_feature: MA Experiment 20000234 PARAMETER Experiment Name: At_Siliques_P Parameter: Age (day) Value: 21
  misc_feature: MA Experiment 20000234 PARAMETER Experiment Name: At_Siliques_P Parameter: Organism Value: A. thaliana
  misc_feature: MA Experiment 20000234 PARAMETER Experiment Name: At_Siliques_P Parameter: Plant Line Value: WS
  misc_feature: MA Experiment 20000234 PARAMETER Experiment Name: At_Siliques_P Parameter: Tissue Value: Less Than 5mm Siliques vs. Whole Plant
  misc_feature: MA Experiment ID: 20000264 Result: Up-regulated in Transcription
  misc_feature: MA Experiment 20000264 PARAMETER Experiment Name: At_Open_Flower_P Parameter: Age (day) Value: 21
  misc_feature: MA Experiment 20000264 PARAMETER Experiment Name: At_Open_Flower_P Parameter: Plant Line Value: WS
  misc_feature: MA Experiment 20000264 PARAMETER Experiment Name: At_Open_Flower_P Parameter: Tissue Value: Open Flower vs. Whole Plant
  misc_feature: MA Experiment ID: 20000265 Result: Up-regulated in Transcription
  misc_feature: MA Experiment 20000265 PARAMETER Experiment Name: At_Open_Flower_P Parameter: Age (day) Value: 21
  misc_feature: MA Experiment 20000265 PARAMETER Experiment Name: At_Open_Flower_P Parameter: Plant Line Value: WS
  misc_feature: MA Experiment 20000265 PARAMETER Experiment Name: At_Open_Flower_P Parameter: Tissue Value: Closed Flower vs. Whole Plant
  misc_feature: MA Experiment ID: 20000437 Result: Down-regulated in Transcription
  misc_feature: MA Experiment 20000437 PARAMETER Experiment Name: At_Drought_P Parameter: Age (day) Value: 8
  misc_feature: MA Experiment 20000437 PARAMETER Experiment Name: At_Drought_P Parameter: Organism Value: A. thaliana
  misc_feature: MA Experiment 20000437 PARAMETER Experiment Name: At_Drought_P Parameter: Plant Line Value: WS
  misc_feature: MA Experiment 20000437 PARAMETER Experiment Name: At_Drought_P Parameter: Timepoint (hr) Value: 24
  misc_feature: MA Experiment 20000437 PARAMETER Experiment Name: At_Drought_P Parameter: Tissue Value: Whole Plant
  misc_feature: MA Experiment 20000437 PARAMETER Experiment Name: At_Drought_P Parameter: Treatment Value: Drought vs. No Drought
  misc_feature: MA Experiment ID: 20000439 Result: Up-regulated in Transcription
  misc_feature: MA Experiment 20000439 PARAMETER Experiment Name: At_Roots__P Parameter: Age (day) Value: 14 vs. 21
  misc_feature: MA Experiment 20000439 PARAMETER Experiment Name: At_Roots__P Parameter: Organism Value: A. thaliana
  misc_feature: MA Experiment 20000439 PARAMETER Experiment Name: At_Roots__P Parameter: Tissue Value: Roots vs. Whole Plant
  misc_feature: MA Experiment ID: 20000445 Result: Down-regulated in Transcription
  misc_feature: MA Experiment 20000445 PARAMETER Experiment Name: At_100uM_NAA__P Parameter: Age (day) Value: 14
  misc_feature: MA Experiment 20000445 PARAMETER Experiment Name: At_100uM_NAA__P Parameter: Organism Value: A. thaliana
  misc_feature: MA Experiment 20000445 PARAMETER Experiment Name: At_100uM_NAA__P Parameter: Plant Line Value: WS
  misc_feature: MA Experiment 20000445 PARAMETER Experiment Name: At_100uM_NAA__P Parameter: Timepoint (hr) Value: 6
  misc_feature: MA Experiment 20000445 PARAMETER Experiment Name: At_100uM_NAA__P Parameter: Tissue Value: Aerial
  misc_feature: MA Experiment 20000445 PARAMETER Experiment Name: At_100uM_NAA__P Parameter: Treatment Value: 100uM NAA vs. No Treatment
  misc_feature: MA Experiment ID: 20001248 Result: Down-regulated in Transcription
  misc_feature: MA Experiment 20001248 PARAMETER Experiment Name: At_Far-red-induction_P Parameter: Age (day) Value: 7
  misc_feature: MA Experiment 20001248 PARAMETER Experiment Name: At_Far-red-induction_P Parameter: Light Value: Far-red vs. White
  misc_feature: MA Experiment 20001248 PARAMETER Experiment Name: At_Far-red-induction_P Parameter: Organism Value: A. thaliana
  misc_feature: MA Experiment 20001248 PARAMETER Experiment Name: At_Far-red-induction_P Parameter: Plant Line Value: Columbia
  misc_feature: MA Experiment 20001248 PARAMETER Experiment Name: At_Far-red-induction_P Parameter: Timepoint (hr) Value: 4
  misc_feature: MA Experiment 20001248 PARAMETER Experiment Name: At_Far-red-induction_P Parameter: Tissue Value: Whole Plant
  misc_feature: MA Experiment ID: 20001450 Result: Down-regulated in Transcription
  misc_feature: MA Experiment 20001450 PARAMETER Experiment Name: At_Far-red-induction_P Parameter: Age (day) Value: 7
  misc_feature: MA Experiment 20001450 PARAMETER Experiment Name: At_Far-red-induction_P Parameter: Light Value: Far-red vs. White
  misc_feature: MA Experiment 20001450 PARAMETER Experiment Name: At_Far-red-induction_P Parameter: Organism Value: A. thaliana
  misc_feature: MA Experiment 20001450 PARAMETER Experiment Name: At_Far-red-induction_P Parameter: Plant Line Value: Columbia
  misc_feature: MA Experiment 20001450 PARAMETER Experiment Name: At_Far-red-induction_P Parameter: Timepoint (hr) Value: 8
  misc_feature: MA Experiment 20001450 PARAMETER Experiment Name: At_Far-red-induction_P Parameter: Tissue Value: Whole Plant
  misc_feature: MA Experiment ID: 20001757 Result: Up-regulated in Transcription
  misc_feature: MA Experiment 20001757 PARAMETER Experiment Name: At_50mM_NH4NO3_L-to-H_P Parameter: Timepoint (hr) Value: 6
  misc_feature: MA Experiment 20001757 PARAMETER Experiment Name: At_50mM_NH4NO3_L-to-H_P Parameter: Tissue Value: Leaf
  misc_feature: MA Experiment 20001757 PARAMETER Experiment Name: At_50mM_NH4NO3_L-to-H_P Parameter: Treatment Value: 50mM NH4NO3 vs 100mM Mannitol
  misc_feature: MA Experiment ID: 20001911 Result: Down-regulated in Transcription
  misc_feature: MA Experiment 20001911 PARAMETER Experiment Name: At_Drought_Reproduction_P Parameter: Age (day) Value: 40
  misc_feature: MA Experiment 20001911 PARAMETER Experiment Name: At_Drought_Reproduction_P Parameter: Organism Value: A. thaliana
  misc_feature: MA Experiment 20001911 PARAMETER Experiment Name: At_Drought_Reproduction_P Parameter: Plant Line Value: WS
  misc_feature: MA Experiment 20001911 PARAMETER Experiment Name: At_Drought_Reproduction_P Parameter: Timepoint (day) Value: 10
  misc_feature: MA Experiment 20001911 PARAMETER Experiment Name: At_Drought_Reproduction_P Parameter: Tissue Value: Flowers
  misc_feature: MA Experiment 20001911 PARAMETER Experiment Name: At_Drought_Reproduction_P Parameter: Treatment Value: Drought vs. No Drought
ccataacaacaaattcgattcttataactgtttccctctcatctttacacaaaagtattctaatcgatttcaatggcgggtcgtggtaaaacactcggatctgggtctgcgaagaaggcaacaacaagaagcagcaaagccggtctccaattccctgtgggtcgtatcgctcgtttcttgaagaaaggcaaatacgccgaacgtgttggtgccggagctccggtttacttagccgccgttctcgaatacctcgccgctgaggtattggaattggctggaaacgcagcgagggataacaagaagacgaggattgttccaaggcatattcaattggcggtgaggaacgatgaagaattgagcaaattgcttggagatgtgactattgctaatggaggtgtgatgcctaacattcacaatcttcttcttcctaagaagaccggtgcttccaagccatctgctgaagacgattgattaatcaaccaaatccactctcttgtgttttttgagtttttaaggctttttaagagtaatttagattagatctatggtgaagaaagaatctatcttctgtgttttttgaattgaattgaatgttcatatgctttcaatttcttatggaatcaagattttaacttttct

SEQ ID NO: 102555 - protein, 132 aa, Arabidopsis thaliana; identical to SEQ ID NO: 30154
  peptide (1)..(132): Ceres Seq. ID no. 13610688
  misc_feature (4)..(121): Pfam Name: Core histone H2A/H2B/H3/H4 Pfam Description: Core histone H2A/H2B/H3/H4
  misc_feature (1)..(132): Homolog of NCBI NO: 15223708 NR Description: histone H2A, putative [Arabidopsis thaliana]
  misc_feature (1)..(132): Homolog of NCBI NO: 15232330 NR Description: histone H2A, putative [Arabidopsis thaliana]
  misc_feature (1)..(131): Homolog of NCBI NO: 15239697 NR Description: histone H2A [Arabidopsis thaliana] histone H2A [Arabidopsis thaliana] histone H2A [Arabidopsis thaliana] >gi|9758956|dbj|BAB09343.1|
  misc_feature (1)..(131): Homolog of NCBI NO: 15237024 NR Description: histone H2A, putative [Arabidopsis thaliana]
  misc_feature (1)..(131): Homolog of NCBI NO: 21617982 NR Description: histone H2A-like protein [Arabidopsis thaliana]
  misc_feature (1)..(132): Homolog of NCBI NO: 29837243 NR Description: putative histone H2A [Oryza sativa (japonica
  misc_feature (1)..(132): Homolog of NCBI NO: 2130105 NR Description: histone H2A.4 - wheat >gi|536892|dbj|BAA07278.1| H2A [Triticum aestivum] >gi|536896|dbj|BAA07280.1| protein H2A
  misc_feature (1)..(132): Homolog of NCBI NO: 34393264 NR Description: putative histone H2A [Oryza sativa (japonica
  misc_feature (1)..(132): Homolog of NCBI NO: 34393263 NR Description: histone H2A [Oryza sativa (japonica
  misc_feature (1)..(132): Homolog of NCBI NO: 7439702 NR Description: histone H2A (clone TH254) - wheat histone H2A [Triticum aestivum]

SEQ ID NO: 102556 - DNA, 968 bp, Arabidopsis thaliana
  misc_feature (1)..(968): Ceres Seq. ID no. 13610695
  misc_feature: MA Experiment ID: 108434 Result: Up-regulated in Transcription
  misc_feature: MA Experiment 108434 PARAMETER Experiment Name: At_Root_Tips_cDNA_P Parameter: Tissue Value: Root Tips
  misc_feature: MA Experiment ID: 108462 Result: Down-regulated in Transcription
  misc_feature: MA Experiment 108462 PARAMETER Experiment Name: At_Germinating_Seeds_cDNA_P Parameter: Age (day) Value: 2 vs. 0
  misc_feature: MA Experiment 108462 PARAMETER Experiment Name: At_Germinating_Seeds_cDNA_P Parameter: Tissue Value: Germinating Seeds
  misc_feature: MA Experiment ID: 108463 Result: Down-regulated in Transcription
  misc_feature: MA Experiment 108463 PARAMETER Experiment Name: At_Germinating_Seeds_cDNA_P Parameter: Age (day) Value: 3 vs. 0
  misc_feature: MA Experiment 108463 PARAMETER Experiment Name: At_Germinating_Seeds_cDNA_P Parameter: Tissue Value: Germinating Seeds
atagaagaaagagctccgtccccaaaaacaaaggaaacaaaaaatcagtcggcgaaacgggaagagatctatcggaaatcttacggcggcggaagtcatggcgaacatagaatcagaagcagtcgatttcgagccagaggaggatgaccttatggacgaagaaggtacagctattgacggagctgatgtttctccacgcgcgggacatccgaggcttaagtcggctattgccggagctaatggcgaatcagcaaagaagaccaaaggccgtgggtttcgcgaggagaaagattccgatcgtcagcgtcgtctttcctcacgcgatttcgaatcacttggttcagatggccgtcctggtccgcagagatccgttgaaggatggattatcttggtctctggagttcatgaggagacacaggaggaggatataaccaatgcttttggtgattttggggagattaagaatctaaatctcaatctcgatcgccgtagtggttatgtcaagggatatgctttgatagaatatgagaagaaggaagaagcacagagcgctatttcagcaatgaatggtgctgagcttctaacacagaatgttagcgttgactgggccttcagcagcggtcccagtggtggtgaatcttacaggagaaagaactcgaggtatgggaggtcgcaacgttcaagaagtccgagaagacgttactgattgtatgatttggtggagagttctccccatatctctctgtattagggattccctctcttatctgtaaggtactgatgcaagacgctgagtgttgaacaaatttttttctggggtttttgtagggtttggctgcttttgcattggtttatctctttatgcatttgcatgggattgttgcgtttaaacaccatgagatctgttttaatgctttgtattggtaaaagaagagaaacattggatgaggaagaatgttttaattttc

SEQ ID NO: 102557 - protein, 202 aa, Arabidopsis thaliana
  peptide (1)..(202): Ceres Seq. ID no. 13610696
  misc_feature (97)..(168): Pfam Name: RNA recognition motif. (a.k.a. RRM, RBD, or RNP domain) Pfam Description: RNA recognition motif. (a.k.a. RRM, RBD, or RNP
  misc_feature (1)..(202): Homolog of NCBI NO: 18403559 NR Description: RNA-binding protein, putative [Arabidopsis
  misc_feature (1)..(202): Homolog of NCBI NO: 21536738 NR Description: RNA-binding protein, putative [Arabidopsis
  misc_feature (1)..(189): Homolog of NCBI NO: 25405472 NR Description: probable RNA-binding protein 35994-37391
  misc_feature (1)..(202): Homolog of NCBI NO: 30524687 NR Description: salt tolerance protein 4 [Beta vulgaris]
  misc_feature (1)..(89): Homolog of NCBI NO: 15010564 NR Description: At1g51510/F5D21_5 [Arabidopsis thaliana]
  misc_feature (50)..(201): Homolog of NCBI NO: 20804379 NR Description: RNA binding motif protein 8 [Oryzias latipes]
  misc_feature (50)..(201): Homolog of NCBI NO: 20804381 NR Description: RNA binding motif protein 8 [Oryzias latipes]
  misc_feature (50)..(201): Homolog of NCBI NO: 4826972 NR Description: RNA binding motif protein 8A; RNA binding motif
  misc_feature (50)..(201): Homolog of NCBI NO: 10197630 NR Description: MDS014 [Homo sapiens]
  misc_feature (50)..(201): Homolog of NCBI NO: 13385356 NR Description: RNA binding motif protein [Mus musculus]
MANIESEAVDFEPEEDDLMDEEGTAIDGADVSPRAGHPRLKSAIAGANGESAKKTKGRGFREEKDSDRQRRLSSRDFESLGSDGRPGPQRSVEGWIILVSGVHEETQEEDITNAFGDFGEIKNLNLNLDRRSGYVKGYALIEYEKKEEAQSAISAMNGAELLTQNVSVDWAFSSGPSGGESYRRKNSRYGRSQRSRSPRRRY

SEQ ID NO: 102558 - protein, 184 aa, Arabidopsis thaliana
  peptide (1)..(184): Ceres Seq. ID no. 13610697
  misc_feature (79)..(150): Pfam Name: RNA recognition motif. (a.k.a. RRM, RBD, or RNP domain) Pfam Description: RNA recognition motif. (a.k.a. RRM, RBD, or RNP
  misc_feature (1)..(184): Homolog of NCBI NO: 18403559 NR Description: RNA-binding protein, putative [Arabidopsis
  misc_feature (1)..(184): Homolog of NCBI NO: 21536738 NR Description: RNA-binding protein, putative [Arabidopsis
  misc_feature (1)..(171): Homolog of NCBI NO: 25405472 NR Description: probable RNA-binding protein 35994-37391
  misc_feature (1)..(184): Homolog of NCBI NO: 30524687 NR Description: salt tolerance protein 4 [Beta vulgaris]
  misc_feature (1)..(71): Homolog of NCBI NO: 15010564 NR Description: At1g51510/F5D21_5 [Arabidopsis thaliana]
  misc_feature (32)..(183): Homolog of NCBI NO: 20804379 NR Description: RNA binding motif protein 8 [Oryzias latipes]
  misc_feature (32)..(183): Homolog of NCBI NO: 20804381 NR Description: RNA binding motif protein 8 [Oryzias latipes]
  misc_feature (32)..(183): Homolog of NCBI NO: 4826972 NR Description: RNA binding motif protein 8A; RNA binding motif
  misc_feature (32)..(183): Homolog of NCBI NO: 10197630 NR Description: MDS014 [Homo sapiens]
  misc_feature (32)..(183): Homolog of NCBI NO: 13385356 NR Description: RNA binding motif protein [Mus musculus]
MDEEGTAIDGADVSPRAGHPRLKSAIAGANGESAKKTKGRGFREEKDSDRQRRLSSRDFESLGSDGRPGPQRSVEGWIILVSGVHEETQEEDITNAFGDFGEIKNLNLNLDRRSGYVKGYALIEYEKKEEAQSAISAMNGAELLTQNVSVDWAFSSGPSGGESYRRKNSRYGRSQRSRSPRRRY

SEQ ID NO: 102559 - DNA, 3268 bp, Arabidopsis thaliana
  misc_feature (1)..(3268): Ceres Seq. ID no. 13610710
  misc_feature: MA Experiment ID: 108434 Result: Down-regulated in Transcription
  misc_feature: MA Experiment 108434 PARAMETER Experiment Name: At_Root_Tips_cDNA_P Parameter: Tissue Value: Root Tips
  misc_feature: MA Experiment ID: 108469 Result: Up-regulated in Transcription
  misc_feature: MA Experiment ID: 108561 Result: Up-regulated in Transcription
  misc_feature: MA Experiment 108561 PARAMETER Experiment Name: At_100uM_ABA_cDNA_P Parameter: Timepoint (hr) Value: 6
  misc_feature: MA Experiment 108561 PARAMETER Experiment Name: At_100uM_ABA_cDNA_P Parameter: Tissue Value: Aerial
  misc_feature: MA Experiment 108561 PARAMETER Experiment Name: At_100uM_ABA_cDNA_P Parameter: Treatment Value: 100uM ABA vs. No Treatment
  misc_feature: MA Experiment ID: 108569 Result: Up-regulated in Transcription
  misc_feature: MA Experiment 108569 PARAMETER Experiment Name: At_0.001%_MeJA__cDNA_P Parameter: Timepoint (hr) Value: 6
  misc_feature: MA Experiment 108569 PARAMETER Experiment Name: At_0.001%_MeJA__cDNA_P Parameter: Tissue Value: Aerial
  misc_feature: MA Experiment 108569 PARAMETER Experiment Name: At_0.001%_MeJA__cDNA_P Parameter: Treatment Value: 0.001% MeJA vs. No Treatment
  misc_feature: MA Experiment ID: 108572 Result: Up-regulated in Transcription
  misc_feature: MA Experiment 108572 PARAMETER Experiment Name: At_Drought_cDNA_P Parameter: Timepoint (hr) Value: 1
  misc_feature: MA Experiment 108572 PARAMETER Experiment Name: At_Drought_cDNA_P Parameter: Tissue Value: Aerial
  misc_feature: MA Experiment 108572 PARAMETER Experiment Name: At_Drought_cDNA_P Parameter: Treatment Value: Drought vs. No Drought
  misc_feature: MA Experiment ID: 108573 Result: Up-regulated in Transcription
  misc_feature: MA Experiment 108573 PARAMETER Experiment Name: At_Drought_cDNA_P Parameter: Timepoint (hr) Value: 6
  misc_feature: MA Experiment 108573 PARAMETER Experiment Name: At_Drought_cDNA_P Parameter: Tissue Value: Aerial
  misc_feature: MA Experiment 108573 PARAMETER Experiment Name: At_Drought_cDNA_P Parameter: Treatment Value: Drought vs. No Drought
  misc_feature: MA Experiment ID: 108574 Result: Up-regulated in Transcription
  misc_feature: MA Experiment 108574 PARAMETER Experiment Name: At_Wounding__cDNA_P Parameter: Timepoint (hr) Value: 1
  misc_feature: MA Experiment 108574 PARAMETER Experiment Name: At_Wounding__cDNA_P Parameter: Tissue Value: Aerial
  misc_feature: MA Experiment 108574 PARAMETER Experiment Name: At_Wounding__cDNA_P Parameter: Treatment Value: Wounding vs. No Wounding
  misc_feature: MA Experiment ID: 108667 Result: Up-regulated in Transcription
  misc_feature: MA Experiment 108667 PARAMETER Experiment Name: At_2mM_SA_cDNA_P Parameter: Plant Line Value: WS
  misc_feature: MA Experiment 108667 PARAMETER Experiment Name: At_2mM_SA_cDNA_P Parameter: Timepoint (hr) Value: 1
  misc_feature: MA Experiment 108667 PARAMETER Experiment Name: At_2mM_SA_cDNA_P Parameter: Treatment Value: 2mM SA vs. No Treatment
  misc_feature: MA Experiment ID: 108668 Result: Up-regulated in Transcription
  misc_feature: MA Experiment 108668 PARAMETER Experiment Name: At_2mM_SA_cDNA_P Parameter: Plant Line Value: WS
  misc_feature: MA Experiment 108668 PARAMETER Experiment Name: At_2mM_SA_cDNA_P Parameter: Timepoint (hr) Value: 6
  misc_feature: MA Experiment 108668 PARAMETER Experiment Name: At_2mM_SA_cDNA_P Parameter: Treatment Value: 2mM SA vs. No Treatment
  misc_feature: MA Experiment ID: 20000069 Result: Up-regulated in Transcription
  misc_feature: MA Experiment 20000069 PARAMETER Experiment Name: At_100uM_ABA_Mutants_cDNA_P Parameter: Plant Line Value: CS23
  misc_feature: MA Experiment 20000069 PARAMETER Experiment Name: At_100uM_ABA_Mutants_cDNA_P Parameter: Timepoint (hr) Value: 6
  misc_feature: MA Experiment 20000069 PARAMETER Experiment Name: At_100uM_ABA_Mutants_cDNA_P Parameter: Tissue Value: Aerial
  misc_feature: MA Experiment 20000069 PARAMETER Experiment Name: At_100uM_ABA_Mutants_cDNA_P Parameter: Treatment Value: 100uM ABA vs. No Treatment
  misc_feature: MA Experiment ID: 20000072 Result: Up-regulated in Transcription
  misc_feature: MA Experiment 20000072 PARAMETER Experiment Name: At_100uM_ABA_Mutants_cDNA_P Parameter: Plant Line Value: CS8105
  misc_feature: MA Experiment 20000072 PARAMETER Experiment Name: At_100uM_ABA_Mutants_cDNA_P Parameter: Timepoint (hr) Value: 6
  misc_feature: MA Experiment 20000072 PARAMETER Experiment Name: At_100uM_ABA_Mutants_cDNA_P Parameter: Tissue Value: Aerial
  misc_feature: MA Experiment 20000072 PARAMETER Experiment Name: At_100uM_ABA_Mutants_cDNA_P Parameter: Treatment Value: 100uM ABA vs. No Treatment
  misc_feature: MA Experiment ID: 20000086 Result: Up-regulated in Transcription
  misc_feature: MA Experiment 20000086 PARAMETER Experiment Name: At_100uM_ABA_Mutants_cDNA_P Parameter: Plant Line Value: CS22
  misc_feature: MA Experiment 20000086 PARAMETER Experiment Name: At_100uM_ABA_Mutants_cDNA_P Parameter: Timepoint (hr) Value: 6
  misc_feature: MA Experiment 20000086 PARAMETER Experiment Name: At_100uM_ABA_Mutants_cDNA_P Parameter: Tissue Value: Aerial
  misc_feature: MA Experiment 20000086 PARAMETER Experiment Name: At_100uM_ABA_Mutants_cDNA_P Parameter: Treatment Value: 100uM ABA vs. No Treatment
  misc_feature: MA Experiment ID: 20000087 Result: Up-regulated in Transcription
  misc_feature: MA Experiment 20000087 PARAMETER Experiment Name: At_100uM_ABA_Mutants_cDNA_P Parameter: Plant Line Value: WS
  misc_feature: MA Experiment 20000087 PARAMETER Experiment Name: At_100uM_ABA_Mutants_cDNA_P Parameter: Timepoint (hr) Value: 6
  misc_feature: MA Experiment 20000087 PARAMETER Experiment Name: At_100uM_ABA_Mutants_cDNA_P Parameter: Tissue Value: Aerial
  misc_feature: MA Experiment 20000087 PARAMETER Experiment Name: At_100uM_ABA_Mutants_cDNA_P Parameter: Treatment Value: 100uM ABA vs. No Treatment
  misc_feature: MA Experiment ID: 20000182 Result: Up-regulated in Transcription
  misc_feature: MA Experiment 20000182 PARAMETER Experiment Name: At_2mM_SA_P Parameter: Age (day) Value: 14
  misc_feature: MA Experiment 20000182 PARAMETER Experiment Name: At_2mM_SA_P Parameter: Organism Value: A. thaliana
  misc_feature: MA Experiment 20000182 PARAMETER Experiment Name: At_2mM_SA_P Parameter: Plant Line Value: WS
  misc_feature: MA Experiment 20000182 PARAMETER Experiment Name: At_2mM_SA_P Parameter: Timepoint (hr) Value: 6
  misc_feature: MA Experiment 20000182 PARAMETER Experiment Name: At_2mM_SA_P Parameter: Tissue Value: Aerial
  misc_feature: MA Experiment 20000182 PARAMETER Experiment Name: At_2mM_SA_P Parameter: Treatment Value: 2mM SA vs. No Treatment
cgcacacctctcttaacttcttcgatctcttctttttctctacacgattcgattgattcaagtatcaatcaatcgaatccgagataagtcatgagtttcttcaaatgggtttcttttgttttgatccttcacttgcttaatccgactctgatttcatgttcctctaatgggttatctcaaataccttcaaagtttcttactttggctaaaaggaatgattttttcgattggatggttggaatcagaaggagaatccatgagaatccagagttaggttatgaggaagtagagacatctaagcttgttagagcagagttggagaagatgggtgtttcttataagtacccagttgctgttactggtgttgttgggtatgttggaactggtcatgctccttttgttgctttaagggctgatatggatgcacttgctatgcaggaaatggtggaatgggaacacaagagtaaggttccagggaagatgcacgcttgtggacatgacgctcacactacgatgcttctcggtgctgcaaaattgctcaaagaacatgaagaagagctacagggcacagtggttctagttttccaaccagctgaggaaggaggaggaggtgcaaagaagattgtggaggctggagtgttggagaatgtgagtgcaatctttggattacatgtcacaaatcaattggcattaggtcaagtgagctcgagagagggtcctatgttggctggtagtggctttttcaaagctaagataagcgggaaaggaggccacgcagctcttccgcagcataccatagatccgatactggcagcttcaaatgttattgttagcttacaacacctcgtttcacgagaggcagatcctttagactctcaggtggttacagttgctaaatttgaaggcggtggtgctttcaatgtgattcctgactctgttactatcggtggtacattccgagctttttcaactaaaagctttatgcaactcaagaaaagaattgagcaggttatcacaaggcaagcgagcgtgaatatgtgtaatgcaacagtggatttcattgaagaggagaaaccttttttcccaccaactgtaaatgacaaagccttacaccagtttttcaagaacgtttcaggcgatatgttagggattgagaattacgtcgagatgcaaccattaatgggatcagaagatttctctttctaccaacaagcaatcccgggacattttagcttcgttggaatgcaaaacaaagctcgttcaccaatggcgagccctcactcgccgtactttgaagttaacgaagaattactaccttatggtgcttcccttcatgcttccatggccacaagatatcttcttgaactaaaagcttcaactctaaataagagtaacaaaaaagatgaactttgatgccaacaaacattggcttctcctattcttctactctgaaaaatgtcaaaacatggtaacagttttttcttttttacagagcctgccatgtaaagattaataaattgttatgcagtgtcaagcttctattaaatccaagaaatgttattactgcaaacaaaaacagatttgggccattgcaatgagagagctgaaacggtcaatttaaacaaatcagattgagagatttcagaagattcgacgcataaacaaatgctaaaattcgagagcttgttaacatgtctaactgataaagattcaatttttctttcttgttttttcttcttcttctttagattcaagttctgatctttgcttctttgaaaatcacaaatcttttcttctgggtttctataaaaaacccattttttgttgttgtcgtacaaacatttcccgtaaagattggatttttgtgtaagcatttgaagatagctaagaaagtgagaagcttttagatgaaagtgatggtaatggagatggaggaatgtgttaaagaaaatggttcatcaacacctaaatctagagtcacaaaccaatctagagctctcttaccgttgcgtctgcttcagattctgttattgtttcttgttttgactcttgggatctctgttgttagtatacacatgatcaagtttttgaagattcaacgtttagatcctgtggctccaattactttgctctctacgtataatcatgagagtgttactttagatagctttattagacctccttccaatgtttggcacacaatgaatgatagtgaattgctttggcgtgcttctatagagccgcaaagaaatggttatccgtttagacgtgtccctaaattggctttcatgtttcttgccaaaggtcctttaccatttgctccactttgggagaagttctgtaaaggacatgagggtctttattctatctatgttcattcgttgcctagttacaaatcggatttttcgaggtcgtctgtgttttacagaagatatatccctagtcaggctgtggcatggggagagatgagtatgggtgaagcagagaggaggcttttggctaatgcgttgcttgatatctctaatgaatggtttgttctgctgtctgaatcatgcattcctctgcgaggtttcagctttatctatagttatgtctctgaatcaagatatagttttatgggtgctgctgatgaggaaggacctgatggaagaggcagatacaggacagaaatggaacctgagatcacactaagccagtggcgaaaagggtctcagtggtttgaaattaaccggaaactcgctgttgagattgttcaagacactacttactatcccaaattcaaagagttttgtagacctccatgctatgtagatgaacattacttcccaacaatgttgtctatgaaacatcgggttttgcttgctaataggacattgacatggacagattggtcacgtggtggtgctcatccagctacttttggtaaggctgatgtaacggaaagttttctcaagaagcttacaggagccaaatcttgcctctacaatgatcatcagtctcaaatctgttatctctttgccagaaagtttgctccaagcgcattggagcctttactgcaacttgcacccaagattcttgagttaggctctaacatatcttccactcgtcactcttggtatttgttttgagaagttcttgagtttagagtatgatcatggaccgaactgatcattagttaatctcctctttcacaatgatattacaggtattgtgaaggttaaacatattttttgacatgacagattattgaataaagggagttttgagt

SEQ ID NO: 102560 - protein, 440 aa, Arabidopsis thaliana; identical to SEQ ID NO: 36083
  peptide (1)..(440): Ceres Seq. ID no. 13610711
  misc_feature (45)..(424): Pfam Name: Peptidase family M20/M25/M40 Pfam Description: Peptidase family M20/M25/M40
  misc_feature (1)..(440): Homolog of NCBI NO: 15218027 NR Description: IAA-Ala hydrolase (IAR3) [Arabidopsis thaliana]
  misc_feature (1)..(440): Homolog of NCBI NO: 2181184 NR Description: JR3 protein [Arabidopsis thaliana]
  misc_feature (1)..(433): Homolog of NCBI NO: 15218029 NR Description: auxin conjugate hydrolase (ILL5); protein id: [Arabidopsis thaliana] >gi|25319490|pir||H96556 auxin conjugate
  misc_feature (15)..(440): Homolog of NCBI NO: 27948556 NR Description: IAA-amino acid hydrolase [Oryza sativa (indica
  misc_feature (15)..(440): Homolog of NCBI NO: 34914096 NR Description: putative IAA-Ala hydrolase [Oryza sativa
  misc_feature (7)..(440): Homolog of NCBI NO: 902791 NR Description: ILL2
  misc_feature (10)..(423): Homolog of NCBI NO: 34900782 NR Description: putative IAA amidohydrolase [Oryza sativa
  misc_feature (34)..(423): Homolog of NCBI NO: 3559811 NR Description: gr1-protein [Arabidopsis thaliana]
  misc_feature (34)..(423): Homolog of NCBI NO: 15219390 NR Description: gr1 protein [Arabidopsis thaliana]
  misc_feature (20)..(423): Homolog of NCBI NO: 34900784 NR Description: IAA amidohydrolase-like protein~contains ESTs

SEQ ID NO: 102561 - protein, 406 aa, Arabidopsis thaliana
  peptide (1)..(406): Ceres Seq. ID no. 13610712
  misc_feature (160)..(271): Pfam Name: Arabidopsis protein of unknown function, DUF266 Pfam Description: Arabidopsis protein of unknown function, DUF266
  misc_feature (8)..(406): Homolog of NCBI NO: 15218028 NR Description: hypothetical protein [Arabidopsis thaliana]
  misc_feature (6)..(390): Homolog of NCBI NO: 18402952 NR Description: expressed protein [Arabidopsis thaliana]
  misc_feature (8)..(390): Homolog of NCBI NO: 21554566 NR Description: unknown [Arabidopsis thaliana]
  misc_feature (6)..(354): Homolog of NCBI NO: 9280235 NR Description: gb|AAD40142.1~gene_id:MXL8.19~strong similarity
  misc_feature (84)..(390): Homolog of NCBI NO: 15218485 NR Description: expressed protein [Arabidopsis thaliana]
  misc_feature (85)..(390): Homolog of NCBI NO: 15221386 NR Description: hypothetical protein [Arabidopsis thaliana]
  misc_feature (92)..(405): Homolog of NCBI NO: 34907318 NR Description: contains ESTs to Arabidopsis thaliana chromosome 1, At1g10280~unknown protein
  misc_feature (85)..(393): Homolog of NCBI NO: 34895606 NR Description: OSJNBa0083M16.15 [Oryza sativa (japonica
  misc_feature (92)..(393): Homolog of NCBI NO: 34895612 NR Description: OSJNBa0083M16.18 [Oryza sativa (japonica
  misc_feature (69)..(390): Homolog of NCBI NO: 15219555 NR Description: expressed protein [Arabidopsis thaliana]
MKVMVMEMEECVKENGSSTPKSRVTNQSRALLPLRLLQILLLFLVLTLGISVVSIHMIKFLKIQRLDPVAPITLLSTYNHESVTLDSFIRPPSNVWHTMNDSELLWRASIEPQRNGYPFRRVPKLAFMFLAKGPLPFAPLWEKFCKGHEGLYSIYVHSLPSYKSDFSRSSVFYRRYIPSQAVAWGEMSMGEAERRLLANALLDISNEWFVLLSESCIPLRGFSFIYSYVSESRYSFMGAADEEGPDGRGRYRTEMEPEITLSQWRKGSQWFEINRKLAVEIVQDTTYYPKFKEFCRPPCYVDEHYFPTMLSMKHRVLLANRTLTWTDWSRGGAHPATFGKADVTESFLKKLTGAKSCLYNDHQSQICYLFARKFAPSALEPLLQLAPKILELGSNISSTRHSWYLF

SEQ ID NO: 102562 - protein, 403 aa, Arabidopsis thaliana
  peptide (1)..(403): Ceres Seq. ID no. 13610713
  misc_feature (157)..(268): Pfam Name: Arabidopsis protein of unknown function, DUF266 Pfam Description: Arabidopsis protein of unknown function, DUF266
  misc_feature (5)..(403): Homolog of NCBI NO: 15218028 NR Description: hypothetical protein [Arabidopsis thaliana]
  misc_feature (3)..(387): Homolog of NCBI NO: 18402952 NR Description: expressed protein [Arabidopsis thaliana]
  misc_feature (5)..(387): Homolog of NCBI NO: 21554566 NR Description: unknown [Arabidopsis thaliana]
  misc_feature (3)..(351): Homolog of NCBI NO: 9280235 NR Description: gb|AAD40142.1~gene_id:MXL8.19~strong similarity
  misc_feature (81)..(387): Homolog of NCBI NO: 15218485 NR Description: expressed protein [Arabidopsis thaliana]
  misc_feature (82)..(387): Homolog of NCBI NO: 15221386 NR Description: hypothetical protein [Arabidopsis thaliana]
  misc_feature (89)..(402): Homolog of NCBI NO: 34907318 NR Description: contains ESTs to Arabidopsis thaliana chromosome 1, At1g10280~unknown protein
  misc_feature (82)..(390): Homolog of NCBI NO: 34895606 NR Description: OSJNBa0083M16.15 [Oryza sativa (japonica
  misc_feature (89)..(390): Homolog of NCBI NO: 34895612 NR Description: OSJNBa0083M16.18 [Oryza sativa (japonica
  misc_feature (66)..(387): Homolog of NCBI NO: 15219555 NR Description: expressed protein [Arabidopsis thaliana]
MVMEMEECVKENGSSTPKSRVTNQSRALLPLRLLQILLLFLVLTLGISVVSIHMIKFLKIQRLDPVAPITLLSTYNHESVTLDSFIRPPSNVWHTMNDSELLWRASIEPQRNGYPFRRVPKLAFMFLAKGPLPFAPLWEKFCKGHEGLYSIYVHSLPSYKSDFSRSSVFYRRYIPSQAVAWGEMSMGEAERRLLANALLDISNEWFVLLSESCIPLRGFSFIYSYVSESRYSFMGAADEEGPDGRGRYRTEMEPEITLSQWRKGSQWFEINRKLAVEIVQDTTYYPKFKEFCRPPCYVDEHYFPTMLSMKHRVLLANRTLTWTDWSRGGAHPATFGKADVTESFLKKLTGAKSCLYNDHQSQICYLFARKFAPSALEPLLQLAPKILELGSNISSTRHSWYLF

SEQ ID NO: 102563 - DNA, 2132 bp, Arabidopsis thaliana
  misc_feature (1)..(2132): Ceres Seq. ID no. 13610714
  misc_feature: MA Experiment ID: 20000306 Result: Down-regulated in Transcription
  misc_feature: MA Experiment 20000306 PARAMETER Experiment Name: At_Germinating_Seeds_Sub_P Parameter: Age (hr) Value: 6 vs. 0
  misc_feature: MA Experiment 20000306 PARAMETER Experiment Name: At_Germinating_Seeds_Sub_P Parameter: Organism Value: A. thaliana
  misc_feature: MA Experiment 20000306 PARAMETER Experiment Name: At_Germinating_Seeds_Sub_P Parameter: Plant Line Value: WS
  misc_feature: MA Experiment 20000306 PARAMETER Experiment Name: At_Germinating_Seeds_Sub_P Parameter: Tissue Value: Germinating Seeds
  misc_feature: MA Experiment ID: 20000307 Result: Up-regulated in Transcription
  misc_feature: MA Experiment 20000307 PARAMETER Experiment Name: At_Germinating_Seeds_Sub_P Parameter: Age (hr) Value: 24 vs. 0
  misc_feature: MA Experiment 20000307 PARAMETER Experiment Name: At_Germinating_Seeds_Sub_P Parameter: Organism Value: A. thaliana
  misc_feature: MA Experiment 20000307 PARAMETER Experiment Name: At_Germinating_Seeds_Sub_P Parameter: Plant Line Value: WS
  misc_feature: MA Experiment 20000307 PARAMETER Experiment Name: At_Germinating_Seeds_Sub_P Parameter: Tissue Value: Germinating Seeds
  misc_feature: MA Experiment ID: 20000314 Result: Down-regulated in Transcription
  misc_feature: MA Experiment 20000314 PARAMETER Experiment Name: At_14day_Shoots-Roots_Sub_P Parameter: Age (day) Value: 14
  misc_feature: MA Experiment 20000314 PARAMETER Experiment Name: At_14day_Shoots-Roots_Sub_P Parameter: Organism Value: A. thaliana
  misc_feature: MA Experiment 20000314 PARAMETER Experiment Name: At_14day_Shoots-Roots_Sub_P Parameter: Plant Line Value: WS
  misc_feature: MA Experiment 20000314 PARAMETER Experiment Name: At_14day_Shoots-Roots_Sub_P Parameter: Tissue Value: Roots vs. Whole Plant
  misc_feature: MA Experiment ID: 20000315 Result: Down-regulated in Transcription
  misc_feature: MA Experiment 20000315 PARAMETER Experiment Name: At_14day_Shoots-Roots_Sub_P Parameter: Age (day) Value: 14
  misc_feature: MA Experiment 20000315 PARAMETER Experiment Name: At_14day_Shoots-Roots_Sub_P Parameter: Organism Value: A. thaliana
  misc_feature: MA Experiment 20000315 PARAMETER Experiment Name: At_14day_Shoots-Roots_Sub_P Parameter: Plant Line Value: WS
  misc_feature: MA Experiment 20000315 PARAMETER Experiment Name: At_14day_Shoots-Roots_Sub_P Parameter: Tissue Value: Shoots vs. Whole Plant
  misc_feature: MA Experiment ID: 20000327 Result: Down-regulated in Transcription
  misc_feature: MA Experiment 20000327 PARAMETER Experiment Name: At_42deg_Heat_Sub_P Parameter: Age (day) Value: 14
  misc_feature: MA Experiment 20000327 PARAMETER Experiment Name: At_42deg_Heat_Sub_P Parameter: Organism Value: A. thaliana
  misc_feature: MA Experiment 20000327 PARAMETER Experiment Name: At_42deg_Heat_Sub_P Parameter: Plant Line Value: WS
  misc_feature: MA Experiment 20000327 PARAMETER Experiment Name: At_42deg_Heat_Sub_P Parameter: Temperature (deg C) Value: 42 vs. 22
  misc_feature: MA Experiment 20000327 PARAMETER Experiment Name: At_42deg_Heat_Sub_P Parameter: Timepoint (hr) Value: 1
  misc_feature: MA Experiment 20000327 PARAMETER Experiment Name: At_42deg_Heat_Sub_P Parameter: Tissue Value: Aerial
  misc_feature: MA Experiment ID: 20000328 Result: Down-regulated in Transcription
  misc_feature: MA Experiment 20000328 PARAMETER Experiment Name: At_42deg_Heat_Sub_P Parameter: Age (day) Value: 14
  misc_feature: MA Experiment 20000328 PARAMETER Experiment Name: At_42deg_Heat_Sub_P Parameter: Organism Value: A. thaliana
  misc_feature: MA Experiment 20000328 PARAMETER Experiment Name: At_42deg_Heat_Sub_P Parameter: Plant Line Value: WS
  misc_feature: MA Experiment 20000328 PARAMETER Experiment Name: At_42deg_Heat_Sub_P Parameter: Temperature (deg C) Value: 42 vs. 22
  misc_feature: MA Experiment 20000328 PARAMETER Experiment Name: At_42deg_Heat_Sub_P Parameter: Timepoint (hr) Value: 6
  misc_feature: MA Experiment 20000328 PARAMETER Experiment Name: At_42deg_Heat_Sub_P Parameter: Tissue Value: Aerial
  misc_feature: MA Experiment ID: 20000329 Result: Up-regulated in Transcription
  misc_feature: MA Experiment 20000329 PARAMETER Experiment Name: At_4deg_Cold_Sub_P Parameter: Age (day) Value: 14
  misc_feature: MA Experiment 20000329 PARAMETER Experiment Name: At_4deg_Cold_Sub_P Parameter: Organism Value: A. thaliana
  misc_feature: MA Experiment 20000329 PARAMETER Experiment Name: At_4deg_Cold_Sub_P Parameter: Plant Line Value: WS
  misc_feature: MA Experiment 20000329 PARAMETER Experiment Name: At_4deg_Cold_Sub_P Parameter: Temperature (deg C) Value: 4 vs. 22
  misc_feature: MA Experiment 20000329 PARAMETER Experiment Name: At_4deg_Cold_Sub_P Parameter: Timepoint (hr) Value: 6
  misc_feature: MA Experiment 20000329 PARAMETER Experiment Name: At_4deg_Cold_Sub_P Parameter: Tissue Value: Aerial
  misc_feature: MA Experiment ID: 20000355 Result: Down-regulated in Transcription
  misc_feature: MA Experiment 20000355 PARAMETER Experiment Name: At_Siliques_Sub_P Parameter: Age (day) Value: 21
  misc_feature: MA Experiment 20000355 PARAMETER Experiment Name: At_Siliques_Sub_P Parameter: Organism Value: A. thaliana
  misc_feature: MA Experiment 20000355 PARAMETER Experiment Name: At_Siliques_Sub_P Parameter: Plant Line Value: WS
  misc_feature: MA Experiment 20000355 PARAMETER Experiment Name: At_Siliques_Sub_P Parameter: Tissue Value: Less Than 5mm Siliques vs. Whole Plant
  misc_feature: MA Experiment ID: 20000440 Result: Down-regulated in Transcription
  misc_feature: MA Experiment 20000440 PARAMETER Experiment Name: At_Closed-Flower__Sub_P Parameter: Tissue Value: Closed Flower vs. Whole Plant
gagaaatacctcatatacataatcataaacttatatgcatagctttgctaactcaaaaaaaaaacagatcccttctttgcatagtaaggaagatattaatggagagtcatcgtgtgttcgttgccacttttatgctgatacttcatcttgttcaagctcaagatcaacccggattcatcaatgtggattgcggtttactccctcgtgattctccttacaacgcactcggaaccggtttagtatatacatcagatgtcggtttagttagcagtgggaaaactggtaaaatcgccaaggaattcgaagagaacaacagtacaccgaatttgacattgagatactttccagacggagcacgaaactgctacaacttaaacgtgagccgtgacaccaactatatgatcaaggctacattcgtgtatggaaattacgatggtcataaagatgagccgaacttcgacctttacttgggtccaaatttatgggcaacggtaagccgcagtgaaactgttgaggagatcatccatgtgacgaaatccgattcgttacaggtttgtcttgctaagacgggagattttataccttttattaatatcttggagctacgaccattgaagaaaaatgtgtacgttacagaaagtggctcactcaagctcttatttaggaagtattttagtgactcaggtcaaacgataaggtatccagatgatatctatgaccgtgtatggcatgcatccttcctggaaaataattgggcacaagtatcgacgactttgggtgtaaacgttactgataattatgatttatcacaagatgtaatggcaacgggcgcaacacctctaaacgatagtgagacattgaacattacatggaacgtagagcctcctactacaaaggtttactcctacatgcactttgcagagcttgagacactaagggccaacgatacaagggaattcaatgtgatgctgaatggaaatgacttggccttgtcaaataacaatttgaccggagaagtacctgaatttctagctgacttaaaatcaatcatggtcatagacttaagaggcaataacctcagtggcccggttcctgcctcacttcttcagaagaaaggattgatgctacaatcgccgagatcctctgaaccagcaatagtgacgaaaaacaaaaggtttacttactcacaagttgtgataatgacaaataacttccaaagaatccttgggaaaggagggtttggaatcgtttatcatggctttgtgaacggtgttgaacaagtagctgttaagatactctctcattcatcatctcaagggtataaacaattcaaagctgaggtagaacttcttcttagagttcatcacaagaatttggttggtcttgttgggtattgcgacgaaggagagaacatggctcttatctatgaatacatggccaatggagatttaaaagaacatatgtcaggaacaagaaaccgatttattttaaattgggaaactagactaaaaatagtcattgactctgcgcaagggcttgagtatttgcataatggatgcaaaccactaatggtacacagggacgtcaaaactacaaatatattgttaaatgaacactttgaagccaaacttgctgattttgggctttcaaggtcttttccgattggaggtgaaactcatgtgtcaacagttgttgctggaactcctggatatctcgatcctgaatattacaaaacaaatcggttgacagagaagagtgatgtatatagttttgggattgtattgttggagatgatcacaaatcggccagtgatagaccaaagccgtgaaaagccatatatttcagaatgggtggggataatgcttacgaaaggagacatcattagcattatggatccaagtctaaatggagactatgattctggttctgtgtggaaagctgttgaactagcaatgtcttgtctgaatccttcttcaacaagaagacctaccatgtctcaagttcttattgcattaaacgaatgtttggtatctgaaaattcaaggggaggagcgagtagggacatggactcaaagagttccctagaggtaagcttgacatttgatactgatgtgagcccaatggctaggtag

SEQ ID NO: 102564 - protein, 709 aa, Arabidopsis thaliana
  peptide (1)..(709): Ceres Seq. ID no. 13610715
  misc_feature (355)..(709): Homolog of NCBI NO: 25387123 NR Description: probable protein kinase [imported] - Arabidopsis >gi|9802784|gb|AAF99853.1|AC015448_3 Putative protein kinase
  misc_feature (33)..(325): Homolog of NCBI NO: 25387123 NR Description: probable protein kinase [imported] - Arabidopsis >gi|9802784|gb|AAF99853.1|AC015448_3 Putative protein kinase
  misc_feature (328)..(376): Homolog of NCBI NO: 25387123 NR Description: probable protein kinase [imported] - Arabidopsis >gi|9802784|gb|AAF99853.1|AC015448_3 Putative protein kinase
  misc_feature (328)..(375): Homolog of NCBI NO: 25387123 NR Description: probable protein kinase [imported] - Arabidopsis >gi|9802784|gb|AAF99853.1|AC015448_3 Putative protein kinase
  misc_feature (376)..(709): Homolog of NCBI NO: 25387148 NR Description: probable protein kinase [imported] - Arabidopsis >gi|9802795|gb|AAF99864.1|AC015448_14 Putative protein kinase
  misc_feature (33)..(325): Homolog of NCBI NO: 25387148 NR Description: probable protein kinase [imported] - Arabidopsis >gi|9802795|gb|AAF99864.1|AC015448_14 Putative protein kinase
  misc_feature (359)..(709): Homolog of NCBI NO: 15218050 NR Description: leucine rich repeat protein kinase, putative
  misc_feature (184)..(325): Homolog of NCBI NO: 15218050 NR Description: leucine rich repeat protein kinase, putative
  misc_feature (33)..(169): Homolog of NCBI NO: 15218050 NR Description: leucine rich repeat protein kinase, putative
  misc_feature (379)..(709): Homolog of NCBI NO: 9294681 NR Description: receptor-like protein kinase [Arabidopsis
EIPHIHNHKLICIALLTQKKNRSLLCIVRKILMESHRVFVATFMLILHLVQAQDQPGFINVDCGLLPRDSPYNALGTGLVYTSDVGLVSSGKTGKIAKEFEENNSTPNLTLRYFPDGARNCYNLNVSRDTNYMIKATFVYGNYDGHKDEPNFDLYLGPNLWATVSRSETVEEIIHVTKSDSLQVCLAKTGDFIPFINILELRPLKKNVYVTESGSLKLLFRKYFSDSGQTIRYPDDIYDRVWHASFLENNWAQVSTTLGVNVTDNYDLSQDVMATGATPLNDSETLNITWNVEPPTTKVYSYMHFAELETLRANDTREFNVMLNGNDLALSNNNLTGEVPEFLADLKSIMVIDLRGNNLSGPVPASLLQKKGLMLQSPRSSEPAIVTKNKRFTYSQVVIMTNNFQRILGKGGFGIVYHGFVNGVEQVAVKILSHSSSQGYKQFKAEVELLLRVHHKNLVGLVGYCDEGENMALIYEYMANGDLKEHMSGTRNRFILNWETRLKIVIDSAQGLEYLHNGCKPLMVHRDVKTTNILLNEHFEAKLADFGLSRSFPIGGETHVSTVVAGTPGYLDPEYYKTNRLTEKSDVYSFGIVLLEMITNRPVIDQSREKPYISEWVGIMLTKGDIISIMDPSLNGDYDSGSVWKAVELAMSCLNPSSTRRPTMSQVLIALNECLVSENSRGGASRDMDSKSSLEVSLTFDTDVSPMAR

SEQ ID NO: 102565 - protein, 677 aa, Arabidopsis thaliana
  peptide (1)..(677): Ceres Seq. ID no. 13610716
  misc_feature (323)..(677): Homolog of NCBI NO: 25387123 NR Description: probable protein kinase [imported] - Arabidopsis >gi|9802784|gb|AAF99853.1|AC015448_3 Putative protein kinase
  misc_feature (1)..(293): Homolog of NCBI NO: 25387123 NR Description: probable protein kinase [imported] - Arabidopsis >gi|9802784|gb|AAF99853.1|AC015448_3 Putative protein kinase
  misc_feature (296)..(344): Homolog of NCBI NO: 25387123 NR Description: probable protein kinase [imported] - Arabidopsis >gi|9802784|gb|AAF99853.1|AC015448_3 Putative protein kinase
  misc_feature (296)..(343): Homolog of NCBI NO: 25387123 NR Description: probable protein kinase [imported] - Arabidopsis >gi|9802784|gb|AAF99853.1|AC015448_3 Putative protein kinase
  misc_feature (344)..(677): Homolog of NCBI NO: 25387148 NR Description: probable protein kinase [imported] - Arabidopsis >gi|9802795|gb|AAF99864.1|AC015448_14 Putative protein kinase
  misc_feature (1)..(293): Homolog of NCBI NO: 25387148 NR Description: probable protein kinase [imported] - Arabidopsis >gi|9802795|gb|AAF99864.1|AC015448_14 Putative protein kinase
  misc_feature (327)..(677): Homolog of NCBI NO: 15218050 NR Description: leucine rich repeat protein kinase, putative
  misc_feature (152)..(293): Homolog of NCBI NO: 15218050 NR Description: leucine rich repeat protein kinase, putative
  misc_feature (1)..(137): Homolog of NCBI NO: 15218050 NR Description: leucine rich repeat protein kinase, putative
  misc_feature (347)..(677): Homolog of NCBI NO: 9294681 NR Description: receptor-like protein kinase [Arabidopsis
MESHRVFVATFMLILHLVQAQDQPGFINVDCGLLPRDSPYNALGTGLVYTSDVGLVSSGKTGKIAKEFEENNSTPNLTLRYFPDGARNCYNLNVSRDTNYMIKATFVYGNYDGHKDEPNFDLYLGPNLWATVSRSETVEEIIHVTKSDSLQVCLAKTGDFIPFINILELRPLKKNVYVTESGSLKLLFRKYFSDSGQTIRYPDDIYDRVWHASFLENNWAQVSTTLGVNVTDNYDLSQDVMATGATPLNDSETLNITWNVEPPTTKVYSYMHFAELETLRANDTREFNVMLNGNDLALSNNNLTGEVPEFLADLKSIMVIDLRGNNLSGPVPASLLQKKGLMLQSPRSSEPAIVTKNKRFTYSQVVIMTNNFQRILGKGGFGIVYHGFVNGVEQVAVKILSHSSSQGYKQFKAEVELLLRVHHKNLVGLVGYCDEGENMALIYEYMANGDLKEHMSGTRNRFILNWETRLKIVIDSAQGLEYLHNGCKPLMVHRDVKTTNILLNEHFEAKLADFGLSRSFPIGGETHVSTVVAGTPGYLDPEYYKTNRLTEKSDVYSFGIVLLEMITNRPVIDQSREKPYISEWVGIMLTKGDIISIMDPSLNGDYDSGSVWKAVELAMSCLNPSSTRRPTMSQVLIALNECLVSENSRGGASRDMDSKSSLEVSLTFDTDVSPMAR

SEQ ID NO: 102566 - protein, 666 aa, Arabidopsis thaliana
  peptide (1)..(666): Ceres Seq. ID no. 13610717
  misc_feature (312)..(666): Homolog of NCBI NO: 25387123 NR Description: probable protein kinase [imported] - Arabidopsis >gi|9802784|gb|AAF99853.1|AC015448_3 Putative protein kinase
  misc_feature (1)..(282): Homolog of NCBI NO: 25387123 NR Description: probable protein kinase [imported] - Arabidopsis >gi|9802784|gb|AAF99853.1|AC015448_3 Putative protein kinase
  misc_feature (285)..(333): Homolog of NCBI NO: 25387123 NR Description: probable protein kinase [imported] - Arabidopsis >gi|9802784|gb|AAF99853.1|AC015448_3 Putative protein kinase
  misc_feature (285)..(332): Homolog of NCBI NO: 25387123 NR Description: probable protein kinase [imported] - Arabidopsis >gi|9802784|gb|AAF99853.1|AC015448_3 Putative protein kinase
  misc_feature (333)..(666): Homolog of NCBI NO: 25387148 NR Description: probable protein kinase [imported] - Arabidopsis >gi|9802795|gb|AAF99864.1|AC015448_14 Putative protein kinase
  misc_feature (1)..(282): Homolog of NCBI NO: 25387148 NR Description: probable protein kinase [imported] - Arabidopsis >gi|9802795|gb|AAF99864.1|AC015448_14 Putative protein kinase
  misc_feature (316)..(666): Homolog of NCBI NO: 15218050 NR Description: leucine rich repeat protein kinase, putative
  misc_feature (141)..(282): Homolog of NCBI NO: 15218050 NR Description: leucine rich repeat protein kinase, putative
  misc_feature (1)..(126): Homolog of NCBI NO: 15218050 NR Description: leucine rich repeat protein kinase, putative
  misc_feature (336)..(666): Homolog of NCBI NO: 9294681 NR Description: receptor-like protein kinase [Arabidopsis
MLILHLVQAQDQPGFINVDCGLLPRDSPYNALGTGLVYTSDVGLVSSGKTGKIAKEFEENNSTPNLTLRYFPDGARNCYNLNVSRDTNYMIKATFVYGNYDGHKDEPNFDLYLGPNLWATVSRSETVEEIIHVTKSDSLQVCLAKTGDFIPFINILELRPLKKNVYVTESGSLKLLFRKYFSDSGQTIRYPDDIYDRVWHASFLENNWAQVSTTLGVNVTDNYDLSQDVMATGATPLNDSETLNITWNVEPPTTKVYSYMHFAELETLRANDTREFNVMLNGNDLALSNNNLTGEVPEFLADLKSIMVIDLRGNNLSGPVPASLLQKKGLMLQSPRSSEPAIVTKNKRFTYSQVVIMTNNFQRILGKGGFGIVYHGFVNGVEQVAVKILSHSSSQGYKQFKAEVELLLRVHHKNLVGLVGYCDEGENMALIYEYMANGDLKEHMSGTRNRFILNWETRLKIVIDSAQGLEYLHNGCKPLMVHRDVKTTNILLNEHFEAKLADFGLSRSFPIGGETHVSTVVAGTPGYLDPEYYKTNRLTEKSDVYSFGIVLLEMITNRPVIDQSREKPYISEWVGIMLTKGDIISIMDPSLNGDYDSGSVWKAVELAMSCLNPSSTRRPTMSQVLIALNECLVSENSRGGASRDMDSKSSLEVSLTFDTDVSPMAR

SEQ ID NO: 102567 - DNA, 1462 bp, Arabidopsis thaliana
  misc_feature (1)..(1462): Ceres Seq. ID no. 13610718
  misc_feature: MA Experiment ID: 20000184 Result: Down-regulated in Transcription
  misc_feature: MA Experiment 20000184 PARAMETER Experiment Name: At_Shoots__P Parameter: Age (day) Value: 7
  misc_feature: MA Experiment 20000184 PARAMETER Experiment Name: At_Shoots__P Parameter: Tissue Value: Shoots vs. Whole Plant
  misc_feature: MA Experiment ID: 20000185 Result: Down-regulated in Transcription
  misc_feature: MA Experiment 20000185 PARAMETER Experiment Name: At_Roots__P Parameter: Age (day) Value: 7 vs. 21
  misc_feature: MA Experiment 20000185 PARAMETER Experiment Name: At_Roots__P Parameter: Organism Value: A. thaliana
  misc_feature: MA Experiment 20000185 PARAMETER Experiment Name: At_Roots__P Parameter: Tissue Value: Roots vs. Whole Plant
  misc_feature: MA Experiment ID: 20000235 Result: Down-regulated in Transcription
  misc_feature: MA Experiment 20000235 PARAMETER Experiment Name: At_Siliques_P Parameter: Age (day) Value: 21
  misc_feature: MA Experiment 20000235 PARAMETER Experiment Name: At_Siliques_P Parameter: Organism Value: A. thaliana
  misc_feature: MA Experiment 20000235 PARAMETER Experiment Name: At_Siliques_P Parameter: Plant Line Value: WS
  misc_feature: MA Experiment 20000235 PARAMETER Experiment Name: At_Siliques_P Parameter: Tissue Value: 5-10mm Siliques vs. Whole Plant
  misc_feature: MA Experiment ID: 20000439 Result: Down-regulated in Transcription
  misc_feature: MA Experiment 20000439 PARAMETER Experiment Name: At_Roots__P Parameter: Age (day) Value: 14 vs. 21
  misc_feature: MA Experiment 20000439 PARAMETER Experiment Name: At_Roots__P Parameter: Organism Value: A. thaliana
  misc_feature: MA Experiment 20000439 PARAMETER Experiment Name: At_Roots__P Parameter: Tissue Value: Roots vs. Whole Plant
  misc_feature: MA Experiment ID: 20000573 Result: Down-regulated in Transcription
  misc_feature: MA Experiment 20000573 PARAMETER Experiment Name: At_100uM_ABA_Mutants__P Parameter: Organism Value: A. thaliana
  misc_feature: MA Experiment 20000573 PARAMETER Experiment Name: At_100uM_ABA_Mutants__P Parameter: Plant Line Value: CS22 vs. Ler wt
  misc_feature: MA Experiment 20000573 PARAMETER Experiment Name: At_100uM_ABA_Mutants__P Parameter: Timepoint (hr) Value: N/A
  misc_feature: MA Experiment 20000573 PARAMETER Experiment Name: At_100uM_ABA_Mutants__P Parameter: Tissue Value: Whole Plant
  misc_feature: MA Experiment 20000573 PARAMETER Experiment Name: At_100uM_ABA_Mutants__P Parameter: Treatment Value: None
  misc_feature: MA Experiment ID: 20000574 Result: Down-regulated in Transcription
  misc_feature: MA Experiment 20000574 PARAMETER Experiment Name: At_100uM_ABA_Mutants__P Parameter: Organism Value: A. thaliana
  misc_feature: MA Experiment 20000574 PARAMETER Experiment Name: At_100uM_ABA_Mutants__P Parameter: Plant Line Value: CS23 vs. Ler wt
  misc_feature: MA Experiment 20000574 PARAMETER Experiment Name: At_100uM_ABA_Mutants__P Parameter: Timepoint (hr) Value: N/A
  misc_feature: MA Experiment 20000574 PARAMETER Experiment Name: At_100uM_ABA_Mutants__P Parameter: Tissue Value: Whole Plant
  misc_feature: MA Experiment 20000574 PARAMETER Experiment Name: At_100uM_ABA_Mutants__P Parameter: Treatment Value: None
  misc_feature: MA Experiment ID: 20001451 Result: Up-regulated in Transcription
  misc_feature: MA Experiment 20001451 PARAMETER Experiment Name: At_Far-red-induction_P Parameter: Age (day) Value: 7
  misc_feature: MA Experiment 20001451 PARAMETER Experiment Name: At_Far-red-induction_P Parameter: Light Value: Far-red vs. White
  misc_feature: MA Experiment 20001451 PARAMETER Experiment Name: At_Far-red-induction_P Parameter: Organism Value: A. thaliana
  misc_feature: MA Experiment 20001451 PARAMETER Experiment Name: At_Far-red-induction_P Parameter: Plant Line Value: Columbia
  misc_feature: MA Experiment 20001451 PARAMETER Experiment Name: At_Far-red-induction_P Parameter: Timepoint (hr) Value: 24
  misc_feature: MA Experiment 20001451 PARAMETER Experiment Name: At_Far-red-induction_P Parameter: Tissue Value: Whole Plant
  misc_feature: MA Experiment ID: 20001905 Result: Up-regulated in Transcription
  misc_feature: MA Experiment 20001905 PARAMETER Experiment Name: At_Drought_Reproduction_P Parameter: Age (day) Value: 40
  misc_feature: MA Experiment 20001905 PARAMETER Experiment Name: At_Drought_Reproduction_P Parameter: Organism Value: A. thaliana
  misc_feature: MA Experiment 20001905 PARAMETER Experiment Name: At_Drought_Reproduction_P Parameter: Plant Line Value: WS
  misc_feature: MA Experiment 20001905 PARAMETER Experiment Name: At_Drought_Reproduction_P Parameter: Timepoint (day) Value: 10
  misc_feature: MA Experiment 20001905 PARAMETER Experiment Name: At_Drought_Reproduction_P Parameter: Tissue Value: Rosettes
  misc_feature: MA Experiment 20001905 PARAMETER Experiment Name: At_Drought_Reproduction_P Parameter: Treatment Value: Drought vs. No Drought
ataaaatccaacttcttctccttcaagaatctagagatagagagagagagagaacacaaagtgggaaaaaagataagaacccaccataaagttttaacatttttcccttcaaaaggcgaaagcttttgatttgtataaaagtcccacttaatcacctctctagcttctcattccatttccatctcctctcttttgttttctaagttgcttcaagagttttggatagtgtagcagagagattttaactaatgggtttataaaattttgttcttttgcgtgaacaagttgtcaacttctagacagattttctttttgaagtgttttcttgtcgaaattcttcttcttttggtcaaagaacgcaagattcttctgtagttcctctaaaaaaaatcctaatggagggttattcaagaaacggtgaaatctctccgaagctgcttgacttgatgattccacaagagagaagaaattggtttcacgatgagaaaaactctgttttcaaaacagaggagaagaagcttgagctaaagcttggaccacctggtgaagaagatgatgatgaatcgatgataagacacatgaagaaagaaccaaaagacaaatctatcctctctctcgctggcaaatacttctctccttcttccaccaaaaccacatcccataaaagaactgctcctggtccagtggtgggatggcctccggttcgatccttcaggaagaatttagctagtggaagttcttcaaagcttggaaatgactcaaccacctccaatggtgttaccctcaagaaccaaaagtgtgatgctgctgctaagacaacagaaccaaagagacaaggaggcatgtttgtgaagatcaacatgtatggtgttcccattggtcgtaaagttgatctcagtgctcataatagctatgagcagttatctttcacagttgacaagctcttcagaggtcttcttgcagctcaaagagactttccatcatccatagaagatgaaaaaccaatcactggattattagatgggaatggagaatatactcttacatatgaagacaatgaaggagacaagatgcttgtaggagatgttccatggcaaatgtttgtgtcttcggtgaagaggctgcgtgtgattaaaacttctgagatttcttcagcattaacatatggaaatggtaagcaagagaaaatgagaagatgaagaaaaagatcttttacagcttttaaagaagtagagagatgttattaattgcattttgcctttaaactttgatgagtttttggtcttggaaaagtttctgatataagtctgatgtacattctggtttgttacatcttcttttggcttttgagatatcatagagttttgttggaactcaaagaccaaacagtgcaatgatgattttggggtcttgagtaaatttacaaacccttttaggcatattataatagtcttctgttttt

SEQ ID NO: 102568 - protein, 267 aa, Arabidopsis thaliana; identical to SEQ ID NO: 39751
  peptide (1)..(267): Ceres Seq. ID no. 13610719
  misc_feature (40)..(261): Pfam Name: AUX/IAA family Pfam Description: AUX/IAA family
  misc_feature (1)..(267): Homolog of NCBI NO: 15218080 NR Description: auxin-responsive protein IAA18 (Indoleacetic
  misc_feature (1)..(267): Homolog of NCBI NO: 21594025 NR Description: auxin regulated protein IAA18, putative
  misc_feature (31)..(267): Homolog of NCBI NO: 25296228 NR Description: auxin-induced protein IAA18 [imported] - thaliana (fragment) >gi|2618725|gb|AAB84355.1| IAA18 [Arabidopsis
  misc_feature (1)..(265): Homolog of NCBI NO: 15228226 NR Description: auxin-responsive protein (Indoleacetic protein), putative [Arabidopsis thaliana]
  misc_feature (1)..(265): Homolog of NCBI NO: 21593333 NR Description: phytochrome-associated protein 1 (PAP1)
  misc_feature (1)..(265): Homolog of NCBI NO: 4093155 NR Description: phytochrome-associated protein 1 [Arabidopsis
  misc_feature (24)..(251): Homolog of NCBI NO: 34906394 NR Description: P0710E05.9 [Oryza sativa (japonica
  misc_feature (80)..(255): Homolog of NCBI NO: 34909384 NR Description: putative phytochrome-associated protein [Oryza
  misc_feature (38)..(112): Homolog of NCBI NO: 18420964 NR Description: auxin-responsive protein IAA28 (Indoleacetic
  misc_feature (209)..(262): Homolog of NCBI NO: 18420964 NR Description: auxin-responsive protein IAA28 (Indoleacetic

SEQ ID NO: 102569 - protein, 250 aa, Arabidopsis thaliana; identical to SEQ ID NO: 39752
  peptide (1)..(250): Ceres Seq. ID no. 13610720
  misc_feature (23)..(244): Pfam Name: AUX/IAA family Pfam Description: AUX/IAA family
  misc_feature (1)..(250): Homolog of NCBI NO: 15218080 NR Description: auxin-responsive protein IAA18 (Indoleacetic
  misc_feature (1)..(250): Homolog of NCBI NO: 21594025 NR Description: auxin regulated protein IAA18, putative
  misc_feature (14)..(250): Homolog of NCBI NO: 25296228 NR Description: auxin-induced protein IAA18 [imported] - thaliana (fragment) >gi|2618725|gb|AAB84355.1| IAA18 [Arabidopsis
  misc_feature (1)..(248): Homolog of NCBI NO: 15228226 NR Description: auxin-responsive protein (Indoleacetic protein), putative [Arabidopsis thaliana]
  misc_feature (1)..(248): Homolog of NCBI NO: 21593333 NR Description: phytochrome-associated protein 1 (PAP1)
  misc_feature (1)..(248): Homolog of NCBI NO: 4093155 NR Description: phytochrome-associated protein 1 [Arabidopsis
  misc_feature (7)..(234): Homolog of NCBI NO: 34906394 NR Description: P0710E05.9 [Oryza sativa (japonica
  misc_feature (63)..(238): Homolog of NCBI NO: 34909384 NR Description: putative phytochrome-associated protein [Oryza
  misc_feature (21)..(95): Homolog of NCBI NO: 18420964 NR Description: auxin-responsive protein IAA28 (Indoleacetic
  misc_feature (192)..(245): Homolog of NCBI NO: 18420964 NR Description: auxin-responsive protein IAA28 (Indoleacetic

SEQ ID NO: 102570 - protein, 210 aa, Arabidopsis thaliana; identical to SEQ ID NO: 39753
  peptide (1)..(210): Ceres Seq. ID no. 13610721
  misc_feature (1)..(204): Pfam Name: AUX/IAA family Pfam Description: AUX/IAA family
  misc_feature (1)..(210): Homolog of NCBI NO: 15218080 NR Description: auxin-responsive protein IAA18 (Indoleacetic
  misc_feature (1)..(210): Homolog of NCBI NO: 21594025 NR Description: auxin regulated protein IAA18, putative
  misc_feature (1)..(210): Homolog of NCBI NO: 25296228 NR Description: auxin-induced protein IAA18 [imported] - thaliana (fragment) >gi|2618725|gb|AAB84355.1| IAA18 [Arabidopsis
  misc_feature (1)..(208): Homolog of NCBI NO: 15228226 NR Description: auxin-responsive protein (Indoleacetic protein), putative [Arabidopsis thaliana]
  misc_feature (1)..(208): Homolog of NCBI NO: 21593333 NR Description: phytochrome-associated protein 1 (PAP1)
  misc_feature (1)..(208): Homolog of NCBI NO: 4093155 NR Description: phytochrome-associated protein 1 [Arabidopsis
  misc_feature (1)..(194): Homolog of NCBI NO: 34906394 NR Description: P0710E05.9 [Oryza sativa (japonica
  misc_feature (23)..(198): Homolog of NCBI NO: 34909384 NR Description: putative phytochrome-associated protein [Oryza
  misc_feature (1)..(55): Homolog of NCBI NO: 18420964 NR Description: auxin-responsive protein IAA28 (Indoleacetic
  misc_feature (152)..(205): Homolog of NCBI NO: 18420964 NR Description: auxin-responsive protein IAA28 (Indoleacetic

SEQ ID NO: 102571 - DNA, 1885 bp, Arabidopsis thaliana
  misc_feature (1)..(1885): Ceres Seq. ID no. 13610722
  misc_feature: MA Experiment ID: 108463 Result: Down-regulated in Transcription
  misc_feature: MA Experiment 108463 PARAMETER Experiment Name: At_Germinating_Seeds_cDNA_P Parameter: Age (day) Value: 3 vs. 0
  misc_feature: MA Experiment 108463 PARAMETER Experiment Name: At_Germinating_Seeds_cDNA_P Parameter: Tissue Value: Germinating Seeds
  misc_feature: MA Experiment ID: 108595 Result: Down-regulated in Transcription
  misc_feature: MA Experiment 108595 PARAMETER Experiment Name: At_Ler-pi_Ovule_cDNA_P Parameter: Plant Line Value: null
  misc_feature: MA Experiment ID: 20000227 Result: Down-regulated in Transcription
  misc_feature: MA Experiment 20000227 PARAMETER Experiment Name: At_Root-Tips-vs-Tops_P Parameter: Tissue Value: Root Tips vs. Root Tops
  misc_feature: MA Experiment ID: 20000794 Result: Up-regulated in Transcription
  misc_feature: MA Experiment 20000794 PARAMETER Experiment Name: At_Petals_P Parameter: Age (day) Value: 23-25 days
  misc_feature: MA Experiment 20000794 PARAMETER Experiment Name: At_Petals_P Parameter: Plant Line Value: WS
  misc_feature: MA Experiment 20000794 PARAMETER Experiment Name: At_Petals_P Parameter: Tissue Value: Petals vs. Whole plant
gtaaataaactgagaaaaagcctccgtctcctcctctctctctattcatcagcctcaacctctctttcgtcgtcgactcagtttccgatttagggttacccaatcttcgccatgtatcgcacggcagcttcacgagccagggctcttaagggagttcttactcgtagtttgagaccagcgcgttatgctagttctagtgctgttgcggagacgagttcgtcaacgccggcttacttgagctggttgagtggtgggtctcgtgctgcgcttacttcattggatatgcctctacaaggtgtttctcttcctccgccgcttgctgataaagtcgagccgagcaaacttcagatcactactcttccaaatggtcttaagatagcctcagagacgactccgaatccggcagcttcgattggtttatatgttgattgcggttctatttatgaggcgccttatttccatggagctacacatttgcttgaaagaatggctttcaagagcacgttgaacagaactcattttcgtcttgtgagggaaattgaggctattggaggcaacacatccgcttctgcgtctcgagagcaaatgagttacactattgatgctcttaagacctatgtccctgaaatggttgaagttcttattgacagtgttagaaaccctgctttcttggactgggaagtgaatgaagagctacggaagatgaaggtagagatagcggaacttgcaaagaaccctatgggtttcctcttggaggccattcattctgctggttactctggtccattggcaagtcctctgtacgcaccggagtctgctttagatagattgaatggggagctcttggaagagtttatgactgagaatttcactgctgcacggatggtattggcggcaagtggagtagaacatgaggaacttttaaaagttgctgagccattaacttctgaccttcctaatgtaccaccccaattggctccaaaatctcagtatgtcggtggagattttcgccaacatactggtggagaggctacacactttgcggttgctttcgaggtgcctggctggaataacgagaaagaagcagtcaccgccactgttctccagatgcttatgggaggaggtggctcattctctgcgggaggtcctggaaaaggaatgcactcgtggctttatcgccgtgttctaaacgaatatcaggaggttcagtcatgcactgcattcactagcatctttaacgacaccgggttgtttggaatctatggttgctcgagtcctcaattcgctgcaaaagcaattgaattagcagctaaagaactcaaagatgttgcaggaggaaaagttaaccaggcacatcttgatcgtgccaaggcagccacaaaatctgcagttctgatgaatttggaatctcggatgattgcagcagaagacattggtagacagatacttacatacggagagaggaaaccagttgatcaattcttgaagtcagtagaccaactaaccttgaaagacattgcagacttcaccagcaaggttatttcaaagcctttgacaatgggttcctttggagatgtgttggctgttccgagctatgacacaataagcagcaaatttcgttgaagcaaaacaaacaatttgccaaatcaacaatattttgggacttgtaaaataaagaagatcttggggagaagaagacccaaccaattttaattttaatttttttttttacaattacagtttcgtatttttatgaaatggattttgtttccatcgacagatataaatgactggattttgtccggtttgtctctccaattttcaggagtatttgtattccaataaataatcttttactacgtgtaatgcaaacaacttcagtggt

SEQ ID NO: 102572 - protein, 503 aa, Arabidopsis thaliana; identical to SEQ ID NO: 27376
  peptide (1)..(503): Ceres Seq. ID no. 13610723
  misc_feature (239)..(423): Pfam Name: Peptidase M16 inactive domain Pfam Description: Peptidase M16 inactive domain
  misc_feature (1)..(503): Homolog of NCBI NO: 15218090 NR Description: mitochondrial processing peptidase alpha subunit [Arabidopsis thaliana] >gi|29839695|sp|Q9ZU25|MPA1_ARATH Probable
  misc_feature (1)..(503): Homolog of NCBI NO: 21594004 NR Description: mitochondrial processing peptidase alpha subunit,
  misc_feature (1)..(503): Homolog of NCBI NO: 18401141 NR Description: mitochondrial processing peptidase alpha subunit [Arabidopsis thaliana] >gi|29839443|sp|O04308|MPA2_ARATH Probable processing peptidase alpha subunit 2, mitochondrial peptidase
  misc_feature (1)..(503): Homolog of NCBI NO: 14334534 NR Description: putative mitochondrial processing peptidase alpha
  misc_feature (1)..(503): Homolog of NCBI NO: 266567 NR Description: Mitochondrial processing peptidase alpha subunit,
  misc_feature (1)..(502): Homolog of NCBI NO: 2117355 NR Description: mitochondrial processing peptidase (EC 3.4.24.64)
  misc_feature (23)..(502): Homolog of NCBI NO: 34909352 NR Description: putative mitochondrial processing peptidase alpha
  misc_feature (1)..(502): Homolog of NCBI NO: 15076515 NR Description: mitochondrial processing peptidase alpha subunit
  misc_feature (1)..(502): Homolog of NCBI NO: 11993905 NR Description: mitochondrial processing peptidase alpha-chain
  misc_feature (1)..(488): Homolog of NCBI NO: 34906418 NR Description: putative mitochondrial processing peptidase

SEQ ID NO: 102573 - protein, 446 aa, Arabidopsis thaliana; identical to SEQ ID NO: 27377
  peptide (1)..(446): Ceres Seq. ID no. 13610724
  misc_feature (182)..(366): Pfam Name: Peptidase M16 inactive domain Pfam Description: Peptidase M16 inactive domain
  misc_feature (1)..(446): Homolog of NCBI NO: 15218090 NR Description: mitochondrial processing peptidase alpha subunit [Arabidopsis thaliana] >gi|29839695|sp|Q9ZU25|MPA1_ARATH Probable
  misc_feature (1)..(446): Homolog of NCBI NO: 21594004 NR Description: mitochondrial processing peptidase alpha subunit,
  misc_feature (1)..(446): Homolog of NCBI NO: 18401141 NR Description: mitochondrial processing peptidase alpha subunit [Arabidopsis thaliana] >gi|29839443|sp|O04308|MPA2_ARATH Probable processing peptidase alpha subunit 2, mitochondrial peptidase
  misc_feature (1)..(446): Homolog of NCBI NO: 14334534 NR Description: putative mitochondrial processing peptidase alpha
  misc_feature (1)..(446): Homolog of NCBI NO: 266567 NR Description: Mitochondrial processing peptidase alpha subunit,
  misc_feature (1)..(445): Homolog of NCBI NO: 2117355 NR Description: mitochondrial processing peptidase (EC 3.4.24.64)
  misc_feature (1)..(445): Homolog of NCBI NO: 34909352 NR Description: putative mitochondrial processing peptidase alpha
  misc_feature (1)..(445): Homolog of NCBI NO: 15076515 NR Description: mitochondrial processing peptidase alpha subunit
  misc_feature (1)..(445): Homolog of NCBI NO: 11993905 NR Description: mitochondrial processing peptidase alpha-chain
  misc_feature (1)..(431): Homolog of NCBI NO: 34906418 NR Description: putative mitochondrial processing peptidase

SEQ ID NO: 102574 - protein, 378 aa, Arabidopsis thaliana; identical to SEQ ID NO: 27378
  peptide (1)..(378): Ceres Seq. ID no. 13610725
  misc_feature (114)..(298): Pfam Name: Peptidase M16 inactive domain Pfam Description: Peptidase M16 inactive domain
  misc_feature (1)..(378): Homolog of NCBI NO: 15218090 NR Description: mitochondrial processing peptidase alpha subunit [Arabidopsis thaliana] >gi|29839695|sp|Q9ZU25|MPA1_ARATH Probable
  misc_feature (1)..(378): Homolog of NCBI NO: 21594004 NR Description: mitochondrial processing peptidase alpha subunit,
  misc_feature (1)..(378): Homolog of NCBI NO: 18401141 NR Description: mitochondrial processing peptidase alpha subunit [Arabidopsis thaliana] >gi|29839443|sp|O04308|MPA2_ARATH Probable processing peptidase alpha subunit 2, mitochondrial peptidase
  misc_feature (1)..(378): Homolog of NCBI NO: 14334534 NR Description: putative mitochondrial processing peptidase alpha
  misc_feature (1)..(378): Homolog of NCBI NO: 266567 NR Description: Mitochondrial processing peptidase alpha subunit,
  misc_feature (1)..(377): Homolog of NCBI NO: 2117355 NR Description: mitochondrial processing peptidase (EC 3.4.24.64)
  misc_feature (1)..(377): Homolog of NCBI NO: 34909352 NR Description: putative mitochondrial processing peptidase alpha
  misc_feature (1)..(377): Homolog of NCBI NO: 15076515 NR Description: mitochondrial processing peptidase alpha subunit
  misc_feature (1)..(377): Homolog of NCBI NO: 11993905 NR Description: mitochondrial processing peptidase alpha-chain
  misc_feature (1)..(363): Homolog of NCBI NO: 34906418 NR Description: putative mitochondrial processing peptidase

SEQ ID NO: 102575 - DNA, 1176 bp, Arabidopsis thaliana
  misc_feature (1)..(1176): Ceres Seq. ID no. 13610726
  misc_feature: MA Experiment ID: 20000182 Result: Up-regulated in Transcription
  misc_feature: MA Experiment 20000182 PARAMETER Experiment Name: At_2mM_SA_P Parameter: Age (day) Value: 14
  misc_feature: MA Experiment 20000182 PARAMETER Experiment Name: At_2mM_SA_P Parameter: Organism Value: A. thaliana
  misc_feature: MA Experiment 20000182 PARAMETER Experiment Name: At_2mM_SA_P Parameter: Plant Line Value: WS
  misc_feature: MA Experiment 20000182 PARAMETER Experiment Name: At_2mM_SA_P Parameter: Timepoint (hr) Value: 6
  misc_feature: MA Experiment 20000182 PARAMETER Experiment Name: At_2mM_SA_P Parameter: Tissue Value: Aerial
  misc_feature: MA Experiment 20000182 PARAMETER Experiment Name: At_2mM_SA_P Parameter: Treatment Value: 2mM SA vs. No Treatment
  misc_feature: MA Experiment ID: 20000227 Result: Down-regulated in Transcription
  misc_feature: MA Experiment 20000227 PARAMETER Experiment Name: At_Root-Tips-vs-Tops_P Parameter: Tissue Value: Root Tips vs. Root Tops
  misc_feature: MA Experiment ID: 20000265 Result: Down-regulated in Transcription
  misc_feature: MA Experiment 20000265 PARAMETER Experiment Name: At_Open_Flower_P Parameter: Age (day) Value: 21
  misc_feature: MA Experiment 20000265 PARAMETER Experiment Name: At_Open_Flower_P Parameter: Plant Line Value: WS
  misc_feature: MA Experiment 20000265 PARAMETER Experiment Name: At_Open_Flower_P Parameter: Tissue Value: Closed Flower vs. Whole Plant
  misc_feature: MA Experiment ID: 20001451 Result: Up-regulated in Transcription
  misc_feature: MA Experiment 20001451 PARAMETER Experiment Name: At_Far-red-induction_P Parameter: Age (day) Value: 7
  misc_feature: MA Experiment 20001451 PARAMETER Experiment Name: At_Far-red-induction_P Parameter: Light Value: Far-red vs. White
  misc_feature: MA Experiment 20001451 PARAMETER Experiment Name: At_Far-red-induction_P Parameter: Organism Value: A. thaliana
  misc_feature: MA Experiment 20001451 PARAMETER Experiment Name: At_Far-red-induction_P Parameter: Plant Line Value: Columbia
  misc_feature: MA Experiment 20001451 PARAMETER Experiment Name: At_Far-red-induction_P Parameter: Timepoint (hr) Value: 24
  misc_feature: MA Experiment 20001451 PARAMETER Experiment Name: At_Far-red-induction_P Parameter: Tissue Value: Whole Plant
gtcttcaacgttcggctaatccttggtccgtgctaagatcttagatcgatttctaaagtcttcgtcttcttcttcttctgataactagctttttcaatcttctgaagctttaattttttcatacccatggctaatcgttatgatccaaatcctttcgctgaggaagaagaagtcaatcctttcgctaatgctagaggagttccacctgcgtcgaattcgagactttcgcctttgcctccagagcctgttggtttcgattatggtcgaaccgtagacattcctcttgacagagctggtacacaggatttgaagaagaaagagaaggaactccaagccaaagaagctgagctaaaacgacgagagcaggacctcaaacggaaagaagatgctgctgcacgagctggaatcgttattgaagtgaaaaactggccgcctttcttcccacttatccaccatgacatcgcaaacgaaattccggttcatctccaaagactacagtatgttacctttgcaacgtatttggggttggttctttgtcttttctggaatatcatcgccgttactacagcttggatcaaaggagaaggagtgacgatatggcttcttgccttaatttacttcatagcgggtgttccaggaggctatgtgttatggtatcgaccactctaccgtgccttcagaactgatagtgcattgagctttggatggtttttcttgttctatatgctccacattgctttctgcgtctttgctgcagttgctccacctgtcgtcttcaaaggaaaatctcttgctgggatcttacctgcaatagatgtcttaagtggtcaagcaattgttgggatattctacttcattgggtttgcatttttctgcctcgaatcagtggttagcatctgggttattcagcaagtgtatatgtacttccgaggcagcgggaaacaagatcaaatgagacgggaagcagcgagaggagccttgagagccgctgtttgagagttctccttgtaacattctggtttgtgtatgcactgtttcttttttcagattttcttgaagtctctctctctctctctctctctctctgctctataaacaaaaaaaaaaagatttaatttttcctttgtacctttatgtcatgtaaatttgtttgttcaaaaatcagagttcagattc

SEQ ID NO: 102576 - protein, 289 aa, Arabidopsis thaliana; identical to SEQ ID NO: 36309
  peptide (1)..(289): Ceres Seq. ID no. 13610727
  misc_feature (97)..(271): Pfam Name: SCAMP family Pfam Description: SCAMP family
  misc_feature (1)..(289): Homolog of NCBI NO: 15219893 NR Description: secretory carrier membrane protein [Arabidopsis >gi|7109228|gb|AAF36686.1|AF225920_1 secretory carrier membrane
  misc_feature (1)..(289): Homolog of NCBI NO: 15220305 NR Description: secretory carrier membrane protein -related
  misc_feature (3)..(289): Homolog of NCBI NO: 15226410 NR Description: secretory carrier-associated membrane protein [Arabidopsis thaliana] >gi|25411996|pir||A84594 hypothetical
  misc_feature (1)..(288): Homolog of NCBI NO: 7109232 NR Description: secretory carrier membrane protein [Oryza sativa]
  misc_feature (1)..(289): Homolog of NCBI NO: 3941289 NR Description: similarity to SCAMP37 [Pisum sativum]
  misc_feature (1)..(289): Homolog of NCBI NO: 25402653 NR Description: hypothetical protein [imported] - Arabidopsis >gi|5734732|gb|AAD49997.1|AC007259_10 Hypothetical protein
  misc_feature (1)..(136): Homolog of NCBI NO: 25404319 NR Description: hypothetical protein F11P17.4 [imported] - thaliana >gi|2443878|gb|AAB71471.1| Unknown protein [Arabidopsis
  misc_feature (201)..(261): Homolog of NCBI NO: 25404319 NR Description: hypothetical protein F11P17.4 [imported] - thaliana >gi|2443878|gb|AAB71471.1| Unknown protein [Arabidopsis
  misc_feature (4)..(289): Homolog of NCBI NO: 18379111 NR Description: expressed protein [Arabidopsis thaliana]
  misc_feature (21)..(288): Homolog of NCBI NO: 34899754 NR Description: putative secretory carrier membrane protein

SEQ ID NO: 102577 - DNA, 2743 bp, Arabidopsis thaliana
  misc_feature (1)..(2743): Ceres Seq. ID no. 13610731
  misc_feature: MA Experiment ID: 108434 Result: Down-regulated in Transcription
  misc_feature: MA Experiment 108434 PARAMETER Experiment Name: At_Root_Tips_cDNA_P Parameter: Tissue Value: Root Tips
  misc_feature: MA Experiment ID: 108501 Result: Up-regulated in Transcription
  misc_feature: MA Experiment 108501 PARAMETER Experiment Name: At_ap2_floral_buds_cDNA_P Parameter: Plant Line Value: ap2 (Ler.)
  misc_feature: MA Experiment 108501 PARAMETER Experiment Name: At_ap2_floral_buds_cDNA_P Parameter: Tissue Value: Closed Flower
  misc_feature: MA Experiment ID: 108579 Result: Up-regulated in Transcription
  misc_feature: MA Experiment 108579 PARAMETER Experiment Name: At_4deg_Cold_cDNA_P Parameter: Temperature (deg C) Value: 4 vs. 22
  misc_feature: MA Experiment 108579 PARAMETER Experiment Name: At_4deg_Cold_cDNA_P Parameter: Timepoint (hr) Value: 6
  misc_feature: MA Experiment 108579 PARAMETER Experiment Name: At_4deg_Cold_cDNA_P Parameter: Tissue Value: Aerial
  misc_feature: MA Experiment ID: 108585 Result: Up-regulated in Transcription
  misc_feature: MA Experiment 108585 PARAMETER Experiment Name: At_5mM_NaNP_cDNA_P Parameter: Timepoint (hr) Value: 6
  misc_feature: MA Experiment 108585 PARAMETER Experiment Name: At_5mM_NaNP_cDNA_P Parameter: Tissue Value: Aerial
  misc_feature: MA Experiment 108585 PARAMETER Experiment Name: At_5mM_NaNP_cDNA_P Parameter: Treatment Value: null
  misc_feature: MA Experiment ID: 108668 Result: Up-regulated in Transcription
  misc_feature: MA Experiment 108668 PARAMETER Experiment Name: At_2mM_SA_cDNA_P Parameter: Plant Line Value: WS
  misc_feature: MA Experiment 108668 PARAMETER Experiment Name: At_2mM_SA_cDNA_P Parameter: Timepoint (hr) Value: 6
  misc_feature: MA Experiment 108668 PARAMETER Experiment Name: At_2mM_SA_cDNA_P Parameter: Treatment Value: 2mM SA vs. No Treatment
  misc_feature: MA Experiment ID: 20000030 Result: Down-regulated in Transcription
  misc_feature: MA Experiment 20000030 PARAMETER Experiment Name: At_CS6630_Roots_cDNA_P Parameter: Plant Line Value: CS6630 vs. WS
  misc_feature: MA Experiment 20000030 PARAMETER Experiment Name: At_CS6630_Roots_cDNA_P Parameter: Tissue Value: Roots
  misc_feature: MA Experiment ID: 20000069 Result: Up-regulated in Transcription
  misc_feature: MA Experiment 20000069 PARAMETER Experiment Name: At_100uM_ABA_Mutants_cDNA_P Parameter: Plant Line Value: CS23
  misc_feature: MA Experiment 20000069 PARAMETER Experiment Name: At_100uM_ABA_Mutants_cDNA_P Parameter: Timepoint (hr) Value: 6
  misc_feature: MA Experiment 20000069 PARAMETER Experiment Name: At_100uM_ABA_Mutants_cDNA_P Parameter: Tissue Value: Aerial
  misc_feature: MA Experiment 20000069 PARAMETER Experiment Name: At_100uM_ABA_Mutants_cDNA_P Parameter: Treatment Value: 100uM ABA vs. No Treatment
  misc_feature: MA Experiment ID: 20000113 Result: Down-regulated in Transcription
  misc_feature: MA Experiment 20000113 PARAMETER Experiment Name: At_42deg_Heat_cDNA_P Parameter: Temperature (deg C) Value: 42 vs. 22
  misc_feature: MA Experiment 20000113 PARAMETER Experiment Name: At_42deg_Heat_cDNA_P Parameter: Timepoint (hr) Value: 8
  misc_feature: MA Experiment 20000113 PARAMETER Experiment Name: At_42deg_Heat_cDNA_P Parameter: Tissue Value: Aerial
  misc_feature: MA Experiment ID: 20000182 Result: Up-regulated in Transcription
  misc_feature: MA Experiment 20000182 PARAMETER Experiment Name: At_2mM_SA_P Parameter: Age (day) Value: 14
  misc_feature: MA Experiment 20000182 PARAMETER Experiment Name: At_2mM_SA_P Parameter: Organism Value: A. thaliana
  misc_feature: MA Experiment 20000182 PARAMETER Experiment Name: At_2mM_SA_P Parameter: Plant Line Value: WS
  misc_feature: MA Experiment 20000182 PARAMETER Experiment Name: At_2mM_SA_P Parameter: Timepoint (hr) Value: 6
  misc_feature: MA Experiment 20000182 PARAMETER Experiment Name: At_2mM_SA_P Parameter: Tissue Value: Aerial
  misc_feature: MA Experiment 20000182 PARAMETER Experiment Name: At_2mM_SA_P Parameter: Treatment Value: 2mM SA vs. No Treatment
  misc_feature: MA Experiment ID: 20000184 Result: Down-regulated in Transcription
  misc_feature: MA Experiment 20000184 PARAMETER Experiment Name: At_Shoots__P Parameter: Age (day) Value: 7
  misc_feature: MA Experiment 20000184 PARAMETER Experiment Name: At_Shoots__P Parameter: Tissue Value: Shoots vs. Whole Plant
  misc_feature: MA Experiment ID: 20000185 Result: Down-regulated in Transcription
  misc_feature: MA Experiment 20000185 PARAMETER Experiment Name: At_Roots__P Parameter: Age (day) Value: 7 vs. 21
  misc_feature: MA Experiment 20000185 PARAMETER Experiment Name: At_Roots__P Parameter: Organism Value: A. thaliana
  misc_feature: MA Experiment 20000185 PARAMETER Experiment Name: At_Roots__P Parameter: Tissue Value: Roots vs. Whole Plant
  misc_feature: MA Experiment ID: 20000265 Result: Down-regulated in Transcription
  misc_feature: MA Experiment 20000265 PARAMETER Experiment Name: At_Open_Flower_P Parameter: Age (day) Value: 21
  misc_feature: MA Experiment 20000265 PARAMETER Experiment Name: At_Open_Flower_P Parameter: Plant Line Value: WS
  misc_feature: MA Experiment 20000265 PARAMETER Experiment Name: At_Open_Flower_P Parameter: Tissue Value: Closed Flower vs. Whole Plant
  misc_feature: MA Experiment ID: 20000438 Result: Down-regulated in Transcription
  misc_feature: MA Experiment 20000438 PARAMETER Experiment Name: At_Shoots__P Parameter: Age (day) Value: 14
  misc_feature: MA Experiment 20000438 PARAMETER Experiment Name: At_Shoots__P Parameter: Tissue Value: Shoots vs. Whole Plant
  misc_feature: MA Experiment ID: 20000439 Result: Down-regulated in Transcription
  misc_feature: MA Experiment 20000439 PARAMETER Experiment Name: At_Roots__P Parameter: Age (day) Value: 14 vs. 21
  misc_feature: MA Experiment 20000439 PARAMETER Experiment Name: At_Roots__P Parameter: Organism Value: A. thaliana
  misc_feature: MA Experiment 20000439 PARAMETER Experiment Name: At_Roots__P Parameter: Tissue Value: Roots vs. Whole Plant
  misc_feature: MA Experiment ID: 20001557 Result: Up-regulated in Transcription
  misc_feature: MA Experiment 20001557 PARAMETER Experiment Name: At_Drought_Soil_Dry_P Parameter: Age (day) Value: 27
  misc_feature: MA Experiment 20001557 PARAMETER Experiment Name: At_Drought_Soil_Dry_P Parameter: Organism Value: A. thaliana
  misc_feature: MA Experiment 20001557 PARAMETER Experiment Name: At_Drought_Soil_Dry_P Parameter: Plant Line Value: WS
  misc_feature: MA Experiment 20001557 PARAMETER Experiment Name: At_Drought_Soil_Dry_P Parameter: Post Timepoint (hr) Value: 3
  misc_feature: MA Experiment 20001557 PARAMETER Experiment Name: At_Drought_Soil_Dry_P Parameter: Post-Treatment Value: Re-Water vs. No Drought
  misc_feature: MA Experiment 20001557 PARAMETER Experiment Name: At_Drought_Soil_Dry_P Parameter: Timepoint (day) Value: 13
  misc_feature: MA Experiment 20001557 PARAMETER Experiment Name: At_Drought_Soil_Dry_P Parameter: Treatment Value: Drought vs. No Drought
  misc_feature: MA Experiment ID: 20001757 Result: Down-regulated in Transcription
  misc_feature: MA Experiment 20001757 PARAMETER Experiment Name: At_50mM_NH4NO3_L-to-H_P Parameter: Timepoint (hr) Value: 6
  misc_feature: MA Experiment 20001757 PARAMETER Experiment Name: At_50mM_NH4NO3_L-to-H_P Parameter: Tissue Value: Leaf
  misc_feature: MA Experiment 20001757 PARAMETER Experiment Name: At_50mM_NH4NO3_L-to-H_P Parameter: Treatment Value: 50mM NH4NO3 vs 100mM Mannitol
atttaattatctcaggatacgttaacataaaagtttttttttctcttggtctcaatgctcactctatccccatgaagttttgctcatactcaagttatcttgcagagaaatagaaaaaagatgggtatggttttatttgcttgcttgcttttactaatcatattcccaacttgtggctatgcagctataaacacatcaagtcctttgtcaataagacaaactctgagttctcctggtggattttatgagttaggcttcttcagtcctaataatactcagaatcagtatgtcgggatctggttcaagaagattgttcctcgtgtagttgtgtgggtggctaacagagatacgccagttactagctctgcagcaaatctcactatcagcagcaatgggagcctgatcttgcttgatgggaaacaagatgttatttggtcaacaggaaaagctttcacatccaacaaatgtcatgcggagctcttagataccggaaattttgttgtaattgatgatgtttcagggaataaattatggcaaagcttcgagcatcttggtaatactatgctgcctcagtcatcattgatgtatgatacttctaatggcaagaagcgtgtgttgactacatggaaaagtaacagcgatccttcgcctggggagttctcactggagattacaccacaaatccccacacaaggccttataagaagaggctcagtaccttactggagatgtggtccttgggcaaaaacaagattctctgggatatctggaattgatgcatcatatgtaagtccattcagcgttgtccaggatacagcagccggcacaggatctttctcttattccacattaagaaactataatctctcatatgttacgctaacaccagaagggaaaatgaagatcctctgggatgatggaaataattggaagcttcacttgtctctcccagagaacccatgtgatctatatggtagatgcgggccttatggtttgtgtgtgagatctgatcccccaaagtgtgaatgcttgaaagggtttgtaccaaagtctgatgaggagtggggaaaaggaaactggacaagtgggtgtgtgagacgtacaaaattatcttgccaagcaaaatcttctatgaaaacacaaggcaaagacacagacatcttctatcgtatgacagatgtaaagactccggatctgcaccaatttgcaagctttctcaatgccgaacagtgctatcaaggttgtctaggcaactgttcttgcacagccttcgcctatattagtggaattggatgtttggtatggaatggggagctagcagacaccgttcaatttttgtctagcggagagtttctcttcattcgtcttgcaagttcagaattggctggaagcagtcgaaggaagattatcgtaggcactactgtcagcctttccattttcttgatcttggtatttgctgcaattatgttgtggagatacagagcgaaacaaaatgatgcatggaagaatggttttgaacgacaagatgtctccggcgtcaatttctttgagatgcatacaatacgaactgccaccaataacttcagtccttcaaataaacttggtcaaggtggatttggtccagtttacaagggaaagttggtagatgggaaggaaataggtgttaaacgccttgctagtagttccggtcagggtacagaggagttcatgaatgaaataacactgatctcaaaattgcaacacagaaacttggttcggcttttgggatactgcatcgacggagaagagaagctactgatctatgagttcatggtgaacaaaagtctcgatatttttatatttgatccatgtctaaagtttgagcttgattggccaaagagatttaatatcattcaaggtattgcgcgtggacttctctatctccaccgtgactcacgcctcagagttattcaccgagacctgaaggtcagcaatattcttctggacgacagaatgaatccaaaaatatcagattttggattggctcggatgttccagggaacccaatatcaagacaacactcgcagagttgtaggaactctaggatatatgtctcccgagtatgcatgggcaggattgttctctgagaagtctgatatctatagcttcggagttctgatgttagaaatcatcagcggaaagagaatttcacggttcatctatggtgatgaaagcaaaggccttcttgcttatacatgggattcttggtgcgagaccgggggatcaaatctacttgacagagatcttactgatacatgccaagcattcgaagttgcgagatgtgttcagattggtctgctctgtgttcaacacgaagccgtcgacagacccaacactcttcaagtactatccatgcttacttcagcaacagatcttccagtaccaaaacagccaatatttgcagtgcatactctaaacgatatgccaatgttacaggctaattctcaagatttcttatctgtaaatgagatgacagaatctatgatccaaggaaggtaagcctaaggatcttgttatctcactacagaagtagtagtatatacttgtaaattcatgaacatttaaagcttaagattttgatatctcactctattttcttaagcatgtgatctcataaagccccaatattgcgttgacacgtcatcattttcggtataatattgttattaagcgtcgcaaagataaaaatatgctttttgatgac

SEQ ID NO: 102578 - protein, 805 aa, Arabidopsis thaliana; identical to SEQ ID NO: 29256
  peptide (1)..(805): Ceres Seq. ID no. 13610732
  misc_feature (66)..(176): Pfam Name: D-mannose binding lectin Pfam Description: D-mannose binding lectin
  misc_feature (3)..(800): Homolog of NCBI NO: 15219912 NR Description: S-locus protein kinase family [Arabidopsis
  misc_feature (1)..(805): Homolog of NCBI NO: 30682152 NR Description: S-locus protein kinase, putative [Arabidopsis
  misc_feature (1)..(805): Homolog of NCBI NO: 24417324 NR Description: unknown [Arabidopsis thaliana]
  misc_feature (1)..(805): Homolog of NCBI NO: 15810423 NR Description: putative serine/threonine kinase [Arabidopsis
  misc_feature (1)..(805): Homolog of NCBI NO: 18391259 NR Description: S-locus protein kinase, putative [Arabidopsis
  misc_feature (1)..(805): Homolog of NCBI NO: 30682149 NR Description: S-locus protein kinase, putative [Arabidopsis
  misc_feature (1)..(805): Homolog of NCBI NO: 15219914 NR Description: receptor protein kinase (IRK1) -related
  misc_feature (241)..(677): Homolog of NCBI NO: 30696575 NR Description: S-locus protein kinase, putative [Arabidopsis
  misc_feature (680)..(805): Homolog of NCBI NO: 30696575 NR Description: S-locus protein kinase, putative [Arabidopsis
  misc_feature (148)..(211): Homolog of NCBI NO: 30696575 NR Description: S-locus protein kinase, putative [Arabidopsis

SEQ ID NO: 102579 - protein, 803 aa, Arabidopsis thaliana; identical to SEQ ID NO: 29257
  peptide (1)..(803): Ceres Seq. ID no. 13610733
  misc_feature (64)..(174): Pfam Name: D-mannose binding lectin Pfam Description: D-mannose binding lectin
  misc_feature (1)..(798): Homolog of NCBI NO: 15219912 NR Description: S-locus protein kinase family [Arabidopsis
  misc_feature (1)..(803): Homolog of NCBI NO: 30682152 NR Description: S-locus protein kinase, putative [Arabidopsis
  misc_feature (1)..(803): Homolog of NCBI NO: 24417324 NR Description: unknown [Arabidopsis thaliana]
  misc_feature (1)..(803): Homolog of NCBI NO: 15810423 NR Description: putative serine/threonine kinase [Arabidopsis
  misc_feature (1)..(803): Homolog of NCBI NO: 18391259 NR Description: S-locus protein kinase, putative [Arabidopsis
  misc_feature (1)..(803): Homolog of NCBI NO: 30682149 NR Description: S-locus protein kinase, putative [Arabidopsis
  misc_feature (1)..(803): Homolog of NCBI NO: 15219914 NR Description: receptor protein kinase (IRK1) -related
  misc_feature (239)..(675): Homolog of NCBI NO: 30696575 NR Description: S-locus protein kinase, putative [Arabidopsis
  misc_feature (678)..(803): Homolog of NCBI NO: 30696575 NR Description: S-locus protein kinase, putative [Arabidopsis
  misc_feature (146)..(209): Homolog of NCBI NO: 30696575 NR Description: S-locus protein kinase, putative [Arabidopsis

SEQ ID NO: 102580 - protein, 658 aa, Arabidopsis thaliana; identical to SEQ ID NO: 29258
  peptide (1)..(658): Ceres Seq. ID no. 13610734
  misc_feature (1)..(653): Homolog of NCBI NO: 15219912 NR Description: S-locus protein kinase family [Arabidopsis
  misc_feature (1)..(658): Homolog of NCBI NO: 30682152 NR Description: S-locus protein kinase, putative [Arabidopsis
  misc_feature (1)..(658): Homolog of NCBI NO: 24417324 NR Description: unknown [Arabidopsis thaliana]
  misc_feature (1)..(658): Homolog of NCBI NO: 15810423 NR Description: putative serine/threonine kinase [Arabidopsis
  misc_feature (1)..(658): Homolog of NCBI NO: 18391259 NR Description: S-locus protein kinase, putative [Arabidopsis
  misc_feature (1)..(658): Homolog of NCBI NO: 30682149 NR Description: S-locus protein kinase, putative [Arabidopsis
  misc_feature (1)..(658): Homolog of NCBI NO: 15219914 NR Description: receptor protein kinase (IRK1) -related
  misc_feature (94)..(530): Homolog of NCBI NO: 30696575 NR Description: S-locus protein kinase, putative [Arabidopsis
  misc_feature (533)..(658): Homolog of NCBI NO: 30696575 NR Description: S-locus protein kinase, putative [Arabidopsis
  misc_feature (1)..(64): Homolog of NCBI NO: 30696575 NR Description: S-locus protein kinase, putative [Arabidopsis

SEQ ID NO: 102581 - DNA, 1122 bp, Arabidopsis thaliana
  misc_feature (1)..(1122): Ceres Seq. ID no. 13610735
  misc_feature: MA Experiment ID: 108434 Result: Down-regulated in Transcription
  misc_feature: MA Experiment 108434 PARAMETER Experiment Name: At_Root_Tips_cDNA_P Parameter: Tissue Value: Root Tips
  misc_feature: MA Experiment ID: 108435 Result: Down-regulated in Transcription
  misc_feature: MA Experiment 108435 PARAMETER Experiment Name: At_stm_Mutants_cDNA_P Parameter: Plant Line Value: wt Landsburg vs stm
  misc_feature: MA Experiment 108435 PARAMETER Experiment Name: At_stm_Mutants_cDNA_P Parameter: Tissue Value: Shoot Apical Meristem Region
  misc_feature: MA Experiment ID: 108461 Result: Up-regulated in Transcription
  misc_feature: MA Experiment 108461 PARAMETER Experiment Name: At_Germinating_Seeds_cDNA_P Parameter: Age (day) Value: 1 vs. 0
  misc_feature: MA Experiment 108461 PARAMETER Experiment Name: At_Germinating_Seeds_cDNA_P Parameter: Tissue Value: Germinating Seeds
  misc_feature: MA Experiment ID: 108462 Result: Up-regulated in Transcription
  misc_feature: MA Experiment 108462 PARAMETER Experiment Name: At_Germinating_Seeds_cDNA_P Parameter: Age (day) Value: 2 vs. 0
  misc_feature: MA Experiment 108462 PARAMETER Experiment Name: At_Germinating_Seeds_cDNA_P Parameter: Tissue Value: Germinating Seeds
  misc_feature: MA Experiment ID: 108463 Result: Up-regulated in Transcription
  misc_feature: MA Experiment 108463 PARAMETER Experiment Name: At_Germinating_Seeds_cDNA_P Parameter: Age (day) Value: 3 vs. 0
  misc_feature: MA Experiment 108463 PARAMETER Experiment Name: At_Germinating_Seeds_cDNA_P Parameter: Tissue Value: Germinating Seeds
  misc_feature: MA Experiment ID: 108464 Result: Up-regulated in Transcription
  misc_feature: MA Experiment 108464 PARAMETER Experiment Name: At_Germinating_Seeds_cDNA_P Parameter: Age (day) Value: 4 vs. 0
  misc_feature: MA Experiment 108464 PARAMETER Experiment Name: At_Germinating_Seeds_cDNA_P Parameter: Tissue Value: Germinating Seeds
  misc_feature: MA Experiment ID: 108488 Result: Up-regulated in Transcription
  misc_feature: MA Experiment ID: 108489 Result: Down-regulated in Transcription
  misc_feature: MA Experiment ID: 108594 Result: Down-regulated in Transcription
  misc_feature: MA Experiment 108594 PARAMETER Experiment Name: At_Ler-rhl_Root_cDNA_P Parameter: Plant Line Value: null
  misc_feature: MA Experiment ID: 20000180 Result: Up-regulated in Transcription
  misc_feature: MA Experiment 20000180 PARAMETER Experiment Name: At_Germinating_Seeds_P Parameter: Age (hr) Value: 24 vs. 0
  misc_feature: MA Experiment 20000180 PARAMETER Experiment Name: At_Germinating_Seeds_P Parameter: Tissue Value: Germinating Seeds
  misc_feature: MA Experiment ID: 20000185 Result: Down-regulated in Transcription
  misc_feature: MA Experiment 20000185 PARAMETER Experiment Name: At_Roots__P Parameter: Age (day) Value: 7 vs. 21
  misc_feature: MA Experiment 20000185 PARAMETER Experiment Name: At_Roots__P Parameter: Organism Value: A. thaliana
  misc_feature: MA Experiment 20000185 PARAMETER Experiment Name: At_Roots__P Parameter: Tissue Value: Roots vs. Whole Plant
  misc_feature: MA Experiment ID: 20000264 Result: Down-regulated in Transcription
  misc_feature: MA Experiment 20000264 PARAMETER Experiment Name: At_Open_Flower_P Parameter: Age (day) Value: 21
  misc_feature: MA Experiment 20000264 PARAMETER Experiment Name: At_Open_Flower_P Parameter: Plant Line Value: WS
  misc_feature: MA Experiment 20000264 PARAMETER Experiment Name: At_Open_Flower_P Parameter: Tissue Value: Open Flower vs. Whole Plant
  misc_feature: MA Experiment ID: 20000265 Result: Down-regulated in Transcription
  misc_feature: MA Experiment 20000265 PARAMETER Experiment Name: At_Open_Flower_P Parameter: Age (day) Value: 21
  misc_feature: MA Experiment 20000265 PARAMETER Experiment Name: At_Open_Flower_P Parameter: Plant Line Value: WS
  misc_feature: MA Experiment 20000265 PARAMETER Experiment Name: At_Open_Flower_P Parameter: Tissue Value: Closed Flower vs. Whole Plant
  misc_feature: MA Experiment ID: 20000269 Result: Down-regulated in Transcription
  misc_feature: MA Experiment 20000269 PARAMETER Experiment Name: At_1mM_KNO3_L-vs-H_Roots_P Parameter: Age (day) Value: 7,10,12
  misc_feature: MA Experiment 20000269 PARAMETER Experiment Name: At_1mM_KNO3_L-vs-H_Roots_P Parameter: Organism Value: A. thaliana
  misc_feature: MA Experiment 20000269 PARAMETER Experiment Name: At_1mM_KNO3_L-vs-H_Roots_P Parameter: Plant Line Value: WS
  misc_feature: MA Experiment 20000269 PARAMETER Experiment Name: At_1mM_KNO3_L-vs-H_Roots_P Parameter: Timepoint (day) Value: 7,10,12
  misc_feature: MA Experiment 20000269 PARAMETER Experiment Name: At_1mM_KNO3_L-vs-H_Roots_P Parameter: Tissue Value: Roots
  misc_feature: MA Experiment 20000269 PARAMETER Experiment Name: At_1mM_KNO3_L-vs-H_Roots_P Parameter: Treatment Value: 1mM KNO3 vs. 50mM KNO3
  misc_feature: MA Experiment ID: 20000286 Result: Down-regulated in Transcription
  misc_feature: MA Experiment 20000286 PARAMETER Experiment Name: At_Open_Flower_P Parameter: Age (day) Value: 21
  misc_feature: MA Experiment 20000286 PARAMETER Experiment Name: At_Open_Flower_P Parameter: Plant Line Value: WS
  misc_feature: MA Experiment 20000286 PARAMETER Experiment Name: At_Open_Flower_P Parameter: Tissue Value: Half Open vs. Whole Plant
  misc_feature: MA Experiment ID: 20000439 Result: Down-regulated in Transcription
  misc_feature: MA Experiment 20000439 PARAMETER Experiment Name: At_Roots__P Parameter: Age (day) Value: 14 vs. 21
  misc_feature: MA Experiment 20000439 PARAMETER Experiment Name: At_Roots__P Parameter: Organism Value: A. thaliana
  misc_feature: MA Experiment 20000439 PARAMETER Experiment Name: At_Roots__P Parameter: Tissue Value: Roots vs. Whole Plant
  misc_feature: MA Experiment ID: 20000441 Result: Up-regulated in Transcription
  misc_feature: MA Experiment 20000441 PARAMETER Experiment Name: At_1uM_BR-BRZ__P Parameter: Tissue Value: Shoot Apices
  misc_feature: MA Experiment 20000441 PARAMETER Experiment Name: At_1uM_BR-BRZ__P Parameter: Treatment Value: 1uM BR vs. No Treatment
  misc_feature: MA Experiment ID: 20000794 Result: Down-regulated in Transcription
  misc_feature: MA Experiment 20000794 PARAMETER Experiment Name: At_Petals_P Parameter: Age (day) Value: 23-25 days
  misc_feature: MA Experiment 20000794 PARAMETER Experiment Name: At_Petals_P Parameter: Plant Line Value: WS
  misc_feature: MA Experiment 20000794 PARAMETER Experiment Name: At_Petals_P Parameter: Tissue Value: Petals vs. Whole plant
  misc_feature: MA Experiment ID: 20001757 Result: Up-regulated in Transcription
  misc_feature: MA Experiment 20001757 PARAMETER Experiment Name: At_50mM_NH4NO3_L-to-H_P Parameter: Timepoint (hr) Value: 6
  misc_feature: MA Experiment 20001757 PARAMETER Experiment Name: At_50mM_NH4NO3_L-to-H_P Parameter: Tissue Value: Leaf
  misc_feature: MA Experiment 20001757 PARAMETER Experiment Name: At_50mM_NH4NO3_L-to-H_P Parameter: Treatment Value: 50mM NH4NO3 vs 100mM Mannitol
aaaaccagttgggctatttgaaagccacaagtacttggaacctttgtttcttctaccctaacatagcccttgcaaaccataaccaaaccatcatcatcatcatctcttggtgacagaagaaaagagttgaggaacagagaaaatggcagcacaagcacttgtgtcttcttcacttacctcctctgttcagacagctagacagatatttggctcaaaaccagttgcgtctgcctcacagaagaagagttcctttgttgttaaagctgctgcaactccacctgtcaagcaaggagccaacagaccattgtggtttgcttcatcgcagagtctctcttacttggatggcagcttacctggtgactatggattcgaccctcttggtctttcagacccagaaggtactggaggattcattgagccaagatggctagcatacggagagatcatcaacggacggttcgccatgttgggtgcagctggagctattgctcctgagattttaggaaaggctggtctgattccagcagagactgctcttccttggttccaaaccggtgtgattccaccagcagggacatacacttactgggcagacaattacacactctttgttctcgagatggctctgatgggattcgctgagcaccggaggttacaggactggtacaacccaggatctatgggaaaacagtacttcttggggttagagaagggtttggccggttcaggtaacccggcttaccccggtggacctttcttcaaccctcttgggtttgggaaagatgagaagtcactgaaggagttgaaactcaaggaggtcaagaacggtagactggctatgctcgccatcctcggttactttatccaaggactagtgaccggtgtgggaccttatcagaacctgcttgatcacttggctgatcccgtcaacaacaacgtcttgaccagcctcaagttccactgaggtgatcatcatctcatgtgtttttatgtctcttgtatcgtacaatatttccatctttcgctaccattggcttcttcgtattgtaacaccctgtgtaaacatattcgtgttttgtaagaaatgacaatgtcaatggccaaacgaaaaaacttttagga

SEQ ID NO: 102582 - protein, 273 aa, Arabidopsis thaliana; identical to SEQ ID NO: 21964
  peptide (1)..(273): Ceres Seq. ID no. 13610736
  misc_feature (61)..(244): Pfam Name: Chlorophyll A-B binding protein Pfam Description: Chlorophyll A-B binding protein
  misc_feature (1)..(273): Homolog of NCBI NO: 15219941 NR Description: light-harvesting chlorophyll a/b binding protein
  misc_feature (1)..(273): Homolog of NCBI NO: 430947 NR Description: PSI type III chlorophyll a/b-binding protein
  misc_feature (1)..(273): Homolog of NCBI NO: 21554335 NR Description: PSI type III chlorophyll a/b-binding protein,
  misc_feature (1)..(273): Homolog of NCBI NO: 82080 NR Description: chlorophyll a/b-binding protein type III
  misc_feature (1)..(273): Homolog of NCBI NO: 115813 NR Description: Chlorophyll A-B binding protein 8, chloroplast
  misc_feature (1)..(273): Homolog of NCBI NO: 7443229 NR Description: probable chlorophyll a/b-binding protein type III
  misc_feature (1)..(273): Homolog of NCBI NO: 99487 NR Description: chlorophyll a/b-binding protein (clone pINEab 43)
  misc_feature (72)..(264): Homolog of NCBI NO: 7271947 NR Description: chlorophyll a/b-binding protein type III [Alonsoa
  misc_feature (11)..(269): Homolog of NCBI NO: 40714511 NR Description: light-harvesting chlorophyll-a/b protein of
  misc_feature (109)..(273): Homolog of NCBI NO: 37780998 NR Description: chlorophyll a/b binding protein [Vitis vinifera]

SEQ ID NO: 102583 - protein, 166 aa, Arabidopsis thaliana; identical to SEQ ID NO: 21965
  peptide (1)..(166): Ceres Seq. ID no. 13610737
  misc_feature (1)..(137): Pfam Name: Chlorophyll A-B binding protein Pfam Description: Chlorophyll A-B binding protein
  misc_feature (1)..(166): Homolog of NCBI NO: 15219941 NR Description: light-harvesting chlorophyll a/b binding protein
  misc_feature (1)..(166): Homolog of NCBI NO: 430947 NR Description: PSI type III chlorophyll a/b-binding protein
  misc_feature (1)..(166): Homolog of NCBI NO: 21554335 NR Description: PSI type III chlorophyll a/b-binding protein,
  misc_feature (1)..(166): Homolog of NCBI NO: 82080 NR Description: chlorophyll a/b-binding protein type III
  misc_feature (1)..(166): Homolog of NCBI NO: 115813 NR Description: Chlorophyll A-B binding protein 8, chloroplast
  misc_feature (1)..(166): Homolog of NCBI NO: 7443229 NR Description: probable chlorophyll a/b-binding protein type III
  misc_feature (1)..(166): Homolog of NCBI NO: 99487 NR Description: chlorophyll a/b-binding protein (clone pINEab 43)
  misc_feature (1)..(157): Homolog of NCBI NO: 7271947 NR Description: chlorophyll a/b-binding protein type III [Alonsoa
  misc_feature (1)..(162): Homolog of NCBI NO: 40714511 NR Description: light-harvesting chlorophyll-a/b protein of
  misc_feature (2)..(166): Homolog of NCBI NO: 37780998 NR Description: chlorophyll a/b binding protein [Vitis vinifera]

SEQ ID NO: 102584 - DNA, 1231 bp, Arabidopsis thaliana
  misc_feature (1)..(1231): Ceres Seq. ID no. 13610746
  misc_feature: MA Experiment ID: 108573 Result: Up-regulated in Transcription
  misc_feature: MA Experiment 108573 PARAMETER Experiment Name: At_Drought_cDNA_P Parameter: Timepoint (hr) Value: 6
  misc_feature: MA Experiment 108573 PARAMETER Experiment Name: At_Drought_cDNA_P Parameter: Tissue Value: Aerial
  misc_feature: MA Experiment 108573 PARAMETER Experiment Name: At_Drought_cDNA_P Parameter: Treatment Value: Drought vs. No Drought
  misc_feature: MA Experiment ID: 20000111 Result: Up-regulated in Transcription
  misc_feature: MA Experiment 20000111 PARAMETER Experiment Name: At_42deg_Heat_cDNA_P Parameter: Temperature (deg C) Value: 42 vs. 22
  misc_feature: MA Experiment 20000111 PARAMETER Experiment Name: At_42deg_Heat_cDNA_P Parameter: Timepoint (hr) Value: 6
  misc_feature: MA Experiment 20000111 PARAMETER Experiment Name: At_42deg_Heat_cDNA_P Parameter: Tissue Value: Aerial
  misc_feature: MA Experiment ID: 20000112 Result: Up-regulated in Transcription
  misc_feature: MA Experiment 20000112 PARAMETER Experiment Name: At_42deg_Heat_cDNA_P Parameter: Temperature (deg C) Value: 42 vs. 22
  misc_feature: MA Experiment 20000112 PARAMETER Experiment Name: At_42deg_Heat_cDNA_P Parameter: Timepoint (hr) Value: 2
  misc_feature: MA Experiment 20000112 PARAMETER Experiment Name: At_42deg_Heat_cDNA_P Parameter: Tissue Value: Aerial
  misc_feature: MA Experiment ID: 20000113 Result: Up-regulated in Transcription
  misc_feature: MA Experiment 20000113 PARAMETER Experiment Name: At_42deg_Heat_cDNA_P Parameter: Temperature (deg C) Value: 42 vs. 22
  misc_feature: MA Experiment 20000113 PARAMETER Experiment Name: At_42deg_Heat_cDNA_P Parameter: Timepoint (hr) Value: 8
  misc_feature: MA Experiment 20000113 PARAMETER Experiment Name: At_42deg_Heat_cDNA_P Parameter: Tissue Value: Aerial
  misc_feature: MA Experiment ID: 20000171 Result: Up-regulated in Transcription
  misc_feature: MA Experiment 20000171 PARAMETER Experiment Name: At_42deg_Heat_P Parameter: Age (day) Value: 14
  misc_feature: MA Experiment 20000171 PARAMETER Experiment Name: At_42deg_Heat_P Parameter: Organism Value: A. thaliana
  misc_feature: MA Experiment 20000171 PARAMETER Experiment Name: At_42deg_Heat_P Parameter: Plant Line Value: WS
  misc_feature: MA Experiment 20000171 PARAMETER Experiment Name: At_42deg_Heat_P Parameter: Temperature (deg C) Value: 42 vs. 22
  misc_feature: MA Experiment 20000171 PARAMETER Experiment Name: At_42deg_Heat_P Parameter: Timepoint (hr) Value: 1
  misc_feature: MA Experiment 20000171 PARAMETER Experiment Name: At_42deg_Heat_P Parameter: Tissue Value: Aerial
  misc_feature: MA Experiment ID: 20000173 Result: Up-regulated in Transcription
  misc_feature: MA Experiment 20000173 PARAMETER Experiment Name: At_42deg_Heat_P Parameter: Age (day) Value: 14
  misc_feature: MA Experiment 20000173 PARAMETER Experiment Name: At_42deg_Heat_P Parameter: Organism Value: A. thaliana
  misc_feature: MA Experiment 20000173 PARAMETER Experiment Name: At_42deg_Heat_P Parameter: Plant Line Value: WS
  misc_feature: MA Experiment 20000173 PARAMETER Experiment Name: At_42deg_Heat_P Parameter: Temperature (deg C) Value: 42 vs. 22
  misc_feature: MA Experiment 20000173 PARAMETER Experiment Name: At_42deg_Heat_P Parameter: Timepoint (hr) Value: 6
  misc_feature: MA Experiment 20000173 PARAMETER Experiment Name: At_42deg_Heat_P Parameter: Tissue Value: Aerial
  misc_feature: MA Experiment ID: 20001905 Result: Up-regulated in Transcription
  misc_feature: MA Experiment 20001905 PARAMETER Experiment Name: At_Drought_Reproduction_P Parameter: Age (day) Value: 40
  misc_feature: MA Experiment 20001905 PARAMETER Experiment Name: At_Drought_Reproduction_P Parameter: Organism Value: A. thaliana
  misc_feature: MA Experiment 20001905 PARAMETER Experiment Name: At_Drought_Reproduction_P Parameter: Plant Line Value: WS
  misc_feature: MA Experiment 20001905 PARAMETER Experiment Name: At_Drought_Reproduction_P Parameter: Timepoint (day) Value: 10
  misc_feature: MA Experiment 20001905 PARAMETER Experiment Name: At_Drought_Reproduction_P Parameter: Tissue Value: Rosettes
  misc_feature: MA Experiment 20001905 PARAMETER Experiment Name: At_Drought_Reproduction_P Parameter: Treatment Value: Drought vs. No Drought
aattccccaatttctccaatctgagaaaatagggtttccgatttggatccttaattcagacacctgactcgtcttctcatcctacccccaattcaatattcgtcgccaatatgccgcaaagacactcgaagaacaacaatgatcttgcgtatttcacttacgacgagaagaagaagttaggttatggaactcagagagagagattggggagagactcgatcaaaccctttgatgcttgttctctctgcttgaagcctttcattgatccgatgtgttgccataagggtcatgtcttttgcagagagtgtatacttgaatgtttccttgctcagaagaaagatatccaaaggaggcttgctgcacattcgtctcaaaagaagcaagataaggatgaagaagaagagaggctaatgttacaaaaggcgagagagctcgacgaatttgatcagcaaaaccatagtgcaatgcctcgaaacagtgacaagaatcacaacgaagataagaatggttttcatggggcaaacagtgtgaagacgacttcctttgaagaagaagcgcttaggacaatgaaagccttctggctcccatcagctacaccagcagcttcggtcagagtagatgctccagaaactcacacagtctgtccagagggcaaagagaagctcaagcttaagaacctctttgcaattcgtttcacagaagacaacagcgaagaggaagagaccaagacaaaatcagcatcttcaagctcttatgataaatcctacatctgcccgagctgcaaagtcactctcaccaacacaatgtccctcgtggcacttagctcatgcggacatgttttctgcaagaagtgtgctgagaagtttatgcccgtcgacaaagtctgtcttgtgtgtgacaaaccttgcaaggataggaacttggttgggttaaagaaaggaggcacgggtttcgctgagcacgacgatcatcttgaggctaaggagtacaagcatttgggtagtggatctggtttggggcttgtgaggccggttaagacatgatgtaaccacatcaaatgttctgttccagttacagaaaatatccttgattttgtaatacttatggcttgtatcctttgctacaactaagagacgctgctttctccattttggctcttggtttgtccttttgatcggatcctatttgtgtttcttccctacggagatcaaatggaaatttaacatttaag

SEQ ID NO: 102585 - protein, 310 aa, Arabidopsis thaliana
  peptide (1)..(310): Ceres Seq. ID no. 13610747
  misc_feature (1)..(310): Homolog of NCBI NO: 18407260 NR Description: expressed protein [Arabidopsis thaliana]
  misc_feature (1)..(310): Homolog of NCBI NO: 26449463 NR Description: unknown protein [Arabidopsis thaliana]
  misc_feature (4)..(292): Homolog of NCBI NO: 24643007 NR Description: CG6179-PA [Drosophila melanogaster]
  misc_feature (4)..(292): Homolog of NCBI NO: 38174118 NR Description: Unknown (protein for MGC:75989) [Silurana
  misc_feature (4)..(292): Homolog of NCBI NO: 7705716 NR Description: eNOS interacting protein; CGI-25 protein [Homo
  misc_feature (4)..(291): Homolog of NCBI NO: 27731403 NR Description: similar to RIKEN cDNA 2310061K06 [Mus musculus]
  misc_feature (4)..(292): Homolog of NCBI NO: 15030017 NR Description: Similar to eNOS interacting protein [Homo sapiens]
  misc_feature (4)..(291): Homolog of NCBI NO: 13384956 NR Description: RIKEN cDNA 2310061K06 [Mus musculus]
  misc_feature (4)..(291): Homolog of NCBI NO: 39593613 NR Description: Hypothetical protein CBG05897 [Caenorhabditis
  misc_feature (4)..(282): Homolog of NCBI NO: 17541784 NR Description: eNOS interacting protein (34.0 kD)
MPQRHSKNNNDLAYFTYDEKKKLGYGTQRERLGRDSIKPFDACSLCLKPFIDPMCCHKGHVFCRECILECFLAQKKDIQRRLAAHSSQKKQDKDEEEERLMLQKARELDEFDQQNHSAMPRNSDKNHNEDKNGFHGANSVKTTSFEEEALRTMKAFWLPSATPAASVRVDAPETHTVCPEGKEKLKLKNLFAIRFTEDNSEEEETKTKSASSSSYDKSYICPSCKVTLTNTMSLVALSSCGHVFCKKCAEKFMPVDKVCLVCDKPCKDRNLVGLKKGGTGFAEHDDHLEAKEYKHLGSGSGLGLVRPVKT

SEQ ID NO: 102586 - protein, 257 aa, Arabidopsis thaliana
  peptide (1)..(257): Ceres Seq. ID no. 13610748
  misc_feature (1)..(257): Homolog of NCBI NO: 18407260 NR Description: expressed protein [Arabidopsis thaliana]
  misc_feature (1)..(257): Homolog of NCBI NO: 26449463 NR Description: unknown protein [Arabidopsis thaliana]
  misc_feature (1)..(239): Homolog of NCBI NO: 24643007 NR Description: CG6179-PA [Drosophila melanogaster]
  misc_feature (1)..(239): Homolog of NCBI NO: 38174118 NR Description: Unknown (protein for MGC:75989) [Silurana
  misc_feature (1)..(239): Homolog of NCBI NO: 7705716 NR Description: eNOS interacting protein; CGI-25 protein [Homo
  misc_feature (1)..(238): Homolog of NCBI NO: 27731403 NR Description: similar to RIKEN cDNA 2310061K06 [Mus musculus]
  misc_feature (1)..(239): Homolog of NCBI NO: 15030017 NR Description: Similar to eNOS interacting protein [Homo sapiens]
  misc_feature (1)..(238): Homolog of NCBI NO: 13384956 NR Description: RIKEN cDNA 2310061K06 [Mus musculus]
  misc_feature (1)..(238): Homolog of NCBI NO: 39593613 NR Description: Hypothetical protein CBG05897 [Caenorhabditis
  misc_feature (1)..(229): Homolog of NCBI NO: 17541784 NR Description: eNOS interacting protein (34.0 kD)
MCCHKGHVFCRECILECFLAQKKDIQRRLAAHSSQKKQDKDEEEERLMLQKARELDEFDQQNHSAMPRNSDKNHNEDKNGFHGANSVKTTSFEEEALRTMKAFWLPSATPAASVRVDAPETHTVCPEGKEKLKLKNLFAIRFTEDNSEEEETKTKSASSSSYDKSYICPSCKVTLTNTMSLVALSSCGHVFCKKCAEKFMPVDKVCLVCDKPCKDRNLVGLKKGGTGFAEHDDHLEAKEYKHLGSGSGLGLVRPVKT

SEQ ID NO: 102587 - protein, 210 aa, Arabidopsis thaliana
  peptide (1)..(210): Ceres Seq. ID no. 13610749
  misc_feature (1)..(210): Homolog of NCBI NO: 18407260 NR Description: expressed protein [Arabidopsis thaliana]
  misc_feature (1)..(210): Homolog of NCBI NO: 26449463 NR Description: unknown protein [Arabidopsis thaliana]
  misc_feature (1)..(192): Homolog of NCBI NO: 24643007 NR Description: CG6179-PA [Drosophila melanogaster]
  misc_feature (1)..(192): Homolog of NCBI NO: 38174118 NR Description: Unknown (protein for MGC:75989) [Silurana
  misc_feature (1)..(192): Homolog of NCBI NO: 7705716 NR Description: eNOS interacting protein; CGI-25 protein [Homo
  misc_feature (1)..(191): Homolog of NCBI NO: 27731403 NR Description: similar to RIKEN cDNA 2310061K06 [Mus musculus]
  misc_feature (1)..(192): Homolog of NCBI NO: 15030017 NR Description: Similar to eNOS interacting protein [Homo sapiens]
  misc_feature (1)..(191): Homolog of NCBI NO: 13384956 NR Description: RIKEN cDNA 2310061K06 [Mus musculus]
  misc_feature (1)..(191): Homolog of NCBI NO: 39593613 NR Description: Hypothetical protein CBG05897 [Caenorhabditis
  misc_feature (1)..(182): Homolog of NCBI NO: 17541784 NR Description: eNOS interacting protein (34.0 kD)
MLQKARELDEFDQQNHSAMPRNSDKNHNEDKNGFHGANSVKTTSFEEEALRTMKAFWLPSATPAASVRVDAPETHTVCPEGKEKLKLKNLFAIRFTEDNSEEEETKTKSASSSSYDKSYICPSCKVTLTNTMSLVALSSCGHVFCKKCAEKFMPVDKVCLVCDKPCKDRNLVGLKKGGTGFAEHDDHLEAKEYKHLGSGSGLGLVRPVKT

SEQ ID NO: 102588 - DNA, 1612 bp, Arabidopsis thaliana
  misc_feature (1)..(1612): Ceres Seq. ID no. 13610754
  misc_feature: MA Experiment ID: 108434 Result: Up-regulated in Transcription
  misc_feature: MA Experiment 108434 PARAMETER Experiment Name: At_Root_Tips_cDNA_P Parameter: Tissue Value: Root Tips
  misc_feature: MA Experiment ID: 108461 Result: Down-regulated in Transcription
  misc_feature: MA Experiment 108461 PARAMETER Experiment Name: At_Germinating_Seeds_cDNA_P Parameter: Age (day) Value: 1 vs. 0
  misc_feature: MA Experiment 108461 PARAMETER Experiment Name: At_Germinating_Seeds_cDNA_P Parameter: Tissue Value: Germinating Seeds
  misc_feature: MA Experiment ID: 108462 Result: Down-regulated in Transcription
  misc_feature: MA Experiment 108462 PARAMETER Experiment Name: At_Germinating_Seeds_cDNA_P Parameter: Age (day) Value: 2 vs. 0
  misc_feature: MA Experiment 108462 PARAMETER Experiment Name: At_Germinating_Seeds_cDNA_P Parameter: Tissue Value: Germinating Seeds
  misc_feature: MA Experiment ID: 108463 Result: Down-regulated in Transcription
  misc_feature: MA Experiment 108463 PARAMETER Experiment Name: At_Germinating_Seeds_cDNA_P Parameter: Age (day) Value: 3 vs. 0
  misc_feature: MA Experiment 108463 PARAMETER Experiment Name: At_Germinating_Seeds_cDNA_P Parameter: Tissue Value: Germinating Seeds
  misc_feature: MA Experiment ID: 108464 Result: Down-regulated in Transcription
  misc_feature: MA Experiment 108464 PARAMETER Experiment Name: At_Germinating_Seeds_cDNA_P Parameter: Age (day) Value: 4 vs. 0
  misc_feature: MA Experiment 108464 PARAMETER Experiment Name: At_Germinating_Seeds_cDNA_P Parameter: Tissue Value: Germinating Seeds
  misc_feature: MA Experiment ID: 108572 Result: Down-regulated in Transcription
  misc_feature: MA Experiment 108572 PARAMETER Experiment Name: At_Drought_cDNA_P Parameter: Timepoint (hr) Value: 1
  misc_feature: MA Experiment 108572 PARAMETER Experiment Name: At_Drought_cDNA_P Parameter: Tissue Value: Aerial
  misc_feature: MA Experiment 108572 PARAMETER Experiment Name: At_Drought_cDNA_P Parameter: Treatment Value: Drought vs. No Drought
  misc_feature: MA Experiment ID: 108573 Result: Down-regulated in Transcription
  misc_feature: MA Experiment 108573 PARAMETER Experiment Name: At_Drought_cDNA_P Parameter: Timepoint (hr) Value: 6
  misc_feature: MA Experiment 108573 PARAMETER Experiment Name: At_Drought_cDNA_P Parameter: Tissue Value: Aerial
  misc_feature: MA Experiment 108573 PARAMETER Experiment Name: At_Drought_cDNA_P Parameter: Treatment Value: Drought vs. No Drought
  misc_feature: MA Experiment ID: 20000171 Result: Down-regulated in Transcription
  misc_feature: MA Experiment 20000171 PARAMETER Experiment Name: At_42deg_Heat_P Parameter: Age (day) Value: 14
  misc_feature: MA Experiment 20000171 PARAMETER Experiment Name: At_42deg_Heat_P Parameter: Organism Value: A. thaliana
  misc_feature: MA Experiment 20000171 PARAMETER Experiment Name: At_42deg_Heat_P Parameter: Plant Line Value: WS
  misc_feature: MA Experiment 20000171 PARAMETER Experiment Name: At_42deg_Heat_P Parameter: Temperature (deg C) Value: 42 vs. 22
  misc_feature: MA Experiment 20000171 PARAMETER Experiment Name: At_42deg_Heat_P Parameter: Timepoint (hr) Value: 1
  misc_feature: MA Experiment 20000171 PARAMETER Experiment Name: At_42deg_Heat_P Parameter: Tissue Value: Aerial
  misc_feature: MA Experiment ID: 20000180 Result: Down-regulated in Transcription
  misc_feature: MA Experiment 20000180 PARAMETER Experiment Name: At_Germinating_Seeds_P Parameter: Age (hr) Value: 24 vs. 0
  misc_feature: MA Experiment 20000180 PARAMETER Experiment Name: At_Germinating_Seeds_P Parameter: Tissue Value: Germinating Seeds
  misc_feature: MA Experiment ID: 20000224 Result: Down-regulated in Transcription
  misc_feature: MA Experiment ID: 20000437 Result: Down-regulated in Transcription
  misc_feature: MA Experiment 20000437 PARAMETER Experiment Name: At_Drought_P Parameter: Age (day) Value: 8
  misc_feature: MA Experiment 20000437 PARAMETER Experiment Name: At_Drought_P Parameter: Organism Value: A. thaliana
  misc_feature: MA Experiment 20000437 PARAMETER Experiment Name: At_Drought_P Parameter: Plant Line Value: WS
  misc_feature: MA Experiment 20000437 PARAMETER Experiment Name: At_Drought_P Parameter: Timepoint (hr) Value: 24
  misc_feature: MA Experiment 20000437 PARAMETER Experiment Name: At_Drought_P Parameter: Tissue Value: Whole Plant
  misc_feature: MA Experiment 20000437 PARAMETER Experiment Name: At_Drought_P Parameter: Treatment Value: Drought vs. No Drought
  misc_feature: MA Experiment ID: 20000573 Result: Down-regulated in Transcription
  misc_feature: MA Experiment 20000573 PARAMETER Experiment Name: At_100uM_ABA_Mutants__P Parameter: Organism Value: A. thaliana
  misc_feature: MA Experiment 20000573 PARAMETER Experiment Name: At_100uM_ABA_Mutants__P Parameter: Plant Line Value: CS22 vs. Ler wt
  misc_feature: MA Experiment 20000573 PARAMETER Experiment Name: At_100uM_ABA_Mutants__P Parameter: Timepoint (hr) Value: N/A
  misc_feature: MA Experiment 20000573 PARAMETER Experiment Name: At_100uM_ABA_Mutants__P Parameter: Tissue Value: Whole Plant
  misc_feature: MA Experiment 20000573 PARAMETER Experiment Name: At_100uM_ABA_Mutants__P Parameter: Treatment Value: None
  misc_feature: MA Experiment ID: 20000574 Result: Down-regulated in Transcription
  misc_feature: MA Experiment 20000574 PARAMETER Experiment Name: At_100uM_ABA_Mutants__P Parameter: Organism Value: A. thaliana
  misc_feature: MA Experiment 20000574 PARAMETER Experiment Name: At_100uM_ABA_Mutants__P Parameter: Plant Line Value: CS23 vs. Ler wt
  misc_feature: MA Experiment 20000574 PARAMETER Experiment Name: At_100uM_ABA_Mutants__P Parameter: Timepoint (hr) Value: N/A
  misc_feature: MA Experiment 20000574 PARAMETER Experiment Name: At_100uM_ABA_Mutants__P Parameter: Tissue Value: Whole Plant
  misc_feature: MA Experiment 20000574 PARAMETER Experiment Name: At_100uM_ABA_Mutants__P Parameter: Treatment Value: None
  misc_feature: MA Experiment ID: 20000794 Result: Down-regulated in Transcription
  misc_feature: MA Experiment 20000794 PARAMETER Experiment Name: At_Petals_P Parameter: Age (day) Value: 23-25 days
  misc_feature: MA Experiment 20000794 PARAMETER Experiment Name: At_Petals_P Parameter: Plant Line Value: WS
  misc_feature: MA Experiment 20000794 PARAMETER Experiment Name: At_Petals_P Parameter: Tissue Value: Petals vs. Whole plant
  misc_feature: MA Experiment ID: 20001451 Result: Down-regulated in Transcription
  misc_feature: MA Experiment 20001451 PARAMETER Experiment Name: At_Far-red-induction_P Parameter: Age (day) Value: 7
  misc_feature: MA Experiment 20001451 PARAMETER Experiment Name: At_Far-red-induction_P Parameter: Light Value: Far-red vs. White
  misc_feature: MA Experiment 20001451 PARAMETER Experiment Name: At_Far-red-induction_P Parameter: Organism Value: A. thaliana
  misc_feature: MA Experiment 20001451 PARAMETER Experiment Name: At_Far-red-induction_P Parameter: Plant Line Value: Columbia
  misc_feature: MA Experiment 20001451 PARAMETER Experiment Name: At_Far-red-induction_P Parameter: Timepoint (hr) Value: 24
  misc_feature: MA Experiment 20001451 PARAMETER Experiment Name: At_Far-red-induction_P Parameter: Tissue Value: Whole Plant
  misc_feature: MA Experiment ID: 20001911 Result: Down-regulated in Transcription
  misc_feature: MA Experiment 20001911 PARAMETER Experiment Name: At_Drought_Reproduction_P Parameter: Age (day) Value: 40
  misc_feature: MA Experiment 20001911 PARAMETER Experiment Name: At_Drought_Reproduction_P Parameter: Organism Value: A. thaliana
  misc_feature: MA Experiment 20001911 PARAMETER Experiment Name: At_Drought_Reproduction_P Parameter: Plant Line Value: WS
  misc_feature: MA Experiment 20001911 PARAMETER Experiment Name: At_Drought_Reproduction_P Parameter: Timepoint (day) Value: 10
  misc_feature: MA Experiment 20001911 PARAMETER Experiment Name: At_Drought_Reproduction_P Parameter: Tissue Value: Flowers
  misc_feature: MA Experiment 20001911 PARAMETER Experiment Name: At_Drought_Reproduction_P Parameter: Treatment Value: Drought vs. No Drought
agtctccgtcttcttcttcatttcacagtcatcttcttcatctaaaaccctaagaaaacaacaatggcgttactctctcgaatccgttcatcaacatctctcttccgtcacctcaacgcatcaccacaaatccgatcactctcctcggcttcaacaatcctctcaccagattcaaaaactcctctcacaagcaaagaaaaaagcaaagcagctctctctcttctcaaatccgagaaagatccagatcgtatcctcgaaatctgccgtgcagcttctcttactccagattgccgcatagatcgaatcgctttctccgccgccgtcgagaatctcgccgagaagaaacatttctccgctgtatcgaatctcctcgacggattcatcgaaaacagaccagatctcaaatcggaacgttttgctgctcacgccattgttttgtatgctcaagctaatatgcttgatcactctttaagagtttttcgtgatctcgagaaattcgaaatctctcgtacggtgaagtctttaaacgcgcttctctttgcttgtttagtagctaaggattacaaagaagctaaaagagtttacattgagatgcctaagatgtatggaattgaacctgatctcgagacttataatcgtatgatcaaagtgttttgtgaatccggttcagcgagttcgtcgtactccattgttgcggagatggagaggaaagggataaagccgaatagttcaagctttggtttgatgatttctgggttttatgcagaggataagagtgatgaagtagggaaagtgttggcgatgatgaaagatcgtggtgttaatatcggtgtttcgacttataacattaggattcagagtttgtgtaagaggaagaaatctaaggaagcgaaggctttgcttgatgggatgttatctgcagggatgaaaccgaatacggtaacgtatagccatttgattcacgggttttgtaatgaagatgatttcgaggaagcgaagaagttgtttaagattatggtgaacagaggatgtaagcctgatagtgagtgttacttcactcttatatattacttatgcaaaggaggagactttgagacggctttgagtctttgtaaagagagtatggagaagaattgggttccgagttttagtatcatgaagtcgcttgttaacggactagctaaggattcgaaagtcgaagaagcaaaggagcttattgggcaagtgaaagagaagttcactagaaacgttgagttgtggaacgaagtcgaagccgcattaccgcaatgaatcaaaagatagttcccgagatcggtattttcaaaattttacgaattttctctcttcatttgtcagcaatgaaataagtttatatcttcttagaagatagtaatcttttgctcatcatggtagctatagattaatggtttatcttgttagtttttggatttggaatcagagagatgttgagcagtttatctgtaagatttggtcaaagcattgtagcaatgttaagtgtcttcctatgtttatattatatagtatgatgactatataatatagaaagaagtttaatgtttacatgcttaccacgaactaatgtgttttggag

SEQ ID NO: 102589 - protein, 408 aa, Arabidopsis thaliana
  peptide (1)..(408): Ceres Seq. ID no. 13610755
  misc_feature (328)..(362): Pfam Name: PPR repeat Pfam Description: PPR repeat
  misc_feature (1)..(408): Homolog of NCBI NO: 18407365 NR Description: pentatricopeptide (PPR) repeat-containing protein
  misc_feature (1)..(408): Homolog of NCBI NO: 21553755 NR Description: putative membrane-associated salt-inducible
  misc_feature (1)..(407): Homolog of NCBI NO: 15221069 NR Description: pentatricopeptide (PPR) repeat-containing protein thaliana] >gi|25402674|pir||G86249 hypothetical protein
  misc_feature (31)..(408): Homolog of NCBI NO: 34908820 NR Description: P0557A01.33 [Oryza sativa (japonica
  misc_feature (1)..(385): Homolog of NCBI NO: 15222796 NR Description: pentatricopeptide (PPR) repeat-containing protein
  misc_feature (29)..(406): Homolog of NCBI NO: 15234493 NR Description: pentatricopeptide (PPR) repeat-containing protein
  misc_feature (29)..(406): Homolog of NCBI NO: 25455786 NR Description: membrane-associated salt-inducible protein like
  misc_feature (23)..(406): Homolog of NCBI NO: 18398767 NR Description: pentatricopeptide (PPR) repeat-containing protein
  misc_feature (1)..(389): Homolog of NCBI NO: 18399887 NR Description: pentatricopeptide (PPR) repeat-containing protein thaliana] >gi|10172603|dbj|BAB01407.1| unnamed protein product thaliana] >gi|22531265|gb|AAM97136.1| expressed expressed protein
  misc_feature (19)..(389): Homolog of NCBI NO: 21617993 NR Description: unknown [Arabidopsis thaliana]
MALLSRIRSSTSLFRHLNASPQIRSLSSASTILSPDSKTPLTSKEKSKAALSLLKSEKDPDRILEICRAASLTPDCRIDRIAFSAAVENLAEKKHFSAVSNLLDGFIENRPDLKSERFAAHAIVLYAQANMLDHSLRVFRDLEKFEISRTVKSLNALLFACLVAKDYKEAKRVYIEMPKMYGIEPDLETYNRMIKVFCESGSASSSYSIVAEMERKGIKPNSSSFGLMISGFYAEDKSDEVGKVLAMMKDRGVNIGVSTYNIRIQSLCKRKKSKEAKALLDGMLSAGMKPNTVTYSHLIHGFCNEDDFEEAKKLFKIMVNRGCKPDSECYFTLIYYLCKGGDFETALSLCKESMEKNWVPSFSIMKSLVNGLAKDSKVEEAKELIGQVKEKFTRNVELWNEVEAALPQ

SEQ ID NO: 102590 - protein, 278 aa, Arabidopsis thaliana
  peptide (1)..(278): Ceres Seq. ID no. 13610756
  misc_feature (198)..(232): Pfam Name: PPR repeat Pfam Description: PPR repeat
  misc_feature (1)..(278): Homolog of NCBI NO: 18407365 NR Description: pentatricopeptide (PPR) repeat-containing protein
  misc_feature (1)..(278): Homolog of NCBI NO: 21553755 NR Description: putative membrane-associated salt-inducible
  misc_feature (1)..(277): Homolog of NCBI NO: 15221069 NR Description: pentatricopeptide (PPR) repeat-containing protein thaliana] >gi|25402674|pir||G86249 hypothetical protein
  misc_feature (1)..(278): Homolog of NCBI NO: 34908820 NR Description: P0557A01.33 [Oryza sativa (japonica
  misc_feature (1)..(255): Homolog of NCBI NO: 15222796 NR Description: pentatricopeptide (PPR) repeat-containing protein
  misc_feature (1)..(276): Homolog of NCBI NO: 15234493 NR Description: pentatricopeptide (PPR) repeat-containing protein
  misc_feature (1)..(276): Homolog of NCBI NO: 25455786 NR Description: membrane-associated salt-inducible protein like
  misc_feature (1)..(276): Homolog of NCBI NO: 18398767 NR Description: pentatricopeptide (PPR) repeat-containing protein
  misc_feature (1)..(259): Homolog of NCBI NO: 18399887 NR Description: pentatricopeptide (PPR) repeat-containing protein thaliana] >gi|10172603|dbj|BAB01407.1| unnamed protein product thaliana] >gi|22531265|gb|AAM97136.1| expressed expressed protein
  misc_feature (1)..(259): Homolog of NCBI NO: 21617993 NR Description: unknown [Arabidopsis thaliana]
MLDHSLRVFRDLEKFEISRTVKSLNALLFACLVAKDYKEAKRVYIEMPKMYGIEPDLETYNRMIKVFCESGSASSSYSIVAEMERKGIKPNSSSFGLMISGFYAEDKSDEVGKVLAMMKDRGVNIGVSTYNIRIQSLCKRKKSKEAKALLDGMLSAGMKPNTVTYSHLIHGFCNEDDFEEAKKLFKIMVNRGCKPDSECYFTLIYYLCKGGDFETALSLCKESMEKNWVPSFSIMKSLVNGLAKDSKVEEAKELIGQVKEKFTRNVELWNEVEAALPQ

SEQ ID NO: 102591 - protein, 232 aa, Arabidopsis thaliana
  peptide (1)..(232): Ceres Seq. ID no. 13610757
  misc_feature (152)..(186): Pfam Name: PPR repeat Pfam Description: PPR repeat
  misc_feature (1)..(232): Homolog of NCBI NO: 18407365 NR Description: pentatricopeptide (PPR) repeat-containing protein
  misc_feature (1)..(232): Homolog of NCBI NO: 21553755 NR Description: putative membrane-associated salt-inducible
  misc_feature (1)..(231): Homolog of NCBI NO: 15221069 NR Description: pentatricopeptide (PPR) repeat-containing protein thaliana] >gi|25402674|pir||G86249 hypothetical protein
  misc_feature (1)..(232): Homolog of NCBI NO: 34908820 NR Description: P0557A01.33 [Oryza sativa (japonica
  misc_feature (1)..(209): Homolog of NCBI NO: 15222796 NR Description: pentatricopeptide (PPR) repeat-containing protein
  misc_feature (1)..(230): Homolog of NCBI NO: 15234493 NR Description: pentatricopeptide (PPR) repeat-containing protein
  misc_feature (1)..(230): Homolog of NCBI NO: 25455786 NR Description: membrane-associated salt-inducible protein like
  misc_feature (1)..(230): Homolog of NCBI NO: 18398767 NR Description: pentatricopeptide (PPR) repeat-containing protein
  misc_feature (1)..(213): Homolog of NCBI NO: 18399887 NR Description: pentatricopeptide (PPR) repeat-containing protein thaliana] >gi|10172603|dbj|BAB01407.1| unnamed protein product thaliana] >gi|22531265|gb|AAM97136.1| expressed expressed protein
  misc_feature (1)..(213): Homolog of NCBI NO: 21617993 NR Description: unknown [Arabidopsis thaliana]
MPKMYGIEPDLETYNRMIKVFCESGSASSSYSIVAEMERKGIKPNSSSFGLMISGFYAEDKSDEVGKVLAMMKDRGVNIGVSTYNIRIQSLCKRKKSKEAKALLDGMLSAGMKPNTVTYSHLIHGFCNEDDFEEAKKLFKIMVNRGCKPDSECYFTLIYYLCKGGDFETALSLCKESMEKNWVPSFSIMKSLVNGLAKDSKVEEAKELIGQVKEKFTRNVELWNEVEAALPQ

SEQ ID NO: 102592 - DNA, 626 bp, Arabidopsis thaliana
  misc_feature (1)..(626): Ceres Seq. ID no. 13610762
  misc_feature: MA Experiment ID: 108433 Result: Up-regulated in Transcription
  misc_feature: MA Experiment 108433 PARAMETER Experiment Name: At_rhl_Mutant2_cDNA_P Parameter: Age (day) Value: 7
  misc_feature: MA Experiment 108433 PARAMETER Experiment Name: At_rhl_Mutant2_cDNA_P Parameter: Organism Value: A. thaliana
  misc_feature: MA Experiment 108433 PARAMETER Experiment Name: At_rhl_Mutant2_cDNA_P Parameter: Plant Line Value: rhl Mutant vs. wt landsburg
  misc_feature: MA Experiment 108433 PARAMETER Experiment Name: At_rhl_Mutant2_cDNA_P Parameter: Tissue Value: Roots
  misc_feature: MA Experiment ID: 108434 Result: Down-regulated in Transcription
  misc_feature: MA Experiment 108434 PARAMETER Experiment Name: At_Root_Tips_cDNA_P Parameter: Tissue Value: Root Tips
  misc_feature: MA Experiment ID: 108462 Result: Up-regulated in Transcription
  misc_feature: MA Experiment 108462 PARAMETER Experiment Name: At_Germinating_Seeds_cDNA_P Parameter: Age (day) Value: 2 vs. 0
  misc_feature: MA Experiment 108462 PARAMETER Experiment Name: At_Germinating_Seeds_cDNA_P Parameter: Tissue Value: Germinating Seeds
  misc_feature: MA Experiment ID: 108464 Result: Up-regulated in Transcription
  misc_feature: MA Experiment 108464 PARAMETER Experiment Name: At_Germinating_Seeds_cDNA_P Parameter: Age (day) Value: 4 vs. 0
  misc_feature: MA Experiment 108464 PARAMETER Experiment Name: At_Germinating_Seeds_cDNA_P Parameter: Tissue Value: Germinating Seeds
  misc_feature: MA Experiment ID: 108488 Result: Down-regulated in Transcription
  misc_feature: MA Experiment ID: 108561 Result: Up-regulated in Transcription
  misc_feature: MA Experiment 108561 PARAMETER Experiment Name: At_100uM_ABA_cDNA_P Parameter: Timepoint (hr) Value: 6
  misc_feature: MA Experiment 108561 PARAMETER Experiment Name: At_100uM_ABA_cDNA_P Parameter: Tissue Value: Aerial
  misc_feature: MA Experiment 108561 PARAMETER Experiment Name: At_100uM_ABA_cDNA_P Parameter: Treatment Value: 100uM ABA vs. No Treatment
  misc_feature: MA Experiment ID: 108579 Result: Down-regulated in Transcription
  misc_feature: MA Experiment 108579 PARAMETER Experiment Name: At_4deg_Cold_cDNA_P Parameter: Temperature (deg C) Value: 4 vs. 22
  misc_feature: MA Experiment 108579 PARAMETER Experiment Name: At_4deg_Cold_cDNA_P Parameter: Timepoint (hr) Value: 6
  misc_feature: MA Experiment 108579 PARAMETER Experiment Name: At_4deg_Cold_cDNA_P Parameter: Tissue Value: Aerial
  misc_feature: MA Experiment ID: 20000214 Result: Down-regulated in Transcription
  misc_feature: MA Experiment 20000214 PARAMETER Experiment Name: At_4deg_Cold_P Parameter: Timepoint (hr) Value: 6
  misc_feature: MA Experiment ID: 20000224 Result: Down-regulated in Transcription
  misc_feature: MA Experiment ID: 20000437 Result: Up-regulated in Transcription
  misc_feature: MA Experiment 20000437 PARAMETER Experiment Name: At_Drought_P Parameter: Age (day) Value: 8
  misc_feature: MA Experiment 20000437 PARAMETER Experiment Name: At_Drought_P Parameter: Organism Value: A. thaliana
  misc_feature: MA Experiment 20000437 PARAMETER Experiment Name: At_Drought_P Parameter: Plant Line Value: WS
  misc_feature: MA Experiment 20000437 PARAMETER Experiment Name: At_Drought_P Parameter: Timepoint (hr) Value: 24
  misc_feature: MA Experiment 20000437 PARAMETER Experiment Name: At_Drought_P Parameter: Tissue Value: Whole Plant
  misc_feature: MA Experiment 20000437 PARAMETER Experiment Name: At_Drought_P Parameter: Treatment Value: Drought vs. No Drought
  misc_feature: MA Experiment ID: 20001557 Result: Down-regulated in Transcription
  misc_feature: MA Experiment 20001557 PARAMETER Experiment Name: At_Drought_Soil_Dry_P Parameter: Age (day) Value: 27
  misc_feature: MA Experiment 20001557 PARAMETER Experiment Name: At_Drought_Soil_Dry_P Parameter: Organism Value: A. thaliana
  misc_feature: MA Experiment 20001557 PARAMETER Experiment Name: At_Drought_Soil_Dry_P Parameter: Plant Line Value: WS
  misc_feature: MA Experiment 20001557 PARAMETER Experiment Name: At_Drought_Soil_Dry_P Parameter: Post Timepoint (hr) Value: 3
  misc_feature: MA Experiment 20001557 PARAMETER Experiment Name: At_Drought_Soil_Dry_P Parameter: Post-Treatment Value: Re-Water vs. No Drought
  misc_feature: MA Experiment 20001557 PARAMETER Experiment Name: At_Drought_Soil_Dry_P Parameter: Timepoint (day) Value: 13
  misc_feature: MA Experiment 20001557 PARAMETER Experiment Name: At_Drought_Soil_Dry_P Parameter: Treatment Value: Drought vs. No Drought
  misc_feature: MA Experiment ID: 20001905 Result: Up-regulated in Transcription
  misc_feature: MA Experiment 20001905 PARAMETER Experiment Name: At_Drought_Reproduction_P Parameter: Age (day) Value: 40
  misc_feature: MA Experiment 20001905 PARAMETER Experiment Name: At_Drought_Reproduction_P Parameter: Organism Value: A. thaliana
  misc_feature: MA Experiment 20001905 PARAMETER Experiment Name: At_Drought_Reproduction_P Parameter: Plant Line Value: WS
  misc_feature: MA Experiment 20001905 PARAMETER Experiment Name: At_Drought_Reproduction_P Parameter: Timepoint (day) Value: 10
  misc_feature: MA Experiment 20001905 PARAMETER Experiment Name: At_Drought_Reproduction_P Parameter: Tissue Value: Rosettes
  misc_feature: MA Experiment 20001905 PARAMETER Experiment Name: At_Drought_Reproduction_P Parameter: Treatment Value: Drought vs. No Drought
gttttcagtttcgtgcatagattaggaatctcgaaaccctaattctgttttctacacgaaacccatcaaaatcgaattttgatcgtttctaatttctgccatttgattctcttcatcagtcacatttaggggaaacgagaagccctaatctttgattctttaatcgccatggctaatagctctttcaagttggaacacccactagagaggagacaaattgaatcttctcgcatcagggagaagtatccagacagaattccagtgatcgtagagagagctgaaagaagtgatgttcccaatatcgacaagaagaagtaccttgttccagctgatctaactgttgggcaatttgtgtatgttgtccgtaaaagaatcaagctgagtgccgaaaaggctatcttcgtctttgtgaagaacacattgcctccaactgctgcaatgatgtctgcaatctatgatgagaacaaagacgaagatgggtttctctacatgacttacagtggagagaacacctttggtttggtttaaatgtgtgccttccaatgcttttgtgctgatgtgtatattatatgctcttttataacactatgaatatgcaaaagttatatgtactactattaatgtaa

SEQ ID NO: 102593 - protein, 119 aa, Arabidopsis thaliana; identical to SEQ ID NO: 30805
  peptide (1)..(119): Ceres Seq. ID no. 13610763
  misc_feature (14)..(117): Pfam Name: Microtubule associated protein 1A/1B, light chain 3 Pfam Description: Microtubule associated protein 1A/1B, light
  misc_feature (1)..(118): Homolog of NCBI NO: 7446944 NR Description: hypothetical protein F8K4.23 - Arabidopsis
  misc_feature (1)..(119): Homolog of NCBI NO: 15220686 NR Description: symbiosis-related protein -related [Arabidopsis
  misc_feature (1)..(118): Homolog of NCBI NO: 40253647 NR Description: putative microtubial binding protein [Oryza
  misc_feature (1)..(117): Homolog of NCBI NO: 34595981 NR Description: microtubule-associated protein 1 light chain 3
  misc_feature (1)..(119): Homolog of NCBI NO: 38344173 NR Description: OSJNBa0053K19.12 [Oryza sativa (japonica
  misc_feature (1)..(117): Homolog of NCBI NO: 33146967 NR Description: putative microtubule associated protein [Oryza
  misc_feature (1)..(118): Homolog of NCBI NO: 21592920 NR Description: putative microtubule-associated protein
  misc_feature (1)..(118): Homolog of NCBI NO: 15224577 NR Description: microtubule-associated protein -related
  misc_feature (1)..(117): Homolog of NCBI NO: 18415813 NR Description: symbiosis-related like protein [Arabidopsis >gi|19912151|dbj|BAB88387.1| autophagy 8a [Arabidopsis thaliana] autophagy APG8 [Arabidopsis protein [Arabidopsis thaliana]
  misc_feature (1)..(117): Homolog of NCBI NO: 21553487 NR Description: symbiosis-related like protein [Arabidopsis

SEQ ID NO: 102594 - DNA, 1289 bp, Arabidopsis thaliana
  misc_feature (1)..(1289): Ceres Seq. ID no. 13610775
  misc_feature: MA Experiment ID: 108434 Result: Down-regulated in Transcription
  misc_feature: MA Experiment 108434 PARAMETER Experiment Name: At_Root_Tips_cDNA_P Parameter: Tissue Value: Root Tips
  misc_feature: MA Experiment ID: 108461 Result: Up-regulated in Transcription
  misc_feature: MA Experiment 108461 PARAMETER Experiment Name: At_Germinating_Seeds_cDNA_P Parameter: Age (day) Value: 1 vs. 0
  misc_feature: MA Experiment 108461 PARAMETER Experiment Name: At_Germinating_Seeds_cDNA_P Parameter: Tissue Value: Germinating Seeds
  misc_feature: MA Experiment ID: 108462 Result: Up-regulated in Transcription
  misc_feature: MA Experiment 108462 PARAMETER Experiment Name: At_Germinating_Seeds_cDNA_P Parameter: Age (day) Value: 2 vs. 0
  misc_feature: MA Experiment 108462 PARAMETER Experiment Name: At_Germinating_Seeds_cDNA_P Parameter: Tissue Value: Germinating Seeds
  misc_feature: MA Experiment ID: 108561 Result: Up-regulated in Transcription
  misc_feature: MA Experiment 108561 PARAMETER Experiment Name: At_100uM_ABA_cDNA_P Parameter: Timepoint (hr) Value: 6
  misc_feature: MA Experiment 108561 PARAMETER Experiment Name: At_100uM_ABA_cDNA_P Parameter: Tissue Value: Aerial
  misc_feature: MA Experiment 108561 PARAMETER Experiment Name: At_100uM_ABA_cDNA_P Parameter: Treatment Value: 100uM ABA vs. No Treatment
  misc_feature: MA Experiment ID: 108573 Result: Up-regulated in Transcription
  misc_feature: MA Experiment 108573 PARAMETER Experiment Name: At_Drought_cDNA_P Parameter: Timepoint (hr) Value: 6
  misc_feature: MA Experiment 108573 PARAMETER Experiment Name: At_Drought_cDNA_P Parameter: Tissue Value: Aerial
  misc_feature: MA Experiment 108573 PARAMETER Experiment Name: At_Drought_cDNA_P Parameter: Treatment Value: Drought vs. No Drought
  misc_feature: MA Experiment ID: 108595 Result: Up-regulated in Transcription
  misc_feature: MA Experiment 108595 PARAMETER Experiment Name: At_Ler-pi_Ovule_cDNA_P Parameter: Plant Line Value: null
  misc_feature: MA Experiment ID: 108605 Result: Up-regulated in Transcription
  misc_feature: MA Experiment 108605 PARAMETER Experiment Name: At_100uM_ABA_cDNA_P Parameter: Timepoint (hr) Value: 6
  misc_feature: MA Experiment 108605 PARAMETER Experiment Name: At_100uM_ABA_cDNA_P Parameter: Tissue Value: Aerial
  misc_feature: MA Experiment 108605 PARAMETER Experiment Name: At_100uM_ABA_cDNA_P Parameter: Treatment Value: 100uM ABA vs. No Treatment
  misc_feature: MA Experiment ID: 108607 Result: Up-regulated in Transcription
  misc_feature: MA Experiment 108607 PARAMETER Experiment Name: At_100uM_ABA_cDNA_P Parameter: Timepoint (hr) Value: 4
  misc_feature: MA Experiment 108607 PARAMETER Experiment Name: At_100uM_ABA_cDNA_P Parameter: Tissue Value: Aerial
  misc_feature: MA Experiment 108607 PARAMETER Experiment Name: At_100uM_ABA_cDNA_P Parameter: Treatment Value: 100uM ABA vs. No Treatment
  misc_feature: MA Experiment ID: 20000069 Result: Up-regulated in Transcription
  misc_feature: MA Experiment 20000069 PARAMETER Experiment Name: At_100uM_ABA_Mutants_cDNA_P Parameter: Plant Line Value: CS23
  misc_feature: MA Experiment 20000069 PARAMETER Experiment Name: At_100uM_ABA_Mutants_cDNA_P Parameter: Timepoint (hr) Value: 6
  misc_feature: MA Experiment 20000069 PARAMETER Experiment Name: At_100uM_ABA_Mutants_cDNA_P Parameter: Tissue Value: Aerial
  misc_feature: MA Experiment 20000069 PARAMETER Experiment Name: At_100uM_ABA_Mutants_cDNA_P Parameter: Treatment Value: 100uM ABA vs. No Treatment
  misc_feature: MA Experiment ID: 20000070 Result: Up-regulated in Transcription
  misc_feature: MA Experiment 20000070 PARAMETER Experiment Name: At_100uM_ABA_Mutants_cDNA_P Parameter: Plant Line Value: CS24
  misc_feature: MA Experiment 20000070 PARAMETER Experiment Name: At_100uM_ABA_Mutants_cDNA_P Parameter: Timepoint (hr) Value: 6
  misc_feature: MA Experiment 20000070 PARAMETER Experiment Name: At_100uM_ABA_Mutants_cDNA_P Parameter: Tissue Value: Aerial
  misc_feature: MA Experiment 20000070 PARAMETER Experiment Name: At_100uM_ABA_Mutants_cDNA_P Parameter: Treatment Value: 100uM ABA vs. No Treatment
  misc_feature: MA Experiment ID: 20000071 Result: Up-regulated in Transcription
  misc_feature: MA Experiment 20000071 PARAMETER Experiment Name: At_100uM_ABA_Mutants_cDNA_P Parameter: Plant Line Value: CS8104
  misc_feature: MA Experiment 20000071 PARAMETER Experiment Name: At_100uM_ABA_Mutants_cDNA_P Parameter: Timepoint (hr) Value: 6
  misc_feature: MA Experiment 20000071 PARAMETER Experiment Name: At_100uM_ABA_Mutants_cDNA_P Parameter: Tissue Value: Aerial
  misc_feature: MA Experiment 20000071 PARAMETER Experiment Name: At_100uM_ABA_Mutants_cDNA_P Parameter: Treatment Value: 100uM ABA vs. No Treatment
  misc_feature: MA Experiment ID: 20000072 Result: Up-regulated in Transcription
  misc_feature: MA Experiment 20000072 PARAMETER Experiment Name: At_100uM_ABA_Mutants_cDNA_P Parameter: Plant Line Value: CS8105
  misc_feature: MA Experiment 20000072 PARAMETER Experiment Name: At_100uM_ABA_Mutants_cDNA_P Parameter: Timepoint (hr) Value: 6
  misc_feature: MA Experiment 20000072 PARAMETER Experiment Name: At_100uM_ABA_Mutants_cDNA_P Parameter: Tissue Value: Aerial
  misc_feature: MA Experiment 20000072 PARAMETER Experiment Name: At_100uM_ABA_Mutants_cDNA_P Parameter: Treatment Value: 100uM ABA vs. No Treatment
  misc_feature: MA Experiment ID: 20000087 Result: Up-regulated in Transcription
  misc_feature: MA Experiment 20000087 PARAMETER Experiment Name: At_100uM_ABA_Mutants_cDNA_P Parameter: Plant Line Value: WS
  misc_feature: MA Experiment 20000087 PARAMETER Experiment Name: At_100uM_ABA_Mutants_cDNA_P Parameter: Timepoint (hr) Value: 6
  misc_feature: MA Experiment 20000087 PARAMETER Experiment Name: At_100uM_ABA_Mutants_cDNA_P Parameter: Tissue Value: Aerial
  misc_feature: MA Experiment 20000087 PARAMETER Experiment Name: At_100uM_ABA_Mutants_cDNA_P Parameter: Treatment Value: 100uM ABA vs. No Treatment
  misc_feature: MA Experiment ID: 20000117 Result: Up-regulated in Transcription
  misc_feature: MA Experiment 20000117 PARAMETER Experiment Name: At_100uM_ABA_Mutants_cDNA_P Parameter: Plant Line Value: Columbia
  misc_feature: MA Experiment 20000117 PARAMETER Experiment Name: At_100uM_ABA_Mutants_cDNA_P Parameter: Timepoint (hr) Value: 6
  misc_feature: MA Experiment 20000117 PARAMETER Experiment Name: At_100uM_ABA_Mutants_cDNA_P Parameter: Tissue Value: Aerial
  misc_feature: MA Experiment 20000117 PARAMETER Experiment Name: At_100uM_ABA_Mutants_cDNA_P Parameter: Treatment Value: 100uM ABA vs. No Treatment
  misc_feature: MA Experiment ID: 20000169 Result: Up-regulated in Transcription
  misc_feature: MA Experiment 20000169 PARAMETER Experiment Name: At_100uM_ABA_P Parameter: Age (day) Value: 14
  misc_feature: MA Experiment 20000169 PARAMETER Experiment Name: At_100uM_ABA_P Parameter: Organism Value: A. thaliana
  misc_feature: MA Experiment 20000169 PARAMETER Experiment Name: At_100uM_ABA_P Parameter: Plant Line Value: WS
  misc_feature: MA Experiment 20000169 PARAMETER Experiment Name: At_100uM_ABA_P Parameter: Timepoint (hr) Value: 6
  misc_feature: MA Experiment 20000169 PARAMETER Experiment Name: At_100uM_ABA_P Parameter: Tissue Value: Aerial
  misc_feature: MA Experiment 20000169 PARAMETER Experiment Name: At_100uM_ABA_P Parameter: Treatment Value: 100uM ABA vs. No Treatment
  misc_feature: MA Experiment ID: 20000179 Result: Up-regulated in Transcription
  misc_feature: MA Experiment 20000179 PARAMETER Experiment Name: At_Germinating_Seeds_P Parameter: Age (hr) Value: 6 vs. 0
  misc_feature: MA Experiment 20000179 PARAMETER Experiment Name: At_Germinating_Seeds_P Parameter: Tissue Value: Germinating Seeds
  misc_feature: MA Experiment ID: 20000180 Result: Up-regulated in Transcription
  misc_feature: MA Experiment 20000180 PARAMETER Experiment Name: At_Germinating_Seeds_P Parameter: Age (hr) Value: 24 vs. 0
  misc_feature: MA Experiment 20000180 PARAMETER Experiment Name: At_Germinating_Seeds_P Parameter: Tissue Value: Germinating Seeds
  misc_feature: MA Experiment ID: 20000182 Result: Up-regulated in Transcription
  misc_feature: MA Experiment 20000182 PARAMETER Experiment Name: At_2mM_SA_P Parameter: Age (day) Value: 14
  misc_feature: MA Experiment 20000182 PARAMETER Experiment Name: At_2mM_SA_P Parameter: Organism Value: A. thaliana
  misc_feature: MA Experiment 20000182 PARAMETER Experiment Name: At_2mM_SA_P Parameter: Plant Line Value: WS
  misc_feature: MA Experiment 20000182 PARAMETER Experiment Name: At_2mM_SA_P Parameter: Timepoint (hr) Value: 6
  misc_feature: MA Experiment 20000182 PARAMETER Experiment Name: At_2mM_SA_P Parameter: Tissue Value: Aerial
  misc_feature: MA Experiment 20000182 PARAMETER Experiment Name: At_2mM_SA_P Parameter: Treatment Value: 2mM SA vs. No Treatment
  misc_feature: MA Experiment ID: 20000184 Result: Down-regulated in Transcription
  misc_feature: MA Experiment 20000184 PARAMETER Experiment Name: At_Shoots__P Parameter: Age (day) Value: 7
  misc_feature: MA Experiment 20000184 PARAMETER Experiment Name: At_Shoots__P Parameter: Tissue Value: Shoots vs. Whole Plant
  misc_feature: MA Experiment ID: 20000436 Result: Up-regulated in Transcription
  misc_feature: MA Experiment 20000436 PARAMETER Experiment Name: At_Drought_P Parameter: Age (day) Value: 7
  misc_feature: MA Experiment 20000436 PARAMETER Experiment Name: At_Drought_P Parameter: Organism Value: A. thaliana
  misc_feature: MA Experiment 20000436 PARAMETER Experiment Name: At_Drought_P Parameter: Plant Line Value: WS
  misc_feature: MA Experiment 20000436 PARAMETER Experiment Name: At_Drought_P Parameter: Timepoint (hr) Value: 12
  misc_feature: MA Experiment 20000436 PARAMETER Experiment Name: At_Drought_P Parameter: Tissue Value: Whole Plant
  misc_feature: MA Experiment 20000436 PARAMETER Experiment Name: At_Drought_P Parameter: Treatment Value: Drought vs. No Drought
  misc_feature: MA Experiment ID: 20000437 Result: Up-regulated in Transcription
  misc_feature: MA Experiment 20000437 PARAMETER Experiment Name: At_Drought_P Parameter: Age (day) Value: 8
  misc_feature: MA Experiment 20000437 PARAMETER Experiment Name: At_Drought_P Parameter: Organism Value: A. thaliana
  misc_feature: MA Experiment 20000437 PARAMETER Experiment Name: At_Drought_P Parameter: Plant Line Value: WS
  misc_feature: MA Experiment 20000437 PARAMETER Experiment Name: At_Drought_P Parameter: Timepoint (hr) Value: 24
  misc_feature: MA Experiment 20000437 PARAMETER Experiment Name: At_Drought_P Parameter: Tissue Value: Whole Plant
  misc_feature: MA Experiment 20000437 PARAMETER Experiment Name: At_Drought_P Parameter: Treatment Value: Drought vs. No Drought
  misc_feature: MA Experiment ID: 20000453 Result: Up-regulated in Transcription
  misc_feature: MA Experiment 20000453 PARAMETER Experiment Name: At_100uM_ABA_P Parameter: Age (day) Value: 15
  misc_feature: MA Experiment 20000453 PARAMETER Experiment Name: At_100uM_ABA_P Parameter: Organism Value: A. thaliana
  misc_feature: MA Experiment 20000453 PARAMETER Experiment Name: At_100uM_ABA_P Parameter: Plant Line Value: WS
  misc_feature: MA Experiment 20000453 PARAMETER Experiment Name: At_100uM_ABA_P Parameter: Timepoint (hr) Value: 24
  misc_feature: MA Experiment 20000453 PARAMETER Experiment Name: At_100uM_ABA_P Parameter: Tissue Value: Aerial
  misc_feature: MA Experiment 20000453 PARAMETER Experiment Name: At_100uM_ABA_P Parameter: Treatment Value: 100uM ABA vs. No Treatment
  misc_feature: MA Experiment ID: 20001556 Result: Up-regulated in Transcription
  misc_feature: MA Experiment 20001556 PARAMETER Experiment Name: At_Drought_Soil_Dry_P Parameter: Age (day) Value: 26
  misc_feature: MA Experiment 20001556 PARAMETER Experiment Name: At_Drought_Soil_Dry_P Parameter: Organism Value: A. thaliana
  misc_feature: MA Experiment 20001556 PARAMETER Experiment Name: At_Drought_Soil_Dry_P Parameter: Plant Line Value: WS
  misc_feature: MA Experiment 20001556 PARAMETER Experiment Name: At_Drought_Soil_Dry_P Parameter: Post Timepoint (hr) Value: None
  misc_feature: MA Experiment 20001556 PARAMETER Experiment Name: At_Drought_Soil_Dry_P Parameter: Post-Treatment Value: None
  misc_feature: MA Experiment 20001556 PARAMETER Experiment Name: At_Drought_Soil_Dry_P Parameter: Timepoint (day) Value: 12
  misc_feature: MA Experiment 20001556 PARAMETER Experiment Name: At_Drought_Soil_Dry_P Parameter: Treatment Value: Drought vs. No Drought
  misc_feature: MA Experiment ID: 20001904 Result: Up-regulated in Transcription
  misc_feature: MA Experiment 20001904 PARAMETER Experiment Name: At_Drought_Reproduction_P Parameter: Age (day) Value: 37
  misc_feature: MA Experiment 20001904 PARAMETER Experiment Name: At_Drought_Reproduction_P Parameter: Organism Value: A. thaliana
  misc_feature: MA Experiment 20001904 PARAMETER Experiment Name: At_Drought_Reproduction_P Parameter: Plant Line Value: WS
  misc_feature: MA Experiment 20001904 PARAMETER Experiment Name: At_Drought_Reproduction_P Parameter: Timepoint (day) Value: 7
  misc_feature: MA Experiment 20001904 PARAMETER Experiment Name: At_Drought_Reproduction_P Parameter: Tissue Value: Rosettes
  misc_feature: MA Experiment 20001904 PARAMETER Experiment Name: At_Drought_Reproduction_P Parameter: Treatment Value: Drought vs. No Drought
  misc_feature: MA Experiment ID: 20001906 Result: Up-regulated in Transcription
  misc_feature: MA Experiment 20001906 PARAMETER Experiment Name: At_Drought_Reproduction_P Parameter: Age (day) Value: 35
  misc_feature: MA Experiment 20001906 PARAMETER Experiment Name: At_Drought_Reproduction_P Parameter: Organism Value: A. thaliana
  misc_feature: MA Experiment 20001906 PARAMETER Experiment Name: At_Drought_Reproduction_P Parameter: Plant Line Value: WS
  misc_feature: MA Experiment 20001906 PARAMETER Experiment Name: At_Drought_Reproduction_P Parameter: Timepoint (day) Value: 5
  misc_feature: MA Experiment 20001906 PARAMETER Experiment Name: At_Drought_Reproduction_P Parameter: Tissue Value: Siliques
  misc_feature: MA Experiment 20001906 PARAMETER Experiment Name: At_Drought_Reproduction_P Parameter: Treatment Value: Drought vs. No Drought
tacgtctctcacatgtcaaatccttacgatttcgatttctcctgaaaatctcaatttcaacaaaacccttaagatttttcgattttggattcccaattctcccggagttctgatgcagatcgccggagataagtaatctcgagtttactaatgccgcggcttccgtcgtctcgtcgcggtgtcgtgtggtttcgatggaagatactcatcactatctccaccgcattatgcatcctcgctctcttctgtatcaaccgtcagtctaattccactgcgacgacgacgacactgtcttcgtctctctccgtcgcgagatctcgtatccctctcgttaaatactccggcgatcgtcccaaactcgccttccttttcctcgctcgacgtgatttgccacttgattttctctgggacagattcttcaagagtgcagatcagaggaatttctcaatctatgtacattcaatacctggtttcgtattcgatgaatcatccacaagatcacatttcttctacaatcgtcaattgaagaatagcattgaggtagtttggggagaatcaagcatgattgcagcagaaagattgttgcttgcatctgctttggaagatccttctaatcaaagatttgttcttttgtctgatagctgtgttccgttatacgactttggttacatttacagatatctagtttcttcaccaaagagttttgtagacagcttccttgataaagataatcgctacactatgaaaatgtttcctgttatacggaaagaaaaatggcgaaaaggatctcagtggatatcattgatcagaagccatgcagaggtcattgttaatgatgatactgtgttccctgtttttcagaaattttgcaagcgatctctacctctggatcccagaaagaattggctatatcttaaaaagaggcgacacaactgtatccctgatgaacactacgtgcaaactctactaacaatgcgtggcttggaaaatgaaatggaacggagaacagtgacatacaccacatggaacctatcagcaaaaaaagctgaagctaaatcttggcatcctctcactttcacatctgacaattgcggaccagaggaaatagaaggaataaagaaaatcaaccatgtatattatgaatcggagtatcgaacagaatggtgcagagcgaattcaaaacccgtcccgtgctttctgtttgcgaggaagttcactagaggagccgcaatgcgtcttttgagtgaaggattaatagaatcctctatagatacaacaaccttttagat

SEQ ID NO: 102595 - protein, 378 aa, Arabidopsis thaliana
  peptide (1)..(378): Ceres Seq. ID no. 13610776
  misc_feature (108)..(216): Pfam Name: Arabidopsis protein of unknown function, DUF266 Pfam Description: Arabidopsis protein of unknown function, DUF266
  misc_feature (5)..(376): Homolog of NCBI NO: 30682534 NR Description: expressed protein [Arabidopsis thaliana] unknown protein [Arabidopsis thaliana]
  misc_feature (130)..(244): Homolog of NCBI NO: 22330381 NR Description: hypothetical protein [Arabidopsis thaliana]
  misc_feature (1)..(91): Homolog of NCBI NO: 22330381 NR Description: hypothetical protein [Arabidopsis thaliana]
  misc_feature (5)..(293): Homolog of NCBI NO: 25402693 NR Description: hypothetical protein [imported] - Arabidopsis >gi|3157941|gb|AAC17624.1| Contains similarity to hypothetical
  misc_feature (14)..(369): Homolog of NCBI NO: 15241437 NR Description: expressed protein [Arabidopsis thaliana]
  misc_feature (14)..(323): Homolog of NCBI NO: 30684956 NR Description: expressed protein [Arabidopsis thaliana]
  misc_feature (64)..(241): Homolog of NCBI NO: 34911442 NR Description: P0431H09.21 [Oryza sativa (japonica
  misc_feature (59)..(365): Homolog of NCBI NO: 38346557 NR Description: OSJNBa0035M09.18 [Oryza sativa (japonica
  misc_feature (52)..(355): Homolog of NCBI NO: 15236024 NR Description: expressed protein [Arabidopsis thaliana]
  misc_feature (69)..(355): Homolog of NCBI NO: 30680587 NR Description: expressed protein [Arabidopsis thaliana]
MPRLPSSRRGVVWFRWKILITISTALCILALFCINRQSNSTATTTTLSSSLSVARSRIPLVKYSGDRPKLAFLFLARRDLPLDFLWDRFFKSADQRNFSIYVHSIPGFVFDESSTRSHFFYNRQLKNSIEVVWGESSMIAAERLLLASALEDPSNQRFVLLSDSCVPLYDFGYIYRYLVSSPKSFVDSFLDKDNRYTMKMFPVIRKEKWRKGSQWISLIRSHAEVIVNDDTVFPVFQKFCKRSLPLDPRKNWLYLKKRRHNCIPDEHYVQTLLTMRGLENEMERRTVTYTTWNLSAKKAEAKSWHPLTFTSDNCGPEEIEGIKKINHVYYESEYRTEWCRANSKPVPCFLFARKFTRGAAMRLLSEGLIESSIDTTTF

SEQ ID NO: 102596 - protein, 241 aa, Arabidopsis thaliana
  peptide (1)..(241): Ceres Seq. ID no. 13610777
  misc_feature (1)..(79): Pfam Name: Arabidopsis protein of unknown function, DUF266 Pfam Description: Arabidopsis protein of unknown function, DUF266
  misc_feature (1)..(239): Homolog of NCBI NO: 30682534 NR Description: expressed protein [Arabidopsis thaliana] unknown protein [Arabidopsis thaliana]
  misc_feature (1)..(107): Homolog of NCBI NO: 22330381 NR Description: hypothetical protein [Arabidopsis thaliana]
  misc_feature (1)..(156): Homolog of NCBI NO: 25402693 NR Description: hypothetical protein [imported] - Arabidopsis >gi|3157941|gb|AAC17624.1| Contains similarity to hypothetical
  misc_feature (1)..(232): Homolog of NCBI NO: 15241437 NR Description: expressed protein [Arabidopsis thaliana]
  misc_feature (1)..(186): Homolog of NCBI NO: 30684956 NR Description: expressed protein [Arabidopsis thaliana]
  misc_feature (1)..(104): Homolog of NCBI NO: 34911442 NR Description: P0431H09.21 [Oryza sativa (japonica
  misc_feature (1)..(228): Homolog of NCBI NO: 38346557 NR Description: OSJNBa0035M09.18 [Oryza sativa (japonica
  misc_feature (1)..(218): Homolog of NCBI NO: 15236024 NR Description: expressed protein [Arabidopsis thaliana]
  misc_feature (1)..(218): Homolog of NCBI NO: 30680587 NR Description: expressed protein [Arabidopsis thaliana]
  misc_feature (1)..(218): Homolog of NCBI NO: 38637182 NR Description: unknown protein [Oryza sativa (japonica
MIAAERLLLASALEDPSNQRFVLLSDSCVPLYDFGYIYRYLVSSPKSFVDSFLDKDNRYTMKMFPVIRKEKWRKGSQWISLIRSHAEVIVNDDTVFPVFQKFCKRSLPLDPRKNWLYLKKRRHNCIPDEHYVQTLLTMRGLENEMERRTVTYTTWNLSAKKAEAKSWHPLTFTSDNCGPEEIEGIKKINHVYYESEYRTEWCRANSKPVPCFLFARKFTRGAAMRLLSEGLIESSIDTTTF

SEQ ID NO: 102597 - DNA, 1039 bp, Arabidopsis thaliana
  misc_feature (1)..(1039): Ceres Seq. ID no. 13610778
  misc_feature: MA Experiment ID: 20000179 Result: Down-regulated in Transcription
  misc_feature: MA Experiment 20000179 PARAMETER Experiment Name: At_Germinating_Seeds_P Parameter: Age (hr) Value: 6 vs. 0
  misc_feature: MA Experiment 20000179 PARAMETER Experiment Name: At_Germinating_Seeds_P Parameter: Tissue Value: Germinating Seeds
  misc_feature: MA Experiment ID: 20000180 Result: Down-regulated in Transcription
  misc_feature: MA Experiment 20000180 PARAMETER Experiment Name: At_Germinating_Seeds_P Parameter: Age (hr) Value: 24 vs. 0
  misc_feature: MA Experiment 20000180 PARAMETER Experiment Name: At_Germinating_Seeds_P Parameter: Tissue Value: Germinating Seeds
  misc_feature: MA Experiment ID: 20000437 Result: Down-regulated in Transcription
  misc_feature: MA Experiment 20000437 PARAMETER Experiment Name: At_Drought_P Parameter: Age (day) Value: 8
  misc_feature: MA Experiment 20000437 PARAMETER Experiment Name: At_Drought_P Parameter: Organism Value: A. thaliana
  misc_feature: MA Experiment 20000437 PARAMETER Experiment Name: At_Drought_P Parameter: Plant Line Value: WS
  misc_feature: MA Experiment 20000437 PARAMETER Experiment Name: At_Drought_P Parameter: Timepoint (hr) Value: 24
  misc_feature: MA Experiment 20000437 PARAMETER Experiment Name: At_Drought_P Parameter: Tissue Value: Whole Plant
  misc_feature: MA Experiment 20000437 PARAMETER Experiment Name: At_Drought_P Parameter: Treatment Value: Drought vs. No Drought
  misc_feature: MA Experiment ID: 20000452 Result: Down-regulated in Transcription
  misc_feature: MA Experiment 20000452 PARAMETER Experiment Name: At_CS6879_Shoots-Roots_P Parameter: Age (day) Value: 14
  misc_feature: MA Experiment 20000452 PARAMETER Experiment Name: At_CS6879_Shoots-Roots_P Parameter: Organism Value: A. thaliana
  misc_feature: MA Experiment 20000452 PARAMETER Experiment Name: At_CS6879_Shoots-Roots_P Parameter: Plant Line Value: CS6879 vs. WS
  misc_feature: MA Experiment 20000452 PARAMETER Experiment Name: At_CS6879_Shoots-Roots_P Parameter: Tissue Value: Shoots
  misc_feature: MA Experiment ID: 20000460 Result: Up-regulated in Transcription
  misc_feature: MA Experiment 20000460 PARAMETER Experiment Name: At_10percent_PEG_P Parameter: Age (day) Value: 12
  misc_feature: MA Experiment 20000460 PARAMETER Experiment Name: At_10percent_PEG_P Parameter: Organism Value: A. thaliana
  misc_feature: MA Experiment 20000460 PARAMETER Experiment Name: At_10percent_PEG_P Parameter: Plant Line Value: WS
  misc_feature: MA Experiment 20000460 PARAMETER Experiment Name: At_10percent_PEG_P Parameter: Timepoint (day) Value: 12
  misc_feature: MA Experiment 20000460 PARAMETER Experiment Name: At_10percent_PEG_P Parameter: Tissue Value: Whole Plant
  misc_feature: MA Experiment 20000460 PARAMETER Experiment Name: At_10percent_PEG_P Parameter: Treatment Value: 10percent PEG vs. No Treatment
  misc_feature: MA Experiment ID: 20000527 Result: Up-regulated in Transcription
  misc_feature: MA Experiment 20000527 PARAMETER Experiment Name: At_10percent_PEG_P Parameter: Age (day) Value: 20
  misc_feature: MA Experiment 20000527 PARAMETER Experiment Name: At_10percent_PEG_P Parameter: Organism Value: A. thaliana
  misc_feature: MA Experiment 20000527 PARAMETER Experiment Name: At_10percent_PEG_P Parameter: Plant Line Value: WS
  misc_feature: MA Experiment 20000527 PARAMETER Experiment Name: At_10percent_PEG_P Parameter: Timepoint (day) Value: 20
  misc_feature: MA Experiment 20000527 PARAMETER Experiment Name: At_10percent_PEG_P Parameter: Tissue Value: Whole Plant
  misc_feature: MA Experiment 20000527 PARAMETER Experiment Name: At_10percent_PEG_P Parameter: Treatment Value: 10percent PEG vs. No Treatment
  misc_feature: MA Experiment ID: 20000573 Result: Up-regulated in Transcription
  misc_feature: MA Experiment 20000573 PARAMETER Experiment Name: At_100uM_ABA_Mutants__P Parameter: Organism Value: A. thaliana
  misc_feature: MA Experiment 20000573 PARAMETER Experiment Name: At_100uM_ABA_Mutants__P Parameter: Plant Line Value: CS22 vs. Ler wt
  misc_feature: MA Experiment 20000573 PARAMETER Experiment Name: At_100uM_ABA_Mutants__P Parameter: Timepoint (hr) Value: N/A
  misc_feature: MA Experiment 20000573 PARAMETER Experiment Name: At_100uM_ABA_Mutants__P Parameter: Tissue Value: Whole Plant
  misc_feature: MA Experiment 20000573 PARAMETER Experiment Name: At_100uM_ABA_Mutants__P Parameter: Treatment Value: None
  misc_feature: MA Experiment ID: 20000574 Result: Up-regulated in Transcription
  misc_feature: MA Experiment 20000574 PARAMETER Experiment Name: At_100uM_ABA_Mutants__P Parameter: Organism Value: A. thaliana
  misc_feature: MA Experiment 20000574 PARAMETER Experiment Name: At_100uM_ABA_Mutants__P Parameter: Plant Line Value: CS23 vs. Ler wt
  misc_feature: MA Experiment 20000574 PARAMETER Experiment Name: At_100uM_ABA_Mutants__P Parameter: Timepoint (hr) Value: N/A
  misc_feature: MA Experiment 20000574 PARAMETER Experiment Name: At_100uM_ABA_Mutants__P Parameter: Tissue Value: Whole Plant
  misc_feature: MA Experiment 20000574 PARAMETER Experiment Name: At_100uM_ABA_Mutants__P Parameter: Treatment Value: None
  misc_feature: MA Experiment ID: 20001247 Result: Up-regulated in Transcription
  misc_feature: MA Experiment 20001247 PARAMETER Experiment Name: At_Far-red-induction_P Parameter: Age (day) Value: 7
  misc_feature: MA Experiment 20001247 PARAMETER Experiment Name: At_Far-red-induction_P Parameter: Light Value: Far-red vs. White
  misc_feature: MA Experiment 20001247 PARAMETER Experiment Name: At_Far-red-induction_P Parameter: Organism Value: A. thaliana
  misc_feature: MA Experiment 20001247 PARAMETER Experiment Name: At_Far-red-induction_P Parameter: Plant Line Value: Columbia
  misc_feature: MA Experiment 20001247 PARAMETER Experiment Name: At_Far-red-induction_P Parameter: Timepoint (hr) Value: 1
  misc_feature: MA Experiment 20001247 PARAMETER Experiment Name: At_Far-red-induction_P Parameter: Tissue Value: Whole Plant
  misc_feature: MA Experiment ID: 20001248 Result: Up-regulated in Transcription
  misc_feature: MA Experiment 20001248 PARAMETER Experiment Name: At_Far-red-induction_P Parameter: Age (day) Value: 7
  misc_feature: MA Experiment 20001248 PARAMETER Experiment Name: At_Far-red-induction_P Parameter: Light Value: Far-red vs. White
  misc_feature: MA Experiment 20001248 PARAMETER Experiment Name: At_Far-red-induction_P Parameter: Organism Value: A. thaliana
  misc_feature: MA Experiment 20001248 PARAMETER Experiment Name: At_Far-red-induction_P Parameter: Plant Line Value: Columbia
  misc_feature: MA Experiment 20001248 PARAMETER Experiment Name: At_Far-red-induction_P Parameter: Timepoint (hr) Value: 4
  misc_feature: MA Experiment 20001248 PARAMETER Experiment Name: At_Far-red-induction_P Parameter: Tissue Value: Whole Plant
  misc_feature: MA Experiment ID: 20001450 Result: Up-regulated in Transcription
  misc_feature: MA Experiment 20001450 PARAMETER Experiment Name: At_Far-red-induction_P Parameter: Age (day) Value: 7
  misc_feature: MA Experiment 20001450 PARAMETER Experiment Name: At_Far-red-induction_P Parameter: Light Value: Far-red vs. White
  misc_feature: MA Experiment 20001450 PARAMETER Experiment Name: At_Far-red-induction_P Parameter: Organism Value: A. thaliana
  misc_feature: MA Experiment 20001450 PARAMETER Experiment Name: At_Far-red-induction_P Parameter: Plant Line Value: Columbia
  misc_feature: MA Experiment 20001450 PARAMETER Experiment Name: At_Far-red-induction_P Parameter: Timepoint (hr) Value: 8
  misc_feature: MA Experiment 20001450 PARAMETER Experiment Name: At_Far-red-induction_P Parameter: Tissue Value: Whole Plant
  misc_feature: MA Experiment ID: 20001905 Result: Up-regulated in Transcription
  misc_feature: MA Experiment 20001905 PARAMETER Experiment Name: At_Drought_Reproduction_P Parameter: Age (day) Value: 40
  misc_feature: MA Experiment 20001905 PARAMETER Experiment Name: At_Drought_Reproduction_P Parameter: Organism Value: A. thaliana
  misc_feature: MA Experiment 20001905 PARAMETER Experiment Name: At_Drought_Reproduction_P Parameter: Plant Line Value: WS
  misc_feature: MA Experiment 20001905 PARAMETER Experiment Name: At_Drought_Reproduction_P Parameter: Timepoint (day) Value: 10
  misc_feature: MA Experiment 20001905 PARAMETER Experiment Name: At_Drought_Reproduction_P Parameter: Tissue Value: Rosettes
  misc_feature: MA Experiment 20001905 PARAMETER Experiment Name: At_Drought_Reproduction_P Parameter: Treatment Value: Drought vs. No Drought
gtgtatcgtcaaaaagattttatcaaaaggacaaaagaaagagatggttgagattcagggaagattcaaaagaattgagtcggctttcaacgtagccgcggctcgtgtacatccaccgtgtgataacagtagcggaagcgatcattcgccggatctttccgatttggtcgcatcttttatagagaaagagggacaaatagtattacgtgaagaagaagaaacttcttccgacgataacaatttggaagatgtgaatgagaggttacggaagcttctagaaggtttatcctgtggcgaagagcggatgagaatactgtcagcgacgatggaggttgctggaacgttcgtcggagatattagttcttctaagcgtcacttaatggcgtttctacgtaacaagggttttgatgcaggtctttgcaagtcgagttgggaaagattcggcaaaaacaccggcggaaaatacgagtacgtcgacgttcgttgtggcggagattataataatcggtatttcgtcgagacaaaccttgccggagagtttgagatagctagaccaacgaaaaggtacctctcaatactaagccaagtgccacgcgtcttcgtgggaacttcagaggaactgaaactgctcgtgagaatcatgtgccatgagatgagacggtcgatgaagcacgtagggatccacgtgccaccgtggaggagaaacggttacatgcaagctaagtggttcggtttctataaacgaacttcgacgaccaataactacgaaatggttaatacttatgatacgactgcgtttaagggttgcaaggaagagttttgggaagctaaaggtcttaaggttatggttggtcagctttcgattgctttcaacattagtgcggttgaagtgtaataataatcagaaaacaaaagagggatccttttccagtttgagctaatatgtaagctaattcttgggttttgtttgtaaatactaaaatagtgaaatttttgttgatttagttacgcagattaatacgtaaaatgtattttaaat

SEQ ID NO: 102598 - protein, 297 aa, Arabidopsis thaliana
  peptide (1)..(297): Ceres Seq. ID no. 13610779
  misc_feature (52)..(248): Pfam Name: Protein of unknown function (DUF506) Pfam Description: Protein of unknown function (DUF506)
  misc_feature (15)..(297): Homolog of NCBI NO: 7486102 NR Description: hypothetical protein F24O1.16 - Arabidopsis >gi|7940287|gb|AAF70846.1|AC003113_13 F2401.16 [Arabidopsis >gi|26450592|dbj|BAC42408.1| unknown protein [Arabidopsis
  misc_feature (15)..(295): Homolog of NCBI NO: 15220778 NR Description: expressed protein [Arabidopsis thaliana]
  misc_feature (15)..(295): Homolog of NCBI NO: 15221175 NR Description: hypothetical protein [Arabidopsis thaliana]
  misc_feature (18)..(248): Homolog of NCBI NO: 15230824 NR Description: hypothetical protein [Arabidopsis thaliana] gb|AAF02145.1~gene_id:MJL12.20~similar to unknown protein
  misc_feature (82)..(263): Homolog of NCBI NO: 18397919 NR Description: expressed protein [Arabidopsis thaliana] unknown protein [Arabidopsis thaliana] unknown protein [Arabidopsis thaliana]
  misc_feature (82)..(263): Homolog of NCBI NO: 21554332 NR Description: unknown [Arabidopsis thaliana]
  misc_feature (7)..(257): Homolog of NCBI NO: 25408622 NR Description: hypothetical protein At2g38820 [imported] -
  misc_feature (120)..(242): Homolog of NCBI NO: 34907382 NR Description: P0471B04.25 [Oryza sativa (japonica
  misc_feature (86)..(253): Homolog of NCBI NO: 34906942 NR Description: similar to Arabidopsis thaliana chromosome 3,
  misc_feature (7)..(257): Homolog of NCBI NO: 18404867 NR Description: expressed protein [Arabidopsis thaliana] Unknown protein [Arabidopsis thaliana] unknown protein [Arabidopsis thaliana]
CIVKKILSKGQKKEMVEIQGRFKRIESAFNVAAARVHPPCDNSSGSDHSPDLSDLVASFIEKEGQIVLREEEETSSDDNNLEDVNERLRKLLEGLSCGEERMRILSATMEVAGTFVGDISSSKRHLMAFLRNKGFDAGLCKSSWERFGKNTGGKYEYVDVRCGGDYNNRYFVETNLAGEFEIARPTKRYLSILSQVPRVFVGTSEELKLLVRIMCHEMRRSMKHVGIHVPPWRRNGYMQAKWFGFYKRTSTTNNYEMVNTYDTTAFKGCKEEFWEAKGLKVMVGQLSIAFNISAVEV

SEQ ID NO: 102599 - protein, 283 aa, Arabidopsis thaliana
  peptide (1)..(283): Ceres Seq. ID no. 13610780
  misc_feature (38)..(234): Pfam Name: Protein of unknown function (DUF506) Pfam Description: Protein of unknown function (DUF506)
  misc_feature (1)..(283): Homolog of NCBI NO: 7486102 NR Description: hypothetical protein F24O1.16 - Arabidopsis >gi|7940287|gb|AAF70846.1|AC003113_13 F2401.16 [Arabidopsis >gi|26450592|dbj|BAC42408.1| unknown protein [Arabidopsis
  misc_feature (1)..(281): Homolog of NCBI NO: 15220778 NR Description: expressed protein [Arabidopsis thaliana]
  misc_feature (1)..(281): Homolog of NCBI NO: 15221175 NR Description: hypothetical protein [Arabidopsis thaliana]
  misc_feature (4)..(234): Homolog of NCBI NO: 15230824 NR Description: hypothetical protein [Arabidopsis thaliana] gb|AAF02145.1~gene_id:MJL12.20~similar to unknown protein
  misc_feature (68)..(249): Homolog of NCBI NO: 18397919 NR Description: expressed protein [Arabidopsis thaliana] unknown protein [Arabidopsis thaliana] unknown protein [Arabidopsis thaliana]
  misc_feature (68)..(249): Homolog of NCBI NO: 21554332 NR Description: unknown [Arabidopsis thaliana]
  misc_feature (1)..(243): Homolog of NCBI NO: 25408622 NR Description: hypothetical protein At2g38820 [imported] -
  misc_feature (106)..(228): Homolog of NCBI NO: 34907382 NR Description: P0471B04.25 [Oryza sativa (japonica
  misc_feature (72)..(239): Homolog of NCBI NO: 34906942 NR Description: similar to Arabidopsis thaliana chromosome 3,
  misc_feature (1)..(243): Homolog of NCBI NO: 18404867 NR Description: expressed protein [Arabidopsis thaliana] Unknown protein [Arabidopsis thaliana] unknown protein [Arabidopsis thaliana]
MVEIQGRFKRIESAFNVAAARVHPPCDNSSGSDHSPDLSDLVASFIEKEGQIVLREEEETSSDDNNLEDVNERLRKLLEGLSCGEERMRILSATMEVAGTFVGDISSSKRHLMAFLRNKGFDAGLCKSSWERFGKNTGGKYEYVDVRCGGDYNNRYFVETNLAGEFEIARPTKRYLSILSQVPRVFVGTSEELKLLVRIMCHEMRRSMKHVGIHVPPWRRNGYMQAKWFGFYKRTSTTNNYEMVNTYDTTAFKGCKEEFWEAKGLKVMVGQLSIAFNISAVEV

SEQ ID NO: 102600 - protein, 196 aa, Arabidopsis thaliana
  peptide (1)..(196): Ceres Seq. ID no. 13610781
  misc_feature (1)..(147): Pfam Name: Protein of unknown function (DUF506) Pfam Description: Protein of unknown function (DUF506)
  misc_feature (1)..(196): Homolog of NCBI NO: 7486102 NR Description: hypothetical protein F24O1.16 - Arabidopsis >gi|7940287|gb|AAF70846.1|AC003113_13 F2401.16 [Arabidopsis >gi|26450592|dbj|BAC42408.1| unknown protein [Arabidopsis
  misc_feature (1)..(194): Homolog of NCBI NO: 15220778 NR Description: expressed protein [Arabidopsis thaliana]
  misc_feature (1)..(194): Homolog of NCBI NO: 15221175 NR Description: hypothetical protein [Arabidopsis thaliana]
  misc_feature (1)..(147): Homolog of NCBI NO: 15230824 NR Description: hypothetical protein [Arabidopsis thaliana] gb|AAF02145.1~gene_id:MJL12.20~similar to unknown protein
  misc_feature (1)..(162): Homolog of NCBI NO: 18397919 NR Description: expressed protein [Arabidopsis thaliana] unknown protein [Arabidopsis thaliana] unknown protein [Arabidopsis thaliana]
  misc_feature (1)..(162): Homolog of NCBI NO: 21554332 NR Description: unknown [Arabidopsis thaliana]
  misc_feature (1)..(156): Homolog of NCBI NO: 25408622 NR Description: hypothetical protein At2g38820 [imported] -
  misc_feature (19)..(141): Homolog of NCBI NO: 34907382 NR Description: P0471B04.25 [Oryza sativa (japonica
  misc_feature (1)..(152): Homolog of NCBI NO: 34906942 NR Description: similar to Arabidopsis thaliana chromosome 3,
  misc_feature (1)..(156): Homolog of NCBI NO: 18404867 NR Description: expressed protein [Arabidopsis thaliana] Unknown protein [Arabidopsis thaliana] unknown protein [Arabidopsis thaliana]
MRILSATMEVAGTFVGDISSSKRHLMAFLRNKGFDAGLCKSSWERFGKNTGGKYEYVDVRCGGDYNNRYFVETNLAGEFEIARPTKRYLSILSQVPRVFVGTSEELKLLVRIMCHEMRRSMKHVGIHVPPWRRNGYMQAKWFGFYKRTSTTNNYEMVNTYDTTAFKGCKEEFWEAKGLKVMVGQLSIAFNISAVEV

SEQ ID NO: 102601 - DNA, 1839 bp, Arabidopsis thaliana
  misc_feature (1)..(1839): Ceres Seq. ID no. 13610782
  misc_feature: MA Experiment ID: 20000173 Result: Down-regulated in Transcription
  misc_feature: MA Experiment 20000173 PARAMETER Experiment Name: At_42deg_Heat_P Parameter: Age (day) Value: 14
  misc_feature: MA Experiment 20000173 PARAMETER Experiment Name: At_42deg_Heat_P Parameter: Organism Value: A. thaliana
  misc_feature: MA Experiment 20000173 PARAMETER Experiment Name: At_42deg_Heat_P Parameter: Plant Line Value: WS
  misc_feature: MA Experiment 20000173 PARAMETER Experiment Name: At_42deg_Heat_P Parameter: Temperature (deg C) Value: 42 vs. 22
  misc_feature: MA Experiment 20000173 PARAMETER Experiment Name: At_42deg_Heat_P Parameter: Timepoint (hr) Value: 6
  misc_feature: MA Experiment 20000173 PARAMETER Experiment Name: At_42deg_Heat_P Parameter: Tissue Value: Aerial
  misc_feature: MA Experiment ID: 20000227 Result: Down-regulated in Transcription
  misc_feature: MA Experiment 20000227 PARAMETER Experiment Name: At_Root-Tips-vs-Tops_P Parameter: Tissue Value: Root Tips vs. Root Tops
  misc_feature: MA Experiment ID: 20000234 Result: Down-regulated in Transcription
  misc_feature: MA Experiment 20000234 PARAMETER Experiment Name: At_Siliques_P Parameter: Age (day) Value: 21
  misc_feature: MA Experiment 20000234 PARAMETER Experiment Name: At_Siliques_P Parameter: Organism Value: A. thaliana
  misc_feature: MA Experiment 20000234 PARAMETER Experiment Name: At_Siliques_P Parameter: Plant Line Value: WS
  misc_feature: MA Experiment 20000234 PARAMETER Experiment Name: At_Siliques_P Parameter: Tissue Value: Less Than 5mm Siliques vs. Whole Plant
  misc_feature: MA Experiment ID: 20001451 Result: Down-regulated in Transcription
  misc_feature: MA Experiment 20001451 PARAMETER Experiment Name: At_Far-red-induction_P Parameter: Age (day) Value: 7
  misc_feature: MA Experiment 20001451 PARAMETER Experiment Name: At_Far-red-induction_P Parameter: Light Value: Far-red vs. White
  misc_feature: MA Experiment 20001451 PARAMETER Experiment Name: At_Far-red-induction_P Parameter: Organism Value: A. thaliana
  misc_feature: MA Experiment 20001451 PARAMETER Experiment Name: At_Far-red-induction_P Parameter: Plant Line Value: Columbia
  misc_feature: MA Experiment 20001451 PARAMETER Experiment Name: At_Far-red-induction_P Parameter: Timepoint (hr) Value: 24
  misc_feature: MA Experiment 20001451 PARAMETER Experiment Name: At_Far-red-induction_P Parameter: Tissue Value: Whole Plant
  misc_feature: MA Experiment ID: 20001557 Result: Up-regulated in Transcription
  misc_feature: MA Experiment 20001557 PARAMETER Experiment Name: At_Drought_Soil_Dry_P Parameter: Age (day) Value: 27
  misc_feature: MA Experiment 20001557 PARAMETER Experiment Name: At_Drought_Soil_Dry_P Parameter: Organism Value: A. thaliana
  misc_feature: MA Experiment 20001557 PARAMETER Experiment Name: At_Drought_Soil_Dry_P Parameter: Plant Line Value: WS
  misc_feature: MA Experiment 20001557 PARAMETER Experiment Name: At_Drought_Soil_Dry_P Parameter: Post Timepoint (hr) Value: 3
  misc_feature: MA Experiment 20001557 PARAMETER Experiment Name: At_Drought_Soil_Dry_P Parameter: Post-Treatment Value: Re-Water vs. No Drought
  misc_feature: MA Experiment 20001557 PARAMETER Experiment Name: At_Drought_Soil_Dry_P Parameter: Timepoint (day) Value: 13
  misc_feature: MA Experiment 20001557 PARAMETER Experiment Name: At_Drought_Soil_Dry_P Parameter: Treatment Value: Drought vs. No Drought
  misc_feature: MA Experiment ID: 20001911 Result: Down-regulated in Transcription
  misc_feature: MA Experiment 20001911 PARAMETER Experiment Name: At_Drought_Reproduction_P Parameter: Age (day) Value: 40
  misc_feature: MA Experiment 20001911 PARAMETER Experiment Name: At_Drought_Reproduction_P Parameter: Organism Value: A. thaliana
  misc_feature: MA Experiment 20001911 PARAMETER Experiment Name: At_Drought_Reproduction_P Parameter: Plant Line Value: WS
  misc_feature: MA Experiment 20001911 PARAMETER Experiment Name: At_Drought_Reproduction_P Parameter: Timepoint (day) Value: 10
  misc_feature: MA Experiment 20001911 PARAMETER Experiment Name: At_Drought_Reproduction_P Parameter: Tissue Value: Flowers
  misc_feature: MA Experiment 20001911 PARAMETER Experiment Name: At_Drought_Reproduction_P Parameter: Treatment Value: Drought vs. No Drought
gaaaggggaaaaaaaaaaaaaacagattcctgatattttctgcttcgcttcgctttgctttggcctttgggtttgctttgccttttatctccacaataataatattcgttaacctctcctcgttctcgtcgctgtttcttcccgatctttgctatagttctggattcaaaatctttcttccccaatagatgtttgtctcttaatttttgatttttctgcaaaatcaaatttttaagagctatggaggaagagaatgttactagttcaccttcaacaccggtacataggcttaggcatcgaagacgttctaatgaggttgttacggatggggataaagtgaatgcaagtcctttgttggttaatgatcggaataagtacaaatctttcatggtccggacctactctacgttatggatgattggtggttttgttttggttgtctacatgggtcatctttatatcacagctatggttgttgttattcaaatatttatggctaaagagttgtttaatctgctgaggaaagctcctgaggataaatgtctcccctatattaaacagctcaattggcacttctttttcactgccatgcttttcgtttatggacggatccttagtcaacggttagccaataccatgactgcagatcagttcttctatcggctagtcagcggcttaatcaaataccatatggcaatctgttacttgttgtatattataggtttcatgtggttcattctcacattaaagaagaagatgtacaagtaccagtttggccagtatgcttggacccacatgatcttgatagtcgtgtttactcaatcgtcgttcactgttgccaacatatttgaagggatcttctggtttcttctcccagcatctttaattataatcaacgacatcttcgcctacattttcggtttcttctttggaagaacgcctttaataaagctgtctccaaagaaaacatgggagggattcatcggagcctctgtgacaactatcatctctgcatttgttctggcaaatattttgggtcgtttcccttggttgacatgcccacgacaggatttgtccactggctggctacagtgtgacgctgatccattgttcaaacctgaaccttttgctttacctgcatggattccagaatggtttccttggaaggaaatgacgatcctccctgttcagtggcatgctttatgcctcggtttgttcgcttcaatcatagcaccttttggaggatttttcgctagcggtttcaaaagagcattcaaaattaaggactttggtgatagtattccaggacatggtggaatcacagatagaatggactgccagatggttatggcagtatttgcctacatatatcttcaatcatttattgtctcccaaagcgtttcggttgacaaaatcctagaccagatattgacgaaccttacctttgaggaacaacaagcgctcttcgtgaagttaggacaaatgctgaaggacaagctctcataggctccattgccaaaagtttcttttattcagattctgattctccaagaacaggttcctctggaatatccttttatctttgtccttactagagacaataaatttaaaattggattaagatttgttgtttcctgccattgtaaatcctctcgaaatttgtcgaaaaaaatagaagtttttttttttaagtcttctcattggatacaaaaggtttgaaggaagttgtatctactactatctacttatttagtagctttggtggtttttagctgtattttgtatattggttaaaatgaaacaacatttggtttgtttgtctcatgattcgatttgttc

SEQ ID NO: 102602 - protein, 421 aa, Arabidopsis thaliana; identical to SEQ ID NO: 23228
  peptide (1)..(421): Ceres Seq. ID no. 13610783
  misc_feature (1)..(421): Homolog of NCBI NO: 30696710 NR Description: phosphatidate cytidylyltransferase (CDS) thaliana] >gi|3121836|sp|O04928|CDS1_ARATH Phosphatidate
  misc_feature (1)..(421): Homolog of NCBI NO: 7484839 NR Description: CDP-diacylglycerol synthetase homolog F24O1.17 -
  misc_feature (1)..(420): Homolog of NCBI NO: 15235611 NR Description: phosphatidate cytidylyltransferase, putative
  misc_feature (1)..(419): Homolog of NCBI NO: 3121837 NR Description: Phosphatidate cytidylyltransferase
  misc_feature (5)..(416): Homolog of NCBI NO: 20303635 NR Description: putative CDP-diacylglycerol synthetase [Oryza
  misc_feature (9)..(420): Homolog of NCBI NO: 15236874 NR Description: phosphatidate cytidylyltransferase, putative
  misc_feature (5)..(132): Homolog of NCBI NO: 37532798 NR Description: putative phosphatidate cytidylyltransferase
  misc_feature (277)..(367): Homolog of NCBI NO: 37532798 NR Description: putative phosphatidate cytidylyltransferase
  misc_feature (385)..(416): Homolog of NCBI NO: 37532798 NR Description: putative phosphatidate cytidylyltransferase
  misc_feature (31)..(416): Homolog of NCBI NO: 40743157 NR Description: hypothetical protein AN5166.2 [Aspergillus

SEQ ID NO: 102603 - protein, 372 aa, Arabidopsis thaliana; identical to SEQ ID NO: 23229
  peptide (1)..(372): Ceres Seq. ID no. 13610784
  misc_feature (1)..(372): Homolog of NCBI NO: 30696710 NR Description: phosphatidate cytidylyltransferase (CDS) thaliana] >gi|3121836|sp|O04928|CDS1_ARATH Phosphatidate
  misc_feature (1)..(372): Homolog of NCBI NO: 7484839 NR Description: CDP-diacylglycerol synthetase homolog F24O1.17 -
  misc_feature (1)..(371): Homolog of NCBI NO: 15235611 NR Description: phosphatidate cytidylyltransferase, putative
  misc_feature (1)..(370): Homolog of NCBI NO: 3121837 NR Description: Phosphatidate cytidylyltransferase
  misc_feature (1)..(367): Homolog of NCBI NO: 20303635 NR Description: putative CDP-diacylglycerol synthetase [Oryza
  misc_feature (1)..(371): Homolog of NCBI NO: 15236874 NR Description: phosphatidate cytidylyltransferase, putative
  misc_feature (1)..(83): Homolog of NCBI NO: 37532798 NR Description: putative phosphatidate cytidylyltransferase
  misc_feature (228)..(318): Homolog of NCBI NO: 37532798 NR Description: putative phosphatidate cytidylyltransferase
  misc_feature (336)..(367): Homolog of NCBI NO: 37532798 NR Description: putative phosphatidate cytidylyltransferase
  misc_feature (1)..(367): Homolog of NCBI NO: 40743157 NR Description: hypothetical protein AN5166.2 [Aspergillus

SEQ ID NO: 102604 - protein, 363 aa, Arabidopsis thaliana; identical to SEQ ID NO: 23230
  peptide (1)..(363): Ceres Seq. ID no. 13610785
  misc_feature (1)..(363): Homolog of NCBI NO: 30696710 NR Description: phosphatidate cytidylyltransferase (CDS) thaliana] >gi|3121836|sp|O04928|CDS1_ARATH Phosphatidate
  misc_feature (1)..(363): Homolog of NCBI NO: 7484839 NR Description: CDP-diacylglycerol synthetase homolog F24O1.17 -
  misc_feature (1)..(362): Homolog of NCBI NO: 15235611 NR Description: phosphatidate cytidylyltransferase, putative
  misc_feature (1)..(361): Homolog of NCBI NO: 3121837 NR Description: Phosphatidate cytidylyltransferase
  misc_feature (1)..(358): Homolog of NCBI NO: 20303635 NR Description: putative CDP-diacylglycerol synthetase [Oryza
  misc_feature (1)..(362): Homolog of NCBI NO: 15236874 NR Description: phosphatidate cytidylyltransferase, putative
  misc_feature (1)..(74): Homolog of NCBI NO: 37532798 NR Description: putative phosphatidate cytidylyltransferase
  misc_feature (219)..(309): Homolog of NCBI NO: 37532798 NR Description: putative phosphatidate cytidylyltransferase
  misc_feature (327)..(358): Homolog of NCBI NO: 37532798 NR Description: putative phosphatidate cytidylyltransferase
  misc_feature (1)..(358): Homolog of NCBI NO: 40743157 NR Description: hypothetical protein AN5166.2 [Aspergillus

SEQ ID NO: 102605 - DNA, 846 bp, Arabidopsis thaliana
  misc_feature (1)..(846): Ceres Seq. ID no. 13610800
  misc_feature: MA Experiment ID: 20000179 Result: Down-regulated in Transcription
  misc_feature: MA Experiment 20000179 PARAMETER Experiment Name: At_Germinating_Seeds_P Parameter: Age (hr) Value: 6 vs. 0
  misc_feature: MA Experiment 20000179 PARAMETER Experiment Name: At_Germinating_Seeds_P Parameter: Tissue Value: Germinating Seeds
  misc_feature: MA Experiment ID: 20000180 Result: Up-regulated in Transcription
  misc_feature: MA Experiment 20000180 PARAMETER Experiment Name: At_Germinating_Seeds_P Parameter: Age (hr) Value: 24 vs. 0
  misc_feature: MA Experiment 20000180 PARAMETER Experiment Name: At_Germinating_Seeds_P Parameter: Tissue Value: Germinating Seeds
  misc_feature: MA Experiment ID: 20000185 Result: Up-regulated in Transcription
  misc_feature: MA Experiment 20000185 PARAMETER Experiment Name: At_Roots__P Parameter: Age (day) Value: 7 vs. 21
  misc_feature: MA Experiment 20000185 PARAMETER Experiment Name: At_Roots__P Parameter: Organism Value: A. thaliana
  misc_feature: MA Experiment 20000185 PARAMETER Experiment Name: At_Roots__P Parameter: Tissue Value: Roots vs. Whole Plant
  misc_feature: MA Experiment ID: 20000234 Result: Down-regulated in Transcription
  misc_feature: MA Experiment 20000234 PARAMETER Experiment Name: At_Siliques_P Parameter: Age (day) Value: 21
  misc_feature: MA Experiment 20000234 PARAMETER Experiment Name: At_Siliques_P Parameter: Organism Value: A. thaliana
  misc_feature: MA Experiment 20000234 PARAMETER Experiment Name: At_Siliques_P Parameter: Plant Line Value: WS
  misc_feature: MA Experiment 20000234 PARAMETER Experiment Name: At_Siliques_P Parameter: Tissue Value: Less Than 5mm Siliques vs. Whole Plant
  misc_feature: MA Experiment ID: 20000265 Result: Down-regulated in Transcription
  misc_feature: MA Experiment 20000265 PARAMETER Experiment Name: At_Open_Flower_P Parameter: Age (day) Value: 21
  misc_feature: MA Experiment 20000265 PARAMETER Experiment Name: At_Open_Flower_P Parameter: Plant Line Value: WS
  misc_feature: MA Experiment 20000265 PARAMETER Experiment Name: At_Open_Flower_P Parameter: Tissue Value: Closed Flower vs. Whole Plant
  misc_feature: MA Experiment ID: 20000439 Result: Up-regulated in Transcription
  misc_feature: MA Experiment 20000439 PARAMETER Experiment Name: At_Roots__P Parameter: Age (day) Value: 14 vs. 21
  misc_feature: MA Experiment 20000439 PARAMETER Experiment Name: At_Roots__P Parameter: Organism Value: A. thaliana
  misc_feature: MA Experiment 20000439 PARAMETER Experiment Name: At_Roots__P Parameter: Tissue Value: Roots vs. Whole Plant
  misc_feature: MA Experiment ID: 20000445 Result: Up-regulated in Transcription
  misc_feature: MA Experiment 20000445 PARAMETER Experiment Name: At_100uM_NAA__P Parameter: Age (day) Value: 14
  misc_feature: MA Experiment 20000445 PARAMETER Experiment Name: At_100uM_NAA__P Parameter: Organism Value: A. thaliana
  misc_feature: MA Experiment 20000445 PARAMETER Experiment Name: At_100uM_NAA__P Parameter: Plant Line Value: WS
  misc_feature: MA Experiment 20000445 PARAMETER Experiment Name: At_100uM_NAA__P Parameter: Timepoint (hr) Value: 6
  misc_feature: MA Experiment 20000445 PARAMETER Experiment Name: At_100uM_NAA__P Parameter: Tissue Value: Aerial
  misc_feature: MA Experiment 20000445 PARAMETER Experiment Name: At_100uM_NAA__P Parameter: Treatment Value: 100uM NAA vs. No Treatment
  misc_feature: MA Experiment ID: 20000527 Result: Down-regulated in Transcription
  misc_feature: MA Experiment 20000527 PARAMETER Experiment Name: At_10percent_PEG_P Parameter: Age (day) Value: 20
  misc_feature: MA Experiment 20000527 PARAMETER Experiment Name: At_10percent_PEG_P Parameter: Organism Value: A. thaliana
  misc_feature: MA Experiment 20000527 PARAMETER Experiment Name: At_10percent_PEG_P Parameter: Plant Line Value: WS
  misc_feature: MA Experiment 20000527 PARAMETER Experiment Name: At_10percent_PEG_P Parameter: Timepoint (day) Value: 20
  misc_feature: MA Experiment 20000527 PARAMETER Experiment Name: At_10percent_PEG_P Parameter: Tissue Value: Whole Plant
  misc_feature: MA Experiment 20000527 PARAMETER Experiment Name: At_10percent_PEG_P Parameter: Treatment Value: 10percent PEG vs. No Treatment
  misc_feature: MA Experiment ID: 20000573 Result: Down-regulated in Transcription
  misc_feature: MA Experiment 20000573 PARAMETER Experiment Name: At_100uM_ABA_Mutants__P Parameter: Organism Value: A. thaliana
  misc_feature: MA Experiment 20000573 PARAMETER Experiment Name: At_100uM_ABA_Mutants__P Parameter: Plant Line Value: CS22 vs. Ler wt
  misc_feature: MA Experiment 20000573 PARAMETER Experiment Name: At_100uM_ABA_Mutants__P Parameter: Timepoint (hr) Value: N/A
  misc_feature: MA Experiment 20000573 PARAMETER Experiment Name: At_100uM_ABA_Mutants__P Parameter: Tissue Value: Whole Plant
  misc_feature: MA Experiment 20000573 PARAMETER Experiment Name: At_100uM_ABA_Mutants__P Parameter: Treatment Value: None
  misc_feature: MA Experiment ID: 20000574 Result: Down-regulated in Transcription
  misc_feature: MA Experiment 20000574 PARAMETER Experiment Name: At_100uM_ABA_Mutants__P Parameter: Organism Value: A. thaliana
  misc_feature: MA Experiment 20000574 PARAMETER Experiment Name: At_100uM_ABA_Mutants__P Parameter: Plant Line Value: CS23 vs. Ler wt
  misc_feature: MA Experiment 20000574 PARAMETER Experiment Name: At_100uM_ABA_Mutants__P Parameter: Timepoint (hr) Value: N/A
  misc_feature: MA Experiment 20000574 PARAMETER Experiment Name: At_100uM_ABA_Mutants__P Parameter: Tissue Value: Whole Plant
  misc_feature: MA Experiment 20000574 PARAMETER Experiment Name: At_100uM_ABA_Mutants__P Parameter: Treatment Value: None
  misc_feature: MA Experiment ID: 20000794 Result: Down-regulated in Transcription
  misc_feature: MA Experiment 20000794 PARAMETER Experiment Name: At_Petals_P Parameter: Age (day) Value: 23-25 days
  misc_feature: MA Experiment 20000794 PARAMETER Experiment Name: At_Petals_P Parameter: Plant Line Value: WS
  misc_feature: MA Experiment 20000794 PARAMETER Experiment Name: At_Petals_P Parameter: Tissue Value: Petals vs. Whole plant
  misc_feature: MA Experiment ID: 20001248 Result: Up-regulated in Transcription
  misc_feature: MA Experiment 20001248 PARAMETER Experiment Name: At_Far-red-induction_P Parameter: Age (day) Value: 7
  misc_feature: MA Experiment 20001248 PARAMETER Experiment Name: At_Far-red-induction_P Parameter: Light Value: Far-red vs. White
  misc_feature: MA Experiment 20001248 PARAMETER Experiment Name: At_Far-red-induction_P Parameter: Organism Value: A. thaliana
  misc_feature: MA Experiment 20001248 PARAMETER Experiment Name: At_Far-red-induction_P Parameter: Plant Line Value: Columbia
  misc_feature: MA Experiment 20001248 PARAMETER Experiment Name: At_Far-red-induction_P Parameter: Timepoint (hr) Value: 4
  misc_feature: MA Experiment 20001248 PARAMETER Experiment Name: At_Far-red-induction_P Parameter: Tissue Value: Whole Plant
  misc_feature: MA Experiment ID: 20001450 Result: Up-regulated in Transcription
  misc_feature: MA Experiment 20001450 PARAMETER Experiment Name: At_Far-red-induction_P Parameter: Age (day) Value: 7
  misc_feature: MA Experiment 20001450 PARAMETER Experiment Name: At_Far-red-induction_P Parameter: Light Value: Far-red vs. White
  misc_feature: MA Experiment 20001450 PARAMETER Experiment Name: At_Far-red-induction_P Parameter: Organism Value: A. thaliana
  misc_feature: MA Experiment 20001450 PARAMETER Experiment Name: At_Far-red-induction_P Parameter: Plant Line Value: Columbia
  misc_feature: MA Experiment 20001450 PARAMETER Experiment Name: At_Far-red-induction_P Parameter: Timepoint (hr) Value: 8
  misc_feature: MA Experiment 20001450 PARAMETER Experiment Name: At_Far-red-induction_P Parameter: Tissue Value: Whole Plant
  misc_feature: MA Experiment ID: 20001770 Result: Up-regulated in Transcription
  misc_feature: MA Experiment 20001770 PARAMETER Experiment Name: At_Far-red-enriched-adult_P Parameter: Age (day) Value: 28
  misc_feature: MA Experiment 20001770 PARAMETER Experiment Name: At_Far-red-enriched-adult_P Parameter: Light Value: Far-red enriched vs. White
  misc_feature: MA Experiment 20001770 PARAMETER Experiment Name: At_Far-red-enriched-adult_P Parameter: Organism Value: A. thaliana
  misc_feature: MA Experiment 20001770 PARAMETER Experiment Name: At_Far-red-enriched-adult_P Parameter: Plant Line Value: Columbia
  misc_feature: MA Experiment 20001770 PARAMETER Experiment Name: At_Far-red-enriched-adult_P Parameter: Timepoint (hr) Value: 8
  misc_feature: MA Experiment 20001770 PARAMETER Experiment Name: At_Far-red-enriched-adult_P Parameter: Tissue Value: Aerial
  misc_feature: MA Experiment ID: 20001771 Result: Up-regulated in Transcription
  misc_feature: MA Experiment 20001771 PARAMETER Experiment Name: At_Far-red-enriched-adult_P Parameter: Age (day) Value: 28
  misc_feature: MA Experiment 20001771 PARAMETER Experiment Name: At_Far-red-enriched-adult_P Parameter: Light Value: Far-red enriched vs. White
  misc_feature: MA Experiment 20001771 PARAMETER Experiment Name: At_Far-red-enriched-adult_P Parameter: Organism Value: A. thaliana
  misc_feature: MA Experiment 20001771 PARAMETER Experiment Name: At_Far-red-enriched-adult_P Parameter: Plant Line Value: Columbia
  misc_feature: MA Experiment 20001771 PARAMETER Experiment Name: At_Far-red-enriched-adult_P Parameter: Timepoint (hr) Value: 16
  misc_feature: MA Experiment 20001771 PARAMETER Experiment Name: At_Far-red-enriched-adult_P Parameter: Tissue Value: Aerial
  misc_feature: MA Experiment ID: 20001904 Result: Up-regulated in Transcription
  misc_feature: MA Experiment 20001904 PARAMETER Experiment Name: At_Drought_Reproduction_P Parameter: Age (day) Value: 37
  misc_feature: MA Experiment 20001904 PARAMETER Experiment Name: At_Drought_Reproduction_P Parameter: Organism Value: A. thaliana
  misc_feature: MA Experiment 20001904 PARAMETER Experiment Name: At_Drought_Reproduction_P Parameter: Plant Line Value: WS
  misc_feature: MA Experiment 20001904 PARAMETER Experiment Name: At_Drought_Reproduction_P Parameter: Timepoint (day) Value: 7
  misc_feature: MA Experiment 20001904 PARAMETER Experiment Name: At_Drought_Reproduction_P Parameter: Tissue Value: Rosettes
  misc_feature: MA Experiment 20001904 PARAMETER Experiment Name: At_Drought_Reproduction_P Parameter: Treatment Value: Drought vs. No Drought
attttagaaaaaataaacaaacaaacaaaccaaaacaccatggagcttaaaaatacaatctttctagtcatacttctatcaataaccattctccaatcttcatctgcaaccccaaaccggtcggaatcagaccagtttattgtgtcttcatgccaaaccacccaatatccatcactatgcgtgcacacactctctgcttacgccaccaagatccgccacaacaatgaccaagatctcgcccagactgctctcatcatcagcttggctcgagccaaatccgttactatcttcgtcgccaaactaaccaaagagacaccaaaatttaaacgtagggaatatctagcaatcaaagattgcatcgaagtgctaggcaatagcgtggaccggttagctcaatcggttaaggaacttgctcgagctggtcatgctgtggctagtgaggacttcatgtggaaaatgagtaacgttcaaacatgggtcagtgccgctttgacggacgagacaacgtgtctagatggattctcagaacgagccatgggaggcaaagtcaaaagactgattcggtataaggtggttcacgtggctcaagtcactagcaatgctcttgctttggttaatcagtttgcagagaagcgaagtgtgaagtttccttaaatggacttaaatgtgaaaattttggcttgtaagtgagagtttgaatctaaacttcaattagttgtgtaaattgttatctttttttttcgtcggtcggaaagtaaactcaagattgtgtaacaatctttgttgtgtcctgtataatattgtattttaagataatgatatatagtcaccttttttgggtgtaaa

SEQ ID NO: 102606 - protein, 217 aa, Arabidopsis thaliana
  peptide (1)..(217): Ceres Seq. ID no. 13610801
  misc_feature (14)..(217): Homolog of NCBI NO: 18407657 NR Description: pectinesterase family [Arabidopsis thaliana]
  misc_feature (14)..(217): Homolog of NCBI NO: 21618013 NR Description: putative ripening-related protein [Arabidopsis
  misc_feature (20)..(211): Homolog of NCBI NO: 15234547 NR Description: pectinesterase - related [Arabidopsis thaliana]
  misc_feature (20)..(211): Homolog of NCBI NO: 21555297 NR Description: unknown [Arabidopsis thaliana]
  misc_feature (22)..(211): Homolog of NCBI NO: 7406663 NR Description: putative ripening-related protein [Vitis vinifera]
  misc_feature (14)..(211): Homolog of NCBI NO: 112717 NR Description: 21 KD PROTEIN PRECURSOR (1.2 PROTEIN)
  misc_feature (19)..(210): Homolog of NCBI NO: 15241799 NR Description: pectinesterase family [Arabidopsis thaliana]
  misc_feature (19)..(210): Homolog of NCBI NO: 21618088 NR Description: ripening-related protein-like [Arabidopsis
  misc_feature (19)..(211): Homolog of NCBI NO: 7488727 NR Description: 21K protein precursor - alfalfa
  misc_feature (15)..(211): Homolog of NCBI NO: 15234982 NR Description: pectinesterase - related [Arabidopsis thaliana]
ILEKINKQTNQNTMELKNTIFLVILLSITILQSSSATPNRSESDQFIVSSCQTTQYPSLCVHTLSAYATKIRHNNDQDLAQTALIISLARAKSVTIFVAKLTKETPKFKRREYLAIKDCIEVLGNSVDRLAQSVKELARAGHAVASEDFMWKMSNVQTWVSAALTDETTCLDGFSERAMGGKVKRLIRYKVVHVAQVTSNALALVNQFAEKRSVKFP

SEQ ID NO: 102607 - protein, 204 aa, Arabidopsis thaliana
  peptide (1)..(204): Ceres Seq. ID no. 13610802
  misc_feature (1)..(204): Homolog of NCBI NO: 18407657 NR Description: pectinesterase family [Arabidopsis thaliana]
  misc_feature (1)..(204): Homolog of NCBI NO: 21618013 NR Description: putative ripening-related protein [Arabidopsis
  misc_feature (7)..(198): Homolog of NCBI NO: 15234547 NR Description: pectinesterase - related [Arabidopsis thaliana]
  misc_feature (7)..(198): Homolog of NCBI NO: 21555297 NR Description: unknown [Arabidopsis thaliana]
  misc_feature (9)..(198): Homolog of NCBI NO: 7406663 NR Description: putative ripening-related protein [Vitis vinifera]
  misc_feature (1)..(198): Homolog of NCBI NO: 112717 NR Description: 21 KD PROTEIN PRECURSOR (1.2 PROTEIN)
  misc_feature (6)..(197): Homolog of NCBI NO: 15241799 NR Description: pectinesterase family [Arabidopsis thaliana]
  misc_feature (6)..(197): Homolog of NCBI NO: 21618088 NR Description: ripening-related protein-like [Arabidopsis
  misc_feature (6)..(198): Homolog of NCBI NO: 7488727 NR Description: 21K protein precursor - alfalfa
  misc_feature (2)..(198): Homolog of NCBI NO: 15234982 NR Description: pectinesterase - related [Arabidopsis thaliana]
MELKNTIFLVILLSITILQSSSATPNRSESDQFIVSSCQTTQYPSLCVHTLSAYATKIRHNNDQDLAQTALIISLARAKSVTIFVAKLTKETPKFKRREYLAIKDCIEVLGNSVDRLAQSVKELARAGHAVASEDFMWKMSNVQTWVSAALTDETTCLDGFSERAMGGKVKRLIRYKVVHVAQVTSNALALVNQFAEKRSVKFP

SEQ ID NO: 102608 - DNA, 923 bp, Arabidopsis thaliana
  misc_feature (1)..(923): Ceres Seq. ID no. 13610803
  misc_feature: MA Experiment ID: 20001248 Result: Down-regulated in Transcription
  misc_feature: MA Experiment 20001248 PARAMETER Experiment Name: At_Far-red-induction_P Parameter: Age (day) Value: 7
  misc_feature: MA Experiment 20001248 PARAMETER Experiment Name: At_Far-red-induction_P Parameter: Light Value: Far-red vs. White
  misc_feature: MA Experiment 20001248 PARAMETER Experiment Name: At_Far-red-induction_P Parameter: Organism Value: A. thaliana
  misc_feature: MA Experiment 20001248 PARAMETER Experiment Name: At_Far-red-induction_P Parameter: Plant Line Value: Columbia
  misc_feature: MA Experiment 20001248 PARAMETER Experiment Name: At_Far-red-induction_P Parameter: Timepoint (hr) Value: 4
  misc_feature: MA Experiment 20001248 PARAMETER Experiment Name: At_Far-red-induction_P Parameter: Tissue Value: Whole Plant
agtgccgagaaagataaacaaaatggcggcaatcagaacgatgacgaacatgattctacgcgagttcatccatcatccacttctccttcactcttcatcgaaatcgtgtcaatctcttttaccatgtctccgtctcactcccctaatttctccaattcactctaattcccggctcgtatccgtccgatgtgcggcatcgacctccggtggaagcggtggtgatcggaaagtctcttcacggttgtcgcaggtgcaacagatgcttcatgaagccgaagagagagctagttccgctggcaatgagcctactcctcaaatcactctagacaatgttacacttaactttgctagaagtggtggtcctggaggccagaatgtgaacaaattgaataccaaagtagatatgcgcttcaatgttaagaacgcgtattggctgagtgacaggatcagagagaaaatcttactgacggagaagaatcggatcaacaaggatggtgaacttgtgatatcttctaccaaaaccagaacgcagaaaggtaacatcgacgatgcacttgaaaaactacaggcgataattgatgcggcttcatatgttccacctccaccatcagaagaacaaaagaagaaaatagtaaagctcgctgcgaaagctgacaataaacgacttaaaagcaaaaaagttctgtcagacaagaaatctgcgagaagaagccgcggtagttacgatgattaaacttaaaaccatacaatggagtccaggttgattctaaagcttttaacttaaaatgattgttattttcttggaatttaatgtaacacaacaatcaaatcatccaataaaaatttgcagtatattggattttatgtacaaaccactcttatacaaattatgaacaaaaaaagtatcaaacataacattcctc

SEQ ID NO: 102609 - protein, 243 aa, Arabidopsis thaliana
  peptide (1)..(243): Ceres Seq. ID no. 13610804
  misc_feature (8)..(243): Homolog of NCBI NO: 27754314 NR Description: unknown protein [Arabidopsis thaliana]
  misc_feature (135)..(243): Homolog of NCBI NO: 15221608 NR Description: expressed protein [Arabidopsis thaliana]
  misc_feature (8)..(108): Homolog of NCBI NO: 22330386 NR Description: expressed protein [Arabidopsis thaliana]
  misc_feature (109)..(177): Homolog of NCBI NO: 6630453 NR Description: F23N19.20 [Arabidopsis thaliana]
  misc_feature (214)..(243): Homolog of NCBI NO: 6630453 NR Description: F23N19.20 [Arabidopsis thaliana]
  misc_feature (85)..(236): Homolog of NCBI NO: 19387848 NR Description: immature colon carcinoma transcript 1 [Mus >gi|12833706|dbj|BAB22632.1| unnamed protein product [Mus
  misc_feature (101)..(236): Homolog of NCBI NO: 27690532 NR Description: similar to immature colon carcinoma transcript 1
  misc_feature (106)..(236): Homolog of NCBI NO: 12833859 NR Description: unnamed protein product [Mus musculus]
  misc_feature (106)..(236): Homolog of NCBI NO: 20306641 NR Description: Ict1 protein [Mus musculus]
  misc_feature (94)..(236): Homolog of NCBI NO: 4557657 NR Description: immature colon carcinoma transcript 1 [Homo >gi|6015033|sp|Q14197|ICT1_HUMAN Immature colon carcinoma
VPRKINKMAAIRTMTNMILREFIHHPLLLHSSSKSCQSLLPCLRLTPLISPIHSNSRLVSVRCAASTSGGSGGDRKVSSRLSQVQQMLHEAEERASSAGNEPTPQITLDNVTLNFARSGGPGGQNVNKLNTKVDMRFNVKNAYWLSDRIREKILLTEKNRINKDGELVISSTKTRTQKGNIDDALEKLQAIIDAASYVPPPPSEEQKKKIVKLAAKADNKRLKSKKVLSDKKSARRSRGSYDD

SEQ ID NO: 102610 - protein, 236 aa, Arabidopsis thaliana; identical to SEQ ID NO: 26577
  peptide (1)..(236): Ceres Seq. ID no. 13610805
  misc_feature (1)..(236): Homolog of NCBI NO: 27754314 NR Description: unknown protein [Arabidopsis thaliana]
  misc_feature (128)..(236): Homolog of NCBI NO: 15221608 NR Description: expressed protein [Arabidopsis thaliana]
  misc_feature (1)..(101): Homolog of NCBI NO: 22330386 NR Description: expressed protein [Arabidopsis thaliana]
  misc_feature (102)..(170): Homolog of NCBI NO: 6630453 NR Description: F23N19.20 [Arabidopsis thaliana]
  misc_feature (207)..(236): Homolog of NCBI NO: 6630453 NR Description: F23N19.20 [Arabidopsis thaliana]
  misc_feature (78)..(229): Homolog of NCBI NO: 19387848 NR Description: immature colon carcinoma transcript 1 [Mus >gi|12833706|dbj|BAB22632.1| unnamed protein product [Mus
  misc_feature (94)..(229): Homolog of NCBI NO: 27690532 NR Description: similar to immature colon carcinoma transcript 1
  misc_feature (99)..(229): Homolog of NCBI NO: 12833859 NR Description: unnamed protein product [Mus musculus]
  misc_feature (99)..(229): Homolog of NCBI NO: 20306641 NR Description: Ict1 protein [Mus musculus]
  misc_feature (87)..(229): Homolog of NCBI NO: 4557657 NR Description: immature colon carcinoma transcript 1 [Homo >gi|6015033|sp|Q14197|ICT1_HUMAN Immature colon carcinoma

SEQ ID NO: 102611 - protein, 230 aa, Arabidopsis thaliana; identical to SEQ ID NO: 26578
  peptide (1)..(230): Ceres Seq. ID no. 13610806
  misc_feature (1)..(230): Homolog of NCBI NO: 27754314 NR Description: unknown protein [Arabidopsis thaliana]
  misc_feature (122)..(230): Homolog of NCBI NO: 15221608 NR Description: expressed protein [Arabidopsis thaliana]
  misc_feature (1)..(95): Homolog of NCBI NO: 22330386 NR Description: expressed protein [Arabidopsis thaliana]
  misc_feature (96)..(164): Homolog of NCBI NO: 6630453 NR Description: F23N19.20 [Arabidopsis thaliana]
  misc_feature (201)..(230): Homolog of NCBI NO: 6630453 NR Description: F23N19.20 [Arabidopsis thaliana]
  misc_feature (72)..(223): Homolog of NCBI NO: 19387848 NR Description: immature colon carcinoma transcript 1 [Mus >gi|12833706|dbj|BAB22632.1| unnamed protein product [Mus
  misc_feature (88)..(223): Homolog of NCBI NO: 27690532 NR Description: similar to immature colon carcinoma transcript 1
  misc_feature (93)..(223): Homolog of NCBI NO: 12833859 NR Description: unnamed protein product [Mus musculus]
  misc_feature (93)..(223): Homolog of NCBI NO: 20306641 NR Description: Ict1 protein [Mus musculus]
  misc_feature (81)..(223): Homolog of NCBI NO: 4557657 NR Description: immature colon carcinoma transcript 1 [Homo >gi|6015033|sp|Q14197|ICT1_HUMAN Immature colon carcinoma

SEQ ID NO: 102612 - DNA, 881 bp, Arabidopsis thaliana
  misc_feature (1)..(881): Ceres Seq. ID no. 13610810
  misc_feature: MA Experiment ID: 108464 Result: Down-regulated in Transcription
  misc_feature: MA Experiment 108464 PARAMETER Experiment Name: At_Germinating_Seeds_cDNA_P Parameter: Age (day) Value: 4 vs. 0
  misc_feature: MA Experiment 108464 PARAMETER Experiment Name: At_Germinating_Seeds_cDNA_P Parameter: Tissue Value: Germinating Seeds
  misc_feature: MA Experiment ID: 108488 Result: Down-regulated in Transcription
  misc_feature: MA Experiment ID: 108576 Result: Up-regulated in Transcription
  misc_feature: MA Experiment 108576 PARAMETER Experiment Name: At_42deg_Heat_cDNA_P Parameter: Temperature (deg C) Value: 42 vs. 22
  misc_feature: MA Experiment 108576 PARAMETER Experiment Name: At_42deg_Heat_cDNA_P Parameter: Timepoint (hr) Value: 1
  misc_feature: MA Experiment 108576 PARAMETER Experiment Name: At_42deg_Heat_cDNA_P Parameter: Tissue Value: Aerial
  misc_feature: MA Experiment ID: 108577 Result: Up-regulated in Transcription
  misc_feature: MA Experiment 108577 PARAMETER Experiment Name: At_42deg_Heat_cDNA_P Parameter: Temperature (deg C) Value: 42 vs. 22
  misc_feature: MA Experiment 108577 PARAMETER Experiment Name: At_42deg_Heat_cDNA_P Parameter: Timepoint (hr) Value: 6
  misc_feature: MA Experiment 108577 PARAMETER Experiment Name: At_42deg_Heat_cDNA_P Parameter: Tissue Value: Aerial
  misc_feature: MA Experiment ID: 108585 Result: Up-regulated in Transcription
  misc_feature: MA Experiment 108585 PARAMETER Experiment Name: At_5mM_NaNP_cDNA_P Parameter: Timepoint (hr) Value: 6
  misc_feature: MA Experiment 108585 PARAMETER Experiment Name: At_5mM_NaNP_cDNA_P Parameter: Tissue Value: Aerial
  misc_feature: MA Experiment 108585 PARAMETER Experiment Name: At_5mM_NaNP_cDNA_P Parameter: Treatment Value: null
  misc_feature: MA Experiment ID: 20000112 Result: Up-regulated in Transcription
  misc_feature: MA Experiment 20000112 PARAMETER Experiment Name: At_42deg_Heat_cDNA_P Parameter: Temperature (deg C) Value: 42 vs. 22
  misc_feature: MA Experiment 20000112 PARAMETER Experiment Name: At_42deg_Heat_cDNA_P Parameter: Timepoint (hr) Value: 2
  misc_feature: MA Experiment 20000112 PARAMETER Experiment Name: At_42deg_Heat_cDNA_P Parameter: Tissue Value: Aerial
  misc_feature: MA Experiment ID: 20000113 Result: Up-regulated in Transcription
  misc_feature: MA Experiment 20000113 PARAMETER Experiment Name: At_42deg_Heat_cDNA_P Parameter: Temperature (deg C) Value: 42 vs. 22
  misc_feature: MA Experiment 20000113 PARAMETER Experiment Name: At_42deg_Heat_cDNA_P Parameter: Timepoint (hr) Value: 8
  misc_feature: MA Experiment 20000113 PARAMETER Experiment Name: At_42deg_Heat_cDNA_P Parameter: Tissue Value: Aerial
  misc_feature: MA Experiment ID: 20000117 Result: Up-regulated in Transcription
  misc_feature: MA Experiment 20000117 PARAMETER Experiment Name: At_100uM_ABA_Mutants_cDNA_P Parameter: Plant Line Value: Columbia
  misc_feature: MA Experiment 20000117 PARAMETER Experiment Name: At_100uM_ABA_Mutants_cDNA_P Parameter: Timepoint (hr) Value: 6
  misc_feature: MA Experiment 20000117 PARAMETER Experiment Name: At_100uM_ABA_Mutants_cDNA_P Parameter: Tissue Value: Aerial
  misc_feature: MA Experiment 20000117 PARAMETER Experiment Name: At_100uM_ABA_Mutants_cDNA_P Parameter: Treatment Value: 100uM ABA vs. No Treatment
  misc_feature: MA Experiment ID: 20000144 Result: Up-regulated in Transcription
  misc_feature: MA Experiment 20000144 PARAMETER Experiment Name: At_42deg_Heat_cDNA_P Parameter: Temperature (deg C) Value: 42 vs. 22
  misc_feature: MA Experiment 20000144 PARAMETER Experiment Name: At_42deg_Heat_cDNA_P Parameter: Timepoint (hr) Value: 1
  misc_feature: MA Experiment 20000144 PARAMETER Experiment Name: At_42deg_Heat_cDNA_P Parameter: Tissue Value: Aerial
  misc_feature: MA Experiment ID: 20000171 Result: Up-regulated in Transcription
  misc_feature: MA Experiment 20000171 PARAMETER Experiment Name: At_42deg_Heat_P Parameter: Age (day) Value: 14
  misc_feature: MA Experiment 20000171 PARAMETER Experiment Name: At_42deg_Heat_P Parameter: Organism Value: A. thaliana
  misc_feature: MA Experiment 20000171 PARAMETER Experiment Name: At_42deg_Heat_P Parameter: Plant Line Value: WS
  misc_feature: MA Experiment 20000171 PARAMETER Experiment Name: At_42deg_Heat_P Parameter: Temperature (deg C) Value: 42 vs. 22
  misc_feature: MA Experiment 20000171 PARAMETER Experiment Name: At_42deg_Heat_P Parameter: Timepoint (hr) Value: 1
  misc_feature: MA Experiment 20000171 PARAMETER Experiment Name: At_42deg_Heat_P Parameter: Tissue Value: Aerial
  misc_feature: MA Experiment ID: 20000173 Result: Up-regulated in Transcription
  misc_feature: MA Experiment 20000173 PARAMETER Experiment Name: At_42deg_Heat_P Parameter: Age (day) Value: 14
  misc_feature: MA Experiment 20000173 PARAMETER Experiment Name: At_42deg_Heat_P Parameter: Organism Value: A. thaliana
  misc_feature: MA Experiment 20000173 PARAMETER Experiment Name: At_42deg_Heat_P Parameter: Plant Line Value: WS
  misc_feature: MA Experiment 20000173 PARAMETER Experiment Name: At_42deg_Heat_P Parameter: Temperature (deg C) Value: 42 vs. 22
  misc_feature: MA Experiment 20000173 PARAMETER Experiment Name: At_42deg_Heat_P Parameter: Timepoint (hr) Value: 6
  misc_feature: MA Experiment 20000173 PARAMETER Experiment Name: At_42deg_Heat_P Parameter: Tissue Value: Aerial
  misc_feature: MA Experiment ID: 20000180 Result: Down-regulated in Transcription
  misc_feature: MA Experiment 20000180 PARAMETER Experiment Name: At_Germinating_Seeds_P Parameter: Age (hr) Value: 24 vs. 0
  misc_feature: MA Experiment 20000180 PARAMETER Experiment Name: At_Germinating_Seeds_P Parameter: Tissue Value: Germinating Seeds
  misc_feature: MA Experiment ID: 20000184 Result: Down-regulated in Transcription
  misc_feature: MA Experiment 20000184 PARAMETER Experiment Name: At_Shoots__P Parameter: Age (day) Value: 7
  misc_feature: MA Experiment 20000184 PARAMETER Experiment Name: At_Shoots__P Parameter: Tissue Value: Shoots vs. Whole Plant
  misc_feature: MA Experiment ID: 20000436 Result: Up-regulated in Transcription
  misc_feature: MA Experiment 20000436 PARAMETER Experiment Name: At_Drought_P Parameter: Age (day) Value: 7
  misc_feature: MA Experiment 20000436 PARAMETER Experiment Name: At_Drought_P Parameter: Organism Value: A. thaliana
  misc_feature: MA Experiment 20000436 PARAMETER Experiment Name: At_Drought_P Parameter: Plant Line Value: WS
  misc_feature: MA Experiment 20000436 PARAMETER Experiment Name: At_Drought_P Parameter: Timepoint (hr) Value: 12
  misc_feature: MA Experiment 20000436 PARAMETER Experiment Name: At_Drought_P Parameter: Tissue Value: Whole Plant
  misc_feature: MA Experiment 20000436 PARAMETER Experiment Name: At_Drought_P Parameter: Treatment Value: Drought vs. No Drought
  misc_feature: MA Experiment ID: 20000437 Result: Up-regulated in Transcription
  misc_feature: MA Experiment 20000437 PARAMETER Experiment Name: At_Drought_P Parameter: Age (day) Value: 8
  misc_feature: MA Experiment 20000437 PARAMETER Experiment Name: At_Drought_P Parameter: Organism Value: A. thaliana
  misc_feature: MA Experiment 20000437 PARAMETER Experiment Name: At_Drought_P Parameter: Plant Line Value: WS
  misc_feature: MA Experiment 20000437 PARAMETER Experiment Name: At_Drought_P Parameter: Timepoint (hr) Value: 24
  misc_feature: MA Experiment 20000437 PARAMETER Experiment Name: At_Drought_P Parameter: Tissue Value: Whole Plant
  misc_feature: MA Experiment 20000437 PARAMETER Experiment Name: At_Drought_P Parameter: Treatment Value: Drought vs. No Drought
  misc_feature: MA Experiment ID: 20000495 Result: Down-regulated in Transcription
  misc_feature: MA Experiment 20000495 PARAMETER Experiment Name: At_Guard_Cells_P Parameter: Harvest Date Value: 8/2/2002
  misc_feature: MA Experiment 20000495 PARAMETER Experiment Name: At_Guard_Cells_P Parameter: Organism Value: A. thaliana
  misc_feature: MA Experiment 20000495 PARAMETER Experiment Name: At_Guard_Cells_P Parameter: Tissue Value: Guard Cells vs. Leaves
  misc_feature: MA Experiment ID: 20001904 Result: Up-regulated in Transcription
  misc_feature: MA Experiment 20001904 PARAMETER Experiment Name: At_Drought_Reproduction_P Parameter: Age (day) Value: 37
  misc_feature: MA Experiment 20001904 PARAMETER Experiment Name: At_Drought_Reproduction_P Parameter: Organism Value: A. thaliana
  misc_feature: MA Experiment 20001904 PARAMETER Experiment Name: At_Drought_Reproduction_P Parameter: Plant Line Value: WS
  misc_feature: MA Experiment 20001904 PARAMETER Experiment Name: At_Drought_Reproduction_P Parameter: Timepoint (day) Value: 7
  misc_feature: MA Experiment 20001904 PARAMETER Experiment Name: At_Drought_Reproduction_P Parameter: Tissue Value: Rosettes
  misc_feature: MA Experiment 20001904 PARAMETER Experiment Name: At_Drought_Reproduction_P Parameter: Treatment Value: Drought vs. No Drought
  misc_feature: MA Experiment ID: 20001911 Result: Up-regulated in Transcription
  misc_feature: MA Experiment 20001911 PARAMETER Experiment Name: At_Drought_Reproduction_P Parameter: Age (day) Value: 40
  misc_feature: MA Experiment 20001911 PARAMETER Experiment Name: At_Drought_Reproduction_P Parameter: Organism Value: A. thaliana
  misc_feature: MA Experiment 20001911 PARAMETER Experiment Name: At_Drought_Reproduction_P Parameter: Plant Line Value: WS
  misc_feature: MA Experiment 20001911 PARAMETER Experiment Name: At_Drought_Reproduction_P Parameter: Timepoint (day) Value: 10
  misc_feature: MA Experiment 20001911 PARAMETER Experiment Name: At_Drought_Reproduction_P Parameter: Tissue Value: Flowers
  misc_feature: MA Experiment 20001911 PARAMETER Experiment Name: At_Drought_Reproduction_P Parameter: Treatment Value: Drought vs. No Drought
gtttcgtgtttggtcatcggtgttccgtgtttctcccaaacttttattacacgaacacaacaaaacaacacaagtgagagaaccctagattcttcttctattcccttcttccttcaagtcctttttatttctctaccaacctcgaaaacgaatcaagagattagcatcttatcgagatttaaaccatcaattaatcggctgccatggctgggagactacttgcaaatttgattgtgatgggttctgggatcattggtcgtgctgtctttcaagcctatcgtcaagcacttgctaatgcgtctaaatctggtgttgcgcaggaagcaatgcaaaatggagtacgtcaagcagggaaagccatcactgagcaagaggctaggcagattcttggtgtaaccgagaagacctcttgggaagagatattacagaaatatgacaaactgtttgagaataatgcgaaagcagggagcttttaccttcaatctaaagttcatcgagccaaagaatgtctagaagttgtgtacagaagccaaggcaacggtacacctagttaagaccttactctttttgttttccagactcaaaattcttgctcttaatgtaaaatcaagacgagttcatggtttctttgagatgatgtggaacttacaaaacggccatagttttcttcacacattaaattagtaataactaagacaggtttgctctgatcagttgatcagtgtcaaagaacctctgaaaactagaaaggattgttctgtttgtgtatgttttatccttctctcctgagagaagactcttttaaagctatccttcctgtttttgattcagattccaaactgatcatctacactctgtaatgtataatgtataataaaaaa

SEQ ID NO: 102613 - protein, 116 aa, Arabidopsis thaliana; identical to SEQ ID NO: 37830
  peptide (1)..(116): Ceres Seq. ID no. 13610811
  misc_feature (1)..(114): Pfam Name: Uncharacterised protein family (UPF0108) Pfam Description: Uncharacterised protein family (UPF0108)
  misc_feature (1)..(116): Homolog of NCBI NO: 18411133 NR Description: expressed protein [Arabidopsis thaliana] AT3g59280/F25L23_140 [Arabidopsis thaliana]
  misc_feature (2)..(116): Homolog of NCBI NO: 11357639 NR Description: hypothetical protein F25L23.140 - Arabidopsis >gi|7801678|emb|CAB91598.1| putative protein [Arabidopsis
  misc_feature (2)..(108): Homolog of NCBI NO: 34905796 NR Description: P0401G10.24 [Oryza sativa (japonica
  misc_feature (1)..(108): Homolog of NCBI NO: 18424521 NR Description: auxin-regulated protein [Arabidopsis thaliana]
  misc_feature (12)..(115): Homolog of NCBI NO: 37535410 NR Description: putative pol polyprotein [Oryza sativa (japonica group)] >gi|10140747|gb|AAG13579.1| putative pol polyprotein sativa] >gi|31432696|gb|AAP54294.1| putative pol polyprotein
  misc_feature (12)..(108): Homolog of NCBI NO: 10176880 NR Description: gene_id:MAC9.20~unknown protein [Arabidopsis
  misc_feature (4)..(104): Homolog of NCBI NO: 19112141 NR Description: conserved hypothetical protein; similar to S. YJL104W [Schizosaccharomyces pombe] Hypothetical protein C713.10 in chromosome II
  misc_feature (1)..(104): Homolog of NCBI NO: 6322357 NR Description: Hypothetical ORF; Yjl104wp [Saccharomyces

SEQ ID NO: 102614 - protein, 105 aa, Arabidopsis thaliana; identical to SEQ ID NO: 37831
  peptide (1)..(105): Ceres Seq. ID no. 13610812
  misc_feature (1)..(103): Pfam Name: Uncharacterised protein family (UPF0108) Pfam Description: Uncharacterised protein family (UPF0108)
  misc_feature (1)..(105): Homolog of NCBI NO: 18411133 NR Description: expressed protein [Arabidopsis thaliana] AT3g59280/F25L23_140 [Arabidopsis thaliana]
  misc_feature (1)..(105): Homolog of NCBI NO: 11357639 NR Description: hypothetical protein F25L23.140 - Arabidopsis >gi|7801678|emb|CAB91598.1| putative protein [Arabidopsis
  misc_feature (1)..(97): Homolog of NCBI NO: 34905796 NR Description: P0401G10.24 [Oryza sativa (japonica
  misc_feature (1)..(97): Homolog of NCBI NO: 18424521 NR Description: auxin-regulated protein [Arabidopsis thaliana]
  misc_feature (1)..(104): Homolog of NCBI NO: 37535410 NR Description: putative pol polyprotein [Oryza sativa (japonica group)] >gi|10140747|gb|AAG13579.1| putative pol polyprotein sativa] >gi|31432696|gb|AAP54294.1| putative pol polyprotein
  misc_feature (1)..(97): Homolog of NCBI NO: 10176880 NR Description: gene_id:MAC9.20~unknown protein [Arabidopsis
  misc_feature (1)..(93): Homolog of NCBI NO: 19112141 NR Description: conserved hypothetical protein; similar to S. YJL104W [Schizosaccharomyces pombe] Hypothetical protein C713.10 in chromosome II
  misc_feature (1)..(93): Homolog of NCBI NO: 6322357 NR Description: Hypothetical ORF; Yjl104wp [Saccharomyces

SEQ ID NO: 102615 - protein, 76 aa, Arabidopsis thaliana; identical to SEQ ID NO: 41050
  peptide (1)..(76): Ceres Seq. ID no. 13610813

SEQ ID NO: 102616 - DNA, 1256 bp, Arabidopsis thaliana
  misc_feature (1)..(1256): Ceres Seq. ID no. 13610818
  misc_feature: MA Experiment ID: 20000171 Result: Up-regulated in Transcription
  misc_feature: MA Experiment 20000171 PARAMETER Experiment Name: At_42deg_Heat_P Parameter: Age (day) Value: 14
  misc_feature: MA Experiment 20000171 PARAMETER Experiment Name: At_42deg_Heat_P Parameter: Organism Value: A. thaliana
  misc_feature: MA Experiment 20000171 PARAMETER Experiment Name: At_42deg_Heat_P Parameter: Plant Line Value: WS
  misc_feature: MA Experiment 20000171 PARAMETER Experiment Name: At_42deg_Heat_P Parameter: Temperature (deg C) Value: 42 vs. 22
  misc_feature: MA Experiment 20000171 PARAMETER Experiment Name: At_42deg_Heat_P Parameter: Timepoint (hr) Value: 1
  misc_feature: MA Experiment 20000171 PARAMETER Experiment Name: At_42deg_Heat_P Parameter: Tissue Value: Aerial
  misc_feature: MA Experiment ID: 20001911 Result: Up-regulated in Transcription
  misc_feature: MA Experiment 20001911 PARAMETER Experiment Name: At_Drought_Reproduction_P Parameter: Age (day) Value: 40
  misc_feature: MA Experiment 20001911 PARAMETER Experiment Name: At_Drought_Reproduction_P Parameter: Organism Value: A. thaliana
  misc_feature: MA Experiment 20001911 PARAMETER Experiment Name: At_Drought_Reproduction_P Parameter: Plant Line Value: WS
  misc_feature: MA Experiment 20001911 PARAMETER Experiment Name: At_Drought_Reproduction_P Parameter: Timepoint (day) Value: 10
  misc_feature: MA Experiment 20001911 PARAMETER Experiment Name: At_Drought_Reproduction_P Parameter: Tissue Value: Flowers
  misc_feature: MA Experiment 20001911 PARAMETER Experiment Name: At_Drought_Reproduction_P Parameter: Treatment Value: Drought vs. No Drought
attatatccaaaacataatctctctctatctctctctattttgctcaatcttaatcgtccgatcaaaacactccgactaaaaatggctgcatctaacggcgagaaaagcttgatcgtgagcttcggtgaaatgctcatcgatttcgtcccaaccgtctccggtgtatccctcgccgatgctcctggcttcatcaaagcccccggtggtgcacctgccaacgttgccatcgccatttcccgtctaggcggtcgtgccgctttcgttggaaaactcggtgacgacgagttcggtcacatgctcgccggaatcttgaaacagaacggtgtctctgctgaaggtatcaatttcgacactggagccaggactgcacttgcgttcgtgacactaagatctgatggagaacgtgagttcatgttctaccggaaccctagtgccgatatgctcctccgtcccgacgagctcaatcttgatgtcatcagatctgctaaggtgttccactacggatccataagcttgatcgttgagccatgtcgatctgctcacttgaaagccatggaggtggctaaggaagctggtgcgttgctttcatatgatccgaacttgaggcttcctttgtggccctcgaaggaggaggctcagaagcagattcttagcatctgggacaaagctgaagtgatcaaagtcagcgatgaagagcttatgttcttgactggatctgataaggttgatgatgagactgctttgtctctgtggcactctaatctgaaacttctcttggtcactctaggtgaaaagggttgtagatactacaccaagagcttccgtggatctgttgatcccttccatgtggatgcagtagatacaactggtgctggtgattcatttgttggtgcattgctttgcaagattgttgatgaccgtgctgtgcttgaggacgaagctcggctgagagaagtgcttaggcttgcgaatgcttgtggagccatcacaacaacaaagaaaggagctattccagctctccctacagagtctgaagttcagagcctcctgaaaggaaactgatttcacaatgtctggatttttaggacttcaagttttaccttttcttggctttgttttttattttcccctgcttttggctctgtgttcttgtagaaccgttctattctgttatgaatctcgttttattccaattgcaaggttttttgtcgtttgagtaactttgatgaataaaaactctttaccaagttcagtg

SEQ ID NO: 102617 - protein, 353 aa, Arabidopsis thaliana
  peptide (1)..(353): Ceres Seq. ID no. 13610819
  misc_feature (35)..(343): Pfam Name: pfkB family carbohydrate kinase Pfam Description: pfkB family carbohydrate kinase
  misc_feature (28)..(353): Homolog of NCBI NO: 15231692 NR Description: fructokinase, putative [Arabidopsis thaliana]
  misc_feature (28)..(353): Homolog of NCBI NO: 21592495 NR Description: fructokinase-like protein [Arabidopsis thaliana]
  misc_feature (30)..(351): Homolog of NCBI NO: 15224669 NR Description: fructokinase, putative [Arabidopsis thaliana]
  misc_feature (30)..(351): Homolog of NCBI NO: 14423528 NR Description: putative fructokinase [Arabidopsis thaliana]
  misc_feature (28)..(351): Homolog of NCBI NO: 15221364 NR Description: pfkB type carbohydrate kinase protein family
  misc_feature (30)..(352): Homolog of NCBI NO: 1915974 NR Description: fructokinase [Lycopersicon esculentum]
  misc_feature (28)..(351): Homolog of NCBI NO: 15221365 NR Description: fructokinase, putative [Arabidopsis thaliana]
  misc_feature (30)..(352): Homolog of NCBI NO: 32765547 NR Description: fructokinase 2 [Lycopersicon hirsutum]
  misc_feature (31)..(353): Homolog of NCBI NO: 7434223 NR Description: fructokinase (EC 2.7.1.4) - beet
  misc_feature (30)..(352): Homolog of NCBI NO: 585973 NR Description: FRUCTOKINASE >gi|626018|pir||S39997 fructokinase
LYPKHNLSLSLSILLNLNRPIKTLRLKMAASNGEKSLIVSFGEMLIDFVPTVSGVSLADAPGFIKAPGGAPANVAIAISRLGGRAAFVGKLGDDEFGHMLAGILKQNGVSAEGINFDTGARTALAFVTLRSDGEREFMFYRNPSADMLLRPDELNLDVIRSAKVFHYGSISLIVEPCRSAHLKAMEVAKEAGALLSYDPNLRLPLWPSKEEAQKQILSIWDKAEVIKVSDEELMFLTGSDKVDDETALSLWHSNLKLLLVTLGEKGCRYYTKSFRGSVDPFHVDAVDTTGAGDSFVGALLCKIVDDRAVLEDEARLREVLRLANACGAITTTKKGAIPALPTESEVQSLLKGN

SEQ ID NO: 102618 - protein, 326 aa, Arabidopsis thaliana
  peptide (1)..(326): Ceres Seq. ID no. 13610820
  misc_feature (8)..(316): Pfam Name: pfkB family carbohydrate kinase Pfam Description: pfkB family carbohydrate kinase
  misc_feature (1)..(326): Homolog of NCBI NO: 15231692 NR Description: fructokinase, putative [Arabidopsis thaliana]
  misc_feature (1)..(326): Homolog of NCBI NO: 21592495 NR Description: fructokinase-like protein [Arabidopsis thaliana]
  misc_feature (3)..(324): Homolog of NCBI NO: 15224669 NR Description: fructokinase, putative [Arabidopsis thaliana]
  misc_feature (3)..(324): Homolog of NCBI NO: 14423528 NR Description: putative fructokinase [Arabidopsis thaliana]
  misc_feature (1)..(324): Homolog of NCBI NO: 15221364 NR Description: pfkB type carbohydrate kinase protein family
  misc_feature (3)..(325): Homolog of NCBI NO: 1915974 NR Description: fructokinase [Lycopersicon esculentum]
  misc_feature (1)..(324): Homolog of NCBI NO: 15221365 NR Description: fructokinase, putative [Arabidopsis thaliana]
  misc_feature (3)..(325): Homolog of NCBI NO: 32765547 NR Description: fructokinase 2 [Lycopersicon hirsutum]
  misc_feature (4)..(326): Homolog of NCBI NO: 7434223 NR Description: fructokinase (EC 2.7.1.4) - beet
  misc_feature (3)..(325): Homolog of NCBI NO: 585973 NR Description: FRUCTOKINASE >gi|626018|pir||S39997 fructokinase
MAASNGEKSLIVSFGEMLIDFVPTVSGVSLADAPGFIKAPGGAPANVAIAISRLGGRAAFVGKLGDDEFGHMLAGILKQNGVSAEGINFDTGARTALAFVTLRSDGEREFMFYRNPSADMLLRPDELNLDVIRSAKVFHYGSISLIVEPCRSAHLKAMEVAKEAGALLSYDPNLRLPLWPSKEEAQKQILSIWDKAEVIKVSDEELMFLTGSDKVDDETALSLWHSNLKLLLVTLGEKGCRYYTKSFRGSVDPFHVDAVDTTGAGDSFVGALLCKIVDDRAVLEDEARLREVLRLANACGAITTTKKGAIPALPTESEVQSLLKGN

SEQ ID NO: 102619 - protein, 310 aa, Arabidopsis thaliana
  peptide (1)..(310): Ceres Seq. ID no. 13610821
  misc_feature (1)..(300): Pfam Name: pfkB family carbohydrate kinase Pfam Description: pfkB family carbohydrate kinase
  misc_feature (1)..(310): Homolog of NCBI NO: 15231692 NR Description: fructokinase, putative [Arabidopsis thaliana]
  misc_feature (1)..(310): Homolog of NCBI NO: 21592495 NR Description: fructokinase-like protein [Arabidopsis thaliana]
  misc_feature (1)..(308): Homolog of NCBI NO: 15224669 NR Description: fructokinase, putative [Arabidopsis thaliana]
  misc_feature (1)..(308): Homolog of NCBI NO: 14423528 NR Description: putative fructokinase [Arabidopsis thaliana]
  misc_feature (1)..(308): Homolog of NCBI NO: 15221364 NR Description: pfkB type carbohydrate kinase protein family
  misc_feature (1)..(309): Homolog of NCBI NO: 1915974 NR Description: fructokinase [Lycopersicon esculentum]
  misc_feature (1)..(308): Homolog of NCBI NO: 15221365 NR Description: fructokinase, putative [Arabidopsis thaliana]
  misc_feature (1)..(309): Homolog of NCBI NO: 32765547 NR Description: fructokinase 2 [Lycopersicon hirsutum]
  misc_feature (1)..(310): Homolog of NCBI NO: 7434223 NR Description: fructokinase (EC 2.7.1.4) - beet
  misc_feature (1)..(309): Homolog of NCBI NO: 585973 NR Description: FRUCTOKINASE >gi|626018|pir||S39997 fructokinase
MLIDFVPTVSGVSLADAPGFIKAPGGAPANVAIAISRLGGRAAFVGKLGDDEFGHMLAGILKQNGVSAEGINFDTGARTALAFVTLRSDGEREFMFYRNPSADMLLRPDELNLDVIRSAKVFHYGSISLIVEPCRSAHLKAMEVAKEAGALLSYDPNLRLPLWPSKEEAQKQILSIWDKAEVIKVSDEELMFLTGSDKVDDETALSLWHSNLKLLLVTLGEKGCRYYTKSFRGSVDPFHVDAVDTTGAGDSFVGALLCKIVDDRAVLEDEARLREVLRLANACGAITTTKKGAIPALPTESEVQSLLKGN

SEQ ID NO: 102620 - DNA, 629 bp, Arabidopsis thaliana
  misc_feature (1)..(629): Ceres Seq. ID no. 13610826
  misc_feature: MA Experiment ID: 108434 Result: Up-regulated in Transcription
  misc_feature: MA Experiment 108434 PARAMETER Experiment Name: At_Root_Tips_cDNA_P Parameter: Tissue Value: Root Tips
  misc_feature: MA Experiment ID: 108435 Result: Up-regulated in Transcription
  misc_feature: MA Experiment 108435 PARAMETER Experiment Name: At_stm_Mutants_cDNA_P Parameter: Plant Line Value: wt Landsburg vs stm
  misc_feature: MA Experiment 108435 PARAMETER Experiment Name: At_stm_Mutants_cDNA_P Parameter: Tissue Value: Shoot Apical Meristem Region
  misc_feature: MA Experiment ID: 108462 Result: Down-regulated in Transcription
  misc_feature: MA Experiment 108462 PARAMETER Experiment Name: At_Germinating_Seeds_cDNA_P Parameter: Age (day) Value: 2 vs. 0
  misc_feature: MA Experiment 108462 PARAMETER Experiment Name: At_Germinating_Seeds_cDNA_P Parameter: Tissue Value: Germinating Seeds
  misc_feature: MA Experiment ID: 108463 Result: Down-regulated in Transcription
  misc_feature: MA Experiment 108463 PARAMETER Experiment Name: At_Germinating_Seeds_cDNA_P Parameter: Age (day) Value: 3 vs. 0
  misc_feature: MA Experiment 108463 PARAMETER Experiment Name: At_Germinating_Seeds_cDNA_P Parameter: Tissue Value: Germinating Seeds
  misc_feature: MA Experiment ID: 108464 Result: Down-regulated in Transcription
  misc_feature: MA Experiment 108464 PARAMETER Experiment Name: At_Germinating_Seeds_cDNA_P Parameter: Age (day) Value: 4 vs. 0
  misc_feature: MA Experiment 108464 PARAMETER Experiment Name: At_Germinating_Seeds_cDNA_P Parameter: Tissue Value: Germinating Seeds
  misc_feature: MA Experiment ID: 108573 Result: Down-regulated in Transcription
  misc_feature: MA Experiment 108573 PARAMETER Experiment Name: At_Drought_cDNA_P Parameter: Timepoint (hr) Value: 6
  misc_feature: MA Experiment 108573 PARAMETER Experiment Name: At_Drought_cDNA_P Parameter: Tissue Value: Aerial
  misc_feature: MA Experiment 108573 PARAMETER Experiment Name: At_Drought_cDNA_P Parameter: Treatment Value: Drought vs. No Drought
  misc_feature: MA Experiment ID: 108577 Result: Down-regulated in Transcription
  misc_feature: MA Experiment 108577 PARAMETER Experiment Name: At_42deg_Heat_cDNA_P Parameter: Temperature (deg C) Value: 42 vs. 22
  misc_feature: MA Experiment 108577 PARAMETER Experiment Name: At_42deg_Heat_cDNA_P Parameter: Timepoint (hr) Value: 6
  misc_feature: MA Experiment 108577 PARAMETER Experiment Name: At_42deg_Heat_cDNA_P Parameter: Tissue Value: Aerial
  misc_feature: MA Experiment ID: 20000184 Result: Up-regulated in Transcription
  misc_feature: MA Experiment 20000184 PARAMETER Experiment Name: At_Shoots__P Parameter: Age (day) Value: 7
  misc_feature: MA Experiment 20000184 PARAMETER Experiment Name: At_Shoots__P Parameter: Tissue Value: Shoots vs. Whole Plant
  misc_feature: MA Experiment ID: 20000227 Result: Up-regulated in Transcription
  misc_feature: MA Experiment 20000227 PARAMETER Experiment Name: At_Root-Tips-vs-Tops_P Parameter: Tissue Value: Root Tips vs. Root Tops
  misc_feature: MA Experiment ID: 20000437 Result: Down-regulated in Transcription
  misc_feature: MA Experiment 20000437 PARAMETER Experiment Name: At_Drought_P Parameter: Age (day) Value: 8
  misc_feature: MA Experiment 20000437 PARAMETER Experiment Name: At_Drought_P Parameter: Organism Value: A. thaliana
  misc_feature: MA Experiment 20000437 PARAMETER Experiment Name: At_Drought_P Parameter: Plant Line Value: WS
  misc_feature: MA Experiment 20000437 PARAMETER Experiment Name: At_Drought_P Parameter: Timepoint (hr) Value: 24
  misc_feature: MA Experiment 20000437 PARAMETER Experiment Name: At_Drought_P Parameter: Tissue Value: Whole Plant
  misc_feature: MA Experiment 20000437 PARAMETER Experiment Name: At_Drought_P Parameter: Treatment Value: Drought vs. No Drought
  misc_feature: MA Experiment ID: 20001558 Result: Up-regulated in Transcription
  misc_feature: MA Experiment 20001558 PARAMETER Experiment Name: At_Drought_Soil_Dry_P Parameter: Age (day) Value: 27
  misc_feature: MA Experiment 20001558 PARAMETER Experiment Name: At_Drought_Soil_Dry_P Parameter: Organism Value: A. thaliana
  misc_feature: MA Experiment 20001558 PARAMETER Experiment Name: At_Drought_Soil_Dry_P Parameter: Plant Line Value: WS
  misc_feature: MA Experiment 20001558 PARAMETER Experiment Name: At_Drought_Soil_Dry_P Parameter: Post Timepoint (hr) Value: 6
  misc_feature: MA Experiment 20001558 PARAMETER Experiment Name: At_Drought_Soil_Dry_P Parameter: Post-Treatment Value: Re-Water vs. No Drought
  misc_feature: MA Experiment 20001558 PARAMETER Experiment Name: At_Drought_Soil_Dry_P Parameter: Timepoint (day) Value: 13
  misc_feature: MA Experiment 20001558 PARAMETER Experiment Name: At_Drought_Soil_Dry_P Parameter: Treatment Value: Drought vs. No Drought
  misc_feature: MA Experiment ID: 20001560 Result: Up-regulated in Transcription
  misc_feature: MA Experiment 20001560 PARAMETER Experiment Name: At_Drought_Soil_Dry_P Parameter: Age (day) Value: 28
  misc_feature: MA Experiment 20001560 PARAMETER Experiment Name: At_Drought_Soil_Dry_P Parameter: Organism Value: A. thaliana
  misc_feature: MA Experiment 20001560 PARAMETER Experiment Name: At_Drought_Soil_Dry_P Parameter: Plant Line Value: WS
  misc_feature: MA Experiment 20001560 PARAMETER Experiment Name: At_Drought_Soil_Dry_P Parameter: Post Timepoint (hr) Value: None
  misc_feature: MA Experiment 20001560 PARAMETER Experiment Name: At_Drought_Soil_Dry_P Parameter: Post-Treatment Value: None
  misc_feature: MA Experiment 20001560 PARAMETER Experiment Name: At_Drought_Soil_Dry_P Parameter: Timepoint (day) Value: 14
  misc_feature: MA Experiment 20001560 PARAMETER Experiment Name: At_Drought_Soil_Dry_P Parameter: Treatment Value: Drought vs. No Drought
  misc_feature: MA Experiment ID: 20001911 Result: Down-regulated in Transcription
  misc_feature: MA Experiment 20001911 PARAMETER Experiment Name: At_Drought_Reproduction_P Parameter: Age (day) Value: 40
  misc_feature: MA Experiment 20001911 PARAMETER Experiment Name: At_Drought_Reproduction_P Parameter: Organism Value: A. thaliana
  misc_feature: MA Experiment 20001911 PARAMETER Experiment Name: At_Drought_Reproduction_P Parameter: Plant Line Value: WS
  misc_feature: MA Experiment 20001911 PARAMETER Experiment Name: At_Drought_Reproduction_P Parameter: Timepoint (day) Value: 10
  misc_feature: MA Experiment 20001911 PARAMETER Experiment Name: At_Drought_Reproduction_P Parameter: Tissue Value: Flowers
  misc_feature: MA Experiment 20001911 PARAMETER Experiment Name: At_Drought_Reproduction_P Parameter: Treatment Value: Drought vs. No Drought
acacatcggttagggttttagtttctcttaccgagattcaaatggcgcttagaggagtttggcagctcaagaaactcgttgtgagctactgtaattggggtggtagcagtagaggcatcagagcctttatggaatcagaattgcctgctctaaaggagaaaaacccgcagctcgaagtaattaccgagctttcacggggacaacatccttatttgaagggcatttacaggaatagaaatgaaagggtagtgtgtgtgaagaacatggatcctgaagaagtgcttttgaatgcaacgaggctgaggaactcgcttggacggaaagtggttaaactgaggaccagacatgtcaccaaacaccccagtgttcaaggcacctggacaactgctgtcaaattctgagactttcctgctaaattgtttgcaggttttcatcttctagctgttaaatcgaatgttgcaagtatcaggattggtcgtttatctgtattgcaaccccaagttgtttgtaccgtctgtgacttgggacaaagatgtagtcttcaaatgttttgcagtttttgcaatgtttgaattttgtcttgtccttctggttgagtctataataagattacacaagggtttaaggtt

SEQ ID NO: 102621 - protein, 132 aa, Arabidopsis thaliana; identical to SEQ ID NO: 37958
  peptide (1)..(132): Ceres Seq. ID no. 13610827
  misc_feature (15)..(105): Pfam Name: Mitochondrial ribosomal protein L51 / S25 / Pfam Description: Mitochondrial ribosomal protein L51 / S25 /
  misc_feature (14)..(132): Homolog of NCBI NO: 15231727 NR Description: expressed protein [Arabidopsis thaliana]
  misc_feature (14)..(131): Homolog of NCBI NO: 26006491 NR Description: Unknown protein [Oryza sativa (japonica
  misc_feature (19)..(127): Homolog of NCBI NO: 40739113 NR Description: hypothetical protein AN6904.2 [Aspergillus
  misc_feature (23)..(127): Homolog of NCBI NO: 19112489 NR Description: hypothetical protein [Schizosaccharomyces pombe]
  misc_feature (21)..(132): Homolog of NCBI NO: 17505717 NR Description: NADH-ubiquinone oxidoreductase B8 [Caenorhabditis
  misc_feature (21)..(132): Homolog of NCBI NO: 39589613 NR Description: Hypothetical protein CBG12220 [Caenorhabditis
  misc_feature (19)..(127): Homolog of NCBI NO: 6325356 NR Description: Mitochondrial Ribosome Protein, Large Subunit; [Saccharomyces cerevisiae] >gi|2132281|pir||S59765 hypothetical
  misc_feature (17)..(127): Homolog of NCBI NO: 17647665 NR Description: mitochondrial ribosomal protein L-CI-B8 CG5479-PA
  misc_feature (1)..(127): Homolog of NCBI NO: 13559406 NR Description: mitochondrial ribosomal protein bMRP36a [Mus

SEQ ID NO: 102622 - protein, 119 aa, Arabidopsis thaliana; identical to SEQ ID NO: 37959
  peptide (1)..(119): Ceres Seq. ID no. 13610828
  misc_feature (2)..(92): Pfam Name: Mitochondrial ribosomal protein L51 / S25 / Pfam Description: Mitochondrial ribosomal protein L51 / S25 /
  misc_feature (1)..(119): Homolog of NCBI NO: 15231727 NR Description: expressed protein [Arabidopsis thaliana]
  misc_feature (1)..(118): Homolog of NCBI NO: 26006491 NR Description: Unknown protein [Oryza sativa (japonica
  misc_feature (6)..(114): Homolog of NCBI NO: 40739113 NR Description: hypothetical protein AN6904.2 [Aspergillus
  misc_feature (10)..(114): Homolog of NCBI NO: 19112489 NR Description: hypothetical protein [Schizosaccharomyces pombe]
  misc_feature (8)..(119): Homolog of NCBI NO: 17505717 NR Description: NADH-ubiquinone oxidoreductase B8 [Caenorhabditis
  misc_feature (8)..(119): Homolog of NCBI NO: 39589613 NR Description: Hypothetical protein CBG12220 [Caenorhabditis
  misc_feature (6)..(114): Homolog of NCBI NO: 6325356 NR Description: Mitochondrial Ribosome Protein, Large Subunit; [Saccharomyces cerevisiae] >gi|2132281|pir||S59765 hypothetical
  misc_feature (4)..(114): Homolog of NCBI NO: 17647665 NR Description: mitochondrial ribosomal protein L-CI-B8 CG5479-PA
  misc_feature (1)..(114): Homolog of NCBI NO: 13559406 NR Description: mitochondrial ribosomal protein bMRP36a [Mus

SEQ ID NO: 102623 - protein, 90 aa, Arabidopsis thaliana; identical to SEQ ID NO: 37960
  peptide (1)..(90): Ceres Seq. ID no. 13610829
  misc_feature (1)..(63): Pfam Name: Mitochondrial ribosomal protein L51 / S25 / Pfam Description: Mitochondrial ribosomal protein L51 / S25 /
  misc_feature (1)..(90): Homolog of NCBI NO: 15231727 NR Description: expressed protein [Arabidopsis thaliana]
  misc_feature (1)..(89): Homolog of NCBI NO: 26006491 NR Description: Unknown protein [Oryza sativa (japonica
  misc_feature (1)..(85): Homolog of NCBI NO: 40739113 NR Description: hypothetical protein AN6904.2 [Aspergillus
  misc_feature (1)..(85): Homolog of NCBI NO: 19112489 NR Description: hypothetical protein [Schizosaccharomyces pombe]
  misc_feature (1)..(90): Homolog of NCBI NO: 17505717 NR Description: NADH-ubiquinone oxidoreductase B8 [Caenorhabditis
  misc_feature (1)..(90): Homolog of NCBI NO: 39589613 NR Description: Hypothetical protein CBG12220 [Caenorhabditis
  misc_feature (1)..(85): Homolog of NCBI NO: 6325356 NR Description: Mitochondrial Ribosome Protein, Large Subunit; [Saccharomyces cerevisiae] >gi|2132281|pir||S59765 hypothetical
  misc_feature (1)..(85): Homolog of NCBI NO: 17647665 NR Description: mitochondrial ribosomal protein L-CI-B8 CG5479-PA
  misc_feature (1)..(85): Homolog of NCBI NO: 13559406 NR Description: mitochondrial ribosomal protein bMRP36a [Mus

SEQ ID NO: 102624 - DNA, 1489 bp, Arabidopsis thaliana
  misc_feature (1)..(1489): Ceres Seq. ID no. 13610838
  misc_feature: MA Experiment ID: 108501 Result: Up-regulated in Transcription
  misc_feature: MA Experiment 108501 PARAMETER Experiment Name: At_ap2_floral_buds_cDNA_P Parameter: Plant Line Value: ap2 (Ler.)
  misc_feature: MA Experiment 108501 PARAMETER Experiment Name: At_ap2_floral_buds_cDNA_P Parameter: Tissue Value: Closed Flower
  misc_feature: MA Experiment ID: 20000437 Result: Down-regulated in Transcription
  misc_feature: MA Experiment 20000437 PARAMETER Experiment Name: At_Drought_P Parameter: Age (day) Value: 8
  misc_feature: MA Experiment 20000437 PARAMETER Experiment Name: At_Drought_P Parameter: Organism Value: A. thaliana
  misc_feature: MA Experiment 20000437 PARAMETER Experiment Name: At_Drought_P Parameter: Plant Line Value: WS
  misc_feature: MA Experiment 20000437 PARAMETER Experiment Name: At_Drought_P Parameter: Timepoint (hr) Value: 24
  misc_feature: MA Experiment 20000437 PARAMETER Experiment Name: At_Drought_P Parameter: Tissue Value: Whole Plant
  misc_feature: MA Experiment 20000437 PARAMETER Experiment Name: At_Drought_P Parameter: Treatment Value: Drought vs. No Drought
atggagaccaccgtgaaaaacaagcaagtgatactgagaaattatgtgaagggtatccctaaagaatctgacctaatgattatcacagcttcagaccccgtggaactcaaggttaagcccggatcagcggcggttatggtgaggaatctttacttgtcttgtgacccttacatggggattctcatgagagaaccaactccttccactctagcacttttggatgccttcatccccggaaagcctatagctggaattggagtgtctcaagtaatagattctgatgatccatcttttacgaaaggcgatatgatttggggaattgtgaactgggaggagtttagtactatcaacccggctgctatattcaaaatcgacgtcaatatcaatgttcctctcagctactatactggaatcctcggtatgataggtttaactgcttacgccgggtttttcgagatatgttcacctaagaaaggagacacagtgttcgtgtctgctgcttctggcgcggttggacagctcgtgggtcagtttgcaaagttgatgggctgctatgttgttggaagtgccggaagtaaacaaaaggtcgatctcctgctgaacaaattcggttacgatgatgcattcaattataaggaagagcctgaccttgactccgccttgaagaggtgtgtaccaaaaggtattgacatatactttgagaacgtgggaggcaaaatgcttgacgcggttctacttaacatgaaaacgtatggacgaatcgctgtatgtgggatgatatctcagtaccatcttgaaaccagagacaggttacaaaatctacctgacatcatattcaagaagataaggatgcaagggtttgcttcttatgactttatagatagattcccaaagttcttggagtttgttcttccctacataaaagaagagaaattagcgtacgtggaagacattgttgaaggactcgagaatggtcctgctgctcttgtaggacttcttcatggaaaaaacgttgatcagaaggggaaaaagataaaccctaattcctcagattacaatttgagaaccaccgattcgagagtagcaatggggattctatcatggttcacgggaagtcctaagccatcacagtccgagacgtctaagccggagatgattcagatgccgaaatcagaaactccagccccggggatgaatggagccatagaagttcctcggcccgatcgcgcgacggttttcgagttcggctccgttgctgctactggagacagagtcactctcgctggttactgtcccgtttccgatgatctcgaaccttgccgttgggagattcttcccgccgacggcaaagacgctccacagtttcgcgtcgtcttctgaggaatcagtcaataatctgtagaagatgtaaacttgttcaatctcgtcgttgataattgtatttggtctggtaatgtcatctctttcatttgaaatcgaacaagttctc

SEQ ID NO: 102625 - protein, 459 aa, Arabidopsis thaliana
  peptide (1)..(459): Ceres Seq. ID no. 13610839
  misc_feature (110)..(345): Pfam Name: Zinc-binding dehydrogenase Pfam Description: Zinc-binding dehydrogenase
  misc_feature (1)..(459): Homolog of NCBI NO: 11357163 NR Description: allyl alcohol dehydrogenase-like protein -
  misc_feature (1)..(345): Homolog of NCBI NO: 18411352 NR Description: NADP-dependent oxidoreductase, putative
  misc_feature (1)..(345): Homolog of NCBI NO: 21555641 NR Description: allyl alcohol dehydrogenase-like protein
  misc_feature (4)..(341): Homolog of NCBI NO: 15228456 NR Description: NADP-dependent oxidoreductase (P2), putative
  misc_feature (4)..(345): Homolog of NCBI NO: 22326861 NR Description: NADP-dependent oxidoreductase, putative thaliana] >gi|16604344|gb|AAL24178.1| AT5g16970/F2K13_120 thaliana] >gi|23297366|gb|AAN12951.1| putative quinone
  misc_feature (4)..(345): Homolog of NCBI NO: 17529140 NR Description: putative quinone oxidoreductase [Arabidopsis
  misc_feature (7)..(345): Homolog of NCBI NO: 15237890 NR Description: allyl alcohol dehydrogenase, putative
  misc_feature (4)..(345): Homolog of NCBI NO: 15237888 NR Description: NADP-dependent oxidoreductase (P1), putative
  misc_feature (3)..(341): Homolog of NCBI NO: 21536967 NR Description: quinone oxidoreductase-like protein [Arabidopsis
  misc_feature (7)..(345): Homolog of NCBI NO: 21554121 NR Description: quinone oxidoreductase-like protein [Arabidopsis
METTVKNKQVILRNYVKGIPKESDLMIITASDPVELKVKPGSAAVMVRNLYLSCDPYMGILMREPTPSTLALLDAFIPGKPIAGIGVSQVIDSDDPSFTKGDMIWGIVNWEEFSTINPAAIFKIDVNINVPLSYYTGILGMIGLTAYAGFFEICSPKKGDTVFVSAASGAVGQLVGQFAKLMGCYVVGSAGSKQKVDLLLNKFGYDDAFNYKEEPDLDSALKRCVPKGIDIYFENVGGKMLDAVLLNMKTYGRIAVCGMISQYHLETRDRLQNLPDIIFKKIRMQGFASYDFIDRFPKFLEFVLPYIKEEKLAYVEDIVEGLENGPAALVGLLHGKNVDQKGKKINPNSSDYNLRTTDSRVAMGILSWFTGSPKPSQSETSKPEMIQMPKSETPAPGMNGAIEVPRPDRATVFEFGSVAATGDRVTLAGYCPVSDDLEPCRWEILPADGKDAPQFRVVF

SEQ ID NO: 102626 - protein, 434 aa, Arabidopsis thaliana
  peptide (1)..(434): Ceres Seq. ID no. 13610840
  misc_feature (85)..(320): Pfam Name: Zinc-binding dehydrogenase Pfam Description: Zinc-binding dehydrogenase
  misc_feature (1)..(434): Homolog of NCBI NO: 11357163 NR Description: allyl alcohol dehydrogenase-like protein -
  misc_feature (1)..(320): Homolog of NCBI NO: 18411352 NR Description: NADP-dependent oxidoreductase, putative
  misc_feature (1)..(320): Homolog of NCBI NO: 21555641 NR Description: allyl alcohol dehydrogenase-like protein
  misc_feature (1)..(316): Homolog of NCBI NO: 15228456 NR Description: NADP-dependent oxidoreductase (P2), putative
  misc_feature (1)..(320): Homolog of NCBI NO: 22326861 NR Description: NADP-dependent oxidoreductase, putative thaliana] >gi|16604344|gb|AAL24178.1| AT5g16970/F2K13_120 thaliana] >gi|23297366|gb|AAN12951.1| putative quinone
  misc_feature (1)..(320): Homolog of NCBI NO: 17529140 NR Description: putative quinone oxidoreductase [Arabidopsis
  misc_feature (1)..(320): Homolog of NCBI NO: 15237890 NR Description: allyl alcohol dehydrogenase, putative
  misc_feature (1)..(320): Homolog of NCBI NO: 15237888 NR Description: NADP-dependent oxidoreductase (P1), putative
  misc_feature (1)..(316): Homolog of NCBI NO: 21536967 NR Description: quinone oxidoreductase-like protein [Arabidopsis
  misc_feature (1)..(320): Homolog of NCBI NO: 21554121 NR Description: quinone oxidoreductase-like protein [Arabidopsis
MIITASDPVELKVKPGSAAVMVRNLYLSCDPYMGILMREPTPSTLALLDAFIPGKPIAGIGVSQVIDSDDPSFTKGDMIWGIVNWEEFSTINPAAIFKIDVNINVPLSYYTGILGMIGLTAYAGFFEICSPKKGDTVFVSAASGAVGQLVGQFAKLMGCYVVGSAGSKQKVDLLLNKFGYDDAFNYKEEPDLDSALKRCVPKGIDIYFENVGGKMLDAVLLNMKTYGRIAVCGMISQYHLETRDRLQNLPDIIFKKIRMQGFASYDFIDRFPKFLEFVLPYIKEEKLAYVEDIVEGLENGPAALVGLLHGKNVDQKGKKINPNSSDYNLRTTDSRVAMGILSWFTGSPKPSQSETSKPEMIQMPKSETPAPGMNGAIEVPRPDRATVFEFGSVAATGDRVTLAGYCPVSDDLEPCRWEILPADGKDAPQFRVVF

SEQ ID NO: 102627 - protein, 414 aa, Arabidopsis thaliana
  peptide (1)..(414): Ceres Seq. ID no. 13610841
  misc_feature (65)..(300): Pfam Name: Zinc-binding dehydrogenase Pfam Description: Zinc-binding dehydrogenase
  misc_feature (1)..(414): Homolog of NCBI NO: 11357163 NR Description: allyl alcohol dehydrogenase-like protein -
  misc_feature (1)..(300): Homolog of NCBI NO: 18411352 NR Description: NADP-dependent oxidoreductase, putative
  misc_feature (1)..(300): Homolog of NCBI NO: 21555641 NR Description: allyl alcohol dehydrogenase-like protein
  misc_feature (1)..(296): Homolog of NCBI NO: 15228456 NR Description: NADP-dependent oxidoreductase (P2), putative
  misc_feature (1)..(300): Homolog of NCBI NO: 22326861 NR Description: NADP-dependent oxidoreductase, putative thaliana] >gi|16604344|gb|AAL24178.1| AT5g16970/F2K13_120 thaliana] >gi|23297366|gb|AAN12951.1| putative quinone
  misc_feature (1)..(300): Homolog of NCBI NO: 17529140 NR Description: putative quinone oxidoreductase [Arabidopsis
  misc_feature (1)..(300): Homolog of NCBI NO: 15237890 NR Description: allyl alcohol dehydrogenase, putative
  misc_feature (1)..(300): Homolog of NCBI NO: 15237888 NR Description: NADP-dependent oxidoreductase (P1), putative
  misc_feature (1)..(296): Homolog of NCBI NO: 21536967 NR Description: quinone oxidoreductase-like protein [Arabidopsis
  misc_feature (1)..(300): Homolog of NCBI NO: 21554121 NR Description: quinone oxidoreductase-like protein [Arabidopsis
MVRNLYLSCDPYMGILMREPTPSTLALLDAFIPGKPIAGIGVSQVIDSDDPSFTKGDMIWGIVNWEEFSTINPAAIFKIDVNINVPLSYYTGILGMIGLTAYAGFFEICSPKKGDTVFVSAASGAVGQLVGQFAKLMGCYVVGSAGSKQKVDLLLNKFGYDDAFNYKEEPDLDSALKRCVPKGIDIYFENVGGKMLDAVLLNMKTYGRIAVCGMISQYHLETRDRLQNLPDIIFKKIRMQGFASYDFIDRFPKFLEFVLPYIKEEKLAYVEDIVEGLENGPAALVGLLHGKNVDQKGKKINPNSSDYNLRTTDSRVAMGILSWFTGSPKPSQSETSKPEMIQMPKSETPAPGMNGAIEVPRPDRATVFEFGSVAATGDRVTLAGYCPVSDDLEPCRWEILPADGKDAPQFRVVF

SEQ ID NO: 102628 - DNA, 1218 bp, Arabidopsis thaliana
  misc_feature (1)..(1218): Ceres Seq. ID no. 13610842
  misc_feature: MA Experiment ID: 108595 Result: Down-regulated in Transcription
  misc_feature: MA Experiment 108595 PARAMETER Experiment Name: At_Ler-pi_Ovule_cDNA_P Parameter: Plant Line Value: null
  misc_feature: MA Experiment ID: 20001451 Result: Down-regulated in Transcription
  misc_feature: MA Experiment 20001451 PARAMETER Experiment Name: At_Far-red-induction_P Parameter: Age (day) Value: 7
  misc_feature: MA Experiment 20001451 PARAMETER Experiment Name: At_Far-red-induction_P Parameter: Light Value: Far-red vs. White
  misc_feature: MA Experiment 20001451 PARAMETER Experiment Name: At_Far-red-induction_P Parameter: Organism Value: A. thaliana
  misc_feature: MA Experiment 20001451 PARAMETER Experiment Name: At_Far-red-induction_P Parameter: Plant Line Value: Columbia
  misc_feature: MA Experiment 20001451 PARAMETER Experiment Name: At_Far-red-induction_P Parameter: Timepoint (hr) Value: 24
  misc_feature: MA Experiment 20001451 PARAMETER Experiment Name: At_Far-red-induction_P Parameter: Tissue Value: Whole Plant
atccatcatctcagctcacctttagcttcttcttcttcctcttccgatttcaacgttgtgtttatcttcttcttcataattccgacgaatttcaccagagagaatcaaacccccgaagaatcttaattttctctctgtattatcatcttccaattcaagtgaagaaactcgtacgtggtcgtagtggagatgagttcggctctacctttgaagcttttgttgcctcttacaacaacttcattgctaccttctcctttccgatcggataaccctaacttctatcgccgtcgttcctcttcctctacttcgtgttcttctcaatcccaatcgtttcagcttttctctgttagacgacgccgatccagatcctcctctccctctattcccatgtgctttcctgaacaaacgagagatcaagacgacgtggatagttgggtgaacaaagaggacaatgtgacttgtaggtttgactcagatgaagacaccaccaccaccggactccggattccaacacaagctcaagctatcgttgaaggacctggttcacttgctgtgtcggagctacaacgagtccctgatgtagattatatacaagaactgttggctatacagcaacaaggaccaagaacaattggcttctttggaactagaaatatgggtttcatgcatcaagagctcattcagattcttagctatgctatggttataactaaaaaccatatctacacatcaggtgcagctggaaccaatgcagctgttataagaggtgcacttagagcagagagaccagagcttcttacagttatcttacctcaaagtttgaaaaagcaacctcctgaaagccaggaactactgtcaaaagtacaaaacgtgatagaaaagcctcacaacgaccatttaccgttattagaagccagcaggctatgtaacatggatatcatatcacaagtgcaacaaatcatttgctttgcgtttcatgatagtaagcttctcatggagacatgtcaagaagctagaaatctccggaagattgttaccctcttctacctggattgagtgattcagtgtttcccacttcaaaaaactcttctttgtcttcttagtgttttgttcatcttcctcttcggagaaagacaagttccattgtaattaggaatcgtcgtttacacatgcacaacctattctttggtctttcatttttttatttgctttataggg

SEQ ID NO: 102629 - protein, 288 aa, Arabidopsis thaliana
  peptide (1)..(288): Ceres Seq. ID no. 13610843
  misc_feature (1)..(288): Homolog of NCBI NO: 15232185 NR Description: expressed protein [Arabidopsis thaliana]
  misc_feature (1)..(288): Homolog of NCBI NO: 21537298 NR Description: unknown [Arabidopsis thaliana]
  misc_feature (1)..(288): Homolog of NCBI NO: 30689549 NR Description: predicted protein [Arabidopsis thaliana]
  misc_feature (1)..(264): Homolog of NCBI NO: 7486491 NR Description: hypothetical protein At2g43940 [imported] - thaliana >gi|3212851|gb|AAC23402.1| unknown protein [Arabidopsis
  misc_feature (86)..(224): Homolog of NCBI NO: 34894968 NR Description: B1088D01.6 [Oryza sativa (japonica
  misc_feature (134)..(288): Homolog of NCBI NO: 13812204 NR Description: hypothetical protein [Guillardia theta]
  misc_feature (121)..(288): Homolog of NCBI NO: 16331173 NR Description: unknown protein [Synechocystis sp. PCC 6803]
  misc_feature (152)..(288): Homolog of NCBI NO: 23043068 NR Description: hypothetical protein [Trichodesmium erythraeum
  misc_feature (138)..(288): Homolog of NCBI NO: 37522470 NR Description: hypothetical protein gll2901 [Gloeobacter
  misc_feature (156)..(288): Homolog of NCBI NO: 17232156 NR Description: hypothetical protein [Nostoc sp. PCC 7120]
MSSALPLKLLLPLTTTSLLPSPFRSDNPNFYRRRSSSSTSCSSQSQSFQLFSVRRRRSRSSSPSIPMCFPEQTRDQDDVDSWVNKEDNVTCRFDSDEDTTTTGLRIPTQAQAIVEGPGSLAVSELQRVPDVDYIQELLAIQQQGPRTIGFFGTRNMGFMHQELIQILSYAMVITKNHIYTSGAAGTNAAVIRGALRAERPELLTVILPQSLKKQPPESQELLSKVQNVIEKPHNDHLPLLEASRLCNMDIISQVQQIICFAFHDSKLLMETCQEARNLRKIVTLFYLD

SEQ ID NO: 102630 - protein, 222 aa, Arabidopsis thaliana
  peptide (1)..(222): Ceres Seq. ID no. 13610844
  misc_feature (1)..(222): Homolog of NCBI NO: 15232185 NR Description: expressed protein [Arabidopsis thaliana]
  misc_feature (1)..(222): Homolog of NCBI NO: 21537298 NR Description: unknown [Arabidopsis thaliana]
  misc_feature (1)..(222): Homolog of NCBI NO: 30689549 NR Description: predicted protein [Arabidopsis thaliana]
  misc_feature (1)..(198): Homolog of NCBI NO: 7486491 NR Description: hypothetical protein At2g43940 [imported] - thaliana >gi|3212851|gb|AAC23402.1| unknown protein [Arabidopsis
  misc_feature (20)..(158): Homolog of NCBI NO: 34894968 NR Description: B1088D01.6 [Oryza sativa (japonica
  misc_feature (68)..(222): Homolog of NCBI NO: 13812204 NR Description: hypothetical protein [Guillardia theta]
  misc_feature (55)..(222): Homolog of NCBI NO: 16331173 NR Description: unknown protein [Synechocystis sp. PCC 6803]
  misc_feature (86)..(222): Homolog of NCBI NO: 23043068 NR Description: hypothetical protein [Trichodesmium erythraeum
  misc_feature (72)..(222): Homolog of NCBI NO: 37522470 NR Description: hypothetical protein gll2901 [Gloeobacter
  misc_feature (90)..(222): Homolog of NCBI NO: 17232156 NR Description: hypothetical protein [Nostoc sp. PCC 7120]
MCFPEQTRDQDDVDSWVNKEDNVTCRFDSDEDTTTTGLRIPTQAQAIVEGPGSLAVSELQRVPDVDYIQELLAIQQQGPRTIGFFGTRNMGFMHQELIQILSYAMVITKNHIYTSGAAGTNAAVIRGALRAERPELLTVILPQSLKKQPPESQELLSKVQNVIEKPHNDHLPLLEASRLCNMDIISQVQQIICFAFHDSKLLMETCQEARNLRKIVTLFYLD

SEQ ID NO: 102631 - DNA, 1322 bp, Arabidopsis thaliana
  misc_feature (1)..(1322): Ceres Seq. ID no. 13610845
  misc_feature: MA Experiment ID: 108434 Result: Up-regulated in Transcription
  misc_feature: MA Experiment 108434 PARAMETER Experiment Name: At_Root_Tips_cDNA_P Parameter: Tissue Value: Root Tips
  misc_feature: MA Experiment ID: 108435 Result: Up-regulated in Transcription
  misc_feature: MA Experiment 108435 PARAMETER Experiment Name: At_stm_Mutants_cDNA_P Parameter: Plant Line Value: wt Landsburg vs stm
  misc_feature: MA Experiment 108435 PARAMETER Experiment Name: At_stm_Mutants_cDNA_P Parameter: Tissue Value: Shoot Apical Meristem Region
  misc_feature: MA Experiment ID: 108462 Result: Down-regulated in Transcription
  misc_feature: MA Experiment 108462 PARAMETER Experiment Name: At_Germinating_Seeds_cDNA_P Parameter: Age (day) Value: 2 vs. 0
  misc_feature: MA Experiment 108462 PARAMETER Experiment Name: At_Germinating_Seeds_cDNA_P Parameter: Tissue Value: Germinating Seeds
  misc_feature: MA Experiment ID: 108463 Result: Down-regulated in Transcription
  misc_feature: MA Experiment 108463 PARAMETER Experiment Name: At_Germinating_Seeds_cDNA_P Parameter: Age (day) Value: 3 vs. 0
  misc_feature: MA Experiment 108463 PARAMETER Experiment Name: At_Germinating_Seeds_cDNA_P Parameter: Tissue Value: Germinating Seeds
  misc_feature: MA Experiment ID: 108464 Result: Down-regulated in Transcription
  misc_feature: MA Experiment 108464 PARAMETER Experiment Name: At_Germinating_Seeds_cDNA_P Parameter: Age (day) Value: 4 vs. 0
  misc_feature: MA Experiment 108464 PARAMETER Experiment Name: At_Germinating_Seeds_cDNA_P Parameter: Tissue Value: Germinating Seeds
  misc_feature: MA Experiment ID: 108585 Result: Down-regulated in Transcription
  misc_feature: MA Experiment 108585 PARAMETER Experiment Name: At_5mM_NaNP_cDNA_P Parameter: Timepoint (hr) Value: 6
  misc_feature: MA Experiment 108585 PARAMETER Experiment Name: At_5mM_NaNP_cDNA_P Parameter: Tissue Value: Aerial
  misc_feature: MA Experiment 108585 PARAMETER Experiment Name: At_5mM_NaNP_cDNA_P Parameter: Treatment Value: null
  misc_feature: MA Experiment ID: 20000227 Result: Up-regulated in Transcription
  misc_feature: MA Experiment 20000227 PARAMETER Experiment Name: At_Root-Tips-vs-Tops_P Parameter: Tissue Value: Root Tips vs. Root Tops
  misc_feature: MA Experiment ID: 20000264 Result: Up-regulated in Transcription
  misc_feature: MA Experiment 20000264 PARAMETER Experiment Name: At_Open_Flower_P Parameter: Age (day) Value: 21
  misc_feature: MA Experiment 20000264 PARAMETER Experiment Name: At_Open_Flower_P Parameter: Plant Line Value: WS
  misc_feature: MA Experiment 20000264 PARAMETER Experiment Name: At_Open_Flower_P Parameter: Tissue Value: Open Flower vs. Whole Plant
  misc_feature: MA Experiment ID: 20000286 Result: Up-regulated in Transcription
  misc_feature: MA Experiment 20000286 PARAMETER Experiment Name: At_Open_Flower_P Parameter: Age (day) Value: 21
  misc_feature: MA Experiment 20000286 PARAMETER Experiment Name: At_Open_Flower_P Parameter: Plant Line Value: WS
  misc_feature: MA Experiment 20000286 PARAMETER Experiment Name: At_Open_Flower_P Parameter: Tissue Value: Half Open vs. Whole Plant
  misc_feature: MA Experiment ID: 20000437 Result: Down-regulated in Transcription
  misc_feature: MA Experiment 20000437 PARAMETER Experiment Name: At_Drought_P Parameter: Age (day) Value: 8
  misc_feature: MA Experiment 20000437 PARAMETER Experiment Name: At_Drought_P Parameter: Organism Value: A. thaliana
  misc_feature: MA Experiment 20000437 PARAMETER Experiment Name: At_Drought_P Parameter: Plant Line Value: WS
  misc_feature: MA Experiment 20000437 PARAMETER Experiment Name: At_Drought_P Parameter: Timepoint (hr) Value: 24
  misc_feature: MA Experiment 20000437 PARAMETER Experiment Name: At_Drought_P Parameter: Tissue Value: Whole Plant
  misc_feature: MA Experiment 20000437 PARAMETER Experiment Name: At_Drought_P Parameter: Treatment Value: Drought vs. No Drought
  misc_feature: MA Experiment ID: 20001558 Result: Up-regulated in Transcription
  misc_feature: MA Experiment 20001558 PARAMETER Experiment Name: At_Drought_Soil_Dry_P Parameter: Age (day) Value: 27
  misc_feature: MA Experiment 20001558 PARAMETER Experiment Name: At_Drought_Soil_Dry_P Parameter: Organism Value: A. thaliana
  misc_feature: MA Experiment 20001558 PARAMETER Experiment Name: At_Drought_Soil_Dry_P Parameter: Plant Line Value: WS
  misc_feature: MA Experiment 20001558 PARAMETER Experiment Name: At_Drought_Soil_Dry_P Parameter: Post Timepoint (hr) Value: 6
  misc_feature: MA Experiment 20001558 PARAMETER Experiment Name: At_Drought_Soil_Dry_P Parameter: Post-Treatment Value: Re-Water vs. No Drought
  misc_feature: MA Experiment 20001558 PARAMETER Experiment Name: At_Drought_Soil_Dry_P Parameter: Timepoint (day) Value: 13
  misc_feature: MA Experiment 20001558 PARAMETER Experiment Name: At_Drought_Soil_Dry_P Parameter: Treatment Value: Drought vs. No Drought
  misc_feature: MA Experiment ID: 20001560 Result: Up-regulated in Transcription
  misc_feature: MA Experiment 20001560 PARAMETER Experiment Name: At_Drought_Soil_Dry_P Parameter: Age (day) Value: 28
  misc_feature: MA Experiment 20001560 PARAMETER Experiment Name: At_Drought_Soil_Dry_P Parameter: Organism Value: A. thaliana
  misc_feature: MA Experiment 20001560 PARAMETER Experiment Name: At_Drought_Soil_Dry_P Parameter: Plant Line Value: WS
  misc_feature: MA Experiment 20001560 PARAMETER Experiment Name: At_Drought_Soil_Dry_P Parameter: Post Timepoint (hr) Value: None
  misc_feature: MA Experiment 20001560 PARAMETER Experiment Name: At_Drought_Soil_Dry_P Parameter: Post-Treatment Value: None
  misc_feature: MA Experiment 20001560 PARAMETER Experiment Name: At_Drought_Soil_Dry_P Parameter: Timepoint (day) Value: 14
  misc_feature: MA Experiment 20001560 PARAMETER Experiment Name: At_Drought_Soil_Dry_P Parameter: Treatment Value: Drought vs. No Drought
  misc_feature: MA Experiment ID: 20001757 Result: Up-regulated in Transcription
  misc_feature: MA Experiment 20001757 PARAMETER Experiment Name: At_50mM_NH4NO3_L-to-H_P Parameter: Timepoint (hr) Value: 6
  misc_feature: MA Experiment 20001757 PARAMETER Experiment Name: At_50mM_NH4NO3_L-to-H_P Parameter: Tissue Value: Leaf
  misc_feature: MA Experiment 20001757 PARAMETER Experiment Name: At_50mM_NH4NO3_L-to-H_P Parameter: Treatment Value: 50mM NH4NO3 vs 100mM Mannitol
aaggtttgaacataaattctaatttcgttgctcgacagcaatctcggaccaagtggaaaccgaaaatggcggcgaatgggctaatggcggcatctagtgtgtttctccaccgtcctgtacatccccatttctcgttctcttctagaacgaatcaaatggttccactcggcttcaaaggccgtgttagtttcatcggcaatgtgaaacgctgttttccggtggtattgtcaatgggaaagtcggagactttcgaggaagctggaaattccgttgcgcctggtaacggcatatcgatcatggtgaatggatgcagtggtaaaatggggaaagctgtcatcaaagcggcagattctgctggagtgaatattgttcctacatcatttgggtctgttgaagaggctggccagactgttgaggtctgtggaaaggagattcttgtgcatggtcctactgaaagagaaaaggtgctgtcttcagtgtttgagaagtatcctgaactaattgttgtggactacacaattccctctgcagtaaatgataatgcagagctgtatggcaaagtaggagttccgttcgtaatgggaacaactggaggagacaggacaagattgtataaaactgtcgaggaatcaaagatttatgctgtgatttctccacagatgggtaaacaggttgttgcgtttcttgcagcaatggagatcatgtctgagcagtttcctggtgcatttgctggttattccttagaggtgatggagtctcatcaagctagcaaattggatgcatctggtactgcaaaagctgttatttcttgctttcagaaattaggcgtgtcttacgacatggaccagatacaattaattcgagatcctaagcagcagattgaggtggtgggtgttccagaggagcatgtctcgggtcatgctttccatctttatcacttgacatcaccagataaaactgtgtcctttgagttccagcacaatgtttgcggaagatcaatatatgctgagggtactgttgatgcagtgctattccttgccaaaaagatccggtctaaagcagagaagaggatctataacatgattgatgtcttgagagagggaaacatgcgttgaacaaaccccaagctgcagtggctagtaaagaagagtatatgaaactctatataaaaaaatgtcatgccaagttaaatgtgctttggttcttcatttctttgtagggttttgtctttttatggcttctctgtttctcttttcggatttgcaaaattcctgagaaaattgtcatttcttttcgattatagtcgtctttcttcgggatct

SEQ ID NO: 102632 - protein, 370 aa, Arabidopsis thaliana
  peptide (1)..(370): Ceres Seq. ID no. 13610846
  misc_feature (223)..(365): Pfam Name: Dihydrodipicolinate reductase, C-terminus Pfam Description: Dihydrodipicolinate reductase, C-terminus
  misc_feature (22)..(370): Homolog of NCBI NO: 18411368 NR Description: expressed protein [Arabidopsis thaliana]
  misc_feature (22)..(348): Homolog of NCBI NO: 11357603 NR Description: hypothetical protein F24G16.160 - Arabidopsis >gi|7019683|emb|CAB75808.1| putative protein [Arabidopsis
  misc_feature (22)..(370): Homolog of NCBI NO: 18406430 NR Description: expressed protein [Arabidopsis thaliana] expressed protein [Arabidopsis thaliana] unknown [Arabidopsis thaliana] >gi|26452703|dbj|BAC43434.1|
  misc_feature (28)..(349): Homolog of NCBI NO: 7486478 NR Description: hypothetical protein At2g44040 [imported] -
  misc_feature (96)..(364): Homolog of NCBI NO: 23474665 NR Description: hypothetical protein [Desulfovibrio desulfuricans
GLNINSNFVARQQSRTKWKPKMAANGLMAASSVFLHRPVHPHFSFSSRTNQMVPLGFKGRVSFIGNVKRCFPVVLSMGKSETFEEAGNSVAPGNGISIMVNGCSGKMGKAVIKAADSAGVNIVPTSFGSVEEAGQTVEVCGKEILVHGPTEREKVLSSVFEKYPELIVVDYTIPSAVNDNAELYGKVGVPFVMGTTGGDRTRLYKTVEESKIYAVISPQMGKQVVAFLAAMEIMSEQFPGAFAGYSLEVMESHQASKLDASGTAKAVISCFQKLGVSYDMDQIQLIRDPKQQIEVVGVPEEHVSGHAFHLYHLTSPDKTVSFEFQHNVCGRSIYAEGTVDAVLFLAKKIRSKAEKRIYNMIDVLREGNMR

SEQ ID NO: 102633 - protein, 349 aa, Arabidopsis thaliana
  peptide (1)..(349): Ceres Seq. ID no. 13610847
  misc_feature (202)..(344): Pfam Name: Dihydrodipicolinate reductase, C-terminus Pfam Description: Dihydrodipicolinate reductase, C-terminus
  misc_feature (1)..(349): Homolog of NCBI NO: 18411368 NR Description: expressed protein [Arabidopsis thaliana]
  misc_feature (1)..(327): Homolog of NCBI NO: 11357603 NR Description: hypothetical protein F24G16.160 - Arabidopsis >gi|7019683|emb|CAB75808.1| putative protein [Arabidopsis
  misc_feature (1)..(349): Homolog of NCBI NO: 18406430 NR Description: expressed protein [Arabidopsis thaliana] expressed protein [Arabidopsis thaliana] unknown [Arabidopsis thaliana] >gi|26452703|dbj|BAC43434.1|
  misc_feature (7)..(328): Homolog of NCBI NO: 7486478 NR Description: hypothetical protein At2g44040 [imported] -
  misc_feature (75)..(343): Homolog of NCBI NO: 23474665 NR Description: hypothetical protein [Desulfovibrio desulfuricans
MAANGLMAASSVFLHRPVHPHFSFSSRTNQMVPLGFKGRVSFIGNVKRCFPVVLSMGKSETFEEAGNSVAPGNGISIMVNGCSGKMGKAVIKAADSAGVNIVPTSFGSVEEAGQTVEVCGKEILVHGPTEREKVLSSVFEKYPELIVVDYTIPSAVNDNAELYGKVGVPFVMGTTGGDRTRLYKTVEESKIYAVISPQMGKQVVAFLAAMEIMSEQFPGAFAGYSLEVMESHQASKLDASGTAKAVISCFQKLGVSYDMDQIQLIRDPKQQIEVVGVPEEHVSGHAFHLYHLTSPDKTVSFEFQHNVCGRSIYAEGTVDAVLFLAKKIRSKAEKRIYNMIDVLREGNMR

SEQ ID NO: 102634 - protein, 343 aa, Arabidopsis thaliana
  peptide (1)..(343): Ceres Seq. ID no. 13610848
  misc_feature (196)..(338): Pfam Name: Dihydrodipicolinate reductase, C-terminus Pfam Description: Dihydrodipicolinate reductase, C-terminus
  misc_feature (1)..(343): Homolog of NCBI NO: 18411368 NR Description: expressed protein [Arabidopsis thaliana]
  misc_feature (1)..(321): Homolog of NCBI NO: 11357603 NR Description: hypothetical protein F24G16.160 - Arabidopsis >gi|7019683|emb|CAB75808.1| putative protein [Arabidopsis
  misc_feature (1)..(343): Homolog of NCBI NO: 18406430 NR Description: expressed protein [Arabidopsis thaliana] expressed protein [Arabidopsis thaliana] unknown [Arabidopsis thaliana] >gi|26452703|dbj|BAC43434.1|
  misc_feature (1)..(322): Homolog of NCBI NO: 7486478 NR Description: hypothetical protein At2g44040 [imported] -
  misc_feature (69)..(337): Homolog of NCBI NO: 23474665 NR Description: hypothetical protein [Desulfovibrio desulfuricans
MAASSVFLHRPVHPHFSFSSRTNQMVPLGFKGRVSFIGNVKRCFPVVLSMGKSETFEEAGNSVAPGNGISIMVNGCSGKMGKAVIKAADSAGVNIVPTSFGSVEEAGQTVEVCGKEILVHGPTEREKVLSSVFEKYPELIVVDYTIPSAVNDNAELYGKVGVPFVMGTTGGDRTRLYKTVEESKIYAVISPQMGKQVVAFLAAMEIMSEQFPGAFAGYSLEVMESHQASKLDASGTAKAVISCFQKLGVSYDMDQIQLIRDPKQQIEVVGVPEEHVSGHAFHLYHLTSPDKTVSFEFQHNVCGRSIYAEGTVDAVLFLAKKIRSKAEKRIYNMIDVLREGNMR

SEQ ID NO: 102635 - DNA, 844 bp, Arabidopsis thaliana
  misc_feature (1)..(844): Ceres Seq. ID no. 13610849
  misc_feature: MA Experiment ID: 108668 Result: Up-regulated in Transcription
  misc_feature: MA Experiment 108668 PARAMETER Experiment Name: At_2mM_SA_cDNA_P Parameter: Plant Line Value: WS
  misc_feature: MA Experiment 108668 PARAMETER Experiment Name: At_2mM_SA_cDNA_P Parameter: Timepoint (hr) Value: 6
  misc_feature: MA Experiment 108668 PARAMETER Experiment Name: At_2mM_SA_cDNA_P Parameter: Treatment Value: 2mM SA vs. No Treatment
  misc_feature: MA Experiment ID: 20000069 Result: Up-regulated in Transcription
  misc_feature: MA Experiment 20000069 PARAMETER Experiment Name: At_100uM_ABA_Mutants_cDNA_P Parameter: Plant Line Value: CS23
  misc_feature: MA Experiment 20000069 PARAMETER Experiment Name: At_100uM_ABA_Mutants_cDNA_P Parameter: Timepoint (hr) Value: 6
  misc_feature: MA Experiment 20000069 PARAMETER Experiment Name: At_100uM_ABA_Mutants_cDNA_P Parameter: Tissue Value: Aerial
  misc_feature: MA Experiment 20000069 PARAMETER Experiment Name: At_100uM_ABA_Mutants_cDNA_P Parameter: Treatment Value: 100uM ABA vs. No Treatment
  misc_feature: MA Experiment ID: 20000071 Result: Up-regulated in Transcription
  misc_feature: MA Experiment 20000071 PARAMETER Experiment Name: At_100uM_ABA_Mutants_cDNA_P Parameter: Plant Line Value: CS8104
  misc_feature: MA Experiment 20000071 PARAMETER Experiment Name: At_100uM_ABA_Mutants_cDNA_P Parameter: Timepoint (hr) Value: 6
  misc_feature: MA Experiment 20000071 PARAMETER Experiment Name: At_100uM_ABA_Mutants_cDNA_P Parameter: Tissue Value: Aerial
  misc_feature: MA Experiment 20000071 PARAMETER Experiment Name: At_100uM_ABA_Mutants_cDNA_P Parameter: Treatment Value: 100uM ABA vs. No Treatment
  misc_feature: MA Experiment ID: 20000089 Result: Up-regulated in Transcription
  misc_feature: MA Experiment ID: 20000117 Result: Up-regulated in Transcription
  misc_feature: MA Experiment 20000117 PARAMETER Experiment Name: At_100uM_ABA_Mutants_cDNA_P Parameter: Plant Line Value: Columbia
  misc_feature: MA Experiment 20000117 PARAMETER Experiment Name: At_100uM_ABA_Mutants_cDNA_P Parameter: Timepoint (hr) Value: 6
  misc_feature: MA Experiment 20000117 PARAMETER Experiment Name: At_100uM_ABA_Mutants_cDNA_P Parameter: Tissue Value: Aerial
  misc_feature: MA Experiment 20000117 PARAMETER Experiment Name: At_100uM_ABA_Mutants_cDNA_P Parameter: Treatment Value: 100uM ABA vs. No Treatment
  misc_feature: MA Experiment ID: 20000182 Result: Up-regulated in Transcription
  misc_feature: MA Experiment 20000182 PARAMETER Experiment Name: At_2mM_SA_P Parameter: Age (day) Value: 14
  misc_feature: MA Experiment 20000182 PARAMETER Experiment Name: At_2mM_SA_P Parameter: Organism Value: A. thaliana
  misc_feature: MA Experiment 20000182 PARAMETER Experiment Name: At_2mM_SA_P Parameter: Plant Line Value: WS
  misc_feature: MA Experiment 20000182 PARAMETER Experiment Name: At_2mM_SA_P Parameter: Timepoint (hr) Value: 6
  misc_feature: MA Experiment 20000182 PARAMETER Experiment Name: At_2mM_SA_P Parameter: Tissue Value: Aerial
  misc_feature: MA Experiment 20000182 PARAMETER Experiment Name: At_2mM_SA_P Parameter: Treatment Value: 2mM SA vs. No Treatment
  misc_feature: MA Experiment ID: 20000184 Result: Down-regulated in Transcription
  misc_feature: MA Experiment 20000184 PARAMETER Experiment Name: At_Shoots__P Parameter: Age (day) Value: 7
  misc_feature: MA Experiment 20000184 PARAMETER Experiment Name: At_Shoots__P Parameter: Tissue Value: Shoots vs. Whole Plant
  misc_feature: MA Experiment ID: 20000234 Result: Down-regulated in Transcription
  misc_feature: MA Experiment 20000234 PARAMETER Experiment Name: At_Siliques_P Parameter: Age (day) Value: 21
  misc_feature: MA Experiment 20000234 PARAMETER Experiment Name: At_Siliques_P Parameter: Organism Value: A. thaliana
  misc_feature: MA Experiment 20000234 PARAMETER Experiment Name: At_Siliques_P Parameter: Plant Line Value: WS
  misc_feature: MA Experiment 20000234 PARAMETER Experiment Name: At_Siliques_P Parameter: Tissue Value: Less Than 5mm Siliques vs. Whole Plant
  misc_feature: MA Experiment ID: 20001557 Result: Down-regulated in Transcription
  misc_feature: MA Experiment 20001557 PARAMETER Experiment Name: At_Drought_Soil_Dry_P Parameter: Age (day) Value: 27
  misc_feature: MA Experiment 20001557 PARAMETER Experiment Name: At_Drought_Soil_Dry_P Parameter: Organism Value: A. thaliana
  misc_feature: MA Experiment 20001557 PARAMETER Experiment Name: At_Drought_Soil_Dry_P Parameter: Plant Line Value: WS
  misc_feature: MA Experiment 20001557 PARAMETER Experiment Name: At_Drought_Soil_Dry_P Parameter: Post Timepoint (hr) Value: 3
  misc_feature: MA Experiment 20001557 PARAMETER Experiment Name: At_Drought_Soil_Dry_P Parameter: Post-Treatment Value: Re-Water vs. No Drought
  misc_feature: MA Experiment 20001557 PARAMETER Experiment Name: At_Drought_Soil_Dry_P Parameter: Timepoint (day) Value: 13
  misc_feature: MA Experiment 20001557 PARAMETER Experiment Name: At_Drought_Soil_Dry_P Parameter: Treatment Value: Drought vs. No Drought
gtcaaacttgtgcgtgattcatcgtcacatcgccttgatcatggaaactcctatcgatgctccgaataaggacgaacatgaatgccctaggtggaagaaatcaactgtagtttttgtgttgggtggtcctggaagtggaaaaggtactcagtgtgctaatgttgtgaagcactttagctatacccattttagtgctggtgatcttctcagagcagaaattaagtccggttctgaatttggagccatgatccaaagtatgattgcagaggggagaatagtgccgtctgagatcacagtgaaacttttgtgtaaagctatggaggaaagtggtaatgataagttccttattgatggcttccctcgcaatgaagaaaatcgaaacgtattcgaaaatgttgctagaatcgagcctgcttttgttctattctttgattgtccagaagaagaactagaaagacgcattatgagcaggaaccagggaagagaagacgataatatagagaccataaagaagcgatttaaagtgtttgttgaatctaccctcccaattattagctactacgaatcgaaagggaaacttcgaaagatcaatgctgcaaaatccagcgaagaggttttcgaggctgtcagagttctatttgcatctgaaacttgacaagcatcaaggacttggattcaccgaacagaacaaaacagagactccaaagtcaatgatgtgccttgtcgtatacgtaactaagtttacagattcatgctttatttgtatatgtaattatctctacattttacatgttctcatcatacgatatagccaaactttcgtcgcaataaccatatttttagc

SEQ ID NO: 102636 - protein, 217 aa, Arabidopsis thaliana
  peptide (1)..(217): Ceres Seq. ID no. 13610850
  misc_feature (39)..(192): Pfam Name: Adenylate kinase Pfam Description: Adenylate kinase
  misc_feature (14)..(217): Homolog of NCBI NO: 18411518 NR Description: URIDYLATE KINASE-related protein [Arabidopsis
  misc_feature (14)..(217): Homolog of NCBI NO: 11260827 NR Description: URIDYLATE KINASE-like protein - Arabidopsis
  misc_feature (32)..(216): Homolog of NCBI NO: 30690243 NR Description: predicted protein [Arabidopsis thaliana]
  misc_feature (32)..(216): Homolog of NCBI NO: 30690246 NR Description: predicted protein [Arabidopsis thaliana] URIDYLATE KINASE (UK) (URIDINE MONOPHOSPHATE KINASE) (UMP KINASE) KINASE) >gi|2121275|gb|AAB71135.1| UMP/CMP kinase [Arabidopsis
  misc_feature (32)..(214): Homolog of NCBI NO: 6683813 NR Description: UMP/CMP kinase b [Oryza sativa]
  misc_feature (32)..(214): Homolog of NCBI NO: 6683811 NR Description: UMP/CMP kinase a [Oryza sativa]
  misc_feature (29)..(217): Homolog of NCBI NO: 34897826 NR Description: putative UMP/CMP kinase [Oryza sativa (japonica group)] >gi|25553538|dbj|BAC24814.1| putative UMP/CMP kinase
  misc_feature (25)..(214): Homolog of NCBI NO: 3913952 NR Description: ADENYLATE KINASE (ATP-AMP TRANSPHOSPHORYLASE)
  misc_feature (32)..(176): Homolog of NCBI NO: 5305496 NR Description: adenylate kinase [Ceratopteris richardii]
  misc_feature (3)..(213): Homolog of NCBI NO: 28374307 NR Description: Similar to RIKEN cDNA 0610011D08 gene [Xenopus
SNLCVIHRHIALIMETPIDAPNKDEHECPRWKKSTVVFVLGGPGSGKGTQCANVVKHFSYTHFSAGDLLRAEIKSGSEFGAMIQSMIAEGRIVPSEITVKLLCKAMEESGNDKFLIDGFPRNEENRNVFENVARIEPAFVLFFDCPEEELERRIMSRNQGREDDNIETIKKRFKVFVESTLPIISYYESKGKLRKINAAKSSEEVFEAVRVLFASET

SEQ ID NO: 102637 - protein, 204 aa, Arabidopsis thaliana; identical to SEQ ID NO: 30135
  peptide (1)..(204): Ceres Seq. ID no. 13610851
  misc_feature (26)..(179): Pfam Name: Adenylate kinase Pfam Description: Adenylate kinase
  misc_feature (1)..(204): Homolog of NCBI NO: 18411518 NR Description: URIDYLATE KINASE-related protein [Arabidopsis
  misc_feature (1)..(204): Homolog of NCBI NO: 11260827 NR Description: URIDYLATE KINASE-like protein - Arabidopsis
  misc_feature (19)..(203): Homolog of NCBI NO: 30690243 NR Description: predicted protein [Arabidopsis thaliana]
  misc_feature (19)..(203): Homolog of NCBI NO: 30690246 NR Description: predicted protein [Arabidopsis thaliana] URIDYLATE KINASE (UK) (URIDINE MONOPHOSPHATE KINASE) (UMP KINASE) KINASE) >gi|2121275|gb|AAB71135.1| UMP/CMP kinase [Arabidopsis
  misc_feature (19)..(201): Homolog of NCBI NO: 6683813 NR Description: UMP/CMP kinase b [Oryza sativa]
  misc_feature (19)..(201): Homolog of NCBI NO: 6683811 NR Description: UMP/CMP kinase a [Oryza sativa]
  misc_feature (16)..(204): Homolog of NCBI NO: 34897826 NR Description: putative UMP/CMP kinase [Oryza sativa (japonica group)] >gi|25553538|dbj|BAC24814.1| putative UMP/CMP kinase
  misc_feature (12)..(201): Homolog of NCBI NO: 3913952 NR Description: ADENYLATE KINASE (ATP-AMP TRANSPHOSPHORYLASE)
  misc_feature (19)..(163): Homolog of NCBI NO: 5305496 NR Description: adenylate kinase [Ceratopteris richardii]
  misc_feature (1)..(200): Homolog of NCBI NO: 28374307 NR Description: Similar to RIKEN cDNA 0610011D08 gene [Xenopus

SEQ ID NO: 102638 - protein, 136 aa, Arabidopsis thaliana; identical to SEQ ID NO: 30136
  peptide (1)..(136): Ceres Seq. ID no. 13610852
  misc_feature (1)..(111): Pfam Name: Adenylate kinase Pfam Description: Adenylate kinase
  misc_feature (1)..(136): Homolog of NCBI NO: 18411518 NR Description: URIDYLATE KINASE-related protein [Arabidopsis
  misc_feature (1)..(136): Homolog of NCBI NO: 11260827 NR Description: URIDYLATE KINASE-like protein - Arabidopsis
  misc_feature (1)..(135): Homolog of NCBI NO: 30690243 NR Description: predicted protein [Arabidopsis thaliana]
  misc_feature (1)..(135): Homolog of NCBI NO: 30690246 NR Description: predicted protein [Arabidopsis thaliana] URIDYLATE KINASE (UK) (URIDINE MONOPHOSPHATE KINASE) (UMP KINASE) KINASE) >gi|2121275|gb|AAB71135.1| UMP/CMP kinase [Arabidopsis
  misc_feature (1)..(133): Homolog of NCBI NO: 6683813 NR Description: UMP/CMP kinase b [Oryza sativa]
  misc_feature (1)..(133): Homolog of NCBI NO: 6683811 NR Description: UMP/CMP kinase a [Oryza sativa]
  misc_feature (1)..(136): Homolog of NCBI NO: 34897826 NR Description: putative UMP/CMP kinase [Oryza sativa (japonica group)] >gi|25553538|dbj|BAC24814.1| putative UMP/CMP kinase
  misc_feature (1)..(133): Homolog of NCBI NO: 3913952 NR Description: ADENYLATE KINASE (ATP-AMP TRANSPHOSPHORYLASE)
  misc_feature (1)..(95): Homolog of NCBI NO: 5305496 NR Description: adenylate kinase [Ceratopteris richardii]
  misc_feature (1)..(132): Homolog of NCBI NO: 28374307 NR Description: Similar to RIKEN cDNA 0610011D08 gene [Xenopus

SEQ ID NO: 102639 - DNA, 902 bp, Arabidopsis thaliana
  misc_feature (1)..(902): Ceres Seq. ID no. 13610853
  misc_feature: MA Experiment ID: 108434 Result: Down-regulated in Transcription
  misc_feature: MA Experiment 108434 PARAMETER Experiment Name: At_Root_Tips_cDNA_P Parameter: Tissue Value: Root Tips
  misc_feature: MA Experiment ID: 108462 Result: Up-regulated in Transcription
  misc_feature: MA Experiment 108462 PARAMETER Experiment Name: At_Germinating_Seeds_cDNA_P Parameter: Age (day) Value: 2 vs. 0
  misc_feature: MA Experiment 108462 PARAMETER Experiment Name: At_Germinating_Seeds_cDNA_P Parameter: Tissue Value: Germinating Seeds
  misc_feature: MA Experiment ID: 108463 Result: Up-regulated in Transcription
  misc_feature: MA Experiment 108463 PARAMETER Experiment Name: At_Germinating_Seeds_cDNA_P Parameter: Age (day) Value: 3 vs. 0
  misc_feature: MA Experiment 108463 PARAMETER Experiment Name: At_Germinating_Seeds_cDNA_P Parameter: Tissue Value: Germinating Seeds
  misc_feature: MA Experiment ID: 108469 Result: Up-regulated in Transcription
  misc_feature: MA Experiment ID: 108488 Result: Down-regulated in Transcription
  misc_feature: MA Experiment ID: 108489 Result: Up-regulated in Transcription
  misc_feature: MA Experiment ID: 108577 Result: Down-regulated in Transcription
  misc_feature: MA Experiment 108577 PARAMETER Experiment Name: At_42deg_Heat_cDNA_P Parameter: Temperature (deg C) Value: 42 vs. 22
  misc_feature: MA Experiment 108577 PARAMETER Experiment Name: At_42deg_Heat_cDNA_P Parameter: Timepoint (hr) Value: 6
  misc_feature: MA Experiment 108577 PARAMETER Experiment Name: At_42deg_Heat_cDNA_P Parameter: Tissue Value: Aerial
  misc_feature: MA Experiment ID: 108585 Result: Up-regulated in Transcription
  misc_feature: MA Experiment 108585 PARAMETER Experiment Name: At_5mM_NaNP_cDNA_P Parameter: Timepoint (hr) Value: 6
  misc_feature: MA Experiment 108585 PARAMETER Experiment Name: At_5mM_NaNP_cDNA_P Parameter: Tissue Value: Aerial
  misc_feature: MA Experiment 108585 PARAMETER Experiment Name: At_5mM_NaNP_cDNA_P Parameter: Treatment Value: null
  misc_feature: MA Experiment ID: 108594 Result: Up-regulated in Transcription
  misc_feature: MA Experiment 108594 PARAMETER Experiment Name: At_Ler-rhl_Root_cDNA_P Parameter: Plant Line Value: null
  misc_feature: MA Experiment ID: 108605 Result: Up-regulated in Transcription
  misc_feature: MA Experiment 108605 PARAMETER Experiment Name: At_100uM_ABA_cDNA_P Parameter: Timepoint (hr) Value: 6
  misc_feature: MA Experiment 108605 PARAMETER Experiment Name: At_100uM_ABA_cDNA_P Parameter: Tissue Value: Aerial
  misc_feature: MA Experiment 108605 PARAMETER Experiment Name: At_100uM_ABA_cDNA_P Parameter: Treatment Value: 100uM ABA vs. No Treatment
  misc_feature: MA Experiment ID: 108609 Result: Up-regulated in Transcription
  misc_feature: MA Experiment 108609 PARAMETER Experiment Name: At_100uM_ABA_cDNA_P Parameter: Timepoint (hr) Value: 24
  misc_feature: MA Experiment 108609 PARAMETER Experiment Name: At_100uM_ABA_cDNA_P Parameter: Tissue Value: Aerial
  misc_feature: MA Experiment 108609 PARAMETER Experiment Name: At_100uM_ABA_cDNA_P Parameter: Treatment Value: 100uM ABA vs. No Treatment
  misc_feature: MA Experiment ID: 108667 Result: Up-regulated in Transcription
  misc_feature: MA Experiment 108667 PARAMETER Experiment Name: At_2mM_SA_cDNA_P Parameter: Plant Line Value: WS
  misc_feature: MA Experiment 108667 PARAMETER Experiment Name: At_2mM_SA_cDNA_P Parameter: Timepoint (hr) Value: 1
  misc_feature: MA Experiment 108667 PARAMETER Experiment Name: At_2mM_SA_cDNA_P Parameter: Treatment Value: 2mM SA vs. No Treatment
  misc_feature: MA Experiment ID: 108668 Result: Up-regulated in Transcription
  misc_feature: MA Experiment 108668 PARAMETER Experiment Name: At_2mM_SA_cDNA_P Parameter: Plant Line Value: WS
  misc_feature: MA Experiment 108668 PARAMETER Experiment Name: At_2mM_SA_cDNA_P Parameter: Timepoint (hr) Value: 6
  misc_feature: MA Experiment 108668 PARAMETER Experiment Name: At_2mM_SA_cDNA_P Parameter: Treatment Value: 2mM SA vs. No Treatment
  misc_feature: MA Experiment ID: 20000069 Result: Up-regulated in Transcription
  misc_feature: MA Experiment 20000069 PARAMETER Experiment Name: At_100uM_ABA_Mutants_cDNA_P Parameter: Plant Line Value: CS23
  misc_feature: MA Experiment 20000069 PARAMETER Experiment Name: At_100uM_ABA_Mutants_cDNA_P Parameter: Timepoint (hr) Value: 6
  misc_feature: MA Experiment 20000069 PARAMETER Experiment Name: At_100uM_ABA_Mutants_cDNA_P Parameter: Tissue Value: Aerial
  misc_feature: MA Experiment 20000069 PARAMETER Experiment Name: At_100uM_ABA_Mutants_cDNA_P Parameter: Treatment Value: 100uM ABA vs. No Treatment
  misc_feature: MA Experiment ID: 20000090 Result: Up-regulated in Transcription
  misc_feature: MA Experiment ID: 20000184 Result: Down-regulated in Transcription
  misc_feature: MA Experiment 20000184 PARAMETER Experiment Name: At_Shoots__P Parameter: Age (day) Value: 7
  misc_feature: MA Experiment 20000184 PARAMETER Experiment Name: At_Shoots__P Parameter: Tissue Value: Shoots vs. Whole Plant
  misc_feature: MA Experiment ID: 20000185 Result: Down-regulated in Transcription
  misc_feature: MA Experiment 20000185 PARAMETER Experiment Name: At_Roots__P Parameter: Age (day) Value: 7 vs. 21
  misc_feature: MA Experiment 20000185 PARAMETER Experiment Name: At_Roots__P Parameter: Organism Value: A. thaliana
  misc_feature: MA Experiment 20000185 PARAMETER Experiment Name: At_Roots__P Parameter: Tissue Value: Roots vs. Whole Plant
  misc_feature: MA Experiment ID: 20000234 Result: Down-regulated in Transcription
  misc_feature: MA Experiment 20000234 PARAMETER Experiment Name: At_Siliques_P Parameter: Age (day) Value: 21
  misc_feature: MA Experiment 20000234 PARAMETER Experiment Name: At_Siliques_P Parameter: Organism Value: A. thaliana
  misc_feature: MA Experiment 20000234 PARAMETER Experiment Name: At_Siliques_P Parameter: Plant Line Value: WS
  misc_feature: MA Experiment 20000234 PARAMETER Experiment Name: At_Siliques_P Parameter: Tissue Value: Less Than 5mm Siliques vs. Whole Plant
  misc_feature: MA Experiment ID: 20000235 Result: Down-regulated in Transcription
  misc_feature: MA Experiment 20000235 PARAMETER Experiment Name: At_Siliques_P Parameter: Age (day) Value: 21
  misc_feature: MA Experiment 20000235 PARAMETER Experiment Name: At_Siliques_P Parameter: Organism Value: A. thaliana
  misc_feature: MA Experiment 20000235 PARAMETER Experiment Name: At_Siliques_P Parameter: Plant Line Value: WS
  misc_feature: MA Experiment 20000235 PARAMETER Experiment Name: At_Siliques_P Parameter: Tissue Value: 5-10mm Siliques vs. Whole Plant
  misc_feature: MA Experiment ID: 20000265 Result: Down-regulated in Transcription
  misc_feature: MA Experiment 20000265 PARAMETER Experiment Name: At_Open_Flower_P Parameter: Age (day) Value: 21
  misc_feature: MA Experiment 20000265 PARAMETER Experiment Name: At_Open_Flower_P Parameter: Plant Line Value: WS
  misc_feature: MA Experiment 20000265 PARAMETER Experiment Name: At_Open_Flower_P Parameter: Tissue Value: Closed Flower vs. Whole Plant
  misc_feature: MA Experiment ID: 20000286 Result: Down-regulated in Transcription
  misc_feature: MA Experiment 20000286 PARAMETER Experiment Name: At_Open_Flower_P Parameter: Age (day) Value: 21
  misc_feature: MA Experiment 20000286 PARAMETER Experiment Name: At_Open_Flower_P Parameter: Plant Line Value: WS
  misc_feature: MA Experiment 20000286 PARAMETER Experiment Name: At_Open_Flower_P Parameter: Tissue Value: Half Open vs. Whole Plant
  misc_feature: MA Experiment ID: 20000438 Result: Down-regulated in Transcription
  misc_feature: MA Experiment 20000438 PARAMETER Experiment Name: At_Shoots__P Parameter: Age (day) Value: 14
  misc_feature: MA Experiment 20000438 PARAMETER Experiment Name: At_Shoots__P Parameter: Tissue Value: Shoots vs. Whole Plant
  misc_feature: MA Experiment ID: 20000439 Result: Down-regulated in Transcription
  misc_feature: MA Experiment 20000439 PARAMETER Experiment Name: At_Roots__P Parameter: Age (day) Value: 14 vs. 21
  misc_feature: MA Experiment 20000439 PARAMETER Experiment Name: At_Roots__P Parameter: Organism Value: A. thaliana
  misc_feature: MA Experiment 20000439 PARAMETER Experiment Name: At_Roots__P Parameter: Tissue Value: Roots vs. Whole Plant
  misc_feature: MA Experiment ID: 20000441 Result: Up-regulated in Transcription
  misc_feature: MA Experiment 20000441 PARAMETER Experiment Name: At_1uM_BR-BRZ__P Parameter: Tissue Value: Shoot Apices
  misc_feature: MA Experiment 20000441 PARAMETER Experiment Name: At_1uM_BR-BRZ__P Parameter: Treatment Value: 1uM BR vs. No Treatment
  misc_feature: MA Experiment ID: 20000445 Result: Up-regulated in Transcription
  misc_feature: MA Experiment 20000445 PARAMETER Experiment Name: At_100uM_NAA__P Parameter: Age (day) Value: 14
  misc_feature: MA Experiment 20000445 PARAMETER Experiment Name: At_100uM_NAA__P Parameter: Organism Value: A. thaliana
  misc_feature: MA Experiment 20000445 PARAMETER Experiment Name: At_100uM_NAA__P Parameter: Plant Line Value: WS
  misc_feature: MA Experiment 20000445 PARAMETER Experiment Name: At_100uM_NAA__P Parameter: Timepoint (hr) Value: 6
  misc_feature: MA Experiment 20000445 PARAMETER Experiment Name: At_100uM_NAA__P Parameter: Tissue Value: Aerial
  misc_feature: MA Experiment 20000445 PARAMETER Experiment Name: At_100uM_NAA__P Parameter: Treatment Value: 100uM NAA vs. No Treatment
  misc_feature: MA Experiment ID: 20000794 Result: Down-regulated in Transcription
  misc_feature: MA Experiment 20000794 PARAMETER Experiment Name: At_Petals_P Parameter: Age (day) Value: 23-25 days
  misc_feature: MA Experiment 20000794 PARAMETER Experiment Name: At_Petals_P Parameter: Plant Line Value: WS
  misc_feature: MA Experiment 20000794 PARAMETER Experiment Name: At_Petals_P Parameter: Tissue Value: Petals vs. Whole plant
  misc_feature: MA Experiment ID: 20001911 Result: Up-regulated in Transcription
  misc_feature: MA Experiment 20001911 PARAMETER Experiment Name: At_Drought_Reproduction_P Parameter: Age (day) Value: 40
  misc_feature: MA Experiment 20001911 PARAMETER Experiment Name: At_Drought_Reproduction_P Parameter: Organism Value: A. thaliana
  misc_feature: MA Experiment 20001911 PARAMETER Experiment Name: At_Drought_Reproduction_P Parameter: Plant Line Value: WS
  misc_feature: MA Experiment 20001911 PARAMETER Experiment Name: At_Drought_Reproduction_P Parameter: Timepoint (day) Value: 10
  misc_feature: MA Experiment 20001911 PARAMETER Experiment Name: At_Drought_Reproduction_P Parameter: Tissue Value: Flowers
  misc_feature: MA Experiment 20001911 PARAMETER Experiment Name: At_Drought_Reproduction_P Parameter: Treatment Value: Drought vs. No Drought
acaccgagaaaggcaatggagtcggctaaatcaatcatcggtggccaccaaaatgtcatcctgatgcgtcatggtgatcgactcgacaatttcgagccactctggacttcaacagctgcgagaccgtgggatccaccgcttgctcaagacggtaaggatcgggcctttagaactggtcagagaatccggtctcaacttggggttccgattcaccgtgtcttcgtctcccctttcctccgctgcatccagaccgcttccgaagtcgttgccgccctctcagccgtcgatttcgatcccattgctatgtcatctaaagacgtgctttccatcgacaatactaagatcaaggtggctattgaatttggattgtccgagataccgcacccaatctttattaagagtgaagttgctcccaaagatgggaaatttgatttcaagatttcagatcttgaagctatgtttcctgaaggaacagtggattctaatgtggatatggtttataaagaggtgccagaatggggagaatctgcacaagcctttgaggatcgatattataagacagtgaagattcttgcggagaagtatccttctgagaacttgctcttagtcactcattggggagcagtaagtgttgcattttacaactacttcaaagacgcaactaagtacgtggtagattattgtggtagtgttgaaatgagaaggcagattttgaatggtgatgggtttggtaaatttgaggtagttactagtcatggagtatcttataagtacaccaaaatcccagtccatgatcatgtagttgtaagccgccaatctcccctttaaccggtttatatgtgaatatctggtttaacgggttgcttcaataaaaaaaaatatataagaataatggttcagtt

SEQ ID NO: 102640 - protein, 275 aa, Arabidopsis thaliana
  peptide (1)..(275): Ceres Seq. ID no. 13610854
  misc_feature (17)..(92): Pfam Name: Phosphoglycerate mutase family Pfam Description: Phosphoglycerate mutase family
  misc_feature (6)..(275): Homolog of NCBI NO: 15232324 NR Description: expressed protein [Arabidopsis thaliana]
  misc_feature (22)..(275): Homolog of NCBI NO: 21592687 NR Description: unknown [Arabidopsis thaliana]
  misc_feature (6)..(275): Homolog of NCBI NO: 15232331 NR Description: expressed protein [Arabidopsis thaliana]
  misc_feature (6)..(275): Homolog of NCBI NO: 21553703 NR Description: pRIB5 protein [Arabidopsis thaliana]
  misc_feature (6)..(265): Homolog of NCBI NO: 15232328 NR Description: expressed protein [Arabidopsis thaliana]
  misc_feature (9)..(253): Homolog of NCBI NO: 15232326 NR Description: hypothetical protein [Arabidopsis thaliana]
  misc_feature (43)..(256): Homolog of NCBI NO: 25347741 NR Description: pRIB5 protein [imported] - Ribes nigrum
  misc_feature (17)..(98): Homolog of NCBI NO: 23042637 NR Description: hypothetical protein [Trichodesmium erythraeum
  misc_feature (17)..(92): Homolog of NCBI NO: 17230464 NR Description: hypothetical protein [Nostoc sp. PCC 7120]
  misc_feature (17)..(93): Homolog of NCBI NO: 23128704 NR Description: hypothetical protein [Nostoc punctiforme]
TPRKAMESAKSIIGGHQNVILMRHGDRLDNFEPLWTSTAARPWDPPLAQDGKDRAFRTGQRIRSQLGVPIHRVFVSPFLRCIQTASEVVAALSAVDFDPIAMSSKDVLSIDNTKIKVAIEFGLSEIPHPIFIKSEVAPKDGKFDFKISDLEAMFPEGTVDSNVDMVYKEVPEWGESAQAFEDRYYKTVKILAEKYPSENLLLVTHWGAVSVAFYNYFKDATKYVVDYCGSVEMRRQILNGDGFGKFEVVTSHGVSYKYTKIPVHDHVVVSRQSPL

SEQ ID NO: 102641 - protein, 270 aa, Arabidopsis thaliana; identical to SEQ ID NO: 21722
  peptide (1)..(270): Ceres Seq. ID no. 13610855
  misc_feature (12)..(87): Pfam Name: Phosphoglycerate mutase family Pfam Description: Phosphoglycerate mutase family
  misc_feature (1)..(270): Homolog of NCBI NO: 15232324 NR Description: expressed protein [Arabidopsis thaliana]
  misc_feature (17)..(270): Homolog of NCBI NO: 21592687 NR Description: unknown [Arabidopsis thaliana]
  misc_feature (1)..(270): Homolog of NCBI NO: 15232331 NR Description: expressed protein [Arabidopsis thaliana]
  misc_feature (1)..(270): Homolog of NCBI NO: 21553703 NR Description: pRIB5 protein [Arabidopsis thaliana]
  misc_feature (1)..(260): Homolog of NCBI NO: 15232328 NR Description: expressed protein [Arabidopsis thaliana]
  misc_feature (4)..(248): Homolog of NCBI NO: 15232326 NR Description: hypothetical protein [Arabidopsis thaliana]
  misc_feature (38)..(251): Homolog of NCBI NO: 25347741 NR Description: pRIB5 protein [imported] - Ribes nigrum
  misc_feature (12)..(93): Homolog of NCBI NO: 23042637 NR Description: hypothetical protein [Trichodesmium erythraeum
  misc_feature (12)..(87): Homolog of NCBI NO: 17230464 NR Description: hypothetical protein [Nostoc sp. PCC 7120]
  misc_feature (12)..(88): Homolog of NCBI NO: 23128704 NR Description: hypothetical protein [Nostoc punctiforme]

SEQ ID NO: 102642 - protein, 254 aa, Arabidopsis thaliana; identical to SEQ ID NO: 21723
  peptide (1)..(254): Ceres Seq. ID no. 13610856
  misc_feature (1)..(71): Pfam Name: Phosphoglycerate mutase family Pfam Description: Phosphoglycerate mutase family
  misc_feature (1)..(254): Homolog of NCBI NO: 15232324 NR Description: expressed protein [Arabidopsis thaliana]
  misc_feature (1)..(254): Homolog of NCBI NO: 21592687 NR Description: unknown [Arabidopsis thaliana]
  misc_feature (1)..(254): Homolog of NCBI NO: 15232331 NR Description: expressed protein [Arabidopsis thaliana]
  misc_feature (1)..(254): Homolog of NCBI NO: 21553703 NR Description: pRIB5 protein [Arabidopsis thaliana]
  misc_feature (1)..(244): Homolog of NCBI NO: 15232328 NR Description: expressed protein [Arabidopsis thaliana]
  misc_feature (1)..(232): Homolog of NCBI NO: 15232326 NR Description: hypothetical protein [Arabidopsis thaliana]
  misc_feature (22)..(235): Homolog of NCBI NO: 25347741 NR Description: pRIB5 protein [imported] - Ribes nigrum
  misc_feature (1)..(77): Homolog of NCBI NO: 23042637 NR Description: hypothetical protein [Trichodesmium erythraeum
  misc_feature (1)..(71): Homolog of NCBI NO: 17230464 NR Description: hypothetical protein [Nostoc sp. PCC 7120]
  misc_feature (1)..(72): Homolog of NCBI NO: 23128704 NR Description: hypothetical protein [Nostoc punctiforme]

SEQ ID NO: 102643 - DNA, 965 bp, Arabidopsis thaliana
  misc_feature (1)..(965): Ceres Seq. ID no. 13610857
  misc_feature: MA Experiment ID: 108434 Result: Down-regulated in Transcription
  misc_feature: MA Experiment 108434 PARAMETER Experiment Name: At_Root_Tips_cDNA_P Parameter: Tissue Value: Root Tips
  misc_feature: MA Experiment ID: 108461 Result: Up-regulated in Transcription
  misc_feature: MA Experiment 108461 PARAMETER Experiment Name: At_Germinating_Seeds_cDNA_P Parameter: Age (day) Value: 1 vs. 0
  misc_feature: MA Experiment 108461 PARAMETER Experiment Name: At_Germinating_Seeds_cDNA_P Parameter: Tissue Value: Germinating Seeds
  misc_feature: MA Experiment ID: 108462 Result: Up-regulated in Transcription
  misc_feature: MA Experiment 108462 PARAMETER Experiment Name: At_Germinating_Seeds_cDNA_P Parameter: Age (day) Value: 2 vs. 0
  misc_feature: MA Experiment 108462 PARAMETER Experiment Name: At_Germinating_Seeds_cDNA_P Parameter: Tissue Value: Germinating Seeds
  misc_feature: MA Experiment ID: 108463 Result: Up-regulated in Transcription
  misc_feature: MA Experiment 108463 PARAMETER Experiment Name: At_Germinating_Seeds_cDNA_P Parameter: Age (day) Value: 3 vs. 0
  misc_feature: MA Experiment 108463 PARAMETER Experiment Name: At_Germinating_Seeds_cDNA_P Parameter: Tissue Value: Germinating Seeds
  misc_feature: MA Experiment ID: 108464 Result: Up-regulated in Transcription
  misc_feature: MA Experiment 108464 PARAMETER Experiment Name: At_Germinating_Seeds_cDNA_P Parameter: Age (day) Value: 4 vs. 0
  misc_feature: MA Experiment 108464 PARAMETER Experiment Name: At_Germinating_Seeds_cDNA_P Parameter: Tissue Value: Germinating Seeds
  misc_feature: MA Experiment ID: 108469 Result: Up-regulated in Transcription
  misc_feature: MA Experiment ID: 108488 Result: Down-regulated in Transcription
  misc_feature: MA Experiment ID: 108573 Result: Up-regulated in Transcription
  misc_feature: MA Experiment 108573 PARAMETER Experiment Name: At_Drought_cDNA_P Parameter: Timepoint (hr) Value: 6
  misc_feature: MA Experiment 108573 PARAMETER Experiment Name: At_Drought_cDNA_P Parameter: Tissue Value: Aerial
  misc_feature: MA Experiment 108573 PARAMETER Experiment Name: At_Drought_cDNA_P Parameter: Treatment Value: Drought vs. No Drought
  misc_feature: MA Experiment ID: 108668 Result: Up-regulated in Transcription
  misc_feature: MA Experiment 108668 PARAMETER Experiment Name: At_2mM_SA_cDNA_P Parameter: Plant Line Value: WS
  misc_feature: MA Experiment 108668 PARAMETER Experiment Name: At_2mM_SA_cDNA_P Parameter: Timepoint (hr) Value: 6
  misc_feature: MA Experiment 108668 PARAMETER Experiment Name: At_2mM_SA_cDNA_P Parameter: Treatment Value: 2mM SA vs. No Treatment
  misc_feature: MA Experiment ID: 20000090 Result: Up-regulated in Transcription
  misc_feature: MA Experiment ID: 20000173 Result: Down-regulated in Transcription
  misc_feature: MA Experiment 20000173 PARAMETER Experiment Name: At_42deg_Heat_P Parameter: Age (day) Value: 14
  misc_feature: MA Experiment 20000173 PARAMETER Experiment Name: At_42deg_Heat_P Parameter: Organism Value: A. thaliana
  misc_feature: MA Experiment 20000173 PARAMETER Experiment Name: At_42deg_Heat_P Parameter: Plant Line Value: WS
  misc_feature: MA Experiment 20000173 PARAMETER Experiment Name: At_42deg_Heat_P Parameter: Temperature (deg C) Value: 42 vs. 22
  misc_feature: MA Experiment 20000173 PARAMETER Experiment Name: At_42deg_Heat_P Parameter: Timepoint (hr) Value: 6
  misc_feature: MA Experiment 20000173 PARAMETER Experiment Name: At_42deg_Heat_P Parameter: Tissue Value: Aerial
  misc_feature: MA Experiment ID: 20000179 Result: Up-regulated in Transcription
  misc_feature: MA Experiment 20000179 PARAMETER Experiment Name: At_Germinating_Seeds_P Parameter: Age (hr) Value: 6 vs. 0
  misc_feature: MA Experiment 20000179 PARAMETER Experiment Name: At_Germinating_Seeds_P Parameter: Tissue Value: Germinating Seeds
  misc_feature: MA Experiment ID: 20000180 Result: Up-regulated in Transcription
  misc_feature: MA Experiment 20000180 PARAMETER Experiment Name: At_Germinating_Seeds_P Parameter: Age (hr) Value: 24 vs. 0
  misc_feature: MA Experiment 20000180 PARAMETER Experiment Name: At_Germinating_Seeds_P Parameter: Tissue Value: Germinating Seeds
  misc_feature: MA Experiment ID: 20000182 Result: Up-regulated in Transcription
  misc_feature: MA Experiment 20000182 PARAMETER Experiment Name: At_2mM_SA_P Parameter: Age (day) Value: 14
  misc_feature: MA Experiment 20000182 PARAMETER Experiment Name: At_2mM_SA_P Parameter: Organism Value: A. thaliana
  misc_feature: MA Experiment 20000182 PARAMETER Experiment Name: At_2mM_SA_P Parameter: Plant Line Value: WS
  misc_feature: MA Experiment 20000182 PARAMETER Experiment Name: At_2mM_SA_P Parameter: Timepoint (hr) Value: 6
  misc_feature: MA Experiment 20000182 PARAMETER Experiment Name: At_2mM_SA_P Parameter: Tissue Value: Aerial
  misc_feature: MA Experiment 20000182 PARAMETER Experiment Name: At_2mM_SA_P Parameter: Treatment Value: 2mM SA vs. No Treatment
  misc_feature: MA Experiment ID: 20000185 Result: Up-regulated in Transcription
  misc_feature: MA Experiment 20000185 PARAMETER Experiment Name: At_Roots__P Parameter: Age (day) Value: 7 vs. 21
  misc_feature: MA Experiment 20000185 PARAMETER Experiment Name: At_Roots__P Parameter: Organism Value: A. thaliana
  misc_feature: MA Experiment 20000185 PARAMETER Experiment Name: At_Roots__P Parameter: Tissue Value: Roots vs. Whole Plant
  misc_feature: MA Experiment ID: 20000439 Result: Up-regulated in Transcription
  misc_feature: MA Experiment 20000439 PARAMETER Experiment Name: At_Roots__P Parameter: Age (day) Value: 14 vs. 21
  misc_feature: MA Experiment 20000439 PARAMETER Experiment Name: At_Roots__P Parameter: Organism Value: A. thaliana
  misc_feature: MA Experiment 20000439 PARAMETER Experiment Name: At_Roots__P Parameter: Tissue Value: Roots vs. Whole Plant
  misc_feature: MA Experiment ID: 20001904 Result: Up-regulated in Transcription
  misc_feature: MA Experiment 20001904 PARAMETER Experiment Name: At_Drought_Reproduction_P Parameter: Age (day) Value: 37
  misc_feature: MA Experiment 20001904 PARAMETER Experiment Name: At_Drought_Reproduction_P Parameter: Organism Value: A. thaliana
  misc_feature: MA Experiment 20001904 PARAMETER Experiment Name: At_Drought_Reproduction_P Parameter: Plant Line Value: WS
  misc_feature: MA Experiment 20001904 PARAMETER Experiment Name: At_Drought_Reproduction_P Parameter: Timepoint (day) Value: 7
  misc_feature: MA Experiment 20001904 PARAMETER Experiment Name: At_Drought_Reproduction_P Parameter: Tissue Value: Rosettes
  misc_feature: MA Experiment 20001904 PARAMETER Experiment Name: At_Drought_Reproduction_P Parameter: Treatment Value: Drought vs. No Drought
  misc_feature: MA Experiment ID: 20001905 Result: Up-regulated in Transcription
  misc_feature: MA Experiment 20001905 PARAMETER Experiment Name: At_Drought_Reproduction_P Parameter: Age (day) Value: 40
  misc_feature: MA Experiment 20001905 PARAMETER Experiment Name: At_Drought_Reproduction_P Parameter: Organism Value: A. thaliana
  misc_feature: MA Experiment 20001905 PARAMETER Experiment Name: At_Drought_Reproduction_P Parameter: Plant Line Value: WS
  misc_feature: MA Experiment 20001905 PARAMETER Experiment Name: At_Drought_Reproduction_P Parameter: Timepoint (day) Value: 10
  misc_feature: MA Experiment 20001905 PARAMETER Experiment Name: At_Drought_Reproduction_P Parameter: Tissue Value: Rosettes
  misc_feature: MA Experiment 20001905 PARAMETER Experiment Name: At_Drought_Reproduction_P Parameter: Treatment Value: Drought vs. No Drought
agaagaagaaagaaacaatggagtctcccaaatctaacgtcgacgatggctaccaaaacatcttcgtcatgcgtcacggtgatcgaatcgacaatttcgagccactctgggtttcaaccgccgagagaccttgggatccacctttggttcaagacggtatgattcgagcgtttcgaaccggtcaaaggatccgatctcagatcgggttcccgattcaccgtgtcttcgtctcccctttcctccgatgtcttcagacagcttccgaagtcgtcgcagctctatcagccgtcaatgtcgatcctaacgccatgtcttccaaagacgtcccttccattgataaatctaagctcaaggtttctattgaattaggtttgtgtgagatgttgaactcagtggctataaggcgtgagcttgctcctaaagatgggaaatttgacttcactgtttcagatattgaaactatgtttcctgagggaatggttgatcataatgtggatatggtttataaagagttgcctaaatgggaagagtctgtggaaggttgcagagatcgatatgttaaagttgtaaaggctcttgctgataagtatcctgaagagaacttgctcttagtaacccacggggaaggagttggaactacattttcgacattctataaagatacaacagtgtacgaagtagactactgtgcttatgttgaaatgagaagacaagtctcaagtgaagatgggtctgttaaagctggggactatgaggtggttttgagtcatggtcaagctgggatcaggtttagtcatgatcctgtcagttatgaacctgtcataagccattcacctgtttagtcaaattgtcttcagtgtcctctgtttctgtacttttgaattgtatttgaactgcttttgtatgaattatgaaacattgtttcaaagttttcattcaatcgaatcagagtccaaagaaaacaa

SEQ ID NO: 102644 - protein, 279 aa, Arabidopsis thaliana
  peptide (1)..(279): Ceres Seq. ID no. 13610858
  misc_feature (18)..(115): Pfam Name: Phosphoglycerate mutase family Pfam Description: Phosphoglycerate mutase family
  misc_feature (6)..(279): Homolog of NCBI NO: 15232331 NR Description: expressed protein [Arabidopsis thaliana]
  misc_feature (6)..(279): Homolog of NCBI NO: 21553703 NR Description: pRIB5 protein [Arabidopsis thaliana]
  misc_feature (6)..(263): Homolog of NCBI NO: 15232328 NR Description: expressed protein [Arabidopsis thaliana]
  misc_feature (1)..(263): Homolog of NCBI NO: 15232326 NR Description: hypothetical protein [Arabidopsis thaliana]
  misc_feature (6)..(279): Homolog of NCBI NO: 15232324 NR Description: expressed protein [Arabidopsis thaliana]
  misc_feature (23)..(279): Homolog of NCBI NO: 21592687 NR Description: unknown [Arabidopsis thaliana]
  misc_feature (41)..(263): Homolog of NCBI NO: 25347741 NR Description: pRIB5 protein [imported] - Ribes nigrum
  misc_feature (116)..(212): Homolog of NCBI NO: 23042637 NR Description: hypothetical protein [Trichodesmium erythraeum
  misc_feature (18)..(99): Homolog of NCBI NO: 23042637 NR Description: hypothetical protein [Trichodesmium erythraeum
  misc_feature (18)..(99): Homolog of NCBI NO: 17230464 NR Description: hypothetical protein [Nostoc sp. PCC 7120]
KKKETMESPKSNVDDGYQNIFVMRHGDRIDNFEPLWVSTAERPWDPPLVQDGMIRAFRTGQRIRSQIGFPIHRVFVSPFLRCLQTASEVVAALSAVNVDPNAMSSKDVPSIDKSKLKVSIELGLCEMLNSVAIRRELAPKDGKFDFTVSDIETMFPEGMVDHNVDMVYKELPKWEESVEGCRDRYVKVVKALADKYPEENLLLVTHGEGVGTTFSTFYKDTTVYEVDYCAYVEMRRQVSSEDGSVKAGDYEVVLSHGQAGIRFSHDPVSYEPVISHSPV

SEQ ID NO: 102645 - protein, 274 aa, Arabidopsis thaliana
  peptide (1)..(274): Ceres Seq. ID no. 13610859
  misc_feature (13)..(110): Pfam Name: Phosphoglycerate mutase family Pfam Description: Phosphoglycerate mutase family
  misc_feature (1)..(274): Homolog of NCBI NO: 15232331 NR Description: expressed protein [Arabidopsis thaliana]
  misc_feature (1)..(274): Homolog of NCBI NO: 21553703 NR Description: pRIB5 protein [Arabidopsis thaliana]
  misc_feature (1)..(258): Homolog of NCBI NO: 15232328 NR Description: expressed protein [Arabidopsis thaliana]
  misc_feature (1)..(258): Homolog of NCBI NO: 15232326 NR Description: hypothetical protein [Arabidopsis thaliana]
  misc_feature (1)..(274): Homolog of NCBI NO: 15232324 NR Description: expressed protein [Arabidopsis thaliana]
  misc_feature (18)..(274): Homolog of NCBI NO: 21592687 NR Description: unknown [Arabidopsis thaliana]
  misc_feature (36)..(258): Homolog of NCBI NO: 25347741 NR Description: pRIB5 protein [imported] - Ribes nigrum
  misc_feature (111)..(207): Homolog of NCBI NO: 23042637 NR Description: hypothetical protein [Trichodesmium erythraeum
  misc_feature (13)..(94): Homolog of NCBI NO: 23042637 NR Description: hypothetical protein [Trichodesmium erythraeum
  misc_feature (13)..(94): Homolog of NCBI NO: 17230464 NR Description: hypothetical protein [Nostoc sp. PCC 7120]
MESPKSNVDDGYQNIFVMRHGDRIDNFEPLWVSTAERPWDPPLVQDGMIRAFRTGQRIRSQIGFPIHRVFVSPFLRCLQTASEVVAALSAVNVDPNAMSSKDVPSIDKSKLKVSIELGLCEMLNSVAIRRELAPKDGKFDFTVSDIETMFPEGMVDHNVDMVYKELPKWEESVEGCRDRYVKVVKALADKYPEENLLLVTHGEGVGTTFSTFYKDTTVYEVDYCAYVEMRRQVSSEDGSVKAGDYEVVLSHGQAGIRFSHDPVSYEPVISHSPV

SEQ ID NO: 102646 - protein, 257 aa, Arabidopsis thaliana
  peptide (1)..(257): Ceres Seq. ID no. 13610860
  misc_feature (1)..(93): Pfam Name: Phosphoglycerate mutase family Pfam Description: Phosphoglycerate mutase family
  misc_feature (1)..(257): Homolog of NCBI NO: 15232331 NR Description: expressed protein [Arabidopsis thaliana]
  misc_feature (1)..(257): Homolog of NCBI NO: 21553703 NR Description: pRIB5 protein [Arabidopsis thaliana]
  misc_feature (1)..(241): Homolog of NCBI NO: 15232328 NR Description: expressed protein [Arabidopsis thaliana]
  misc_feature (1)..(241): Homolog of NCBI NO: 15232326 NR Description: hypothetical protein [Arabidopsis thaliana]
  misc_feature (1)..(257): Homolog of NCBI NO: 15232324 NR Description: expressed protein [Arabidopsis thaliana]
  misc_feature (1)..(257): Homolog of NCBI NO: 21592687 NR Description: unknown [Arabidopsis thaliana]
  misc_feature (19)..(241): Homolog of NCBI NO: 25347741 NR Description: pRIB5 protein [imported] - Ribes nigrum
  misc_feature (94)..(190): Homolog of NCBI NO: 23042637 NR Description: hypothetical protein [Trichodesmium erythraeum
  misc_feature (1)..(77): Homolog of NCBI NO: 23042637 NR Description: hypothetical protein [Trichodesmium erythraeum
  misc_feature (1)..(77): Homolog of NCBI NO: 17230464 NR Description: hypothetical protein [Nostoc sp. PCC 7120]
MRHGDRIDNFEPLWVSTAERPWDPPLVQDGMIRAFRTGQRIRSQIGFPIHRVFVSPFLRCLQTASEVVAALSAVNVDPNAMSSKDVPSIDKSKLKVSIELGLCEMLNSVAIRRELAPKDGKFDFTVSDIETMFPEGMVDHNVDMVYKELPKWEESVEGCRDRYVKVVKALADKYPEENLLLVTHGEGVGTTFSTFYKDTTVYEVDYCAYVEMRRQVSSEDGSVKAGDYEVVLSHGQAGIRFSHDPVSYEPVISHSPV

SEQ ID NO: 102647 - DNA, 1215 bp, Arabidopsis thaliana
  misc_feature (1)..(1215): Ceres Seq. ID no. 13610865
  misc_feature: MA Experiment ID: 20000224 Result: Down-regulated in Transcription
aagaaacagccaacggattagggatcttaccgttctgcgattcgccgaacagagtttgaagctttttttagagacttcaatggtgagccaaggaatggtatctcttacaaagtctctatgcactatgactccaagagtccgtctcaagaatccgaatatgttgcagaaactaaagactggatcttgtaatttccgtttcagaaatctccgtgtcttatgcacaccaaagctgtctcagtgggaaccgtcacctttcattcatgcttctgcagaagaagctgctgatatagtattggacaaaaccgcgaatgtgttcgaatctattgtctccgagagtgcagaggaagagaaagtagatatgtcagcgcaacaacgaactaattctcaagttcaggtacttaaatggccaatatggcttttgggtccatctgttctcctcacaagcggtatggcgcctactttatggcttccgttgtcatcggtttttctcggttccaacgtggttagtctactttctttgatcggtctagattgcattttcaatcttggagcaacccttttcctcttaatggctgattcttgcgcacgtcctaaagacccatcacagtcctgcaacagcaaaccaccatttagctataagttctggaacatgttttcactcataatcgggtttctagtcccaatgttacttctcttcggatcccaatctggccttctcgcttctctccagccccagattcctttcctctcgtccgctgttatcctcttcccgtacttcattctccttgctgttcagacattaacagagatcctcacatggcactggcaatcaccggtctggctagtcacaccagttgtctacgaggcttaccgaatcttgcaactgatgagagggttgacacttagtgcagaggtcaacgcaccggtttgggtggttcatatgcttcgtgggcttgtctcttggtgggtattgatcttgggaatgcaactcatgagagttgcttggtttgctggttttgcatctagaacaacaacaggtcagcaaccacaatctgttgcttctaagtaaagacagataaatgtttcttcgtttagtttttaaagtcatgtcaaagatttgtaactctttcttcactgtatagcttttattattcgtgggttggtgataaggattaaaaaaaaacacatattctttatgatcatattcgctctttt

SEQ ID NO: 102648 - protein, 355 aa, Arabidopsis thaliana
  peptide (1)..(355): Ceres Seq. ID no. 13610866
  misc_feature (27)..(355): Homolog of NCBI NO: 11281196 NR Description: hypothetical protein T8B10.250 - Arabidopsis >gi|7288007|emb|CAB81845.1| putative protein [Arabidopsis
  misc_feature (120)..(355): Homolog of NCBI NO: 30695235 NR Description: expressed protein [Arabidopsis thaliana]
  misc_feature (190)..(355): Homolog of NCBI NO: 30695238 NR Description: expressed protein [Arabidopsis thaliana] putative protein [Arabidopsis thaliana]
  misc_feature (66)..(345): Homolog of NCBI NO: 38605903 NR Description: OSJNBb0020O11.15 [Oryza sativa (japonica
  misc_feature (137)..(301): Homolog of NCBI NO: 34910348 NR Description: P0684B02.8 [Oryza sativa (japonica
  misc_feature (69)..(300): Homolog of NCBI NO: 15221197 NR Description: expressed protein [Arabidopsis thaliana]
  misc_feature (168)..(323): Homolog of NCBI NO: 23127993 NR Description: hypothetical protein [Nostoc punctiforme]
RNSQRIRDLTVLRFAEQSLKLFLETSMVSQGMVSLTKSLCTMTPRVRLKNPNMLQKLKTGSCNFRFRNLRVLCTPKLSQWEPSPFIHASAEEAADIVLDKTANVFESIVSESAEEEKVDMSAQQRTNSQVQVLKWPIWLLGPSVLLTSGMAPTLWLPLSSVFLGSNVVSLLSLIGLDCIFNLGATLFLLMADSCARPKDPSQSCNSKPPFSYKFWNMFSLIIGFLVPMLLLFGSQSGLLASLQPQIPFLSSAVILFPYFILLAVQTLTEILTWHWQSPVWLVTPVVYEAYRILQLMRGLTLSAEVNAPVWVVHMLRGLVSWWVLILGMQLMRVAWFAGFASRTTTGQQPQSVASK

SEQ ID NO: 102649 - protein, 329 aa, Arabidopsis thaliana; identical to SEQ ID NO: 71900
  peptide (1)..(329): Ceres Seq. ID no. 13610867
  misc_feature (1)..(329): Homolog of NCBI NO: 11281196 NR Description: hypothetical protein T8B10.250 - Arabidopsis >gi|7288007|emb|CAB81845.1| putative protein [Arabidopsis
  misc_feature (94)..(329): Homolog of NCBI NO: 30695235 NR Description: expressed protein [Arabidopsis thaliana]
  misc_feature (164)..(329): Homolog of NCBI NO: 30695238 NR Description: expressed protein [Arabidopsis thaliana] putative protein [Arabidopsis thaliana]
  misc_feature (40)..(319): Homolog of NCBI NO: 38605903 NR Description: OSJNBb0020O11.15 [Oryza sativa (japonica
  misc_feature (111)..(275): Homolog of NCBI NO: 34910348 NR Description: P0684B02.8 [Oryza sativa (japonica
  misc_feature (43)..(274): Homolog of NCBI NO: 15221197 NR Description: expressed protein [Arabidopsis thaliana]
  misc_feature (142)..(297): Homolog of NCBI NO: 23127993 NR Description: hypothetical protein [Nostoc punctiforme]

SEQ ID NO: 102650 - protein, 324 aa, Arabidopsis thaliana; identical to SEQ ID NO: 71901
  peptide (1)..(324): Ceres Seq. ID no. 13610868
  misc_feature (1)..(324): Homolog of NCBI NO: 11281196 NR Description: hypothetical protein T8B10.250 - Arabidopsis >gi|7288007|emb|CAB81845.1| putative protein [Arabidopsis
  misc_feature (89)..(324): Homolog of NCBI NO: 30695235 NR Description: expressed protein [Arabidopsis thaliana]
  misc_feature (159)..(324): Homolog of NCBI NO: 30695238 NR Description: expressed protein [Arabidopsis thaliana] putative protein [Arabidopsis thaliana]
  misc_feature (35)..(314): Homolog of NCBI NO: 38605903 NR Description: OSJNBb0020O11.15 [Oryza sativa (japonica
  misc_feature (106)..(270): Homolog of NCBI NO: 34910348 NR Description: P0684B02.8 [Oryza sativa (japonica
  misc_feature (38)..(269): Homolog of NCBI NO: 15221197 NR Description: expressed protein [Arabidopsis thaliana]
  misc_feature (137)..(292): Homolog of NCBI NO: 23127993 NR Description: hypothetical protein [Nostoc punctiforme]

SEQ ID NO: 102651 - DNA, 1116 bp, Arabidopsis thaliana
  misc_feature (1)..(1116): Ceres Seq. ID no. 13610869
  misc_feature: MA Experiment ID: 108573 Result: Up-regulated in Transcription
  misc_feature: MA Experiment 108573 PARAMETER Experiment Name: At_Drought_cDNA_P Parameter: Timepoint (hr) Value: 6
  misc_feature: MA Experiment 108573 PARAMETER Experiment Name: At_Drought_cDNA_P Parameter: Tissue Value: Aerial
  misc_feature: MA Experiment 108573 PARAMETER Experiment Name: At_Drought_cDNA_P Parameter: Treatment Value: Drought vs. No Drought
  misc_feature: MA Experiment ID: 108579 Result: Down-regulated in Transcription
  misc_feature: MA Experiment 108579 PARAMETER Experiment Name: At_4deg_Cold_cDNA_P Parameter: Temperature (deg C) Value: 4 vs. 22
  misc_feature: MA Experiment 108579 PARAMETER Experiment Name: At_4deg_Cold_cDNA_P Parameter: Timepoint (hr) Value: 6
  misc_feature: MA Experiment 108579 PARAMETER Experiment Name: At_4deg_Cold_cDNA_P Parameter: Tissue Value: Aerial
  misc_feature: MA Experiment ID: 20000227 Result: Down-regulated in Transcription
  misc_feature: MA Experiment 20000227 PARAMETER Experiment Name: At_Root-Tips-vs-Tops_P Parameter: Tissue Value: Root Tips vs. Root Tops
  misc_feature: MA Experiment ID: 20001248 Result: Up-regulated in Transcription
  misc_feature: MA Experiment 20001248 PARAMETER Experiment Name: At_Far-red-induction_P Parameter: Age (day) Value: 7
  misc_feature: MA Experiment 20001248 PARAMETER Experiment Name: At_Far-red-induction_P Parameter: Light Value: Far-red vs. White
  misc_feature: MA Experiment 20001248 PARAMETER Experiment Name: At_Far-red-induction_P Parameter: Organism Value: A. thaliana
  misc_feature: MA Experiment 20001248 PARAMETER Experiment Name: At_Far-red-induction_P Parameter: Plant Line Value: Columbia
  misc_feature: MA Experiment 20001248 PARAMETER Experiment Name: At_Far-red-induction_P Parameter: Timepoint (hr) Value: 4
  misc_feature: MA Experiment 20001248 PARAMETER Experiment Name: At_Far-red-induction_P Parameter: Tissue Value: Whole Plant
  misc_feature: MA Experiment ID: 20001450 Result: Up-regulated in Transcription
  misc_feature: MA Experiment 20001450 PARAMETER Experiment Name: At_Far-red-induction_P Parameter: Age (day) Value: 7
  misc_feature: MA Experiment 20001450 PARAMETER Experiment Name: At_Far-red-induction_P Parameter: Light Value: Far-red vs. White
  misc_feature: MA Experiment 20001450 PARAMETER Experiment Name: At_Far-red-induction_P Parameter: Organism Value: A. thaliana
  misc_feature: MA Experiment 20001450 PARAMETER Experiment Name: At_Far-red-induction_P Parameter: Plant Line Value: Columbia
  misc_feature: MA Experiment 20001450 PARAMETER Experiment Name: At_Far-red-induction_P Parameter: Timepoint (hr) Value: 8
  misc_feature: MA Experiment 20001450 PARAMETER Experiment Name: At_Far-red-induction_P Parameter: Tissue Value: Whole Plant
agctctgtctaatctctctcgatcgacgactgctctctctctgaaccggagacggtgtcacgggacgaatctaatcgccgggaaaccgttttttttttctctcggaaaatcgatttgaatctccggcgatctgatcgggatgagtaacatcgatctgattgggatgagtaaccgcgatctgatcgggatgagtaacagcgagcttctcaccgtcgagcctctcgatcttcaattcccttttgaattgaagaagcagatctcttgctctctctatttgacgaacaagaccgacaataatgttgcctttaaggttaagacgacgaatccgaaaaagtattgtgttaggcctaatactggagttgttctcccgaggtctacttgcgaagttcttgtgaccatgcaagctcaaaaggaagctccttccgatatgcagtgcaaggacaagtttctgcttcaaggtgtgatagctagtcctggtgtcacagccaaggaagttactcctgagatgtttagcaaagaggctggacatcgagttgaggaaactaaactgagagttacttatgttgctccaccacgaccaccatcaccggttcacgaaggatctgaagagggttcttcacccagggcttctgtctcagataatggacatggttctgaattttcgtttgagagatttatcgtggacaacaaggctggacatcaagaaaacacatctgaggcgagggcactcattaccaagctaaccgaagaaaaacagtctgccattcaactgaacaacagacttcaaagagaactggatcagttaaggcgtgaaagcaaaaagagccaaagtggtggtatcccattcatgtacgttcttttggtcggactcatcggtctaattttgggatacattatgaagaggacataaaccacccaccttgaaattaatccctcacccgccacgaaggaaaaaaaaaagacttttaactcttttcagtcggacatttttttctcttctgtatttgtcaatttcgccttaaaaaggtgtcctagaagatttgtgtttcgtaactcagtttgctatgtttttttcaacttttgtaatccaaatgactttgcgttggttctttctcc

SEQ ID NO: 102652 - protein, 256 aa, Arabidopsis thaliana; identical to SEQ ID NO: 30972
  peptide (1)..(256): Ceres Seq. ID no. 13610870
  misc_feature (1)..(256): Homolog of NCBI NO: 18411661 NR Description: VAMP (vesicle-associated membrane protein, putative [Arabidopsis thaliana] putative protein [Arabidopsis thaliana]
  misc_feature (1)..(256): Homolog of NCBI NO: 11288305 NR Description: hypothetical protein T4C21.10 - Arabidopsis >gi|7329670|emb|CAB82664.1| putative protein [Arabidopsis
  misc_feature (17)..(256): Homolog of NCBI NO: 21554053 NR Description: putative VAMP-associated protein [Arabidopsis
  misc_feature (17)..(256): Homolog of NCBI NO: 15225415 NR Description: VAMP (vesicle-associated membrane
  misc_feature (17)..(256): Homolog of NCBI NO: 11288307 NR Description: 27k vesicle-associated membrane
  misc_feature (17)..(255): Homolog of NCBI NO: 18411240 NR Description: VAMP (vesicle-associated membrane protein family [Arabidopsis thaliana] >gi|25054852|gb|AAN71916.1|
  misc_feature (17)..(255): Homolog of NCBI NO: 21592874 NR Description: putative proline-rich protein [Arabidopsis
  misc_feature (13)..(173): Homolog of NCBI NO: 15223792 NR Description: VAMP (vesicle-associated membrane
  misc_feature (13)..(173): Homolog of NCBI NO: 25405451 NR Description: hypothetical protein F11M15.13 [imported] - thaliana >gi|4836937|gb|AAD30639.1|AC006085_12 Hypothetical
  misc_feature (18)..(175): Homolog of NCBI NO: 37535894 NR Description: putative vesicle-associated membrane protein

SEQ ID NO: 102653 - protein, 248 aa, Arabidopsis thaliana; identical to SEQ ID NO: 30973
  peptide (1)..(248): Ceres Seq. ID no. 13610871
  misc_feature (1)..(248): Homolog of NCBI NO: 18411661 NR Description: VAMP (vesicle-associated membrane protein, putative [Arabidopsis thaliana] putative protein [Arabidopsis thaliana]
  misc_feature (1)..(248): Homolog of NCBI NO: 11288305 NR Description: hypothetical protein T4C21.10 - Arabidopsis >gi|7329670|emb|CAB82664.1| putative protein [Arabidopsis
  misc_feature (9)..(248): Homolog of NCBI NO: 21554053 NR Description: putative VAMP-associated protein [Arabidopsis
  misc_feature (9)..(248): Homolog of NCBI NO: 15225415 NR Description: VAMP (vesicle-associated membrane
  misc_feature (9)..(248): Homolog of NCBI NO: 11288307 NR Description: 27k vesicle-associated membrane
  misc_feature (9)..(247): Homolog of NCBI NO: 18411240 NR Description: VAMP (vesicle-associated membrane protein family [Arabidopsis thaliana] >gi|25054852|gb|AAN71916.1|
  misc_feature (9)..(247): Homolog of NCBI NO: 21592874 NR Description: putative proline-rich protein [Arabidopsis
  misc_feature (5)..(165): Homolog of NCBI NO: 15223792 NR Description: VAMP (vesicle-associated membrane
  misc_feature (5)..(165): Homolog of NCBI NO: 25405451 NR Description: hypothetical protein F11M15.13 [imported] - thaliana >gi|4836937|gb|AAD30639.1|AC006085_12 Hypothetical
  misc_feature (10)..(167): Homolog of NCBI NO: 37535894 NR Description: putative vesicle-associated membrane protein

SEQ ID NO: 102654 - protein, 240 aa, Arabidopsis thaliana; identical to SEQ ID NO: 30974
  peptide (1)..(240): Ceres Seq. ID no. 13610872
  misc_feature (1)..(240): Homolog of NCBI NO: 18411661 NR Description: VAMP (vesicle-associated membrane protein, putative [Arabidopsis thaliana] putative protein [Arabidopsis thaliana]
  misc_feature (1)..(240): Homolog of NCBI NO: 11288305 NR Description: hypothetical protein T4C21.10 - Arabidopsis >gi|7329670|emb|CAB82664.1| putative protein [Arabidopsis
  misc_feature (1)..(240): Homolog of NCBI NO: 21554053 NR Description: putative VAMP-associated protein [Arabidopsis
  misc_feature (1)..(240): Homolog of NCBI NO: 15225415 NR Description: VAMP (vesicle-associated membrane
  misc_feature (1)..(240): Homolog of NCBI NO: 11288307 NR Description: 27k vesicle-associated membrane
  misc_feature (1)..(239): Homolog of NCBI NO: 18411240 NR Description: VAMP (vesicle-associated membrane protein family [Arabidopsis thaliana] >gi|25054852|gb|AAN71916.1|
  misc_feature (1)..(239): Homolog of NCBI NO: 21592874 NR Description: putative proline-rich protein [Arabidopsis
  misc_feature (1)..(157): Homolog of NCBI NO: 15223792 NR Description: VAMP (vesicle-associated membrane
  misc_feature (1)..(157): Homolog of NCBI NO: 25405451 NR Description: hypothetical protein F11M15.13 [imported] - thaliana >gi|4836937|gb|AAD30639.1|AC006085_12 Hypothetical
  misc_feature (2)..(159): Homolog of NCBI NO: 37535894 NR Description: putative vesicle-associated membrane protein

SEQ ID NO: 102655 - DNA, 829 bp, Arabidopsis thaliana
  misc_feature (1)..(829): Ceres Seq. ID no. 13610873
  misc_feature: MA Experiment ID: 20000169 Result: Up-regulated in Transcription
  misc_feature: MA Experiment 20000169 PARAMETER Experiment Name: At_100uM_ABA_P Parameter: Age (day) Value: 14
  misc_feature: MA Experiment 20000169 PARAMETER Experiment Name: At_100uM_ABA_P Parameter: Organism Value: A. thaliana
  misc_feature: MA Experiment 20000169 PARAMETER Experiment Name: At_100uM_ABA_P Parameter: Plant Line Value: WS
  misc_feature: MA Experiment 20000169 PARAMETER Experiment Name: At_100uM_ABA_P Parameter: Timepoint (hr) Value: 6
  misc_feature: MA Experiment 20000169 PARAMETER Experiment Name: At_100uM_ABA_P Parameter: Tissue Value: Aerial
  misc_feature: MA Experiment 20000169 PARAMETER Experiment Name: At_100uM_ABA_P Parameter: Treatment Value: 100uM ABA vs. No Treatment
  misc_feature: MA Experiment ID: 20000184 Result: Down-regulated in Transcription
  misc_feature: MA Experiment 20000184 PARAMETER Experiment Name: At_Shoots__P Parameter: Age (day) Value: 7
  misc_feature: MA Experiment 20000184 PARAMETER Experiment Name: At_Shoots__P Parameter: Tissue Value: Shoots vs. Whole Plant
  misc_feature: MA Experiment ID: 20000185 Result: Down-regulated in Transcription
  misc_feature: MA Experiment 20000185 PARAMETER Experiment Name: At_Roots__P Parameter: Age (day) Value: 7 vs. 21
  misc_feature: MA Experiment 20000185 PARAMETER Experiment Name: At_Roots__P Parameter: Organism Value: A. thaliana
  misc_feature: MA Experiment 20000185 PARAMETER Experiment Name: At_Roots__P Parameter: Tissue Value: Roots vs. Whole Plant
  misc_feature: MA Experiment ID: 20000227 Result: Down-regulated in Transcription
  misc_feature: MA Experiment 20000227 PARAMETER Experiment Name: At_Root-Tips-vs-Tops_P Parameter: Tissue Value: Root Tips vs. Root Tops
  misc_feature: MA Experiment ID: 20000234 Result: Down-regulated in Transcription
  misc_feature: MA Experiment 20000234 PARAMETER Experiment Name: At_Siliques_P Parameter: Age (day) Value: 21
  misc_feature: MA Experiment 20000234 PARAMETER Experiment Name: At_Siliques_P Parameter: Organism Value: A. thaliana
  misc_feature: MA Experiment 20000234 PARAMETER Experiment Name: At_Siliques_P Parameter: Plant Line Value: WS
  misc_feature: MA Experiment 20000234 PARAMETER Experiment Name: At_Siliques_P Parameter: Tissue Value: Less Than 5mm Siliques vs. Whole Plant
  misc_feature: MA Experiment ID: 20000235 Result: Down-regulated in Transcription
  misc_feature: MA Experiment 20000235 PARAMETER Experiment Name: At_Siliques_P Parameter: Age (day) Value: 21
  misc_feature: MA Experiment 20000235 PARAMETER Experiment Name: At_Siliques_P Parameter: Organism Value: A. thaliana
  misc_feature: MA Experiment 20000235 PARAMETER Experiment Name: At_Siliques_P Parameter: Plant Line Value: WS
  misc_feature: MA Experiment 20000235 PARAMETER Experiment Name: At_Siliques_P Parameter: Tissue Value: 5-10mm Siliques vs. Whole Plant
  misc_feature: MA Experiment ID: 20000264 Result: Down-regulated in Transcription
  misc_feature: MA Experiment 20000264 PARAMETER Experiment Name: At_Open_Flower_P Parameter: Age (day) Value: 21
  misc_feature: MA Experiment 20000264 PARAMETER Experiment Name: At_Open_Flower_P Parameter: Plant Line Value: WS
  misc_feature: MA Experiment 20000264 PARAMETER Experiment Name: At_Open_Flower_P Parameter: Tissue Value: Open Flower vs. Whole Plant
  misc_feature: MA Experiment ID: 20000265 Result: Down-regulated in Transcription
  misc_feature: MA Experiment 20000265 PARAMETER Experiment Name: At_Open_Flower_P Parameter: Age (day) Value: 21
  misc_feature: MA Experiment 20000265 PARAMETER Experiment Name: At_Open_Flower_P Parameter: Plant Line Value: WS
  misc_feature: MA Experiment 20000265 PARAMETER Experiment Name: At_Open_Flower_P Parameter: Tissue Value: Closed Flower vs. Whole Plant
  misc_feature: MA Experiment ID: 20000286 Result: Down-regulated in Transcription
  misc_feature: MA Experiment 20000286 PARAMETER Experiment Name: At_Open_Flower_P Parameter: Age (day) Value: 21
  misc_feature: MA Experiment 20000286 PARAMETER Experiment Name: At_Open_Flower_P Parameter: Plant Line Value: WS
  misc_feature: MA Experiment 20000286 PARAMETER Experiment Name: At_Open_Flower_P Parameter: Tissue Value: Half Open vs. Whole Plant
  misc_feature: MA Experiment ID: 20000438 Result: Down-regulated in Transcription
  misc_feature: MA Experiment 20000438 PARAMETER Experiment Name: At_Shoots__P Parameter: Age (day) Value: 14
  misc_feature: MA Experiment 20000438 PARAMETER Experiment Name: At_Shoots__P Parameter: Tissue Value: Shoots vs. Whole Plant
  misc_feature: MA Experiment ID: 20000439 Result: Down-regulated in Transcription
  misc_feature: MA Experiment 20000439 PARAMETER Experiment Name: At_Roots__P Parameter: Age (day) Value: 14 vs. 21
  misc_feature: MA Experiment 20000439 PARAMETER Experiment Name: At_Roots__P Parameter: Organism Value: A. thaliana
  misc_feature: MA Experiment 20000439 PARAMETER Experiment Name: At_Roots__P Parameter: Tissue Value: Roots vs. Whole Plant
  misc_feature: MA Experiment ID: 20000441 Result: Up-regulated in Transcription
  misc_feature: MA Experiment 20000441 PARAMETER Experiment Name: At_1uM_BR-BRZ__P Parameter: Tissue Value: Shoot Apices
  misc_feature: MA Experiment 20000441 PARAMETER Experiment Name: At_1uM_BR-BRZ__P Parameter: Treatment Value: 1uM BR vs. No Treatment
  misc_feature: MA Experiment ID: 20000443 Result: Up-regulated in Transcription
  misc_feature: MA Experiment 20000443 PARAMETER Experiment Name: At_1uM_BR-BRZ__P Parameter: Tissue Value: Shoot Apices
  misc_feature: MA Experiment 20000443 PARAMETER Experiment Name: At_1uM_BR-BRZ__P Parameter: Treatment Value: 1uM BRZ vs. No Treatment
  misc_feature: MA Experiment ID: 20000794 Result: Down-regulated in Transcription
  misc_feature: MA Experiment 20000794 PARAMETER Experiment Name: At_Petals_P Parameter: Age (day) Value: 23-25 days
  misc_feature: MA Experiment 20000794 PARAMETER Experiment Name: At_Petals_P Parameter: Plant Line Value: WS
  misc_feature: MA Experiment 20000794 PARAMETER Experiment Name: At_Petals_P Parameter: Tissue Value: Petals vs. Whole plant
  misc_feature: MA Experiment ID: 20001554 Result: Up-regulated in Transcription
  misc_feature: MA Experiment 20001554 PARAMETER Experiment Name: At_Drought_Soil_Dry_P Parameter: Age (day) Value: 21
  misc_feature: MA Experiment 20001554 PARAMETER Experiment Name: At_Drought_Soil_Dry_P Parameter: Organism Value: A. thaliana
  misc_feature: MA Experiment 20001554 PARAMETER Experiment Name: At_Drought_Soil_Dry_P Parameter: Plant Line Value: WS
  misc_feature: MA Experiment 20001554 PARAMETER Experiment Name: At_Drought_Soil_Dry_P Parameter: Post Timepoint (hr) Value: None
  misc_feature: MA Experiment 20001554 PARAMETER Experiment Name: At_Drought_Soil_Dry_P Parameter: Post-Treatment Value: None
  misc_feature: MA Experiment 20001554 PARAMETER Experiment Name: At_Drought_Soil_Dry_P Parameter: Timepoint (day) Value: 7
  misc_feature: MA Experiment 20001554 PARAMETER Experiment Name: At_Drought_Soil_Dry_P Parameter: Treatment Value: Drought vs. No Drought
  misc_feature: MA Experiment ID: 20001555 Result: Up-regulated in Transcription
  misc_feature: MA Experiment 20001555 PARAMETER Experiment Name: At_Drought_Soil_Dry_P Parameter: Age (day) Value: 24
  misc_feature: MA Experiment 20001555 PARAMETER Experiment Name: At_Drought_Soil_Dry_P Parameter: Organism Value: A. thaliana
  misc_feature: MA Experiment 20001555 PARAMETER Experiment Name: At_Drought_Soil_Dry_P Parameter: Plant Line Value: WS
  misc_feature: MA Experiment 20001555 PARAMETER Experiment Name: At_Drought_Soil_Dry_P Parameter: Post Timepoint (hr) Value: None
  misc_feature: MA Experiment 20001555 PARAMETER Experiment Name: At_Drought_Soil_Dry_P Parameter: Post-Treatment Value: None
  misc_feature: MA Experiment 20001555 PARAMETER Experiment Name: At_Drought_Soil_Dry_P Parameter: Timepoint (day) Value: 10
  misc_feature: MA Experiment 20001555 PARAMETER Experiment Name: At_Drought_Soil_Dry_P Parameter: Treatment Value: Drought vs. No Drought
  misc_feature: MA Experiment ID: 20001905 Result: Up-regulated in Transcription
  misc_feature: MA Experiment 20001905 PARAMETER Experiment Name: At_Drought_Reproduction_P Parameter: Age (day) Value: 40
  misc_feature: MA Experiment 20001905 PARAMETER Experiment Name: At_Drought_Reproduction_P Parameter: Organism Value: A. thaliana
  misc_feature: MA Experiment 20001905 PARAMETER Experiment Name: At_Drought_Reproduction_P Parameter: Plant Line Value: WS
  misc_feature: MA Experiment 20001905 PARAMETER Experiment Name: At_Drought_Reproduction_P Parameter: Timepoint (day) Value: 10
  misc_feature: MA Experiment 20001905 PARAMETER Experiment Name: At_Drought_Reproduction_P Parameter: Tissue Value: Rosettes
  misc_feature: MA Experiment 20001905 PARAMETER Experiment Name: At_Drought_Reproduction_P Parameter: Treatment Value: Drought vs. No Drought
  misc_feature: MA Experiment ID: 20001910 Result: Up-regulated in Transcription
  misc_feature: MA Experiment 20001910 PARAMETER Experiment Name: At_Drought_Reproduction_P Parameter: Age (day) Value: 37
  misc_feature: MA Experiment 20001910 PARAMETER Experiment Name: At_Drought_Reproduction_P Parameter: Organism Value: A. thaliana
  misc_feature: MA Experiment 20001910 PARAMETER Experiment Name: At_Drought_Reproduction_P Parameter: Plant Line Value: WS
  misc_feature: MA Experiment 20001910 PARAMETER Experiment Name: At_Drought_Reproduction_P Parameter: Timepoint (day) Value: 7
  misc_feature: MA Experiment 20001910 PARAMETER Experiment Name: At_Drought_Reproduction_P Parameter: Tissue Value: Flowers
  misc_feature: MA Experiment 20001910 PARAMETER Experiment Name: At_Drought_Reproduction_P Parameter: Treatment Value: Drought vs. No Drought
  misc_feature: MA Experiment ID: 20001911 Result: Up-regulated in Transcription
  misc_feature: MA Experiment 20001911 PARAMETER Experiment Name: At_Drought_Reproduction_P Parameter: Age (day) Value: 40
  misc_feature: MA Experiment 20001911 PARAMETER Experiment Name: At_Drought_Reproduction_P Parameter: Organism Value: A. thaliana
  misc_feature: MA Experiment 20001911 PARAMETER Experiment Name: At_Drought_Reproduction_P Parameter: Plant Line Value: WS
  misc_feature: MA Experiment 20001911 PARAMETER Experiment Name: At_Drought_Reproduction_P Parameter: Timepoint (day) Value: 10
  misc_feature: MA Experiment 20001911 PARAMETER Experiment Name: At_Drought_Reproduction_P Parameter: Tissue Value: Flowers
  misc_feature: MA Experiment 20001911 PARAMETER Experiment Name: At_Drought_Reproduction_P Parameter: Treatment Value: Drought vs. No Drought
tttagcgtttacacagccacaaattcctcaatactctatatttctcttcccgtttgaaactccaaagcttgtttgatgaaaacagagtaaacggttctgttcaaaacatttttcaagctctgttactttgttttttcaacgatgaggaagttaagaggaatcaaaattagaagaccgattaaacaaatctcaagatggatcctccggagaattaagattcgtcgttcaagatacacccggttaagcccaaaccgcccggtttgcaagccgagagccatcacaaaactcataagttggggtcgaagtctcacatcccacagcgccaggtttattgggtctaaatgctccaattcagggtacataccaattggtcaagaacccattcgagaaaagcccgacccggttccgaaaggtcactcggcggtttacatcggtaaaaaagacggcgactttcagagagttttggtgcctatcgtttactttaaccatcctctgtttggtgagcttcttagagaggctgaagaagaatttgggttttctcaagaaggtggaatcactatcccttgtccttactcagatttcaaacgggtccaaacccgaattgaatccgggtcgggtttctgtaaatttccctggagccggcggtggcaataacgacggtggaagaagatgatgatgatgaaaaagttctttaactcttttttactattttctaccttttcacttttgttactatttttacccttttgttagatatgtacatattctgtatgtgaaaagtgaggtttgaatttaggcgataatgtaaataatatagagattttttatt

SEQ ID NO: 102656 - protein, 170 aa, Arabidopsis thaliana
  peptide (1)..(170): Ceres Seq. ID no. 13610874
  misc_feature (50)..(155): Pfam Name: Auxin responsive protein Pfam Description: Auxin responsive protein
  misc_feature (1)..(170): Homolog of NCBI NO: 15232400 NR Description: auxin-induced (indole-3-acetic acid induced)
  misc_feature (1)..(167): Homolog of NCBI NO: 15225432 NR Description: auxin-induced (indole-3-acetic acid induced)
  misc_feature (1)..(154): Homolog of NCBI NO: 15235723 NR Description: auxin-induced (indole-3-acetic acid induced)
  misc_feature (1)..(154): Homolog of NCBI NO: 15234550 NR Description: auxin-induced (indole-3-acetic acid induced)
  misc_feature (6)..(157): Homolog of NCBI NO: 38567865 NR Description: OSJNBa0091D06.3 [Oryza sativa (japonica
  misc_feature (86)..(155): Homolog of NCBI NO: 18411465 NR Description: auxin-induced (indole-3-acetic acid induced)
  misc_feature (88)..(154): Homolog of NCBI NO: 15228626 NR Description: auxin-induced (indole-3-acetic acid induced)
  misc_feature (84)..(155): Homolog of NCBI NO: 15226425 NR Description: auxin-induced (indole-3-acetic acid induced)
  misc_feature (88)..(155): Homolog of NCBI NO: 15238779 NR Description: auxin-induced (indole-3-acetic acid induced) family [Arabidopsis thaliana] >gi|9759198|dbj|BAB09735.1|
  misc_feature (88)..(155): Homolog of NCBI NO: 38454072 NR Description: At5g53590 [Arabidopsis thaliana]
MRKLRGIKIRRPIKQISRWILRRIKIRRSRYTRLSPNRPVCKPRAITKLISWGRSLTSHSARFIGSKCSNSGYIPIGQEPIREKPDPVPKGHSAVYIGKKDGDFQRVLVPIVYFNHPLFGELLREAEEEFGFSQEGGITIPCPYSDFKRVQTRIESGSGFCKFPWSRRWQ

SEQ ID NO: 102657 - DNA, 1592 bp, Arabidopsis thaliana
  misc_feature (1)..(1592): Ceres Seq. ID no. 13610879
  misc_feature: MA Experiment ID: 108577 Result: Down-regulated in Transcription
  misc_feature: MA Experiment 108577 PARAMETER Experiment Name: At_42deg_Heat_cDNA_P Parameter: Temperature (deg C) Value: 42 vs. 22
  misc_feature: MA Experiment 108577 PARAMETER Experiment Name: At_42deg_Heat_cDNA_P Parameter: Timepoint (hr) Value: 6
  misc_feature: MA Experiment 108577 PARAMETER Experiment Name: At_42deg_Heat_cDNA_P Parameter: Tissue Value: Aerial
  misc_feature: MA Experiment ID: 108585 Result: Up-regulated in Transcription
  misc_feature: MA Experiment 108585 PARAMETER Experiment Name: At_5mM_NaNP_cDNA_P Parameter: Timepoint (hr) Value: 6
  misc_feature: MA Experiment 108585 PARAMETER Experiment Name: At_5mM_NaNP_cDNA_P Parameter: Tissue Value: Aerial
  misc_feature: MA Experiment 108585 PARAMETER Experiment Name: At_5mM_NaNP_cDNA_P Parameter: Treatment Value: null
  misc_feature: MA Experiment ID: 20000171 Result: Down-regulated in Transcription
  misc_feature: MA Experiment 20000171 PARAMETER Experiment Name: At_42deg_Heat_P Parameter: Age (day) Value: 14
  misc_feature: MA Experiment 20000171 PARAMETER Experiment Name: At_42deg_Heat_P Parameter: Organism Value: A. thaliana
  misc_feature: MA Experiment 20000171 PARAMETER Experiment Name: At_42deg_Heat_P Parameter: Plant Line Value: WS
  misc_feature: MA Experiment 20000171 PARAMETER Experiment Name: At_42deg_Heat_P Parameter: Temperature (deg C) Value: 42 vs. 22
  misc_feature: MA Experiment 20000171 PARAMETER Experiment Name: At_42deg_Heat_P Parameter: Timepoint (hr) Value: 1
  misc_feature: MA Experiment 20000171 PARAMETER Experiment Name: At_42deg_Heat_P Parameter: Tissue Value: Aerial
  misc_feature: MA Experiment ID: 20000184 Result: Down-regulated in Transcription
  misc_feature: MA Experiment 20000184 PARAMETER Experiment Name: At_Shoots__P Parameter: Age (day) Value: 7
  misc_feature: MA Experiment 20000184 PARAMETER Experiment Name: At_Shoots__P Parameter: Tissue Value: Shoots vs. Whole Plant
gattgactaaaagtcattaaattacaaatctaaagttaaaagtgtttcgtctgaaatttcttgttagctccaaaagaggaaaacgaatccaagaaggagaaaaagtctcattcctcaagctccgcatcattcctccttcatggggtctctgcatcttacaatttagcactctcatattattattccttaaaccccttgttttgattttgtttccagatttaaagaaaccctaagacctcttcgaaatctccccagaaacacttatttcatttcttccttggccttgactacgcgtctttccttttactccggaaggaagatccagaaaggttttctttcgatcgttgcttttgactatgcatagatctggtacaacaatggcgtggaacgtattcaagttctgtactgccttacgaggtcttggatcgatcatgatccttttggttcttggtgttgtcggtgttacttattacgctgtcgttttgactaattatggtcctgcactctctcaaggtggccttgattctcttgctgctctcactatcttaatcctcttccatttcctcctggcaatgcttttgtggagctatttctcagtggtttttactgatcctggtgttgtgcctcctaattggagaccatctactgatgaagaaagaggtgaatctgatccgttaaatagtttggactttgttggtttacaatccgattcttcttcttcaaacccaagagttcggttttgtcggaagtgcaatcaactaaaaccttctcgttgtcatcattgttctgtttgtggtcggtgtgtgttgaagatggatcaccattgtgtttgggttgttaactgtgtaggagcactgaactataagtattttcttcttttcttgttctacacatttttagagacgacccttgtgactttggttcttatgccgcacttcattgcattctttagtgatgaagaaatacctggaaccccaggcactcttgctactacttttcttgcatttgttttgaacttggcatttgcgttgagcgtgatgggtttcttaattatgcatatttccttggtagctggcaataccacaactatagaggcatatgagaagaaaaccactacaaaatggcggtatgacctcggtaaaaagaaaaactttgaacaggtatttggaatggataagagatactggttaatcccaggatacacagaagaagatctaaggcgaatgccggagctgcagggacttgaatacccttcgaaacccgactttgattcccagtgatgctcaagaagactttgatcatcatcatcatcccatgtaaaacagcaatacgtagaaaaacagagcaagtggcatgtcaaggagaaatctactaacatgaagatggatgcttcactttaggcagtgtagatgtcttcccatggaaggctaagtcatcatcaaatttgtgggttttgaaaagaggatgattacaatttagctttgttggccacatatatgttcatcatcttcaatagttcatatatagatatgatcttattataaatgtagaacacacatgatttaccctaaatcctcttgactcttttgttt

SEQ ID NO: 102658 - protein, 307 aa, Arabidopsis thaliana; identical to SEQ ID NO: 30864
  peptide (1)..(307): Ceres Seq. ID no. 13610880
  misc_feature (118)..(182): Pfam Name: DHHC zinc finger domain Pfam Description: DHHC zinc finger domain
  misc_feature (1)..(307): Homolog of NCBI NO: 22331887 NR Description: DHHC-type zinc finger domain-containing protein thaliana] >gi|17979303|gb|AAL49877.1| unknown protein thaliana] >gi|20466005|gb|AAM20224.1| unknown protein
  misc_feature (152)..(307): Homolog of NCBI NO: 11358343 NR Description: hypothetical protein T4C21.210 - Arabidopsis >gi|7329690|emb|CAB82684.1| putative protein [Arabidopsis
  misc_feature (8)..(126): Homolog of NCBI NO: 11358343 NR Description: hypothetical protein T4C21.210 - Arabidopsis >gi|7329690|emb|CAB82684.1| putative protein [Arabidopsis
  misc_feature (8)..(307): Homolog of NCBI NO: 21593364 NR Description: unknown [Arabidopsis thaliana]
  misc_feature (8)..(307): Homolog of NCBI NO: 18416000 NR Description: DHHC-type zinc finger domain-containing protein thaliana] >gi|14334550|gb|AAK59683.1| unknown protein thaliana] >gi|17065618|gb|AAL33803.1| unknown protein
  misc_feature (7)..(307): Homolog of NCBI NO: 7486880 NR Description: hypothetical protein T12H17.140 - Arabidopsis >gi|2827552|emb|CAA16560.1| predicted protein [Arabidopsis >gi|7269121|emb|CAB79230.1| predicted protein [Arabidopsis
  misc_feature (73)..(232): Homolog of NCBI NO: 18411456 NR Description: DHHC-type zinc finger domain-containing protein
  misc_feature (218)..(269): Homolog of NCBI NO: 18411456 NR Description: DHHC-type zinc finger domain-containing protein
  misc_feature (10)..(280): Homolog of NCBI NO: 29791459 NR Description: Similar to RIKEN cDNA 5033406L14 gene [Homo
  misc_feature (25)..(302): Homolog of NCBI NO: 30409974 NR Description: zinc finger, DHHC domain containing 2 [Mus >gi|28202094|sp|P59267|ZDH2_MOUSE Zinc finger DHHC domain protein 2 >gi|26326649|dbj|BAC27068.1| unnamed protein product

SEQ ID NO: 102659 - protein, 300 aa, Arabidopsis thaliana; identical to SEQ ID NO: 30865
  peptide (1)..(300): Ceres Seq. ID no. 13610881
  misc_feature (111)..(175): Pfam Name: DHHC zinc finger domain Pfam Description: DHHC zinc finger domain
  misc_feature (1)..(300): Homolog of NCBI NO: 22331887 NR Description: DHHC-type zinc finger domain-containing protein thaliana] >gi|17979303|gb|AAL49877.1| unknown protein thaliana] >gi|20466005|gb|AAM20224.1| unknown protein
  misc_feature (145)..(300): Homolog of NCBI NO: 11358343 NR Description: hypothetical protein T4C21.210 - Arabidopsis >gi|7329690|emb|CAB82684.1| putative protein [Arabidopsis
  misc_feature (1)..(119): Homolog of NCBI NO: 11358343 NR Description: hypothetical protein T4C21.210 - Arabidopsis >gi|7329690|emb|CAB82684.1| putative protein [Arabidopsis
  misc_feature (1)..(300): Homolog of NCBI NO: 21593364 NR Description: unknown [Arabidopsis thaliana]
  misc_feature (1)..(300): Homolog of NCBI NO: 18416000 NR Description: DHHC-type zinc finger domain-containing protein thaliana] >gi|14334550|gb|AAK59683.1| unknown protein thaliana] >gi|17065618|gb|AAL33803.1| unknown protein
  misc_feature (1)..(300): Homolog of NCBI NO: 7486880 NR Description: hypothetical protein T12H17.140 - Arabidopsis >gi|2827552|emb|CAA16560.1| predicted protein [Arabidopsis >gi|7269121|emb|CAB79230.1| predicted protein [Arabidopsis
  misc_feature (66)..(225): Homolog of NCBI NO: 18411456 NR Description: DHHC-type zinc finger domain-containing protein
  misc_feature (211)..(262): Homolog of NCBI NO: 18411456 NR Description: DHHC-type zinc finger domain-containing protein
  misc_feature (3)..(273): Homolog of NCBI NO: 29791459 NR Description: Similar to RIKEN cDNA 5033406L14 gene [Homo
  misc_feature (18)..(295): Homolog of NCBI NO: 30409974 NR Description: zinc finger, DHHC domain containing 2 [Mus >gi|28202094|sp|P59267|ZDH2_MOUSE Zinc finger DHHC domain protein 2 >gi|26326649|dbj|BAC27068.1| unnamed protein product

SEQ ID NO: 102660 - protein, 282 aa, Arabidopsis thaliana; identical to SEQ ID NO: 30866
  peptide (1)..(282): Ceres Seq. ID no. 13610882
  misc_feature (93)..(157): Pfam Name: DHHC zinc finger domain Pfam Description: DHHC zinc finger domain
  misc_feature (1)..(282): Homolog of NCBI NO: 22331887 NR Description: DHHC-type zinc finger domain-containing protein thaliana] >gi|17979303|gb|AAL49877.1| unknown protein thaliana] >gi|20466005|gb|AAM20224.1| unknown protein
  misc_feature (127)..(282): Homolog of NCBI NO: 11358343 NR Description: hypothetical protein T4C21.210 - Arabidopsis >gi|7329690|emb|CAB82684.1| putative protein [Arabidopsis
  misc_feature (1)..(101): Homolog of NCBI NO: 11358343 NR Description: hypothetical protein T4C21.210 - Arabidopsis >gi|7329690|emb|CAB82684.1| putative protein [Arabidopsis
  misc_feature (1)..(282): Homolog of NCBI NO: 21593364 NR Description: unknown [Arabidopsis thaliana]
  misc_feature (1)..(282): Homolog of NCBI NO: 18416000 NR Description: DHHC-type zinc finger domain-containing protein thaliana] >gi|14334550|gb|AAK59683.1| unknown protein thaliana] >gi|17065618|gb|AAL33803.1| unknown protein
  misc_feature (1)..(282): Homolog of NCBI NO: 7486880 NR Description: hypothetical protein T12H17.140 - Arabidopsis >gi|2827552|emb|CAA16560.1| predicted protein [Arabidopsis >gi|7269121|emb|CAB79230.1| predicted protein [Arabidopsis
  misc_feature (48)..(207): Homolog of NCBI NO: 18411456 NR Description: DHHC-type zinc finger domain-containing protein
  misc_feature (193)..(244): Homolog of NCBI NO: 18411456 NR Description: DHHC-type zinc finger domain-containing protein
  misc_feature (1)..(255): Homolog of NCBI NO: 29791459 NR Description: Similar to RIKEN cDNA 5033406L14 gene [Homo
  misc_feature (1)..(277): Homolog of NCBI NO: 30409974 NR Description: zinc finger, DHHC domain containing 2 [Mus >gi|28202094|sp|P59267|ZDH2_MOUSE Zinc finger DHHC domain protein 2 >gi|26326649|dbj|BAC27068.1| unnamed protein product

SEQ ID NO: 102661 - DNA, 1172 bp, Arabidopsis thaliana
  misc_feature (1)..(1172): Ceres Seq. ID no. 13610891
  misc_feature: MA Experiment ID: 108433 Result: Up-regulated in Transcription
  misc_feature: MA Experiment 108433 PARAMETER Experiment Name: At_rhl_Mutant2_cDNA_P Parameter: Age (day) Value: 7
  misc_feature: MA Experiment 108433 PARAMETER Experiment Name: At_rhl_Mutant2_cDNA_P Parameter: Organism Value: A. thaliana
  misc_feature: MA Experiment 108433 PARAMETER Experiment Name: At_rhl_Mutant2_cDNA_P Parameter: Plant Line Value: rhl Mutant vs. wt landsburg
  misc_feature: MA Experiment 108433 PARAMETER Experiment Name: At_rhl_Mutant2_cDNA_P Parameter: Tissue Value: Roots
  misc_feature: MA Experiment ID: 108434 Result: Down-regulated in Transcription
  misc_feature: MA Experiment 108434 PARAMETER Experiment Name: At_Root_Tips_cDNA_P Parameter: Tissue Value: Root Tips
  misc_feature: MA Experiment ID: 108461 Result: Up-regulated in Transcription
  misc_feature: MA Experiment 108461 PARAMETER Experiment Name: At_Germinating_Seeds_cDNA_P Parameter: Age (day) Value: 1 vs. 0
  misc_feature: MA Experiment 108461 PARAMETER Experiment Name: At_Germinating_Seeds_cDNA_P Parameter: Tissue Value: Germinating Seeds
  misc_feature: MA Experiment ID: 108462 Result: Up-regulated in Transcription
  misc_feature: MA Experiment 108462 PARAMETER Experiment Name: At_Germinating_Seeds_cDNA_P Parameter: Age (day) Value: 2 vs. 0
  misc_feature: MA Experiment 108462 PARAMETER Experiment Name: At_Germinating_Seeds_cDNA_P Parameter: Tissue Value: Germinating Seeds
  misc_feature: MA Experiment ID: 108463 Result: Up-regulated in Transcription
  misc_feature: MA Experiment 108463 PARAMETER Experiment Name: At_Germinating_Seeds_cDNA_P Parameter: Age (day) Value: 3 vs. 0
  misc_feature: MA Experiment 108463 PARAMETER Experiment Name: At_Germinating_Seeds_cDNA_P Parameter: Tissue Value: Germinating Seeds
  misc_feature: MA Experiment ID: 108464 Result: Up-regulated in Transcription
  misc_feature: MA Experiment 108464 PARAMETER Experiment Name: At_Germinating_Seeds_cDNA_P Parameter: Age (day) Value: 4 vs. 0
  misc_feature: MA Experiment 108464 PARAMETER Experiment Name: At_Germinating_Seeds_cDNA_P Parameter: Tissue Value: Germinating Seeds
  misc_feature: MA Experiment ID: 108585 Result: Down-regulated in Transcription
  misc_feature: MA Experiment 108585 PARAMETER Experiment Name: At_5mM_NaNP_cDNA_P Parameter: Timepoint (hr) Value: 6
  misc_feature: MA Experiment 108585 PARAMETER Experiment Name: At_5mM_NaNP_cDNA_P Parameter: Tissue Value: Aerial
  misc_feature: MA Experiment 108585 PARAMETER Experiment Name: At_5mM_NaNP_cDNA_P Parameter: Treatment Value: null
  misc_feature: MA Experiment ID: 108595 Result: Down-regulated in Transcription
  misc_feature: MA Experiment 108595 PARAMETER Experiment Name: At_Ler-pi_Ovule_cDNA_P Parameter: Plant Line Value: null
  misc_feature: MA Experiment ID: 20000180 Result: Up-regulated in Transcription
  misc_feature: MA Experiment 20000180 PARAMETER Experiment Name: At_Germinating_Seeds_P Parameter: Age (hr) Value: 24 vs. 0
  misc_feature: MA Experiment 20000180 PARAMETER Experiment Name: At_Germinating_Seeds_P Parameter: Tissue Value: Germinating Seeds
  misc_feature: MA Experiment ID: 20000185 Result: Down-regulated in Transcription
  misc_feature: MA Experiment 20000185 PARAMETER Experiment Name: At_Roots__P Parameter: Age (day) Value: 7 vs. 21
  misc_feature: MA Experiment 20000185 PARAMETER Experiment Name: At_Roots__P Parameter: Organism Value: A. thaliana
  misc_feature: MA Experiment 20000185 PARAMETER Experiment Name: At_Roots__P Parameter: Tissue Value: Roots vs. Whole Plant
  misc_feature: MA Experiment ID: 20000234 Result: Down-regulated in Transcription
  misc_feature: MA Experiment 20000234 PARAMETER Experiment Name: At_Siliques_P Parameter: Age (day) Value: 21
  misc_feature: MA Experiment 20000234 PARAMETER Experiment Name: At_Siliques_P Parameter: Organism Value: A. thaliana
  misc_feature: MA Experiment 20000234 PARAMETER Experiment Name: At_Siliques_P Parameter: Plant Line Value: WS
  misc_feature: MA Experiment 20000234 PARAMETER Experiment Name: At_Siliques_P Parameter: Tissue Value: Less Than 5mm Siliques vs. Whole Plant
  misc_feature: MA Experiment ID: 20000235 Result: Down-regulated in Transcription
  misc_feature: MA Experiment 20000235 PARAMETER Experiment Name: At_Siliques_P Parameter: Age (day) Value: 21
  misc_feature: MA Experiment 20000235 PARAMETER Experiment Name: At_Siliques_P Parameter: Organism Value: A. thaliana
  misc_feature: MA Experiment 20000235 PARAMETER Experiment Name: At_Siliques_P Parameter: Plant Line Value: WS
  misc_feature: MA Experiment 20000235 PARAMETER Experiment Name: At_Siliques_P Parameter: Tissue Value: 5-10mm Siliques vs. Whole Plant
  misc_feature: MA Experiment ID: 20000265 Result: Down-regulated in Transcription
  misc_feature: MA Experiment 20000265 PARAMETER Experiment Name: At_Open_Flower_P Parameter: Age (day) Value: 21
  misc_feature: MA Experiment 20000265 PARAMETER Experiment Name: At_Open_Flower_P Parameter: Plant Line Value: WS
  misc_feature: MA Experiment 20000265 PARAMETER Experiment Name: At_Open_Flower_P Parameter: Tissue Value: Closed Flower vs. Whole Plant
  misc_feature: MA Experiment ID: 20000286 Result: Down-regulated in Transcription
  misc_feature: MA Experiment 20000286 PARAMETER Experiment Name: At_Open_Flower_P Parameter: Age (day) Value: 21
  misc_feature: MA Experiment 20000286 PARAMETER Experiment Name: At_Open_Flower_P Parameter: Plant Line Value: WS
  misc_feature: MA Experiment 20000286 PARAMETER Experiment Name: At_Open_Flower_P Parameter: Tissue Value: Half Open vs. Whole Plant
  misc_feature: MA Experiment ID: 20000439 Result: Down-regulated in Transcription
  misc_feature: MA Experiment 20000439 PARAMETER Experiment Name: At_Roots__P Parameter: Age (day) Value: 14 vs. 21
  misc_feature: MA Experiment 20000439 PARAMETER Experiment Name: At_Roots__P Parameter: Organism Value: A. thaliana
  misc_feature: MA Experiment 20000439 PARAMETER Experiment Name: At_Roots__P Parameter: Tissue Value: Roots vs. Whole Plant
  misc_feature: MA Experiment ID: 20001555 Result: Down-regulated in Transcription
  misc_feature: MA Experiment 20001555 PARAMETER Experiment Name: At_Drought_Soil_Dry_P Parameter: Age (day) Value: 24
  misc_feature: MA Experiment 20001555 PARAMETER Experiment Name: At_Drought_Soil_Dry_P Parameter: Organism Value: A. thaliana
  misc_feature: MA Experiment 20001555 PARAMETER Experiment Name: At_Drought_Soil_Dry_P Parameter: Plant Line Value: WS
  misc_feature: MA Experiment 20001555 PARAMETER Experiment Name: At_Drought_Soil_Dry_P Parameter: Post Timepoint (hr) Value: None
  misc_feature: MA Experiment 20001555 PARAMETER Experiment Name: At_Drought_Soil_Dry_P Parameter: Post-Treatment Value: None
  misc_feature: MA Experiment 20001555 PARAMETER Experiment Name: At_Drought_Soil_Dry_P Parameter: Timepoint (day) Value: 10
  misc_feature: MA Experiment 20001555 PARAMETER Experiment Name: At_Drought_Soil_Dry_P Parameter: Treatment Value: Drought vs. No Drought
  misc_feature: MA Experiment ID: 20001556 Result: Down-regulated in Transcription
  misc_feature: MA Experiment 20001556 PARAMETER Experiment Name: At_Drought_Soil_Dry_P Parameter: Age (day) Value: 26
  misc_feature: MA Experiment 20001556 PARAMETER Experiment Name: At_Drought_Soil_Dry_P Parameter: Organism Value: A. thaliana
  misc_feature: MA Experiment 20001556 PARAMETER Experiment Name: At_Drought_Soil_Dry_P Parameter: Plant Line Value: WS
  misc_feature: MA Experiment 20001556 PARAMETER Experiment Name: At_Drought_Soil_Dry_P Parameter: Post Timepoint (hr) Value: None
  misc_feature: MA Experiment 20001556 PARAMETER Experiment Name: At_Drought_Soil_Dry_P Parameter: Post-Treatment Value: None
  misc_feature: MA Experiment 20001556 PARAMETER Experiment Name: At_Drought_Soil_Dry_P Parameter: Timepoint (day) Value: 12
  misc_feature: MA Experiment 20001556 PARAMETER Experiment Name: At_Drought_Soil_Dry_P Parameter: Treatment Value: Drought vs. No Drought
  misc_feature: MA Experiment ID: 20001557 Result: Down-regulated in Transcription
  misc_feature: MA Experiment 20001557 PARAMETER Experiment Name: At_Drought_Soil_Dry_P Parameter: Age (day) Value: 27
  misc_feature: MA Experiment 20001557 PARAMETER Experiment Name: At_Drought_Soil_Dry_P Parameter: Organism Value: A. thaliana
  misc_feature: MA Experiment 20001557 PARAMETER Experiment Name: At_Drought_Soil_Dry_P Parameter: Plant Line Value: WS
  misc_feature: MA Experiment 20001557 PARAMETER Experiment Name: At_Drought_Soil_Dry_P Parameter: Post Timepoint (hr) Value: 3
  misc_feature: MA Experiment 20001557 PARAMETER Experiment Name: At_Drought_Soil_Dry_P Parameter: Post-Treatment Value: Re-Water vs. No Drought
  misc_feature: MA Experiment 20001557 PARAMETER Experiment Name: At_Drought_Soil_Dry_P Parameter: Timepoint (day) Value: 13
  misc_feature: MA Experiment 20001557 PARAMETER Experiment Name: At_Drought_Soil_Dry_P Parameter: Treatment Value: Drought vs. No Drought
  misc_feature: MA Experiment ID: 20001558 Result: Down-regulated in Transcription
  misc_feature: MA Experiment 20001558 PARAMETER Experiment Name: At_Drought_Soil_Dry_P Parameter: Age (day) Value: 27
  misc_feature: MA Experiment 20001558 PARAMETER Experiment Name: At_Drought_Soil_Dry_P Parameter: Organism Value: A. thaliana
  misc_feature: MA Experiment 20001558 PARAMETER Experiment Name: At_Drought_Soil_Dry_P Parameter: Plant Line Value: WS
  misc_feature: MA Experiment 20001558 PARAMETER Experiment Name: At_Drought_Soil_Dry_P Parameter: Post Timepoint (hr) Value: 6
  misc_feature: MA Experiment 20001558 PARAMETER Experiment Name: At_Drought_Soil_Dry_P Parameter: Post-Treatment Value: Re-Water vs. No Drought
  misc_feature: MA Experiment 20001558 PARAMETER Experiment Name: At_Drought_Soil_Dry_P Parameter: Timepoint (day) Value: 13
  misc_feature: MA Experiment 20001558 PARAMETER Experiment Name: At_Drought_Soil_Dry_P Parameter: Treatment Value: Drought vs. No Drought
  misc_feature: MA Experiment ID: 20001560 Result: Down-regulated in Transcription
  misc_feature: MA Experiment 20001560 PARAMETER Experiment Name: At_Drought_Soil_Dry_P Parameter: Age (day) Value: 28
  misc_feature: MA Experiment 20001560 PARAMETER Experiment Name: At_Drought_Soil_Dry_P Parameter: Organism Value: A. thaliana
  misc_feature: MA Experiment 20001560 PARAMETER Experiment Name: At_Drought_Soil_Dry_P Parameter: Plant Line Value: WS
  misc_feature: MA Experiment 20001560 PARAMETER Experiment Name: At_Drought_Soil_Dry_P Parameter: Post Timepoint (hr) Value: None
  misc_feature: MA Experiment 20001560 PARAMETER Experiment Name: At_Drought_Soil_Dry_P Parameter: Post-Treatment Value: None
  misc_feature: MA Experiment 20001560 PARAMETER Experiment Name: At_Drought_Soil_Dry_P Parameter: Timepoint (day) Value: 14
  misc_feature: MA Experiment 20001560 PARAMETER Experiment Name: At_Drought_Soil_Dry_P Parameter: Treatment Value: Drought vs. No Drought
  misc_feature: MA Experiment ID: 20001905 Result: Down-regulated in Transcription
  misc_feature: MA Experiment 20001905 PARAMETER Experiment Name: At_Drought_Reproduction_P Parameter: Age (day) Value: 40
  misc_feature: MA Experiment 20001905 PARAMETER Experiment Name: At_Drought_Reproduction_P Parameter: Organism Value: A. thaliana
  misc_feature: MA Experiment 20001905 PARAMETER Experiment Name: At_Drought_Reproduction_P Parameter: Plant Line Value: WS
  misc_feature: MA Experiment 20001905 PARAMETER Experiment Name: At_Drought_Reproduction_P Parameter: Timepoint (day) Value: 10
  misc_feature: MA Experiment 20001905 PARAMETER Experiment Name: At_Drought_Reproduction_P Parameter: Tissue Value: Rosettes
  misc_feature: MA Experiment 20001905 PARAMETER Experiment Name: At_Drought_Reproduction_P Parameter: Treatment Value: Drought vs. No Drought
  misc_feature: MA Experiment ID: 20001906 Result: Down-regulated in Transcription
  misc_feature: MA Experiment 20001906 PARAMETER Experiment Name: At_Drought_Reproduction_P Parameter: Age (day) Value: 35
  misc_feature: MA Experiment 20001906 PARAMETER Experiment Name: At_Drought_Reproduction_P Parameter: Organism Value: A. thaliana
  misc_feature: MA Experiment 20001906 PARAMETER Experiment Name: At_Drought_Reproduction_P Parameter: Plant Line Value: WS
  misc_feature: MA Experiment 20001906 PARAMETER Experiment Name: At_Drought_Reproduction_P Parameter: Timepoint (day) Value: 5
  misc_feature: MA Experiment 20001906 PARAMETER Experiment Name: At_Drought_Reproduction_P Parameter: Tissue Value: Siliques
  misc_feature: MA Experiment 20001906 PARAMETER Experiment Name: At_Drought_Reproduction_P Parameter: Treatment Value: Drought vs. No Drought
  misc_feature: MA Experiment ID: 20001908 Result: Down-regulated in Transcription
  misc_feature: MA Experiment 20001908 PARAMETER Experiment Name: At_Drought_Reproduction_P Parameter: Age (day) Value: 40
  misc_feature: MA Experiment 20001908 PARAMETER Experiment Name: At_Drought_Reproduction_P Parameter: Organism Value: A. thaliana
  misc_feature: MA Experiment 20001908 PARAMETER Experiment Name: At_Drought_Reproduction_P Parameter: Plant Line Value: WS
  misc_feature: MA Experiment 20001908 PARAMETER Experiment Name: At_Drought_Reproduction_P Parameter: Timepoint (day) Value: 10
  misc_feature: MA Experiment 20001908 PARAMETER Experiment Name: At_Drought_Reproduction_P Parameter: Tissue Value: Siliques
  misc_feature: MA Experiment 20001908 PARAMETER Experiment Name: At_Drought_Reproduction_P Parameter: Treatment Value: Drought vs. No Drought
tttgtctcgtcttccatgtccgatatatcgttaccagagaaagagagctcagagatttagttagcttaatttttcttttcgttttgaaattaaggaagtgattgttatcaccggaggagagagagaaaatgttgggaattttcagtggagctatagtatcgccgccggaagagttagtggctgccggaagcagaactccgtcgccgaaaacaaccggatcaactttagtaaaccggttcgtcgagaaaaatccatccgctgtttctgtacaagtcggcgactatgttcagcttgcttacagccatcacaacgagagtcctctccggcctagatcatttggagctaaggatgaaatattctgcttgttccaaggctcacttgacaacctaggaagcttgaaacagcagtacgggcttgcaaaaaacgcaaacgaggttctcttggtcatcgaggcttataagactctccgtgacagagctccttacccggctaaccacgttgttgctcacctaagtggcgatttcgcctttgtggtctttgataaatcaacctccactctgtttgtagcctctgaccaagttggcaaggttccattgtattggggaataacagctgatggctatgtggcatttgctgatgatgttgacttactaaaaggtgcttgtggcaagtctcttgcgtctttccctcaaggctgttattactcgacggcattaggtgggcttaggagcttcgagaaccctaagaacaagatcactgcagttcctgctaatgagggagaaatttggggagctaccttcaaggtggaaggagcaacagttcttgcagattgaaaatgaaagagaaacacaaaagaagtttcatgtctcttaaagctctcgaactgtaacagcacaaacaaaaaaaaatatgtaggaaaaacaaaaagctgttctatgagtacttgaagctatcaatggttggtgataatgtgtgtagtgttgtatctctcttatgtcttatgcttctttgtacagcacgtgtgtgtcttctggtgttattagtgtcttcttcctaataagttaatgtctctgaaacaaaaatctaccttctcttgatccttttgcctctgtttctatagtaaatctcacaatggtaatgaggaagaacaggcgatatctctgtttctatcg

SEQ ID NO: 102662 - protein, 234 aa, Arabidopsis thaliana; identical to SEQ ID NO: 23037
  peptide (1)..(234): Ceres Seq. ID no. 13610892
  misc_feature (1)..(234): Homolog of NCBI NO: 15239658 NR Description: aluminium-induced protein - like [Arabidopsis
  misc_feature (1)..(227): Homolog of NCBI NO: 7488440 NR Description: aluminum-induced protein - rape
  misc_feature (1)..(233): Homolog of NCBI NO: 7488881 NR Description: hypothetical protein ARG10 - mung bean
  misc_feature (1)..(233): Homolog of NCBI NO: 34541994 NR Description: Al-induced protein [Gossypium hirsutum]
  misc_feature (1)..(233): Homolog of NCBI NO: 13958130 NR Description: aluminium induced protein [Avicennia marina]
  misc_feature (2)..(222): Homolog of NCBI NO: 7489671 NR Description: hypothetical protein wali7 - wheat (fragment)
  misc_feature (1)..(230): Homolog of NCBI NO: 20340249 NR Description: aluminum-induced protein-like protein
  misc_feature (1)..(227): Homolog of NCBI NO: 30017570 NR Description: unknown protein [Oryza sativa (japonica
  misc_feature (1)..(230): Homolog of NCBI NO: 15239993 NR Description: aluminum-induced protein-related [Arabidopsis
  misc_feature (1)..(227): Homolog of NCBI NO: 15228883 NR Description: expressed protein [Arabidopsis thaliana] contains similarity to unknown [Arabidopsis thaliana] >gi|18252901|gb|AAL62377.1| unknown

SEQ ID NO: 102663 - DNA, 560 bp, Arabidopsis thaliana
  misc_feature (1)..(560): Ceres Seq. ID no. 13610893
  misc_feature: MA Experiment ID: 20000184 Result: Up-regulated in Transcription
  misc_feature: MA Experiment 20000184 PARAMETER Experiment Name: At_Shoots__P Parameter: Age (day) Value: 7
  misc_feature: MA Experiment 20000184 PARAMETER Experiment Name: At_Shoots__P Parameter: Tissue Value: Shoots vs. Whole Plant
aaaacacagaacaacggaaaaggcaaatcgggatcagccaccggcgatgaaggaagacatggataagatggtggcggtagggctcgtatggggagccaccaatgctctgatccgtcgtggcgctcttgcctgggataaaacaaagtcttcttcgacaacagaatctcattctcctcctcttcagatccgccgcaaaatcatgattgctctccgcgactggatcaatctcctcctcttctggcaatactcaattcctttcctcataaacctctccgcctccgccacattcttcgcccttctcagtcacgctcccatctctcttgccgttccggtgactaacgccacaacctttgccgcaaccgccgcttttgggatccttttaggggaagaaactcaaatcggacttgctttgttaggtacgagctttattgtatttggaatttggctttgtgttctgtgaaattcgaattttgtaaaaccgtgactctgtttctgtgagatctattttgcgaaagaactatttgtgtaccatcttttgagaattttagctaactctctgc

SEQ ID NO: 102664 - protein, 152 aa, Arabidopsis thaliana; identical to SEQ ID NO: 36953
  peptide (1)..(152): Ceres Seq. ID no. 13610894
  misc_feature (16)..(152): Homolog of NCBI NO: 15239774 NR Description: expressed protein [Arabidopsis thaliana] unknown protein [Arabidopsis thaliana]
  misc_feature (23)..(151): Homolog of NCBI NO: 28829061 NR Description: similar to putative protein; protein id: supported by cDNA: gi_15027866, supported by cDNA: gi_19310720
  misc_feature (22)..(151): Homolog of NCBI NO: 24652124 NR Description: CG12929-PA [Drosophila melanogaster]
  misc_feature (23)..(151): Homolog of NCBI NO: 13436137 NR Description: Similar to RIKEN cDNA 4933407D05 gene [Homo
  misc_feature (23)..(151): Homolog of NCBI NO: 21361814 NR Description: hypothetical protein RP4-622L5 [Homo sapiens]

SEQ ID NO: 102665 - protein, 137 aa, Arabidopsis thaliana; identical to SEQ ID NO: 36954
  peptide (1)..(137): Ceres Seq. ID no. 13610895
  misc_feature (1)..(137): Homolog of NCBI NO: 15239774 NR Description: expressed protein [Arabidopsis thaliana] unknown protein [Arabidopsis thaliana]
  misc_feature (8)..(136): Homolog of NCBI NO: 28829061 NR Description: similar to putative protein; protein id: supported by cDNA: gi_15027866, supported by cDNA: gi_19310720
  misc_feature (7)..(136): Homolog of NCBI NO: 24652124 NR Description: CG12929-PA [Drosophila melanogaster]
  misc_feature (8)..(136): Homolog of NCBI NO: 13436137 NR Description: Similar to RIKEN cDNA 4933407D05 gene [Homo
  misc_feature (8)..(136): Homolog of NCBI NO: 21361814 NR Description: hypothetical protein RP4-622L5 [Homo sapiens]

SEQ ID NO: 102666 - protein, 133 aa, Arabidopsis thaliana; identical to SEQ ID NO: 36955
  peptide (1)..(133): Ceres Seq. ID no. 13610896
  misc_feature (1)..(133): Homolog of NCBI NO: 15239774 NR Description: expressed protein [Arabidopsis thaliana] unknown protein [Arabidopsis thaliana]
  misc_feature (4)..(132): Homolog of NCBI NO: 28829061 NR Description: similar to putative protein; protein id: supported by cDNA: gi_15027866, supported by cDNA: gi_19310720
  misc_feature (3)..(132): Homolog of NCBI NO: 24652124 NR Description: CG12929-PA [Drosophila melanogaster]
  misc_feature (4)..(132): Homolog of NCBI NO: 13436137 NR Description: Similar to RIKEN cDNA 4933407D05 gene [Homo
  misc_feature (4)..(132): Homolog of NCBI NO: 21361814 NR Description: hypothetical protein RP4-622L5 [Homo sapiens]

SEQ ID NO: 102667 - DNA, 1333 bp, Arabidopsis thaliana
  misc_feature (1)..(1333): Ceres Seq. ID no. 13610897
  misc_feature: MA Experiment ID: 108572 Result: Up-regulated in Transcription
  misc_feature: MA Experiment 108572 PARAMETER Experiment Name: At_Drought_cDNA_P Parameter: Timepoint (hr) Value: 1
  misc_feature: MA Experiment 108572 PARAMETER Experiment Name: At_Drought_cDNA_P Parameter: Tissue Value: Aerial
  misc_feature: MA Experiment 108572 PARAMETER Experiment Name: At_Drought_cDNA_P Parameter: Treatment Value: Drought vs. No Drought
  misc_feature: MA Experiment ID: 108573 Result: Up-regulated in Transcription
  misc_feature: MA Experiment 108573 PARAMETER Experiment Name: At_Drought_cDNA_P Parameter: Timepoint (hr) Value: 6
  misc_feature: MA Experiment 108573 PARAMETER Experiment Name: At_Drought_cDNA_P Parameter: Tissue Value: Aerial
  misc_feature: MA Experiment 108573 PARAMETER Experiment Name: At_Drought_cDNA_P Parameter: Treatment Value: Drought vs. No Drought
  misc_feature: MA Experiment ID: 108574 Result: Up-regulated in Transcription
  misc_feature: MA Experiment 108574 PARAMETER Experiment Name: At_Wounding__cDNA_P Parameter: Timepoint (hr) Value: 1
  misc_feature: MA Experiment 108574 PARAMETER Experiment Name: At_Wounding__cDNA_P Parameter: Tissue Value: Aerial
  misc_feature: MA Experiment 108574 PARAMETER Experiment Name: At_Wounding__cDNA_P Parameter: Treatment Value: Wounding vs. No Wounding
  misc_feature: MA Experiment ID: 108594 Result: Down-regulated in Transcription
  misc_feature: MA Experiment 108594 PARAMETER Experiment Name: At_Ler-rhl_Root_cDNA_P Parameter: Plant Line Value: null
  misc_feature: MA Experiment ID: 108605 Result: Up-regulated in Transcription
  misc_feature: MA Experiment 108605 PARAMETER Experiment Name: At_100uM_ABA_cDNA_P Parameter: Timepoint (hr) Value: 6
  misc_feature: MA Experiment 108605 PARAMETER Experiment Name: At_100uM_ABA_cDNA_P Parameter: Tissue Value: Aerial
  misc_feature: MA Experiment 108605 PARAMETER Experiment Name: At_100uM_ABA_cDNA_P Parameter: Treatment Value: 100uM ABA vs. No Treatment
  misc_feature: MA Experiment ID: 108607 Result: Up-regulated in Transcription
  misc_feature: MA Experiment 108607 PARAMETER Experiment Name: At_100uM_ABA_cDNA_P Parameter: Timepoint (hr) Value: 4
  misc_feature: MA Experiment 108607 PARAMETER Experiment Name: At_100uM_ABA_cDNA_P Parameter: Tissue Value: Aerial
  misc_feature: MA Experiment 108607 PARAMETER Experiment Name: At_100uM_ABA_cDNA_P Parameter: Treatment Value: 100uM ABA vs. No Treatment
  misc_feature: MA Experiment ID: 108608 Result: Up-regulated in Transcription
  misc_feature: MA Experiment 108608 PARAMETER Experiment Name: At_100uM_ABA_cDNA_P Parameter: Timepoint (hr) Value: 1
  misc_feature: MA Experiment 108608 PARAMETER Experiment Name: At_100uM_ABA_cDNA_P Parameter: Tissue Value: Aerial
  misc_feature: MA Experiment 108608 PARAMETER Experiment Name: At_100uM_ABA_cDNA_P Parameter: Treatment Value: 100uM ABA vs. No Treatment
  misc_feature: MA Experiment ID: 20000089 Result: Down-regulated in Transcription
  misc_feature: MA Experiment ID: 20000090 Result: Down-regulated in Transcription
  misc_feature: MA Experiment ID: 20000112 Result: Down-regulated in Transcription
  misc_feature: MA Experiment 20000112 PARAMETER Experiment Name: At_42deg_Heat_cDNA_P Parameter: Temperature (deg C) Value: 42 vs. 22
  misc_feature: MA Experiment 20000112 PARAMETER Experiment Name: At_42deg_Heat_cDNA_P Parameter: Timepoint (hr) Value: 2
  misc_feature: MA Experiment 20000112 PARAMETER Experiment Name: At_42deg_Heat_cDNA_P Parameter: Tissue Value: Aerial
  misc_feature: MA Experiment ID: 20000264 Result: Up-regulated in Transcription
  misc_feature: MA Experiment 20000264 PARAMETER Experiment Name: At_Open_Flower_P Parameter: Age (day) Value: 21
  misc_feature: MA Experiment 20000264 PARAMETER Experiment Name: At_Open_Flower_P Parameter: Plant Line Value: WS
  misc_feature: MA Experiment 20000264 PARAMETER Experiment Name: At_Open_Flower_P Parameter: Tissue Value: Open Flower vs. Whole Plant
  misc_feature: MA Experiment ID: 20000794 Result: Up-regulated in Transcription
  misc_feature: MA Experiment 20000794 PARAMETER Experiment Name: At_Petals_P Parameter: Age (day) Value: 23-25 days
  misc_feature: MA Experiment 20000794 PARAMETER Experiment Name: At_Petals_P Parameter: Plant Line Value: WS
  misc_feature: MA Experiment 20000794 PARAMETER Experiment Name: At_Petals_P Parameter: Tissue Value: Petals vs. Whole plant
  misc_feature: MA Experiment ID: 20001248 Result: Down-regulated in Transcription
  misc_feature: MA Experiment 20001248 PARAMETER Experiment Name: At_Far-red-induction_P Parameter: Age (day) Value: 7
  misc_feature: MA Experiment 20001248 PARAMETER Experiment Name: At_Far-red-induction_P Parameter: Light Value: Far-red vs. White
  misc_feature: MA Experiment 20001248 PARAMETER Experiment Name: At_Far-red-induction_P Parameter: Organism Value: A. thaliana
  misc_feature: MA Experiment 20001248 PARAMETER Experiment Name: At_Far-red-induction_P Parameter: Plant Line Value: Columbia
  misc_feature: MA Experiment 20001248 PARAMETER Experiment Name: At_Far-red-induction_P Parameter: Timepoint (hr) Value: 4
  misc_feature: MA Experiment 20001248 PARAMETER Experiment Name: At_Far-red-induction_P Parameter: Tissue Value: Whole Plant
  misc_feature: MA Experiment ID: 20001558 Result: Up-regulated in Transcription
  misc_feature: MA Experiment 20001558 PARAMETER Experiment Name: At_Drought_Soil_Dry_P Parameter: Age (day) Value: 27
  misc_feature: MA Experiment 20001558 PARAMETER Experiment Name: At_Drought_Soil_Dry_P Parameter: Organism Value: A. thaliana
  misc_feature: MA Experiment 20001558 PARAMETER Experiment Name: At_Drought_Soil_Dry_P Parameter: Plant Line Value: WS
  misc_feature: MA Experiment 20001558 PARAMETER Experiment Name: At_Drought_Soil_Dry_P Parameter: Post Timepoint (hr) Value: 6
  misc_feature: MA Experiment 20001558 PARAMETER Experiment Name: At_Drought_Soil_Dry_P Parameter: Post-Treatment Value: Re-Water vs. No Drought
  misc_feature: MA Experiment 20001558 PARAMETER Experiment Name: At_Drought_Soil_Dry_P Parameter: Timepoint (day) Value: 13
  misc_feature: MA Experiment 20001558 PARAMETER Experiment Name: At_Drought_Soil_Dry_P Parameter: Treatment Value: Drought vs. No Drought
  misc_feature: MA Experiment ID: 20001560 Result: Up-regulated in Transcription
  misc_feature: MA Experiment 20001560 PARAMETER Experiment Name: At_Drought_Soil_Dry_P Parameter: Age (day) Value: 28
  misc_feature: MA Experiment 20001560 PARAMETER Experiment Name: At_Drought_Soil_Dry_P Parameter: Organism Value: A. thaliana
  misc_feature: MA Experiment 20001560 PARAMETER Experiment Name: At_Drought_Soil_Dry_P Parameter: Plant Line Value: WS
  misc_feature: MA Experiment 20001560 PARAMETER Experiment Name: At_Drought_Soil_Dry_P Parameter: Post Timepoint (hr) Value: None
  misc_feature: MA Experiment 20001560 PARAMETER Experiment Name: At_Drought_Soil_Dry_P Parameter: Post-Treatment Value: None
  misc_feature: MA Experiment 20001560 PARAMETER Experiment Name: At_Drought_Soil_Dry_P Parameter: Timepoint (day) Value: 14
  misc_feature: MA Experiment 20001560 PARAMETER Experiment Name: At_Drought_Soil_Dry_P Parameter: Treatment Value: Drought vs. No Drought
  misc_feature: MA Experiment ID: 20001911 Result: Down-regulated in Transcription
  misc_feature: MA Experiment 20001911 PARAMETER Experiment Name: At_Drought_Reproduction_P Parameter: Age (day) Value: 40
  misc_feature: MA Experiment 20001911 PARAMETER Experiment Name: At_Drought_Reproduction_P Parameter: Organism Value: A. thaliana
  misc_feature: MA Experiment 20001911 PARAMETER Experiment Name: At_Drought_Reproduction_P Parameter: Plant Line Value: WS
  misc_feature: MA Experiment 20001911 PARAMETER Experiment Name: At_Drought_Reproduction_P Parameter: Timepoint (day) Value: 10
  misc_feature: MA Experiment 20001911 PARAMETER Experiment Name: At_Drought_Reproduction_P Parameter: Tissue Value: Flowers
  misc_feature: MA Experiment 20001911 PARAMETER Experiment Name: At_Drought_Reproduction_P Parameter: Treatment Value: Drought vs. No Drought
acatcttccttgtttcttctctctctctctctcccctcaaacttaaattcacattttaatacttgttacttcaactataataataataataatctttcttcattatatattttcctctcctctcagatcttctctctcaccatcttctcttgagatcaagattgagtattcttgtctcaagaatcgatactcgagagctcttatggaccaaaatggtcataacgacgaagcagaaacagtttcatgcggcaacggcaactgcaaaagcaagatcgtgcctggagatgatcacggtggagatgagagtagtggtaccaagagaaggaagaagagaaaaacgcaacaaaagacaatgaaacgacgtgaattaatgtcgtattgtgagctaccggagtacatgaaagacaacgaatacatattgaattattacagagctgattggtccattagagatgctttcttcagcgtatttagtttccacaatgagtccctcaatgtttggacacatttgattggttttatcttctttgtggcactaaccgtcgccaatattattcatcacgacggattcttccccgtggatgcaaagagtccagggaatgtaacaagatggcccttcttcgttttcttaggaggctcaatgttctgcctactcgcaagcagcatttgtcacctcttctgttgccactcaaaagagcttaatgtcttccttctccgaatagactatgccggtatcaccgccatgatcatcacttccttcttcccaccaatcttctacatcttccagtgcactcctcggtggtacttcatctacctcgcaggcatcacatccatgggaatcttcacaatcatcacacttttcaccccatcactttccgctcccaagtaccgagctttccgcgctttgctctttgcctccatggggctgtttgggattgtcccagctgcccacgcgctagtggtcaattggggaaacccgcaaaggaacgtgacgctcgtgtacgagttgcttatggcagtgttctatcttgttggaacaggattctacgtagggagagtgccagaaaggcttaaaccgggatggtttgatcgtgtgggacatagtcatcagatcttccatgtgttcgttttgttgggtgctttgtctcactatgcagctgctctcttgttcttggactggcgtgaccacgttggttgttaaaccatatatttgtaattcttttaaatataatattattaatttgttgtatcgtggtgaacaaaattgtaataacccatttgttttaaattgaattgtaattcaacttgtgttaattgttatgtttgttgaata

SEQ ID NO: 102668 - protein, 332 aa, Arabidopsis thaliana; identical to SEQ ID NO: 35710
  peptide (1)..(332): Ceres Seq. ID no. 13610898
  misc_feature (90)..(321): Pfam Name: Uncharacterised protein family (Hly-III / UPF0073) Pfam Description: Uncharacterised protein family (Hly-III /
  misc_feature (1)..(332): Homolog of NCBI NO: 15241302 NR Description: expressed protein [Arabidopsis thaliana] AT5g20270/F5O24_160 [Arabidopsis thaliana] unknown [Arabidopsis thaliana] >gi|23506109|gb|AAN28914.1|
  misc_feature (134)..(332): Homolog of NCBI NO: 15235657 NR Description: expressed protein [Arabidopsis thaliana]
  misc_feature (29)..(114): Homolog of NCBI NO: 15235657 NR Description: expressed protein [Arabidopsis thaliana]
  misc_feature (134)..(321): Homolog of NCBI NO: 15233813 NR Description: expressed protein [Arabidopsis thaliana]
  misc_feature (29)..(114): Homolog of NCBI NO: 15233813 NR Description: expressed protein [Arabidopsis thaliana]
  misc_feature (48)..(326): Homolog of NCBI NO: 25309925 NR Description: hypothetical protein At2g24150 [imported] -
  misc_feature (134)..(327): Homolog of NCBI NO: 18377749 NR Description: unknown protein [Arabidopsis thaliana]
  misc_feature (134)..(327): Homolog of NCBI NO: 30688829 NR Description: expressed protein [Arabidopsis thaliana]
  misc_feature (134)..(278): Homolog of NCBI NO: 20330770 NR Description: Hypothetical protein [Oryza sativa (japonica
  misc_feature (43)..(114): Homolog of NCBI NO: 20330770 NR Description: Hypothetical protein [Oryza sativa (japonica

SEQ ID NO: 102669 - protein, 282 aa, Arabidopsis thaliana; identical to SEQ ID NO: 35711
  peptide (1)..(282): Ceres Seq. ID no. 13610899
  misc_feature (40)..(271): Pfam Name: Uncharacterised protein family (Hly-III / UPF0073) Pfam Description: Uncharacterised protein family (Hly-III /
  misc_feature (1)..(282): Homolog of NCBI NO: 15241302 NR Description: expressed protein [Arabidopsis thaliana] AT5g20270/F5O24_160 [Arabidopsis thaliana] unknown [Arabidopsis thaliana] >gi|23506109|gb|AAN28914.1|
  misc_feature (84)..(282): Homolog of NCBI NO: 15235657 NR Description: expressed protein [Arabidopsis thaliana]
  misc_feature (1)..(64): Homolog of NCBI NO: 15235657 NR Description: expressed protein [Arabidopsis thaliana]
  misc_feature (84)..(271): Homolog of NCBI NO: 15233813 NR Description: expressed protein [Arabidopsis thaliana]
  misc_feature (1)..(64): Homolog of NCBI NO: 15233813 NR Description: expressed protein [Arabidopsis thaliana]
  misc_feature (1)..(276): Homolog of NCBI NO: 25309925 NR Description: hypothetical protein At2g24150 [imported] -
  misc_feature (84)..(277): Homolog of NCBI NO: 18377749 NR Description: unknown protein [Arabidopsis thaliana]
  misc_feature (84)..(277): Homolog of NCBI NO: 30688829 NR Description: expressed protein [Arabidopsis thaliana]
  misc_feature (84)..(228): Homolog of NCBI NO: 20330770 NR Description: Hypothetical protein [Oryza sativa (japonica
  misc_feature (1)..(64): Homolog of NCBI NO: 20330770 NR Description: Hypothetical protein [Oryza sativa (japonica

SEQ ID NO: 102670 - protein, 276 aa, Arabidopsis thaliana; identical to SEQ ID NO: 35712
  peptide (1)..(276): Ceres Seq. ID no. 13610900
  misc_feature (34)..(265): Pfam Name: Uncharacterised protein family (Hly-III / UPF0073) Pfam Description: Uncharacterised protein family (Hly-III /
  misc_feature (1)..(276): Homolog of NCBI NO: 15241302 NR Description: expressed protein [Arabidopsis thaliana] AT5g20270/F5O24_160 [Arabidopsis thaliana] unknown [Arabidopsis thaliana] >gi|23506109|gb|AAN28914.1|
  misc_feature (78)..(276): Homolog of NCBI NO: 15235657 NR Description: expressed protein [Arabidopsis thaliana]
  misc_feature (1)..(58): Homolog of NCBI NO: 15235657 NR Description: expressed protein [Arabidopsis thaliana]
  misc_feature (78)..(265): Homolog of NCBI NO: 15233813 NR Description: expressed protein [Arabidopsis thaliana]
  misc_feature (1)..(58): Homolog of NCBI NO: 15233813 NR Description: expressed protein [Arabidopsis thaliana]
  misc_feature (1)..(270): Homolog of NCBI NO: 25309925 NR Description: hypothetical protein At2g24150 [imported] -
  misc_feature (78)..(271): Homolog of NCBI NO: 18377749 NR Description: unknown protein [Arabidopsis thaliana]
  misc_feature (78)..(271): Homolog of NCBI NO: 30688829 NR Description: expressed protein [Arabidopsis thaliana]
  misc_feature (78)..(222): Homolog of NCBI NO: 20330770 NR Description: Hypothetical protein [Oryza sativa (japonica
  misc_feature (1)..(58): Homolog of NCBI NO: 20330770 NR Description: Hypothetical protein [Oryza sativa (japonica

SEQ ID NO: 102671 - DNA, 656 bp, Arabidopsis thaliana
  misc_feature (1)..(656): Ceres Seq. ID no. 13610905
  misc_feature: MA Experiment ID: 108462 Result: Down-regulated in Transcription
  misc_feature: MA Experiment 108462 PARAMETER Experiment Name: At_Germinating_Seeds_cDNA_P Parameter: Age (day) Value: 2 vs. 0
  misc_feature: MA Experiment 108462 PARAMETER Experiment Name: At_Germinating_Seeds_cDNA_P Parameter: Tissue Value: Germinating Seeds
  misc_feature: MA Experiment ID: 108463 Result: Down-regulated in Transcription
  misc_feature: MA Experiment 108463 PARAMETER Experiment Name: At_Germinating_Seeds_cDNA_P Parameter: Age (day) Value: 3 vs. 0
  misc_feature: MA Experiment 108463 PARAMETER Experiment Name: At_Germinating_Seeds_cDNA_P Parameter: Tissue Value: Germinating Seeds
  misc_feature: MA Experiment ID: 108464 Result: Down-regulated in Transcription
  misc_feature: MA Experiment 108464 PARAMETER Experiment Name: At_Germinating_Seeds_cDNA_P Parameter: Age (day) Value: 4 vs. 0
  misc_feature: MA Experiment 108464 PARAMETER Experiment Name: At_Germinating_Seeds_cDNA_P Parameter: Tissue Value: Germinating Seeds
  misc_feature: MA Experiment ID: 20000180 Result: Down-regulated in Transcription
  misc_feature: MA Experiment 20000180 PARAMETER Experiment Name: At_Germinating_Seeds_P Parameter: Age (hr) Value: 24 vs. 0
  misc_feature: MA Experiment 20000180 PARAMETER Experiment Name: At_Germinating_Seeds_P Parameter: Tissue Value: Germinating Seeds
  misc_feature: MA Experiment ID: 20000224 Result: Down-regulated in Transcription
tctctctacaacaaaatcagcgacagctcaaacgttgatatttttctccggcttttctagggtttaaattttctttccgatcagagattaatggcgactctagactccgacgttaccatgattcctgccggagaagcctccagcagcgtagccgcgtcgtcttccaacaagaaagctaagcgattcgaaattaagaagtggagcgccgttgctctctgggcttgggatatcgttgttgacaactgtgcgatctgcagaaaccacatcatggatctttgtatcgagtgtcaggctaatcaggccagtgccacaagtgaagagtgcactgtagcttggggggtttgcaatcacgccttccactttcactgcatcagcagatggctaaagactcgtcaagtttgtccattggataacagtgagtgggagtttcagaaatatggtcactaaatcaacaaatggttccagcaagcatgtgtctaatcgtgaagacatcaggttcatttggttaccaccgcatatgataactaaagattgttcaagtttttgccctttttttggtactgtattttacaatttgtggaaacagagatttactgttcagtgttcactaaacctattatggttgtgctttgggtgacgtctttgatttcaaaatt

SEQ ID NO: 102672 - protein, 118 aa, Arabidopsis thaliana; identical to SEQ ID NO: 21264
  peptide (1)..(118): Ceres Seq. ID no. 13610906
  misc_feature (85)..(106): Pfam Name: Zinc finger, C3HC4 type (RING finger) Pfam Description: Zinc finger, C3HC4 type (RING finger)
  misc_feature (1)..(118): Homolog of NCBI NO: 18420256 NR Description: ring-box protein - like [Arabidopsis thaliana]
  misc_feature (1)..(118): Homolog of NCBI NO: 15229164 NR Description: ring-box protein Roc1/Rbx1/Hrt1, putative
  misc_feature (21)..(118): Homolog of NCBI NO: 19387246 NR Description: putative ring box-1 protein [Oryza sativa
  misc_feature (8)..(118): Homolog of NCBI NO: 19067884 NR Description: hyperosmotic protein 21 [Salmo salar]
  misc_feature (15)..(118): Homolog of NCBI NO: 18543187 NR Description: CG16982-PA [Drosophila melanogaster]
  misc_feature (21)..(118): Homolog of NCBI NO: 37537963 NR Description: RING-box protein 1 (Rbx1) (Hyperosmotic protein
  misc_feature (21)..(118): Homolog of NCBI NO: 7657508 NR Description: ring-box 1; RING box protein 1; regulator of
  misc_feature (24)..(118): Homolog of NCBI NO: 20502055 NR Description: ZYP protein [Homo sapiens]
  misc_feature (30)..(118): Homolog of NCBI NO: 21466060 NR Description: Chain B, Structure Of The Cul1-Rbx1-Skp1-F
  misc_feature (21)..(118): Homolog of NCBI NO: 12833653 NR Description: unnamed protein product [Mus musculus]

SEQ ID NO: 102673 - protein, 109 aa, Arabidopsis thaliana; identical to SEQ ID NO: 21265
  peptide (1)..(109): Ceres Seq. ID no. 13610907
  misc_feature (76)..(97): Pfam Name: Zinc finger, C3HC4 type (RING finger) Pfam Description: Zinc finger, C3HC4 type (RING finger)
  misc_feature (1)..(109): Homolog of NCBI NO: 18420256 NR Description: ring-box protein - like [Arabidopsis thaliana]
  misc_feature (1)..(109): Homolog of NCBI NO: 15229164 NR Description: ring-box protein Roc1/Rbx1/Hrt1, putative
  misc_feature (12)..(109): Homolog of NCBI NO: 19387246 NR Description: putative ring box-1 protein [Oryza sativa
  misc_feature (1)..(109): Homolog of NCBI NO: 19067884 NR Description: hyperosmotic protein 21 [Salmo salar]
  misc_feature (6)..(109): Homolog of NCBI NO: 18543187 NR Description: CG16982-PA [Drosophila melanogaster]
  misc_feature (12)..(109): Homolog of NCBI NO: 37537963 NR Description: RING-box protein 1 (Rbx1) (Hyperosmotic protein
  misc_feature (12)..(109): Homolog of NCBI NO: 7657508 NR Description: ring-box 1; RING box protein 1; regulator of
  misc_feature (15)..(109): Homolog of NCBI NO: 20502055 NR Description: ZYP protein [Homo sapiens]
  misc_feature (21)..(109): Homolog of NCBI NO: 21466060 NR Description: Chain B, Structure Of The Cul1-Rbx1-Skp1-F
  misc_feature (12)..(109): Homolog of NCBI NO: 12833653 NR Description: unnamed protein product [Mus musculus]

SEQ ID NO: 102674 - protein, 66 aa, Arabidopsis thaliana; identical to SEQ ID NO: 21266
  peptide (1)..(66): Ceres Seq. ID no. 13610908

SEQ ID NO: 102675 - DNA, 2729 bp, Arabidopsis thaliana
  misc_feature (1)..(2729): Ceres Seq. ID no. 13610909
  misc_feature: MA Experiment ID: 108464 Result: Up-regulated in Transcription
  misc_feature: MA Experiment 108464 PARAMETER Experiment Name: At_Germinating_Seeds_cDNA_P Parameter: Age (day) Value: 4 vs. 0
  misc_feature: MA Experiment 108464 PARAMETER Experiment Name: At_Germinating_Seeds_cDNA_P Parameter: Tissue Value: Germinating Seeds
  misc_feature: MA Experiment ID: 20000437 Result: Up-regulated in Transcription
  misc_feature: MA Experiment 20000437 PARAMETER Experiment Name: At_Drought_P Parameter: Age (day) Value: 8
  misc_feature: MA Experiment 20000437 PARAMETER Experiment Name: At_Drought_P Parameter: Organism Value: A. thaliana
  misc_feature: MA Experiment 20000437 PARAMETER Experiment Name: At_Drought_P Parameter: Plant Line Value: WS
  misc_feature: MA Experiment 20000437 PARAMETER Experiment Name: At_Drought_P Parameter: Timepoint (hr) Value: 24
  misc_feature: MA Experiment 20000437 PARAMETER Experiment Name: At_Drought_P Parameter: Tissue Value: Whole Plant
  misc_feature: MA Experiment 20000437 PARAMETER Experiment Name: At_Drought_P Parameter: Treatment Value: Drought vs. No Drought
atgacctcatcgccatcagtggagaatggcggctcaggctcctctggatcatctgctcttttaggctgtatgcaacaattcaagctcttcgagactcaagcgaatttctatatgattggttggaacggtagtggagtatatagaatacttaagatagaccggctcgaagcatctgagcttaatctcagagaggattcgactgcgtataccaaaaaagaatgctacgagttgcttaaacggatacacgaaggaaacaaggcgactggtggactgaaacttgtcactgtttgttatggaatcattgggttcattaagtttttgggaccatattacatgctgcttataactgaaagaagagagataggtgaaatttgtggtcacattgtttacgaagtgtcaaagagtgatatgattgcattgcaacattctagcgtgctttgcaacactgcaaatttaagagacgagaacagtttccagaagaatatatgcgaccatgagagtggaggtactctctataagaaaatgtttgtgtggaacgaattcttgactcggggaactcgacatcaccttcggaataccctgtggactgtagcattggtgtatgggttttttaagcagacaatactttccgaagctggacggaatttcaaactcactcttattgctaggcgttcccgccataatgctggaaccaggtacttgaaacgaggaataaacgaaagtggcaatgttgctaatgatgtggaaacagaacagatagtgtctgaggatgttccagtagaccgtcccatgcaaataagttctgttgtgcagaatcgtggctcaatccctctattctggtcacaggagacctcacggatgaaagttaagcctgatatagcaactagagttcactttgaaaatcttgtggagcgttatggagtccccatcattattctgaacttgatcaagaccaacgagaggaaacccagggagtcgattctccgggcagagtttgctaatgcaattgactttataaacaaagatctgccggaagaaaatcggcttagattcctccactgggacttgcacaaacattttcacagcaaaacagaaaatgtattggcacttcttggaaaagtagctgcctgtgctttgatgctaacaggtttcttttattatcaacttacaccagcaatgaagcttgagggttatatgagcttgtcttcgtctgatgccgacacgtctccacataatagttctgatgatgatagtagggattatgactcattagagaagaattgccgcccaagtaagaatgttgcaaatggtgattatgatgtcaagcctagcaggctccagagtggagtgctgcggaccaactgcatagattgccttgatcgtacaaatgttgcccaatatgcatatggttgggctgctctagggcaacagcttcatgctttaggaattagagatgctccaacaatagaacttgatgatcctttgtctagtactttaatggggttatacgagagaatgggagacacactagcttatcaatatggtggatctgcagcccacaataaggcgaggccagtggagagcagcaacccagtcacaagagttcttgaggactctgcaacatttcttggtactttccggcctgaacaagggagccaggcggtttgggagttgcgttcagattcccactctaatggacgaagtggagagataagcatgggggaagatgaaaagtttcttgtaaagaggtgcttatcagatgggaatattctccatgaaagtcacactccgatgtctgcaatgagtagaaagaatgaaagcatatcacatagaggttttgtgtcgtcacaccaagtgactcgtactcatataatttcagaatcatcaccagatatgccagctgccggtgatgtaacattatcgaggtgtactccgtcaatgcctagcacacatttttttggagatgtccaaaaagttcaacataatggtagtagctccatttacttgtccgagcaagaagatatgtctagtgtctcaaatttcgttgatattgagtggctttcgtcgtcagaaaatctatgtgagaacgatcacttgtccaggccgtcagcgcttacaatatattcaaccgcagagacgtcttcatcagagaatatcatcactgaagtaaaacaattgacgccagctatgagagagagtggatcaagcagcaggaagggaaaagaaccagtggaaaccgaactgtctgtacacacaaagattcgcgatgatttcccagatagcttcaaacaatgggtagcatacggggaagcactctgccattgaagatctctcaactttccatttccaacaaagaacatactttgctttcaccaaacttaaaagtcttctgaacatttgggtataacggtgcaaacatggagaagcgactggtggaaagatcctcagtaccatgtatatgaggcttcacggtgacgaccgaacggtcaaaagagatagaactattaagaggagcaaatactaaataagctgagaagtttgagtttgcagtcttgcagagaaaacgaaaatttcatctttatggagagaagaaattaaacttgtgataatctgagacttttgttagggtctttttttggggggtttgaagtctgttgtaaatatctgtatcatttgttaatccatctcgtaaggtctttactattcgtaaaaaaaaaatccattcgtct

SEQ ID NO: 102676 - protein, 774 aa, Arabidopsis thaliana
  peptide (1)..(774): Ceres Seq. ID no. 13610910
  misc_feature (97)..(163): Pfam Name: SacI homology domain Pfam Description: SacI homology domain
  misc_feature (157)..(522): Homolog of NCBI NO: 22331537 NR Description: expressed protein [Arabidopsis thaliana]
  misc_feature (542)..(774): Homolog of NCBI NO: 22331537 NR Description: expressed protein [Arabidopsis thaliana]
  misc_feature (24)..(163): Homolog of NCBI NO: 22331537 NR Description: expressed protein [Arabidopsis thaliana]
  misc_feature (24)..(522): Homolog of NCBI NO: 11357847 NR Description: hypothetical protein F7K15.70 - Arabidopsis >gi|7649362|emb|CAB89043.1| putative protein [Arabidopsis
  misc_feature (542)..(774): Homolog of NCBI NO: 11357847 NR Description: hypothetical protein F7K15.70 - Arabidopsis >gi|7649362|emb|CAB89043.1| putative protein [Arabidopsis
  misc_feature (157)..(522): Homolog of NCBI NO: 20453210 NR Description: AT3g43220/F7K15_70 [Arabidopsis thaliana]
  misc_feature (24)..(163): Homolog of NCBI NO: 20453210 NR Description: AT3g43220/F7K15_70 [Arabidopsis thaliana]
  misc_feature (294)..(766): Homolog of NCBI NO: 9294649 NR Description: gb|AAC25523.1~gene_id:MAG2.20~similar to unknown
  misc_feature (156)..(326): Homolog of NCBI NO: 9294649 NR Description: gb|AAC25523.1~gene_id:MAG2.20~similar to unknown
  misc_feature (24)..(163): Homolog of NCBI NO: 9294649 NR Description: gb|AAC25523.1~gene_id:MAG2.20~similar to unknown
MTSSPSVENGGSGSSGSSALLGCMQQFKLFETQANFYMIGWNGSGVYRILKIDRLEASELNLREDSTAYTKKECYELLKRIHEGNKATGGLKLVTVCYGIIGFIKFLGPYYMLLITERREIGEICGHIVYEVSKSDMIALQHSSVLCNTANLRDENSFQKNICDHESGGTLYKKMFVWNEFLTRGTRHHLRNTLWTVALVYGFFKQTILSEAGRNFKLTLIARRSRHNAGTRYLKRGINESGNVANDVETEQIVSEDVPVDRPMQISSVVQNRGSIPLFWSQETSRMKVKPDIATRVHFENLVERYGVPIIILNLIKTNERKPRESILRAEFANAIDFINKDLPEENRLRFLHWDLHKHFHSKTENVLALLGKVAACALMLTGFFYYQLTPAMKLEGYMSLSSSDADTSPHNSSDDDSRDYDSLEKNCRPSKNVANGDYDVKPSRLQSGVLRTNCIDCLDRTNVAQYAYGWAALGQQLHALGIRDAPTIELDDPLSSTLMGLYERMGDTLAYQYGGSAAHNKARPVESSNPVTRVLEDSATFLGTFRPEQGSQAVWELRSDSHSNGRSGEISMGEDEKFLVKRCLSDGNILHESHTPMSAMSRKNESISHRGFVSSHQVTRTHIISESSPDMPAAGDVTLSRCTPSMPSTHFFGDVQKVQHNGSSSIYLSEQEDMSSVSNFVDIEWLSSSENLCENDHLSRPSALTIYSTAETSSSENIITEVKQLTPAMRESGSSSRKGKEPVETELSVHTKIRDDFPDSFKQWVAYGEALCH

SEQ ID NO: 102677 - protein, 751 aa, Arabidopsis thaliana
  peptide (1)..(751): Ceres Seq. ID no. 13610911
  misc_feature (74)..(140): Pfam Name: SacI homology domain Pfam Description: SacI homology domain
  misc_feature (134)..(499): Homolog of NCBI NO: 22331537 NR Description: expressed protein [Arabidopsis thaliana]
  misc_feature (519)..(751): Homolog of NCBI NO: 22331537 NR Description: expressed protein [Arabidopsis thaliana]
  misc_feature (1)..(140): Homolog of NCBI NO: 22331537 NR Description: expressed protein [Arabidopsis thaliana]
  misc_feature (1)..(499): Homolog of NCBI NO: 11357847 NR Description: hypothetical protein F7K15.70 - Arabidopsis >gi|7649362|emb|CAB89043.1| putative protein [Arabidopsis
  misc_feature (519)..(751): Homolog of NCBI NO: 11357847 NR Description: hypothetical protein F7K15.70 - Arabidopsis >gi|7649362|emb|CAB89043.1| putative protein [Arabidopsis
  misc_feature (134)..(499): Homolog of NCBI NO: 20453210 NR Description: AT3g43220/F7K15_70 [Arabidopsis thaliana]
  misc_feature (1)..(140): Homolog of NCBI NO: 20453210 NR Description: AT3g43220/F7K15_70 [Arabidopsis thaliana]
  misc_feature (271)..(743): Homolog of NCBI NO: 9294649 NR Description: gb|AAC25523.1~gene_id:MAG2.20~similar to unknown
  misc_feature (133)..(303): Homolog of NCBI NO: 9294649 NR Description: gb|AAC25523.1~gene_id:MAG2.20~similar to unknown
  misc_feature (1)..(140): Homolog of NCBI NO: 9294649 NR Description: gb|AAC25523.1~gene_id:MAG2.20~similar to unknown
MQQFKLFETQANFYMIGWNGSGVYRILKIDRLEASELNLREDSTAYTKKECYELLKRIHEGNKATGGLKLVTVCYGIIGFIKFLGPYYMLLITERREIGEICGHIVYEVSKSDMIALQHSSVLCNTANLRDENSFQKNICDHESGGTLYKKMFVWNEFLTRGTRHHLRNTLWTVALVYGFFKQTILSEAGRNFKLTLIARRSRHNAGTRYLKRGINESGNVANDVETEQIVSEDVPVDRPMQISSVVQNRGSIPLFWSQETSRMKVKPDIATRVHFENLVERYGVPIIILNLIKTNERKPRESILRAEFANAIDFINKDLPEENRLRFLHWDLHKHFHSKTENVLALLGKVAACALMLTGFFYYQLTPAMKLEGYMSLSSSDADTSPHNSSDDDSRDYDSLEKNCRPSKNVANGDYDVKPSRLQSGVLRTNCIDCLDRTNVAQYAYGWAALGQQLHALGIRDAPTIELDDPLSSTLMGLYERMGDTLAYQYGGSAAHNKARPVESSNPVTRVLEDSATFLGTFRPEQGSQAVWELRSDSHSNGRSGEISMGEDEKFLVKRCLSDGNILHESHTPMSAMSRKNESISHRGFVSSHQVTRTHIISESSPDMPAAGDVTLSRCTPSMPSTHFFGDVQKVQHNGSSSIYLSEQEDMSSVSNFVDIEWLSSSENLCENDHLSRPSALTIYSTAETSSSENIITEVKQLTPAMRESGSSSRKGKEPVETELSVHTKIRDDFPDSFKQWVAYGEALCH

SEQ ID NO: 102678 - protein, 737 aa, Arabidopsis thaliana
  peptide (1)..(737): Ceres Seq. ID no. 13610912
  misc_feature (60)..(126): Pfam Name: SacI homology domain Pfam Description: SacI homology domain
  misc_feature (120)..(485): Homolog of NCBI NO: 22331537 NR Description: expressed protein [Arabidopsis thaliana]
  misc_feature (505)..(737): Homolog of NCBI NO: 22331537 NR Description: expressed protein [Arabidopsis thaliana]
  misc_feature (1)..(126): Homolog of NCBI NO: 22331537 NR Description: expressed protein [Arabidopsis thaliana]
  misc_feature (1)..(485): Homolog of NCBI NO: 11357847 NR Description: hypothetical protein F7K15.70 - Arabidopsis >gi|7649362|emb|CAB89043.1| putative protein [Arabidopsis
  misc_feature (505)..(737): Homolog of NCBI NO: 11357847 NR Description: hypothetical protein F7K15.70 - Arabidopsis >gi|7649362|emb|CAB89043.1| putative protein [Arabidopsis
  misc_feature (120)..(485): Homolog of NCBI NO: 20453210 NR Description: AT3g43220/F7K15_70 [Arabidopsis thaliana]
  misc_feature (1)..(126): Homolog of NCBI NO: 20453210 NR Description: AT3g43220/F7K15_70 [Arabidopsis thaliana]
  misc_feature (257)..(729): Homolog of NCBI NO: 9294649 NR Description: gb|AAC25523.1~gene_id:MAG2.20~similar to unknown
  misc_feature (119)..(289): Homolog of NCBI NO: 9294649 NR Description: gb|AAC25523.1~gene_id:MAG2.20~similar to unknown
  misc_feature (1)..(126): Homolog of NCBI NO: 9294649 NR Description: gb|AAC25523.1~gene_id:MAG2.20~similar to unknown
MIGWNGSGVYRILKIDRLEASELNLREDSTAYTKKECYELLKRIHEGNKATGGLKLVTVCYGIIGFIKFLGPYYMLLITERREIGEICGHIVYEVSKSDMIALQHSSVLCNTANLRDENSFQKNICDHESGGTLYKKMFVWNEFLTRGTRHHLRNTLWTVALVYGFFKQTILSEAGRNFKLTLIARRSRHNAGTRYLKRGINESGNVANDVETEQIVSEDVPVDRPMQISSVVQNRGSIPLFWSQETSRMKVKPDIATRVHFENLVERYGVPIIILNLIKTNERKPRESILRAEFANAIDFINKDLPEENRLRFLHWDLHKHFHSKTENVLALLGKVAACALMLTGFFYYQLTPAMKLEGYMSLSSSDADTSPHNSSDDDSRDYDSLEKNCRPSKNVANGDYDVKPSRLQSGVLRTNCIDCLDRTNVAQYAYGWAALGQQLHALGIRDAPTIELDDPLSSTLMGLYERMGDTLAYQYGGSAAHNKARPVESSNPVTRVLEDSATFLGTFRPEQGSQAVWELRSDSHSNGRSGEISMGEDEKFLVKRCLSDGNILHESHTPMSAMSRKNESISHRGFVSSHQVTRTHIISESSPDMPAAGDVTLSRCTPSMPSTHFFGDVQKVQHNGSSSIYLSEQEDMSSVSNFVDIEWLSSSENLCENDHLSRPSALTIYSTAETSSSENIITEVKQLTPAMRESGSSSRKGKEPVETELSVHTKIRDDFPDSFKQWVAYGEALCH

SEQ ID NO: 102679 - DNA, 1916 bp, Arabidopsis thaliana
  misc_feature (1)..(1916): Ceres Seq. ID no. 13610921
  misc_feature: MA Experiment ID: 108434 Result: Down-regulated in Transcription
  misc_feature: MA Experiment 108434 PARAMETER Experiment Name: At_Root_Tips_cDNA_P Parameter: Tissue Value: Root Tips
  misc_feature: MA Experiment ID: 108435 Result: Up-regulated in Transcription
  misc_feature: MA Experiment 108435 PARAMETER Experiment Name: At_stm_Mutants_cDNA_P Parameter: Plant Line Value: wt Landsburg vs stm
  misc_feature: MA Experiment 108435 PARAMETER Experiment Name: At_stm_Mutants_cDNA_P Parameter: Tissue Value: Shoot Apical Meristem Region
  misc_feature: MA Experiment ID: 108464 Result: Up-regulated in Transcription
  misc_feature: MA Experiment 108464 PARAMETER Experiment Name: At_Germinating_Seeds_cDNA_P Parameter: Age (day) Value: 4 vs. 0
  misc_feature: MA Experiment 108464 PARAMETER Experiment Name: At_Germinating_Seeds_cDNA_P Parameter: Tissue Value: Germinating Seeds
  misc_feature: MA Experiment ID: 108469 Result: Down-regulated in Transcription
  misc_feature: MA Experiment ID: 108488 Result: Up-regulated in Transcription
  misc_feature: MA Experiment ID: 108489 Result: Up-regulated in Transcription
  misc_feature: MA Experiment ID: 108501 Result: Up-regulated in Transcription
  misc_feature: MA Experiment 108501 PARAMETER Experiment Name: At_ap2_floral_buds_cDNA_P Parameter: Plant Line Value: ap2 (Ler.)
  misc_feature: MA Experiment 108501 PARAMETER Experiment Name: At_ap2_floral_buds_cDNA_P Parameter: Tissue Value: Closed Flower
  misc_feature: MA Experiment ID: 108569 Result: Up-regulated in Transcription
  misc_feature: MA Experiment 108569 PARAMETER Experiment Name: At_0.001%_MeJA__cDNA_P Parameter: Timepoint (hr) Value: 6
  misc_feature: MA Experiment 108569 PARAMETER Experiment Name: At_0.001%_MeJA__cDNA_P Parameter: Tissue Value: Aerial
  misc_feature: MA Experiment 108569 PARAMETER Experiment Name: At_0.001%_MeJA__cDNA_P Parameter: Treatment Value: 0.001% MeJA vs. No Treatment
  misc_feature: MA Experiment ID: 20000068 Result: Up-regulated in Transcription
  misc_feature: MA Experiment ID: 20000069 Result: Up-regulated in Transcription
  misc_feature: MA Experiment 20000069 PARAMETER Experiment Name: At_100uM_ABA_Mutants_cDNA_P Parameter: Plant Line Value: CS23
  misc_feature: MA Experiment 20000069 PARAMETER Experiment Name: At_100uM_ABA_Mutants_cDNA_P Parameter: Timepoint (hr) Value: 6
  misc_feature: MA Experiment 20000069 PARAMETER Experiment Name: At_100uM_ABA_Mutants_cDNA_P Parameter: Tissue Value: Aerial
  misc_feature: MA Experiment 20000069 PARAMETER Experiment Name: At_100uM_ABA_Mutants_cDNA_P Parameter: Treatment Value: 100uM ABA vs. No Treatment
  misc_feature: MA Experiment ID: 20000070 Result: Up-regulated in Transcription
  misc_feature: MA Experiment 20000070 PARAMETER Experiment Name: At_100uM_ABA_Mutants_cDNA_P Parameter: Plant Line Value: CS24
  misc_feature: MA Experiment 20000070 PARAMETER Experiment Name: At_100uM_ABA_Mutants_cDNA_P Parameter: Timepoint (hr) Value: 6
  misc_feature: MA Experiment 20000070 PARAMETER Experiment Name: At_100uM_ABA_Mutants_cDNA_P Parameter: Tissue Value: Aerial
  misc_feature: MA Experiment 20000070 PARAMETER Experiment Name: At_100uM_ABA_Mutants_cDNA_P Parameter: Treatment Value: 100uM ABA vs. No Treatment
  misc_feature: MA Experiment ID: 20000071 Result: Up-regulated in Transcription
  misc_feature: MA Experiment 20000071 PARAMETER Experiment Name: At_100uM_ABA_Mutants_cDNA_P Parameter: Plant Line Value: CS8104
  misc_feature: MA Experiment 20000071 PARAMETER Experiment Name: At_100uM_ABA_Mutants_cDNA_P Parameter: Timepoint (hr) Value: 6
  misc_feature: MA Experiment 20000071 PARAMETER Experiment Name: At_100uM_ABA_Mutants_cDNA_P Parameter: Tissue Value: Aerial
  misc_feature: MA Experiment 20000071 PARAMETER Experiment Name: At_100uM_ABA_Mutants_cDNA_P Parameter: Treatment Value: 100uM ABA vs. No Treatment
  misc_feature: MA Experiment ID: 20000086 Result: Up-regulated in Transcription
  misc_feature: MA Experiment 20000086 PARAMETER Experiment Name: At_100uM_ABA_Mutants_cDNA_P Parameter: Plant Line Value: CS22
  misc_feature: MA Experiment 20000086 PARAMETER Experiment Name: At_100uM_ABA_Mutants_cDNA_P Parameter: Timepoint (hr) Value: 6
  misc_feature: MA Experiment 20000086 PARAMETER Experiment Name: At_100uM_ABA_Mutants_cDNA_P Parameter: Tissue Value: Aerial
  misc_feature: MA Experiment 20000086 PARAMETER Experiment Name: At_100uM_ABA_Mutants_cDNA_P Parameter: Treatment Value: 100uM ABA vs. No Treatment
  misc_feature: MA Experiment ID: 20000088 Result: Up-regulated in Transcription
  misc_feature: MA Experiment 20000088 PARAMETER Experiment Name: At_100uM_ABA_Mutants_cDNA_P Parameter: Plant Line Value: Landsberg
  misc_feature: MA Experiment 20000088 PARAMETER Experiment Name: At_100uM_ABA_Mutants_cDNA_P Parameter: Timepoint (hr) Value: 6
  misc_feature: MA Experiment 20000088 PARAMETER Experiment Name: At_100uM_ABA_Mutants_cDNA_P Parameter: Tissue Value: Aerial
  misc_feature: MA Experiment 20000088 PARAMETER Experiment Name: At_100uM_ABA_Mutants_cDNA_P Parameter: Treatment Value: 100uM ABA vs. No Treatment
  misc_feature: MA Experiment ID: 20000113 Result: Down-regulated in Transcription
  misc_feature: MA Experiment 20000113 PARAMETER Experiment Name: At_42deg_Heat_cDNA_P Parameter: Temperature (deg C) Value: 42 vs. 22
  misc_feature: MA Experiment 20000113 PARAMETER Experiment Name: At_42deg_Heat_cDNA_P Parameter: Timepoint (hr) Value: 8
  misc_feature: MA Experiment 20000113 PARAMETER Experiment Name: At_42deg_Heat_cDNA_P Parameter: Tissue Value: Aerial
  misc_feature: MA Experiment ID: 20000184 Result: Down-regulated in Transcription
  misc_feature: MA Experiment 20000184 PARAMETER Experiment Name: At_Shoots__P Parameter: Age (day) Value: 7
  misc_feature: MA Experiment 20000184 PARAMETER Experiment Name: At_Shoots__P Parameter: Tissue Value: Shoots vs. Whole Plant
  misc_feature: MA Experiment ID: 20000185 Result: Down-regulated in Transcription
  misc_feature: MA Experiment 20000185 PARAMETER Experiment Name: At_Roots__P Parameter: Age (day) Value: 7 vs. 21
  misc_feature: MA Experiment 20000185 PARAMETER Experiment Name: At_Roots__P Parameter: Organism Value: A. thaliana
  misc_feature: MA Experiment 20000185 PARAMETER Experiment Name: At_Roots__P Parameter: Tissue Value: Roots vs. Whole Plant
  misc_feature: MA Experiment ID: 20000211 Result: Up-regulated in Transcription
  misc_feature: MA Experiment 20000211 PARAMETER Experiment Name: At_0.001percent_MeJA__P Parameter: Age (day) Value: 14
  misc_feature: MA Experiment 20000211 PARAMETER Experiment Name: At_0.001percent_MeJA__P Parameter: Organism Value: A. thaliana
  misc_feature: MA Experiment 20000211 PARAMETER Experiment Name: At_0.001percent_MeJA__P Parameter: Plant Line Value: WS
  misc_feature: MA Experiment 20000211 PARAMETER Experiment Name: At_0.001percent_MeJA__P Parameter: Timepoint (hr) Value: 1
  misc_feature: MA Experiment 20000211 PARAMETER Experiment Name: At_0.001percent_MeJA__P Parameter: Tissue Value: Aerial
  misc_feature: MA Experiment 20000211 PARAMETER Experiment Name: At_0.001percent_MeJA__P Parameter: Treatment Value: 0.001percent MeJA vs. No Treatment
  misc_feature: MA Experiment ID: 20000224 Result: Up-regulated in Transcription
  misc_feature: MA Experiment ID: 20000234 Result: Up-regulated in Transcription
  misc_feature: MA Experiment 20000234 PARAMETER Experiment Name: At_Siliques_P Parameter: Age (day) Value: 21
  misc_feature: MA Experiment 20000234 PARAMETER Experiment Name: At_Siliques_P Parameter: Organism Value: A. thaliana
  misc_feature: MA Experiment 20000234 PARAMETER Experiment Name: At_Siliques_P Parameter: Plant Line Value: WS
  misc_feature: MA Experiment 20000234 PARAMETER Experiment Name: At_Siliques_P Parameter: Tissue Value: Less Than 5mm Siliques vs. Whole Plant
  misc_feature: MA Experiment ID: 20000264 Result: Up-regulated in Transcription
  misc_feature: MA Experiment 20000264 PARAMETER Experiment Name: At_Open_Flower_P Parameter: Age (day) Value: 21
  misc_feature: MA Experiment 20000264 PARAMETER Experiment Name: At_Open_Flower_P Parameter: Plant Line Value: WS
  misc_feature: MA Experiment 20000264 PARAMETER Experiment Name: At_Open_Flower_P Parameter: Tissue Value: Open Flower vs. Whole Plant
  misc_feature: MA Experiment ID: 20000265 Result: Up-regulated in Transcription
  misc_feature: MA Experiment 20000265 PARAMETER Experiment Name: At_Open_Flower_P Parameter: Age (day) Value: 21
  misc_feature: MA Experiment 20000265 PARAMETER Experiment Name: At_Open_Flower_P Parameter: Plant Line Value: WS
  misc_feature: MA Experiment 20000265 PARAMETER Experiment Name: At_Open_Flower_P Parameter: Tissue Value: Closed Flower vs. Whole Plant
  misc_feature: MA Experiment ID: 20000286 Result: Up-regulated in Transcription
  misc_feature: MA Experiment 20000286 PARAMETER Experiment Name: At_Open_Flower_P Parameter: Age (day) Value: 21
  misc_feature: MA Experiment 20000286 PARAMETER Experiment Name: At_Open_Flower_P Parameter: Plant Line Value: WS
  misc_feature: MA Experiment 20000286 PARAMETER Experiment Name: At_Open_Flower_P Parameter: Tissue Value: Half Open vs. Whole Plant
  misc_feature: MA Experiment ID: 20000308 Result: Up-regulated in Transcription
  misc_feature: MA Experiment 20000308 PARAMETER Experiment Name: At_100mM_NaCl__P Parameter: Age (day) Value: 17
  misc_feature: MA Experiment 20000308 PARAMETER Experiment Name: At_100mM_NaCl__P Parameter: Organism Value: A. thaliana
  misc_feature: MA Experiment 20000308 PARAMETER Experiment Name: At_100mM_NaCl__P Parameter: Plant Line Value: WS
  misc_feature: MA Experiment 20000308 PARAMETER Experiment Name: At_100mM_NaCl__P Parameter: Timepoint (hr) Value: 72
  misc_feature: MA Experiment 20000308 PARAMETER Experiment Name: At_100mM_NaCl__P Parameter: Tissue Value: Whole Plant
  misc_feature: MA Experiment 20000308 PARAMETER Experiment Name: At_100mM_NaCl__P Parameter: Treatment Value: 100mM NaCl vs. No Treatment
  misc_feature: MA Experiment ID: 20000439 Result: Down-regulated in Transcription
  misc_feature: MA Experiment 20000439 PARAMETER Experiment Name: At_Roots__P Parameter: Age (day) Value: 14 vs. 21
  misc_feature: MA Experiment 20000439 PARAMETER Experiment Name: At_Roots__P Parameter: Organism Value: A. thaliana
  misc_feature: MA Experiment 20000439 PARAMETER Experiment Name: At_Roots__P Parameter: Tissue Value: Roots vs. Whole Plant
  misc_feature: MA Experiment ID: 20000455 Result: Up-regulated in Transcription
  misc_feature: MA Experiment 20000455 PARAMETER Experiment Name: At_100uM_ABA_P Parameter: Age (day) Value: 16
  misc_feature: MA Experiment 20000455 PARAMETER Experiment Name: At_100uM_ABA_P Parameter: Organism Value: A. thaliana
  misc_feature: MA Experiment 20000455 PARAMETER Experiment Name: At_100uM_ABA_P Parameter: Plant Line Value: WS
  misc_feature: MA Experiment 20000455 PARAMETER Experiment Name: At_100uM_ABA_P Parameter: Timepoint (hr) Value: 48
  misc_feature: MA Experiment 20000455 PARAMETER Experiment Name: At_100uM_ABA_P Parameter: Tissue Value: Aerial
  misc_feature: MA Experiment 20000455 PARAMETER Experiment Name: At_100uM_ABA_P Parameter: Treatment Value: 100uM ABA vs. No Treatment
  misc_feature: MA Experiment ID: 20000495 Result: Up-regulated in Transcription
  misc_feature: MA Experiment 20000495 PARAMETER Experiment Name: At_Guard_Cells_P Parameter: Harvest Date Value: 8/2/2002
  misc_feature: MA Experiment 20000495 PARAMETER Experiment Name: At_Guard_Cells_P Parameter: Organism Value: A. thaliana
  misc_feature: MA Experiment 20000495 PARAMETER Experiment Name: At_Guard_Cells_P Parameter: Tissue Value: Guard Cells vs. Leaves
  misc_feature: MA Experiment ID: 20000794 Result: Down-regulated in Transcription
  misc_feature: MA Experiment 20000794 PARAMETER Experiment Name: At_Petals_P Parameter: Age (day) Value: 23-25 days
  misc_feature: MA Experiment 20000794 PARAMETER Experiment Name: At_Petals_P Parameter: Plant Line Value: WS
  misc_feature: MA Experiment 20000794 PARAMETER Experiment Name: At_Petals_P Parameter: Tissue Value: Petals vs. Whole plant
  misc_feature: MA Experiment ID: 20001248 Result: Down-regulated in Transcription
  misc_feature: MA Experiment 20001248 PARAMETER Experiment Name: At_Far-red-induction_P Parameter: Age (day) Value: 7
  misc_feature: MA Experiment 20001248 PARAMETER Experiment Name: At_Far-red-induction_P Parameter: Light Value: Far-red vs. White
  misc_feature: MA Experiment 20001248 PARAMETER Experiment Name: At_Far-red-induction_P Parameter: Organism Value: A. thaliana
  misc_feature: MA Experiment 20001248 PARAMETER Experiment Name: At_Far-red-induction_P Parameter: Plant Line Value: Columbia
  misc_feature: MA Experiment 20001248 PARAMETER Experiment Name: At_Far-red-induction_P Parameter: Timepoint (hr) Value: 4
  misc_feature: MA Experiment 20001248 PARAMETER Experiment Name: At_Far-red-induction_P Parameter: Tissue Value: Whole Plant
  misc_feature: MA Experiment ID: 20001450 Result: Down-regulated in Transcription
  misc_feature: MA Experiment 20001450 PARAMETER Experiment Name: At_Far-red-induction_P Parameter: Age (day) Value: 7
  misc_feature: MA Experiment 20001450 PARAMETER Experiment Name: At_Far-red-induction_P Parameter: Light Value: Far-red vs. White
  misc_feature: MA Experiment 20001450 PARAMETER Experiment Name: At_Far-red-induction_P Parameter: Organism Value: A. thaliana
  misc_feature: MA Experiment 20001450 PARAMETER Experiment Name: At_Far-red-induction_P Parameter: Plant Line Value: Columbia
  misc_feature: MA Experiment 20001450 PARAMETER Experiment Name: At_Far-red-induction_P Parameter: Timepoint (hr) Value: 8
  misc_feature: MA Experiment 20001450 PARAMETER Experiment Name: At_Far-red-induction_P Parameter: Tissue Value: Whole Plant
  misc_feature: MA Experiment ID: 20001451 Result: Down-regulated in Transcription
  misc_feature: MA Experiment 20001451 PARAMETER Experiment Name: At_Far-red-induction_P Parameter: Age (day) Value: 7
  misc_feature: MA Experiment 20001451 PARAMETER Experiment Name: At_Far-red-induction_P Parameter: Light Value: Far-red vs. White
  misc_feature: MA Experiment 20001451 PARAMETER Experiment Name: At_Far-red-induction_P Parameter: Organism Value: A. thaliana
  misc_feature: MA Experiment 20001451 PARAMETER Experiment Name: At_Far-red-induction_P Parameter: Plant Line Value: Columbia
  misc_feature: MA Experiment 20001451 PARAMETER Experiment Name: At_Far-red-induction_P Parameter: Timepoint (hr) Value: 24
  misc_feature: MA Experiment 20001451 PARAMETER Experiment Name: At_Far-red-induction_P Parameter: Tissue Value: Whole Plant
  misc_feature: MA Experiment ID: 20001555 Result: Up-regulated in Transcription
  misc_feature: MA Experiment 20001555 PARAMETER Experiment Name: At_Drought_Soil_Dry_P Parameter: Age (day) Value: 24
  misc_feature: MA Experiment 20001555 PARAMETER Experiment Name: At_Drought_Soil_Dry_P Parameter: Organism Value: A. thaliana
  misc_feature: MA Experiment 20001555 PARAMETER Experiment Name: At_Drought_Soil_Dry_P Parameter: Plant Line Value: WS
  misc_feature: MA Experiment 20001555 PARAMETER Experiment Name: At_Drought_Soil_Dry_P Parameter: Post Timepoint (hr) Value: None
  misc_feature: MA Experiment 20001555 PARAMETER Experiment Name: At_Drought_Soil_Dry_P Parameter: Post-Treatment Value: None
  misc_feature: MA Experiment 20001555 PARAMETER Experiment Name: At_Drought_Soil_Dry_P Parameter: Timepoint (day) Value: 10
  misc_feature: MA Experiment 20001555 PARAMETER Experiment Name: At_Drought_Soil_Dry_P Parameter: Treatment Value: Drought vs. No Drought
  misc_feature: MA Experiment ID: 20001556 Result: Up-regulated in Transcription
  misc_feature: MA Experiment 20001556 PARAMETER Experiment Name: At_Drought_Soil_Dry_P Parameter: Age (day) Value: 26
  misc_feature: MA Experiment 20001556 PARAMETER Experiment Name: At_Drought_Soil_Dry_P Parameter: Organism Value: A. thaliana
  misc_feature: MA Experiment 20001556 PARAMETER Experiment Name: At_Drought_Soil_Dry_P Parameter: Plant Line Value: WS
  misc_feature: MA Experiment 20001556 PARAMETER Experiment Name: At_Drought_Soil_Dry_P Parameter: Post Timepoint (hr) Value: None
  misc_feature: MA Experiment 20001556 PARAMETER Experiment Name: At_Drought_Soil_Dry_P Parameter: Post-Treatment Value: None
  misc_feature: MA Experiment 20001556 PARAMETER Experiment Name: At_Drought_Soil_Dry_P Parameter: Timepoint (day) Value: 12
  misc_feature: MA Experiment 20001556 PARAMETER Experiment Name: At_Drought_Soil_Dry_P Parameter: Treatment Value: Drought vs. No Drought
  misc_feature: MA Experiment ID: 20001558 Result: Down-regulated in Transcription
  misc_feature: MA Experiment 20001558 PARAMETER Experiment Name: At_Drought_Soil_Dry_P Parameter: Age (day) Value: 27
  misc_feature: MA Experiment 20001558 PARAMETER Experiment Name: At_Drought_Soil_Dry_P Parameter: Organism Value: A. thaliana
  misc_feature: MA Experiment 20001558 PARAMETER Experiment Name: At_Drought_Soil_Dry_P Parameter: Plant Line Value: WS
  misc_feature: MA Experiment 20001558 PARAMETER Experiment Name: At_Drought_Soil_Dry_P Parameter: Post Timepoint (hr) Value: 6
  misc_feature: MA Experiment 20001558 PARAMETER Experiment Name: At_Drought_Soil_Dry_P Parameter: Post-Treatment Value: Re-Water vs. No Drought
  misc_feature: MA Experiment 20001558 PARAMETER Experiment Name: At_Drought_Soil_Dry_P Parameter: Timepoint (day) Value: 13
  misc_feature: MA Experiment 20001558 PARAMETER Experiment Name: At_Drought_Soil_Dry_P Parameter: Treatment Value: Drought vs. No Drought
  misc_feature: MA Experiment ID: 20001559 Result: Up-regulated in Transcription
  misc_feature: MA Experiment 20001559 PARAMETER Experiment Name: At_Drought_Soil_Dry_P Parameter: Age (day) Value: 28
  misc_feature: MA Experiment 20001559 PARAMETER Experiment Name: At_Drought_Soil_Dry_P Parameter: Organism Value: A. thaliana
  misc_feature: MA Experiment 20001559 PARAMETER Experiment Name: At_Drought_Soil_Dry_P Parameter: Plant Line Value: WS
  misc_feature: MA Experiment 20001559 PARAMETER Experiment Name: At_Drought_Soil_Dry_P Parameter: Post Timepoint (hr) Value: 29
  misc_feature: MA Experiment 20001559 PARAMETER Experiment Name: At_Drought_Soil_Dry_P Parameter: Post-Treatment Value: Re-Water vs. No Drought
  misc_feature: MA Experiment 20001559 PARAMETER Experiment Name: At_Drought_Soil_Dry_P Parameter: Timepoint (day) Value: 14
  misc_feature: MA Experiment 20001559 PARAMETER Experiment Name: At_Drought_Soil_Dry_P Parameter: Treatment Value: Drought vs. No Drought
  misc_feature: MA Experiment ID: 20001761 Result: Up-regulated in Transcription
  misc_feature: MA Experiment 20001761 PARAMETER Experiment Name: At_50mM_NH4NO3_L-to-H_P Parameter: Timepoint (hr) Value: 4
  misc_feature: MA Experiment 20001761 PARAMETER Experiment Name: At_50mM_NH4NO3_L-to-H_P Parameter: Tissue Value: Siliques
  misc_feature: MA Experiment 20001761 PARAMETER Experiment Name: At_50mM_NH4NO3_L-to-H_P Parameter: Treatment Value: 50mM NH4NO3 vs 100mM Mannitol
  misc_feature: MA Experiment ID: 20001774 Result: Up-regulated in Transcription
  misc_feature: MA Experiment 20001774 PARAMETER Experiment Name: At_Far-red-enriched-adult_P Parameter: Age (day) Value: 31
  misc_feature: MA Experiment 20001774 PARAMETER Experiment Name: At_Far-red-enriched-adult_P Parameter: Light Value: Far-red enriched vs. White
  misc_feature: MA Experiment 20001774 PARAMETER Experiment Name: At_Far-red-enriched-adult_P Parameter: Organism Value: A. thaliana
  misc_feature: MA Experiment 20001774 PARAMETER Experiment Name: At_Far-red-enriched-adult_P Parameter: Plant Line Value: Columbia
  misc_feature: MA Experiment 20001774 PARAMETER Experiment Name: At_Far-red-enriched-adult_P Parameter: Timepoint (hr) Value: 72
  misc_feature: MA Experiment 20001774 PARAMETER Experiment Name: At_Far-red-enriched-adult_P Parameter: Tissue Value: Aerial
  misc_feature: MA Experiment ID: 20001904 Result: Up-regulated in Transcription
  misc_feature: MA Experiment 20001904 PARAMETER Experiment Name: At_Drought_Reproduction_P Parameter: Age (day) Value: 37
  misc_feature: MA Experiment 20001904 PARAMETER Experiment Name: At_Drought_Reproduction_P Parameter: Organism Value: A. thaliana
  misc_feature: MA Experiment 20001904 PARAMETER Experiment Name: At_Drought_Reproduction_P Parameter: Plant Line Value: WS
  misc_feature: MA Experiment 20001904 PARAMETER Experiment Name: At_Drought_Reproduction_P Parameter: Timepoint (day) Value: 7
  misc_feature: MA Experiment 20001904 PARAMETER Experiment Name: At_Drought_Reproduction_P Parameter: Tissue Value: Rosettes
  misc_feature: MA Experiment 20001904 PARAMETER Experiment Name: At_Drought_Reproduction_P Parameter: Treatment Value: Drought vs. No Drought
  misc_feature: MA Experiment ID: 20001906 Result: Down-regulated in Transcription
  misc_feature: MA Experiment 20001906 PARAMETER Experiment Name: At_Drought_Reproduction_P Parameter: Age (day) Value: 35
  misc_feature: MA Experiment 20001906 PARAMETER Experiment Name: At_Drought_Reproduction_P Parameter: Organism Value: A. thaliana
  misc_feature: MA Experiment 20001906 PARAMETER Experiment Name: At_Drought_Reproduction_P Parameter: Plant Line Value: WS
  misc_feature: MA Experiment 20001906 PARAMETER Experiment Name: At_Drought_Reproduction_P Parameter: Timepoint (day) Value: 5
  misc_feature: MA Experiment 20001906 PARAMETER Experiment Name: At_Drought_Reproduction_P Parameter: Tissue Value: Siliques
  misc_feature: MA Experiment 20001906 PARAMETER Experiment Name: At_Drought_Reproduction_P Parameter: Treatment Value: Drought vs. No Drought
  misc_feature: MA Experiment ID: 20001908 Result: Down-regulated in Transcription
  misc_feature: MA Experiment 20001908 PARAMETER Experiment Name: At_Drought_Reproduction_P Parameter: Age (day) Value: 40
  misc_feature: MA Experiment 20001908 PARAMETER Experiment Name: At_Drought_Reproduction_P Parameter: Organism Value: A. thaliana
  misc_feature: MA Experiment 20001908 PARAMETER Experiment Name: At_Drought_Reproduction_P Parameter: Plant Line Value: WS
  misc_feature: MA Experiment 20001908 PARAMETER Experiment Name: At_Drought_Reproduction_P Parameter: Timepoint (day) Value: 10
  misc_feature: MA Experiment 20001908 PARAMETER Experiment Name: At_Drought_Reproduction_P Parameter: Tissue Value: Siliques
  misc_feature: MA Experiment 20001908 PARAMETER Experiment Name: At_Drought_Reproduction_P Parameter: Treatment Value: Drought vs. No Drought
gagctctccttcatttcatcctcaacaaattcctacaccaatatctttagctagagagaaaaaaagagtgaggaaactagagagagagaccacccaataatggtgaggttcgagaaggttcatttagtgttagggttagctctggttctaactctggtcggagctccgaccaaagcccaaggacctgtttgcggtgcaggcctgcctgacaaatttagcagattaaacttccctgaaggcttcatttggggaaccgcaacagcagcatttcaggttgaaggagctgttaatgaaggttgcagaggtccaagcatgtgggatactttcactaagaagttcccacatagatgtgaaaatcataacgctgatgttgctgtggatttctatcatcgttacaaggaagatatccagttgatgaaagaccttaacactgatgcttttagactttctattgcgtggcccagaatattcccccatggaaggatgtctaagggaataagcaaagtgggagtccaattctaccacgacctcatcgatgagcttctcaaaaacaatataataccattagttacagtctttcattgggatactccccaagacttggaagatgaatatggtggtttcttaagtggtcgcatcgtgcaagattttaccgaatatgcgaatttcactttccacgaatatggacacaaagtgaaacattggatcacatttaacgagccatgggtgtttagtcgtgccggttacgacaacggaaagaaagctccgggacgttgttcgccgtacatccccggttatggacagcattgtcaggatgggcggtctggatacgaagcttatcaagtcagtcacaacttactcttgtcgcatgcttacgctgttgacgcattcagaaactgcaaacagtgtgctggaggtaaaattggaattgcacacagtccagcttggttcgaaccacaagaccttgagcatgttggaggttccattgaacgtgtgcttgatttcatcctaggatggcatttggctccaacaacttatggagattatccacaatcgatgaaggatcgtgtcggtcatagattgccaaaattcacagaagctgagaagaagttgctaaagggttctacagattacgtaggaatgaattactatacttcagtgtttgcaaaagaaattagccctgatcctaagagtccgagttggacgactgattctcttgttgattgggatagcaagagtgtggatggatacaaaattggtagcaagccgtttaatggtaaactggatgtgtattcaaaaggtttgagataccttttgaagtatattaaggataactatggcgacccagaagttatcattgccgagaatggatacggagaagaccttggagagaagcacaatgacgtaaactttgggacacaagatcacaacagaaaatattatatccaaaggcatctcttgagtatgcacgacgccatttgcaaggacaaagtgaacgttacgggatactttgtgtggtctttgatggacaactttgagtggcaagatgggtacaaggcgaggttcggactttactacatcgatttccagaacaacttgacccgtcaccaaaaagtttcgggcaaatggtattccgaattcctcaaaccacagtttccaacctccaagctgagggaagaactctagatgatcaagaatcctatcgggacaaaataattgagtacaagagtcttgaagatgttgttgaggataatatcagtttgtgtgttctatggatcgttttcatctaccggtccttcctatgttagaaggacttgtgagttgttcgagttttaataatatcaataaatgtcttcttttttaatatatgttgagttaataattaaatctgcttatcgaaaagaacagataaaata

SEQ ID NO: 102680 - protein, 528 aa, Arabidopsis thaliana [sequence omitted]

SEQ ID NO: 102681 - protein, 457 aa, Arabidopsis thaliana; identical to SEQ ID NO: 36062
  peptide (1)..(457): Ceres Seq. ID no. 13610923
  misc_feature (1)..(457): Homolog of NCBI NO: 15218992 NR Description: glycosyl hydrolase family 1, beta-glucosidase
  misc_feature (1)..(457): Homolog of NCBI NO: 12229686 NR Description: Beta-glucosidase homolog precursor
  misc_feature (1)..(457): Homolog of NCBI NO: 23397037 NR Description: putative beta-glucosidase [Arabidopsis thaliana]
  misc_feature (1)..(457): Homolog of NCBI NO: 12043529 NR Description: beta-glucosidase 1 [Arabidopsis thaliana]
  misc_feature (1)..(457): Homolog of NCBI NO: 22331243 NR Description: glycosyl hydrolase family 1 [Arabidopsis thaliana]
  misc_feature (1)..(457): Homolog of NCBI NO: 16604493 NR Description: AT3g21370/MHC9_5 [Arabidopsis thaliana]
  misc_feature (1)..(444): Homolog of NCBI NO: 25404995 NR Description: protein T4O12.15 [imported] - Arabidopsis >gi|8778810|gb|AAF26759.2|AC007396_8 T4O12.15 [Arabidopsis
  misc_feature (1)..(444): Homolog of NCBI NO: 15222905 NR Description: glycosyl hydrolase family 1,
  misc_feature (1)..(436): Homolog of NCBI NO: 1076442 NR Description: beta-glucosidase (EC 3.2.1.21) - rape
  misc_feature (1)..(444): Homolog of NCBI NO: 25289457 NR Description: probable beta-glucosidase (EC 3.2.1.21) ATA27 - Arabidopsis thaliana >gi|2746341|gb|AAC39504.1| ATA27

SEQ ID NO: 102682 - protein, 423 aa, Arabidopsis thaliana; identical to SEQ ID NO: 36063
  peptide (1)..(423): Ceres Seq. ID no. 13610924
  misc_feature (1)..(423): Homolog of NCBI NO: 15218992 NR Description: glycosyl hydrolase family 1, beta-glucosidase
  misc_feature (1)..(423): Homolog of NCBI NO: 12229686 NR Description: Beta-glucosidase homolog precursor
  misc_feature (1)..(423): Homolog of NCBI NO: 23397037 NR Description: putative beta-glucosidase [Arabidopsis thaliana]
  misc_feature (1)..(423): Homolog of NCBI NO: 12043529 NR Description: beta-glucosidase 1 [Arabidopsis thaliana]
  misc_feature (1)..(423): Homolog of NCBI NO: 22331243 NR Description: glycosyl hydrolase family 1 [Arabidopsis thaliana]
  misc_feature (1)..(423): Homolog of NCBI NO: 16604493 NR Description: AT3g21370/MHC9_5 [Arabidopsis thaliana]
  misc_feature (1)..(410): Homolog of NCBI NO: 25404995 NR Description: protein T4O12.15 [imported] - Arabidopsis >gi|8778810|gb|AAF26759.2|AC007396_8 T4O12.15 [Arabidopsis
  misc_feature (1)..(410): Homolog of NCBI NO: 15222905 NR Description: glycosyl hydrolase family 1,
  misc_feature (1)..(402): Homolog of NCBI NO: 1076442 NR Description: beta-glucosidase (EC 3.2.1.21) - rape
  misc_feature (1)..(410): Homolog of NCBI NO: 25289457 NR Description: probable beta-glucosidase (EC 3.2.1.21) ATA27 - Arabidopsis thaliana >gi|2746341|gb|AAC39504.1| ATA27

SEQ ID NO: 102683 - DNA, 776 bp, Arabidopsis thaliana
  misc_feature (1)..(776): Ceres Seq. ID no. 13610933
  misc_feature: MA Experiment ID: 108435 Result: Down-regulated in Transcription
  misc_feature: MA Experiment 108435 PARAMETER Experiment Name: At_stm_Mutants_cDNA_P Parameter: Plant Line Value: wt Landsburg vs stm
  misc_feature: MA Experiment 108435 PARAMETER Experiment Name: At_stm_Mutants_cDNA_P Parameter: Tissue Value: Shoot Apical Meristem Region
  misc_feature: MA Experiment ID: 108464 Result: Up-regulated in Transcription
  misc_feature: MA Experiment 108464 PARAMETER Experiment Name: At_Germinating_Seeds_cDNA_P Parameter: Age (day) Value: 4 vs. 0
  misc_feature: MA Experiment 108464 PARAMETER Experiment Name: At_Germinating_Seeds_cDNA_P Parameter: Tissue Value: Germinating Seeds
  misc_feature: MA Experiment ID: 108489 Result: Down-regulated in Transcription
  misc_feature: MA Experiment ID: 108579 Result: Up-regulated in Transcription
  misc_feature: MA Experiment 108579 PARAMETER Experiment Name: At_4deg_Cold_cDNA_P Parameter: Temperature (deg C) Value: 4 vs. 22
  misc_feature: MA Experiment 108579 PARAMETER Experiment Name: At_4deg_Cold_cDNA_P Parameter: Timepoint (hr) Value: 6
  misc_feature: MA Experiment 108579 PARAMETER Experiment Name: At_4deg_Cold_cDNA_P Parameter: Tissue Value: Aerial
  misc_feature: MA Experiment ID: 20000068 Result: Down-regulated in Transcription
  misc_feature: MA Experiment ID: 20000113 Result: Up-regulated in Transcription
  misc_feature: MA Experiment 20000113 PARAMETER Experiment Name: At_42deg_Heat_cDNA_P Parameter: Temperature (deg C) Value: 42 vs. 22
  misc_feature: MA Experiment 20000113 PARAMETER Experiment Name: At_42deg_Heat_cDNA_P Parameter: Timepoint (hr) Value: 8
  misc_feature: MA Experiment 20000113 PARAMETER Experiment Name: At_42deg_Heat_cDNA_P Parameter: Tissue Value: Aerial
  misc_feature: MA Experiment ID: 20000185 Result: Down-regulated in Transcription
  misc_feature: MA Experiment 20000185 PARAMETER Experiment Name: At_Roots__P Parameter: Age (day) Value: 7 vs. 21
  misc_feature: MA Experiment 20000185 PARAMETER Experiment Name: At_Roots__P Parameter: Organism Value: A. thaliana
  misc_feature: MA Experiment 20000185 PARAMETER Experiment Name: At_Roots__P Parameter: Tissue Value: Roots vs. Whole Plant
  misc_feature: MA Experiment ID: 20000439 Result: Down-regulated in Transcription
  misc_feature: MA Experiment 20000439 PARAMETER Experiment Name: At_Roots__P Parameter: Age (day) Value: 14 vs. 21
  misc_feature: MA Experiment 20000439 PARAMETER Experiment Name: At_Roots__P Parameter: Organism Value: A. thaliana
  misc_feature: MA Experiment 20000439 PARAMETER Experiment Name: At_Roots__P Parameter: Tissue Value: Roots vs. Whole Plant
  misc_feature: MA Experiment ID: 20000573 Result: Up-regulated in Transcription
  misc_feature: MA Experiment 20000573 PARAMETER Experiment Name: At_100uM_ABA_Mutants__P Parameter: Organism Value: A. thaliana
  misc_feature: MA Experiment 20000573 PARAMETER Experiment Name: At_100uM_ABA_Mutants__P Parameter: Plant Line Value: CS22 vs. Ler wt
  misc_feature: MA Experiment 20000573 PARAMETER Experiment Name: At_100uM_ABA_Mutants__P Parameter: Timepoint (hr) Value: N/A
  misc_feature: MA Experiment 20000573 PARAMETER Experiment Name: At_100uM_ABA_Mutants__P Parameter: Tissue Value: Whole Plant
  misc_feature: MA Experiment 20000573 PARAMETER Experiment Name: At_100uM_ABA_Mutants__P Parameter: Treatment Value: None
  misc_feature: MA Experiment ID: 20000574 Result: Up-regulated in Transcription
  misc_feature: MA Experiment 20000574 PARAMETER Experiment Name: At_100uM_ABA_Mutants__P Parameter: Organism Value: A. thaliana
  misc_feature: MA Experiment 20000574 PARAMETER Experiment Name: At_100uM_ABA_Mutants__P Parameter: Plant Line Value: CS23 vs. Ler wt
  misc_feature: MA Experiment 20000574 PARAMETER Experiment Name: At_100uM_ABA_Mutants__P Parameter: Timepoint (hr) Value: N/A
  misc_feature: MA Experiment 20000574 PARAMETER Experiment Name: At_100uM_ABA_Mutants__P Parameter: Tissue Value: Whole Plant
  misc_feature: MA Experiment 20000574 PARAMETER Experiment Name: At_100uM_ABA_Mutants__P Parameter: Treatment Value: None
  misc_feature: MA Experiment ID: 20001451 Result: Down-regulated in Transcription
  misc_feature: MA Experiment 20001451 PARAMETER Experiment Name: At_Far-red-induction_P Parameter: Age (day) Value: 7
  misc_feature: MA Experiment 20001451 PARAMETER Experiment Name: At_Far-red-induction_P Parameter: Light Value: Far-red vs. White
  misc_feature: MA Experiment 20001451 PARAMETER Experiment Name: At_Far-red-induction_P Parameter: Organism Value: A. thaliana
  misc_feature: MA Experiment 20001451 PARAMETER Experiment Name: At_Far-red-induction_P Parameter: Plant Line Value: Columbia
  misc_feature: MA Experiment 20001451 PARAMETER Experiment Name: At_Far-red-induction_P Parameter: Timepoint (hr) Value: 24
  misc_feature: MA Experiment 20001451 PARAMETER Experiment Name: At_Far-red-induction_P Parameter: Tissue Value: Whole Plant
  misc_feature: MA Experiment ID: 20001557 Result: Down-regulated in Transcription
  misc_feature: MA Experiment 20001557 PARAMETER Experiment Name: At_Drought_Soil_Dry_P Parameter: Age (day) Value: 27
  misc_feature: MA Experiment 20001557 PARAMETER Experiment Name: At_Drought_Soil_Dry_P Parameter: Organism Value: A. thaliana
  misc_feature: MA Experiment 20001557 PARAMETER Experiment Name: At_Drought_Soil_Dry_P Parameter: Plant Line Value: WS
  misc_feature: MA Experiment 20001557 PARAMETER Experiment Name: At_Drought_Soil_Dry_P Parameter: Post Timepoint (hr) Value: 3
  misc_feature: MA Experiment 20001557 PARAMETER Experiment Name: At_Drought_Soil_Dry_P Parameter: Post-Treatment Value: Re-Water vs. No Drought
  misc_feature: MA Experiment 20001557 PARAMETER Experiment Name: At_Drought_Soil_Dry_P Parameter: Timepoint (day) Value: 13
  misc_feature: MA Experiment 20001557 PARAMETER Experiment Name: At_Drought_Soil_Dry_P Parameter: Treatment Value: Drought vs. No Drought
aaagctaagccaaactcagtggctctccggtgaagctttgagatggcgatccttattccggcgagtttcgggcgattaacaattacgtcgcgtgcacaagttagagtgagagtttctgcttctgctaaccaacgcactattcgtcgcgattcagtggattgggttaaggaaacttcaagctttttcgaagaagataaaaggccgatcatgttgttcgacggtgtttgtaatctctgtaatggaggtgtgaaatttgttagagaccatgatcgaaacaggagcataaggtttgaagcattacagagtgaagcgggcaagaaactgttattgcggtcaggaagagctcctgacgatatatcgagtgtcgtactagtcgaaaacgataggtcttacataaagtcagaagcagttttgaagatcatgaaatacattgacttaccatttccacagcttgcgttcttcttgcagtttgctcctctgtttgtgagagactttttgtatgaaaatgttgcaaacaatcgatatgcaatgtttggtcgatctgattcatgtgagctctaagaatacatatgtgatcctactttgccacaaaaaaaaaaactagatatgtaatcctacagattaatataagcttttatacagatgtatagtttacaacagccattaaacaatagatacatatgtactacttttcgaatcatgtactcgtcaaatgtataacctttccgacgttgatatttgtgttatatatatggaaaaaaacttgggattgtgtg

SEQ ID NO: 102684 - protein, 172 aa, Arabidopsis thaliana; identical to SEQ ID NO: 25746
  peptide (1)..(172): Ceres Seq. ID no. 13610934
  misc_feature (50)..(167): Pfam Name: Protein of unknown function, DUF393 Pfam Description: Protein of unknown function, DUF393
  misc_feature (1)..(172): Homolog of NCBI NO: 18404093 NR Description: expressed protein [Arabidopsis thaliana]
  misc_feature (1)..(172): Homolog of NCBI NO: 21593813 NR Description: unknown [Arabidopsis thaliana]
  misc_feature (17)..(172): Homolog of NCBI NO: 34910238 NR Description: OSJNBa0089K24.3 [Oryza sativa (japonica
  misc_feature (42)..(172): Homolog of NCBI NO: 23470059 NR Description: hypothetical protein [Pseudomonas syringae pv.
  misc_feature (49)..(172): Homolog of NCBI NO: 16080202 NR Description: alternate gene name: yugD [Bacillus subtilis]
  misc_feature (55)..(172): Homolog of NCBI NO: 28871571 NR Description: conserved hypothetical protein [Pseudomonas pv. tomato str. DC3000] >gi|28854823|gb|AAO57885.1| conserved
  misc_feature (53)..(172): Homolog of NCBI NO: 21243940 NR Description: conserved hypothetical protein [Xanthomonas pv. citri str. 306] >gi|21109550|gb|AAM38058.1| conserved
  misc_feature (55)..(172): Homolog of NCBI NO: 15613415 NR Description: BH0852~unknown conserved protein [Bacillus
  misc_feature (55)..(169): Homolog of NCBI NO: 16121834 NR Description: putative membrane protein [Yersinia pestis]
  misc_feature (55)..(169): Homolog of NCBI NO: 22126482 NR Description: hypothetical [Yersinia pestis KIM]

SEQ ID NO: 102685 - protein, 117 aa, Arabidopsis thaliana; identical to SEQ ID NO: 25747
  peptide (1)..(117): Ceres Seq. ID no. 13610935
  misc_feature (1)..(112): Pfam Name: Protein of unknown function, DUF393 Pfam Description: Protein of unknown function, DUF393
  misc_feature (1)..(117): Homolog of NCBI NO: 18404093 NR Description: expressed protein [Arabidopsis thaliana]
  misc_feature (1)..(117): Homolog of NCBI NO: 21593813 NR Description: unknown [Arabidopsis thaliana]
  misc_feature (1)..(117): Homolog of NCBI NO: 34910238 NR Description: OSJNBa0089K24.3 [Oryza sativa (japonica
  misc_feature (1)..(117): Homolog of NCBI NO: 23470059 NR Description: hypothetical protein [Pseudomonas syringae pv.
  misc_feature (1)..(117): Homolog of NCBI NO: 16080202 NR Description: alternate gene name: yugD [Bacillus subtilis]
  misc_feature (1)..(117): Homolog of NCBI NO: 28871571 NR Description: conserved hypothetical protein [Pseudomonas pv. tomato str. DC3000] >gi|28854823|gb|AAO57885.1| conserved
  misc_feature (1)..(117): Homolog of NCBI NO: 21243940 NR Description: conserved hypothetical protein [Xanthomonas pv. citri str. 306] >gi|21109550|gb|AAM38058.1| conserved
  misc_feature (1)..(117): Homolog of NCBI NO: 15613415 NR Description: BH0852~unknown conserved protein [Bacillus
  misc_feature (1)..(114): Homolog of NCBI NO: 16121834 NR Description: putative membrane protein [Yersinia pestis]
  misc_feature (1)..(114): Homolog of NCBI NO: 22126482 NR Description: hypothetical [Yersinia pestis KIM]

SEQ ID NO: 102686 - DNA, 765 bp, Arabidopsis thaliana
  misc_feature (1)..(765): Ceres Seq. ID no. 13610960
  misc_feature: MA Experiment ID: 108461 Result: Up-regulated in Transcription
  misc_feature: MA Experiment 108461 PARAMETER Experiment Name: At_Germinating_Seeds_cDNA_P Parameter: Age (day) Value: 1 vs. 0
  misc_feature: MA Experiment 108461 PARAMETER Experiment Name: At_Germinating_Seeds_cDNA_P Parameter: Tissue Value: Germinating Seeds
  misc_feature: MA Experiment ID: 108462 Result: Up-regulated in Transcription
  misc_feature: MA Experiment 108462 PARAMETER Experiment Name: At_Germinating_Seeds_cDNA_P Parameter: Age (day) Value: 2 vs. 0
  misc_feature: MA Experiment 108462 PARAMETER Experiment Name: At_Germinating_Seeds_cDNA_P Parameter: Tissue Value: Germinating Seeds
  misc_feature: MA Experiment ID: 108464 Result: Up-regulated in Transcription
  misc_feature: MA Experiment 108464 PARAMETER Experiment Name: At_Germinating_Seeds_cDNA_P Parameter: Age (day) Value: 4 vs. 0
  misc_feature: MA Experiment 108464 PARAMETER Experiment Name: At_Germinating_Seeds_cDNA_P Parameter: Tissue Value: Germinating Seeds
  misc_feature: MA Experiment ID: 108561 Result: Down-regulated in Transcription
  misc_feature: MA Experiment 108561 PARAMETER Experiment Name: At_100uM_ABA_cDNA_P Parameter: Timepoint (hr) Value: 6
  misc_feature: MA Experiment 108561 PARAMETER Experiment Name: At_100uM_ABA_cDNA_P Parameter: Tissue Value: Aerial
  misc_feature: MA Experiment 108561 PARAMETER Experiment Name: At_100uM_ABA_cDNA_P Parameter: Treatment Value: 100uM ABA vs. No Treatment
  misc_feature: MA Experiment ID: 20000069 Result: Down-regulated in Transcription
  misc_feature: MA Experiment 20000069 PARAMETER Experiment Name: At_100uM_ABA_Mutants_cDNA_P Parameter: Plant Line Value: CS23
  misc_feature: MA Experiment 20000069 PARAMETER Experiment Name: At_100uM_ABA_Mutants_cDNA_P Parameter: Timepoint (hr) Value: 6
  misc_feature: MA Experiment 20000069 PARAMETER Experiment Name: At_100uM_ABA_Mutants_cDNA_P Parameter: Tissue Value: Aerial
  misc_feature: MA Experiment 20000069 PARAMETER Experiment Name: At_100uM_ABA_Mutants_cDNA_P Parameter: Treatment Value: 100uM ABA vs. No Treatment
  misc_feature: MA Experiment ID: 20000071 Result: Down-regulated in Transcription
  misc_feature: MA Experiment 20000071 PARAMETER Experiment Name: At_100uM_ABA_Mutants_cDNA_P Parameter: Plant Line Value: CS8104
  misc_feature: MA Experiment 20000071 PARAMETER Experiment Name: At_100uM_ABA_Mutants_cDNA_P Parameter: Timepoint (hr) Value: 6
  misc_feature: MA Experiment 20000071 PARAMETER Experiment Name: At_100uM_ABA_Mutants_cDNA_P Parameter: Tissue Value: Aerial
  misc_feature: MA Experiment 20000071 PARAMETER Experiment Name: At_100uM_ABA_Mutants_cDNA_P Parameter: Treatment Value: 100uM ABA vs. No Treatment
  misc_feature: MA Experiment ID: 20000117 Result: Down-regulated in Transcription
  misc_feature: MA Experiment 20000117 PARAMETER Experiment Name: At_100uM_ABA_Mutants_cDNA_P Parameter: Plant Line Value: Columbia
  misc_feature: MA Experiment 20000117 PARAMETER Experiment Name: At_100uM_ABA_Mutants_cDNA_P Parameter: Timepoint (hr) Value: 6
  misc_feature: MA Experiment 20000117 PARAMETER Experiment Name: At_100uM_ABA_Mutants_cDNA_P Parameter: Tissue Value: Aerial
  misc_feature: MA Experiment 20000117 PARAMETER Experiment Name: At_100uM_ABA_Mutants_cDNA_P Parameter: Treatment Value: 100uM ABA vs. No Treatment
  misc_feature: MA Experiment ID: 20000180 Result: Up-regulated in Transcription
  misc_feature: MA Experiment 20000180 PARAMETER Experiment Name: At_Germinating_Seeds_P Parameter: Age (hr) Value: 24 vs. 0
  misc_feature: MA Experiment 20000180 PARAMETER Experiment Name: At_Germinating_Seeds_P Parameter: Tissue Value: Germinating Seeds
  misc_feature: MA Experiment ID: 20000185 Result: Up-regulated in Transcription
  misc_feature: MA Experiment 20000185 PARAMETER Experiment Name: At_Roots__P Parameter: Age (day) Value: 7 vs. 21
  misc_feature: MA Experiment 20000185 PARAMETER Experiment Name: At_Roots__P Parameter: Organism Value: A. thaliana
  misc_feature: MA Experiment 20000185 PARAMETER Experiment Name: At_Roots__P Parameter: Tissue Value: Roots vs. Whole Plant
  misc_feature: MA Experiment ID: 20000234 Result: Up-regulated in Transcription
  misc_feature: MA Experiment 20000234 PARAMETER Experiment Name: At_Siliques_P Parameter: Age (day) Value: 21
  misc_feature: MA Experiment 20000234 PARAMETER Experiment Name: At_Siliques_P Parameter: Organism Value: A. thaliana
  misc_feature: MA Experiment 20000234 PARAMETER Experiment Name: At_Siliques_P Parameter: Plant Line Value: WS
  misc_feature: MA Experiment 20000234 PARAMETER Experiment Name: At_Siliques_P Parameter: Tissue Value: Less Than 5mm Siliques vs. Whole Plant
  misc_feature: MA Experiment ID: 20000235 Result: Up-regulated in Transcription
  misc_feature: MA Experiment 20000235 PARAMETER Experiment Name: At_Siliques_P Parameter: Age (day) Value: 21
  misc_feature: MA Experiment 20000235 PARAMETER Experiment Name: At_Siliques_P Parameter: Organism Value: A. thaliana
  misc_feature: MA Experiment 20000235 PARAMETER Experiment Name: At_Siliques_P Parameter: Plant Line Value: WS
  misc_feature: MA Experiment 20000235 PARAMETER Experiment Name: At_Siliques_P Parameter: Tissue Value: 5-10mm Siliques vs. Whole Plant
  misc_feature: MA Experiment ID: 20000439 Result: Up-regulated in Transcription
  misc_feature: MA Experiment 20000439 PARAMETER Experiment Name: At_Roots__P Parameter: Age (day) Value: 14 vs. 21
  misc_feature: MA Experiment 20000439 PARAMETER Experiment Name: At_Roots__P Parameter: Organism Value: A. thaliana
  misc_feature: MA Experiment 20000439 PARAMETER Experiment Name: At_Roots__P Parameter: Tissue Value: Roots vs. Whole Plant
  misc_feature: MA Experiment ID: 20000452 Result: Up-regulated in Transcription
  misc_feature: MA Experiment 20000452 PARAMETER Experiment Name: At_CS6879_Shoots-Roots_P Parameter: Age (day) Value: 14
  misc_feature: MA Experiment 20000452 PARAMETER Experiment Name: At_CS6879_Shoots-Roots_P Parameter: Organism Value: A. thaliana
  misc_feature: MA Experiment 20000452 PARAMETER Experiment Name: At_CS6879_Shoots-Roots_P Parameter: Plant Line Value: CS6879 vs. WS
  misc_feature: MA Experiment 20000452 PARAMETER Experiment Name: At_CS6879_Shoots-Roots_P Parameter: Tissue Value: Shoots
  misc_feature: MA Experiment ID: 20000794 Result: Down-regulated in Transcription
  misc_feature: MA Experiment 20000794 PARAMETER Experiment Name: At_Petals_P Parameter: Age (day) Value: 23-25 days
  misc_feature: MA Experiment 20000794 PARAMETER Experiment Name: At_Petals_P Parameter: Plant Line Value: WS
  misc_feature: MA Experiment 20000794 PARAMETER Experiment Name: At_Petals_P Parameter: Tissue Value: Petals vs. Whole plant
  misc_feature: MA Experiment ID: 20001248 Result: Down-regulated in Transcription
  misc_feature: MA Experiment 20001248 PARAMETER Experiment Name: At_Far-red-induction_P Parameter: Age (day) Value: 7
  misc_feature: MA Experiment 20001248 PARAMETER Experiment Name: At_Far-red-induction_P Parameter: Light Value: Far-red vs. White
  misc_feature: MA Experiment 20001248 PARAMETER Experiment Name: At_Far-red-induction_P Parameter: Organism Value: A. thaliana
  misc_feature: MA Experiment 20001248 PARAMETER Experiment Name: At_Far-red-induction_P Parameter: Plant Line Value: Columbia
  misc_feature: MA Experiment 20001248 PARAMETER Experiment Name: At_Far-red-induction_P Parameter: Timepoint (hr) Value: 4
  misc_feature: MA Experiment 20001248 PARAMETER Experiment Name: At_Far-red-induction_P Parameter: Tissue Value: Whole Plant
  misc_feature: MA Experiment ID: 20001906 Result: Down-regulated in Transcription
  misc_feature: MA Experiment 20001906 PARAMETER Experiment Name: At_Drought_Reproduction_P Parameter: Age (day) Value: 35
  misc_feature: MA Experiment 20001906 PARAMETER Experiment Name: At_Drought_Reproduction_P Parameter: Organism Value: A. thaliana
  misc_feature: MA Experiment 20001906 PARAMETER Experiment Name: At_Drought_Reproduction_P Parameter: Plant Line Value: WS
  misc_feature: MA Experiment 20001906 PARAMETER Experiment Name: At_Drought_Reproduction_P Parameter: Timepoint (day) Value: 5
  misc_feature: MA Experiment 20001906 PARAMETER Experiment Name: At_Drought_Reproduction_P Parameter: Tissue Value: Siliques
  misc_feature: MA Experiment 20001906 PARAMETER Experiment Name: At_Drought_Reproduction_P Parameter: Treatment Value: Drought vs. No Drought
  misc_feature: MA Experiment ID: 20001911 Result: Down-regulated in Transcription
  misc_feature: MA Experiment 20001911 PARAMETER Experiment Name: At_Drought_Reproduction_P Parameter: Age (day) Value: 40
  misc_feature: MA Experiment 20001911 PARAMETER Experiment Name: At_Drought_Reproduction_P Parameter: Organism Value: A. thaliana
  misc_feature: MA Experiment 20001911 PARAMETER Experiment Name: At_Drought_Reproduction_P Parameter: Plant Line Value: WS
  misc_feature: MA Experiment 20001911 PARAMETER Experiment Name: At_Drought_Reproduction_P Parameter: Timepoint (day) Value: 10
  misc_feature: MA Experiment 20001911 PARAMETER Experiment Name: At_Drought_Reproduction_P Parameter: Tissue Value: Flowers
  misc_feature: MA Experiment 20001911 PARAMETER Experiment Name: At_Drought_Reproduction_P Parameter: Treatment Value: Drought vs. No Drought
atcttcgagggaaagagaaagatcacaagaaaagctctctcagaataatcgcaatggcttcaaagctcgtgatcatcattgtgttcattctagatctcattgctgttggattagccattgctgccgaacaaagaagaagtgtcggtaaggttgttccggatggtgagaaggaatttgagcattgtgagtatggctcagacatagctacaagttatggagctggtgcatttgtgcttctcttcattagtcaagtcattattatggtggctagtcggtgtttctgctgcggcaaagctcttaaacccggtggttcaagagcttgtggcattatgctcttccttatttgctgggtgtttttcttgattgctgaggtatgtttgctcgcgggatcaatcagaaacgcgtaccacactacgtacagaaggatgtggaacatcgaaaaccctcctagctgtgaagtgatccgtaaaggagtgtttgctgctggtgcttcctttgctctcttcactgctattgtctctcagttctattacatctcctattctcgtgcccgagacggttaccaaaccccacattactagtgagtagtgagatccagaacaagaaaagctaaaccctgaatgagtttgtccatttatccactcactgatcaataggatattaaaatttgatgatgttagtcattttgcttcttgcttgtatcacaattgtttttttttgttttcttgtgatgtataaaatcttattaatatagacagctattct

SEQ ID NO: 102687 - protein, 192 aa, Arabidopsis thaliana
  peptide (1)..(192): Ceres Seq. ID no. 13610961
  misc_feature (18)..(192): Homolog of NCBI NO: 18404242 NR Description: expressed protein [Arabidopsis thaliana]
  misc_feature (18)..(192): Homolog of NCBI NO: 18400781 NR Description: expressed protein [Arabidopsis thaliana] unknown protein [Arabidopsis thaliana] gb|AAF30339.1~gene_id:MJK13.14~similar to unknown protein
  misc_feature (18)..(185): Homolog of NCBI NO: 38016521 NR Description: fiber protein Fb34 [Gossypium barbadense]
  misc_feature (18)..(191): Homolog of NCBI NO: 18416991 NR Description: expressed protein [Arabidopsis thaliana] At4g27438 [Arabidopsis thaliana]
  misc_feature (18)..(185): Homolog of NCBI NO: 34394069 NR Description: unknown protein [Oryza sativa (japonica
  misc_feature (18)..(185): Homolog of NCBI NO: 18407003 NR Description: expressed protein [Arabidopsis thaliana] unknown protein [Arabidopsis thaliana]
  misc_feature (18)..(185): Homolog of NCBI NO: 21554630 NR Description: unknown [Arabidopsis thaliana]
  misc_feature (20)..(187): Homolog of NCBI NO: 22748411 NR Description: hypothetical protein [Oryza sativa (japonica
  misc_feature (18)..(190): Homolog of NCBI NO: 38344206 NR Description: OSJNBa0064G10.22 [Oryza sativa (japonica
  misc_feature (19)..(183): Homolog of NCBI NO: 18391509 NR Description: expressed protein [Arabidopsis thaliana] Unknown Protein [Arabidopsis thaliana] unknown [Arabidopsis thaliana] >gi|22531211|gb|AAM97109.1|
LRGKEKDHKKSSLRIIAMASKLVIIIVFILDLIAVGLAIAAEQRRSVGKVVPDGEKEFEHCEYGSDIATSYGAGAFVLLFISQVIIMVASRCFCCGKALKPGGSRACGIMLFLICWVFFLIAEVCLLAGSIRNAYHTTYRRMWNIENPPSCEVIRKGVFAAGASFALFTAIVSQFYYISYSRARDGYQTPHY

SEQ ID NO: 102688 - protein, 175 aa, Arabidopsis thaliana
  peptide (1)..(175): Ceres Seq. ID no. 13610962
  misc_feature (1)..(175): Homolog of NCBI NO: 18404242 NR Description: expressed protein [Arabidopsis thaliana]
  misc_feature (1)..(175): Homolog of NCBI NO: 18400781 NR Description: expressed protein [Arabidopsis thaliana] unknown protein [Arabidopsis thaliana] gb|AAF30339.1~gene_id:MJK13.14~similar to unknown protein
  misc_feature (1)..(168): Homolog of NCBI NO: 38016521 NR Description: fiber protein Fb34 [Gossypium barbadense]
  misc_feature (1)..(174): Homolog of NCBI NO: 18416991 NR Description: expressed protein [Arabidopsis thaliana] At4g27438 [Arabidopsis thaliana]
  misc_feature (1)..(168): Homolog of NCBI NO: 34394069 NR Description: unknown protein [Oryza sativa (japonica
  misc_feature (1)..(168): Homolog of NCBI NO: 18407003 NR Description: expressed protein [Arabidopsis thaliana] unknown protein [Arabidopsis thaliana]
  misc_feature (1)..(168): Homolog of NCBI NO: 21554630 NR Description: unknown [Arabidopsis thaliana]
  misc_feature (3)..(170): Homolog of NCBI NO: 22748411 NR Description: hypothetical protein [Oryza sativa (japonica
  misc_feature (1)..(173): Homolog of NCBI NO: 38344206 NR Description: OSJNBa0064G10.22 [Oryza sativa (japonica
  misc_feature (2)..(166): Homolog of NCBI NO: 18391509 NR Description: expressed protein [Arabidopsis thaliana] Unknown Protein [Arabidopsis thaliana] unknown [Arabidopsis thaliana] >gi|22531211|gb|AAM97109.1|
MASKLVIIIVFILDLIAVGLAIAAEQRRSVGKVVPDGEKEFEHCEYGSDIATSYGAGAFVLLFISQVIIMVASRCFCCGKALKPGGSRACGIMLFLICWVFFLIAEVCLLAGSIRNAYHTTYRRMWNIENPPSCEVIRKGVFAAGASFALFTAIVSQFYYISYSRARDGYQTPHY

SEQ ID NO: 102689 - protein, 106 aa, Arabidopsis thaliana
  peptide (1)..(106): Ceres Seq. ID no. 13610963
  misc_feature (1)..(106): Homolog of NCBI NO: 18404242 NR Description: expressed protein [Arabidopsis thaliana]
  misc_feature (1)..(106): Homolog of NCBI NO: 18400781 NR Description: expressed protein [Arabidopsis thaliana] unknown protein [Arabidopsis thaliana] gb|AAF30339.1~gene_id:MJK13.14~similar to unknown protein
  misc_feature (1)..(99): Homolog of NCBI NO: 38016521 NR Description: fiber protein Fb34 [Gossypium barbadense]
  misc_feature (1)..(105): Homolog of NCBI NO: 18416991 NR Description: expressed protein [Arabidopsis thaliana] At4g27438 [Arabidopsis thaliana]
  misc_feature (1)..(99): Homolog of NCBI NO: 34394069 NR Description: unknown protein [Oryza sativa (japonica
  misc_feature (1)..(99): Homolog of NCBI NO: 18407003 NR Description: expressed protein [Arabidopsis thaliana] unknown protein [Arabidopsis thaliana]
  misc_feature (1)..(99): Homolog of NCBI NO: 21554630 NR Description: unknown [Arabidopsis thaliana]
  misc_feature (1)..(101): Homolog of NCBI NO: 22748411 NR Description: hypothetical protein [Oryza sativa (japonica
  misc_feature (1)..(104): Homolog of NCBI NO: 38344206 NR Description: OSJNBa0064G10.22 [Oryza sativa (japonica
  misc_feature (1)..(97): Homolog of NCBI NO: 18391509 NR Description: expressed protein [Arabidopsis thaliana] Unknown Protein [Arabidopsis thaliana] unknown [Arabidopsis thaliana] >gi|22531211|gb|AAM97109.1|
MVASRCFCCGKALKPGGSRACGIMLFLICWVFFLIAEVCLLAGSIRNAYHTTYRRMWNIENPPSCEVIRKGVFAAGASFALFTAIVSQFYYISYSRARDGYQTPHY

SEQ ID NO: 102690 - DNA, 1615 bp, Arabidopsis thaliana
  misc_feature (1)..(1615): Ceres Seq. ID no. 13610972
  misc_feature: MA Experiment ID: 20000169 Result: Up-regulated in Transcription
  misc_feature: MA Experiment 20000169 PARAMETER Experiment Name: At_100uM_ABA_P Parameter: Age (day) Value: 14
  misc_feature: MA Experiment 20000169 PARAMETER Experiment Name: At_100uM_ABA_P Parameter: Organism Value: A. thaliana
  misc_feature: MA Experiment 20000169 PARAMETER Experiment Name: At_100uM_ABA_P Parameter: Plant Line Value: WS
  misc_feature: MA Experiment 20000169 PARAMETER Experiment Name: At_100uM_ABA_P Parameter: Timepoint (hr) Value: 6
  misc_feature: MA Experiment 20000169 PARAMETER Experiment Name: At_100uM_ABA_P Parameter: Tissue Value: Aerial
  misc_feature: MA Experiment 20000169 PARAMETER Experiment Name: At_100uM_ABA_P Parameter: Treatment Value: 100uM ABA vs. No Treatment
  misc_feature: MA Experiment ID: 20000179 Result: Up-regulated in Transcription
  misc_feature: MA Experiment 20000179 PARAMETER Experiment Name: At_Germinating_Seeds_P Parameter: Age (hr) Value: 6 vs. 0
  misc_feature: MA Experiment 20000179 PARAMETER Experiment Name: At_Germinating_Seeds_P Parameter: Tissue Value: Germinating Seeds
  misc_feature: MA Experiment ID: 20000180 Result: Up-regulated in Transcription
  misc_feature: MA Experiment 20000180 PARAMETER Experiment Name: At_Germinating_Seeds_P Parameter: Age (hr) Value: 24 vs. 0
  misc_feature: MA Experiment 20000180 PARAMETER Experiment Name: At_Germinating_Seeds_P Parameter: Tissue Value: Germinating Seeds
  misc_feature: MA Experiment ID: 20000234 Result: Down-regulated in Transcription
  misc_feature: MA Experiment 20000234 PARAMETER Experiment Name: At_Siliques_P Parameter: Age (day) Value: 21
  misc_feature: MA Experiment 20000234 PARAMETER Experiment Name: At_Siliques_P Parameter: Organism Value: A. thaliana
  misc_feature: MA Experiment 20000234 PARAMETER Experiment Name: At_Siliques_P Parameter: Plant Line Value: WS
  misc_feature: MA Experiment 20000234 PARAMETER Experiment Name: At_Siliques_P Parameter: Tissue Value: Less Than 5mm Siliques vs. Whole Plant
  misc_feature: MA Experiment ID: 20000264 Result: Up-regulated in Transcription
  misc_feature: MA Experiment 20000264 PARAMETER Experiment Name: At_Open_Flower_P Parameter: Age (day) Value: 21
  misc_feature: MA Experiment 20000264 PARAMETER Experiment Name: At_Open_Flower_P Parameter: Plant Line Value: WS
  misc_feature: MA Experiment 20000264 PARAMETER Experiment Name: At_Open_Flower_P Parameter: Tissue Value: Open Flower vs. Whole Plant
  misc_feature: MA Experiment ID: 20000455 Result: Up-regulated in Transcription
  misc_feature: MA Experiment 20000455 PARAMETER Experiment Name: At_100uM_ABA_P Parameter: Age (day) Value: 16
  misc_feature: MA Experiment 20000455 PARAMETER Experiment Name: At_100uM_ABA_P Parameter: Organism Value: A. thaliana
  misc_feature: MA Experiment 20000455 PARAMETER Experiment Name: At_100uM_ABA_P Parameter: Plant Line Value: WS
  misc_feature: MA Experiment 20000455 PARAMETER Experiment Name: At_100uM_ABA_P Parameter: Timepoint (hr) Value: 48
  misc_feature: MA Experiment 20000455 PARAMETER Experiment Name: At_100uM_ABA_P Parameter: Tissue Value: Aerial
  misc_feature: MA Experiment 20000455 PARAMETER Experiment Name: At_100uM_ABA_P Parameter: Treatment Value: 100uM ABA vs. No Treatment
  misc_feature: MA Experiment ID: 20000495 Result: Down-regulated in Transcription
  misc_feature: MA Experiment 20000495 PARAMETER Experiment Name: At_Guard_Cells_P Parameter: Harvest Date Value: 8/2/2002
  misc_feature: MA Experiment 20000495 PARAMETER Experiment Name: At_Guard_Cells_P Parameter: Organism Value: A. thaliana
  misc_feature: MA Experiment 20000495 PARAMETER Experiment Name: At_Guard_Cells_P Parameter: Tissue Value: Guard Cells vs. Leaves
  misc_feature: MA Experiment ID: 20000496 Result: Down-regulated in Transcription
  misc_feature: MA Experiment 20000496 PARAMETER Experiment Name: At_Guard_Cells_P Parameter: Harvest Date Value: 7/19/2002
  misc_feature: MA Experiment 20000496 PARAMETER Experiment Name: At_Guard_Cells_P Parameter: Organism Value: Canola
  misc_feature: MA Experiment 20000496 PARAMETER Experiment Name: At_Guard_Cells_P Parameter: Tissue Value: Guard Cells vs. Leaves
  misc_feature: MA Experiment ID: 20000794 Result: Up-regulated in Transcription
  misc_feature: MA Experiment 20000794 PARAMETER Experiment Name: At_Petals_P Parameter: Age (day) Value: 23-25 days
  misc_feature: MA Experiment 20000794 PARAMETER Experiment Name: At_Petals_P Parameter: Plant Line Value: WS
  misc_feature: MA Experiment 20000794 PARAMETER Experiment Name: At_Petals_P Parameter: Tissue Value: Petals vs. Whole plant
  misc_feature: MA Experiment ID: 20001451 Result: Down-regulated in Transcription
  misc_feature: MA Experiment 20001451 PARAMETER Experiment Name: At_Far-red-induction_P Parameter: Age (day) Value: 7
  misc_feature: MA Experiment 20001451 PARAMETER Experiment Name: At_Far-red-induction_P Parameter: Light Value: Far-red vs. White
  misc_feature: MA Experiment 20001451 PARAMETER Experiment Name: At_Far-red-induction_P Parameter: Organism Value: A. thaliana
  misc_feature: MA Experiment 20001451 PARAMETER Experiment Name: At_Far-red-induction_P Parameter: Plant Line Value: Columbia
  misc_feature: MA Experiment 20001451 PARAMETER Experiment Name: At_Far-red-induction_P Parameter: Timepoint (hr) Value: 24
  misc_feature: MA Experiment 20001451 PARAMETER Experiment Name: At_Far-red-induction_P Parameter: Tissue Value: Whole Plant
atacaatcgtcttcttcatcattttctcttcttcttctccaagaaaacactgaagaagaaatggggttccttaagccaaccatggcgattctttttctagcgatggtcgccgtttcatcagccgtggacatgtcaatcatctcctacgacgagaaacatggcgtctccaccaccggtggccgtagcgaagccgaggttatgagtatctacgaggcatggttggtgaaacacggcaaggctcagagccagaactctcttgttgagaaagatcgacggttcgagatctttaaagacaatcttcgtttcgtcgatgaacataacgagaagaatcttagttatagattgggtttgactcgttttgcggatcttactaacgatgagtatagatccaagtatcttggagctaagatggagaagaaaggtgagagaaggactagcctacggtacgaggctcgtgtcggtgatgagctaccggagtctattgactggaggaagaaaggagccgtggctgaggtcaaagatcagggtggttgcgggagttgttgggcgttttcaaccattggagcagtggagggaataaaccagatcgtaaccggagacctaataaccttgtctgaacaagagttggtcgattgtgacacttcatacaacgaaggttgtaacggaggtcttatggactatgcttttgagttcattatcaagaatggtggaatcgatacagacaaagattatccttacaagggtgttgatggaacttgtgaccagatcaggaaaaacgctaaagttgtcactatcgattcatatgaggatgttccaacttacagcgaggaatcgttgaagaaagcagttgctcatcaacccattagcattgccattgaggctggtggtcgtgcgttccagctctatgattcgggtatatttgatggaagttgtggaacacaactagaccacggagttgtggcggttggatacggaactgagaacggcaaagattactggattgtgagaaactcatggggtaaaagctggggagagagtggatacctaaggatggcgcgtaacattgcgtcttcatcaggaaaatgtggaatcgcgattgaaccttcatacccgataaagaatggcgaaaacccgccaaacccgggaccttcacctccatctcccatcaagcctccaacccaatgtgacagttactacacttgtcctgagagcaacacttgttgttgtctgtttgagtatggcaagtattgctttgcttggggatgttgcccactagaagcagccacttgctgtgatgacaactatagttgctgccctcacgagtacccggtttgtgaccttgatcaaggaacctgtttattgagcaagaacagtccatttagtgttaaggccttaaagcgtaaacccgcaacgccattctggtcacaaggcagaaagaacattgcctaaacattgcttcttcaagaggactctggctcatgagagaagagatctctctgaagggatttatcagatgctttttaatgttgttgtttatgccataactagatacataaaaaatgcagctgttgggtttcgtgtatataaaaaaaggaccctatgtttcattcagttt

SEQ ID NO: 102691 - protein, 482 aa, Arabidopsis thaliana
  peptide (1)..(482): Ceres Seq. ID no. 13610973
  misc_feature (157)..(372): Pfam Name: Papain family cysteine protease Pfam Description: Papain family cysteine protease
  misc_feature (21)..(482): Homolog of NCBI NO: 18401614 NR Description: cysteine proteinase RD21A [Arabidopsis thaliana]
  misc_feature (21)..(482): Homolog of NCBI NO: 14517542 NR Description: F2G19.31/F2G19.31 [Arabidopsis thaliana]
  misc_feature (21)..(482): Homolog of NCBI NO: 18422289 NR Description: cysteine proteinase RD21A [Arabidopsis thaliana]
  misc_feature (21)..(456): Homolog of NCBI NO: 18141285 NR Description: senescence-associated cysteine protease [Brassica
  misc_feature (21)..(482): Homolog of NCBI NO: 18141283 NR Description: senescence-associated cysteine protease [Brassica
  misc_feature (30)..(472): Homolog of NCBI NO: 7435791 NR Description: cysteine proteinase (EC 3.4.22.-) 3 precursor - bean >gi|2511693|emb|CAB17076.1| cysteine proteinase precursor
  misc_feature (24)..(482): Homolog of NCBI NO: 129231 NR Description: Oryzain alpha chain precursor
  misc_feature (29)..(475): Homolog of NCBI NO: 6682829 NR Description: cysteine protease component of protease-inhibitor
  misc_feature (28)..(477): Homolog of NCBI NO: 13897890 NR Description: putative cysteine protease [Ipomoea batatas]
  misc_feature (24)..(482): Homolog of NCBI NO: 38345906 NR Description: OSJNBb0059K02.8 [Oryza sativa (japonica
IQSSSSSFSLLLLQENTEEEMGFLKPTMAILFLAMVAVSSAVDMSIISYDEKHGVSTTGGRSEAEVMSIYEAWLVKHGKAQSQNSLVEKDRRFEIFKDNLRFVDEHNEKNLSYRLGLTRFADLTNDEYRSKYLGAKMEKKGERRTSLRYEARVGDELPESIDWRKKGAVAEVKDQGGCGSCWAFSTIGAVEGINQIVTGDLITLSEQELVDCDTSYNEGCNGGLMDYAFEFIIKNGGIDTDKDYPYKGVDGTCDQIRKNAKVVTIDSYEDVPTYSEESLKKAVAHQPISIAIEAGGRAFQLYDSGIFDGSCGTQLDHGVVAVGYGTENGKDYWIVRNSWGKSWGESGYLRMARNIASSSGKCGIAIEPSYPIKNGENPPNPGPSPPSPIKPPTQCDSYYTCPESNTCCCLFEYGKYCFAWGCCPLEAATCCDDNYSCCPHEYPVCDLDQGTCLLSKNSPFSVKALKRKPATPFWSQGRKNIA

SEQ ID NO: 102692 - protein, 462 aa, Arabidopsis thaliana; identical to SEQ ID NO: 25940
  peptide (1)..(462): Ceres Seq. ID no. 13610974
  misc_feature (137)..(352): Pfam Name: Papain family cysteine protease Pfam Description: Papain family cysteine protease
  misc_feature (1)..(462): Homolog of NCBI NO: 18401614 NR Description: cysteine proteinase RD21A [Arabidopsis thaliana]
  misc_feature (1)..(462): Homolog of NCBI NO: 14517542 NR Description: F2G19.31/F2G19.31 [Arabidopsis thaliana]
  misc_feature (1)..(462): Homolog of NCBI NO: 18422289 NR Description: cysteine proteinase RD21A [Arabidopsis thaliana]
  misc_feature (1)..(436): Homolog of NCBI NO: 18141285 NR Description: senescence-associated cysteine protease [Brassica
  misc_feature (1)..(462): Homolog of NCBI NO: 18141283 NR Description: senescence-associated cysteine protease [Brassica
  misc_feature (10)..(452): Homolog of NCBI NO: 7435791 NR Description: cysteine proteinase (EC 3.4.22.-) 3 precursor - bean >gi|2511693|emb|CAB17076.1| cysteine proteinase precursor
  misc_feature (4)..(462): Homolog of NCBI NO: 129231 NR Description: Oryzain alpha chain precursor
  misc_feature (9)..(455): Homolog of NCBI NO: 6682829 NR Description: cysteine protease component of protease-inhibitor
  misc_feature (8)..(457): Homolog of NCBI NO: 13897890 NR Description: putative cysteine protease [Ipomoea batatas]
  misc_feature (4)..(462): Homolog of NCBI NO: 38345906 NR Description: OSJNBb0059K02.8 [Oryza sativa (japonica

SEQ ID NO: 102693 - protein, 455 aa, Arabidopsis thaliana; identical to SEQ ID NO: 25941
  peptide (1)..(455): Ceres Seq. ID no. 13610975
  misc_feature (130)..(345): Pfam Name: Papain family cysteine protease Pfam Description: Papain family cysteine protease
  misc_feature (1)..(455): Homolog of NCBI NO: 18401614 NR Description: cysteine proteinase RD21A [Arabidopsis thaliana]
  misc_feature (1)..(455): Homolog of NCBI NO: 14517542 NR Description: F2G19.31/F2G19.31 [Arabidopsis thaliana]
  misc_feature (1)..(455): Homolog of NCBI NO: 18422289 NR Description: cysteine proteinase RD21A [Arabidopsis thaliana]
  misc_feature (1)..(429): Homolog of NCBI NO: 18141285 NR Description: senescence-associated cysteine protease [Brassica
  misc_feature (1)..(455): Homolog of NCBI NO: 18141283 NR Description: senescence-associated cysteine protease [Brassica
  misc_feature (3)..(445): Homolog of NCBI NO: 7435791 NR Description: cysteine proteinase (EC 3.4.22.-) 3 precursor - bean >gi|2511693|emb|CAB17076.1| cysteine proteinase precursor
  misc_feature (1)..(455): Homolog of NCBI NO: 129231 NR Description: Oryzain alpha chain precursor
  misc_feature (2)..(448): Homolog of NCBI NO: 6682829 NR Description: cysteine protease component of protease-inhibitor
  misc_feature (1)..(450): Homolog of NCBI NO: 13897890 NR Description: putative cysteine protease [Ipomoea batatas]
  misc_feature (1)..(455): Homolog of NCBI NO: 38345906 NR Description: OSJNBb0059K02.8 [Oryza sativa (japonica

SEQ ID NO: 102694 - DNA, 1475 bp, Arabidopsis thaliana
  misc_feature (1)..(1475): Ceres Seq. ID no. 13610984
  misc_feature: MA Experiment ID: 108434 Result: Up-regulated in Transcription
  misc_feature: MA Experiment 108434 PARAMETER Experiment Name: At_Root_Tips_cDNA_P Parameter: Tissue Value: Root Tips
  misc_feature: MA Experiment ID: 108461 Result: Up-regulated in Transcription
  misc_feature: MA Experiment 108461 PARAMETER Experiment Name: At_Germinating_Seeds_cDNA_P Parameter: Age (day) Value: 1 vs. 0
  misc_feature: MA Experiment 108461 PARAMETER Experiment Name: At_Germinating_Seeds_cDNA_P Parameter: Tissue Value: Germinating Seeds
  misc_feature: MA Experiment ID: 108595 Result: Down-regulated in Transcription
  misc_feature: MA Experiment 108595 PARAMETER Experiment Name: At_Ler-pi_Ovule_cDNA_P Parameter: Plant Line Value: null
  misc_feature: MA Experiment ID: 20000111 Result: Down-regulated in Transcription
  misc_feature: MA Experiment 20000111 PARAMETER Experiment Name: At_42deg_Heat_cDNA_P Parameter: Temperature (deg C) Value: 42 vs. 22
  misc_feature: MA Experiment 20000111 PARAMETER Experiment Name: At_42deg_Heat_cDNA_P Parameter: Timepoint (hr) Value: 6
  misc_feature: MA Experiment 20000111 PARAMETER Experiment Name: At_42deg_Heat_cDNA_P Parameter: Tissue Value: Aerial
  misc_feature: MA Experiment ID: 20000179 Result: Up-regulated in Transcription
  misc_feature: MA Experiment 20000179 PARAMETER Experiment Name: At_Germinating_Seeds_P Parameter: Age (hr) Value: 6 vs. 0
  misc_feature: MA Experiment 20000179 PARAMETER Experiment Name: At_Germinating_Seeds_P Parameter: Tissue Value: Germinating Seeds
  misc_feature: MA Experiment ID: 20000180 Result: Up-regulated in Transcription
  misc_feature: MA Experiment 20000180 PARAMETER Experiment Name: At_Germinating_Seeds_P Parameter: Age (hr) Value: 24 vs. 0
  misc_feature: MA Experiment 20000180 PARAMETER Experiment Name: At_Germinating_Seeds_P Parameter: Tissue Value: Germinating Seeds
  misc_feature: MA Experiment ID: 20000437 Result: Down-regulated in Transcription
  misc_feature: MA Experiment 20000437 PARAMETER Experiment Name: At_Drought_P Parameter: Age (day) Value: 8
  misc_feature: MA Experiment 20000437 PARAMETER Experiment Name: At_Drought_P Parameter: Organism Value: A. thaliana
  misc_feature: MA Experiment 20000437 PARAMETER Experiment Name: At_Drought_P Parameter: Plant Line Value: WS
  misc_feature: MA Experiment 20000437 PARAMETER Experiment Name: At_Drought_P Parameter: Timepoint (hr) Value: 24
  misc_feature: MA Experiment 20000437 PARAMETER Experiment Name: At_Drought_P Parameter: Tissue Value: Whole Plant
  misc_feature: MA Experiment 20000437 PARAMETER Experiment Name: At_Drought_P Parameter: Treatment Value: Drought vs. No Drought
  misc_feature: MA Experiment ID: 20001911 Result: Down-regulated in Transcription
  misc_feature: MA Experiment 20001911 PARAMETER Experiment Name: At_Drought_Reproduction_P Parameter: Age (day) Value: 40
  misc_feature: MA Experiment 20001911 PARAMETER Experiment Name: At_Drought_Reproduction_P Parameter: Organism Value: A. thaliana
  misc_feature: MA Experiment 20001911 PARAMETER Experiment Name: At_Drought_Reproduction_P Parameter: Plant Line Value: WS
  misc_feature: MA Experiment 20001911 PARAMETER Experiment Name: At_Drought_Reproduction_P Parameter: Timepoint (day) Value: 10
  misc_feature: MA Experiment 20001911 PARAMETER Experiment Name: At_Drought_Reproduction_P Parameter: Tissue Value: Flowers
  misc_feature: MA Experiment 20001911 PARAMETER Experiment Name: At_Drought_Reproduction_P Parameter: Treatment Value: Drought vs. No Drought
ttttttgttctccgaacgttctctcctctctgtctatcatcgaacgccgtcgctctcgccgttgacttctaccagtgaccccaacgccttcaatttccgcctcgtcggataatttcatcggagaagacaatggtgatggaagttacagagactgagcgatggtgcgttgtaactggtggtagaggattcgctgcaagacatcttgtagaaatgctcgtacgttaccaaatgttccacgttcgtatcgccgatttagctcctgcgatagtgctcaatcctcacgaggaaactggaattctcggtgaagcaattagatccggtagagttcaatacgtctccgctgatcttcggaacaaaactcaagttgtcaaaggttttcaaggagcagaagtggtgtttcatatggcagctccagattcatcgattaacaatcaccagcttcagtactcagttaatgttcaagggacaacaaatgtaattgatgcttgtattgaggttggagtaaagaggctaatctatacaagttctccgagtgttgtgtttgacggggtccatggtactttgaatgctgatgaatcactgccgtatccacctaagcataatgattcatattcagctactaaagctgaaggggaagctttgattttgaaagcgaatggaagaagtggactactcacttgttgcatacgtcctagcagcatatttggtcctggtgataaattaatggttccatcgcttgttactgctgccagggctgggaaatccaagttcattataggtgatgggagtaacttctatgatttcacttatgttgaaaatgttgtgcacgcccatgtctgtgctgagcgagctctagcatcaggaggagaagtatgtgcaaaagctgctggccaggcttacttcattaccaacatggagccaattaaattttgggagtttatgtcacagcttcttgaaggacttggctatgagaggccaagtataaagatacctgcaagtctcatgatgccaatagcatatcttgtggaactagcatataaattactcggaccgtatgggatgaaagtaccagtgctaacaccttctagggttaggctactctcttgcaacagaacatttgattcttcaaaagcaaaggatcgtttaggctattctcctgttgtcccacttcaggaaggtataaagaggacaatagattcattctcacacttgaaagctcaaaatcaacccaaaacagaagagaaaatgaaagtgttcgggagcaagaagatcgactaaagaatactccaaatttgagctttgtgtaaggtaaacaacgacttattttttcctctatacattgataaacatgactcctgcctgtgtagatggatgttgtttggtctgagttttgcgtcgtttattttacgatttgtaatttgaactctgtaactgtcgatttcggttactctgataccaaaatctatgaattgatg

SEQ ID NO: 102695 - protein, 382 aa, Arabidopsis thaliana
  peptide (1)..(382): Ceres Seq. ID no. 13610985
  misc_feature (8)..(362): Pfam Name: 3-beta hydroxysteroid dehydrogenase/isomerase family Pfam Description: 3-beta hydroxysteroid dehydrogenase/isomerase
  misc_feature (1)..(382): Homolog of NCBI NO: 18401656 NR Description: 3-beta hydroxysteroid dehydrogenase/isomerase
  misc_feature (3)..(382): Homolog of NCBI NO: 21553411 NR Description: 3-beta-hydroxysteroid dehydrogenase, putative
  misc_feature (1)..(370): Homolog of NCBI NO: 30694041 NR Description: 3-beta hydroxysteroid dehydrogenase/isomerase [Arabidopsis thaliana] >gi|25405196|pir||F96513 hypothetical
  misc_feature (6)..(374): Homolog of NCBI NO: 15225272 NR Description: 3-beta hydroxysteroid dehydrogenase/isomerase
  misc_feature (6)..(213): Homolog of NCBI NO: 23198272 NR Description: 3-beta-hydroxysteroid dehydrogenase [Arabidopsis
  misc_feature (12)..(359): Homolog of NCBI NO: 18406234 NR Description: 3-beta hydroxysteroid dehydrogenase/isomerase [Arabidopsis thaliana] >gi|15027969|gb|AAK76515.1| putative dehydrogenase [Arabidopsis thaliana] >gi|20196859|gb|AAB64337.2|
  misc_feature (84)..(358): Homolog of NCBI NO: 25408868 NR Description: probable sterol dehydrogenase [imported] -
  misc_feature (12)..(83): Homolog of NCBI NO: 25408868 NR Description: probable sterol dehydrogenase [imported] -
  misc_feature (249)..(381): Homolog of NCBI NO: 21539467 NR Description: 3-beta-hydroxysteroid dehydrogenase [Arabidopsis
  misc_feature (65)..(362): Homolog of NCBI NO: 31127258 NR Description: Nsdhl protein [Mus musculus]
MVMEVTETERWCVVTGGRGFAARHLVEMLVRYQMFHVRIADLAPAIVLNPHEETGILGEAIRSGRVQYVSADLRNKTQVVKGFQGAEVVFHMAAPDSSINNHQLQYSVNVQGTTNVIDACIEVGVKRLIYTSSPSVVFDGVHGTLNADESLPYPPKHNDSYSATKAEGEALILKANGRSGLLTCCIRPSSIFGPGDKLMVPSLVTAARAGKSKFIIGDGSNFYDFTYVENVVHAHVCAERALASGGEVCAKAAGQAYFITNMEPIKFWEFMSQLLEGLGYERPSIKIPASLMMPIAYLVELAYKLLGPYGMKVPVLTPSRVRLLSCNRTFDSSKAKDRLGYSPVVPLQEGIKRTIDSFSHLKAQNQPKTEEKMKVFGSKKID

SEQ ID NO: 102696 - protein, 380 aa, Arabidopsis thaliana
  peptide (1)..(380): Ceres Seq. ID no. 13610986
  misc_feature (6)..(360): Pfam Name: 3-beta hydroxysteroid dehydrogenase/isomerase family Pfam Description: 3-beta hydroxysteroid dehydrogenase/isomerase
  misc_feature (1)..(380): Homolog of NCBI NO: 18401656 NR Description: 3-beta hydroxysteroid dehydrogenase/isomerase
  misc_feature (1)..(380): Homolog of NCBI NO: 21553411 NR Description: 3-beta-hydroxysteroid dehydrogenase, putative
  misc_feature (1)..(368): Homolog of NCBI NO: 30694041 NR Description: 3-beta hydroxysteroid dehydrogenase/isomerase [Arabidopsis thaliana] >gi|25405196|pir||F96513 hypothetical
  misc_feature (4)..(372): Homolog of NCBI NO: 15225272 NR Description: 3-beta hydroxysteroid dehydrogenase/isomerase
  misc_feature (4)..(211): Homolog of NCBI NO: 23198272 NR Description: 3-beta-hydroxysteroid dehydrogenase [Arabidopsis
  misc_feature (10)..(357): Homolog of NCBI NO: 18406234 NR Description: 3-beta hydroxysteroid dehydrogenase/isomerase [Arabidopsis thaliana] >gi|15027969|gb|AAK76515.1| putative dehydrogenase [Arabidopsis thaliana] >gi|20196859|gb|AAB64337.2|
  misc_feature (82)..(356): Homolog of NCBI NO: 25408868 NR Description: probable sterol dehydrogenase [imported] -
  misc_feature (10)..(81): Homolog of NCBI NO: 25408868 NR Description: probable sterol dehydrogenase [imported] -
  misc_feature (247)..(379): Homolog of NCBI NO: 21539467 NR Description: 3-beta-hydroxysteroid dehydrogenase [Arabidopsis
  misc_feature (63)..(360): Homolog of NCBI NO: 31127258 NR Description: Nsdhl protein [Mus musculus]
MEVTETERWCVVTGGRGFAARHLVEMLVRYQMFHVRIADLAPAIVLNPHEETGILGEAIRSGRVQYVSADLRNKTQVVKGFQGAEVVFHMAAPDSSINNHQLQYSVNVQGTTNVIDACIEVGVKRLIYTSSPSVVFDGVHGTLNADESLPYPPKHNDSYSATKAEGEALILKANGRSGLLTCCIRPSSIFGPGDKLMVPSLVTAARAGKSKFIIGDGSNFYDFTYVENVVHAHVCAERALASGGEVCAKAAGQAYFITNMEPIKFWEFMSQLLEGLGYERPSIKIPASLMMPIAYLVELAYKLLGPYGMKVPVLTPSRVRLLSCNRTFDSSKAKDRLGYSPVVPLQEGIKRTIDSFSHLKAQNQPKTEEKMKVFGSKKID

SEQ ID NO: 102697 - protein, 355 aa, Arabidopsis thaliana
  peptide (1)..(355): Ceres Seq. ID no. 13610987
  misc_feature (1)..(335): Pfam Name: 3-beta hydroxysteroid dehydrogenase/isomerase family Pfam Description: 3-beta hydroxysteroid dehydrogenase/isomerase
  misc_feature (1)..(355): Homolog of NCBI NO: 18401656 NR Description: 3-beta hydroxysteroid dehydrogenase/isomerase
  misc_feature (1)..(355): Homolog of NCBI NO: 21553411 NR Description: 3-beta-hydroxysteroid dehydrogenase, putative
  misc_feature (1)..(343): Homolog of NCBI NO: 30694041 NR Description: 3-beta hydroxysteroid dehydrogenase/isomerase [Arabidopsis thaliana] >gi|25405196|pir||F96513 hypothetical
  misc_feature (1)..(347): Homolog of NCBI NO: 15225272 NR Description: 3-beta hydroxysteroid dehydrogenase/isomerase
  misc_feature (1)..(186): Homolog of NCBI NO: 23198272 NR Description: 3-beta-hydroxysteroid dehydrogenase [Arabidopsis
  misc_feature (1)..(332): Homolog of NCBI NO: 18406234 NR Description: 3-beta hydroxysteroid dehydrogenase/isomerase [Arabidopsis thaliana] >gi|15027969|gb|AAK76515.1| putative dehydrogenase [Arabidopsis thaliana] >gi|20196859|gb|AAB64337.2|
  misc_feature (57)..(331): Homolog of NCBI NO: 25408868 NR Description: probable sterol dehydrogenase [imported] -
  misc_feature (1)..(56): Homolog of NCBI NO: 25408868 NR Description: probable sterol dehydrogenase [imported] -
  misc_feature (222)..(354): Homolog of NCBI NO: 21539467 NR Description: 3-beta-hydroxysteroid dehydrogenase [Arabidopsis
  misc_feature (38)..(335): Homolog of NCBI NO: 31127258 NR Description: Nsdhl protein [Mus musculus]
MLVRYQMFHVRIADLAPAIVLNPHEETGILGEAIRSGRVQYVSADLRNKTQVVKGFQGAEVVFHMAAPDSSINNHQLQYSVNVQGTTNVIDACIEVGVKRLIYTSSPSVVFDGVHGTLNADESLPYPPKHNDSYSATKAEGEALILKANGRSGLLTCCIRPSSIFGPGDKLMVPSLVTAARAGKSKFIIGDGSNFYDFTYVENVVHAHVCAERALASGGEVCAKAAGQAYFITNMEPIKFWEFMSQLLEGLGYERPSIKIPASLMMPIAYLVELAYKLLGPYGMKVPVLTPSRVRLLSCNRTFDSSKAKDRLGYSPVVPLQEGIKRTIDSFSHLKAQNQPKTEEKMKVFGSKKID

SEQ ID NO: 102698 - DNA, 1582 bp, Arabidopsis thaliana
  misc_feature (1)..(1582): Ceres Seq. ID no. 13611006
  misc_feature: MA Experiment ID: 108573 Result: Up-regulated in Transcription
  misc_feature: MA Experiment 108573 PARAMETER Experiment Name: At_Drought_cDNA_P Parameter: Timepoint (hr) Value: 6
  misc_feature: MA Experiment 108573 PARAMETER Experiment Name: At_Drought_cDNA_P Parameter: Tissue Value: Aerial
  misc_feature: MA Experiment 108573 PARAMETER Experiment Name: At_Drought_cDNA_P Parameter: Treatment Value: Drought vs. No Drought
  misc_feature: MA Experiment ID: 108595 Result: Down-regulated in Transcription
  misc_feature: MA Experiment 108595 PARAMETER Experiment Name: At_Ler-pi_Ovule_cDNA_P Parameter: Plant Line Value: null
cgatttgtccgactcatcatcttctttctctttctgtctctctctctctctgttcgaatcgaaaccctaacaaatccgaaattgtctctgagattgaaattgccccaatttaatggcgtaaagcttcaccaatttcatcaattcgatatcaatttttgaaatttcgaagaaaggaagaaactttgaaaagagaaagcaaaatgtcaagagagacgacgacggaagcaacgcctttgattttaaccgacggaggaggaggaaggagatcggtgagaagacaagggttaagagaagcggcgaggttactaagacatgcaagtagcgggagaatgatgatgagagagccatcgatgcttgttcgtgaagctgcggctgagcagcttgaagagagacaaagcgattgggcttattcgaaacctgtagtggttttggatttcgtttggaatcttgcttttgtcgttgttgctacagctgttttggtacttagcagcgatgagaatccgaatatgcctcttagggtttggattattgggtatgggttgcaatgtatgatgcatatggtttgtgtttgtgttgagtatcgtaggaggaatagtagaagaagaagagatttgagtccaagatctagctcttcttcttcttcttcttcttcttctatggatgaagaagaaggtttgggtttgagtagaaactcagatgaacgttacttggagctaggtcaattagagaatgaaaacaatagttttgctaagcatctagaatctgcaaatacgatgatctcatttatatggtgggttattggattttattgggtatcttctggtggtcaagagttagcacaaggatccccacagctttattggttgtgtatagtctttcttggtttcgatgtgttctttgttgttttctgcgttgcattggcttgtgttatcggcattgctgtttgctgctgcttgccttgcatcattgcagttctatacgccgtagcagaacaggaaggagcttcgaaagaagacattgaccaacttactaaattcaaattccgaaaggttggtgatactatgaaacacactgttgatgaagaacaaggacaaggagattctggaggagtgatgactgaatgtggtacagattcacccgttgaacatgctcttcctcatgaggatgcagaatgctgcatttgtctttccgcttatgaagacgagacagagctaagagaacttccttgtggccaccatttccattgcggttgtgtggataaatggctttacataaatgctacttgtcccctctgcaaatacaacatcctcaagagtagcaactacgaagaaggcgaggaagtctagaagactagaacagtaagaagaggaaacttgcaaatatgcgaatatctgtatcatttagcagctgaggaacccatgagaaaaagggttcgagatttgatcaatttgttgtttacattgcttgttatatgtttacacattttagttgcttttttctttggagtctgtatgttctgttgttgtcgactcttgttaacatgttttggtacttacttgctcaacaagttaacaacatcttg

SEQ ID NO: 102699 - protein, 381 aa, Arabidopsis thaliana
  peptide (1)..(381): Ceres Seq. ID no. 13611007
  misc_feature (325)..(365): Pfam Name: Zinc finger, C3HC4 type (RING finger) Pfam Description: Zinc finger, C3HC4 type (RING finger)
  misc_feature (1)..(381): Homolog of NCBI NO: 18407748 NR Description: zinc finger (C3HC4-type RING finger) protein [Arabidopsis thaliana] >gi|25404410|pir||C96657 hypothetical
  misc_feature (1)..(381): Homolog of NCBI NO: 21554228 NR Description: unknown [Arabidopsis thaliana]
  misc_feature (1)..(381): Homolog of NCBI NO: 16604388 NR Description: At1g63170/F16M19_7 [Arabidopsis thaliana]
  misc_feature (17)..(381): Homolog of NCBI NO: 9502381 NR Description: T12C24.29 [Arabidopsis thaliana] unknown protein [Arabidopsis thaliana]
  misc_feature (206)..(381): Homolog of NCBI NO: 15222059 NR Description: zinc finger (C3HC4-type RING finger) protein
  misc_feature (17)..(180): Homolog of NCBI NO: 15222059 NR Description: zinc finger (C3HC4-type RING finger) protein
  misc_feature (22)..(376): Homolog of NCBI NO: 18413629 NR Description: zinc finger (C3HC4-type RING finger) protein [Arabidopsis thaliana] >gi|16323218|gb|AAL15343.1|
  misc_feature (22)..(323): Homolog of NCBI NO: 7487667 NR Description: hypothetical protein T5C23.110 - Arabidopsis >gi|4539459|emb|CAB39939.1| putative protein [Arabidopsis >gi|7267868|emb|CAB78211.1| putative protein [Arabidopsis
  misc_feature (324)..(376): Homolog of NCBI NO: 7487667 NR Description: hypothetical protein T5C23.110 - Arabidopsis >gi|4539459|emb|CAB39939.1| putative protein [Arabidopsis >gi|7267868|emb|CAB78211.1| putative protein [Arabidopsis
  misc_feature (46)..(381): Homolog of NCBI NO: 38344371 NR Description: OSJNBb0032E06.5 [Oryza sativa (japonica
MSRETTTEATPLILTDGGGGRRSVRRQGLREAARLLRHASSGRMMMREPSMLVREAAAEQLEERQSDWAYSKPVVVLDFVWNLAFVVVATAVLVLSSDENPNMPLRVWIIGYGLQCMMHMVCVCVEYRRRNSRRRRDLSPRSSSSSSSSSSSMDEEEGLGLSRNSDERYLELGQLENENNSFAKHLESANTMISFIWWVIGFYWVSSGGQELAQGSPQLYWLCIVFLGFDVFFVVFCVALACVIGIAVCCCLPCIIAVLYAVAEQEGASKEDIDQLTKFKFRKVGDTMKHTVDEEQGQGDSGGVMTECGTDSPVEHALPHEDAECCICLSAYEDETELRELPCGHHFHCGCVDKWLYINATCPLCKYNILKSSNYEEGEEV

SEQ ID NO: 102700 - protein, 338 aa, Arabidopsis thaliana
  peptide (1)..(338): Ceres Seq. ID no. 13611008
  misc_feature (282)..(322): Pfam Name: Zinc finger, C3HC4 type (RING finger) Pfam Description: Zinc finger, C3HC4 type (RING finger)
  misc_feature (1)..(338): Homolog of NCBI NO: 18407748 NR Description: zinc finger (C3HC4-type RING finger) protein [Arabidopsis thaliana] >gi|25404410|pir||C96657 hypothetical
  misc_feature (1)..(338): Homolog of NCBI NO: 21554228 NR Description: unknown [Arabidopsis thaliana]
  misc_feature (1)..(338): Homolog of NCBI NO: 16604388 NR Description: At1g63170/F16M19_7 [Arabidopsis thaliana]
  misc_feature (1)..(338): Homolog of NCBI NO: 9502381 NR Description: T12C24.29 [Arabidopsis thaliana] unknown protein [Arabidopsis thaliana]
  misc_feature (163)..(338): Homolog of NCBI NO: 15222059 NR Description: zinc finger (C3HC4-type RING finger) protein
  misc_feature (1)..(137): Homolog of NCBI NO: 15222059 NR Description: zinc finger (C3HC4-type RING finger) protein
  misc_feature (1)..(333): Homolog of NCBI NO: 18413629 NR Description: zinc finger (C3HC4-type RING finger) protein [Arabidopsis thaliana] >gi|16323218|gb|AAL15343.1|
  misc_feature (1)..(280): Homolog of NCBI NO: 7487667 NR Description: hypothetical protein T5C23.110 - Arabidopsis >gi|4539459|emb|CAB39939.1| putative protein [Arabidopsis >gi|7267868|emb|CAB78211.1| putative protein [Arabidopsis
  misc_feature (281)..(333): Homolog of NCBI NO: 7487667 NR Description: hypothetical protein T5C23.110 - Arabidopsis >gi|4539459|emb|CAB39939.1| putative protein [Arabidopsis >gi|7267868|emb|CAB78211.1| putative protein [Arabidopsis
  misc_feature (3)..(338): Homolog of NCBI NO: 38344371 NR Description: OSJNBb0032E06.5 [Oryza sativa (japonica
MMMREPSMLVREAAAEQLEERQSDWAYSKPVVVLDFVWNLAFVVVATAVLVLSSDENPNMPLRVWIIGYGLQCMMHMVCVCVEYRRRNSRRRRDLSPRSSSSSSSSSSSMDEEEGLGLSRNSDERYLELGQLENENNSFAKHLESANTMISFIWWVIGFYWVSSGGQELAQGSPQLYWLCIVFLGFDVFFVVFCVALACVIGIAVCCCLPCIIAVLYAVAEQEGASKEDIDQLTKFKFRKVGDTMKHTVDEEQGQGDSGGVMTECGTDSPVEHALPHEDAECCICLSAYEDETELRELPCGHHFHCGCVDKWLYINATCPLCKYNILKSSNYEEGEEV

SEQ ID NO: 102701 - protein, 337 aa, Arabidopsis thaliana
  peptide (1)..(337): Ceres Seq. ID no. 13611009
  misc_feature (281)..(321): Pfam Name: Zinc finger, C3HC4 type (RING finger) Pfam Description: Zinc finger, C3HC4 type (RING finger)
  misc_feature (1)..(337): Homolog of NCBI NO: 18407748 NR Description: zinc finger (C3HC4-type RING finger) protein [Arabidopsis thaliana] >gi|25404410|pir||C96657 hypothetical
  misc_feature (1)..(337): Homolog of NCBI NO: 21554228 NR Description: unknown [Arabidopsis thaliana]
  misc_feature (1)..(337): Homolog of NCBI NO: 16604388 NR Description: At1g63170/F16M19_7 [Arabidopsis thaliana]
  misc_feature (1)..(337): Homolog of NCBI NO: 9502381 NR Description: T12C24.29 [Arabidopsis thaliana] unknown protein [Arabidopsis thaliana]
  misc_feature (162)..(337): Homolog of NCBI NO: 15222059 NR Description: zinc finger (C3HC4-type RING finger) protein
  misc_feature (1)..(136): Homolog of NCBI NO: 15222059 NR Description: zinc finger (C3HC4-type RING finger) protein
  misc_feature (1)..(332): Homolog of NCBI NO: 18413629 NR Description: zinc finger (C3HC4-type RING finger) protein [Arabidopsis thaliana] >gi|16323218|gb|AAL15343.1|
  misc_feature (1)..(279): Homolog of NCBI NO: 7487667 NR Description: hypothetical protein T5C23.110 - Arabidopsis >gi|4539459|emb|CAB39939.1| putative protein [Arabidopsis >gi|7267868|emb|CAB78211.1| putative protein [Arabidopsis
  misc_feature (280)..(332): Homolog of NCBI NO: 7487667 NR Description: hypothetical protein T5C23.110 - Arabidopsis >gi|4539459|emb|CAB39939.1| putative protein [Arabidopsis >gi|7267868|emb|CAB78211.1| putative protein [Arabidopsis
  misc_feature (2)..(337): Homolog of NCBI NO: 38344371 NR Description: OSJNBb0032E06.5 [Oryza sativa (japonica
MMREPSMLVREAAAEQLEERQSDWAYSKPVVVLDFVWNLAFVVVATAVLVLSSDENPNMPLRVWIIGYGLQCMMHMVCVCVEYRRRNSRRRRDLSPRSSSSSSSSSSSMDEEEGLGLSRNSDERYLELGQLENENNSFAKHLESANTMISFIWWVIGFYWVSSGGQELAQGSPQLYWLCIVFLGFDVFFVVFCVALACVIGIAVCCCLPCIIAVLYAVAEQEGASKEDIDQLTKFKFRKVGDTMKHTVDEEQGQGDSGGVMTECGTDSPVEHALPHEDAECCICLSAYEDETELRELPCGHHFHCGCVDKWLYINATCPLCKYNILKSSNYEEGEEV

SEQ ID NO: 102702 - DNA, 1394 bp, Arabidopsis thaliana
  misc_feature (1)..(1394): Ceres Seq. ID no. 13611010
  misc_feature: MA Experiment ID: 108433 Result: Up-regulated in Transcription
  misc_feature: MA Experiment 108433 PARAMETER Experiment Name: At_rhl_Mutant2_cDNA_P Parameter: Age (day) Value: 7
  misc_feature: MA Experiment 108433 PARAMETER Experiment Name: At_rhl_Mutant2_cDNA_P Parameter: Organism Value: A. thaliana
  misc_feature: MA Experiment 108433 PARAMETER Experiment Name: At_rhl_Mutant2_cDNA_P Parameter: Plant Line Value: rhl Mutant vs. wt landsburg
  misc_feature: MA Experiment 108433 PARAMETER Experiment Name: At_rhl_Mutant2_cDNA_P Parameter: Tissue Value: Roots
  misc_feature: MA Experiment ID: 108434 Result: Down-regulated in Transcription
  misc_feature: MA Experiment 108434 PARAMETER Experiment Name: At_Root_Tips_cDNA_P Parameter: Tissue Value: Root Tips
  misc_feature: MA Experiment ID: 108435 Result: Down-regulated in Transcription
  misc_feature: MA Experiment 108435 PARAMETER Experiment Name: At_stm_Mutants_cDNA_P Parameter: Plant Line Value: wt Landsburg vs stm
  misc_feature: MA Experiment 108435 PARAMETER Experiment Name: At_stm_Mutants_cDNA_P Parameter: Tissue Value: Shoot Apical Meristem Region
  misc_feature: MA Experiment ID: 108462 Result: Down-regulated in Transcription
  misc_feature: MA Experiment 108462 PARAMETER Experiment Name: At_Germinating_Seeds_cDNA_P Parameter: Age (day) Value: 2 vs. 0
  misc_feature: MA Experiment 108462 PARAMETER Experiment Name: At_Germinating_Seeds_cDNA_P Parameter: Tissue Value: Germinating Seeds
  misc_feature: MA Experiment ID: 108463 Result: Down-regulated in Transcription
  misc_feature: MA Experiment 108463 PARAMETER Experiment Name: At_Germinating_Seeds_cDNA_P Parameter: Age (day) Value: 3 vs. 0
  misc_feature: MA Experiment 108463 PARAMETER Experiment Name: At_Germinating_Seeds_cDNA_P Parameter: Tissue Value: Germinating Seeds
  misc_feature: MA Experiment ID: 108464 Result: Down-regulated in Transcription
  misc_feature: MA Experiment 108464 PARAMETER Experiment Name: At_Germinating_Seeds_cDNA_P Parameter: Age (day) Value: 4 vs. 0
  misc_feature: MA Experiment 108464 PARAMETER Experiment Name: At_Germinating_Seeds_cDNA_P Parameter: Tissue Value: Germinating Seeds
  misc_feature: MA Experiment ID: 108489 Result: Up-regulated in Transcription
  misc_feature: MA Experiment ID: 108501 Result: Down-regulated in Transcription
  misc_feature: MA Experiment 108501 PARAMETER Experiment Name: At_ap2_floral_buds_cDNA_P Parameter: Plant Line Value: ap2 (Ler.)
  misc_feature: MA Experiment 108501 PARAMETER Experiment Name: At_ap2_floral_buds_cDNA_P Parameter: Tissue Value: Closed Flower
  misc_feature: MA Experiment ID: 108574 Result: Down-regulated in Transcription
  misc_feature: MA Experiment 108574 PARAMETER Experiment Name: At_Wounding__cDNA_P Parameter: Timepoint (hr) Value: 1
  misc_feature: MA Experiment 108574 PARAMETER Experiment Name: At_Wounding__cDNA_P Parameter: Tissue Value: Aerial
  misc_feature: MA Experiment 108574 PARAMETER Experiment Name: At_Wounding__cDNA_P Parameter: Treatment Value: Wounding vs. No Wounding
  misc_feature: MA Experiment ID: 108576 Result: Up-regulated in Transcription
  misc_feature: MA Experiment 108576 PARAMETER Experiment Name: At_42deg_Heat_cDNA_P Parameter: Temperature (deg C) Value: 42 vs. 22
  misc_feature: MA Experiment 108576 PARAMETER Experiment Name: At_42deg_Heat_cDNA_P Parameter: Timepoint (hr) Value: 1
  misc_feature: MA Experiment 108576 PARAMETER Experiment Name: At_42deg_Heat_cDNA_P Parameter: Tissue Value: Aerial
  misc_feature: MA Experiment ID: 108579 Result: Down-regulated in Transcription
  misc_feature: MA Experiment 108579 PARAMETER Experiment Name: At_4deg_Cold_cDNA_P Parameter: Temperature (deg C) Value: 4 vs. 22
  misc_feature: MA Experiment 108579 PARAMETER Experiment Name: At_4deg_Cold_cDNA_P Parameter: Timepoint (hr) Value: 6
  misc_feature: MA Experiment 108579 PARAMETER Experiment Name: At_4deg_Cold_cDNA_P Parameter: Tissue Value: Aerial
  misc_feature: MA Experiment ID: 108595 Result: Down-regulated in Transcription
  misc_feature: MA Experiment 108595 PARAMETER Experiment Name: At_Ler-pi_Ovule_cDNA_P Parameter: Plant Line Value: null
  misc_feature: MA Experiment ID: 108607 Result: Down-regulated in Transcription
  misc_feature: MA Experiment 108607 PARAMETER Experiment Name: At_100uM_ABA_cDNA_P Parameter: Timepoint (hr) Value: 4
  misc_feature: MA Experiment 108607 PARAMETER Experiment Name: At_100uM_ABA_cDNA_P Parameter: Tissue Value: Aerial
  misc_feature: MA Experiment 108607 PARAMETER Experiment Name: At_100uM_ABA_cDNA_P Parameter: Treatment Value: 100uM ABA vs. No Treatment
  misc_feature: MA Experiment ID: 108668 Result: Up-regulated in Transcription
  misc_feature: MA Experiment 108668 PARAMETER Experiment Name: At_2mM_SA_cDNA_P Parameter: Plant Line Value: WS
  misc_feature: MA Experiment 108668 PARAMETER Experiment Name: At_2mM_SA_cDNA_P Parameter: Timepoint (hr) Value: 6
  misc_feature: MA Experiment 108668 PARAMETER Experiment Name: At_2mM_SA_cDNA_P Parameter: Treatment Value: 2mM SA vs. No Treatment
  misc_feature: MA Experiment ID: 20000089 Result: Up-regulated in Transcription
  misc_feature: MA Experiment ID: 20000307 Result: Down-regulated in Transcription
  misc_feature: MA Experiment 20000307 PARAMETER Experiment Name: At_Germinating_Seeds_Sub_P Parameter: Age (hr) Value: 24 vs. 0
  misc_feature: MA Experiment 20000307 PARAMETER Experiment Name: At_Germinating_Seeds_Sub_P Parameter: Organism Value: A. thaliana
  misc_feature: MA Experiment 20000307 PARAMETER Experiment Name: At_Germinating_Seeds_Sub_P Parameter: Plant Line Value: WS
  misc_feature: MA Experiment 20000307 PARAMETER Experiment Name: At_Germinating_Seeds_Sub_P Parameter: Tissue Value: Germinating Seeds
  misc_feature: MA Experiment ID: 20000315 Result: Down-regulated in Transcription
  misc_feature: MA Experiment 20000315 PARAMETER Experiment Name: At_14day_Shoots-Roots_Sub_P Parameter: Age (day) Value: 14
  misc_feature: MA Experiment 20000315 PARAMETER Experiment Name: At_14day_Shoots-Roots_Sub_P Parameter: Organism Value: A. thaliana
  misc_feature: MA Experiment 20000315 PARAMETER Experiment Name: At_14day_Shoots-Roots_Sub_P Parameter: Plant Line Value: WS
  misc_feature: MA Experiment 20000315 PARAMETER Experiment Name: At_14day_Shoots-Roots_Sub_P Parameter: Tissue Value: Shoots vs. Whole Plant
  misc_feature: MA Experiment ID: 20000347 Result: Up-regulated in Transcription
  misc_feature: MA Experiment 20000347 PARAMETER Experiment Name: At_2mM_SA_Sub_P Parameter: Age (day) Value: 14
  misc_feature: MA Experiment 20000347 PARAMETER Experiment Name: At_2mM_SA_Sub_P Parameter: Organism Value: A. thaliana
  misc_feature: MA Experiment 20000347 PARAMETER Experiment Name: At_2mM_SA_Sub_P Parameter: Plant Line Value: WS
  misc_feature: MA Experiment 20000347 PARAMETER Experiment Name: At_2mM_SA_Sub_P Parameter: Timepoint (hr) Value: 6
  misc_feature: MA Experiment 20000347 PARAMETER Experiment Name: At_2mM_SA_Sub_P Parameter: Tissue Value: Aerial
  misc_feature: MA Experiment 20000347 PARAMETER Experiment Name: At_2mM_SA_Sub_P Parameter: Treatment Value: 2mM SA vs. No Treatment
  misc_feature: MA Experiment ID: 20000355 Result: Down-regulated in Transcription
  misc_feature: MA Experiment 20000355 PARAMETER Experiment Name: At_Siliques_Sub_P Parameter: Age (day) Value: 21
  misc_feature: MA Experiment 20000355 PARAMETER Experiment Name: At_Siliques_Sub_P Parameter: Organism Value: A. thaliana
  misc_feature: MA Experiment 20000355 PARAMETER Experiment Name: At_Siliques_Sub_P Parameter: Plant Line Value: WS
  misc_feature: MA Experiment 20000355 PARAMETER Experiment Name: At_Siliques_Sub_P Parameter: Tissue Value: Less Than 5mm Siliques vs. Whole Plant
aaaagcaaaaaagctttctctttctctacctttttccttaatttcacttttgcggcgtcgttcttatctactcacaagaaagcaaccgatcaaataactcccagaataaagaaagactcaaactttattctctctctctttcttaaatagtgaagaaagcttcgattttgggaagtgggtttgttcgaaaaatgggttcttctgtggaacagaacattttggtgactggtggtgctggattcattggaacacatactgttgttcagcttttgaatcagggttttaaggttacgatcattgataatcttgataactctgtcgttgaagctgttcatagggttagggaacttgttggtcctgatctctctaccaagcttgaattcaatctgggtgatctaagaaacaaaggagatattgagaaactcttttccaatcagagatttgatgctgtgattcactttgctggtcttaaagctgtgggagaaagtgttggaaaccctcgtcgttactttgataataacttagttggaactatcaatctatatgagaccatggcaaaatacaactgcaaaatgatggtgttttcgtcgtctgcaacagtttatggtcaacctgaaatagtcccatgtgtggaagactttgagttacaggctatgaatccttatggtcgtactaagctgtttcttgaagagatagctagagacattcacgctgcggaaccagaatggaagataattcttctgaggtacttcaatccggttggagctcacgagagtggaagaattggagaagatccaaagggcataccgaataatctcatgccttatatccaacaagtggcggttggaagattacctgaactcaatgtatttggacatgattatcctaccatggatggtagcgcggttagagactacatccatgtaatggatttagcagatggccatgtggctgcgttaaacaaattgttttcagactcaaagattggctgtactgcttataatcttggcactggtcaaggaacttctgtcttagaaatggtttcttcttttgaaaaagcttctggcaagaaaatacctatcaagctatgtccaagaagagctggagatgcaacagctgtttatgcttcaactcagaaagctgagaaggaacttggctggaaggcaaaatatggagttgatgagatgtgcagagatcaatggaactgggcaaataagaatccatggggtttccagaagaagccttgattgattttgttttgtttcaccactcaatataaagaaaaaaaaagatatagatgtcgttttattttcctgcatctatttgatttctctcttcaaaaaaagttgtattgaactcgtcatctttcggttaataaagtataaagtttatct

SEQ ID NO: 102703 - protein, 351 aa, Arabidopsis thaliana
  peptide (1)..(351): Ceres Seq. ID no. 13611011
  misc_feature (9)..(344): Pfam Name: NAD dependent epimerase/dehydratase family Pfam Description: NAD dependent epimerase/dehydratase family
  misc_feature (1)..(351): Homolog of NCBI NO: 18407751 NR Description: UDP-glucose 4-epimerase (UDP-galactose (Galactowaldenase), putative [Arabidopsis thaliana] uridine diphosphate glucose epimerase, putative [Arabidopsis
  misc_feature (1)..(351): Homolog of NCBI NO: 25292327 NR Description: hypothetical protein F16M19.8 [imported] - thaliana >gi|12323247|gb|AAG51599.1|AC010795_3 uridine
  misc_feature (1)..(350): Homolog of NCBI NO: 15222072 NR Description: UDP-glucose 4-epimerase (UDP-galactose
  misc_feature (1)..(350): Homolog of NCBI NO: 2129759 NR Description: UDPglucose 4-epimerase (EC 5.1.3.2) - Arabidopsis >gi|1143392|emb|CAA90941.1| uridine diphosphate glucose epimerase
  misc_feature (7)..(351): Homolog of NCBI NO: 11386762 NR Description: UDP-glucose 4-epimerase (Galactowaldenase)
  misc_feature (7)..(350): Homolog of NCBI NO: 11386774 NR Description: UDP-glucose 4-epimerase GEPI42 (Galactowaldenase)
  misc_feature (1)..(347): Homolog of NCBI NO: 26106014 NR Description: putative UDP-glucose 4-epimerase [Oryza sativa
  misc_feature (7)..(347): Homolog of NCBI NO: 11386775 NR Description: UDP-glucose 4-epimerase GEPI48 (Galactowaldenase)
  misc_feature (7)..(350): Homolog of NCBI NO: 21553659 NR Description: UDP-galactose 4-epimerase-like protein
  misc_feature (7)..(347): Homolog of NCBI NO: 12643850 NR Description: Probable UDP-glucose 4-epimerase At4g10960
MGSSVEQNILVTGGAGFIGTHTVVQLLNQGFKVTIIDNLDNSVVEAVHRVRELVGPDLSTKLEFNLGDLRNKGDIEKLFSNQRFDAVIHFAGLKAVGESVGNPRRYFDNNLVGTINLYETMAKYNCKMMVFSSSATVYGQPEIVPCVEDFELQAMNPYGRTKLFLEEIARDIHAAEPEWKIILLRYFNPVGAHESGRIGEDPKGIPNNLMPYIQQVAVGRLPELNVFGHDYPTMDGSAVRDYIHVMDLADGHVAALNKLFSDSKIGCTAYNLGTGQGTSVLEMVSSFEKASGKKIPIKLCPRRAGDATAVYASTQKAEKELGWKAKYGVDEMCRDQWNWANKNPWGFQKKP

SEQ ID NO: 102704 - protein, 231 aa, Arabidopsis thaliana
  peptide (1)..(231): Ceres Seq. ID no. 13611012
  misc_feature (1)..(224): Pfam Name: NAD dependent epimerase/dehydratase family Pfam Description: NAD dependent epimerase/dehydratase family
  misc_feature (1)..(231): Homolog of NCBI NO: 18407751 NR Description: UDP-glucose 4-epimerase (UDP-galactose (Galactowaldenase), putative [Arabidopsis thaliana] uridine diphosphate glucose epimerase, putative [Arabidopsis
  misc_feature (1)..(231): Homolog of NCBI NO: 25292327 NR Description: hypothetical protein F16M19.8 [imported] - thaliana >gi|12323247|gb|AAG51599.1|AC010795_3 uridine
  misc_feature (1)..(230): Homolog of NCBI NO: 15222072 NR Description: UDP-glucose 4-epimerase (UDP-galactose
  misc_feature (1)..(230): Homolog of NCBI NO: 2129759 NR Description: UDPglucose 4-epimerase (EC 5.1.3.2) - Arabidopsis >gi|1143392|emb|CAA90941.1| uridine diphosphate glucose epimerase
  misc_feature (1)..(231): Homolog of NCBI NO: 11386762 NR Description: UDP-glucose 4-epimerase (Galactowaldenase)
  misc_feature (1)..(230): Homolog of NCBI NO: 11386774 NR Description: UDP-glucose 4-epimerase GEPI42 (Galactowaldenase)
  misc_feature (1)..(227): Homolog of NCBI NO: 26106014 NR Description: putative UDP-glucose 4-epimerase [Oryza sativa
  misc_feature (1)..(227): Homolog of NCBI NO: 11386775 NR Description: UDP-glucose 4-epimerase GEPI48 (Galactowaldenase)
  misc_feature (1)..(230): Homolog of NCBI NO: 21553659 NR Description: UDP-galactose 4-epimerase-like protein
  misc_feature (1)..(227): Homolog of NCBI NO: 12643850 NR Description: Probable UDP-glucose 4-epimerase At4g10960
MAKYNCKMMVFSSSATVYGQPEIVPCVEDFELQAMNPYGRTKLFLEEIARDIHAAEPEWKIILLRYFNPVGAHESGRIGEDPKGIPNNLMPYIQQVAVGRLPELNVFGHDYPTMDGSAVRDYIHVMDLADGHVAALNKLFSDSKIGCTAYNLGTGQGTSVLEMVSSFEKASGKKIPIKLCPRRAGDATAVYASTQKAEKELGWKAKYGVDEMCRDQWNWANKNPWGFQKKP

SEQ ID NO: 102705 - protein, 224 aa, Arabidopsis thaliana
  peptide (1)..(224): Ceres Seq. ID no. 13611013
  misc_feature (1)..(217): Pfam Name: NAD dependent epimerase/dehydratase family Pfam Description: NAD dependent epimerase/dehydratase family
  misc_feature (1)..(224): Homolog of NCBI NO: 18407751 NR Description: UDP-glucose 4-epimerase (UDP-galactose (Galactowaldenase), putative [Arabidopsis thaliana] uridine diphosphate glucose epimerase, putative [Arabidopsis
  misc_feature (1)..(224): Homolog of NCBI NO: 25292327 NR Description: hypothetical protein F16M19.8 [imported] - thaliana >gi|12323247|gb|AAG51599.1|AC010795_3 uridine
  misc_feature (1)..(223): Homolog of NCBI NO: 15222072 NR Description: UDP-glucose 4-epimerase (UDP-galactose
  misc_feature (1)..(223): Homolog of NCBI NO: 2129759 NR Description: UDPglucose 4-epimerase (EC 5.1.3.2) - Arabidopsis >gi|1143392|emb|CAA90941.1| uridine diphosphate glucose epimerase
  misc_feature (1)..(224): Homolog of NCBI NO: 11386762 NR Description: UDP-glucose 4-epimerase (Galactowaldenase)
  misc_feature (1)..(223): Homolog of NCBI NO: 11386774 NR Description: UDP-glucose 4-epimerase GEPI42 (Galactowaldenase)
  misc_feature (1)..(220): Homolog of NCBI NO: 26106014 NR Description: putative UDP-glucose 4-epimerase [Oryza sativa
  misc_feature (1)..(220): Homolog of NCBI NO: 11386775 NR Description: UDP-glucose 4-epimerase GEPI48 (Galactowaldenase)
  misc_feature (1)..(223): Homolog of NCBI NO: 21553659 NR Description: UDP-galactose 4-epimerase-like protein
  misc_feature (1)..(220): Homolog of NCBI NO: 12643850 NR Description: Probable UDP-glucose 4-epimerase At4g10960
MMVFSSSATVYGQPEIVPCVEDFELQAMNPYGRTKLFLEEIARDIHAAEPEWKIILLRYFNPVGAHESGRIGEDPKGIPNNLMPYIQQVAVGRLPELNVFGHDYPTMDGSAVRDYIHVMDLADGHVAALNKLFSDSKIGCTAYNLGTGQGTSVLEMVSSFEKASGKKIPIKLCPRRAGDATAVYASTQKAEKELGWKAKYGVDEMCRDQWNWANKNPWGFQKKP

SEQ ID NO: 102706 - DNA, 1339 bp, Arabidopsis thaliana
  misc_feature (1)..(1339): Ceres Seq. ID no. 13611018
  misc_feature: MA Experiment ID: 20001905 Result: Down-regulated in Transcription
  misc_feature: MA Experiment 20001905 PARAMETER Experiment Name: At_Drought_Reproduction_P Parameter: Age (day) Value: 40
  misc_feature: MA Experiment 20001905 PARAMETER Experiment Name: At_Drought_Reproduction_P Parameter: Organism Value: A. thaliana
  misc_feature: MA Experiment 20001905 PARAMETER Experiment Name: At_Drought_Reproduction_P Parameter: Plant Line Value: WS
  misc_feature: MA Experiment 20001905 PARAMETER Experiment Name: At_Drought_Reproduction_P Parameter: Timepoint (day) Value: 10
  misc_feature: MA Experiment 20001905 PARAMETER Experiment Name: At_Drought_Reproduction_P Parameter: Tissue Value: Rosettes
  misc_feature: MA Experiment 20001905 PARAMETER Experiment Name: At_Drought_Reproduction_P Parameter: Treatment Value: Drought vs. No Drought
atgggacaaaataaaccagtccagaaaaagtctccattatatgaagaaagtactatcatttttgcttcaagtcaaaatgaaaaacttgttgagatagagaaagagaagagacttgcgttaatagatgcatgggaagagaacgagaaggcaaaagctcaaaccaaggcttacaaagaactttgctcgattgaatcatgggaaaacaacatgaagacagctctagagttagatttgaagaaaatggaggagaatttacaagtggagaaaactgaattctcaaaaaaattcaagaaaaaaatacctgaaattgagaagattgcagaagccaaaagagaaaaaatagagaaacaaaaggagcaagaatctatcaaagtcgaaaaaataatgctctcacctaacgcagattcttcttctctaccatattcgttgaaaccagagaagatggtgggtgtgtcgccgaagatcgctccgtcgatgttgtcatcggactttgcaaatcttgccgcggaggctaagcggatgatcgatttgggcgccaattggcttcacatggacattatggacgggcattttgtttctaacctaacgattggtgctcctgtcatcgagagtttgaggaagcacacaaatgcatatcttgattgccacttaatggtgacgaaccccatggattatgtggatcagatggctaaagctggggcgtctggtttcacattccacgttgaggtggcccaagagaattggcaagaacttgtgaagaagattaaggctgctgggatgaggccaggtgtggctctaaagcctggaacacctgttgaacaagtctatcctctggtcgaaggtacaaatccggtcgaaatggttcttgtgatgactgtggagcctggatttggaggccagaagttcatgcccagcatgatggacaaggtcagggcattgaggaacaagtacccaacacttgatattgaggtggacggcggcttaggcccttccacaatcgatgcagcagctgcagctggagccaactgtatcgtcgcaggaagttcagtgtttggagctccgaagcctggggacgtcatatcccttttgcgggctagtgttgagaaagcacaaccctccacttaaggaagttggtgccctaactctatgagccaaggtcttaagctaatacttttttatttctttgaaatggaataaaccttagatcttagttacttgttatacaattaaaatgtgtctgagagcttttgccctagcgatgaaattccacaagaaaatcaccggagatagaattttttgttaagaaattgtttattatgtagcagttacattttagtct

SEQ ID NO: 102707 - protein, 374 aa, Arabidopsis thaliana
  peptide (1)..(374): Ceres Seq. ID no. 13611019
  misc_feature (154)..(354): Pfam Name: Ribulose-phosphate 3 epimerase family Pfam Description: Ribulose-phosphate 3 epimerase family
  misc_feature (148)..(374): Homolog of NCBI NO: 15221735 NR Description: D-ribulose-5-phosphate-3-epimerase -related
  misc_feature (151)..(374): Homolog of NCBI NO: 18395962 NR Description: D-ribulose-5-phosphate 3-epimerase -related
  misc_feature (151)..(374): Homolog of NCBI NO: 6091725 NR Description: putative D-ribulose-5-phosphate 3-epimerase
  misc_feature (154)..(371): Homolog of NCBI NO: 28373310 NR Description: Chain A, The Structure Of The Cytosolic
  misc_feature (151)..(371): Homolog of NCBI NO: 19114917 NR Description: putative ribulose phosphate 3-epimerase
  misc_feature (154)..(371): Homolog of NCBI NO: 27532955 NR Description: ribulose-5-phosphate-3-epimerase [Mus musculus]
  misc_feature (154)..(371): Homolog of NCBI NO: 40385883 NR Description: ribulose-5-phosphate-3-epimerase isoform 1;
  misc_feature (151)..(369): Homolog of NCBI NO: 6322341 NR Description: D-ribulose-5-Phosphate 3-epimerase; Rpe1p
  misc_feature (155)..(370): Homolog of NCBI NO: 39581355 NR Description: Hypothetical protein CBG15299 [Caenorhabditis
  misc_feature (153)..(370): Homolog of NCBI NO: 17552948 NR Description: D-ribulose-5-Phosphate 3-epimerase (24.4 kD) elegans] >gi|14574055|gb|AAK68310.1|U28991_8 Hypothetical protein
MGQNKPVQKKSPLYEESTIIFASSQNEKLVEIEKEKRLALIDAWEENEKAKAQTKAYKELCSIESWENNMKTALELDLKKMEENLQVEKTEFSKKFKKKIPEIEKIAEAKREKIEKQKEQESIKVEKIMLSPNADSSSLPYSLKPEKMVGVSPKIAPSMLSSDFANLAAEAKRMIDLGANWLHMDIMDGHFVSNLTIGAPVIESLRKHTNAYLDCHLMVTNPMDYVDQMAKAGASGFTFHVEVAQENWQELVKKIKAAGMRPGVALKPGTPVEQVYPLVEGTNPVEMVLVMTVEPGFGGQKFMPSMMDKVRALRNKYPTLDIEVDGGLGPSTIDAAAAAGANCIVAGSSVFGAPKPGDVISLLRASVEKAQPST

SEQ ID NO: 102708 - protein, 305 aa, Arabidopsis thaliana
  peptide (1)..(305): Ceres Seq. ID no. 13611020
  misc_feature (85)..(285): Pfam Name: Ribulose-phosphate 3 epimerase family Pfam Description: Ribulose-phosphate 3 epimerase family
  misc_feature (79)..(305): Homolog of NCBI NO: 15221735 NR Description: D-ribulose-5-phosphate-3-epimerase -related
  misc_feature (82)..(305): Homolog of NCBI NO: 18395962 NR Description: D-ribulose-5-phosphate 3-epimerase -related
  misc_feature (82)..(305): Homolog of NCBI NO: 6091725 NR Description: putative D-ribulose-5-phosphate 3-epimerase
  misc_feature (85)..(302): Homolog of NCBI NO: 28373310 NR Description: Chain A, The Structure Of The Cytosolic
  misc_feature (82)..(302): Homolog of NCBI NO: 19114917 NR Description: putative ribulose phosphate 3-epimerase
  misc_feature (85)..(302): Homolog of NCBI NO: 27532955 NR Description: ribulose-5-phosphate-3-epimerase [Mus musculus]
  misc_feature (85)..(302): Homolog of NCBI NO: 40385883 NR Description: ribulose-5-phosphate-3-epimerase isoform 1;
  misc_feature (82)..(300): Homolog of NCBI NO: 6322341 NR Description: D-ribulose-5-Phosphate 3-epimerase; Rpe1p
  misc_feature (86)..(301): Homolog of NCBI NO: 39581355 NR Description: Hypothetical protein CBG15299 [Caenorhabditis
  misc_feature (84)..(301): Homolog of NCBI NO: 17552948 NR Description: D-ribulose-5-Phosphate 3-epimerase (24.4 kD) elegans] >gi|14574055|gb|AAK68310.1|U28991_8 Hypothetical protein
MKTALELDLKKMEENLQVEKTEFSKKFKKKIPEIEKIAEAKREKIEKQKEQESIKVEKIMLSPNADSSSLPYSLKPEKMVGVSPKIAPSMLSSDFANLAAEAKRMIDLGANWLHMDIMDGHFVSNLTIGAPVIESLRKHTNAYLDCHLMVTNPMDYVDQMAKAGASGFTFHVEVAQENWQELVKKIKAAGMRPGVALKPGTPVEQVYPLVEGTNPVEMVLVMTVEPGFGGQKFMPSMMDKVRALRNKYPTLDIEVDGGLGPSTIDAAAAAGANCIVAGSSVFGAPKPGDVISLLRASVEKAQPST

SEQ ID NO: 102709 - protein, 294 aa, Arabidopsis thaliana
  peptide (1)..(294): Ceres Seq. ID no. 13611021
  misc_feature (74)..(274): Pfam Name: Ribulose-phosphate 3 epimerase family Pfam Description: Ribulose-phosphate 3 epimerase family
  misc_feature (68)..(294): Homolog of NCBI NO: 15221735 NR Description: D-ribulose-5-phosphate-3-epimerase -related
  misc_feature (71)..(294): Homolog of NCBI NO: 18395962 NR Description: D-ribulose-5-phosphate 3-epimerase -related
  misc_feature (71)..(294): Homolog of NCBI NO: 6091725 NR Description: putative D-ribulose-5-phosphate 3-epimerase
  misc_feature (74)..(291): Homolog of NCBI NO: 28373310 NR Description: Chain A, The Structure Of The Cytosolic
  misc_feature (71)..(291): Homolog of NCBI NO: 19114917 NR Description: putative ribulose phosphate 3-epimerase
  misc_feature (74)..(291): Homolog of NCBI NO: 27532955 NR Description: ribulose-5-phosphate-3-epimerase [Mus musculus]
  misc_feature (74)..(291): Homolog of NCBI NO: 40385883 NR Description: ribulose-5-phosphate-3-epimerase isoform 1;
  misc_feature (71)..(289): Homolog of NCBI NO: 6322341 NR Description: D-ribulose-5-Phosphate 3-epimerase; Rpe1p
  misc_feature (75)..(290): Homolog of NCBI NO: 39581355 NR Description: Hypothetical protein CBG15299 [Caenorhabditis
  misc_feature (73)..(290): Homolog of NCBI NO: 17552948 NR Description: D-ribulose-5-Phosphate 3-epimerase (24.4 kD) elegans] >gi|14574055|gb|AAK68310.1|U28991_8 Hypothetical protein
MEENLQVEKTEFSKKFKKKIPEIEKIAEAKREKIEKQKEQESIKVEKIMLSPNADSSSLPYSLKPEKMVGVSPKIAPSMLSSDFANLAAEAKRMIDLGANWLHMDIMDGHFVSNLTIGAPVIESLRKHTNAYLDCHLMVTNPMDYVDQMAKAGASGFTFHVEVAQENWQELVKKIKAAGMRPGVALKPGTPVEQVYPLVEGTNPVEMVLVMTVEPGFGGQKFMPSMMDKVRALRNKYPTLDIEVDGGLGPSTIDAAAAAGANCIVAGSSVFGAPKPGDVISLLRASVEKAQPST

SEQ ID NO: 102710 - DNA, 1053 bp, Arabidopsis thaliana
  misc_feature (1)..(1053): Ceres Seq. ID no. 13611041
  misc_feature: MA Experiment ID: 20000794 Result: Down-regulated in Transcription
  misc_feature: MA Experiment 20000794 PARAMETER Experiment Name: At_Petals_P Parameter: Age (day) Value: 23-25 days
  misc_feature: MA Experiment 20000794 PARAMETER Experiment Name: At_Petals_P Parameter: Plant Line Value: WS
  misc_feature: MA Experiment 20000794 PARAMETER Experiment Name: At_Petals_P Parameter: Tissue Value: Petals vs. Whole plant
  misc_feature: MA Experiment ID: 20001560 Result: Up-regulated in Transcription
  misc_feature: MA Experiment 20001560 PARAMETER Experiment Name: At_Drought_Soil_Dry_P Parameter: Age (day) Value: 28
  misc_feature: MA Experiment 20001560 PARAMETER Experiment Name: At_Drought_Soil_Dry_P Parameter: Organism Value: A. thaliana
  misc_feature: MA Experiment 20001560 PARAMETER Experiment Name: At_Drought_Soil_Dry_P Parameter: Plant Line Value: WS
  misc_feature: MA Experiment 20001560 PARAMETER Experiment Name: At_Drought_Soil_Dry_P Parameter: Post Timepoint (hr) Value: None
  misc_feature: MA Experiment 20001560 PARAMETER Experiment Name: At_Drought_Soil_Dry_P Parameter: Post-Treatment Value: None
  misc_feature: MA Experiment 20001560 PARAMETER Experiment Name: At_Drought_Soil_Dry_P Parameter: Timepoint (day) Value: 14
  misc_feature: MA Experiment 20001560 PARAMETER Experiment Name: At_Drought_Soil_Dry_P Parameter: Treatment Value: Drought vs. No Drought
  misc_feature: MA Experiment ID: 20001911 Result: Down-regulated in Transcription
  misc_feature: MA Experiment 20001911 PARAMETER Experiment Name: At_Drought_Reproduction_P Parameter: Age (day) Value: 40
  misc_feature: MA Experiment 20001911 PARAMETER Experiment Name: At_Drought_Reproduction_P Parameter: Organism Value: A. thaliana
  misc_feature: MA Experiment 20001911 PARAMETER Experiment Name: At_Drought_Reproduction_P Parameter: Plant Line Value: WS
  misc_feature: MA Experiment 20001911 PARAMETER Experiment Name: At_Drought_Reproduction_P Parameter: Timepoint (day) Value: 10
  misc_feature: MA Experiment 20001911 PARAMETER Experiment Name: At_Drought_Reproduction_P Parameter: Tissue Value: Flowers
  misc_feature: MA Experiment 20001911 PARAMETER Experiment Name: At_Drought_Reproduction_P Parameter: Treatment Value: Drought vs. No Drought
ttttcgttttcttctccgtttctcgctcatcgcttactgaaaccagaaacaagtttagggtttttgcggaggtttcaaagttaacaatggcggaagagcacaagcacgaggaatcgatcatggagaagatctctgagaagatccatggtcacgatgactcttcttcttcttcttccgattcggatgacgataagaactctgcgtctctcaaaaccaagatttatcgtcttttcggaagagaacagcctcttcacaagcttttcggtggcggaaaacctgccgacattttcctgtggaggaacaagaaggtatcaggaggagtattgggtgctgcaactgtttcctggatcttattcgagttacttgagtacaatcttctcacactcttcggccacatttcaattcttgctctcgcagtattgttcttgtggtctagtgctagtaccttcattcacaagtcacctcttcatatccctgaagttcacatccccgaggatgttgttcttcagcttgcttctggattaaggattgaaatcaatcgtggatttactgttcttagggacattgcatcaggaagagatcttaagaagtttctgttggtgattgctggtttatgggttttgtccaaagttggtagctcctgcaacttcttgaccttaatctacatcgcaactgtacttctcttcacgattcccgtgctttacgagaagtatgaagataaagtagatgactttggtgaaaaggcgatgagggagatcaagaagcaatacgtggagttcgacgtgaaggttttgagtaaggtgatgagcaaaattcctaaaggagcctttgcctttatcaagaagaaagattagagagtgtgtaagtttctctcatcatcattatccgagattattcaagattgatatataaatctcgaagcattgtttttttggctgttggttaataaccctttattctctcaaatatctgctatatggattttattcgggttttaaccaaattttatagcaatattgaatctgattgaaatttgaattgatccttttttcg

SEQ ID NO: 102711 - protein, 283 aa, Arabidopsis thaliana
  peptide (1)..(283): Ceres Seq. ID no. 13611042
  misc_feature (29)..(283): Homolog of NCBI NO: 15222616 NR Description: expressed protein [Arabidopsis thaliana] F22C12.15 [Arabidopsis thaliana] >gi|17381218|gb|AAL36421.1| protein [Arabidopsis thaliana] >gi|21436435|gb|AAM51418.1|
  misc_feature (29)..(283): Homolog of NCBI NO: 15238125 NR Description: expressed protein [Arabidopsis thaliana] contains similarity to 24 kDa seed maturation [Arabidopsis thaliana] >gi|14334530|gb|AAK59673.1| unknown
  misc_feature (27)..(283): Homolog of NCBI NO: 15237093 NR Description: expressed protein [Arabidopsis thaliana]
  misc_feature (32)..(274): Homolog of NCBI NO: 34909318 NR Description: OSJNBb0021A09.5 [Oryza sativa (japonica
  misc_feature (30)..(283): Homolog of NCBI NO: 15236556 NR Description: expressed protein [Arabidopsis thaliana]
  misc_feature (29)..(267): Homolog of NCBI NO: 18406991 NR Description: expressed protein [Arabidopsis thaliana]
  misc_feature (66)..(267): Homolog of NCBI NO: 34904202 NR Description: P0492F05.25 [Oryza sativa (japonica
  misc_feature (37)..(64): Homolog of NCBI NO: 34904202 NR Description: P0492F05.25 [Oryza sativa (japonica
  misc_feature (36)..(267): Homolog of NCBI NO: 15234108 NR Description: hypothetical protein [Arabidopsis thaliana]
  misc_feature (34)..(282): Homolog of NCBI NO: 34897094 NR Description: unknown protein [Oryza sativa (japonica
FVFFSVSRSSLTETRNKFRVFAEVSKLTMAEEHKHEESIMEKISEKIHGHDDSSSSSSDSDDDKNSASLKTKIYRLFGREQPLHKLFGGGKPADIFLWRNKKVSGGVLGAATVSWILFELLEYNLLTLFGHISILALAVLFLWSSASTFIHKSPLHIPEVHIPEDVVLQLASGLRIEINRGFTVLRDIASGRDLKKFLLVIAGLWVLSKVGSSCNFLTLIYIATVLLFTIPVLYEKYEDKVDDFGEKAMREIKKQYVEFDVKVLSKVMSKIPKGAFAFIKKKD

SEQ ID NO: 102712 - protein, 255 aa, Arabidopsis thaliana; identical to SEQ ID NO: 38059
  peptide (1)..(255): Ceres Seq. ID no. 13611043
  misc_feature (1)..(255): Homolog of NCBI NO: 15222616 NR Description: expressed protein [Arabidopsis thaliana] F22C12.15 [Arabidopsis thaliana] >gi|17381218|gb|AAL36421.1| protein [Arabidopsis thaliana] >gi|21436435|gb|AAM51418.1|
  misc_feature (1)..(255): Homolog of NCBI NO: 15238125 NR Description: expressed protein [Arabidopsis thaliana] contains similarity to 24 kDa seed maturation [Arabidopsis thaliana] >gi|14334530|gb|AAK59673.1| unknown
  misc_feature (1)..(255): Homolog of NCBI NO: 15237093 NR Description: expressed protein [Arabidopsis thaliana]
  misc_feature (4)..(246): Homolog of NCBI NO: 34909318 NR Description: OSJNBb0021A09.5 [Oryza sativa (japonica
  misc_feature (2)..(255): Homolog of NCBI NO: 15236556 NR Description: expressed protein [Arabidopsis thaliana]
  misc_feature (1)..(239): Homolog of NCBI NO: 18406991 NR Description: expressed protein [Arabidopsis thaliana]
  misc_feature (38)..(239): Homolog of NCBI NO: 34904202 NR Description: P0492F05.25 [Oryza sativa (japonica
  misc_feature (9)..(36): Homolog of NCBI NO: 34904202 NR Description: P0492F05.25 [Oryza sativa (japonica
  misc_feature (8)..(239): Homolog of NCBI NO: 15234108 NR Description: hypothetical protein [Arabidopsis thaliana]
  misc_feature (6)..(254): Homolog of NCBI NO: 34897094 NR Description: unknown protein [Oryza sativa (japonica

SEQ ID NO: 102713 - protein, 244 aa, Arabidopsis thaliana; identical to SEQ ID NO: 38060
  peptide (1)..(244): Ceres Seq. ID no. 13611044
  misc_feature (1)..(244): Homolog of NCBI NO: 15222616 NR Description: expressed protein [Arabidopsis thaliana] F22C12.15 [Arabidopsis thaliana] >gi|17381218|gb|AAL36421.1| protein [Arabidopsis thaliana] >gi|21436435|gb|AAM51418.1|
  misc_feature (1)..(244): Homolog of NCBI NO: 15238125 NR Description: expressed protein [Arabidopsis thaliana] contains similarity to 24 kDa seed maturation [Arabidopsis thaliana] >gi|14334530|gb|AAK59673.1| unknown
  misc_feature (1)..(244): Homolog of NCBI NO: 15237093 NR Description: expressed protein [Arabidopsis thaliana]
  misc_feature (1)..(235): Homolog of NCBI NO: 34909318 NR Description: OSJNBb0021A09.5 [Oryza sativa (japonica
  misc_feature (1)..(244): Homolog of NCBI NO: 15236556 NR Description: expressed protein [Arabidopsis thaliana]
  misc_feature (1)..(228): Homolog of NCBI NO: 18406991 NR Description: expressed protein [Arabidopsis thaliana]
  misc_feature (27)..(228): Homolog of NCBI NO: 34904202 NR Description: P0492F05.25 [Oryza sativa (japonica
  misc_feature (1)..(25): Homolog of NCBI NO: 34904202 NR Description: P0492F05.25 [Oryza sativa (japonica
  misc_feature (1)..(228): Homolog of NCBI NO: 15234108 NR Description: hypothetical protein [Arabidopsis thaliana]
  misc_feature (1)..(243): Homolog of NCBI NO: 34897094 NR Description: unknown protein [Oryza sativa (japonica

SEQ ID NO: 102714 - DNA, 869 bp, Arabidopsis thaliana
  misc_feature (1)..(869): Ceres Seq. ID no. 13611045
  misc_feature: MA Experiment ID: 20000185 Result: Down-regulated in Transcription
  misc_feature: MA Experiment 20000185 PARAMETER Experiment Name: At_Roots__P Parameter: Age (day) Value: 7 vs. 21
  misc_feature: MA Experiment 20000185 PARAMETER Experiment Name: At_Roots__P Parameter: Organism Value: A. thaliana
  misc_feature: MA Experiment 20000185 PARAMETER Experiment Name: At_Roots__P Parameter: Tissue Value: Roots vs. Whole Plant
  misc_feature: MA Experiment ID: 20000227 Result: Down-regulated in Transcription
  misc_feature: MA Experiment 20000227 PARAMETER Experiment Name: At_Root-Tips-vs-Tops_P Parameter: Tissue Value: Root Tips vs. Root Tops
  misc_feature: MA Experiment ID: 20000234 Result: Down-regulated in Transcription
  misc_feature: MA Experiment 20000234 PARAMETER Experiment Name: At_Siliques_P Parameter: Age (day) Value: 21
  misc_feature: MA Experiment 20000234 PARAMETER Experiment Name: At_Siliques_P Parameter: Organism Value: A. thaliana
  misc_feature: MA Experiment 20000234 PARAMETER Experiment Name: At_Siliques_P Parameter: Plant Line Value: WS
  misc_feature: MA Experiment 20000234 PARAMETER Experiment Name: At_Siliques_P Parameter: Tissue Value: Less Than 5mm Siliques vs. Whole Plant
  misc_feature: MA Experiment ID: 20000235 Result: Down-regulated in Transcription
  misc_feature: MA Experiment 20000235 PARAMETER Experiment Name: At_Siliques_P Parameter: Age (day) Value: 21
  misc_feature: MA Experiment 20000235 PARAMETER Experiment Name: At_Siliques_P Parameter: Organism Value: A. thaliana
  misc_feature: MA Experiment 20000235 PARAMETER Experiment Name: At_Siliques_P Parameter: Plant Line Value: WS
  misc_feature: MA Experiment 20000235 PARAMETER Experiment Name: At_Siliques_P Parameter: Tissue Value: 5-10mm Siliques vs. Whole Plant
  misc_feature: MA Experiment ID: 20000264 Result: Down-regulated in Transcription
  misc_feature: MA Experiment 20000264 PARAMETER Experiment Name: At_Open_Flower_P Parameter: Age (day) Value: 21
  misc_feature: MA Experiment 20000264 PARAMETER Experiment Name: At_Open_Flower_P Parameter: Plant Line Value: WS
  misc_feature: MA Experiment 20000264 PARAMETER Experiment Name: At_Open_Flower_P Parameter: Tissue Value: Open Flower vs. Whole Plant
  misc_feature: MA Experiment ID: 20000265 Result: Down-regulated in Transcription
  misc_feature: MA Experiment 20000265 PARAMETER Experiment Name: At_Open_Flower_P Parameter: Age (day) Value: 21
  misc_feature: MA Experiment 20000265 PARAMETER Experiment Name: At_Open_Flower_P Parameter: Plant Line Value: WS
  misc_feature: MA Experiment 20000265 PARAMETER Experiment Name: At_Open_Flower_P Parameter: Tissue Value: Closed Flower vs. Whole Plant
  misc_feature: MA Experiment ID: 20000286 Result: Down-regulated in Transcription
  misc_feature: MA Experiment 20000286 PARAMETER Experiment Name: At_Open_Flower_P Parameter: Age (day) Value: 21
  misc_feature: MA Experiment 20000286 PARAMETER Experiment Name: At_Open_Flower_P Parameter: Plant Line Value: WS
  misc_feature: MA Experiment 20000286 PARAMETER Experiment Name: At_Open_Flower_P Parameter: Tissue Value: Half Open vs. Whole Plant
  misc_feature: MA Experiment ID: 20000794 Result: Down-regulated in Transcription
  misc_feature: MA Experiment 20000794 PARAMETER Experiment Name: At_Petals_P Parameter: Age (day) Value: 23-25 days
  misc_feature: MA Experiment 20000794 PARAMETER Experiment Name: At_Petals_P Parameter: Plant Line Value: WS
  misc_feature: MA Experiment 20000794 PARAMETER Experiment Name: At_Petals_P Parameter: Tissue Value: Petals vs. Whole plant
  misc_feature: MA Experiment ID: 20001450 Result: Up-regulated in Transcription
  misc_feature: MA Experiment 20001450 PARAMETER Experiment Name: At_Far-red-induction_P Parameter: Age (day) Value: 7
  misc_feature: MA Experiment 20001450 PARAMETER Experiment Name: At_Far-red-induction_P Parameter: Light Value: Far-red vs. White
  misc_feature: MA Experiment 20001450 PARAMETER Experiment Name: At_Far-red-induction_P Parameter: Organism Value: A. thaliana
  misc_feature: MA Experiment 20001450 PARAMETER Experiment Name: At_Far-red-induction_P Parameter: Plant Line Value: Columbia
  misc_feature: MA Experiment 20001450 PARAMETER Experiment Name: At_Far-red-induction_P Parameter: Timepoint (hr) Value: 8
  misc_feature: MA Experiment 20001450 PARAMETER Experiment Name: At_Far-red-induction_P Parameter: Tissue Value: Whole Plant
  misc_feature: MA Experiment ID: 20001451 Result: Up-regulated in Transcription
  misc_feature: MA Experiment 20001451 PARAMETER Experiment Name: At_Far-red-induction_P Parameter: Age (day) Value: 7
  misc_feature: MA Experiment 20001451 PARAMETER Experiment Name: At_Far-red-induction_P Parameter: Light Value: Far-red vs. White
  misc_feature: MA Experiment 20001451 PARAMETER Experiment Name: At_Far-red-induction_P Parameter: Organism Value: A. thaliana
  misc_feature: MA Experiment 20001451 PARAMETER Experiment Name: At_Far-red-induction_P Parameter: Plant Line Value: Columbia
  misc_feature: MA Experiment 20001451 PARAMETER Experiment Name: At_Far-red-induction_P Parameter: Timepoint (hr) Value: 24
  misc_feature: MA Experiment 20001451 PARAMETER Experiment Name: At_Far-red-induction_P Parameter: Tissue Value: Whole Plant
ctctctctttgtttattcgttaggtctcaaaggctctctctgtctctttctcaaaaatcatctgcaggaagtgaatcgtcaaaaccgagtttggaggatctgtcttgaggagtttttttttggttgagaaatggcttcgaaaaggatcttgaaagagctcaaggatctccagaaggatcctccaacttcctgcagtgctggcccagttgctgaagacatgtttcattggcaagctacaataatgggtccatctgatagtccttattcaggcggtgtctttctcgtaaccattcacttccctccggattatcctttcaaaccaccaaaggttgcattcaggacaaaagtgttccaccctaatgtcaacagcaatggaagcatttgccttgacattttgaaagaacaatggagtcctgcactcaccatatcgaaggttttgctttcgatatgttcattgttaacggacccaaacccagatgatccattggttccagagattgctcacatgtacaaaaccgatagagcaaagtatgagtctactgcgagaagctggactcagaaatatgcaatgggatgaaagtttgtgtcctttgatccctcacagactcggttttaatagagagagagagagaaagagagaggacttcttcacatagggatcttccatgaaataagttagattcctatgttttatcatctctttgtttgaaacctctttaatctcaaacaaaaacattacttcacctctttattatccatatgttccctatctttgtttctatgctttttccaaaaaattataagaaaaattatttatgtaaagctggaaactttgagcttttacctaacaaagtatgacgatgattaaa

SEQ ID NO: 102715 - protein, 148 aa, Arabidopsis thaliana; identical to SEQ ID NO: 23173
  peptide (1)..(148): Ceres Seq. ID no. 13611046
  misc_feature (1)..(148): Homolog of NCBI NO: 18408001 NR Description: ubiquitin-conjugating enzyme [Arabidopsis >gi|14326529|gb|AAK60309.1|AF385718_1 At1g64230/F22C12_17 thaliana] >gi|20136192|gb|AAM11574.1|AF480945_1 ubiquitin
  misc_feature (1)..(148): Homolog of NCBI NO: 11762186 NR Description: AT4g27960 [Arabidopsis thaliana]
  misc_feature (1)..(148): Homolog of NCBI NO: 18417097 NR Description: ubiquitin-conjugating enzyme 9 (UBC9)
  misc_feature (1)..(148): Homolog of NCBI NO: 30687803 NR Description: ubiquitin-conjugating enzyme 9 (UBC9)
  misc_feature (1)..(148): Homolog of NCBI NO: 441457 NR Description: ubiquitin conjugating enzyme E2 [Lycopersicon
  misc_feature (1)..(148): Homolog of NCBI NO: 30693863 NR Description: ubiquitin-conjugating enzyme 8 (UBC8)
  misc_feature (1)..(148): Homolog of NCBI NO: 464981 NR Description: Ubiquitin-conjugating enzyme E2-17 kDa ligase) (Ubiquitin carrier protein) >gi|388207|gb|AAA34125.1|
  misc_feature (1)..(148): Homolog of NCBI NO: 20152205 NR Description: ubiquitin-conjugating enzyme OsUBC5b [Oryza
  misc_feature (1)..(148): Homolog of NCBI NO: 28569269 NR Description: ubiquitin-conjugating enzyme E2 [Gossypium
  misc_feature (1)..(148): Homolog of NCBI NO: 40287554 NR Description: ubiquitin-conjugating enzyme 8 [Capsicum annuum]

SEQ ID NO: 102716 - protein, 119 aa, Arabidopsis thaliana; identical to SEQ ID NO: 23174
  peptide (1)..(119): Ceres Seq. ID no. 13611047
  misc_feature (1)..(119): Homolog of NCBI NO: 18408001 NR Description: ubiquitin-conjugating enzyme [Arabidopsis >gi|14326529|gb|AAK60309.1|AF385718_1 At1g64230/F22C12_17 thaliana] >gi|20136192|gb|AAM11574.1|AF480945_1 ubiquitin
  misc_feature (1)..(119): Homolog of NCBI NO: 11762186 NR Description: AT4g27960 [Arabidopsis thaliana]
  misc_feature (1)..(119): Homolog of NCBI NO: 18417097 NR Description: ubiquitin-conjugating enzyme 9 (UBC9)
  misc_feature (1)..(119): Homolog of NCBI NO: 30687803 NR Description: ubiquitin-conjugating enzyme 9 (UBC9)
  misc_feature (1)..(119): Homolog of NCBI NO: 441457 NR Description: ubiquitin conjugating enzyme E2 [Lycopersicon
  misc_feature (1)..(119): Homolog of NCBI NO: 464981 NR Description: Ubiquitin-conjugating enzyme E2-17 kDa ligase) (Ubiquitin carrier protein) >gi|388207|gb|AAA34125.1|
  misc_feature (1)..(119): Homolog of NCBI NO: 30693863 NR Description: ubiquitin-conjugating enzyme 8 (UBC8)
  misc_feature (1)..(119): Homolog of NCBI NO: 20152205 NR Description: ubiquitin-conjugating enzyme OsUBC5b [Oryza
  misc_feature (1)..(119): Homolog of NCBI NO: 28569269 NR Description: ubiquitin-conjugating enzyme E2 [Gossypium
  misc_feature (1)..(119): Homolog of NCBI NO: 40287554 NR Description: ubiquitin-conjugating enzyme 8 [Capsicum annuum]

SEQ ID NO: 102717 - protein, 111 aa, Arabidopsis thaliana; identical to SEQ ID NO: 23175
  peptide (1)..(111): Ceres Seq. ID no. 13611048
  misc_feature (1)..(111): Homolog of NCBI NO: 18408001 NR Description: ubiquitin-conjugating enzyme [Arabidopsis >gi|14326529|gb|AAK60309.1|AF385718_1 At1g64230/F22C12_17 thaliana] >gi|20136192|gb|AAM11574.1|AF480945_1 ubiquitin
  misc_feature (1)..(111): Homolog of NCBI NO: 11762186 NR Description: AT4g27960 [Arabidopsis thaliana]
  misc_feature (1)..(111): Homolog of NCBI NO: 18417097 NR Description: ubiquitin-conjugating enzyme 9 (UBC9)
  misc_feature (1)..(111): Homolog of NCBI NO: 30687803 NR Description: ubiquitin-conjugating enzyme 9 (UBC9)
  misc_feature (1)..(111): Homolog of NCBI NO: 441457 NR Description: ubiquitin conjugating enzyme E2 [Lycopersicon
  misc_feature (1)..(111): Homolog of NCBI NO: 464981 NR Description: Ubiquitin-conjugating enzyme E2-17 kDa ligase) (Ubiquitin carrier protein) >gi|388207|gb|AAA34125.1|
  misc_feature (1)..(111): Homolog of NCBI NO: 30693863 NR Description: ubiquitin-conjugating enzyme 8 (UBC8)
  misc_feature (1)..(111): Homolog of NCBI NO: 20152205 NR Description: ubiquitin-conjugating enzyme OsUBC5b [Oryza
  misc_feature (1)..(111): Homolog of NCBI NO: 28569269 NR Description: ubiquitin-conjugating enzyme E2 [Gossypium
  misc_feature (1)..(111): Homolog of NCBI NO: 40287554 NR Description: ubiquitin-conjugating enzyme 8 [Capsicum annuum]

SEQ ID NO: 102718 - DNA, 1486 bp, Arabidopsis thaliana
  misc_feature (1)..(1486): Ceres Seq. ID no. 13611057
  misc_feature: MA Experiment ID: 108573 Result: Up-regulated in Transcription
  misc_feature: MA Experiment 108573 PARAMETER Experiment Name: At_Drought_cDNA_P Parameter: Timepoint (hr) Value: 6
  misc_feature: MA Experiment 108573 PARAMETER Experiment Name: At_Drought_cDNA_P Parameter: Tissue Value: Aerial
  misc_feature: MA Experiment 108573 PARAMETER Experiment Name: At_Drought_cDNA_P Parameter: Treatment Value: Drought vs. No Drought
  misc_feature: MA Experiment ID: 108576 Result: Down-regulated in Transcription
  misc_feature: MA Experiment 108576 PARAMETER Experiment Name: At_42deg_Heat_cDNA_P Parameter: Temperature (deg C) Value: 42 vs. 22
  misc_feature: MA Experiment 108576 PARAMETER Experiment Name: At_42deg_Heat_cDNA_P Parameter: Timepoint (hr) Value: 1
  misc_feature: MA Experiment 108576 PARAMETER Experiment Name: At_42deg_Heat_cDNA_P Parameter: Tissue Value: Aerial
  misc_feature: MA Experiment ID: 20000111 Result: Down-regulated in Transcription
  misc_feature: MA Experiment 20000111 PARAMETER Experiment Name: At_42deg_Heat_cDNA_P Parameter: Temperature (deg C) Value: 42 vs. 22
  misc_feature: MA Experiment 20000111 PARAMETER Experiment Name: At_42deg_Heat_cDNA_P Parameter: Timepoint (hr) Value: 6
  misc_feature: MA Experiment 20000111 PARAMETER Experiment Name: At_42deg_Heat_cDNA_P Parameter: Tissue Value: Aerial
  misc_feature: MA Experiment ID: 20000185 Result: Up-regulated in Transcription
  misc_feature: MA Experiment 20000185 PARAMETER Experiment Name: At_Roots__P Parameter: Age (day) Value: 7 vs. 21
  misc_feature: MA Experiment 20000185 PARAMETER Experiment Name: At_Roots__P Parameter: Organism Value: A. thaliana
  misc_feature: MA Experiment 20000185 PARAMETER Experiment Name: At_Roots__P Parameter: Tissue Value: Roots vs. Whole Plant
  misc_feature: MA Experiment ID: 20000234 Result: Up-regulated in Transcription
  misc_feature: MA Experiment 20000234 PARAMETER Experiment Name: At_Siliques_P Parameter: Age (day) Value: 21
  misc_feature: MA Experiment 20000234 PARAMETER Experiment Name: At_Siliques_P Parameter: Organism Value: A. thaliana
  misc_feature: MA Experiment 20000234 PARAMETER Experiment Name: At_Siliques_P Parameter: Plant Line Value: WS
  misc_feature: MA Experiment 20000234 PARAMETER Experiment Name: At_Siliques_P Parameter: Tissue Value: Less Than 5mm Siliques vs. Whole Plant
  misc_feature: MA Experiment ID: 20000264 Result: Up-regulated in Transcription
  misc_feature: MA Experiment 20000264 PARAMETER Experiment Name: At_Open_Flower_P Parameter: Age (day) Value: 21
  misc_feature: MA Experiment 20000264 PARAMETER Experiment Name: At_Open_Flower_P Parameter: Plant Line Value: WS
  misc_feature: MA Experiment 20000264 PARAMETER Experiment Name: At_Open_Flower_P Parameter: Tissue Value: Open Flower vs. Whole Plant
  misc_feature: MA Experiment ID: 20000265 Result: Up-regulated in Transcription
  misc_feature: MA Experiment 20000265 PARAMETER Experiment Name: At_Open_Flower_P Parameter: Age (day) Value: 21
  misc_feature: MA Experiment 20000265 PARAMETER Experiment Name: At_Open_Flower_P Parameter: Plant Line Value: WS
  misc_feature: MA Experiment 20000265 PARAMETER Experiment Name: At_Open_Flower_P Parameter: Tissue Value: Closed Flower vs. Whole Plant
  misc_feature: MA Experiment ID: 20000286 Result: Up-regulated in Transcription
  misc_feature: MA Experiment 20000286 PARAMETER Experiment Name: At_Open_Flower_P Parameter: Age (day) Value: 21
  misc_feature: MA Experiment 20000286 PARAMETER Experiment Name: At_Open_Flower_P Parameter: Plant Line Value: WS
  misc_feature: MA Experiment 20000286 PARAMETER Experiment Name: At_Open_Flower_P Parameter: Tissue Value: Half Open vs. Whole Plant
  misc_feature: MA Experiment ID: 20000439 Result: Up-regulated in Transcription
  misc_feature: MA Experiment 20000439 PARAMETER Experiment Name: At_Roots__P Parameter: Age (day) Value: 14 vs. 21
  misc_feature: MA Experiment 20000439 PARAMETER Experiment Name: At_Roots__P Parameter: Organism Value: A. thaliana
  misc_feature: MA Experiment 20000439 PARAMETER Experiment Name: At_Roots__P Parameter: Tissue Value: Roots vs. Whole Plant
  misc_feature: MA Experiment ID: 20000794 Result: Up-regulated in Transcription
  misc_feature: MA Experiment 20000794 PARAMETER Experiment Name: At_Petals_P Parameter: Age (day) Value: 23-25 days
  misc_feature: MA Experiment 20000794 PARAMETER Experiment Name: At_Petals_P Parameter: Plant Line Value: WS
  misc_feature: MA Experiment 20000794 PARAMETER Experiment Name: At_Petals_P Parameter: Tissue Value: Petals vs. Whole plant
  misc_feature: MA Experiment ID: 20001247 Result: Down-regulated in Transcription
  misc_feature: MA Experiment 20001247 PARAMETER Experiment Name: At_Far-red-induction_P Parameter: Age (day) Value: 7
  misc_feature: MA Experiment 20001247 PARAMETER Experiment Name: At_Far-red-induction_P Parameter: Light Value: Far-red vs. White
  misc_feature: MA Experiment 20001247 PARAMETER Experiment Name: At_Far-red-induction_P Parameter: Organism Value: A. thaliana
  misc_feature: MA Experiment 20001247 PARAMETER Experiment Name: At_Far-red-induction_P Parameter: Plant Line Value: Columbia
  misc_feature: MA Experiment 20001247 PARAMETER Experiment Name: At_Far-red-induction_P Parameter: Timepoint (hr) Value: 1
  misc_feature: MA Experiment 20001247 PARAMETER Experiment Name: At_Far-red-induction_P Parameter: Tissue Value: Whole Plant
  misc_feature: MA Experiment ID: 20001248 Result: Down-regulated in Transcription
  misc_feature: MA Experiment 20001248 PARAMETER Experiment Name: At_Far-red-induction_P Parameter: Age (day) Value: 7
  misc_feature: MA Experiment 20001248 PARAMETER Experiment Name: At_Far-red-induction_P Parameter: Light Value: Far-red vs. White
  misc_feature: MA Experiment 20001248 PARAMETER Experiment Name: At_Far-red-induction_P Parameter: Organism Value: A. thaliana
  misc_feature: MA Experiment 20001248 PARAMETER Experiment Name: At_Far-red-induction_P Parameter: Plant Line Value: Columbia
  misc_feature: MA Experiment 20001248 PARAMETER Experiment Name: At_Far-red-induction_P Parameter: Timepoint (hr) Value: 4
  misc_feature: MA Experiment 20001248 PARAMETER Experiment Name: At_Far-red-induction_P Parameter: Tissue Value: Whole Plant
atgcaagcatttgttagtataaacaaaaaagccacgtggcttctcttctccactcctctttttattccttcccaaacaagaaggttagttattattatttccagagaagcttctcttttgattctctcgctctctctttcttcatcgcctcttcgagcttcgatggttgggaatattctggtgaccggtggtgctggttacatcggaagtcacacggttcttcagcttcttctcggaggctataacaccgtcgttatagacaacctcgacaattcctctctcgtttcgatccaacgcgtcaaggatctcgccggagatcatggacaaaatctcaccgtccaccaggtggaccttcgcgataaacccgcacttgagaaggttttctccgaaacaaagtttgatgcagtaatgcattttgctggattgaaagcagttggtgagagcgtggcgaaaccacttctgtattataacaataacttgattgcgactattacacttttggaagtaatggctgcacacggatgtaaaaagcttgtattttcttcgtccgctactgtgtatggctggccaaaggaggttccttgtacagaagagtctcccctgtctggaatgagtccttatggacggacaaagctgttcatagaggacatttgccgtgatgtacaacgtggtgatcctgaatggagaatcataatgctgaggtactttaaccctgtgggagctcaccctagcggtcgcattggtgaggatccttgtgggactccaaataatctcatgccttatgtccagcaagtcgttgttgggaggctacctaacctaaaaatttatggaactgactataccactaaagatggcactggtgtacgagactatattcatgttgttgatctagcagatggccatatatgtgcgcttcaaaagctagacgatactgaaataggttgtgaggtatacaacctgggaaccggaaaaggaacaacagtgttggagatggttgatgcatttgagaaagcttctggaatgaaaatcccactggtgaaggttggaaggagaccaggtgatgcagaaaccgtctatgcgtcaacagaaaaagctgaacgcgaactaaactggaaggcaaattttggaatcgaagaaatgtgtagggatcagtggaactgggcaagcaacaatcctttcggttacggttcttcaccaaactcaacataacgaagctaatgtatccaacactccattctttttcttttgggtcgtcggctgttatctttatgttacacactcaggttttagctttaaagcctaaacacagtgagggagaagttacttctctattcatatatctgctttctccttttgtaatttatatatatcttatatacgcataggtttaacttaagcggatccttttgttttttggatttgtataatctctcttaggaaattaattgtcatgggattatatttgtattaaatagaaactgaattc

SEQ ID NO: 102719 - protein, 402 aa, Arabidopsis thaliana
  peptide (1)..(402): Ceres Seq. ID no. 13611058
  misc_feature (59)..(392): Pfam Name: NAD dependent epimerase/dehydratase family Pfam Description: NAD dependent epimerase/dehydratase family
  misc_feature (55)..(402): Homolog of NCBI NO: 15217653 NR Description: UDP-glucose 4-epimerase (UDP-galactose
  misc_feature (116)..(289): Homolog of NCBI NO: 6633809 NR Description: F1N19.2 [Arabidopsis thaliana]
  misc_feature (288)..(402): Homolog of NCBI NO: 6633809 NR Description: F1N19.2 [Arabidopsis thaliana]
  misc_feature (55)..(116): Homolog of NCBI NO: 6633809 NR Description: F1N19.2 [Arabidopsis thaliana]
  misc_feature (55)..(402): Homolog of NCBI NO: 15236663 NR Description: UDP-glucose 4-epimerase (UDP-galactose
  misc_feature (55)..(401): Homolog of NCBI NO: 21553659 NR Description: UDP-galactose 4-epimerase-like protein
  misc_feature (55)..(398): Homolog of NCBI NO: 12643850 NR Description: Probable UDP-glucose 4-epimerase At4g10960
  misc_feature (55)..(398): Homolog of NCBI NO: 15236988 NR Description: UDP-glucose 4-epimerase (UDP-galactose (Galactowaldenase), putative [Arabidopsis thaliana]
  misc_feature (55)..(402): Homolog of NCBI NO: 21536846 NR Description: UDPglucose 4-epimerase-like protein [Arabidopsis
  misc_feature (59)..(402): Homolog of NCBI NO: 11386775 NR Description: UDP-glucose 4-epimerase GEPI48 (Galactowaldenase)
MQAFVSINKKATWLLFSTPLFIPSQTRRLVIIISREASLLILSLSLSSSPLRASMVGNILVTGGAGYIGSHTVLQLLLGGYNTVVIDNLDNSSLVSIQRVKDLAGDHGQNLTVHQVDLRDKPALEKVFSETKFDAVMHFAGLKAVGESVAKPLLYYNNNLIATITLLEVMAAHGCKKLVFSSSATVYGWPKEVPCTEESPLSGMSPYGRTKLFIEDICRDVQRGDPEWRIIMLRYFNPVGAHPSGRIGEDPCGTPNNLMPYVQQVVVGRLPNLKIYGTDYTTKDGTGVRDYIHVVDLADGHICALQKLDDTEIGCEVYNLGTGKGTTVLEMVDAFEKASGMKIPLVKVGRRPGDAETVYASTEKAERELNWKANFGIEEMCRDQWNWASNNPFGYGSSPNST

SEQ ID NO: 102720 - protein, 348 aa, Arabidopsis thaliana
  peptide (1)..(348): Ceres Seq. ID no. 13611059
  misc_feature (5)..(338): Pfam Name: NAD dependent epimerase/dehydratase family Pfam Description: NAD dependent epimerase/dehydratase family
  misc_feature (1)..(348): Homolog of NCBI NO: 15217653 NR Description: UDP-glucose 4-epimerase (UDP-galactose
  misc_feature (62)..(235): Homolog of NCBI NO: 6633809 NR Description: F1N19.2 [Arabidopsis thaliana]
  misc_feature (234)..(348): Homolog of NCBI NO: 6633809 NR Description: F1N19.2 [Arabidopsis thaliana]
  misc_feature (1)..(62): Homolog of NCBI NO: 6633809 NR Description: F1N19.2 [Arabidopsis thaliana]
  misc_feature (1)..(348): Homolog of NCBI NO: 15236663 NR Description: UDP-glucose 4-epimerase (UDP-galactose
  misc_feature (1)..(347): Homolog of NCBI NO: 21553659 NR Description: UDP-galactose 4-epimerase-like protein
  misc_feature (1)..(344): Homolog of NCBI NO: 12643850 NR Description: Probable UDP-glucose 4-epimerase At4g10960
  misc_feature (1)..(344): Homolog of NCBI NO: 15236988 NR Description: UDP-glucose 4-epimerase (UDP-galactose (Galactowaldenase), putative [Arabidopsis thaliana]
  misc_feature (1)..(348): Homolog of NCBI NO: 21536846 NR Description: UDPglucose 4-epimerase-like protein [Arabidopsis
  misc_feature (5)..(348): Homolog of NCBI NO: 11386775 NR Description: UDP-glucose 4-epimerase GEPI48 (Galactowaldenase)
MVGNILVTGGAGYIGSHTVLQLLLGGYNTVVIDNLDNSSLVSIQRVKDLAGDHGQNLTVHQVDLRDKPALEKVFSETKFDAVMHFAGLKAVGESVAKPLLYYNNNLIATITLLEVMAAHGCKKLVFSSSATVYGWPKEVPCTEESPLSGMSPYGRTKLFIEDICRDVQRGDPEWRIIMLRYFNPVGAHPSGRIGEDPCGTPNNLMPYVQQVVVGRLPNLKIYGTDYTTKDGTGVRDYIHVVDLADGHICALQKLDDTEIGCEVYNLGTGKGTTVLEMVDAFEKASGMKIPLVKVGRRPGDAETVYASTEKAERELNWKANFGIEEMCRDQWNWASNNPFGYGSSPNST

SEQ ID NO: 102721 - protein, 266 aa, Arabidopsis thaliana
  peptide (1)..(266): Ceres Seq. ID no. 13611060
  misc_feature (1)..(256): Pfam Name: NAD dependent epimerase/dehydratase family Pfam Description: NAD dependent epimerase/dehydratase family
  misc_feature (1)..(266): Homolog of NCBI NO: 15217653 NR Description: UDP-glucose 4-epimerase (UDP-galactose
  misc_feature (1)..(153): Homolog of NCBI NO: 6633809 NR Description: F1N19.2 [Arabidopsis thaliana]
  misc_feature (152)..(266): Homolog of NCBI NO: 6633809 NR Description: F1N19.2 [Arabidopsis thaliana]
  misc_feature (1)..(266): Homolog of NCBI NO: 15236663 NR Description: UDP-glucose 4-epimerase (UDP-galactose
  misc_feature (1)..(265): Homolog of NCBI NO: 21553659 NR Description: UDP-galactose 4-epimerase-like protein
  misc_feature (1)..(262): Homolog of NCBI NO: 12643850 NR Description: Probable UDP-glucose 4-epimerase At4g10960
  misc_feature (1)..(262): Homolog of NCBI NO: 15236988 NR Description: UDP-glucose 4-epimerase (UDP-galactose (Galactowaldenase), putative [Arabidopsis thaliana]
  misc_feature (1)..(266): Homolog of NCBI NO: 21536846 NR Description: UDPglucose 4-epimerase-like protein [Arabidopsis
  misc_feature (1)..(266): Homolog of NCBI NO: 11386775 NR Description: UDP-glucose 4-epimerase GEPI48 (Galactowaldenase)
  misc_feature (1)..(266): Homolog of NCBI NO: 21715990 NR Description: UDP-glucose 4-epimerase [Oryza sativa (japonica
MHFAGLKAVGESVAKPLLYYNNNLIATITLLEVMAAHGCKKLVFSSSATVYGWPKEVPCTEESPLSGMSPYGRTKLFIEDICRDVQRGDPEWRIIMLRYFNPVGAHPSGRIGEDPCGTPNNLMPYVQQVVVGRLPNLKIYGTDYTTKDGTGVRDYIHVVDLADGHICALQKLDDTEIGCEVYNLGTGKGTTVLEMVDAFEKASGMKIPLVKVGRRPGDAETVYASTEKAERELNWKANFGIEEMCRDQWNWASNNPFGYGSSPNST

SEQ ID NO: 102722 - DNA, 713 bp, Arabidopsis thaliana
  misc_feature (1)..(713): Ceres Seq. ID no. 13611076
  misc_feature: MA Experiment ID: 108595 Result: Down-regulated in Transcription
  misc_feature: MA Experiment 108595 PARAMETER Experiment Name: At_Ler-pi_Ovule_cDNA_P Parameter: Plant Line Value: null
  misc_feature: MA Experiment ID: 20000224 Result: Down-regulated in Transcription
agaaagagaaaagaaattgagaagaaaaaagaaaaaaaggtgaccgtattctccgtcgattgtagccgcccgaagaaatatcttctcctctctcgtttaaccacgaatttgctctgatattagtgtttctctagccatggtaagctcaattttccacttgttatctcgatctgcgaacgcggcatctggaatggctgtgcatgatgattgcaagctgagatttctggaactgaaggctaaaaggacacaccgtttcatagtttacaagattgaggagaagcagaagcaagttgttgttgagaaagttggtcaaccgatccaaacttacgaggagtttgcagcatgtcttccagctgatgaatgccgttacgccatttacgattttgactttgtaactgctgagaattgccagaagagcaagatcttcttcatcgcgtggtgtccggatattgctaaggtgagaagcaagatgatctacgcgagctccaaggacaggttcaagagggaactagatgggattcaagtagagctacaggcaactgatccaacagagatggatctcgatgttttcaggagccgtgccaactaaaaagtaaaaaccaaagtttattatcatcatccccttgaaagatctattctcttattctgttatttttgagtgatggtactggtacttgattatgtttttacattgtgttgtgaagttatgaacc

SEQ ID NO: 102723 - protein, 150 aa, Arabidopsis thaliana; identical to SEQ ID NO: 28254
  peptide (1)..(150): Ceres Seq. ID no. 13611077
  misc_feature (23)..(150): Pfam Name: Cofilin/tropomyosin-type actin-binding protein Pfam Description: Cofilin/tropomyosin-type actin-binding protein
  misc_feature (13)..(150): Homolog of NCBI NO: 15231309 NR Description: actin depolymerizing factor 1 (ADF1) [Arabidopsis
  misc_feature (13)..(150): Homolog of NCBI NO: 30697300 NR Description: actin depolymerizing factor 4 - like protein
  misc_feature (13)..(150): Homolog of NCBI NO: 4185511 NR Description: actin depolymerizing factor 4 [Arabidopsis
  misc_feature (19)..(150): Homolog of NCBI NO: 30697303 NR Description: actin depolymerizing factor 4 - like protein thaliana] >gi|15215859|gb|AAK91473.1| AT5g59890/mmn10_110 thaliana] >gi|19699262|gb|AAL90997.1| At1g05180/YUP8H12_21
  misc_feature (13)..(150): Homolog of NCBI NO: 17366768 NR Description: Actin-depolymerizing factor 1 (ADF 1)
  misc_feature (13)..(149): Homolog of NCBI NO: 17366765 NR Description: Actin-depolymerizing factor 2 (ADF 2)
  misc_feature (13)..(150): Homolog of NCBI NO: 30697295 NR Description: actin depolymerizing factor 3 - like protein
  misc_feature (13)..(150): Homolog of NCBI NO: 18408116 NR Description: actin depolymerizing factor 2 (ADF2) [Arabidopsis
  misc_feature (13)..(150): Homolog of NCBI NO: 38564721 NR Description: putative actin-depolymerizing factor 2
  misc_feature (19)..(150): Homolog of NCBI NO: 11276987 NR Description: actin depolymerizing factor 2 - Arabidopsis >gi|7339501|emb|CAB82824.1| actin depolymerizing factor 2 (ADF2)

SEQ ID NO: 102724 - protein, 132 aa, Arabidopsis thaliana; identical to SEQ ID NO: 26127
  peptide (1)..(132): Ceres Seq. ID no. 13611078
  misc_feature (5)..(132): Pfam Name: Cofilin/tropomyosin-type actin-binding protein Pfam Description: Cofilin/tropomyosin-type actin-binding protein
  misc_feature (1)..(132): Homolog of NCBI NO: 15231309 NR Description: actin depolymerizing factor 1 (ADF1) [Arabidopsis
  misc_feature (1)..(132): Homolog of NCBI NO: 30697300 NR Description: actin depolymerizing factor 4 - like protein
  misc_feature (1)..(132): Homolog of NCBI NO: 4185511 NR Description: actin depolymerizing factor 4 [Arabidopsis
  misc_feature (1)..(132): Homolog of NCBI NO: 30697303 NR Description: actin depolymerizing factor 4 - like protein thaliana] >gi|15215859|gb|AAK91473.1| AT5g59890/mmn10_110 thaliana] >gi|19699262|gb|AAL90997.1| At1g05180/YUP8H12_21
  misc_feature (1)..(132): Homolog of NCBI NO: 17366768 NR Description: Actin-depolymerizing factor 1 (ADF 1)
  misc_feature (1)..(131): Homolog of NCBI NO: 17366765 NR Description: Actin-depolymerizing factor 2 (ADF 2)
  misc_feature (1)..(132): Homolog of NCBI NO: 30697295 NR Description: actin depolymerizing factor 3 - like protein
  misc_feature (1)..(132): Homolog of NCBI NO: 18408116 NR Description: actin depolymerizing factor 2 (ADF2) [Arabidopsis
  misc_feature (1)..(132): Homolog of NCBI NO: 38564721 NR Description: putative actin-depolymerizing factor 2
  misc_feature (1)..(132): Homolog of NCBI NO: 11276987 NR Description: actin depolymerizing factor 2 - Arabidopsis >gi|7339501|emb|CAB82824.1| actin depolymerizing factor 2 (ADF2)

SEQ ID NO: 102725 - DNA, 683 bp, Arabidopsis thaliana
  misc_feature (1)..(683): Ceres Seq. ID no. 13611079
  misc_feature: MA Experiment ID: 20000173 Result: Down-regulated in Transcription
  misc_feature: MA Experiment 20000173 PARAMETER Experiment Name: At_42deg_Heat_P Parameter: Age (day) Value: 14
  misc_feature: MA Experiment 20000173 PARAMETER Experiment Name: At_42deg_Heat_P Parameter: Organism Value: A. thaliana
  misc_feature: MA Experiment 20000173 PARAMETER Experiment Name: At_42deg_Heat_P Parameter: Plant Line Value: WS
  misc_feature: MA Experiment 20000173 PARAMETER Experiment Name: At_42deg_Heat_P Parameter: Temperature (deg C) Value: 42 vs. 22
  misc_feature: MA Experiment 20000173 PARAMETER Experiment Name: At_42deg_Heat_P Parameter: Timepoint (hr) Value: 6
  misc_feature: MA Experiment 20000173 PARAMETER Experiment Name: At_42deg_Heat_P Parameter: Tissue Value: Aerial
  misc_feature: MA Experiment ID: 20000437 Result: Down-regulated in Transcription
  misc_feature: MA Experiment 20000437 PARAMETER Experiment Name: At_Drought_P Parameter: Age (day) Value: 8
  misc_feature: MA Experiment 20000437 PARAMETER Experiment Name: At_Drought_P Parameter: Organism Value: A. thaliana
  misc_feature: MA Experiment 20000437 PARAMETER Experiment Name: At_Drought_P Parameter: Plant Line Value: WS
  misc_feature: MA Experiment 20000437 PARAMETER Experiment Name: At_Drought_P Parameter: Timepoint (hr) Value: 24
  misc_feature: MA Experiment 20000437 PARAMETER Experiment Name: At_Drought_P Parameter: Tissue Value: Whole Plant
  misc_feature: MA Experiment 20000437 PARAMETER Experiment Name: At_Drought_P Parameter: Treatment Value: Drought vs. No Drought
aacaaacacaaaacttgatctcacgactccatcttctaaaattcagaatctttctttgaaacttttttcgtgtgaagaaaatggcaccaaaggcagagaagaagccggcagagaagaaaccagtagaggagaaatcaaaagccgagaaagctcctgcagagaagaaaccaaaagccggcaagaaactcccgaaggaagccggtgccggcggcgataagaagaagaagatgaagaagaagagtgttgagacgtacaagatctacatcttcaaggttctgaaacaagttcatccagatattggtatttcaagcaaagctatggggattatgaacagtttcatcaacgacatctttgagaaattggcatcggaatcgtcgaagctcgcgaggtataataagaagccgacgattacttctcgggagattcagactgctgttagacttgttcttcctggtgagcttgcgaaacatgctgtttctgaaggaactaaggcggtgactaagtttactagctcttgaattgtggatcttgttgaaatcgatgtttgtaaaattagggttttttagatttgatggttgttgttgactctttgatcgatttctgtttcgttttcttgttgcgatgttaatcaaatcggatccgatttctttcttaaatcaaatctatcaagtaaaatcttttgc

SEQ ID NO: 102726 - protein, 145 aa, Arabidopsis thaliana; identical to SEQ ID NO: 21275
  peptide (1)..(145): Ceres Seq. ID no. 13611080
  misc_feature (5)..(144): Pfam Name: Core histone H2A/H2B/H3/H4 Pfam Description: Core histone H2A/H2B/H3/H4
  misc_feature (1)..(145): Homolog of NCBI NO: 15231313 NR Description: histone H2B, putative [Arabidopsis thaliana]
  misc_feature (1)..(145): Homolog of NCBI NO: 15231304 NR Description: histone H2B [Arabidopsis thaliana]
  misc_feature (1)..(145): Homolog of NCBI NO: 15238563 NR Description: histone H2B [Arabidopsis thaliana] Histone H2B >gi|9757912|dbj|BAB08359.1| contains similarity to H2B~gene_id:MMN10.15 [Arabidopsis thaliana]
  misc_feature (1)..(145): Homolog of NCBI NO: 21554180 NR Description: histone H2B-like protein [Arabidopsis thaliana]
  misc_feature (1)..(145): Homolog of NCBI NO: 7387726 NR Description: Histone H2B >gi|7439759|pir||T09722 histone H2B1 upland cotton >gi|2558962|gb|AAB97163.1| histone H2B1 [Gossypium
  misc_feature (1)..(145): Homolog of NCBI NO: 7439756 NR Description: histone H2B - tomato >gi|3021489|emb|CAA12233.1|
  misc_feature (1)..(145): Homolog of NCBI NO: 15223016 NR Description: histone H2B, putative [Arabidopsis thaliana]
  misc_feature (1)..(145): Homolog of NCBI NO: 21617908 NR Description: histone H2B [Arabidopsis thaliana]
  misc_feature (1)..(145): Homolog of NCBI NO: 15226943 NR Description: histone H2B, putative [Arabidopsis thaliana]
  misc_feature (1)..(145): Homolog of NCBI NO: 7387727 NR Description: Histone H2B (CaH2B) >gi|7439757|pir||T08063 H2B - pepper >gi|2746719|gb|AAB94923.1| histone H2B [Capsicum

SEQ ID NO: 102727 - protein, 96 aa, Arabidopsis thaliana; identical to SEQ ID NO: 21276
  peptide (1)..(96): Ceres Seq. ID no. 13611081
  misc_feature (1)..(95): Pfam Name: Core histone H2A/H2B/H3/H4 Pfam Description: Core histone H2A/H2B/H3/H4
  misc_feature (1)..(96): Homolog of NCBI NO: 15231313 NR Description: histone H2B, putative [Arabidopsis thaliana]
  misc_feature (1)..(96): Homolog of NCBI NO: 15231304 NR Description: histone H2B [Arabidopsis thaliana]
  misc_feature (1)..(96): Homolog of NCBI NO: 15238563 NR Description: histone H2B [Arabidopsis thaliana] Histone H2B >gi|9757912|dbj|BAB08359.1| contains similarity to H2B~gene_id:MMN10.15 [Arabidopsis thaliana]
  misc_feature (1)..(96): Homolog of NCBI NO: 21554180 NR Description: histone H2B-like protein [Arabidopsis thaliana]
  misc_feature (1)..(96): Homolog of NCBI NO: 7387726 NR Description: Histone H2B >gi|7439759|pir||T09722 histone H2B1 upland cotton >gi|2558962|gb|AAB97163.1| histone H2B1 [Gossypium
  misc_feature (1)..(96): Homolog of NCBI NO: 7439756 NR Description: histone H2B - tomato >gi|3021489|emb|CAA12233.1|
  misc_feature (1)..(96): Homolog of NCBI NO: 15223016 NR Description: histone H2B, putative [Arabidopsis thaliana]
  misc_feature (1)..(96): Homolog of NCBI NO: 21617908 NR Description: histone H2B [Arabidopsis thaliana]
  misc_feature (1)..(96): Homolog of NCBI NO: 15226943 NR Description: histone H2B, putative [Arabidopsis thaliana]
  misc_feature (1)..(96): Homolog of NCBI NO: 7387727 NR Description: Histone H2B (CaH2B) >gi|7439757|pir||T08063 H2B - pepper >gi|2746719|gb|AAB94923.1| histone H2B [Capsicum

SEQ ID NO: 102728 - DNA, 1206 bp, Arabidopsis thaliana
  misc_feature (1)..(1206): Ceres Seq. ID no. 13611104
  misc_feature: MA Experiment ID: 108434 Result: Down-regulated in Transcription
  misc_feature: MA Experiment 108434 PARAMETER Experiment Name: At_Root_Tips_cDNA_P Parameter: Tissue Value: Root Tips
  misc_feature: MA Experiment ID: 108462 Result: Up-regulated in Transcription
  misc_feature: MA Experiment 108462 PARAMETER Experiment Name: At_Germinating_Seeds_cDNA_P Parameter: Age (day) Value: 2 vs. 0
  misc_feature: MA Experiment 108462 PARAMETER Experiment Name: At_Germinating_Seeds_cDNA_P Parameter: Tissue Value: Germinating Seeds
  misc_feature: MA Experiment ID: 108573 Result: Down-regulated in Transcription
  misc_feature: MA Experiment 108573 PARAMETER Experiment Name: At_Drought_cDNA_P Parameter: Timepoint (hr) Value: 6
  misc_feature: MA Experiment 108573 PARAMETER Experiment Name: At_Drought_cDNA_P Parameter: Tissue Value: Aerial
  misc_feature: MA Experiment 108573 PARAMETER Experiment Name: At_Drought_cDNA_P Parameter: Treatment Value: Drought vs. No Drought
  misc_feature: MA Experiment ID: 108595 Result: Down-regulated in Transcription
  misc_feature: MA Experiment 108595 PARAMETER Experiment Name: At_Ler-pi_Ovule_cDNA_P Parameter: Plant Line Value: null
  misc_feature: MA Experiment ID: 20000087 Result: Down-regulated in Transcription
  misc_feature: MA Experiment 20000087 PARAMETER Experiment Name: At_100uM_ABA_Mutants_cDNA_P Parameter: Plant Line Value: WS
  misc_feature: MA Experiment 20000087 PARAMETER Experiment Name: At_100uM_ABA_Mutants_cDNA_P Parameter: Timepoint (hr) Value: 6
  misc_feature: MA Experiment 20000087 PARAMETER Experiment Name: At_100uM_ABA_Mutants_cDNA_P Parameter: Tissue Value: Aerial
  misc_feature: MA Experiment 20000087 PARAMETER Experiment Name: At_100uM_ABA_Mutants_cDNA_P Parameter: Treatment Value: 100uM ABA vs. No Treatment
  misc_feature: MA Experiment ID: 20000111 Result: Down-regulated in Transcription
  misc_feature: MA Experiment 20000111 PARAMETER Experiment Name: At_42deg_Heat_cDNA_P Parameter: Temperature (deg C) Value: 42 vs. 22
  misc_feature: MA Experiment 20000111 PARAMETER Experiment Name: At_42deg_Heat_cDNA_P Parameter: Timepoint (hr) Value: 6
  misc_feature: MA Experiment 20000111 PARAMETER Experiment Name: At_42deg_Heat_cDNA_P Parameter: Tissue Value: Aerial
  misc_feature: MA Experiment ID: 20000113 Result: Down-regulated in Transcription
  misc_feature: MA Experiment 20000113 PARAMETER Experiment Name: At_42deg_Heat_cDNA_P Parameter: Temperature (deg C) Value: 42 vs. 22
  misc_feature: MA Experiment 20000113 PARAMETER Experiment Name: At_42deg_Heat_cDNA_P Parameter: Timepoint (hr) Value: 8
  misc_feature: MA Experiment 20000113 PARAMETER Experiment Name: At_42deg_Heat_cDNA_P Parameter: Tissue Value: Aerial
  misc_feature: MA Experiment ID: 20000173 Result: Down-regulated in Transcription
  misc_feature: MA Experiment 20000173 PARAMETER Experiment Name: At_42deg_Heat_P Parameter: Age (day) Value: 14
  misc_feature: MA Experiment 20000173 PARAMETER Experiment Name: At_42deg_Heat_P Parameter: Organism Value: A. thaliana
  misc_feature: MA Experiment 20000173 PARAMETER Experiment Name: At_42deg_Heat_P Parameter: Plant Line Value: WS
  misc_feature: MA Experiment 20000173 PARAMETER Experiment Name: At_42deg_Heat_P Parameter: Temperature (deg C) Value: 42 vs. 22
  misc_feature: MA Experiment 20000173 PARAMETER Experiment Name: At_42deg_Heat_P Parameter: Timepoint (hr) Value: 6
  misc_feature: MA Experiment 20000173 PARAMETER Experiment Name: At_42deg_Heat_P Parameter: Tissue Value: Aerial
  misc_feature: MA Experiment ID: 20000179 Result: Up-regulated in Transcription
  misc_feature: MA Experiment 20000179 PARAMETER Experiment Name: At_Germinating_Seeds_P Parameter: Age (hr) Value: 6 vs. 0
  misc_feature: MA Experiment 20000179 PARAMETER Experiment Name: At_Germinating_Seeds_P Parameter: Tissue Value: Germinating Seeds
  misc_feature: MA Experiment ID: 20000180 Result: Up-regulated in Transcription
  misc_feature: MA Experiment 20000180 PARAMETER Experiment Name: At_Germinating_Seeds_P Parameter: Age (hr) Value: 24 vs. 0
  misc_feature: MA Experiment 20000180 PARAMETER Experiment Name: At_Germinating_Seeds_P Parameter: Tissue Value: Germinating Seeds
  misc_feature: MA Experiment ID: 20000184 Result: Down-regulated in Transcription
  misc_feature: MA Experiment 20000184 PARAMETER Experiment Name: At_Shoots__P Parameter: Age (day) Value: 7
  misc_feature: MA Experiment 20000184 PARAMETER Experiment Name: At_Shoots__P Parameter: Tissue Value: Shoots vs. Whole Plant
  misc_feature: MA Experiment ID: 20000224 Result: Up-regulated in Transcription
  misc_feature: MA Experiment ID: 20000437 Result: Down-regulated in Transcription
  misc_feature: MA Experiment 20000437 PARAMETER Experiment Name: At_Drought_P Parameter: Age (day) Value: 8
  misc_feature: MA Experiment 20000437 PARAMETER Experiment Name: At_Drought_P Parameter: Organism Value: A. thaliana
  misc_feature: MA Experiment 20000437 PARAMETER Experiment Name: At_Drought_P Parameter: Plant Line Value: WS
  misc_feature: MA Experiment 20000437 PARAMETER Experiment Name: At_Drought_P Parameter: Timepoint (hr) Value: 24
  misc_feature: MA Experiment 20000437 PARAMETER Experiment Name: At_Drought_P Parameter: Tissue Value: Whole Plant
  misc_feature: MA Experiment 20000437 PARAMETER Experiment Name: At_Drought_P Parameter: Treatment Value: Drought vs. No Drought
  misc_feature: MA Experiment ID: 20000794 Result: Down-regulated in Transcription
  misc_feature: MA Experiment 20000794 PARAMETER Experiment Name: At_Petals_P Parameter: Age (day) Value: 23-25 days
  misc_feature: MA Experiment 20000794 PARAMETER Experiment Name: At_Petals_P Parameter: Plant Line Value: WS
  misc_feature: MA Experiment 20000794 PARAMETER Experiment Name: At_Petals_P Parameter: Tissue Value: Petals vs. Whole plant
  misc_feature: MA Experiment ID: 20001247 Result: Down-regulated in Transcription
  misc_feature: MA Experiment 20001247 PARAMETER Experiment Name: At_Far-red-induction_P Parameter: Age (day) Value: 7
  misc_feature: MA Experiment 20001247 PARAMETER Experiment Name: At_Far-red-induction_P Parameter: Light Value: Far-red vs. White
  misc_feature: MA Experiment 20001247 PARAMETER Experiment Name: At_Far-red-induction_P Parameter: Organism Value: A. thaliana
  misc_feature: MA Experiment 20001247 PARAMETER Experiment Name: At_Far-red-induction_P Parameter: Plant Line Value: Columbia
  misc_feature: MA Experiment 20001247 PARAMETER Experiment Name: At_Far-red-induction_P Parameter: Timepoint (hr) Value: 1
  misc_feature: MA Experiment 20001247 PARAMETER Experiment Name: At_Far-red-induction_P Parameter: Tissue Value: Whole Plant
  misc_feature: MA Experiment ID: 20001248 Result: Down-regulated in Transcription
  misc_feature: MA Experiment 20001248 PARAMETER Experiment Name: At_Far-red-induction_P Parameter: Age (day) Value: 7
  misc_feature: MA Experiment 20001248 PARAMETER Experiment Name: At_Far-red-induction_P Parameter: Light Value: Far-red vs. White
  misc_feature: MA Experiment 20001248 PARAMETER Experiment Name: At_Far-red-induction_P Parameter: Organism Value: A. thaliana
  misc_feature: MA Experiment 20001248 PARAMETER Experiment Name: At_Far-red-induction_P Parameter: Plant Line Value: Columbia
  misc_feature: MA Experiment 20001248 PARAMETER Experiment Name: At_Far-red-induction_P Parameter: Timepoint (hr) Value: 4
  misc_feature: MA Experiment 20001248 PARAMETER Experiment Name: At_Far-red-induction_P Parameter: Tissue Value: Whole Plant
  misc_feature: MA Experiment ID: 20001450 Result: Down-regulated in Transcription
  misc_feature: MA Experiment 20001450 PARAMETER Experiment Name: At_Far-red-induction_P Parameter: Age (day) Value: 7
  misc_feature: MA Experiment 20001450 PARAMETER Experiment Name: At_Far-red-induction_P Parameter: Light Value: Far-red vs. White
  misc_feature: MA Experiment 20001450 PARAMETER Experiment Name: At_Far-red-induction_P Parameter: Organism Value: A. thaliana
  misc_feature: MA Experiment 20001450 PARAMETER Experiment Name: At_Far-red-induction_P Parameter: Plant Line Value: Columbia
  misc_feature: MA Experiment 20001450 PARAMETER Experiment Name: At_Far-red-induction_P Parameter: Timepoint (hr) Value: 8
  misc_feature: MA Experiment 20001450 PARAMETER Experiment Name: At_Far-red-induction_P Parameter: Tissue Value: Whole Plant
  misc_feature: MA Experiment ID: 20001451 Result: Down-regulated in Transcription
  misc_feature: MA Experiment 20001451 PARAMETER Experiment Name: At_Far-red-induction_P Parameter: Age (day) Value: 7
  misc_feature: MA Experiment 20001451 PARAMETER Experiment Name: At_Far-red-induction_P Parameter: Light Value: Far-red vs. White
  misc_feature: MA Experiment 20001451 PARAMETER Experiment Name: At_Far-red-induction_P Parameter: Organism Value: A. thaliana
  misc_feature: MA Experiment 20001451 PARAMETER Experiment Name: At_Far-red-induction_P Parameter: Plant Line Value: Columbia
  misc_feature: MA Experiment 20001451 PARAMETER Experiment Name: At_Far-red-induction_P Parameter: Timepoint (hr) Value: 24
  misc_feature: MA Experiment 20001451 PARAMETER Experiment Name: At_Far-red-induction_P Parameter: Tissue Value: Whole Plant
  misc_feature: MA Experiment ID: 20001905 Result: Down-regulated in Transcription
  misc_feature: MA Experiment 20001905 PARAMETER Experiment Name: At_Drought_Reproduction_P Parameter: Age (day) Value: 40
  misc_feature: MA Experiment 20001905 PARAMETER Experiment Name: At_Drought_Reproduction_P Parameter: Organism Value: A. thaliana
  misc_feature: MA Experiment 20001905 PARAMETER Experiment Name: At_Drought_Reproduction_P Parameter: Plant Line Value: WS
  misc_feature: MA Experiment 20001905 PARAMETER Experiment Name: At_Drought_Reproduction_P Parameter: Timepoint (day) Value: 10
  misc_feature: MA Experiment 20001905 PARAMETER Experiment Name: At_Drought_Reproduction_P Parameter: Tissue Value: Rosettes
  misc_feature: MA Experiment 20001905 PARAMETER Experiment Name: At_Drought_Reproduction_P Parameter: Treatment Value: Drought vs. No Drought
  misc_feature: MA Experiment ID: 20001911 Result: Down-regulated in Transcription
  misc_feature: MA Experiment 20001911 PARAMETER Experiment Name: At_Drought_Reproduction_P Parameter: Age (day) Value: 40
  misc_feature: MA Experiment 20001911 PARAMETER Experiment Name: At_Drought_Reproduction_P Parameter: Organism Value: A. thaliana
  misc_feature: MA Experiment 20001911 PARAMETER Experiment Name: At_Drought_Reproduction_P Parameter: Plant Line Value: WS
  misc_feature: MA Experiment 20001911 PARAMETER Experiment Name: At_Drought_Reproduction_P Parameter: Timepoint (day) Value: 10
  misc_feature: MA Experiment 20001911 PARAMETER Experiment Name: At_Drought_Reproduction_P Parameter: Tissue Value: Flowers
  misc_feature: MA Experiment 20001911 PARAMETER Experiment Name: At_Drought_Reproduction_P Parameter: Treatment Value: Drought vs. No Drought
atcacagatttggacttttcttggttatattaaagttttttttgtccatatattcaatgaccaatctagaattcatctgtttttgaactaacccaacactaaagaaatagatccaaaggcctctctcctctctctcgtttttctcatatggttcttgataataatttgaaagaaagatgtcaatgatgagcagaactcgaagcagcatcgccatgggaacaccatctttccttgagttgaagaaacaagcttcatttttcttcaaagagaagcttaaaacggcgcgtttagctctcaccgatgttactcctcttcaactaatgactgaggaagctacggatggtgagtcatgtggaccaaatacacaaaccttagggtccatttcaaaggctgcttttgagtttgaagattacttggcgattgttgaagtcttgcacaaaagattggcaaagttcgataagagaaactggaggatggcttataactcactaatagttgttgagcatttactcactcatggaccagagagtgtttccgatgagtttcaaggtgatatagatgttatctcccaaatgcaaaccttccaacagattgacgagaaagggtttaattggggattagctgttagaaagaaagcagagaaggttttaaagctacttgagaaaggggaattacttaaggaagaaaggaagcgagctcgtgagctgtctcgagggattcaaggtttcggtagctttaaccacaagtcttcatctcattctttgtcagagcatgaagtcttacaagaatctacagtctataggaaatgtaattccaattttaccaagaattacgatgaggatgaccaagagaacactatggtttctcctaatgacgccaacctttttcctcagccgctggtagctgacccgagcgaggaatctaggacgggtatgaaagaaaatatggatcctgaagatgatgagaacacagaggtaaacccacttttgggttttagtaaaaaggagggtcaagaactagccggagaagacgagaaccatccatttacggatggcgagagtaagcatacagtagtcttgcttgatgagaacacagattaaattttaattacgtgatatcgcaatctgtataagagaaaaaacacgagaagaagataatgtgtgtataccaatatgtatacatatctacaataataacacttctgtt

SEQ ID NO: 102729 - protein, 307 aa, Arabidopsis thaliana; identical to SEQ ID NO: 40556
  peptide (1)..(307): Ceres Seq. ID no. 13611105
  misc_feature (43)..(167): Pfam Name: ENTH domain Pfam Description: ENTH domain
  misc_feature (1)..(307): Homolog of NCBI NO: 15231451 NR Description: expressed protein [Arabidopsis thaliana]
  misc_feature (1)..(307): Homolog of NCBI NO: 21536910 NR Description: unknown [Arabidopsis thaliana]
  misc_feature (17)..(143): Homolog of NCBI NO: 34908158 NR Description: P0408C03.22 [Oryza sativa (japonica
  misc_feature (144)..(229): Homolog of NCBI NO: 34908158 NR Description: P0408C03.22 [Oryza sativa (japonica
  misc_feature (13)..(207): Homolog of NCBI NO: 22329424 NR Description: expressed protein [Arabidopsis thaliana]
  misc_feature (13)..(235): Homolog of NCBI NO: 11994320 NR Description: gene_id:MLM24.8~unknown protein [Arabidopsis
  misc_feature (80)..(207): Homolog of NCBI NO: 7485982 NR Description: hypothetical protein F22O13.16 - Arabidopsis
  misc_feature (13)..(49): Homolog of NCBI NO: 7485982 NR Description: hypothetical protein F22O13.16 - Arabidopsis
  misc_feature (30)..(266): Homolog of NCBI NO: 6322585 NR Description: epsin N-terminal homology-containing protein; [Saccharomyces cerevisiae] >gi|1352925|sp|P47160|YJ95_YEAST
  misc_feature (30)..(176): Homolog of NCBI NO: 20345123 NR Description: similar to enthoprotin; epsin 4 [Homo sapiens]

SEQ ID NO: 102730 - protein, 305 aa, Arabidopsis thaliana; identical to SEQ ID NO: 40557
  peptide (1)..(305): Ceres Seq. ID no. 13611106
  misc_feature (41)..(165): Pfam Name: ENTH domain Pfam Description: ENTH domain
  misc_feature (1)..(305): Homolog of NCBI NO: 15231451 NR Description: expressed protein [Arabidopsis thaliana]
  misc_feature (1)..(305): Homolog of NCBI NO: 21536910 NR Description: unknown [Arabidopsis thaliana]
  misc_feature (15)..(141): Homolog of NCBI NO: 34908158 NR Description: P0408C03.22 [Oryza sativa (japonica
  misc_feature (142)..(227): Homolog of NCBI NO: 34908158 NR Description: P0408C03.22 [Oryza sativa (japonica
  misc_feature (11)..(205): Homolog of NCBI NO: 22329424 NR Description: expressed protein [Arabidopsis thaliana]
  misc_feature (11)..(233): Homolog of NCBI NO: 11994320 NR Description: gene_id:MLM24.8~unknown protein [Arabidopsis
  misc_feature (78)..(205): Homolog of NCBI NO: 7485982 NR Description: hypothetical protein F22O13.16 - Arabidopsis
  misc_feature (11)..(47): Homolog of NCBI NO: 7485982 NR Description: hypothetical protein F22O13.16 - Arabidopsis
  misc_feature (28)..(264): Homolog of NCBI NO: 6322585 NR Description: epsin N-terminal homology-containing protein; [Saccharomyces cerevisiae] >gi|1352925|sp|P47160|YJ95_YEAST
  misc_feature (28)..(174): Homolog of NCBI NO: 20345123 NR Description: similar to enthoprotin; epsin 4 [Homo sapiens]

SEQ ID NO: 102731 - protein, 304 aa, Arabidopsis thaliana; identical to SEQ ID NO: 40558
  peptide (1)..(304): Ceres Seq. ID no. 13611107
  misc_feature (40)..(164): Pfam Name: ENTH domain Pfam Description: ENTH domain
  misc_feature (1)..(304): Homolog of NCBI NO: 15231451 NR Description: expressed protein [Arabidopsis thaliana]
  misc_feature (1)..(304): Homolog of NCBI NO: 21536910 NR Description: unknown [Arabidopsis thaliana]
  misc_feature (14)..(140): Homolog of NCBI NO: 34908158 NR Description: P0408C03.22 [Oryza sativa (japonica
  misc_feature (141)..(226): Homolog of NCBI NO: 34908158 NR Description: P0408C03.22 [Oryza sativa (japonica
  misc_feature (10)..(204): Homolog of NCBI NO: 22329424 NR Description: expressed protein [Arabidopsis thaliana]
  misc_feature (10)..(232): Homolog of NCBI NO: 11994320 NR Description: gene_id:MLM24.8~unknown protein [Arabidopsis
  misc_feature (77)..(204): Homolog of NCBI NO: 7485982 NR Description: hypothetical protein F22O13.16 - Arabidopsis
  misc_feature (10)..(46): Homolog of NCBI NO: 7485982 NR Description: hypothetical protein F22O13.16 - Arabidopsis
  misc_feature (27)..(263): Homolog of NCBI NO: 6322585 NR Description: epsin N-terminal homology-containing protein; [Saccharomyces cerevisiae] >gi|1352925|sp|P47160|YJ95_YEAST
  misc_feature (27)..(173): Homolog of NCBI NO: 20345123 NR Description: similar to enthoprotin; epsin 4 [Homo sapiens]

SEQ ID NO: 102732 - DNA, 496 bp, Arabidopsis thaliana
  misc_feature (1)..(496): Ceres Seq. ID no. 13611108
  misc_feature: MA Experiment ID: 108434 Result: Up-regulated in Transcription
  misc_feature: MA Experiment 108434 PARAMETER Experiment Name: At_Root_Tips_cDNA_P Parameter: Tissue Value: Root Tips
  misc_feature: MA Experiment ID: 108462 Result: Down-regulated in Transcription
  misc_feature: MA Experiment 108462 PARAMETER Experiment Name: At_Germinating_Seeds_cDNA_P Parameter: Age (day) Value: 2 vs. 0
  misc_feature: MA Experiment 108462 PARAMETER Experiment Name: At_Germinating_Seeds_cDNA_P Parameter: Tissue Value: Germinating Seeds
  misc_feature: MA Experiment ID: 108463 Result: Down-regulated in Transcription
  misc_feature: MA Experiment 108463 PARAMETER Experiment Name: At_Germinating_Seeds_cDNA_P Parameter: Age (day) Value: 3 vs. 0
  misc_feature: MA Experiment 108463 PARAMETER Experiment Name: At_Germinating_Seeds_cDNA_P Parameter: Tissue Value: Germinating Seeds
  misc_feature: MA Experiment ID: 108464 Result: Down-regulated in Transcription
  misc_feature: MA Experiment 108464 PARAMETER Experiment Name: At_Germinating_Seeds_cDNA_P Parameter: Age (day) Value: 4 vs. 0
  misc_feature: MA Experiment 108464 PARAMETER Experiment Name: At_Germinating_Seeds_cDNA_P Parameter: Tissue Value: Germinating Seeds
  misc_feature: MA Experiment ID: 108573 Result: Down-regulated in Transcription
  misc_feature: MA Experiment 108573 PARAMETER Experiment Name: At_Drought_cDNA_P Parameter: Timepoint (hr) Value: 6
  misc_feature: MA Experiment 108573 PARAMETER Experiment Name: At_Drought_cDNA_P Parameter: Tissue Value: Aerial
  misc_feature: MA Experiment 108573 PARAMETER Experiment Name: At_Drought_cDNA_P Parameter: Treatment Value: Drought vs. No Drought
  misc_feature: MA Experiment ID: 20000111 Result: Down-regulated in Transcription
  misc_feature: MA Experiment 20000111 PARAMETER Experiment Name: At_42deg_Heat_cDNA_P Parameter: Temperature (deg C) Value: 42 vs. 22
  misc_feature: MA Experiment 20000111 PARAMETER Experiment Name: At_42deg_Heat_cDNA_P Parameter: Timepoint (hr) Value: 6
  misc_feature: MA Experiment 20000111 PARAMETER Experiment Name: At_42deg_Heat_cDNA_P Parameter: Tissue Value: Aerial
  misc_feature: MA Experiment ID: 20000224 Result: Down-regulated in Transcription
  misc_feature: MA Experiment ID: 20000234 Result: Up-regulated in Transcription
  misc_feature: MA Experiment 20000234 PARAMETER Experiment Name: At_Siliques_P Parameter: Age (day) Value: 21
  misc_feature: MA Experiment 20000234 PARAMETER Experiment Name: At_Siliques_P Parameter: Organism Value: A. thaliana
  misc_feature: MA Experiment 20000234 PARAMETER Experiment Name: At_Siliques_P Parameter: Plant Line Value: WS
  misc_feature: MA Experiment 20000234 PARAMETER Experiment Name: At_Siliques_P Parameter: Tissue Value: Less Than 5mm Siliques vs. Whole Plant
  misc_feature: MA Experiment ID: 20000264 Result: Up-regulated in Transcription
  misc_feature: MA Experiment 20000264 PARAMETER Experiment Name: At_Open_Flower_P Parameter: Age (day) Value: 21
  misc_feature: MA Experiment 20000264 PARAMETER Experiment Name: At_Open_Flower_P Parameter: Plant Line Value: WS
  misc_feature: MA Experiment 20000264 PARAMETER Experiment Name: At_Open_Flower_P Parameter: Tissue Value: Open Flower vs. Whole Plant
  misc_feature: MA Experiment ID: 20000265 Result: Up-regulated in Transcription
  misc_feature: MA Experiment 20000265 PARAMETER Experiment Name: At_Open_Flower_P Parameter: Age (day) Value: 21
  misc_feature: MA Experiment 20000265 PARAMETER Experiment Name: At_Open_Flower_P Parameter: Plant Line Value: WS
  misc_feature: MA Experiment 20000265 PARAMETER Experiment Name: At_Open_Flower_P Parameter: Tissue Value: Closed Flower vs. Whole Plant
  misc_feature: MA Experiment ID: 20001247 Result: Down-regulated in Transcription
  misc_feature: MA Experiment 20001247 PARAMETER Experiment Name: At_Far-red-induction_P Parameter: Age (day) Value: 7
  misc_feature: MA Experiment 20001247 PARAMETER Experiment Name: At_Far-red-induction_P Parameter: Light Value: Far-red vs. White
  misc_feature: MA Experiment 20001247 PARAMETER Experiment Name: At_Far-red-induction_P Parameter: Organism Value: A. thaliana
  misc_feature: MA Experiment 20001247 PARAMETER Experiment Name: At_Far-red-induction_P Parameter: Plant Line Value: Columbia
  misc_feature: MA Experiment 20001247 PARAMETER Experiment Name: At_Far-red-induction_P Parameter: Timepoint (hr) Value: 1
  misc_feature: MA Experiment 20001247 PARAMETER Experiment Name: At_Far-red-induction_P Parameter: Tissue Value: Whole Plant
  misc_feature: MA Experiment ID: 20001560 Result: Up-regulated in Transcription
  misc_feature: MA Experiment 20001560 PARAMETER Experiment Name: At_Drought_Soil_Dry_P Parameter: Age (day) Value: 28
  misc_feature: MA Experiment 20001560 PARAMETER Experiment Name: At_Drought_Soil_Dry_P Parameter: Organism Value: A. thaliana
  misc_feature: MA Experiment 20001560 PARAMETER Experiment Name: At_Drought_Soil_Dry_P Parameter: Plant Line Value: WS
  misc_feature: MA Experiment 20001560 PARAMETER Experiment Name: At_Drought_Soil_Dry_P Parameter: Post Timepoint (hr) Value: None
  misc_feature: MA Experiment 20001560 PARAMETER Experiment Name: At_Drought_Soil_Dry_P Parameter: Post-Treatment Value: None
  misc_feature: MA Experiment 20001560 PARAMETER Experiment Name: At_Drought_Soil_Dry_P Parameter: Timepoint (day) Value: 14
  misc_feature: MA Experiment 20001560 PARAMETER Experiment Name: At_Drought_Soil_Dry_P Parameter: Treatment Value: Drought vs. No Drought
  misc_feature: MA Experiment ID: 20001911 Result: Down-regulated in Transcription
  misc_feature: MA Experiment 20001911 PARAMETER Experiment Name: At_Drought_Reproduction_P Parameter: Age (day) Value: 40
  misc_feature: MA Experiment 20001911 PARAMETER Experiment Name: At_Drought_Reproduction_P Parameter: Organism Value: A. thaliana
  misc_feature: MA Experiment 20001911 PARAMETER Experiment Name: At_Drought_Reproduction_P Parameter: Plant Line Value: WS
  misc_feature: MA Experiment 20001911 PARAMETER Experiment Name: At_Drought_Reproduction_P Parameter: Timepoint (day) Value: 10
  misc_feature: MA Experiment 20001911 PARAMETER Experiment Name: At_Drought_Reproduction_P Parameter: Tissue Value: Flowers
  misc_feature: MA Experiment 20001911 PARAMETER Experiment Name: At_Drought_Reproduction_P Parameter: Treatment Value: Drought vs. No Drought
atgaagaattgaatctgtagtcgaaagaaaagagttgggaaaaaaatggacgcaagcatgatggctggacttgatggtcttcctgaagaagacaaagccaaaatggcctccatgatcgatcagcttcagctccgtgatagtttgaggatgtacaattcattggtggagaggtgtttcgtggactgtgttgatagcttcacacgcaaatctctgcagaaacaagaggagacttgtgtgatgcgttgcgctgagaagttccttaagcatacgatgcgtgttggtatgcggtttgctgagctcaatcagaacgcaccaacccaagactgatatagtctgctttttctgtttggttttttcgtacggtttacgagtccgaaaccagaataaaccggttgttagttgttcaggttactactccgatactgttttttgaacatcttgtactgtgaaattattttgactgtatccagttctgatattgatattgacttgtatt

SEQ ID NO: 102733 - protein, 93 aa, Arabidopsis thaliana; identical to SEQ ID NO: 28221
  peptide (1)..(93): Ceres Seq. ID no. 13611109
  misc_feature (20)..(85): Pfam Name: Tim10/DDP family zinc finger Pfam Description: Tim10/DDP family zinc finger
  misc_feature (1)..(93): Homolog of NCBI NO: 15231455 NR Description: small zinc finger-related protein TIM9 thaliana] >gi|12643936|sp|Q9XGX9|IM09_ARATH Mitochondrial import
  misc_feature (1)..(93): Homolog of NCBI NO: 21617942 NR Description: mitochondrial import inner membrane translocase
  misc_feature (1)..(92): Homolog of NCBI NO: 5107210 NR Description: small zinc finger-like protein [Arabidopsis
  misc_feature (1)..(92): Homolog of NCBI NO: 11358850 NR Description: small zinc finger-like protein [imported] -
  misc_feature (1)..(93): Homolog of NCBI NO: 12230181 NR Description: Mitochondrial import inner membrane translocase
  misc_feature (1)..(93): Homolog of NCBI NO: 12230182 NR Description: Mitochondrial import inner membrane translocase
  misc_feature (9)..(86): Homolog of NCBI NO: 6320815 NR Description: Translocase in inner membrane of mitochondria
  misc_feature (9)..(86): Homolog of NCBI NO: 12230144 NR Description: Mitochondrial import inner membrane translocase Tim9 >gi|10444070|gb|AAG17695.1| mitochondrial inner membrane
  misc_feature (9)..(86): Homolog of NCBI NO: 12230194 NR Description: Mitochondrial import inner membrane translocase
  misc_feature (9)..(86): Homolog of NCBI NO: 19075508 NR Description: similar to yeast Tim9p essential component of the import machinery; required for transfer of hydrophobic inner carrier proteins across the intermembrane space

SEQ ID NO: 102734 - protein, 89 aa, Arabidopsis thaliana; identical to SEQ ID NO: 28222
  peptide (1)..(89): Ceres Seq. ID no. 13611110
  misc_feature (16)..(81): Pfam Name: Tim10/DDP family zinc finger Pfam Description: Tim10/DDP family zinc finger
  misc_feature (1)..(89): Homolog of NCBI NO: 15231455 NR Description: small zinc finger-related protein TIM9 thaliana] >gi|12643936|sp|Q9XGX9|IM09_ARATH Mitochondrial import
  misc_feature (1)..(89): Homolog of NCBI NO: 21617942 NR Description: mitochondrial import inner membrane translocase
  misc_feature (1)..(88): Homolog of NCBI NO: 5107210 NR Description: small zinc finger-like protein [Arabidopsis
  misc_feature (1)..(88): Homolog of NCBI NO: 11358850 NR Description: small zinc finger-like protein [imported] -
  misc_feature (1)..(89): Homolog of NCBI NO: 12230181 NR Description: Mitochondrial import inner membrane translocase
  misc_feature (1)..(89): Homolog of NCBI NO: 12230182 NR Description: Mitochondrial import inner membrane translocase
  misc_feature (5)..(82): Homolog of NCBI NO: 6320815 NR Description: Translocase in inner membrane of mitochondria
  misc_feature (5)..(82): Homolog of NCBI NO: 12230144 NR Description: Mitochondrial import inner membrane translocase Tim9 >gi|10444070|gb|AAG17695.1| mitochondrial inner membrane
  misc_feature (5)..(82): Homolog of NCBI NO: 12230194 NR Description: Mitochondrial import inner membrane translocase
  misc_feature (5)..(82): Homolog of NCBI NO: 19075508 NR Description: similar to yeast Tim9p essential component of the import machinery; required for transfer of hydrophobic inner carrier proteins across the intermembrane space

SEQ ID NO: 102735 - protein, 88 aa, Arabidopsis thaliana; identical to SEQ ID NO: 28223
  peptide (1)..(88): Ceres Seq. ID no. 13611111
  misc_feature (15)..(80): Pfam Name: Tim10/DDP family zinc finger Pfam Description: Tim10/DDP family zinc finger
  misc_feature (1)..(88): Homolog of NCBI NO: 15231455 NR Description: small zinc finger-related protein TIM9 thaliana] >gi|12643936|sp|Q9XGX9|IM09_ARATH Mitochondrial import
  misc_feature (1)..(88): Homolog of NCBI NO: 21617942 NR Description: mitochondrial import inner membrane translocase
  misc_feature (1)..(87): Homolog of NCBI NO: 5107210 NR Description: small zinc finger-like protein [Arabidopsis
  misc_feature (1)..(87): Homolog of NCBI NO: 11358850 NR Description: small zinc finger-like protein [imported] -
  misc_feature (1)..(88): Homolog of NCBI NO: 12230181 NR Description: Mitochondrial import inner membrane translocase
  misc_feature (1)..(88): Homolog of NCBI NO: 12230182 NR Description: Mitochondrial import inner membrane translocase
  misc_feature (4)..(81): Homolog of NCBI NO: 6320815 NR Description: Translocase in inner membrane of mitochondria
  misc_feature (4)..(81): Homolog of NCBI NO: 12230144 NR Description: Mitochondrial import inner membrane translocase Tim9 >gi|10444070|gb|AAG17695.1| mitochondrial inner membrane
  misc_feature (4)..(81): Homolog of NCBI NO: 12230194 NR Description: Mitochondrial import inner membrane translocase
  misc_feature (4)..(81): Homolog of NCBI NO: 19075508 NR Description: similar to yeast Tim9p essential component of the import machinery; required for transfer of hydrophobic inner carrier proteins across the intermembrane space

SEQ ID NO: 102736 - DNA, 1740 bp, Arabidopsis thaliana
  misc_feature (1)..(1740): Ceres Seq. ID no. 13611120
  misc_feature: MA Experiment ID: 108434 Result: Down-regulated in Transcription
  misc_feature: MA Experiment 108434 PARAMETER Experiment Name: At_Root_Tips_cDNA_P Parameter: Tissue Value: Root Tips
  misc_feature: MA Experiment ID: 108435 Result: Down-regulated in Transcription
  misc_feature: MA Experiment 108435 PARAMETER Experiment Name: At_stm_Mutants_cDNA_P Parameter: Plant Line Value: wt Landsburg vs stm
  misc_feature: MA Experiment 108435 PARAMETER Experiment Name: At_stm_Mutants_cDNA_P Parameter: Tissue Value: Shoot Apical Meristem Region
  misc_feature: MA Experiment ID: 108461 Result: Up-regulated in Transcription
  misc_feature: MA Experiment 108461 PARAMETER Experiment Name: At_Germinating_Seeds_cDNA_P Parameter: Age (day) Value: 1 vs. 0
  misc_feature: MA Experiment 108461 PARAMETER Experiment Name: At_Germinating_Seeds_cDNA_P Parameter: Tissue Value: Germinating Seeds
  misc_feature: MA Experiment ID: 108462 Result: Up-regulated in Transcription
  misc_feature: MA Experiment 108462 PARAMETER Experiment Name: At_Germinating_Seeds_cDNA_P Parameter: Age (day) Value: 2 vs. 0
  misc_feature: MA Experiment 108462 PARAMETER Experiment Name: At_Germinating_Seeds_cDNA_P Parameter: Tissue Value: Germinating Seeds
  misc_feature: MA Experiment ID: 108463 Result: Up-regulated in Transcription
  misc_feature: MA Experiment 108463 PARAMETER Experiment Name: At_Germinating_Seeds_cDNA_P Parameter: Age (day) Value: 3 vs. 0
  misc_feature: MA Experiment 108463 PARAMETER Experiment Name: At_Germinating_Seeds_cDNA_P Parameter: Tissue Value: Germinating Seeds
  misc_feature: MA Experiment ID: 108464 Result: Up-regulated in Transcription
  misc_feature: MA Experiment 108464 PARAMETER Experiment Name: At_Germinating_Seeds_cDNA_P Parameter: Age (day) Value: 4 vs. 0
  misc_feature: MA Experiment 108464 PARAMETER Experiment Name: At_Germinating_Seeds_cDNA_P Parameter: Tissue Value: Germinating Seeds
  misc_feature: MA Experiment ID: 108474 Result: Up-regulated in Transcription
  misc_feature: MA Experiment 108474 PARAMETER Experiment Name: At_Drought_Flowers_cDNA_P Parameter: Timepoint (hr) Value: null
  misc_feature: MA Experiment 108474 PARAMETER Experiment Name: At_Drought_Flowers_cDNA_P Parameter: Treatment Value: Drought vs. No Drought
  misc_feature: MA Experiment ID: 108595 Result: Down-regulated in Transcription
  misc_feature: MA Experiment 108595 PARAMETER Experiment Name: At_Ler-pi_Ovule_cDNA_P Parameter: Plant Line Value: null
  misc_feature: MA Experiment ID: 108668 Result: Down-regulated in Transcription
  misc_feature: MA Experiment 108668 PARAMETER Experiment Name: At_2mM_SA_cDNA_P Parameter: Plant Line Value: WS
  misc_feature: MA Experiment 108668 PARAMETER Experiment Name: At_2mM_SA_cDNA_P Parameter: Timepoint (hr) Value: 6
  misc_feature: MA Experiment 108668 PARAMETER Experiment Name: At_2mM_SA_cDNA_P Parameter: Treatment Value: 2mM SA vs. No Treatment
  misc_feature: MA Experiment ID: 20000069 Result: Down-regulated in Transcription
  misc_feature: MA Experiment 20000069 PARAMETER Experiment Name: At_100uM_ABA_Mutants_cDNA_P Parameter: Plant Line Value: CS23
  misc_feature: MA Experiment 20000069 PARAMETER Experiment Name: At_100uM_ABA_Mutants_cDNA_P Parameter: Timepoint (hr) Value: 6
  misc_feature: MA Experiment 20000069 PARAMETER Experiment Name: At_100uM_ABA_Mutants_cDNA_P Parameter: Tissue Value: Aerial
  misc_feature: MA Experiment 20000069 PARAMETER Experiment Name: At_100uM_ABA_Mutants_cDNA_P Parameter: Treatment Value: 100uM ABA vs. No Treatment
  misc_feature: MA Experiment ID: 20000070 Result: Down-regulated in Transcription
  misc_feature: MA Experiment 20000070 PARAMETER Experiment Name: At_100uM_ABA_Mutants_cDNA_P Parameter: Plant Line Value: CS24
  misc_feature: MA Experiment 20000070 PARAMETER Experiment Name: At_100uM_ABA_Mutants_cDNA_P Parameter: Timepoint (hr) Value: 6
  misc_feature: MA Experiment 20000070 PARAMETER Experiment Name: At_100uM_ABA_Mutants_cDNA_P Parameter: Tissue Value: Aerial
  misc_feature: MA Experiment 20000070 PARAMETER Experiment Name: At_100uM_ABA_Mutants_cDNA_P Parameter: Treatment Value: 100uM ABA vs. No Treatment
  misc_feature: MA Experiment ID: 20000071 Result: Down-regulated in Transcription
  misc_feature: MA Experiment 20000071 PARAMETER Experiment Name: At_100uM_ABA_Mutants_cDNA_P Parameter: Plant Line Value: CS8104
  misc_feature: MA Experiment 20000071 PARAMETER Experiment Name: At_100uM_ABA_Mutants_cDNA_P Parameter: Timepoint (hr) Value: 6
  misc_feature: MA Experiment 20000071 PARAMETER Experiment Name: At_100uM_ABA_Mutants_cDNA_P Parameter: Tissue Value: Aerial
  misc_feature: MA Experiment 20000071 PARAMETER Experiment Name: At_100uM_ABA_Mutants_cDNA_P Parameter: Treatment Value: 100uM ABA vs. No Treatment
  misc_feature: MA Experiment ID: 20000072 Result: Down-regulated in Transcription
  misc_feature: MA Experiment 20000072 PARAMETER Experiment Name: At_100uM_ABA_Mutants_cDNA_P Parameter: Plant Line Value: CS8105
  misc_feature: MA Experiment 20000072 PARAMETER Experiment Name: At_100uM_ABA_Mutants_cDNA_P Parameter: Timepoint (hr) Value: 6
  misc_feature: MA Experiment 20000072 PARAMETER Experiment Name: At_100uM_ABA_Mutants_cDNA_P Parameter: Tissue Value: Aerial
  misc_feature: MA Experiment 20000072 PARAMETER Experiment Name: At_100uM_ABA_Mutants_cDNA_P Parameter: Treatment Value: 100uM ABA vs. No Treatment
  misc_feature: MA Experiment ID: 20000087 Result: Down-regulated in Transcription
  misc_feature: MA Experiment 20000087 PARAMETER Experiment Name: At_100uM_ABA_Mutants_cDNA_P Parameter: Plant Line Value: WS
  misc_feature: MA Experiment 20000087 PARAMETER Experiment Name: At_100uM_ABA_Mutants_cDNA_P Parameter: Timepoint (hr) Value: 6
  misc_feature: MA Experiment 20000087 PARAMETER Experiment Name: At_100uM_ABA_Mutants_cDNA_P Parameter: Tissue Value: Aerial
  misc_feature: MA Experiment 20000087 PARAMETER Experiment Name: At_100uM_ABA_Mutants_cDNA_P Parameter: Treatment Value: 100uM ABA vs. No Treatment
  misc_feature: MA Experiment ID: 20000088 Result: Down-regulated in Transcription
  misc_feature: MA Experiment 20000088 PARAMETER Experiment Name: At_100uM_ABA_Mutants_cDNA_P Parameter: Plant Line Value: Landsberg
  misc_feature: MA Experiment 20000088 PARAMETER Experiment Name: At_100uM_ABA_Mutants_cDNA_P Parameter: Timepoint (hr) Value: 6
  misc_feature: MA Experiment 20000088 PARAMETER Experiment Name: At_100uM_ABA_Mutants_cDNA_P Parameter: Tissue Value: Aerial
  misc_feature: MA Experiment 20000088 PARAMETER Experiment Name: At_100uM_ABA_Mutants_cDNA_P Parameter: Treatment Value: 100uM ABA vs. No Treatment
  misc_feature: MA Experiment ID: 20000090 Result: Down-regulated in Transcription
  misc_feature: MA Experiment ID: 20000111 Result: Down-regulated in Transcription
  misc_feature: MA Experiment 20000111 PARAMETER Experiment Name: At_42deg_Heat_cDNA_P Parameter: Temperature (deg C) Value: 42 vs. 22
  misc_feature: MA Experiment 20000111 PARAMETER Experiment Name: At_42deg_Heat_cDNA_P Parameter: Timepoint (hr) Value: 6
  misc_feature: MA Experiment 20000111 PARAMETER Experiment Name: At_42deg_Heat_cDNA_P Parameter: Tissue Value: Aerial
  misc_feature: MA Experiment ID: 20000113 Result: Down-regulated in Transcription
  misc_feature: MA Experiment 20000113 PARAMETER Experiment Name: At_42deg_Heat_cDNA_P Parameter: Temperature (deg C) Value: 42 vs. 22
  misc_feature: MA Experiment 20000113 PARAMETER Experiment Name: At_42deg_Heat_cDNA_P Parameter: Timepoint (hr) Value: 8
  misc_feature: MA Experiment 20000113 PARAMETER Experiment Name: At_42deg_Heat_cDNA_P Parameter: Tissue Value: Aerial
  misc_feature: MA Experiment ID: 20000117 Result: Down-regulated in Transcription
  misc_feature: MA Experiment 20000117 PARAMETER Experiment Name: At_100uM_ABA_Mutants_cDNA_P Parameter: Plant Line Value: Columbia
  misc_feature: MA Experiment 20000117 PARAMETER Experiment Name: At_100uM_ABA_Mutants_cDNA_P Parameter: Timepoint (hr) Value: 6
  misc_feature: MA Experiment 20000117 PARAMETER Experiment Name: At_100uM_ABA_Mutants_cDNA_P Parameter: Tissue Value: Aerial
  misc_feature: MA Experiment 20000117 PARAMETER Experiment Name: At_100uM_ABA_Mutants_cDNA_P Parameter: Treatment Value: 100uM ABA vs. No Treatment
  misc_feature: MA Experiment ID: 20000180 Result: Up-regulated in Transcription
  misc_feature: MA Experiment 20000180 PARAMETER Experiment Name: At_Germinating_Seeds_P Parameter: Age (hr) Value: 24 vs. 0
  misc_feature: MA Experiment 20000180 PARAMETER Experiment Name: At_Germinating_Seeds_P Parameter: Tissue Value: Germinating Seeds
  misc_feature: MA Experiment ID: 20000185 Result: Down-regulated in Transcription
  misc_feature: MA Experiment 20000185 PARAMETER Experiment Name: At_Roots__P Parameter: Age (day) Value: 7 vs. 21
  misc_feature: MA Experiment 20000185 PARAMETER Experiment Name: At_Roots__P Parameter: Organism Value: A. thaliana
  misc_feature: MA Experiment 20000185 PARAMETER Experiment Name: At_Roots__P Parameter: Tissue Value: Roots vs. Whole Plant
  misc_feature: MA Experiment ID: 20000264 Result: Down-regulated in Transcription
  misc_feature: MA Experiment 20000264 PARAMETER Experiment Name: At_Open_Flower_P Parameter: Age (day) Value: 21
  misc_feature: MA Experiment 20000264 PARAMETER Experiment Name: At_Open_Flower_P Parameter: Plant Line Value: WS
  misc_feature: MA Experiment 20000264 PARAMETER Experiment Name: At_Open_Flower_P Parameter: Tissue Value: Open Flower vs. Whole Plant
  misc_feature: MA Experiment ID: 20000286 Result: Down-regulated in Transcription
  misc_feature: MA Experiment 20000286 PARAMETER Experiment Name: At_Open_Flower_P Parameter: Age (day) Value: 21
  misc_feature: MA Experiment 20000286 PARAMETER Experiment Name: At_Open_Flower_P Parameter: Plant Line Value: WS
  misc_feature: MA Experiment 20000286 PARAMETER Experiment Name: At_Open_Flower_P Parameter: Tissue Value: Half Open vs. Whole Plant
  misc_feature: MA Experiment ID: 20000437 Result: Down-regulated in Transcription
  misc_feature: MA Experiment 20000437 PARAMETER Experiment Name: At_Drought_P Parameter: Age (day) Value: 8
  misc_feature: MA Experiment 20000437 PARAMETER Experiment Name: At_Drought_P Parameter: Organism Value: A. thaliana
  misc_feature: MA Experiment 20000437 PARAMETER Experiment Name: At_Drought_P Parameter: Plant Line Value: WS
  misc_feature: MA Experiment 20000437 PARAMETER Experiment Name: At_Drought_P Parameter: Timepoint (hr) Value: 24
  misc_feature: MA Experiment 20000437 PARAMETER Experiment Name: At_Drought_P Parameter: Tissue Value: Whole Plant
  misc_feature: MA Experiment 20000437 PARAMETER Experiment Name: At_Drought_P Parameter: Treatment Value: Drought vs. No Drought
  misc_feature: MA Experiment ID: 20000438 Result: Up-regulated in Transcription
  misc_feature: MA Experiment 20000438 PARAMETER Experiment Name: At_Shoots__P Parameter: Age (day) Value: 14
  misc_feature: MA Experiment 20000438 PARAMETER Experiment Name: At_Shoots__P Parameter: Tissue Value: Shoots vs. Whole Plant
  misc_feature: MA Experiment ID: 20000439 Result: Down-regulated in Transcription
  misc_feature: MA Experiment 20000439 PARAMETER Experiment Name: At_Roots__P Parameter: Age (day) Value: 14 vs. 21
  misc_feature: MA Experiment 20000439 PARAMETER Experiment Name: At_Roots__P Parameter: Organism Value: A. thaliana
  misc_feature: MA Experiment 20000439 PARAMETER Experiment Name: At_Roots__P Parameter: Tissue Value: Roots vs. Whole Plant
  misc_feature: MA Experiment ID: 20000573 Result: Down-regulated in Transcription
  misc_feature: MA Experiment 20000573 PARAMETER Experiment Name: At_100uM_ABA_Mutants__P Parameter: Organism Value: A. thaliana
  misc_feature: MA Experiment 20000573 PARAMETER Experiment Name: At_100uM_ABA_Mutants__P Parameter: Plant Line Value: CS22 vs. Ler wt
  misc_feature: MA Experiment 20000573 PARAMETER Experiment Name: At_100uM_ABA_Mutants__P Parameter: Timepoint (hr) Value: N/A
  misc_feature: MA Experiment 20000573 PARAMETER Experiment Name: At_100uM_ABA_Mutants__P Parameter: Tissue Value: Whole Plant
  misc_feature: MA Experiment 20000573 PARAMETER Experiment Name: At_100uM_ABA_Mutants__P Parameter: Treatment Value: None
  misc_feature: MA Experiment ID: 20000794 Result: Down-regulated in Transcription
  misc_feature: MA Experiment 20000794 PARAMETER Experiment Name: At_Petals_P Parameter: Age (day) Value: 23-25 days
  misc_feature: MA Experiment 20000794 PARAMETER Experiment Name: At_Petals_P Parameter: Plant Line Value: WS
  misc_feature: MA Experiment 20000794 PARAMETER Experiment Name: At_Petals_P Parameter: Tissue Value: Petals vs. Whole plant
  misc_feature: MA Experiment ID: 20001555 Result: Down-regulated in Transcription
  misc_feature: MA Experiment 20001555 PARAMETER Experiment Name: At_Drought_Soil_Dry_P Parameter: Age (day) Value: 24
  misc_feature: MA Experiment 20001555 PARAMETER Experiment Name: At_Drought_Soil_Dry_P Parameter: Organism Value: A. thaliana
  misc_feature: MA Experiment 20001555 PARAMETER Experiment Name: At_Drought_Soil_Dry_P Parameter: Plant Line Value: WS
  misc_feature: MA Experiment 20001555 PARAMETER Experiment Name: At_Drought_Soil_Dry_P Parameter: Post Timepoint (hr) Value: None
  misc_feature: MA Experiment 20001555 PARAMETER Experiment Name: At_Drought_Soil_Dry_P Parameter: Post-Treatment Value: None
  misc_feature: MA Experiment 20001555 PARAMETER Experiment Name: At_Drought_Soil_Dry_P Parameter: Timepoint (day) Value: 10
  misc_feature: MA Experiment 20001555 PARAMETER Experiment Name: At_Drought_Soil_Dry_P Parameter: Treatment Value: Drought vs. No Drought
  misc_feature: MA Experiment ID: 20001556 Result: Down-regulated in Transcription
  misc_feature: MA Experiment 20001556 PARAMETER Experiment Name: At_Drought_Soil_Dry_P Parameter: Age (day) Value: 26
  misc_feature: MA Experiment 20001556 PARAMETER Experiment Name: At_Drought_Soil_Dry_P Parameter: Organism Value: A. thaliana
  misc_feature: MA Experiment 20001556 PARAMETER Experiment Name: At_Drought_Soil_Dry_P Parameter: Plant Line Value: WS
  misc_feature: MA Experiment 20001556 PARAMETER Experiment Name: At_Drought_Soil_Dry_P Parameter: Post Timepoint (hr) Value: None
  misc_feature: MA Experiment 20001556 PARAMETER Experiment Name: At_Drought_Soil_Dry_P Parameter: Post-Treatment Value: None
  misc_feature: MA Experiment 20001556 PARAMETER Experiment Name: At_Drought_Soil_Dry_P Parameter: Timepoint (day) Value: 12
  misc_feature: MA Experiment 20001556 PARAMETER Experiment Name: At_Drought_Soil_Dry_P Parameter: Treatment Value: Drought vs. No Drought
  misc_feature: MA Experiment ID: 20001557 Result: Down-regulated in Transcription
  misc_feature: MA Experiment 20001557 PARAMETER Experiment Name: At_Drought_Soil_Dry_P Parameter: Age (day) Value: 27
  misc_feature: MA Experiment 20001557 PARAMETER Experiment Name: At_Drought_Soil_Dry_P Parameter: Organism Value: A. thaliana
  misc_feature: MA Experiment 20001557 PARAMETER Experiment Name: At_Drought_Soil_Dry_P Parameter: Plant Line Value: WS
  misc_feature: MA Experiment 20001557 PARAMETER Experiment Name: At_Drought_Soil_Dry_P Parameter: Post Timepoint (hr) Value: 3
  misc_feature: MA Experiment 20001557 PARAMETER Experiment Name: At_Drought_Soil_Dry_P Parameter: Post-Treatment Value: Re-Water vs. No Drought
  misc_feature: MA Experiment 20001557 PARAMETER Experiment Name: At_Drought_Soil_Dry_P Parameter: Timepoint (day) Value: 13
  misc_feature: MA Experiment 20001557 PARAMETER Experiment Name: At_Drought_Soil_Dry_P Parameter: Treatment Value: Drought vs. No Drought
  misc_feature: MA Experiment ID: 20001558 Result: Down-regulated in Transcription
  misc_feature: MA Experiment 20001558 PARAMETER Experiment Name: At_Drought_Soil_Dry_P Parameter: Age (day) Value: 27
  misc_feature: MA Experiment 20001558 PARAMETER Experiment Name: At_Drought_Soil_Dry_P Parameter: Organism Value: A. thaliana
  misc_feature: MA Experiment 20001558 PARAMETER Experiment Name: At_Drought_Soil_Dry_P Parameter: Plant Line Value: WS
  misc_feature: MA Experiment 20001558 PARAMETER Experiment Name: At_Drought_Soil_Dry_P Parameter: Post Timepoint (hr) Value: 6
  misc_feature: MA Experiment 20001558 PARAMETER Experiment Name: At_Drought_Soil_Dry_P Parameter: Post-Treatment Value: Re-Water vs. No Drought
  misc_feature: MA Experiment 20001558 PARAMETER Experiment Name: At_Drought_Soil_Dry_P Parameter: Timepoint (day) Value: 13
  misc_feature: MA Experiment 20001558 PARAMETER Experiment Name: At_Drought_Soil_Dry_P Parameter: Treatment Value: Drought vs. No Drought
  misc_feature: MA Experiment ID: 20001559 Result: Down-regulated in Transcription
  misc_feature: MA Experiment 20001559 PARAMETER Experiment Name: At_Drought_Soil_Dry_P Parameter: Age (day) Value: 28
  misc_feature: MA Experiment 20001559 PARAMETER Experiment Name: At_Drought_Soil_Dry_P Parameter: Organism Value: A. thaliana
  misc_feature: MA Experiment 20001559 PARAMETER Experiment Name: At_Drought_Soil_Dry_P Parameter: Plant Line Value: WS
  misc_feature: MA Experiment 20001559 PARAMETER Experiment Name: At_Drought_Soil_Dry_P Parameter: Post Timepoint (hr) Value: 29
  misc_feature: MA Experiment 20001559 PARAMETER Experiment Name: At_Drought_Soil_Dry_P Parameter: Post-Treatment Value: Re-Water vs. No Drought
  misc_feature: MA Experiment 20001559 PARAMETER Experiment Name: At_Drought_Soil_Dry_P Parameter: Timepoint (day) Value: 14
  misc_feature: MA Experiment 20001559 PARAMETER Experiment Name: At_Drought_Soil_Dry_P Parameter: Treatment Value: Drought vs. No Drought
  misc_feature: MA Experiment ID: 20001757 Result: Up-regulated in Transcription
  misc_feature: MA Experiment 20001757 PARAMETER Experiment Name: At_50mM_NH4NO3_L-to-H_P Parameter: Timepoint (hr) Value: 6
  misc_feature: MA Experiment 20001757 PARAMETER Experiment Name: At_50mM_NH4NO3_L-to-H_P Parameter: Tissue Value: Leaf
  misc_feature: MA Experiment 20001757 PARAMETER Experiment Name: At_50mM_NH4NO3_L-to-H_P Parameter: Treatment Value: 50mM NH4NO3 vs 100mM Mannitol
  misc_feature: MA Experiment ID: 20001904 Result: Down-regulated in Transcription
  misc_feature: MA Experiment 20001904 PARAMETER Experiment Name: At_Drought_Reproduction_P Parameter: Age (day) Value: 37
  misc_feature: MA Experiment 20001904 PARAMETER Experiment Name: At_Drought_Reproduction_P Parameter: Organism Value: A. thaliana
  misc_feature: MA Experiment 20001904 PARAMETER Experiment Name: At_Drought_Reproduction_P Parameter: Plant Line Value: WS
  misc_feature: MA Experiment 20001904 PARAMETER Experiment Name: At_Drought_Reproduction_P Parameter: Timepoint (day) Value: 7
  misc_feature: MA Experiment 20001904 PARAMETER Experiment Name: At_Drought_Reproduction_P Parameter: Tissue Value: Rosettes
  misc_feature: MA Experiment 20001904 PARAMETER Experiment Name: At_Drought_Reproduction_P Parameter: Treatment Value: Drought vs. No Drought
  misc_feature: MA Experiment ID: 20001905 Result: Down-regulated in Transcription
  misc_feature: MA Experiment 20001905 PARAMETER Experiment Name: At_Drought_Reproduction_P Parameter: Age (day) Value: 40
  misc_feature: MA Experiment 20001905 PARAMETER Experiment Name: At_Drought_Reproduction_P Parameter: Organism Value: A. thaliana
  misc_feature: MA Experiment 20001905 PARAMETER Experiment Name: At_Drought_Reproduction_P Parameter: Plant Line Value: WS
  misc_feature: MA Experiment 20001905 PARAMETER Experiment Name: At_Drought_Reproduction_P Parameter: Timepoint (day) Value: 10
  misc_feature: MA Experiment 20001905 PARAMETER Experiment Name: At_Drought_Reproduction_P Parameter: Tissue Value: Rosettes
  misc_feature: MA Experiment 20001905 PARAMETER Experiment Name: At_Drought_Reproduction_P Parameter: Treatment Value: Drought vs. No Drought
  misc_feature: MA Experiment ID: 20001906 Result: Down-regulated in Transcription
  misc_feature: MA Experiment 20001906 PARAMETER Experiment Name: At_Drought_Reproduction_P Parameter: Age (day) Value: 35
  misc_feature: MA Experiment 20001906 PARAMETER Experiment Name: At_Drought_Reproduction_P Parameter: Organism Value: A. thaliana
  misc_feature: MA Experiment 20001906 PARAMETER Experiment Name: At_Drought_Reproduction_P Parameter: Plant Line Value: WS
  misc_feature: MA Experiment 20001906 PARAMETER Experiment Name: At_Drought_Reproduction_P Parameter: Timepoint (day) Value: 5
  misc_feature: MA Experiment 20001906 PARAMETER Experiment Name: At_Drought_Reproduction_P Parameter: Tissue Value: Siliques
  misc_feature: MA Experiment 20001906 PARAMETER Experiment Name: At_Drought_Reproduction_P Parameter: Treatment Value: Drought vs. No Drought
  misc_feature: MA Experiment ID: 20001908 Result: Down-regulated in Transcription
  misc_feature: MA Experiment 20001908 PARAMETER Experiment Name: At_Drought_Reproduction_P Parameter: Age (day) Value: 40
  misc_feature: MA Experiment 20001908 PARAMETER Experiment Name: At_Drought_Reproduction_P Parameter: Organism Value: A. thaliana
  misc_feature: MA Experiment 20001908 PARAMETER Experiment Name: At_Drought_Reproduction_P Parameter: Plant Line Value: WS
  misc_feature: MA Experiment 20001908 PARAMETER Experiment Name: At_Drought_Reproduction_P Parameter: Timepoint (day) Value: 10
  misc_feature: MA Experiment 20001908 PARAMETER Experiment Name: At_Drought_Reproduction_P Parameter: Tissue Value: Siliques
  misc_feature: MA Experiment 20001908 PARAMETER Experiment Name: At_Drought_Reproduction_P Parameter: Treatment Value: Drought vs. No Drought
atggtgtctcatcttcaatgtatggcatccacattgtttacttgaggtacaagcaaaacgtctaagctcgtcgacctcctcttaatggcttcaagttcaacttcattcccgttaaccaccgcgccaccgcagggtgtcaggtttaaccggagaaaaccgaggttaaccgtgtgggctaagcaaacggcgtttcaactcgggaaaacgaagggtgatgatgactcggaggggaaacaaaaagggaagaacccgttccagtttgatttcggtaagttaccggacatgaagtcactgataccggttgtgacgaatccttctaccggtttagtgtttggtaataacagaaagaaagatcctggtactatttttgtggctggtgctacgggacaagctggtatacgcatagctcaaacgctcttacaacgaggattcagtgttcgagccggtgttcctgaccttggagctgcccaggacctagctcgtgtcgcggctacttacaagattttatcaaatgatgaagtcaagaggctaaacgcagttcaatcccccttccaagacgctgaatcaatagcaaaagcgattggaaacgcaaccaaagttgttgttacggtcggggcaacagagaatggtccggacgcccaagtttcgacctcagacgcattgctcgtggtccaagcagctgagctagccggcgtaagccacgtggcgatagtctacgacggcaccatcagcgggtccacatacaacgtgctcgacgggattacttcgtttttcggcaatcttttcgcaaaatctcagccattgactatctctgacctcatcgagaaagtagctcaaaccgacgtggcctacacactcataaagacgagtttgacggaggatttctctccggagaaagcttataacgtcgtcgtttcagctgaagggagtaacagcggcagtggcagtagttcgtccgaggcctacaaagttccgaagttgaagattgcgtcgctggttgcagacatttttgcgaatacggccgtggcagaaaataaggtggtggaagtttctacagatccatcagcaccatcgcggccagtggacgagcttttcagtgtaatcccggaagatgggaggagaaaagtgtacgcagatgcgatcgcaagggaaagagcagaggaagaagctaaagttgcagctgacaaagctcgagaggcagcagaagcagcgaaagagtttgagaagcaaatgcaaaagctctctgagaaagaagcagaagctgcaagcttagctgaggatgcgcagcagaaagcagatgccgtgggagtcacagtggacggtttatttaacaaggcgaaagatatcagctcaggtctctcctggaataaactcggctctcagttcgcaactgcgattcagaacgcttcagagacgcctaaagtacaggttgctacggtcagaggacaagcaaaagcgagaaacttgccacccaagaaagcagtggtgaagcagagaccatcatctccgtttgcatccaaaccgaaagaagaacgtccgaagaagccggagaaagaggtgaggaaagtgttcggaggattgtttaagcaagagaccatctacatcgacgatgattgaaaaggccatatgcgatgtccttttgaagttccgtacagtttccttttttctctttccttctgtttcaagttaaaattctgtaatcgtatgacaaaattatacataaaaaaccatcattctctc

SEQ ID NO: 102737 - protein, 510 aa, Arabidopsis thaliana
  peptide (1)..(510): Ceres Seq. ID no. 13611121
  misc_feature (1)..(510): Homolog of NCBI NO: 7487756 NR Description: hypothetical protein T6H20.190 - Arabidopsis >gi|5541681|emb|CAB51187.1| putative protein [Arabidopsis
  misc_feature (1)..(296): Homolog of NCBI NO: 18408279 NR Description: expressed protein [Arabidopsis thaliana] AT3g46780/T6H20_190 [Arabidopsis thaliana]
  misc_feature (89)..(387): Homolog of NCBI NO: 21616072 NR Description: Tic62 protein [Pisum sativum]
  misc_feature (73)..(488): Homolog of NCBI NO: 30685117 NR Description: expressed protein [Arabidopsis thaliana] Unknown protein [Arabidopsis thaliana]
  misc_feature (89)..(341): Homolog of NCBI NO: 37530302 NR Description: putative dehydrogenase [Oryza sativa (japonica group)] >gi|18481961|gb|AAL73559.1| Unknown protein [Oryza >gi|19920208|gb|AAM08640.1| Putative dehydrogenase [Oryza sativa]
  misc_feature (73)..(488): Homolog of NCBI NO: 9294698 NR Description: gb|AAC26697.1~gene_id:MCB22.6~similar to unknown
MASSSTSFPLTTAPPQGVRFNRRKPRLTVWAKQTAFQLGKTKGDDDSEGKQKGKNPFQFDFGKLPDMKSLIPVVTNPSTGLVFGNNRKKDPGTIFVAGATGQAGIRIAQTLLQRGFSVRAGVPDLGAAQDLARVAATYKILSNDEVKRLNAVQSPFQDAESIAKAIGNATKVVVTVGATENGPDAQVSTSDALLVVQAAELAGVSHVAIVYDGTISGSTYNVLDGITSFFGNLFAKSQPLTISDLIEKVAQTDVAYTLIKTSLTEDFSPEKAYNVVVSAEGSNSGSGSSSSEAYKVPKLKIASLVADIFANTAVAENKVVEVSTDPSAPSRPVDELFSVIPEDGRRKVYADAIARERAEEEAKVAADKAREAAEAAKEFEKQMQKLSEKEAEAASLAEDAQQKADAVGVTVDGLFNKAKDISSGLSWNKLGSQFATAIQNASETPKVQVATVRGQAKARNLPPKKAVVKQRPSSPFASKPKEERPKKPEKEVRKVFGGLFKQETIYIDDD

SEQ ID NO: 102738 - protein, 444 aa, Arabidopsis thaliana
  peptide (1)..(444): Ceres Seq. ID no. 13611122
  misc_feature (1)..(444): Homolog of NCBI NO: 7487756 NR Description: hypothetical protein T6H20.190 - Arabidopsis >gi|5541681|emb|CAB51187.1| putative protein [Arabidopsis
  misc_feature (1)..(230): Homolog of NCBI NO: 18408279 NR Description: expressed protein [Arabidopsis thaliana] AT3g46780/T6H20_190 [Arabidopsis thaliana]
  misc_feature (23)..(321): Homolog of NCBI NO: 21616072 NR Description: Tic62 protein [Pisum sativum]
  misc_feature (7)..(422): Homolog of NCBI NO: 30685117 NR Description: expressed protein [Arabidopsis thaliana] Unknown protein [Arabidopsis thaliana]
  misc_feature (23)..(275): Homolog of NCBI NO: 37530302 NR Description: putative dehydrogenase [Oryza sativa (japonica group)] >gi|18481961|gb|AAL73559.1| Unknown protein [Oryza >gi|19920208|gb|AAM08640.1| Putative dehydrogenase [Oryza sativa]
  misc_feature (7)..(422): Homolog of NCBI NO: 9294698 NR Description: gb|AAC26697.1~gene_id:MCB22.6~similar to unknown
MKSLIPVVTNPSTGLVFGNNRKKDPGTIFVAGATGQAGIRIAQTLLQRGFSVRAGVPDLGAAQDLARVAATYKILSNDEVKRLNAVQSPFQDAESIAKAIGNATKVVVTVGATENGPDAQVSTSDALLVVQAAELAGVSHVAIVYDGTISGSTYNVLDGITSFFGNLFAKSQPLTISDLIEKVAQTDVAYTLIKTSLTEDFSPEKAYNVVVSAEGSNSGSGSSSSEAYKVPKLKIASLVADIFANTAVAENKVVEVSTDPSAPSRPVDELFSVIPEDGRRKVYADAIARERAEEEAKVAADKAREAAEAAKEFEKQMQKLSEKEAEAASLAEDAQQKADAVGVTVDGLFNKAKDISSGLSWNKLGSQFATAIQNASETPKVQVATVRGQAKARNLPPKKAVVKQRPSSPFASKPKEERPKKPEKEVRKVFGGLFKQETIYIDDD

SEQ ID NO: 102739 - DNA, 1164 bp, Arabidopsis thaliana
  misc_feature (1)..(1164): Ceres Seq. ID no. 13611135
  misc_feature: MA Experiment ID: 108464 Result: Up-regulated in Transcription
  misc_feature: MA Experiment 108464 PARAMETER Experiment Name: At_Germinating_Seeds_cDNA_P Parameter: Age (day) Value: 4 vs. 0
  misc_feature: MA Experiment 108464 PARAMETER Experiment Name: At_Germinating_Seeds_cDNA_P Parameter: Tissue Value: Germinating Seeds
  misc_feature: MA Experiment ID: 108501 Result: Down-regulated in Transcription
  misc_feature: MA Experiment 108501 PARAMETER Experiment Name: At_ap2_floral_buds_cDNA_P Parameter: Plant Line Value: ap2 (Ler.)
  misc_feature: MA Experiment 108501 PARAMETER Experiment Name: At_ap2_floral_buds_cDNA_P Parameter: Tissue Value: Closed Flower
  misc_feature: MA Experiment ID: 108573 Result: Up-regulated in Transcription
  misc_feature: MA Experiment 108573 PARAMETER Experiment Name: At_Drought_cDNA_P Parameter: Timepoint (hr) Value: 6
  misc_feature: MA Experiment 108573 PARAMETER Experiment Name: At_Drought_cDNA_P Parameter: Tissue Value: Aerial
  misc_feature: MA Experiment 108573 PARAMETER Experiment Name: At_Drought_cDNA_P Parameter: Treatment Value: Drought vs. No Drought
  misc_feature: MA Experiment ID: 108574 Result: Down-regulated in Transcription
  misc_feature: MA Experiment 108574 PARAMETER Experiment Name: At_Wounding__cDNA_P Parameter: Timepoint (hr) Value: 1
  misc_feature: MA Experiment 108574 PARAMETER Experiment Name: At_Wounding__cDNA_P Parameter: Tissue Value: Aerial
  misc_feature: MA Experiment 108574 PARAMETER Experiment Name: At_Wounding__cDNA_P Parameter: Treatment Value: Wounding vs. No Wounding
  misc_feature: MA Experiment ID: 108579 Result: Down-regulated in Transcription
  misc_feature: MA Experiment 108579 PARAMETER Experiment Name: At_4deg_Cold_cDNA_P Parameter: Temperature (deg C) Value: 4 vs. 22
  misc_feature: MA Experiment 108579 PARAMETER Experiment Name: At_4deg_Cold_cDNA_P Parameter: Timepoint (hr) Value: 6
  misc_feature: MA Experiment 108579 PARAMETER Experiment Name: At_4deg_Cold_cDNA_P Parameter: Tissue Value: Aerial
  misc_feature: MA Experiment ID: 20000185 Result: Down-regulated in Transcription
  misc_feature: MA Experiment 20000185 PARAMETER Experiment Name: At_Roots__P Parameter: Age (day) Value: 7 vs. 21
  misc_feature: MA Experiment 20000185 PARAMETER Experiment Name: At_Roots__P Parameter: Organism Value: A. thaliana
  misc_feature: MA Experiment 20000185 PARAMETER Experiment Name: At_Roots__P Parameter: Tissue Value: Roots vs. Whole Plant
  misc_feature: MA Experiment ID: 20000213 Result: Down-regulated in Transcription
  misc_feature: MA Experiment 20000213 PARAMETER Experiment Name: At_4deg_Cold_P Parameter: Timepoint (hr) Value: 2
  misc_feature: MA Experiment ID: 20000214 Result: Down-regulated in Transcription
  misc_feature: MA Experiment 20000214 PARAMETER Experiment Name: At_4deg_Cold_P Parameter: Timepoint (hr) Value: 6
  misc_feature: MA Experiment ID: 20000234 Result: Down-regulated in Transcription
  misc_feature: MA Experiment 20000234 PARAMETER Experiment Name: At_Siliques_P Parameter: Age (day) Value: 21
  misc_feature: MA Experiment 20000234 PARAMETER Experiment Name: At_Siliques_P Parameter: Organism Value: A. thaliana
  misc_feature: MA Experiment 20000234 PARAMETER Experiment Name: At_Siliques_P Parameter: Plant Line Value: WS
  misc_feature: MA Experiment 20000234 PARAMETER Experiment Name: At_Siliques_P Parameter: Tissue Value: Less Than 5mm Siliques vs. Whole Plant
  misc_feature: MA Experiment ID: 20000264 Result: Down-regulated in Transcription
  misc_feature: MA Experiment 20000264 PARAMETER Experiment Name: At_Open_Flower_P Parameter: Age (day) Value: 21
  misc_feature: MA Experiment 20000264 PARAMETER Experiment Name: At_Open_Flower_P Parameter: Plant Line Value: WS
  misc_feature: MA Experiment 20000264 PARAMETER Experiment Name: At_Open_Flower_P Parameter: Tissue Value: Open Flower vs. Whole Plant
  misc_feature: MA Experiment ID: 20000265 Result: Down-regulated in Transcription
  misc_feature: MA Experiment 20000265 PARAMETER Experiment Name: At_Open_Flower_P Parameter: Age (day) Value: 21
  misc_feature: MA Experiment 20000265 PARAMETER Experiment Name: At_Open_Flower_P Parameter: Plant Line Value: WS
  misc_feature: MA Experiment 20000265 PARAMETER Experiment Name: At_Open_Flower_P Parameter: Tissue Value: Closed Flower vs. Whole Plant
  misc_feature: MA Experiment ID: 20000268 Result: Down-regulated in Transcription
  misc_feature: MA Experiment 20000268 PARAMETER Experiment Name: At_100mM_NaCl__P Parameter: Age (day) Value: 14
  misc_feature: MA Experiment 20000268 PARAMETER Experiment Name: At_100mM_NaCl__P Parameter: Organism Value: A. thaliana
  misc_feature: MA Experiment 20000268 PARAMETER Experiment Name: At_100mM_NaCl__P Parameter: Plant Line Value: WS
  misc_feature: MA Experiment 20000268 PARAMETER Experiment Name: At_100mM_NaCl__P Parameter: Timepoint (hr) Value: 6
  misc_feature: MA Experiment 20000268 PARAMETER Experiment Name: At_100mM_NaCl__P Parameter: Tissue Value: Whole Plant
  misc_feature: MA Experiment 20000268 PARAMETER Experiment Name: At_100mM_NaCl__P Parameter: Treatment Value: 100mM NaCl vs. No Treatment
  misc_feature: MA Experiment ID: 20000286 Result: Down-regulated in Transcription
  misc_feature: MA Experiment 20000286 PARAMETER Experiment Name: At_Open_Flower_P Parameter: Age (day) Value: 21
  misc_feature: MA Experiment 20000286 PARAMETER Experiment Name: At_Open_Flower_P Parameter: Plant Line Value: WS
  misc_feature: MA Experiment 20000286 PARAMETER Experiment Name: At_Open_Flower_P Parameter: Tissue Value: Half Open vs. Whole Plant
  misc_feature: MA Experiment ID: 20000308 Result: Down-regulated in Transcription
  misc_feature: MA Experiment 20000308 PARAMETER Experiment Name: At_100mM_NaCl__P Parameter: Age (day) Value: 17
  misc_feature: MA Experiment 20000308 PARAMETER Experiment Name: At_100mM_NaCl__P Parameter: Organism Value: A. thaliana
  misc_feature: MA Experiment 20000308 PARAMETER Experiment Name: At_100mM_NaCl__P Parameter: Plant Line Value: WS
  misc_feature: MA Experiment 20000308 PARAMETER Experiment Name: At_100mM_NaCl__P Parameter: Timepoint (hr) Value: 72
  misc_feature: MA Experiment 20000308 PARAMETER Experiment Name: At_100mM_NaCl__P Parameter: Tissue Value: Whole Plant
  misc_feature: MA Experiment 20000308 PARAMETER Experiment Name: At_100mM_NaCl__P Parameter: Treatment Value: 100mM NaCl vs. No Treatment
  misc_feature: MA Experiment ID: 20000439 Result: Down-regulated in Transcription
  misc_feature: MA Experiment 20000439 PARAMETER Experiment Name: At_Roots__P Parameter: Age (day) Value: 14 vs. 21
  misc_feature: MA Experiment 20000439 PARAMETER Experiment Name: At_Roots__P Parameter: Organism Value: A. thaliana
  misc_feature: MA Experiment 20000439 PARAMETER Experiment Name: At_Roots__P Parameter: Tissue Value: Roots vs. Whole Plant
  misc_feature: MA Experiment ID: 20000441 Result: Up-regulated in Transcription
  misc_feature: MA Experiment 20000441 PARAMETER Experiment Name: At_1uM_BR-BRZ__P Parameter: Tissue Value: Shoot Apices
  misc_feature: MA Experiment 20000441 PARAMETER Experiment Name: At_1uM_BR-BRZ__P Parameter: Treatment Value: 1uM BR vs. No Treatment
  misc_feature: MA Experiment ID: 20000443 Result: Up-regulated in Transcription
  misc_feature: MA Experiment 20000443 PARAMETER Experiment Name: At_1uM_BR-BRZ__P Parameter: Tissue Value: Shoot Apices
  misc_feature: MA Experiment 20000443 PARAMETER Experiment Name: At_1uM_BR-BRZ__P Parameter: Treatment Value: 1uM BRZ vs. No Treatment
  misc_feature: MA Experiment ID: 20000573 Result: Up-regulated in Transcription
  misc_feature: MA Experiment 20000573 PARAMETER Experiment Name: At_100uM_ABA_Mutants__P Parameter: Organism Value: A. thaliana
  misc_feature: MA Experiment 20000573 PARAMETER Experiment Name: At_100uM_ABA_Mutants__P Parameter: Plant Line Value: CS22 vs. Ler wt
  misc_feature: MA Experiment 20000573 PARAMETER Experiment Name: At_100uM_ABA_Mutants__P Parameter: Timepoint (hr) Value: N/A
  misc_feature: MA Experiment 20000573 PARAMETER Experiment Name: At_100uM_ABA_Mutants__P Parameter: Tissue Value: Whole Plant
  misc_feature: MA Experiment 20000573 PARAMETER Experiment Name: At_100uM_ABA_Mutants__P Parameter: Treatment Value: None
  misc_feature: MA Experiment ID: 20000794 Result: Down-regulated in Transcription
  misc_feature: MA Experiment 20000794 PARAMETER Experiment Name: At_Petals_P Parameter: Age (day) Value: 23-25 days
  misc_feature: MA Experiment 20000794 PARAMETER Experiment Name: At_Petals_P Parameter: Plant Line Value: WS
  misc_feature: MA Experiment 20000794 PARAMETER Experiment Name: At_Petals_P Parameter: Tissue Value: Petals vs. Whole plant
  misc_feature: MA Experiment ID: 20001248 Result: Up-regulated in Transcription
  misc_feature: MA Experiment 20001248 PARAMETER Experiment Name: At_Far-red-induction_P Parameter: Age (day) Value: 7
  misc_feature: MA Experiment 20001248 PARAMETER Experiment Name: At_Far-red-induction_P Parameter: Light Value: Far-red vs. White
  misc_feature: MA Experiment 20001248 PARAMETER Experiment Name: At_Far-red-induction_P Parameter: Organism Value: A. thaliana
  misc_feature: MA Experiment 20001248 PARAMETER Experiment Name: At_Far-red-induction_P Parameter: Plant Line Value: Columbia
  misc_feature: MA Experiment 20001248 PARAMETER Experiment Name: At_Far-red-induction_P Parameter: Timepoint (hr) Value: 4
  misc_feature: MA Experiment 20001248 PARAMETER Experiment Name: At_Far-red-induction_P Parameter: Tissue Value: Whole Plant
  misc_feature: MA Experiment ID: 20001450 Result: Up-regulated in Transcription
  misc_feature: MA Experiment 20001450 PARAMETER Experiment Name: At_Far-red-induction_P Parameter: Age (day) Value: 7
  misc_feature: MA Experiment 20001450 PARAMETER Experiment Name: At_Far-red-induction_P Parameter: Light Value: Far-red vs. White
  misc_feature: MA Experiment 20001450 PARAMETER Experiment Name: At_Far-red-induction_P Parameter: Organism Value: A. thaliana
  misc_feature: MA Experiment 20001450 PARAMETER Experiment Name: At_Far-red-induction_P Parameter: Plant Line Value: Columbia
  misc_feature: MA Experiment 20001450 PARAMETER Experiment Name: At_Far-red-induction_P Parameter: Timepoint (hr) Value: 8
  misc_feature: MA Experiment 20001450 PARAMETER Experiment Name: At_Far-red-induction_P Parameter: Tissue Value: Whole Plant
  misc_feature: MA Experiment ID: 20001451 Result: Up-regulated in Transcription
  misc_feature: MA Experiment 20001451 PARAMETER Experiment Name: At_Far-red-induction_P Parameter: Age (day) Value: 7
  misc_feature: MA Experiment 20001451 PARAMETER Experiment Name: At_Far-red-induction_P Parameter: Light Value: Far-red vs. White
  misc_feature: MA Experiment 20001451 PARAMETER Experiment Name: At_Far-red-induction_P Parameter: Organism Value: A. thaliana
  misc_feature: MA Experiment 20001451 PARAMETER Experiment Name: At_Far-red-induction_P Parameter: Plant Line Value: Columbia
  misc_feature: MA Experiment 20001451 PARAMETER Experiment Name: At_Far-red-induction_P Parameter: Timepoint (hr) Value: 24
  misc_feature: MA Experiment 20001451 PARAMETER Experiment Name: At_Far-red-induction_P Parameter: Tissue Value: Whole Plant
  misc_feature: MA Experiment ID: 20001556 Result: Down-regulated in Transcription
  misc_feature: MA Experiment 20001556 PARAMETER Experiment Name: At_Drought_Soil_Dry_P Parameter: Age (day) Value: 26
  misc_feature: MA Experiment 20001556 PARAMETER Experiment Name: At_Drought_Soil_Dry_P Parameter: Organism Value: A. thaliana
  misc_feature: MA Experiment 20001556 PARAMETER Experiment Name: At_Drought_Soil_Dry_P Parameter: Plant Line Value: WS
  misc_feature: MA Experiment 20001556 PARAMETER Experiment Name: At_Drought_Soil_Dry_P Parameter: Post Timepoint (hr) Value: None
  misc_feature: MA Experiment 20001556 PARAMETER Experiment Name: At_Drought_Soil_Dry_P Parameter: Post-Treatment Value: None
  misc_feature: MA Experiment 20001556 PARAMETER Experiment Name: At_Drought_Soil_Dry_P Parameter: Timepoint (day) Value: 12
  misc_feature: MA Experiment 20001556 PARAMETER Experiment Name: At_Drought_Soil_Dry_P Parameter: Treatment Value: Drought vs. No Drought
  misc_feature: MA Experiment ID: 20001557 Result: Down-regulated in Transcription
  misc_feature: MA Experiment 20001557 PARAMETER Experiment Name: At_Drought_Soil_Dry_P Parameter: Age (day) Value: 27
  misc_feature: MA Experiment 20001557 PARAMETER Experiment Name: At_Drought_Soil_Dry_P Parameter: Organism Value: A. thaliana
  misc_feature: MA Experiment 20001557 PARAMETER Experiment Name: At_Drought_Soil_Dry_P Parameter: Plant Line Value: WS
  misc_feature: MA Experiment 20001557 PARAMETER Experiment Name: At_Drought_Soil_Dry_P Parameter: Post Timepoint (hr) Value: 3
  misc_feature: MA Experiment 20001557 PARAMETER Experiment Name: At_Drought_Soil_Dry_P Parameter: Post-Treatment Value: Re-Water vs. No Drought
  misc_feature: MA Experiment 20001557 PARAMETER Experiment Name: At_Drought_Soil_Dry_P Parameter: Timepoint (day) Value: 13
  misc_feature: MA Experiment 20001557 PARAMETER Experiment Name: At_Drought_Soil_Dry_P Parameter: Treatment Value: Drought vs. No Drought
  misc_feature: MA Experiment ID: 20001558 Result: Down-regulated in Transcription
  misc_feature: MA Experiment 20001558 PARAMETER Experiment Name: At_Drought_Soil_Dry_P Parameter: Age (day) Value: 27
  misc_feature: MA Experiment 20001558 PARAMETER Experiment Name: At_Drought_Soil_Dry_P Parameter: Organism Value: A. thaliana
  misc_feature: MA Experiment 20001558 PARAMETER Experiment Name: At_Drought_Soil_Dry_P Parameter: Plant Line Value: WS
  misc_feature: MA Experiment 20001558 PARAMETER Experiment Name: At_Drought_Soil_Dry_P Parameter: Post Timepoint (hr) Value: 6
  misc_feature: MA Experiment 20001558 PARAMETER Experiment Name: At_Drought_Soil_Dry_P Parameter: Post-Treatment Value: Re-Water vs. No Drought
  misc_feature: MA Experiment 20001558 PARAMETER Experiment Name: At_Drought_Soil_Dry_P Parameter: Timepoint (day) Value: 13
  misc_feature: MA Experiment 20001558 PARAMETER Experiment Name: At_Drought_Soil_Dry_P Parameter: Treatment Value: Drought vs. No Drought
  misc_feature: MA Experiment ID: 20001559 Result: Down-regulated in Transcription
  misc_feature: MA Experiment 20001559 PARAMETER Experiment Name: At_Drought_Soil_Dry_P Parameter: Age (day) Value: 28
  misc_feature: MA Experiment 20001559 PARAMETER Experiment Name: At_Drought_Soil_Dry_P Parameter: Organism Value: A. thaliana
  misc_feature: MA Experiment 20001559 PARAMETER Experiment Name: At_Drought_Soil_Dry_P Parameter: Plant Line Value: WS
  misc_feature: MA Experiment 20001559 PARAMETER Experiment Name: At_Drought_Soil_Dry_P Parameter: Post Timepoint (hr) Value: 29
  misc_feature: MA Experiment 20001559 PARAMETER Experiment Name: At_Drought_Soil_Dry_P Parameter: Post-Treatment Value: Re-Water vs. No Drought
  misc_feature: MA Experiment 20001559 PARAMETER Experiment Name: At_Drought_Soil_Dry_P Parameter: Timepoint (day) Value: 14
  misc_feature: MA Experiment 20001559 PARAMETER Experiment Name: At_Drought_Soil_Dry_P Parameter: Treatment Value: Drought vs. No Drought
  misc_feature: MA Experiment ID: 20001560 Result: Down-regulated in Transcription
  misc_feature: MA Experiment 20001560 PARAMETER Experiment Name: At_Drought_Soil_Dry_P Parameter: Age (day) Value: 28
  misc_feature: MA Experiment 20001560 PARAMETER Experiment Name: At_Drought_Soil_Dry_P Parameter: Organism Value: A. thaliana
  misc_feature: MA Experiment 20001560 PARAMETER Experiment Name: At_Drought_Soil_Dry_P Parameter: Plant Line Value: WS
  misc_feature: MA Experiment 20001560 PARAMETER Experiment Name: At_Drought_Soil_Dry_P Parameter: Post Timepoint (hr) Value: None
  misc_feature: MA Experiment 20001560 PARAMETER Experiment Name: At_Drought_Soil_Dry_P Parameter: Post-Treatment Value: None
  misc_feature: MA Experiment 20001560 PARAMETER Experiment Name: At_Drought_Soil_Dry_P Parameter: Timepoint (day) Value: 14
  misc_feature: MA Experiment 20001560 PARAMETER Experiment Name: At_Drought_Soil_Dry_P Parameter: Treatment Value: Drought vs. No Drought
  misc_feature: MA Experiment ID: 20001757 Result: Up-regulated in Transcription
  misc_feature: MA Experiment 20001757 PARAMETER Experiment Name: At_50mM_NH4NO3_L-to-H_P Parameter: Timepoint (hr) Value: 6
  misc_feature: MA Experiment 20001757 PARAMETER Experiment Name: At_50mM_NH4NO3_L-to-H_P Parameter: Tissue Value: Leaf
  misc_feature: MA Experiment 20001757 PARAMETER Experiment Name: At_50mM_NH4NO3_L-to-H_P Parameter: Treatment Value: 50mM NH4NO3 vs 100mM Mannitol
  misc_feature: MA Experiment ID: 20001906 Result: Down-regulated in Transcription
  misc_feature: MA Experiment 20001906 PARAMETER Experiment Name: At_Drought_Reproduction_P Parameter: Age (day) Value: 35
  misc_feature: MA Experiment 20001906 PARAMETER Experiment Name: At_Drought_Reproduction_P Parameter: Organism Value: A. thaliana
  misc_feature: MA Experiment 20001906 PARAMETER Experiment Name: At_Drought_Reproduction_P Parameter: Plant Line Value: WS
  misc_feature: MA Experiment 20001906 PARAMETER Experiment Name: At_Drought_Reproduction_P Parameter: Timepoint (day) Value: 5
  misc_feature: MA Experiment 20001906 PARAMETER Experiment Name: At_Drought_Reproduction_P Parameter: Tissue Value: Siliques
  misc_feature: MA Experiment 20001906 PARAMETER Experiment Name: At_Drought_Reproduction_P Parameter: Treatment Value: Drought vs. No Drought
  misc_feature: MA Experiment ID: 20001908 Result: Down-regulated in Transcription
  misc_feature: MA Experiment 20001908 PARAMETER Experiment Name: At_Drought_Reproduction_P Parameter: Age (day) Value: 40
  misc_feature: MA Experiment 20001908 PARAMETER Experiment Name: At_Drought_Reproduction_P Parameter: Organism Value: A. thaliana
  misc_feature: MA Experiment 20001908 PARAMETER Experiment Name: At_Drought_Reproduction_P Parameter: Plant Line Value: WS
  misc_feature: MA Experiment 20001908 PARAMETER Experiment Name: At_Drought_Reproduction_P Parameter: Timepoint (day) Value: 10
  misc_feature: MA Experiment 20001908 PARAMETER Experiment Name: At_Drought_Reproduction_P Parameter: Tissue Value: Siliques
  misc_feature: MA Experiment 20001908 PARAMETER Experiment Name: At_Drought_Reproduction_P Parameter: Treatment Value: Drought vs. No Drought
tcttttcctctatctctctcctctctttgtctctctcgcttctgtgatttgggctttttcagatgggaaatgcgaacggcaaagacgaagacgccgccgccggtagcggtggtgcagatgttacctcgtcctcggcgagatctaatggcggcgatccttctgcacgcagtcgtcaccgtcgtccttcttcagactctatgagcagttctcctcccggaagtcctgctcgatctccatctcctttcttattcgctcctcaggttcccgtggctccattgcagagagcaaacgcccctcctcctaataacatccaatggaaccaatcacagagagtttttgataatcccccagagcaaggaatccctaccatcattacatggaaccaaggaggtaatgatgtggcggtggaaggatcatgggacaattggagatcaaggaagaagctgcagaaatcagggaaagaccactcgattctctttgtccttccatctggcatataccactacaaggtgattgtggacggtgaatccaaatacatcccagatttaccctttgtagcagacgaagttggcaatgtctgtaacattctcgatgttcataactttgtgccagaaaacccagaaagcatagtggagtttgaggcgccaccatcacctgatcatagctacggtcaaaccctaccagccgcagaagattacgcgaaagagccactggcggtgccacctcagcttcatctaacacttcttggcactactgaagagacagccatagccacaaagcctcaacatgtggtgcttaaccatgtgttcatagagcaaggatggactcctcaatccatagtagctttgggtttaacccacaggttcgagtctaagtacataactgttgtcctctacaaaccgctcacacggtaaccctaaaaattcagtgccacattgttctctctctttctttctttttcatctctcaattatgtgaaaacatgttctttgttcatagtgactagtgagtgcccaacatttgagtttattaacctctttcttacctggtttgtggtgcttgtgtacaaagcttctctcattgtaacgattgttgttttattttctgcaaaaactgtaaaatacattcgctaataatggctataacaagcttatctgctagcaa

SEQ ID NO: 102740 - protein, 283 aa, Arabidopsis thaliana; identical to SEQ ID NO: 86076
  peptide (1)..(283): Ceres Seq. ID no. 13611136
  misc_feature (0)..(0): Pfam Name: 5'-AMP-activated protein kinase, beta subunit, Pfam Description: 5'-AMP-activated protein kinase, beta subunit,
  misc_feature (1)..(283): Homolog of NCBI NO: 15242175 NR Description: AMPKBI (5'-AMP-activated protein kinase, beta
  misc_feature (1)..(283): Homolog of NCBI NO: 6686782 NR Description: AKIN gamma [Arabidopsis thaliana]
  misc_feature (1)..(283): Homolog of NCBI NO: 5702015 NR Description: GAL83 protein [Solanum tuberosum]
  misc_feature (1)..(283): Homolog of NCBI NO: 6686784 NR Description: AKIN beta2 [Arabidopsis thaliana]
  misc_feature (23)..(241): Homolog of NCBI NO: 29725558 NR Description: SNF1 kinase complex anchoring protein
  misc_feature (38)..(283): Homolog of NCBI NO: 15234895 NR Description: kinase like protein [Arabidopsis thaliana]
  misc_feature (47)..(283): Homolog of NCBI NO: 22324436 NR Description: AKIN beta1-like protein [Oryza sativa (japonica
  misc_feature (62)..(283): Homolog of NCBI NO: 11935162 NR Description: SNF1-related kinase complex anchoring protein
  misc_feature (83)..(281): Homolog of NCBI NO: 4885561 NR Description: protein kinase, AMP-activated, beta 2
  misc_feature (83)..(281): Homolog of NCBI NO: 12018316 NR Description: AMP-activated protein kinase beta-2 regulatory

SEQ ID NO: 102741 - protein, 238 aa, Arabidopsis thaliana; identical to SEQ ID NO: 86077
  peptide (1)..(238): Ceres Seq. ID no. 13611137
  misc_feature (0)..(0): Pfam Name: 5'-AMP-activated protein kinase, beta subunit, Pfam Description: 5'-AMP-activated protein kinase, beta subunit,
  misc_feature (1)..(238): Homolog of NCBI NO: 15242175 NR Description: AMPKBI (5'-AMP-activated protein kinase, beta
  misc_feature (1)..(238): Homolog of NCBI NO: 6686782 NR Description: AKIN gamma [Arabidopsis thaliana]
  misc_feature (1)..(238): Homolog of NCBI NO: 5702015 NR Description: GAL83 protein [Solanum tuberosum]
  misc_feature (1)..(238): Homolog of NCBI NO: 6686784 NR Description: AKIN beta2 [Arabidopsis thaliana]
  misc_feature (1)..(196): Homolog of NCBI NO: 29725558 NR Description: SNF1 kinase complex anchoring protein
  misc_feature (1)..(238): Homolog of NCBI NO: 15234895 NR Description: kinase like protein [Arabidopsis thaliana]
  misc_feature (2)..(238): Homolog of NCBI NO: 22324436 NR Description: AKIN beta1-like protein [Oryza sativa (japonica
  misc_feature (17)..(238): Homolog of NCBI NO: 11935162 NR Description: SNF1-related kinase complex anchoring protein
  misc_feature (38)..(236): Homolog of NCBI NO: 4885561 NR Description: protein kinase, AMP-activated, beta 2
  misc_feature (38)..(236): Homolog of NCBI NO: 12018316 NR Description: AMP-activated protein kinase beta-2 regulatory

SEQ ID NO: 102742 - DNA, 4260 bp, Arabidopsis thaliana
  misc_feature (1)..(4260): Ceres Seq. ID no. 13611138
  misc_feature: MA Experiment ID: 20000495 Result: Down-regulated in Transcription
  misc_feature: MA Experiment 20000495 PARAMETER Experiment Name: At_Guard_Cells_P Parameter: Harvest Date Value: 8/2/2002
  misc_feature: MA Experiment 20000495 PARAMETER Experiment Name: At_Guard_Cells_P Parameter: Organism Value: A. thaliana
  misc_feature: MA Experiment 20000495 PARAMETER Experiment Name: At_Guard_Cells_P Parameter: Tissue Value: Guard Cells vs. Leaves
atggcacagatccgacccggaggcccaattagagacccaaatttcacaaaatacatcgcttcttcttcctcggctttcatcggccttgttcgtcgtctttttcttcttccgcttgagtggcttcgggaagtaaaaatgagaagacagggaaactttgcggactcatcacctgccagtgcatatggagctggacagatacaggatccccattctgattttcaaggtcaattagaggcattcacgcctgagagggatcagccatattcagattcacaagctgagggtcaatggagatgggaaagagatggccctaatatgtcaaggccaatggctactgctgtttacaatgaaggacaacaaggtgttgattcatcgaggacgtattaccgtggccaaatagatccaaaatcaggaatggagaagcaaggcagtgatccaagagctcaaccacaacaccaagaaaatccaaaaaccggttatgataataaccgtggggtgcagacatttgaaggtcttgaacagaagttcatggatgatataacaagactagcaaaagatcaaatcgaagcagaggatgcagagatcgccagacatcgagagaaaataaacactataaacgctagatacgaagaacagttagctacacttagagcacggcacacaggtaagagagaagagatcatgaggaaagaatcactagctaggcagcaacaattcaagcagcaaaccatggggatgatggaccaataccatccaaacgtggttggtcaggccaatctaatgccatctggtcatccccaaggctacattggcagtgctcaagatccagcggctgtggcggatgcaccaccaagatcatatggctcagatcggtttgaagcatacggagagagagctaggtttcagggaggaaacagagatcacgggttcgagcctaggggtccataccctggtgggaatgtctatgacaccagctcacgatcaaaatcaagcttttcagactatccggaatttgaaaatgaaatcagggttccattttttaatcctgacgagagcattttagaattcattgttgaaccgtttaaagaaattgctgtacttagatgctgctggttgtctgaaaaacatttatctttcgctctgcgaatcttcctgtgcggaggaggaacaatgaacgggacatcgcccgacgaatctcccgattcgacaactcagcggatcgattcgttcaacggcgagcagagagtctacttcgttcccttgaggtggtggaaagatgcgcaagattcaatgccttctgaatcagttgaaaaaagagagatcttgtatacagcaagttgcgggtcgtcttatggaggcccaatgaagttgataaataacatttttaactctgatattttgttcgatctgaggagagaaggagatgcgttacagaatggtgaaacgggagaagcaagcgtctcaggcagggactttgctttggtctcaagtgatatgtggctgcaggcactaaaatgtatccgatcaaatgattcttttatggaatttttcgtattttctgcatctgttcattctttggagaacgagtttttaaagaagaggctgaggtatcatgatgataaaaatactgagaaaggcgtaaaaagtttctcggctggaggagttgacagaggtgatgtttatcctgtacaactcaggctctccgttttgcaggaaaccaattcattggcggtcaaaatttgcaaaaaggacaattcagttgaatgcttcagaagagcatgcaagatattcagtttggattctgagcagttgcgcatttgggatatttctggccaaacaaccttgtttttcgaaagtgatgtgagcaattccaaggattgtcaacaacaagcagatcaggaaatcctcctagagctgcagatttatggattatcagactccatcaaattgaaggaatcaaaaaaagaagatggttccacacagcaaaccaatgggattaccaatggcatgaatggtggcacagtgttcagatttggacgaagtaattctttgagctttttgggtaaagctggagaagctggaactttggggttgacaggcttgcagaatctaggaaacacttgtttcatgaacagttcccttcagtgcttggctcacacaccgaagcttgtcgacttctttcttggcgagtacagtaaagaaataaatcttgacaatccattgggaatgaaaggtgagatcgccttagcttttggtgacttgttaaggagtctgtgggctccaggtgcatcaacagtggccccaaggacatttaaagcaaaacttgctcgctttgctcctcagtttagtggctttaatcagcatgattcgcaggagcttctagctttcttgctggatggactccacgaggacttaaaccgtgtaaagaacaagccttacgtggaagcaaaagatggagatggccgtccagacgcagaagtggctgatgaatattggcgaaatcatgtggctcgcaatgattcaataattgttgatgtgtgccaaggccaatacaagtcaacattagtttgtcctatttgcaaaaaggtttctgttatgtttgatccgttcatgtacctatcgctaccattgccatgcacatcaatgcgaacaatggatttaacagtcatgagtgccgatgggagtagtttgcctattccattgactgtcaacgttcctaagtttggaaaatttgaagatcttcataaggctcttgtcactgcctgttctttaccagaggaggagactttattggttactgaggtatacaacaatcggattattcgcttcctggaggagcctactgattcattaaccttgatcagagatggtgacaaacttgtcgtgtatcggttaaagaaggatgcaaacaattctcctttaattgtgtatatgcatcagaagctggaagagcagtttatatctgggaaatctagcccaacttggaaggcatttggaatccccttggtctcaaggctttgtgatgtcgagaatggatctgatgtcgagaacctgtacctgaagctgcttagttcatttaagatgcctactgaattctttacagagaatcttgaaaacccaactgaagaagaagccactgataaaacagataccgatggtactacttcagttgaggatacaaattccactgatgtgaaggagactactgaatctcttccagatcctgtgttgaggctttacctcaccgacgacagaggaaactcgatagaagctgaaatgttgaaagaaaagcctgtaaataaatccaagcggttgaatgtgcttgcacgttggcctgtaaaagagcttgacgtttatgatacttgtcttctgagctccttacctgaggtttccaaatctggaactaagagaccccaagaatccgtttcgcttttcaagtgccttgaagcattcttgacggaggagcctcttggtcctgatgacatgtggtattgtcctgggtgcaaagaacaccggcaagccattaaaaagttagatctctggaggttgccagagatcctggttattcatctgaagaggttttcgtatagccggtttatgaagaacaagctggaggcatatgtggatttcccgctagataatcttgatctatcaagctacatctcctacaagaatggtcagacaacatatcgttacatgctctatgcgattagcaatcactatgggagcatgggaggtggtcattacactgcatatgttcaccatggaggtgatcgatggtatgactttgatgatagccatgtccaccaaatcagccaagaaaagatcaagacctcggctgcttacgttctgttctataaacgccttgtagactaaagaaactgaagcggaaaagacaagaaagtgatcaagatgaaagcagctctgcgttgaggctaatttacagaagagagagagagagttgggaagaagagcaaaagaccgagaggacatgttgcggggaatttattttattcttacaaaaattggtatctgattattttattaaccatattcaattagagaatagaagaatagagaaaagcccttttgtgggatatggttctaaattgttgtttagttcttgtgtgtcagttttggctctcgtcgaccaaagaagattaaagaaacctctaccttattttaactcaattcttttgtttttgcaatgtcctttgctttccaaaattgttagtcttacttttcactactttgatagac

SEQ ID NO: 102743 - protein, 1291 aa, Arabidopsis thaliana
  peptide (1)..(1291): Ceres Seq. ID no. 13611139
  misc_feature (481)..(649): Pfam Name: Domain of Unknown Function (DUF1055) Pfam Description: Domain of Unknown Function (DUF1055)
  misc_feature (822)..(1291): Homolog of NCBI NO: 11993469 NR Description: ubiquitin-specific protease 8 [Arabidopsis
  misc_feature (643)..(1291): Homolog of NCBI NO: 18405549 NR Description: ubiquitin-specific protease 5 (UBP5), putative
  misc_feature (559)..(658): Homolog of NCBI NO: 18405549 NR Description: ubiquitin-specific protease 5 (UBP5), putative
  misc_feature (679)..(1291): Homolog of NCBI NO: 4115922 NR Description: contains similarity to ubiquitin
  misc_feature (1258)..(1289): Homolog of NCBI NO: 4115922 NR Description: contains similarity to ubiquitin
  misc_feature (681)..(1289): Homolog of NCBI NO: 7487641 NR Description: hypothetical protein T4F9.50 - Arabidopsis >gi|4539437|emb|CAB40025.1| putative protein [Arabidopsis >gi|7267756|emb|CAB78182.1| putative protein [Arabidopsis
  misc_feature (681)..(1289): Homolog of NCBI NO: 18413358 NR Description: expressed protein [Arabidopsis thaliana] expressed protein [Arabidopsis thaliana]
  misc_feature (679)..(1289): Homolog of NCBI NO: 7487639 NR Description: hypothetical protein T4F9.30 - Arabidopsis >gi|4539435|emb|CAB40023.1| putative protein [Arabidopsis >gi|7267754|emb|CAB78180.1| putative protein [Arabidopsis
  misc_feature (679)..(1289): Homolog of NCBI NO: 30681490 NR Description: expressed protein [Arabidopsis thaliana]
  misc_feature (559)..(1289): Homolog of NCBI NO: 15223316 NR Description: hypothetical protein [Arabidopsis thaliana]
MAQIRPGGPIRDPNFTKYIASSSSAFIGLVRRLFLLPLEWLREVKMRRQGNFADSSPASAYGAGQIQDPHSDFQGQLEAFTPERDQPYSDSQAEGQWRWERDGPNMSRPMATAVYNEGQQGVDSSRTYYRGQIDPKSGMEKQGSDPRAQPQHQENPKTGYDNNRGVQTFEGLEQKFMDDITRLAKDQIEAEDAEIARHREKINTINARYEEQLATLRARHTGKREEIMRKESLARQQQFKQQTMGMMDQYHPNVVGQANLMPSGHPQGYIGSAQDPAAVADAPPRSYGSDRFEAYGERARFQGGNRDHGFEPRGPYPGGNVYDTSSRSKSSFSDYPEFENEIRVPFFNPDESILEFIVEPFKEIAVLRCCWLSEKHLSFALRIFLCGGGTMNGTSPDESPDSTTQRIDSFNGEQRVYFVPLRWWKDAQDSMPSESVEKREILYTASCGSSYGGPMKLINNIFNSDILFDLRREGDALQNGETGEASVSGRDFALVSSDMWLQALKCIRSNDSFMEFFVFSASVHSLENEFLKKRLRYHDDKNTEKGVKSFSAGGVDRGDVYPVQLRLSVLQETNSLAVKICKKDNSVECFRRACKIFSLDSEQLRIWDISGQTTLFFESDVSNSKDCQQQADQEILLELQIYGLSDSIKLKESKKEDGSTQQTNGITNGMNGGTVFRFGRSNSLSFLGKAGEAGTLGLTGLQNLGNTCFMNSSLQCLAHTPKLVDFFLGEYSKEINLDNPLGMKGEIALAFGDLLRSLWAPGASTVAPRTFKAKLARFAPQFSGFNQHDSQELLAFLLDGLHEDLNRVKNKPYVEAKDGDGRPDAEVADEYWRNHVARNDSIIVDVCQGQYKSTLVCPICKKVSVMFDPFMYLSLPLPCTSMRTMDLTVMSADGSSLPIPLTVNVPKFGKFEDLHKALVTACSLPEEETLLVTEVYNNRIIRFLEEPTDSLTLIRDGDKLVVYRLKKDANNSPLIVYMHQKLEEQFISGKSSPTWKAFGIPLVSRLCDVENGSDVENLYLKLLSSFKMPTEFFTENLENPTEEEATDKTDTDGTTSVEDTNSTDVKETTESLPDPVLRLYLTDDRGNSIEAEMLKEKPVNKSKRLNVLARWPVKELDVYDTCLLSSLPEVSKSGTKRPQESVSLFKCLEAFLTEEPLGPDDMWYCPGCKEHRQAIKKLDLWRLPEILVIHLKRFSYSRFMKNKLEAYVDFPLDNLDLSSYISYKNGQTTYRYMLYAISNHYGSMGGGHYTAYVHHGGDRWYDFDDSHVHQISQEKIKTSAAYVLFYKRLVD

SEQ ID NO: 102744 - protein, 1246 aa, Arabidopsis thaliana
  peptide (1)..(1246): Ceres Seq. ID no. 13611140
  misc_feature (436)..(604): Pfam Name: Domain of Unknown Function (DUF1055) Pfam Description: Domain of Unknown Function (DUF1055)
  misc_feature (777)..(1246): Homolog of NCBI NO: 11993469 NR Description: ubiquitin-specific protease 8 [Arabidopsis
  misc_feature (598)..(1246): Homolog of NCBI NO: 18405549 NR Description: ubiquitin-specific protease 5 (UBP5), putative
  misc_feature (514)..(613): Homolog of NCBI NO: 18405549 NR Description: ubiquitin-specific protease 5 (UBP5), putative
  misc_feature (634)..(1246): Homolog of NCBI NO: 4115922 NR Description: contains similarity to ubiquitin
  misc_feature (1213)..(1244): Homolog of NCBI NO: 4115922 NR Description: contains similarity to ubiquitin
  misc_feature (636)..(1244): Homolog of NCBI NO: 7487641 NR Description: hypothetical protein T4F9.50 - Arabidopsis >gi|4539437|emb|CAB40025.1| putative protein [Arabidopsis >gi|7267756|emb|CAB78182.1| putative protein [Arabidopsis
  misc_feature (636)..(1244): Homolog of NCBI NO: 18413358 NR Description: expressed protein [Arabidopsis thaliana] expressed protein [Arabidopsis thaliana]
  misc_feature (634)..(1244): Homolog of NCBI NO: 7487639 NR Description: hypothetical protein T4F9.30 - Arabidopsis >gi|4539435|emb|CAB40023.1| putative protein [Arabidopsis >gi|7267754|emb|CAB78180.1| putative protein [Arabidopsis
  misc_feature (634)..(1244): Homolog of NCBI NO: 30681490 NR Description: expressed protein [Arabidopsis thaliana]
  misc_feature (514)..(1244): Homolog of NCBI NO: 15223316 NR Description: hypothetical protein [Arabidopsis thaliana]
MRRQGNFADSSPASAYGAGQIQDPHSDFQGQLEAFTPERDQPYSDSQAEGQWRWERDGPNMSRPMATAVYNEGQQGVDSSRTYYRGQIDPKSGMEKQGSDPRAQPQHQENPKTGYDNNRGVQTFEGLEQKFMDDITRLAKDQIEAEDAEIARHREKINTINARYEEQLATLRARHTGKREEIMRKESLARQQQFKQQTMGMMDQYHPNVVGQANLMPSGHPQGYIGSAQDPAAVADAPPRSYGSDRFEAYGERARFQGGNRDHGFEPRGPYPGGNVYDTSSRSKSSFSDYPEFENEIRVPFFNPDESILEFIVEPFKEIAVLRCCWLSEKHLSFALRIFLCGGGTMNGTSPDESPDSTTQRIDSFNGEQRVYFVPLRWWKDAQDSMPSESVEKREILYTASCGSSYGGPMKLINNIFNSDILFDLRREGDALQNGETGEASVSGRDFALVSSDMWLQALKCIRSNDSFMEFFVFSASVHSLENEFLKKRLRYHDDKNTEKGVKSFSAGGVDRGDVYPVQLRLSVLQETNSLAVKICKKDNSVECFRRACKIFSLDSEQLRIWDISGQTTLFFESDVSNSKDCQQQADQEILLELQIYGLSDSIKLKESKKEDGSTQQTNGITNGMNGGTVFRFGRSNSLSFLGKAGEAGTLGLTGLQNLGNTCFMNSSLQCLAHTPKLVDFFLGEYSKEINLDNPLGMKGEIALAFGDLLRSLWAPGASTVAPRTFKAKLARFAPQFSGFNQHDSQELLAFLLDGLHEDLNRVKNKPYVEAKDGDGRPDAEVADEYWRNHVARNDSIIVDVCQGQYKSTLVCPICKKVSVMFDPFMYLSLPLPCTSMRTMDLTVMSADGSSLPIPLTVNVPKFGKFEDLHKALVTACSLPEEETLLVTEVYNNRIIRFLEEPTDSLTLIRDGDKLVVYRLKKDANNSPLIVYMHQKLEEQFISGKSSPTWKAFGIPLVSRLCDVENGSDVENLYLKLLSSFKMPTEFFTENLENPTEEEATDKTDTDGTTSVEDTNSTDVKETTESLPDPVLRLYLTDDRGNSIEAEMLKEKPVNKSKRLNVLARWPVKELDVYDTCLLSSLPEVSKSGTKRPQESVSLFKCLEAFLTEEPLGPDDMWYCPGCKEHRQAIKKLDLWRLPEILVIHLKRFSYSRFMKNKLEAYVDFPLDNLDLSSYISYKNGQTTYRYMLYAISNHYGSMGGGHYTAYVHHGGDRWYDFDDSHVHQISQEKIKTSAAYVLFYKRLVD

SEQ ID NO: 102745 - protein, 1186 aa, Arabidopsis thaliana
  peptide (1)..(1186): Ceres Seq. ID no. 13611141
  misc_feature (376)..(544): Pfam Name: Domain of Unknown Function (DUF1055) Pfam Description: Domain of Unknown Function (DUF1055)
  misc_feature (717)..(1186): Homolog of NCBI NO: 11993469 NR Description: ubiquitin-specific protease 8 [Arabidopsis
  misc_feature (538)..(1186): Homolog of NCBI NO: 18405549 NR Description: ubiquitin-specific protease 5 (UBP5), putative
  misc_feature (454)..(553): Homolog of NCBI NO: 18405549 NR Description: ubiquitin-specific protease 5 (UBP5), putative
  misc_feature (574)..(1186): Homolog of NCBI NO: 4115922 NR Description: contains similarity to ubiquitin
  misc_feature (1153)..(1184): Homolog of NCBI NO: 4115922 NR Description: contains similarity to ubiquitin
  misc_feature (576)..(1184): Homolog of NCBI NO: 7487641 NR Description: hypothetical protein T4F9.50 - Arabidopsis >gi|4539437|emb|CAB40025.1| putative protein [Arabidopsis >gi|7267756|emb|CAB78182.1| putative protein [Arabidopsis
  misc_feature (576)..(1184): Homolog of NCBI NO: 18413358 NR Description: expressed protein [Arabidopsis thaliana] expressed protein [Arabidopsis thaliana]
  misc_feature (574)..(1184): Homolog of NCBI NO: 7487639 NR Description: hypothetical protein T4F9.30 - Arabidopsis >gi|4539435|emb|CAB40023.1| putative protein [Arabidopsis >gi|7267754|emb|CAB78180.1| putative protein [Arabidopsis
  misc_feature (574)..(1184): Homolog of NCBI NO: 30681490 NR Description: expressed protein [Arabidopsis thaliana]
  misc_feature (454)..(1184): Homolog of NCBI NO: 15223316 NR Description: hypothetical protein [Arabidopsis thaliana]
MSRPMATAVYNEGQQGVDSSRTYYRGQIDPKSGMEKQGSDPRAQPQHQENPKTGYDNNRGVQTFEGLEQKFMDDITRLAKDQIEAEDAEIARHREKINTINARYEEQLATLRARHTGKREEIMRKESLARQQQFKQQTMGMMDQYHPNVVGQANLMPSGHPQGYIGSAQDPAAVADAPPRSYGSDRFEAYGERARFQGGNRDHGFEPRGPYPGGNVYDTSSRSKSSFSDYPEFENEIRVPFFNPDESILEFIVEPFKEIAVLRCCWLSEKHLSFALRIFLCGGGTMNGTSPDESPDSTTQRIDSFNGEQRVYFVPLRWWKDAQDSMPSESVEKREILYTASCGSSYGGPMKLINNIFNSDILFDLRREGDALQNGETGEASVSGRDFALVSSDMWLQALKCIRSNDSFMEFFVFSASVHSLENEFLKKRLRYHDDKNTEKGVKSFSAGGVDRGDVYPVQLRLSVLQETNSLAVKICKKDNSVECFRRACKIFSLDSEQLRIWDISGQTTLFFESDVSNSKDCQQQADQEILLELQIYGLSDSIKLKESKKEDGSTQQTNGITNGMNGGTVFRFGRSNSLSFLGKAGEAGTLGLTGLQNLGNTCFMNSSLQCLAHTPKLVDFFLGEYSKEINLDNPLGMKGEIALAFGDLLRSLWAPGASTVAPRTFKAKLARFAPQFSGFNQHDSQELLAFLLDGLHEDLNRVKNKPYVEAKDGDGRPDAEVADEYWRNHVARNDSIIVDVCQGQYKSTLVCPICKKVSVMFDPFMYLSLPLPCTSMRTMDLTVMSADGSSLPIPLTVNVPKFGKFEDLHKALVTACSLPEEETLLVTEVYNNRIIRFLEEPTDSLTLIRDGDKLVVYRLKKDANNSPLIVYMHQKLEEQFISGKSSPTWKAFGIPLVSRLCDVENGSDVENLYLKLLSSFKMPTEFFTENLENPTEEEATDKTDTDGTTSVEDTNSTDVKETTESLPDPVLRLYLTDDRGNSIEAEMLKEKPVNKSKRLNVLARWPVKELDVYDTCLLSSLPEVSKSGTKRPQESVSLFKCLEAFLTEEPLGPDDMWYCPGCKEHRQAIKKLDLWRLPEILVIHLKRFSYSRFMKNKLEAYVDFPLDNLDLSSYISYKNGQTTYRYMLYAISNHYGSMGGGHYTAYVHHGGDRWYDFDDSHVHQISQEKIKTSAAYVLFYKRLVD

SEQ ID NO: 102746 - DNA, 1129 bp, Arabidopsis thaliana
  misc_feature (1)..(1129): Ceres Seq. ID no. 13611142
  misc_feature: MA Experiment ID: 20000173 Result: Down-regulated in Transcription
  misc_feature: MA Experiment 20000173 PARAMETER Experiment Name: At_42deg_Heat_P Parameter: Age (day) Value: 14
  misc_feature: MA Experiment 20000173 PARAMETER Experiment Name: At_42deg_Heat_P Parameter: Organism Value: A. thaliana
  misc_feature: MA Experiment 20000173 PARAMETER Experiment Name: At_42deg_Heat_P Parameter: Plant Line Value: WS
  misc_feature: MA Experiment 20000173 PARAMETER Experiment Name: At_42deg_Heat_P Parameter: Temperature (deg C) Value: 42 vs. 22
  misc_feature: MA Experiment 20000173 PARAMETER Experiment Name: At_42deg_Heat_P Parameter: Timepoint (hr) Value: 6
  misc_feature: MA Experiment 20000173 PARAMETER Experiment Name: At_42deg_Heat_P Parameter: Tissue Value: Aerial
  misc_feature: MA Experiment ID: 20000180 Result: Up-regulated in Transcription
  misc_feature: MA Experiment 20000180 PARAMETER Experiment Name: At_Germinating_Seeds_P Parameter: Age (hr) Value: 24 vs. 0
  misc_feature: MA Experiment 20000180 PARAMETER Experiment Name: At_Germinating_Seeds_P Parameter: Tissue Value: Germinating Seeds
  misc_feature: MA Experiment ID: 20000182 Result: Down-regulated in Transcription
  misc_feature: MA Experiment 20000182 PARAMETER Experiment Name: At_2mM_SA_P Parameter: Age (day) Value: 14
  misc_feature: MA Experiment 20000182 PARAMETER Experiment Name: At_2mM_SA_P Parameter: Organism Value: A. thaliana
  misc_feature: MA Experiment 20000182 PARAMETER Experiment Name: At_2mM_SA_P Parameter: Plant Line Value: WS
  misc_feature: MA Experiment 20000182 PARAMETER Experiment Name: At_2mM_SA_P Parameter: Timepoint (hr) Value: 6
  misc_feature: MA Experiment 20000182 PARAMETER Experiment Name: At_2mM_SA_P Parameter: Tissue Value: Aerial
  misc_feature: MA Experiment 20000182 PARAMETER Experiment Name: At_2mM_SA_P Parameter: Treatment Value: 2mM SA vs. No Treatment
  misc_feature: MA Experiment ID: 20000184 Result: Up-regulated in Transcription
  misc_feature: MA Experiment 20000184 PARAMETER Experiment Name: At_Shoots__P Parameter: Age (day) Value: 7
  misc_feature: MA Experiment 20000184 PARAMETER Experiment Name: At_Shoots__P Parameter: Tissue Value: Shoots vs. Whole Plant
  misc_feature: MA Experiment ID: 20000185 Result: Down-regulated in Transcription
  misc_feature: MA Experiment 20000185 PARAMETER Experiment Name: At_Roots__P Parameter: Age (day) Value: 7 vs. 21
  misc_feature: MA Experiment 20000185 PARAMETER Experiment Name: At_Roots__P Parameter: Organism Value: A. thaliana
  misc_feature: MA Experiment 20000185 PARAMETER Experiment Name: At_Roots__P Parameter: Tissue Value: Roots vs. Whole Plant
  misc_feature: MA Experiment ID: 20000235 Result: Down-regulated in Transcription
  misc_feature: MA Experiment 20000235 PARAMETER Experiment Name: At_Siliques_P Parameter: Age (day) Value: 21
  misc_feature: MA Experiment 20000235 PARAMETER Experiment Name: At_Siliques_P Parameter: Organism Value: A. thaliana
  misc_feature: MA Experiment 20000235 PARAMETER Experiment Name: At_Siliques_P Parameter: Plant Line Value: WS
  misc_feature: MA Experiment 20000235 PARAMETER Experiment Name: At_Siliques_P Parameter: Tissue Value: 5-10mm Siliques vs. Whole Plant
  misc_feature: MA Experiment ID: 20000264 Result: Down-regulated in Transcription
  misc_feature: MA Experiment 20000264 PARAMETER Experiment Name: At_Open_Flower_P Parameter: Age (day) Value: 21
  misc_feature: MA Experiment 20000264 PARAMETER Experiment Name: At_Open_Flower_P Parameter: Plant Line Value: WS
  misc_feature: MA Experiment 20000264 PARAMETER Experiment Name: At_Open_Flower_P Parameter: Tissue Value: Open Flower vs. Whole Plant
  misc_feature: MA Experiment ID: 20000437 Result: Down-regulated in Transcription
  misc_feature: MA Experiment 20000437 PARAMETER Experiment Name: At_Drought_P Parameter: Age (day) Value: 8
  misc_feature: MA Experiment 20000437 PARAMETER Experiment Name: At_Drought_P Parameter: Organism Value: A. thaliana
  misc_feature: MA Experiment 20000437 PARAMETER Experiment Name: At_Drought_P Parameter: Plant Line Value: WS
  misc_feature: MA Experiment 20000437 PARAMETER Experiment Name: At_Drought_P Parameter: Timepoint (hr) Value: 24
  misc_feature: MA Experiment 20000437 PARAMETER Experiment Name: At_Drought_P Parameter: Tissue Value: Whole Plant
  misc_feature: MA Experiment 20000437 PARAMETER Experiment Name: At_Drought_P Parameter: Treatment Value: Drought vs. No Drought
  misc_feature: MA Experiment ID: 20000438 Result: Up-regulated in Transcription
  misc_feature: MA Experiment 20000438 PARAMETER Experiment Name: At_Shoots__P Parameter: Age (day) Value: 14
  misc_feature: MA Experiment 20000438 PARAMETER Experiment Name: At_Shoots__P Parameter: Tissue Value: Shoots vs. Whole Plant
  misc_feature: MA Experiment ID: 20000439 Result: Down-regulated in Transcription
  misc_feature: MA Experiment 20000439 PARAMETER Experiment Name: At_Roots__P Parameter: Age (day) Value: 14 vs. 21
  misc_feature: MA Experiment 20000439 PARAMETER Experiment Name: At_Roots__P Parameter: Organism Value: A. thaliana
  misc_feature: MA Experiment 20000439 PARAMETER Experiment Name: At_Roots__P Parameter: Tissue Value: Roots vs. Whole Plant
  misc_feature: MA Experiment ID: 20000573 Result: Down-regulated in Transcription
  misc_feature: MA Experiment 20000573 PARAMETER Experiment Name: At_100uM_ABA_Mutants__P Parameter: Organism Value: A. thaliana
  misc_feature: MA Experiment 20000573 PARAMETER Experiment Name: At_100uM_ABA_Mutants__P Parameter: Plant Line Value: CS22 vs. Ler wt
  misc_feature: MA Experiment 20000573 PARAMETER Experiment Name: At_100uM_ABA_Mutants__P Parameter: Timepoint (hr) Value: N/A
  misc_feature: MA Experiment 20000573 PARAMETER Experiment Name: At_100uM_ABA_Mutants__P Parameter: Tissue Value: Whole Plant
  misc_feature: MA Experiment 20000573 PARAMETER Experiment Name: At_100uM_ABA_Mutants__P Parameter: Treatment Value: None
  misc_feature: MA Experiment ID: 20000794 Result: Down-regulated in Transcription
  misc_feature: MA Experiment 20000794 PARAMETER Experiment Name: At_Petals_P Parameter: Age (day) Value: 23-25 days
  misc_feature: MA Experiment 20000794 PARAMETER Experiment Name: At_Petals_P Parameter: Plant Line Value: WS
  misc_feature: MA Experiment 20000794 PARAMETER Experiment Name: At_Petals_P Parameter: Tissue Value: Petals vs. Whole plant
  misc_feature: MA Experiment ID: 20001248 Result: Down-regulated in Transcription
  misc_feature: MA Experiment 20001248 PARAMETER Experiment Name: At_Far-red-induction_P Parameter: Age (day) Value: 7
  misc_feature: MA Experiment 20001248 PARAMETER Experiment Name: At_Far-red-induction_P Parameter: Light Value: Far-red vs. White
  misc_feature: MA Experiment 20001248 PARAMETER Experiment Name: At_Far-red-induction_P Parameter: Organism Value: A. thaliana
  misc_feature: MA Experiment 20001248 PARAMETER Experiment Name: At_Far-red-induction_P Parameter: Plant Line Value: Columbia
  misc_feature: MA Experiment 20001248 PARAMETER Experiment Name: At_Far-red-induction_P Parameter: Timepoint (hr) Value: 4
  misc_feature: MA Experiment 20001248 PARAMETER Experiment Name: At_Far-red-induction_P Parameter: Tissue Value: Whole Plant
  misc_feature: MA Experiment ID: 20001450 Result: Down-regulated in Transcription
  misc_feature: MA Experiment 20001450 PARAMETER Experiment Name: At_Far-red-induction_P Parameter: Age (day) Value: 7
  misc_feature: MA Experiment 20001450 PARAMETER Experiment Name: At_Far-red-induction_P Parameter: Light Value: Far-red vs. White
  misc_feature: MA Experiment 20001450 PARAMETER Experiment Name: At_Far-red-induction_P Parameter: Organism Value: A. thaliana
  misc_feature: MA Experiment 20001450 PARAMETER Experiment Name: At_Far-red-induction_P Parameter: Plant Line Value: Columbia
  misc_feature: MA Experiment 20001450 PARAMETER Experiment Name: At_Far-red-induction_P Parameter: Timepoint (hr) Value: 8
  misc_feature: MA Experiment 20001450 PARAMETER Experiment Name: At_Far-red-induction_P Parameter: Tissue Value: Whole Plant
  misc_feature: MA Experiment ID: 20001557 Result: Down-regulated in Transcription
  misc_feature: MA Experiment 20001557 PARAMETER Experiment Name: At_Drought_Soil_Dry_P Parameter: Age (day) Value: 27
  misc_feature: MA Experiment 20001557 PARAMETER Experiment Name: At_Drought_Soil_Dry_P Parameter: Organism Value: A. thaliana
  misc_feature: MA Experiment 20001557 PARAMETER Experiment Name: At_Drought_Soil_Dry_P Parameter: Plant Line Value: WS
  misc_feature: MA Experiment 20001557 PARAMETER Experiment Name: At_Drought_Soil_Dry_P Parameter: Post Timepoint (hr) Value: 3
  misc_feature: MA Experiment 20001557 PARAMETER Experiment Name: At_Drought_Soil_Dry_P Parameter: Post-Treatment Value: Re-Water vs. No Drought
  misc_feature: MA Experiment 20001557 PARAMETER Experiment Name: At_Drought_Soil_Dry_P Parameter: Timepoint (day) Value: 13
  misc_feature: MA Experiment 20001557 PARAMETER Experiment Name: At_Drought_Soil_Dry_P Parameter: Treatment Value: Drought vs. No Drought
  misc_feature: MA Experiment ID: 20001559 Result: Down-regulated in Transcription
  misc_feature: MA Experiment 20001559 PARAMETER Experiment Name: At_Drought_Soil_Dry_P Parameter: Age (day) Value: 28
  misc_feature: MA Experiment 20001559 PARAMETER Experiment Name: At_Drought_Soil_Dry_P Parameter: Organism Value: A. thaliana
  misc_feature: MA Experiment 20001559 PARAMETER Experiment Name: At_Drought_Soil_Dry_P Parameter: Plant Line Value: WS
  misc_feature: MA Experiment 20001559 PARAMETER Experiment Name: At_Drought_Soil_Dry_P Parameter: Post Timepoint (hr) Value: 29
  misc_feature: MA Experiment 20001559 PARAMETER Experiment Name: At_Drought_Soil_Dry_P Parameter: Post-Treatment Value: Re-Water vs. No Drought
  misc_feature: MA Experiment 20001559 PARAMETER Experiment Name: At_Drought_Soil_Dry_P Parameter: Timepoint (day) Value: 14
  misc_feature: MA Experiment 20001559 PARAMETER Experiment Name: At_Drought_Soil_Dry_P Parameter: Treatment Value: Drought vs. No Drought
  misc_feature: MA Experiment ID: 20001757 Result: Up-regulated in Transcription
  misc_feature: MA Experiment 20001757 PARAMETER Experiment Name: At_50mM_NH4NO3_L-to-H_P Parameter: Timepoint (hr) Value: 6
  misc_feature: MA Experiment 20001757 PARAMETER Experiment Name: At_50mM_NH4NO3_L-to-H_P Parameter: Tissue Value: Leaf
  misc_feature: MA Experiment 20001757 PARAMETER Experiment Name: At_50mM_NH4NO3_L-to-H_P Parameter: Treatment Value: 50mM NH4NO3 vs 100mM Mannitol
  misc_feature: MA Experiment ID: 20001905 Result: Down-regulated in Transcription
  misc_feature: MA Experiment 20001905 PARAMETER Experiment Name: At_Drought_Reproduction_P Parameter: Age (day) Value: 40
  misc_feature: MA Experiment 20001905 PARAMETER Experiment Name: At_Drought_Reproduction_P Parameter: Organism Value: A. thaliana
  misc_feature: MA Experiment 20001905 PARAMETER Experiment Name: At_Drought_Reproduction_P Parameter: Plant Line Value: WS
  misc_feature: MA Experiment 20001905 PARAMETER Experiment Name: At_Drought_Reproduction_P Parameter: Timepoint (day) Value: 10
  misc_feature: MA Experiment 20001905 PARAMETER Experiment Name: At_Drought_Reproduction_P Parameter: Tissue Value: Rosettes
  misc_feature: MA Experiment 20001905 PARAMETER Experiment Name: At_Drought_Reproduction_P Parameter: Treatment Value: Drought vs. No Drought
aaccattcctttccttatcttcttcctcttttgcttttctaatctctcaatggctaccttaaaacacaaacctgtaaatttggtattttacgtttataatttgattattatattctcctcccatagttccacggcggagctccgcaggctactgcagccatcaaaaaccgatggtacagtgagctttctcgttatcggagactggggaagaagaggctcctataatcagtcccaagtagctcttcagatgggagaaatcggagagaaattagatatcgattttgtgatttctactggagataatttttacgacaatggtttaaccagcttgcacgatcctctatttcaagattcttttaccaacatttataccgctccgagcttgcagaaaccttggtatagtgttttaggaaatcatgattatagaggtgacgtcagggcacaacttagccctatgctcagagctctggacaacagatgggtttgcatgagatctttcattgtaaatgctgagatcgtcgatttgttcttcgtcgacacaactccgttcgtcgataaatactttattcaaccaaataagcatgtttatgactggagcggtgtattacctaggcaaacatatctgaataatctcttaaaggaactcgacgtggcgttgagagagtcagtcgcaaagtggaaaatagtgattggtcaccatacgatcaaaagcgcaggccaccacgggaacaccattgagttggagaaacaccttttacctattctccaagcaaatgaagtggatctctacgtaaacggacatgatcattgcttagagcacataagcagcgtggacagtaacatacaatttatgacaagtggaggtggatccaaggcctggaaaggaggtgacgtgaactacgttgaaccagaagagatgaggttttactacgacggacaaggtttcatgtcggttcacgtttcagaagctgaactgcgtgtagtcttttatgatgtttttggacacgttctgcatcattggaagaagacttacaaggaggcgctttatttcgcttcttgattccaatttaatcggacgtaattgtttatgatcgatgtactatgaaattatcaatatcgtacttcgtcg

SEQ ID NO: 102747 - protein, 352 aa, Arabidopsis thaliana
  peptide (1)..(352): Ceres Seq. ID no. 13611143
  misc_feature (60)..(271): Pfam Name: Calcineurin-like phosphoesterase Pfam Description: Calcineurin-like phosphoesterase
  misc_feature (1)..(352): Homolog of NCBI NO: 30683951 NR Description: calcineurin-like phosphoesterase family thaliana] >gi|24030193|gb|AAN41277.1| putative purple acid
  misc_feature (1)..(352): Homolog of NCBI NO: 30911094 NR Description: putative purple acid phosphatase [Arabidopsis
  misc_feature (1)..(352): Homolog of NCBI NO: 25752249 NR Description: probable acid phosphatase (EC 3.1.3.2) F10B6.10
  misc_feature (23)..(349): Homolog of NCBI NO: 22325419 NR Description: calcineurin-like phosphoesterase family thaliana] >gi|17529296|gb|AAL38875.1| putative purple acid [Arabidopsis thaliana] >gi|20257479|gb|AAM15909.1|AF492660_1
  misc_feature (23)..(349): Homolog of NCBI NO: 25752251 NR Description: probable acid phosphatase (EC 3.1.3.2) At2g01890
  misc_feature (23)..(325): Homolog of NCBI NO: 6635445 NR Description: putative purple acid phosphatase precursor
TIPFLIFFLFCFSNLSMATLKHKPVNLVFYVYNLIIIFSSHSSTAELRRLLQPSKTDGTVSFLVIGDWGRRGSYNQSQVALQMGEIGEKLDIDFVISTGDNFYDNGLTSLHDPLFQDSFTNIYTAPSLQKPWYSVLGNHDYRGDVRAQLSPMLRALDNRWVCMRSFIVNAEIVDLFFVDTTPFVDKYFIQPNKHVYDWSGVLPRQTYLNNLLKELDVALRESVAKWKIVIGHHTIKSAGHHGNTIELEKHLLPILQANEVDLYVNGHDHCLEHISSVDSNIQFMTSGGGSKAWKGGDVNYVEPEEMRFYYDGQGFMSVHVSEAELRVVFYDVFGHVLHHWKKTYKEALYFAS

SEQ ID NO: 102748 - protein, 336 aa, Arabidopsis thaliana; identical to SEQ ID NO: 29307
  peptide (1)..(336): Ceres Seq. ID no. 13611144
  misc_feature (44)..(255): Pfam Name: Calcineurin-like phosphoesterase Pfam Description: Calcineurin-like phosphoesterase
  misc_feature (1)..(336): Homolog of NCBI NO: 30683951 NR Description: calcineurin-like phosphoesterase family thaliana] >gi|24030193|gb|AAN41277.1| putative purple acid
  misc_feature (1)..(336): Homolog of NCBI NO: 30911094 NR Description: putative purple acid phosphatase [Arabidopsis
  misc_feature (1)..(336): Homolog of NCBI NO: 25752249 NR Description: probable acid phosphatase (EC 3.1.3.2) F10B6.10
  misc_feature (7)..(333): Homolog of NCBI NO: 22325419 NR Description: calcineurin-like phosphoesterase family thaliana] >gi|17529296|gb|AAL38875.1| putative purple acid [Arabidopsis thaliana] >gi|20257479|gb|AAM15909.1|AF492660_1
  misc_feature (7)..(333): Homolog of NCBI NO: 25752251 NR Description: probable acid phosphatase (EC 3.1.3.2) At2g01890
  misc_feature (7)..(309): Homolog of NCBI NO: 6635445 NR Description: putative purple acid phosphatase precursor

SEQ ID NO: 102749 - protein, 270 aa, Arabidopsis thaliana; identical to SEQ ID NO: 29308
  peptide (1)..(270): Ceres Seq. ID no. 13611145
  misc_feature (1)..(189): Pfam Name: Calcineurin-like phosphoesterase Pfam Description: Calcineurin-like phosphoesterase
  misc_feature (1)..(270): Homolog of NCBI NO: 30683951 NR Description: calcineurin-like phosphoesterase family thaliana] >gi|24030193|gb|AAN41277.1| putative purple acid
  misc_feature (1)..(270): Homolog of NCBI NO: 30911094 NR Description: putative purple acid phosphatase [Arabidopsis
  misc_feature (1)..(270): Homolog of NCBI NO: 25752249 NR Description: probable acid phosphatase (EC 3.1.3.2) F10B6.10
  misc_feature (1)..(267): Homolog of NCBI NO: 22325419 NR Description: calcineurin-like phosphoesterase family thaliana] >gi|17529296|gb|AAL38875.1| putative purple acid [Arabidopsis thaliana] >gi|20257479|gb|AAM15909.1|AF492660_1
  misc_feature (1)..(267): Homolog of NCBI NO: 25752251 NR Description: probable acid phosphatase (EC 3.1.3.2) At2g01890
  misc_feature (1)..(243): Homolog of NCBI NO: 6635445 NR Description: putative purple acid phosphatase precursor

SEQ ID NO: 102750 - DNA, 753 bp, Arabidopsis thaliana
  misc_feature (1)..(753): Ceres Seq. ID no. 13611158
  misc_feature: MA Experiment ID: 108473 Result: Down-regulated in Transcription
  misc_feature: MA Experiment 108473 PARAMETER Experiment Name: At_Drought_Flowers_cDNA_P Parameter: Timepoint (hr) Value: 7 d
  misc_feature: MA Experiment 108473 PARAMETER Experiment Name: At_Drought_Flowers_cDNA_P Parameter: Tissue Value: Flower
  misc_feature: MA Experiment 108473 PARAMETER Experiment Name: At_Drought_Flowers_cDNA_P Parameter: Treatment Value: Drought vs. No Drought
  misc_feature: MA Experiment ID: 108501 Result: Down-regulated in Transcription
  misc_feature: MA Experiment 108501 PARAMETER Experiment Name: At_ap2_floral_buds_cDNA_P Parameter: Plant Line Value: ap2 (Ler.)
  misc_feature: MA Experiment 108501 PARAMETER Experiment Name: At_ap2_floral_buds_cDNA_P Parameter: Tissue Value: Closed Flower
  misc_feature: MA Experiment ID: 108667 Result: Down-regulated in Transcription
  misc_feature: MA Experiment 108667 PARAMETER Experiment Name: At_2mM_SA_cDNA_P Parameter: Plant Line Value: WS
  misc_feature: MA Experiment 108667 PARAMETER Experiment Name: At_2mM_SA_cDNA_P Parameter: Timepoint (hr) Value: 1
  misc_feature: MA Experiment 108667 PARAMETER Experiment Name: At_2mM_SA_cDNA_P Parameter: Treatment Value: 2mM SA vs. No Treatment
  misc_feature: MA Experiment ID: 20000184 Result: Down-regulated in Transcription
  misc_feature: MA Experiment 20000184 PARAMETER Experiment Name: At_Shoots__P Parameter: Age (day) Value: 7
  misc_feature: MA Experiment 20000184 PARAMETER Experiment Name: At_Shoots__P Parameter: Tissue Value: Shoots vs. Whole Plant
  misc_feature: MA Experiment ID: 20000234 Result: Down-regulated in Transcription
  misc_feature: MA Experiment 20000234 PARAMETER Experiment Name: At_Siliques_P Parameter: Age (day) Value: 21
  misc_feature: MA Experiment 20000234 PARAMETER Experiment Name: At_Siliques_P Parameter: Organism Value: A. thaliana
  misc_feature: MA Experiment 20000234 PARAMETER Experiment Name: At_Siliques_P Parameter: Plant Line Value: WS
  misc_feature: MA Experiment 20000234 PARAMETER Experiment Name: At_Siliques_P Parameter: Tissue Value: Less Than 5mm Siliques vs. Whole Plant
  misc_feature: MA Experiment ID: 20000235 Result: Down-regulated in Transcription
  misc_feature: MA Experiment 20000235 PARAMETER Experiment Name: At_Siliques_P Parameter: Age (day) Value: 21
  misc_feature: MA Experiment 20000235 PARAMETER Experiment Name: At_Siliques_P Parameter: Organism Value: A. thaliana
  misc_feature: MA Experiment 20000235 PARAMETER Experiment Name: At_Siliques_P Parameter: Plant Line Value: WS
  misc_feature: MA Experiment 20000235 PARAMETER Experiment Name: At_Siliques_P Parameter: Tissue Value: 5-10mm Siliques vs. Whole Plant
  misc_feature: MA Experiment ID: 20000265 Result: Up-regulated in Transcription
  misc_feature: MA Experiment 20000265 PARAMETER Experiment Name: At_Open_Flower_P Parameter: Age (day) Value: 21
  misc_feature: MA Experiment 20000265 PARAMETER Experiment Name: At_Open_Flower_P Parameter: Plant Line Value: WS
  misc_feature: MA Experiment 20000265 PARAMETER Experiment Name: At_Open_Flower_P Parameter: Tissue Value: Closed Flower vs. Whole Plant
  misc_feature: MA Experiment ID: 20000286 Result: Up-regulated in Transcription
  misc_feature: MA Experiment 20000286 PARAMETER Experiment Name: At_Open_Flower_P Parameter: Age (day) Value: 21
  misc_feature: MA Experiment 20000286 PARAMETER Experiment Name: At_Open_Flower_P Parameter: Plant Line Value: WS
  misc_feature: MA Experiment 20000286 PARAMETER Experiment Name: At_Open_Flower_P Parameter: Tissue Value: Half Open vs. Whole Plant
  misc_feature: MA Experiment ID: 20000438 Result: Down-regulated in Transcription
  misc_feature: MA Experiment 20000438 PARAMETER Experiment Name: At_Shoots__P Parameter: Age (day) Value: 14
  misc_feature: MA Experiment 20000438 PARAMETER Experiment Name: At_Shoots__P Parameter: Tissue Value: Shoots vs. Whole Plant
  misc_feature: MA Experiment ID: 20000439 Result: Down-regulated in Transcription
  misc_feature: MA Experiment 20000439 PARAMETER Experiment Name: At_Roots__P Parameter: Age (day) Value: 14 vs. 21
  misc_feature: MA Experiment 20000439 PARAMETER Experiment Name: At_Roots__P Parameter: Organism Value: A. thaliana
  misc_feature: MA Experiment 20000439 PARAMETER Experiment Name: At_Roots__P Parameter: Tissue Value: Roots vs. Whole Plant
  misc_feature: MA Experiment ID: 20001760 Result: Up-regulated in Transcription
  misc_feature: MA Experiment 20001760 PARAMETER Experiment Name: At_50mM_NH4NO3_L-to-H_P Parameter: Timepoint (hr) Value: 2
  misc_feature: MA Experiment 20001760 PARAMETER Experiment Name: At_50mM_NH4NO3_L-to-H_P Parameter: Tissue Value: Siliques
  misc_feature: MA Experiment 20001760 PARAMETER Experiment Name: At_50mM_NH4NO3_L-to-H_P Parameter: Treatment Value: 50mM NH4NO3 vs 100mM Mannitol
  misc_feature: MA Experiment ID: 20001761 Result: Up-regulated in Transcription
  misc_feature: MA Experiment 20001761 PARAMETER Experiment Name: At_50mM_NH4NO3_L-to-H_P Parameter: Timepoint (hr) Value: 4
  misc_feature: MA Experiment 20001761 PARAMETER Experiment Name: At_50mM_NH4NO3_L-to-H_P Parameter: Tissue Value: Siliques
  misc_feature: MA Experiment 20001761 PARAMETER Experiment Name: At_50mM_NH4NO3_L-to-H_P Parameter: Treatment Value: 50mM NH4NO3 vs 100mM Mannitol
  misc_feature: MA Experiment ID: 20001773 Result: Up-regulated in Transcription
  misc_feature: MA Experiment 20001773 PARAMETER Experiment Name: At_Far-red-enriched-adult_P Parameter: Age (day) Value: 30
  misc_feature: MA Experiment 20001773 PARAMETER Experiment Name: At_Far-red-enriched-adult_P Parameter: Light Value: Far-red enriched vs. White
  misc_feature: MA Experiment 20001773 PARAMETER Experiment Name: At_Far-red-enriched-adult_P Parameter: Organism Value: A. thaliana
  misc_feature: MA Experiment 20001773 PARAMETER Experiment Name: At_Far-red-enriched-adult_P Parameter: Plant Line Value: Columbia
  misc_feature: MA Experiment 20001773 PARAMETER Experiment Name: At_Far-red-enriched-adult_P Parameter: Timepoint (hr) Value: 48
  misc_feature: MA Experiment 20001773 PARAMETER Experiment Name: At_Far-red-enriched-adult_P Parameter: Tissue Value: Aerial
  misc_feature: MA Experiment ID: 20001910 Result: Down-regulated in Transcription
  misc_feature: MA Experiment 20001910 PARAMETER Experiment Name: At_Drought_Reproduction_P Parameter: Age (day) Value: 37
  misc_feature: MA Experiment 20001910 PARAMETER Experiment Name: At_Drought_Reproduction_P Parameter: Organism Value: A. thaliana
  misc_feature: MA Experiment 20001910 PARAMETER Experiment Name: At_Drought_Reproduction_P Parameter: Plant Line Value: WS
  misc_feature: MA Experiment 20001910 PARAMETER Experiment Name: At_Drought_Reproduction_P Parameter: Timepoint (day) Value: 7
  misc_feature: MA Experiment 20001910 PARAMETER Experiment Name: At_Drought_Reproduction_P Parameter: Tissue Value: Flowers
  misc_feature: MA Experiment 20001910 PARAMETER Experiment Name: At_Drought_Reproduction_P Parameter: Treatment Value: Drought vs. No Drought
gacaaacatcacagagtaagtaagaatggtacagacgaagaagttcagaggtgtcaggcaacgccattggggttcttgggtcgctgagattcgtcatcctctcttgaaacggaggatttggctagggacgttcgagaccgcagaggaggcagcaagagcatacgacgaggccgccgttttaatgagcggccgcaacgccaaaaccaactttcccctcaacaacaacaacaccggagaaacttccgagggcaaaaccgatatttcagcttcgtccacaatgtcatcctcaacatcatcttcatcgctctcttccatcctcagcgccaaactgaggaaatgctgcaagtctccttccccatccctcacctgcctccgtcttgacacagccagctcccatatcggcgtctggcagaaacgggccggttcaaagtctgactccagctgggtcatgacggtggagctaggtcccgcaagctcctcccaagagactactagtaaagcttcacaagacgctattcttgctccgaccactgaagttgaaattggtggcagcagagaagaagtattggatgaggaagaaaaggttgctttgcaaatgatagaggagcttctcaatacaaactaaatcttatttgcttatatatatgtacctattttcattgctgatttacagccaaaataatcaattataccgtgtattttatagatgttttatattaaaaggttgttagctatatattgtttctctttttc

SEQ ID NO: 102751 - protein, 199 aa, Arabidopsis thaliana; identical to SEQ ID NO: 30300
  peptide (1)..(199): Ceres Seq. ID no. 13611159
  misc_feature (4)..(68): Pfam Name: AP2 domain Pfam Description: AP2 domain
  misc_feature (1)..(199): Homolog of NCBI NO: 15218134 NR Description: ethylene responsive element binding factor 2
  misc_feature (1)..(199): Homolog of NCBI NO: 21553845 NR Description: putative ethylene responsive element [Arabidopsis
  misc_feature (1)..(197): Homolog of NCBI NO: 15238976 NR Description: putative protein; protein id: At5g11190.1 thaliana] >gi|8953381|emb|CAB96654.1| putative protein
  misc_feature (1)..(197): Homolog of NCBI NO: 30689846 NR Description: AP2 domain transcription factor, putative thaliana] >gi|26452577|dbj|BAC43373.1| putative AP2 domain protein [Arabidopsis thaliana] >gi|28973113|gb|AAO63881.1|
  misc_feature (1)..(147): Homolog of NCBI NO: 15239413 NR Description: AP2 domain transcription factor, putative
  misc_feature (5)..(101): Homolog of NCBI NO: 15238727 NR Description: ethylene responsive element binding protein, [Arabidopsis thaliana] >gi|15010716|gb|AAK74017.1| [Arabidopsis thaliana] >gi|16974345|gb|AAL31157.1|
  misc_feature (5)..(101): Homolog of NCBI NO: 18650662 NR Description: ethylene response factor 1 [Lycopersicon
  misc_feature (6)..(67): Homolog of NCBI NO: 38343976 NR Description: OSJNBb0022F16.15 [Oryza sativa (japonica
  misc_feature (5)..(82): Homolog of NCBI NO: 131754 NR Description: PPLZ02 PROTEIN >gi|99973|pir||S11881 hypothetical
  misc_feature (5)..(95): Homolog of NCBI NO: 38346619 NR Description: OSJNBa0074L08.10 [Oryza sativa (japonica

SEQ ID NO: 102752 - protein, 147 aa, Arabidopsis thaliana; identical to SEQ ID NO: 30301
  peptide (1)..(147): Ceres Seq. ID no. 13611160
  misc_feature (1)..(147): Homolog of NCBI NO: 15218134 NR Description: ethylene responsive element binding factor 2
  misc_feature (1)..(147): Homolog of NCBI NO: 21553845 NR Description: putative ethylene responsive element [Arabidopsis
  misc_feature (1)..(145): Homolog of NCBI NO: 15238976 NR Description: putative protein; protein id: At5g11190.1 thaliana] >gi|8953381|emb|CAB96654.1| putative protein
  misc_feature (1)..(145): Homolog of NCBI NO: 30689846 NR Description: AP2 domain transcription factor, putative thaliana] >gi|26452577|dbj|BAC43373.1| putative AP2 domain protein [Arabidopsis thaliana] >gi|28973113|gb|AAO63881.1|
  misc_feature (1)..(95): Homolog of NCBI NO: 15239413 NR Description: AP2 domain transcription factor, putative
  misc_feature (1)..(49): Homolog of NCBI NO: 15238727 NR Description: ethylene responsive element binding protein, [Arabidopsis thaliana] >gi|15010716|gb|AAK74017.1| [Arabidopsis thaliana] >gi|16974345|gb|AAL31157.1|
  misc_feature (1)..(49): Homolog of NCBI NO: 18650662 NR Description: ethylene response factor 1 [Lycopersicon
  misc_feature (1)..(15): Homolog of NCBI NO: 38343976 NR Description: OSJNBb0022F16.15 [Oryza sativa (japonica
  misc_feature (1)..(30): Homolog of NCBI NO: 131754 NR Description: PPLZ02 PROTEIN >gi|99973|pir||S11881 hypothetical
  misc_feature (1)..(43): Homolog of NCBI NO: 38346619 NR Description: OSJNBa0074L08.10 [Oryza sativa (japonica

SEQ ID NO: 102753 - protein, 115 aa, Arabidopsis thaliana; identical to SEQ ID NO: 30302
  peptide (1)..(115): Ceres Seq. ID no. 13611161
  misc_feature (1)..(115): Homolog of NCBI NO: 15218134 NR Description: ethylene responsive element binding factor 2
  misc_feature (1)..(115): Homolog of NCBI NO: 21553845 NR Description: putative ethylene responsive element [Arabidopsis
  misc_feature (1)..(113): Homolog of NCBI NO: 15238976 NR Description: putative protein; protein id: At5g11190.1 thaliana] >gi|8953381|emb|CAB96654.1| putative protein
  misc_feature (1)..(113): Homolog of NCBI NO: 30689846 NR Description: AP2 domain transcription factor, putative thaliana] >gi|26452577|dbj|BAC43373.1| putative AP2 domain protein [Arabidopsis thaliana] >gi|28973113|gb|AAO63881.1|
  misc_feature (1)..(63): Homolog of NCBI NO: 15239413 NR Description: AP2 domain transcription factor, putative
  misc_feature (1)..(17): Homolog of NCBI NO: 15238727 NR Description: ethylene responsive element binding protein, [Arabidopsis thaliana] >gi|15010716|gb|AAK74017.1| [Arabidopsis thaliana] >gi|16974345|gb|AAL31157.1|
  misc_feature (1)..(17): Homolog of NCBI NO: 18650662 NR Description: ethylene response factor 1 [Lycopersicon
  misc_feature (1)..(11): Homolog of NCBI NO: 38346619 NR Description: OSJNBa0074L08.10 [Oryza sativa (japonica
  misc_feature (1)..(88): Homolog of NCBI NO: 27436378 NR Description: dehydration-responsive element binding protein 3
  misc_feature (1)..(20): Homolog of NCBI NO: 21592595 NR Description: ethylene responsive element binding factor 2

SEQ ID NO: 102754 - DNA, 1004 bp, Arabidopsis thaliana
  misc_feature (1)..(1004): Ceres Seq. ID no. 13611166
  misc_feature: MA Experiment ID: 108434 Result: Up-regulated in Transcription
  misc_feature: MA Experiment 108434 PARAMETER Experiment Name: At_Root_Tips_cDNA_P Parameter: Tissue Value: Root Tips
  misc_feature: MA Experiment ID: 108462 Result: Down-regulated in Transcription
  misc_feature: MA Experiment 108462 PARAMETER Experiment Name: At_Germinating_Seeds_cDNA_P Parameter: Age (day) Value: 2 vs. 0
  misc_feature: MA Experiment 108462 PARAMETER Experiment Name: At_Germinating_Seeds_cDNA_P Parameter: Tissue Value: Germinating Seeds
  misc_feature: MA Experiment ID: 108463 Result: Down-regulated in Transcription
  misc_feature: MA Experiment 108463 PARAMETER Experiment Name: At_Germinating_Seeds_cDNA_P Parameter: Age (day) Value: 3 vs. 0
  misc_feature: MA Experiment 108463 PARAMETER Experiment Name: At_Germinating_Seeds_cDNA_P Parameter: Tissue Value: Germinating Seeds
  misc_feature: MA Experiment ID: 108464 Result: Down-regulated in Transcription
  misc_feature: MA Experiment 108464 PARAMETER Experiment Name: At_Germinating_Seeds_cDNA_P Parameter: Age (day) Value: 4 vs. 0
  misc_feature: MA Experiment 108464 PARAMETER Experiment Name: At_Germinating_Seeds_cDNA_P Parameter: Tissue Value: Germinating Seeds
  misc_feature: MA Experiment ID: 108595 Result: Down-regulated in Transcription
  misc_feature: MA Experiment 108595 PARAMETER Experiment Name: At_Ler-pi_Ovule_cDNA_P Parameter: Plant Line Value: null
  misc_feature: MA Experiment ID: 20000437 Result: Down-regulated in Transcription
  misc_feature: MA Experiment 20000437 PARAMETER Experiment Name: At_Drought_P Parameter: Age (day) Value: 8
  misc_feature: MA Experiment 20000437 PARAMETER Experiment Name: At_Drought_P Parameter: Organism Value: A. thaliana
  misc_feature: MA Experiment 20000437 PARAMETER Experiment Name: At_Drought_P Parameter: Plant Line Value: WS
  misc_feature: MA Experiment 20000437 PARAMETER Experiment Name: At_Drought_P Parameter: Timepoint (hr) Value: 24
  misc_feature: MA Experiment 20000437 PARAMETER Experiment Name: At_Drought_P Parameter: Tissue Value: Whole Plant
  misc_feature: MA Experiment 20000437 PARAMETER Experiment Name: At_Drought_P Parameter: Treatment Value: Drought vs. No Drought
  misc_feature: MA Experiment ID: 20001560 Result: Up-regulated in Transcription
  misc_feature: MA Experiment 20001560 PARAMETER Experiment Name: At_Drought_Soil_Dry_P Parameter: Age (day) Value: 28
  misc_feature: MA Experiment 20001560 PARAMETER Experiment Name: At_Drought_Soil_Dry_P Parameter: Organism Value: A. thaliana
  misc_feature: MA Experiment 20001560 PARAMETER Experiment Name: At_Drought_Soil_Dry_P Parameter: Plant Line Value: WS
  misc_feature: MA Experiment 20001560 PARAMETER Experiment Name: At_Drought_Soil_Dry_P Parameter: Post Timepoint (hr) Value: None
  misc_feature: MA Experiment 20001560 PARAMETER Experiment Name: At_Drought_Soil_Dry_P Parameter: Post-Treatment Value: None
  misc_feature: MA Experiment 20001560 PARAMETER Experiment Name: At_Drought_Soil_Dry_P Parameter: Timepoint (day) Value: 14
  misc_feature: MA Experiment 20001560 PARAMETER Experiment Name: At_Drought_Soil_Dry_P Parameter: Treatment Value: Drought vs. No Drought
tcgtatttcaagaaatgacgaccgatgggactccaccgagacgaagcgacggccatggaaacccttttcagagtctcacttcgtctacttccggtttccgccgccgtgacatgtcgctcgatccgattccccgtttcaagacccggttcctcacacttactgaaccgtaagctgtataatttgcctacttcttcttcctcctctttgtcgacaaaagccggttggttattgggtcttggtgagaagaaaaagaaagtggatttaccggagatagtggcatctggtgacccggttctgcacgagaaggcccgagaagttgacccgggagaaatcgggtcggagcgtattcagaagataattgatgatatgattaaagttatgagattggctcctggagttggcctcgctgctcctcaaattggtgttcccttaaggattattgtattggaagatacaaaagagtatataagttacgcaccaaaggaagagattcttgctcaagaaagacgtcattttgatctcatggtgatggtgaatccggttctcaaggagagaagcaacaagaaagctcttttctttgaaggatgcttgagtgttgatggattcagagctgcggtggagagataccttgaggtggtagtgacgggctacgatcgtcaaggaaagaggattgaagtgaatgcttcaggttggcaagctaggattttgcaacatgagtgtgatcatttggatggtaatctttacgttgataagatggtaccacgcacttttaggacagtcgacaacttggacttgcctttagctgagggctgccctaagctcggacctcaatgacagattcttcaacaaaagttgtaatcttctgttttgattctttactaaaactcttctagattgagcttgactcaaataatttcaaagatgaaactttgtcggaaagagggttcttttttcgggtttggtaatggattgaaagattttcatttaataaaatattataactt

SEQ ID NO: 102755 - protein, 269 aa, Arabidopsis thaliana; identical to SEQ ID NO: 37175
  peptide (1)..(269): Ceres Seq. ID no. 13611167
  misc_feature (1)..(269): Homolog of NCBI NO: 18394237 NR Description: peptide deformylase-related protein [Arabidopsis
  misc_feature (11)..(269): Homolog of NCBI NO: 17433051 NR Description: Peptide deformylase, mitochondrial precursor (Polypeptide deformylase) >gi|25518549|pir||E86288 hypothetical
  misc_feature (59)..(267): Homolog of NCBI NO: 17433049 NR Description: Peptide deformylase, mitochondrial precursor (Polypeptide deformylase) >gi|11320968|gb|AAG33981.1|AF271258_1
  misc_feature (21)..(238): Homolog of NCBI NO: 34913982 NR Description: peptide deformylase-like protein [Oryza sativa
  misc_feature (82)..(256): Homolog of NCBI NO: 39930960 NR Description: Peptide deformylase 1 (PDF 1) (Polypeptide
  misc_feature (82)..(256): Homolog of NCBI NO: 37521298 NR Description: polypeptide deformylase [Gloeobacter violaceus]
  misc_feature (87)..(262): Homolog of NCBI NO: 24645728 NR Description: CG31373-PA [Drosophila melanogaster]
  misc_feature (56)..(249): Homolog of NCBI NO: 34851655 NR Description: similar to peptide deformylase-like protein
  misc_feature (56)..(265): Homolog of NCBI NO: 29833891 NR Description: putative polypeptide deformylase [Streptomyces
  misc_feature (80)..(243): Homolog of NCBI NO: 21219403 NR Description: polypeptide deformylase. [Streptomyces coelicolor >gi|23396576|sp|Q9RD27|DEF1_STRCO Peptide deformylase 1 (PDF 1) deformylase 1) >gi|6562865|emb|CAB62674.1| polypeptide

SEQ ID NO: 102756 - protein, 259 aa, Arabidopsis thaliana; identical to SEQ ID NO: 37176
  peptide (1)..(259): Ceres Seq. ID no. 13611168
  misc_feature (1)..(259): Homolog of NCBI NO: 18394237 NR Description: peptide deformylase-related protein [Arabidopsis
  misc_feature (1)..(259): Homolog of NCBI NO: 17433051 NR Description: Peptide deformylase, mitochondrial precursor (Polypeptide deformylase) >gi|25518549|pir||E86288 hypothetical
  misc_feature (49)..(257): Homolog of NCBI NO: 17433049 NR Description: Peptide deformylase, mitochondrial precursor (Polypeptide deformylase) >gi|11320968|gb|AAG33981.1|AF271258_1
  misc_feature (11)..(228): Homolog of NCBI NO: 34913982 NR Description: peptide deformylase-like protein [Oryza sativa
  misc_feature (72)..(246): Homolog of NCBI NO: 39930960 NR Description: Peptide deformylase 1 (PDF 1) (Polypeptide
  misc_feature (72)..(246): Homolog of NCBI NO: 37521298 NR Description: polypeptide deformylase [Gloeobacter violaceus]
  misc_feature (77)..(252): Homolog of NCBI NO: 24645728 NR Description: CG31373-PA [Drosophila melanogaster]
  misc_feature (46)..(239): Homolog of NCBI NO: 34851655 NR Description: similar to peptide deformylase-like protein
  misc_feature (46)..(255): Homolog of NCBI NO: 29833891 NR Description: putative polypeptide deformylase [Streptomyces
  misc_feature (70)..(233): Homolog of NCBI NO: 21219403 NR Description: polypeptide deformylase. [Streptomyces coelicolor >gi|23396576|sp|Q9RD27|DEF1_STRCO Peptide deformylase 1 (PDF 1) deformylase 1) >gi|6562865|emb|CAB62674.1| polypeptide

SEQ ID NO: 102757 - protein, 155 aa, Arabidopsis thaliana; identical to SEQ ID NO: 37177
  peptide (1)..(155): Ceres Seq. ID no. 13611169
  misc_feature (1)..(155): Homolog of NCBI NO: 18394237 NR Description: peptide deformylase-related protein [Arabidopsis
  misc_feature (1)..(155): Homolog of NCBI NO: 17433051 NR Description: Peptide deformylase, mitochondrial precursor (Polypeptide deformylase) >gi|25518549|pir||E86288 hypothetical
  misc_feature (1)..(153): Homolog of NCBI NO: 17433049 NR Description: Peptide deformylase, mitochondrial precursor (Polypeptide deformylase) >gi|11320968|gb|AAG33981.1|AF271258_1
  misc_feature (1)..(124): Homolog of NCBI NO: 34913982 NR Description: peptide deformylase-like protein [Oryza sativa
  misc_feature (1)..(142): Homolog of NCBI NO: 39930960 NR Description: Peptide deformylase 1 (PDF 1) (Polypeptide
  misc_feature (1)..(142): Homolog of NCBI NO: 37521298 NR Description: polypeptide deformylase [Gloeobacter violaceus]
  misc_feature (1)..(148): Homolog of NCBI NO: 24645728 NR Description: CG31373-PA [Drosophila melanogaster]
  misc_feature (1)..(135): Homolog of NCBI NO: 34851655 NR Description: similar to peptide deformylase-like protein
  misc_feature (1)..(151): Homolog of NCBI NO: 29833891 NR Description: putative polypeptide deformylase [Streptomyces
  misc_feature (1)..(129): Homolog of NCBI NO: 21219403 NR Description: polypeptide deformylase. [Streptomyces coelicolor >gi|23396576|sp|Q9RD27|DEF1_STRCO Peptide deformylase 1 (PDF 1) deformylase 1) >gi|6562865|emb|CAB62674.1| polypeptide

SEQ ID NO: 102758 - DNA, 1033 bp, Arabidopsis thaliana
  misc_feature (1)..(1033): Ceres Seq. ID no. 13611185
  misc_feature: MA Experiment ID: 108434 Result: Down-regulated in Transcription
  misc_feature: MA Experiment 108434 PARAMETER Experiment Name: At_Root_Tips_cDNA_P Parameter: Tissue Value: Root Tips
  misc_feature: MA Experiment ID: 108435 Result: Down-regulated in Transcription
  misc_feature: MA Experiment 108435 PARAMETER Experiment Name: At_stm_Mutants_cDNA_P Parameter: Plant Line Value: wt Landsburg vs stm
  misc_feature: MA Experiment 108435 PARAMETER Experiment Name: At_stm_Mutants_cDNA_P Parameter: Tissue Value: Shoot Apical Meristem Region
  misc_feature: MA Experiment ID: 108461 Result: Up-regulated in Transcription
  misc_feature: MA Experiment 108461 PARAMETER Experiment Name: At_Germinating_Seeds_cDNA_P Parameter: Age (day) Value: 1 vs. 0
  misc_feature: MA Experiment 108461 PARAMETER Experiment Name: At_Germinating_Seeds_cDNA_P Parameter: Tissue Value: Germinating Seeds
  misc_feature: MA Experiment ID: 108462 Result: Up-regulated in Transcription
  misc_feature: MA Experiment 108462 PARAMETER Experiment Name: At_Germinating_Seeds_cDNA_P Parameter: Age (day) Value: 2 vs. 0
  misc_feature: MA Experiment 108462 PARAMETER Experiment Name: At_Germinating_Seeds_cDNA_P Parameter: Tissue Value: Germinating Seeds
  misc_feature: MA Experiment ID: 108463 Result: Up-regulated in Transcription
  misc_feature: MA Experiment 108463 PARAMETER Experiment Name: At_Germinating_Seeds_cDNA_P Parameter: Age (day) Value: 3 vs. 0
  misc_feature: MA Experiment 108463 PARAMETER Experiment Name: At_Germinating_Seeds_cDNA_P Parameter: Tissue Value: Germinating Seeds
  misc_feature: MA Experiment ID: 108464 Result: Up-regulated in Transcription
  misc_feature: MA Experiment 108464 PARAMETER Experiment Name: At_Germinating_Seeds_cDNA_P Parameter: Age (day) Value: 4 vs. 0
  misc_feature: MA Experiment 108464 PARAMETER Experiment Name: At_Germinating_Seeds_cDNA_P Parameter: Tissue Value: Germinating Seeds
  misc_feature: MA Experiment ID: 108488 Result: Up-regulated in Transcription
  misc_feature: MA Experiment ID: 108489 Result: Down-regulated in Transcription
  misc_feature: MA Experiment ID: 108595 Result: Down-regulated in Transcription
  misc_feature: MA Experiment 108595 PARAMETER Experiment Name: At_Ler-pi_Ovule_cDNA_P Parameter: Plant Line Value: null
  misc_feature: MA Experiment ID: 20000072 Result: Down-regulated in Transcription
  misc_feature: MA Experiment 20000072 PARAMETER Experiment Name: At_100uM_ABA_Mutants_cDNA_P Parameter: Plant Line Value: CS8105
  misc_feature: MA Experiment 20000072 PARAMETER Experiment Name: At_100uM_ABA_Mutants_cDNA_P Parameter: Timepoint (hr) Value: 6
  misc_feature: MA Experiment 20000072 PARAMETER Experiment Name: At_100uM_ABA_Mutants_cDNA_P Parameter: Tissue Value: Aerial
  misc_feature: MA Experiment 20000072 PARAMETER Experiment Name: At_100uM_ABA_Mutants_cDNA_P Parameter: Treatment Value: 100uM ABA vs. No Treatment
  misc_feature: MA Experiment ID: 20000086 Result: Down-regulated in Transcription
  misc_feature: MA Experiment 20000086 PARAMETER Experiment Name: At_100uM_ABA_Mutants_cDNA_P Parameter: Plant Line Value: CS22
  misc_feature: MA Experiment 20000086 PARAMETER Experiment Name: At_100uM_ABA_Mutants_cDNA_P Parameter: Timepoint (hr) Value: 6
  misc_feature: MA Experiment 20000086 PARAMETER Experiment Name: At_100uM_ABA_Mutants_cDNA_P Parameter: Tissue Value: Aerial
  misc_feature: MA Experiment 20000086 PARAMETER Experiment Name: At_100uM_ABA_Mutants_cDNA_P Parameter: Treatment Value: 100uM ABA vs. No Treatment
  misc_feature: MA Experiment ID: 20000087 Result: Down-regulated in Transcription
  misc_feature: MA Experiment 20000087 PARAMETER Experiment Name: At_100uM_ABA_Mutants_cDNA_P Parameter: Plant Line Value: WS
  misc_feature: MA Experiment 20000087 PARAMETER Experiment Name: At_100uM_ABA_Mutants_cDNA_P Parameter: Timepoint (hr) Value: 6
  misc_feature: MA Experiment 20000087 PARAMETER Experiment Name: At_100uM_ABA_Mutants_cDNA_P Parameter: Tissue Value: Aerial
  misc_feature: MA Experiment 20000087 PARAMETER Experiment Name: At_100uM_ABA_Mutants_cDNA_P Parameter: Treatment Value: 100uM ABA vs. No Treatment
  misc_feature: MA Experiment ID: 20000088 Result: Down-regulated in Transcription
  misc_feature: MA Experiment 20000088 PARAMETER Experiment Name: At_100uM_ABA_Mutants_cDNA_P Parameter: Plant Line Value: Landsberg
  misc_feature: MA Experiment 20000088 PARAMETER Experiment Name: At_100uM_ABA_Mutants_cDNA_P Parameter: Timepoint (hr) Value: 6
  misc_feature: MA Experiment 20000088 PARAMETER Experiment Name: At_100uM_ABA_Mutants_cDNA_P Parameter: Tissue Value: Aerial
  misc_feature: MA Experiment 20000088 PARAMETER Experiment Name: At_100uM_ABA_Mutants_cDNA_P Parameter: Treatment Value: 100uM ABA vs. No Treatment
  misc_feature: MA Experiment ID: 20000090 Result: Down-regulated in Transcription
  misc_feature: MA Experiment ID: 20000180 Result: Up-regulated in Transcription
  misc_feature: MA Experiment 20000180 PARAMETER Experiment Name: At_Germinating_Seeds_P Parameter: Age (hr) Value: 24 vs. 0
  misc_feature: MA Experiment 20000180 PARAMETER Experiment Name: At_Germinating_Seeds_P Parameter: Tissue Value: Germinating Seeds
  misc_feature: MA Experiment ID: 20000185 Result: Down-regulated in Transcription
  misc_feature: MA Experiment 20000185 PARAMETER Experiment Name: At_Roots__P Parameter: Age (day) Value: 7 vs. 21
  misc_feature: MA Experiment 20000185 PARAMETER Experiment Name: At_Roots__P Parameter: Organism Value: A. thaliana
  misc_feature: MA Experiment 20000185 PARAMETER Experiment Name: At_Roots__P Parameter: Tissue Value: Roots vs. Whole Plant
  misc_feature: MA Experiment ID: 20000264 Result: Down-regulated in Transcription
  misc_feature: MA Experiment 20000264 PARAMETER Experiment Name: At_Open_Flower_P Parameter: Age (day) Value: 21
  misc_feature: MA Experiment 20000264 PARAMETER Experiment Name: At_Open_Flower_P Parameter: Plant Line Value: WS
  misc_feature: MA Experiment 20000264 PARAMETER Experiment Name: At_Open_Flower_P Parameter: Tissue Value: Open Flower vs. Whole Plant
  misc_feature: MA Experiment ID: 20000265 Result: Down-regulated in Transcription
  misc_feature: MA Experiment 20000265 PARAMETER Experiment Name: At_Open_Flower_P Parameter: Age (day) Value: 21
  misc_feature: MA Experiment 20000265 PARAMETER Experiment Name: At_Open_Flower_P Parameter: Plant Line Value: WS
  misc_feature: MA Experiment 20000265 PARAMETER Experiment Name: At_Open_Flower_P Parameter: Tissue Value: Closed Flower vs. Whole Plant
  misc_feature: MA Experiment ID: 20000437 Result: Down-regulated in Transcription
  misc_feature: MA Experiment 20000437 PARAMETER Experiment Name: At_Drought_P Parameter: Age (day) Value: 8
  misc_feature: MA Experiment 20000437 PARAMETER Experiment Name: At_Drought_P Parameter: Organism Value: A. thaliana
  misc_feature: MA Experiment 20000437 PARAMETER Experiment Name: At_Drought_P Parameter: Plant Line Value: WS
  misc_feature: MA Experiment 20000437 PARAMETER Experiment Name: At_Drought_P Parameter: Timepoint (hr) Value: 24
  misc_feature: MA Experiment 20000437 PARAMETER Experiment Name: At_Drought_P Parameter: Tissue Value: Whole Plant
  misc_feature: MA Experiment 20000437 PARAMETER Experiment Name: At_Drought_P Parameter: Treatment Value: Drought vs. No Drought
  misc_feature: MA Experiment ID: 20000438 Result: Up-regulated in Transcription
  misc_feature: MA Experiment 20000438 PARAMETER Experiment Name: At_Shoots__P Parameter: Age (day) Value: 14
  misc_feature: MA Experiment 20000438 PARAMETER Experiment Name: At_Shoots__P Parameter: Tissue Value: Shoots vs. Whole Plant
  misc_feature: MA Experiment ID: 20000439 Result: Down-regulated in Transcription
  misc_feature: MA Experiment 20000439 PARAMETER Experiment Name: At_Roots__P Parameter: Age (day) Value: 14 vs. 21
  misc_feature: MA Experiment 20000439 PARAMETER Experiment Name: At_Roots__P Parameter: Organism Value: A. thaliana
  misc_feature: MA Experiment 20000439 PARAMETER Experiment Name: At_Roots__P Parameter: Tissue Value: Roots vs. Whole Plant
  misc_feature: MA Experiment ID: 20000794 Result: Down-regulated in Transcription
  misc_feature: MA Experiment 20000794 PARAMETER Experiment Name: At_Petals_P Parameter: Age (day) Value: 23-25 days
  misc_feature: MA Experiment 20000794 PARAMETER Experiment Name: At_Petals_P Parameter: Plant Line Value: WS
  misc_feature: MA Experiment 20000794 PARAMETER Experiment Name: At_Petals_P Parameter: Tissue Value: Petals vs. Whole plant
  misc_feature: MA Experiment ID: 20001450 Result: Down-regulated in Transcription
  misc_feature: MA Experiment 20001450 PARAMETER Experiment Name: At_Far-red-induction_P Parameter: Age (day) Value: 7
  misc_feature: MA Experiment 20001450 PARAMETER Experiment Name: At_Far-red-induction_P Parameter: Light Value: Far-red vs. White
  misc_feature: MA Experiment 20001450 PARAMETER Experiment Name: At_Far-red-induction_P Parameter: Organism Value: A. thaliana
  misc_feature: MA Experiment 20001450 PARAMETER Experiment Name: At_Far-red-induction_P Parameter: Plant Line Value: Columbia
  misc_feature: MA Experiment 20001450 PARAMETER Experiment Name: At_Far-red-induction_P Parameter: Timepoint (hr) Value: 8
  misc_feature: MA Experiment 20001450 PARAMETER Experiment Name: At_Far-red-induction_P Parameter: Tissue Value: Whole Plant
  misc_feature: MA Experiment ID: 20001555 Result: Down-regulated in Transcription
  misc_feature: MA Experiment 20001555 PARAMETER Experiment Name: At_Drought_Soil_Dry_P Parameter: Age (day) Value: 24
  misc_feature: MA Experiment 20001555 PARAMETER Experiment Name: At_Drought_Soil_Dry_P Parameter: Organism Value: A. thaliana
  misc_feature: MA Experiment 20001555 PARAMETER Experiment Name: At_Drought_Soil_Dry_P Parameter: Plant Line Value: WS
  misc_feature: MA Experiment 20001555 PARAMETER Experiment Name: At_Drought_Soil_Dry_P Parameter: Post Timepoint (hr) Value: None
  misc_feature: MA Experiment 20001555 PARAMETER Experiment Name: At_Drought_Soil_Dry_P Parameter: Post-Treatment Value: None
  misc_feature: MA Experiment 20001555 PARAMETER Experiment Name: At_Drought_Soil_Dry_P Parameter: Timepoint (day) Value: 10
  misc_feature: MA Experiment 20001555 PARAMETER Experiment Name: At_Drought_Soil_Dry_P Parameter: Treatment Value: Drought vs. No Drought
  misc_feature: MA Experiment ID: 20001556 Result: Down-regulated in Transcription
  misc_feature: MA Experiment 20001556 PARAMETER Experiment Name: At_Drought_Soil_Dry_P Parameter: Age (day) Value: 26
  misc_feature: MA Experiment 20001556 PARAMETER Experiment Name: At_Drought_Soil_Dry_P Parameter: Organism Value: A. thaliana
  misc_feature: MA Experiment 20001556 PARAMETER Experiment Name: At_Drought_Soil_Dry_P Parameter: Plant Line Value: WS
  misc_feature: MA Experiment 20001556 PARAMETER Experiment Name: At_Drought_Soil_Dry_P Parameter: Post Timepoint (hr) Value: None
  misc_feature: MA Experiment 20001556 PARAMETER Experiment Name: At_Drought_Soil_Dry_P Parameter: Post-Treatment Value: None
  misc_feature: MA Experiment 20001556 PARAMETER Experiment Name: At_Drought_Soil_Dry_P Parameter: Timepoint (day) Value: 12
  misc_feature: MA Experiment 20001556 PARAMETER Experiment Name: At_Drought_Soil_Dry_P Parameter: Treatment Value: Drought vs. No Drought
  misc_feature: MA Experiment ID: 20001557 Result: Down-regulated in Transcription
  misc_feature: MA Experiment 20001557 PARAMETER Experiment Name: At_Drought_Soil_Dry_P Parameter: Age (day) Value: 27
  misc_feature: MA Experiment 20001557 PARAMETER Experiment Name: At_Drought_Soil_Dry_P Parameter: Organism Value: A. thaliana
  misc_feature: MA Experiment 20001557 PARAMETER Experiment Name: At_Drought_Soil_Dry_P Parameter: Plant Line Value: WS
  misc_feature: MA Experiment 20001557 PARAMETER Experiment Name: At_Drought_Soil_Dry_P Parameter: Post Timepoint (hr) Value: 3
  misc_feature: MA Experiment 20001557 PARAMETER Experiment Name: At_Drought_Soil_Dry_P Parameter: Post-Treatment Value: Re-Water vs. No Drought
  misc_feature: MA Experiment 20001557 PARAMETER Experiment Name: At_Drought_Soil_Dry_P Parameter: Timepoint (day) Value: 13
  misc_feature: MA Experiment 20001557 PARAMETER Experiment Name: At_Drought_Soil_Dry_P Parameter: Treatment Value: Drought vs. No Drought
  misc_feature: MA Experiment ID: 20001559 Result: Down-regulated in Transcription
  misc_feature: MA Experiment 20001559 PARAMETER Experiment Name: At_Drought_Soil_Dry_P Parameter: Age (day) Value: 28
  misc_feature: MA Experiment 20001559 PARAMETER Experiment Name: At_Drought_Soil_Dry_P Parameter: Organism Value: A. thaliana
  misc_feature: MA Experiment 20001559 PARAMETER Experiment Name: At_Drought_Soil_Dry_P Parameter: Plant Line Value: WS
  misc_feature: MA Experiment 20001559 PARAMETER Experiment Name: At_Drought_Soil_Dry_P Parameter: Post Timepoint (hr) Value: 29
  misc_feature: MA Experiment 20001559 PARAMETER Experiment Name: At_Drought_Soil_Dry_P Parameter: Post-Treatment Value: Re-Water vs. No Drought
  misc_feature: MA Experiment 20001559 PARAMETER Experiment Name: At_Drought_Soil_Dry_P Parameter: Timepoint (day) Value: 14
  misc_feature: MA Experiment 20001559 PARAMETER Experiment Name: At_Drought_Soil_Dry_P Parameter: Treatment Value: Drought vs. No Drought
  misc_feature: MA Experiment ID: 20001757 Result: Up-regulated in Transcription
  misc_feature: MA Experiment 20001757 PARAMETER Experiment Name: At_50mM_NH4NO3_L-to-H_P Parameter: Timepoint (hr) Value: 6
  misc_feature: MA Experiment 20001757 PARAMETER Experiment Name: At_50mM_NH4NO3_L-to-H_P Parameter: Tissue Value: Leaf
  misc_feature: MA Experiment 20001757 PARAMETER Experiment Name: At_50mM_NH4NO3_L-to-H_P Parameter: Treatment Value: 50mM NH4NO3 vs 100mM Mannitol
  misc_feature: MA Experiment ID: 20001904 Result: Down-regulated in Transcription
  misc_feature: MA Experiment 20001904 PARAMETER Experiment Name: At_Drought_Reproduction_P Parameter: Age (day) Value: 37
  misc_feature: MA Experiment 20001904 PARAMETER Experiment Name: At_Drought_Reproduction_P Parameter: Organism Value: A. thaliana
  misc_feature: MA Experiment 20001904 PARAMETER Experiment Name: At_Drought_Reproduction_P Parameter: Plant Line Value: WS
  misc_feature: MA Experiment 20001904 PARAMETER Experiment Name: At_Drought_Reproduction_P Parameter: Timepoint (day) Value: 7
  misc_feature: MA Experiment 20001904 PARAMETER Experiment Name: At_Drought_Reproduction_P Parameter: Tissue Value: Rosettes
  misc_feature: MA Experiment 20001904 PARAMETER Experiment Name: At_Drought_Reproduction_P Parameter: Treatment Value: Drought vs. No Drought
  misc_feature: MA Experiment ID: 20001905 Result: Down-regulated in Transcription
  misc_feature: MA Experiment 20001905 PARAMETER Experiment Name: At_Drought_Reproduction_P Parameter: Age (day) Value: 40
  misc_feature: MA Experiment 20001905 PARAMETER Experiment Name: At_Drought_Reproduction_P Parameter: Organism Value: A. thaliana
  misc_feature: MA Experiment 20001905 PARAMETER Experiment Name: At_Drought_Reproduction_P Parameter: Plant Line Value: WS
  misc_feature: MA Experiment 20001905 PARAMETER Experiment Name: At_Drought_Reproduction_P Parameter: Timepoint (day) Value: 10
  misc_feature: MA Experiment 20001905 PARAMETER Experiment Name: At_Drought_Reproduction_P Parameter: Tissue Value: Rosettes
  misc_feature: MA Experiment 20001905 PARAMETER Experiment Name: At_Drought_Reproduction_P Parameter: Treatment Value: Drought vs. No Drought
  misc_feature: MA Experiment ID: 20001906 Result: Down-regulated in Transcription
  misc_feature: MA Experiment 20001906 PARAMETER Experiment Name: At_Drought_Reproduction_P Parameter: Age (day) Value: 35
  misc_feature: MA Experiment 20001906 PARAMETER Experiment Name: At_Drought_Reproduction_P Parameter: Organism Value: A. thaliana
  misc_feature: MA Experiment 20001906 PARAMETER Experiment Name: At_Drought_Reproduction_P Parameter: Plant Line Value: WS
  misc_feature: MA Experiment 20001906 PARAMETER Experiment Name: At_Drought_Reproduction_P Parameter: Timepoint (day) Value: 5
  misc_feature: MA Experiment 20001906 PARAMETER Experiment Name: At_Drought_Reproduction_P Parameter: Tissue Value: Siliques
  misc_feature: MA Experiment 20001906 PARAMETER Experiment Name: At_Drought_Reproduction_P Parameter: Treatment Value: Drought vs. No Drought
  misc_feature: MA Experiment ID: 20001908 Result: Down-regulated in Transcription
  misc_feature: MA Experiment 20001908 PARAMETER Experiment Name: At_Drought_Reproduction_P Parameter: Age (day) Value: 40
  misc_feature: MA Experiment 20001908 PARAMETER Experiment Name: At_Drought_Reproduction_P Parameter: Organism Value: A. thaliana
  misc_feature: MA Experiment 20001908 PARAMETER Experiment Name: At_Drought_Reproduction_P Parameter: Plant Line Value: WS
  misc_feature: MA Experiment 20001908 PARAMETER Experiment Name: At_Drought_Reproduction_P Parameter: Timepoint (day) Value: 10
  misc_feature: MA Experiment 20001908 PARAMETER Experiment Name: At_Drought_Reproduction_P Parameter: Tissue Value: Siliques
  misc_feature: MA Experiment 20001908 PARAMETER Experiment Name: At_Drought_Reproduction_P Parameter: Treatment Value: Drought vs. No Drought
aatctcctctctttgattctttctgctccgaaaaacagagagagagaacaacaaccaaacactcatttctccacatcttgagagaaaaaaacagagcaagtatattagagatctcatggcgatggcggtctccggagctgtcctcagtgggcttggttcttcgttcctcaccggaggcaagagaggtgccaccgcattggcaagcggcgtaggcactggagctcagagagttggcaggaaaactcttattgtcgctgctgcggctgctcagcctaagaaatcttggatccctgccgttaaaggtggtggcaacttccttgaccctgaatggctcgatggctcgctaccaggagatttcgggttcgacccattgggtttggggaaagacccggcttttctgaaatggtacagagaggctgagctgatccatggccgatgggcgatggcagcggttcttgggatcttcgtcggccaggcctggagcggtgtggcatggtttgaagctggagcccagccagacgcgatcgctcccttctcgttcgggtcgcttcttggaacccaattgcttctcatgggttgggtggagagcaaacgatgggtcgatttcttcaacccggattctcaatcggttgagtgggcaacgccatggtcgaagaccgccgagaatttcgcgaactataccggcgatcagggataccccggtgggagattcttcgatccgttgggtctcgccgggaaaaaccgcgacggtgtttatgagccggactttgagaagctggagaggctgaaattggcagagattaagcactcgaggctcgcaatggttgccatgttgatcttttactttgaggccgggcaggggaaaacgcctctcggtgctcttggtttgtgagaaaacggcatgatgtttttgattctgtagatacaatttctcttccaaaaacctaatgtttctcttcttcaatgtgacatttgggaaaagatcatcaaaccattgctataaatgtaaaatgaaatcatgaggcttgttcgt

SEQ ID NO: 102759 - protein, 258 aa, Arabidopsis thaliana; identical to SEQ ID NO: 40172
  peptide (1)..(258): Ceres Seq. ID no. 13611186
  misc_feature (68)..(247): Pfam Name: Chlorophyll A-B binding protein Pfam Description: Chlorophyll A-B binding protein
  misc_feature (1)..(258): Homolog of NCBI NO: 15218330 NR Description: chlorophyll a/b-binding protein Lhcb6
  misc_feature (1)..(258): Homolog of NCBI NO: 25299024 NR Description: chlorophyll a/b-binding protein Lhcb6 [imported] Arabidopsis thaliana >gi|4741960|gb|AAD28777.1|AF134130_1 Lhcb6
  misc_feature (1)..(258): Homolog of NCBI NO: 8954298 NR Description: chlorophyll a/b-binding protein CP24 precursor
  misc_feature (1)..(258): Homolog of NCBI NO: 543939 NR Description: Chlorophyll A-B binding protein CP24, chloroplast
  misc_feature (1)..(258): Homolog of NCBI NO: 115834 NR Description: Chlorophyll A-B binding protein CP24 10B,
  misc_feature (6)..(258): Homolog of NCBI NO: 115833 NR Description: Chlorophyll A-B binding protein CP24 10A,
  misc_feature (32)..(258): Homolog of NCBI NO: 7443235 NR Description: chlorophyll a/b-binding apoprotein CP24 precursor
  misc_feature (6)..(245): Homolog of NCBI NO: 115766 NR Description: Chlorophyll A-B binding protein, chloroplast
  misc_feature (39)..(256): Homolog of NCBI NO: 5902596 NR Description: light harvesting complex a protein [Volvox
  misc_feature (6)..(256): Homolog of NCBI NO: 7443233 NR Description: chlorophyll a/b-binding protein type II, I - Lolium temulentum >gi|551047|emb|CAA55864.1| type II LHCI

SEQ ID NO: 102760 - protein, 256 aa, Arabidopsis thaliana; identical to SEQ ID NO: 40173
  peptide (1)..(256): Ceres Seq. ID no. 13611187
  misc_feature (66)..(245): Pfam Name: Chlorophyll A-B binding protein Pfam Description: Chlorophyll A-B binding protein
  misc_feature (1)..(256): Homolog of NCBI NO: 15218330 NR Description: chlorophyll a/b-binding protein Lhcb6
  misc_feature (1)..(256): Homolog of NCBI NO: 25299024 NR Description: chlorophyll a/b-binding protein Lhcb6 [imported] Arabidopsis thaliana >gi|4741960|gb|AAD28777.1|AF134130_1 Lhcb6
  misc_feature (1)..(256): Homolog of NCBI NO: 8954298 NR Description: chlorophyll a/b-binding protein CP24 precursor
  misc_feature (1)..(256): Homolog of NCBI NO: 543939 NR Description: Chlorophyll A-B binding protein CP24, chloroplast
  misc_feature (1)..(256): Homolog of NCBI NO: 115834 NR Description: Chlorophyll A-B binding protein CP24 10B,
  misc_feature (4)..(256): Homolog of NCBI NO: 115833 NR Description: Chlorophyll A-B binding protein CP24 10A,
  misc_feature (30)..(256): Homolog of NCBI NO: 7443235 NR Description: chlorophyll a/b-binding apoprotein CP24 precursor
  misc_feature (4)..(243): Homolog of NCBI NO: 115766 NR Description: Chlorophyll A-B binding protein, chloroplast
  misc_feature (37)..(254): Homolog of NCBI NO: 5902596 NR Description: light harvesting complex a protein [Volvox
  misc_feature (4)..(254): Homolog of NCBI NO: 7443233 NR Description: chlorophyll a/b-binding protein type II, I - Lolium temulentum >gi|551047|emb|CAA55864.1| type II LHCI

SEQ ID NO: 102761 - protein, 149 aa, Arabidopsis thaliana; identical to SEQ ID NO: 40174
  peptide (1)..(149): Ceres Seq. ID no. 13611188
  misc_feature (1)..(138): Pfam Name: Chlorophyll A-B binding protein Pfam Description: Chlorophyll A-B binding protein
  misc_feature (1)..(149): Homolog of NCBI NO: 15218330 NR Description: chlorophyll a/b-binding protein Lhcb6
  misc_feature (1)..(149): Homolog of NCBI NO: 25299024 NR Description: chlorophyll a/b-binding protein Lhcb6 [imported] Arabidopsis thaliana >gi|4741960|gb|AAD28777.1|AF134130_1 Lhcb6
  misc_feature (1)..(149): Homolog of NCBI NO: 8954298 NR Description: chlorophyll a/b-binding protein CP24 precursor
  misc_feature (1)..(149): Homolog of NCBI NO: 543939 NR Description: Chlorophyll A-B binding protein CP24, chloroplast
  misc_feature (1)..(149): Homolog of NCBI NO: 115834 NR Description: Chlorophyll A-B binding protein CP24 10B,
  misc_feature (1)..(149): Homolog of NCBI NO: 115833 NR Description: Chlorophyll A-B binding protein CP24 10A,
  misc_feature (1)..(149): Homolog of NCBI NO: 7443235 NR Description: chlorophyll a/b-binding apoprotein CP24 precursor
  misc_feature (1)..(136): Homolog of NCBI NO: 115766 NR Description: Chlorophyll A-B binding protein, chloroplast
  misc_feature (1)..(147): Homolog of NCBI NO: 5902596 NR Description: light harvesting complex a protein [Volvox
  misc_feature (1)..(147): Homolog of NCBI NO: 7443233 NR Description: chlorophyll a/b-binding protein type II, I - Lolium temulentum >gi|551047|emb|CAA55864.1| type II LHCI

SEQ ID NO: 102762 - DNA, 1982 bp, Arabidopsis thaliana
  misc_feature (1)..(1982): Ceres Seq. ID no. 13611193
  misc_feature: MA Experiment ID: 108434 Result: Up-regulated in Transcription
  misc_feature: MA Experiment 108434 PARAMETER Experiment Name: At_Root_Tips_cDNA_P Parameter: Tissue Value: Root Tips
  misc_feature: MA Experiment ID: 108462 Result: Up-regulated in Transcription
  misc_feature: MA Experiment 108462 PARAMETER Experiment Name: At_Germinating_Seeds_cDNA_P Parameter: Age (day) Value: 2 vs. 0
  misc_feature: MA Experiment 108462 PARAMETER Experiment Name: At_Germinating_Seeds_cDNA_P Parameter: Tissue Value: Germinating Seeds
  misc_feature: MA Experiment ID: 108463 Result: Up-regulated in Transcription
  misc_feature: MA Experiment 108463 PARAMETER Experiment Name: At_Germinating_Seeds_cDNA_P Parameter: Age (day) Value: 3 vs. 0
  misc_feature: MA Experiment 108463 PARAMETER Experiment Name: At_Germinating_Seeds_cDNA_P Parameter: Tissue Value: Germinating Seeds
  misc_feature: MA Experiment ID: 108464 Result: Up-regulated in Transcription
  misc_feature: MA Experiment 108464 PARAMETER Experiment Name: At_Germinating_Seeds_cDNA_P Parameter: Age (day) Value: 4 vs. 0
  misc_feature: MA Experiment 108464 PARAMETER Experiment Name: At_Germinating_Seeds_cDNA_P Parameter: Tissue Value: Germinating Seeds
  misc_feature: MA Experiment ID: 20000087 Result: Down-regulated in Transcription
  misc_feature: MA Experiment 20000087 PARAMETER Experiment Name: At_100uM_ABA_Mutants_cDNA_P Parameter: Plant Line Value: WS
  misc_feature: MA Experiment 20000087 PARAMETER Experiment Name: At_100uM_ABA_Mutants_cDNA_P Parameter: Timepoint (hr) Value: 6
  misc_feature: MA Experiment 20000087 PARAMETER Experiment Name: At_100uM_ABA_Mutants_cDNA_P Parameter: Tissue Value: Aerial
  misc_feature: MA Experiment 20000087 PARAMETER Experiment Name: At_100uM_ABA_Mutants_cDNA_P Parameter: Treatment Value: 100uM ABA vs. No Treatment
  misc_feature: MA Experiment ID: 20000179 Result: Up-regulated in Transcription
  misc_feature: MA Experiment 20000179 PARAMETER Experiment Name: At_Germinating_Seeds_P Parameter: Age (hr) Value: 6 vs. 0
  misc_feature: MA Experiment 20000179 PARAMETER Experiment Name: At_Germinating_Seeds_P Parameter: Tissue Value: Germinating Seeds
  misc_feature: MA Experiment ID: 20000180 Result: Up-regulated in Transcription
  misc_feature: MA Experiment 20000180 PARAMETER Experiment Name: At_Germinating_Seeds_P Parameter: Age (hr) Value: 24 vs. 0
  misc_feature: MA Experiment 20000180 PARAMETER Experiment Name: At_Germinating_Seeds_P Parameter: Tissue Value: Germinating Seeds
gatccttgtcacaaaatgtcgcgtaattcttctactgatttcagctcaatcgctcaaattcgagtttgcgtttagaaattgaagttgactcttctgttcttgaatctatctccgatcggtgaactatctcgcagtaccaggagattgatcactccttcgacattgctctttgaattcgtcctcaagggtattaatgagctcgtagaagctaccagaaatggcgtccatgagctctggtgatgaaagccttcgactttgcatgtttgatttgaggagaggtcaaactgaaggacaagagttagagaaaattttgttcttttatcctgccgatttagacttctcgacgcagttatcagtgatcgggctcagtgaagggcttattacttttactagacttttctctccggaggcggcttgtgaagtgatcgaagcagaaagacattcccatgttttctatgaggctgaacctgatatctggatggttatggttgtggagaaaaataaggagacaggagcgatatggaggatcgatgcattaaggagggtgcttaaagaagtgcactcactctttgtgatgtttcacgggtcaattagggcattaatcgaaaaagaaccaacaggagggcttacccgatcactattgtacccgttcatcacagattatttaagcacatttcaaatatggtctctctcggaagactgctgctgtgaattttttgttgggaagaaacttcagctaccaactttccgtgaaactttgagagagcgtggaactgttcaaatgcttactttagcaagggatactgcagttgaagttcagtctcttgttcaagtactagattcatgtgctgggagcttacgatgtcactctatgatcttatttcaagatcttttggtttcaacaaccctctcagctgatgataccgtcgacttgtttacatttgcggtaatgaggttgacctcaaaagctttatcctctgatacgagttcttggtcatatctacgtaaagggcctggttcatctgaaatctcttctagatctaatctggcacccgttggctcaattgattccctacactcaagaaacggtaataacatgcatcatgttattaggccactacaaaatgataagtggacaaaagggaaagatgggtttctaataaccgatatttggggtcttgagactggcggctcccctgattctgccatccctacaatttggcttcagcagacacaagaaagaatgtatctccttgcctatcagcataaaagtctcaccttacttcttctgatgcctacaaatgccattgtcaatggagatttaagcatctcagccgtgaaacagcaagttattgaagatgcatcactgagaattttgaaaattgaagagaatatttcaagagggtggggcggtgagaatgcttaccatattaagggttaccgttacttagtagttgataatgacacgaaagtatccagatcttctccttcaggaaaagtaacaacacttgcaaaggagtctctacttgcactaaacaagcttagagaagaagtggattcagaaaaaagccgtgcaaaaggacaggagaaagacatggaaatatgcatcagagctaagaacaatgtgtgggtgatcgcccgtgtgaccagaggcaaagagctttacatggctttggagaaaggcagcgacactcttcttgataccacagacgctgttggaagattcagcaacaggtattgcagcggagcattcttgatggactaagttttcgtgttctttcttctggttttgggaagagggttcttctagtttcaagtacgaagtgaaaagctcagaagaagtaatgagcacttctctctcagccattaattttgttttgtgagaaattgcagagaggaaaacgattgtgttcttagttggcctgtagatatgtaacaatgatattccacgttggatcagtgcaaacaaatccttttttgtg

SEQ ID NO: 102763 - protein, 515 aa, Arabidopsis thaliana
  peptide (1)..(515): Ceres Seq. ID no. 13611194
  misc_feature (1)..(515): Homolog of NCBI NO: 18394314 NR Description: expressed protein [Arabidopsis thaliana]
  misc_feature (1)..(515): Homolog of NCBI NO: 21618002 NR Description: unknown [Arabidopsis thaliana]
  misc_feature (1)..(515): Homolog of NCBI NO: 30684673 NR Description: expressed protein [Arabidopsis thaliana]
  misc_feature (136)..(515): Homolog of NCBI NO: 15220866 NR Description: myrosinase precursor -related [Arabidopsis
  misc_feature (136)..(515): Homolog of NCBI NO: 25372816 NR Description: F23A5.27 [imported] - Arabidopsis thaliana
  misc_feature (1)..(322): Homolog of NCBI NO: 25372816 NR Description: F23A5.27 [imported] - Arabidopsis thaliana
  misc_feature (1)..(322): Homolog of NCBI NO: 15220866 NR Description: myrosinase precursor -related [Arabidopsis
  misc_feature (203)..(515): Homolog of NCBI NO: 18266049 NR Description: myrosinase precursor [Brassica oleracea]
  misc_feature (161)..(515): Homolog of NCBI NO: 38175489 NR Description: putative myrosinase precursor [Oryza sativa
  misc_feature (245)..(506): Homolog of NCBI NO: 14517360 NR Description: At1g80910/F23A5_21 [Arabidopsis thaliana]
MASMSSGDESLRLCMFDLRRGQTEGQELEKILFFYPADLDFSTQLSVIGLSEGLITFTRLFSPEAACEVIEAERHSHVFYEAEPDIWMVMVVEKNKETGAIWRIDALRRVLKEVHSLFVMFHGSIRALIEKEPTGGLTRSLLYPFITDYLSTFQIWSLSEDCCCEFFVGKKLQLPTFRETLRERGTVQMLTLARDTAVEVQSLVQVLDSCAGSLRCHSMILFQDLLVSTTLSADDTVDLFTFAVMRLTSKALSSDTSSWSYLRKGPGSSEISSRSNLAPVGSIDSLHSRNGNNMHHVIRPLQNDKWTKGKDGFLITDIWGLETGGSPDSAIPTIWLQQTQERMYLLAYQHKSLTLLLLMPTNAIVNGDLSISAVKQQVIEDASLRILKIEENISRGWGGENAYHIKGYRYLVVDNDTKVSRSSPSGKVTTLAKESLLALNKLREEVDSEKSRAKGQEKDMEICIRAKNNVWVIARVTRGKELYMALEKGSDTLLDTTDAVGRFSNRYCSGAFLMD

SEQ ID NO: 102764 - protein, 512 aa, Arabidopsis thaliana
  peptide (1)..(512): Ceres Seq. ID no. 13611195
  misc_feature (1)..(512): Homolog of NCBI NO: 18394314 NR Description: expressed protein [Arabidopsis thaliana]
  misc_feature (1)..(512): Homolog of NCBI NO: 21618002 NR Description: unknown [Arabidopsis thaliana]
  misc_feature (1)..(512): Homolog of NCBI NO: 30684673 NR Description: expressed protein [Arabidopsis thaliana]
  misc_feature (133)..(512): Homolog of NCBI NO: 15220866 NR Description: myrosinase precursor -related [Arabidopsis
  misc_feature (133)..(512): Homolog of NCBI NO: 25372816 NR Description: F23A5.27 [imported] - Arabidopsis thaliana
  misc_feature (1)..(319): Homolog of NCBI NO: 25372816 NR Description: F23A5.27 [imported] - Arabidopsis thaliana
  misc_feature (1)..(319): Homolog of NCBI NO: 15220866 NR Description: myrosinase precursor -related [Arabidopsis
  misc_feature (200)..(512): Homolog of NCBI NO: 18266049 NR Description: myrosinase precursor [Brassica oleracea]
  misc_feature (158)..(512): Homolog of NCBI NO: 38175489 NR Description: putative myrosinase precursor [Oryza sativa
  misc_feature (242)..(503): Homolog of NCBI NO: 14517360 NR Description: At1g80910/F23A5_21 [Arabidopsis thaliana]
MSSGDESLRLCMFDLRRGQTEGQELEKILFFYPADLDFSTQLSVIGLSEGLITFTRLFSPEAACEVIEAERHSHVFYEAEPDIWMVMVVEKNKETGAIWRIDALRRVLKEVHSLFVMFHGSIRALIEKEPTGGLTRSLLYPFITDYLSTFQIWSLSEDCCCEFFVGKKLQLPTFRETLRERGTVQMLTLARDTAVEVQSLVQVLDSCAGSLRCHSMILFQDLLVSTTLSADDTVDLFTFAVMRLTSKALSSDTSSWSYLRKGPGSSEISSRSNLAPVGSIDSLHSRNGNNMHHVIRPLQNDKWTKGKDGFLITDIWGLETGGSPDSAIPTIWLQQTQERMYLLAYQHKSLTLLLLMPTNAIVNGDLSISAVKQQVIEDASLRILKIEENISRGWGGENAYHIKGYRYLVVDNDTKVSRSSPSGKVTTLAKESLLALNKLREEVDSEKSRAKGQEKDMEICIRAKNNVWVIARVTRGKELYMALEKGSDTLLDTTDAVGRFSNRYCSGAFLMD

SEQ ID NO: 102765 - protein, 501 aa, Arabidopsis thaliana
  peptide (1)..(501): Ceres Seq. ID no. 13611196
  misc_feature (1)..(501): Homolog of NCBI NO: 18394314 NR Description: expressed protein [Arabidopsis thaliana]
  misc_feature (1)..(501): Homolog of NCBI NO: 21618002 NR Description: unknown [Arabidopsis thaliana]
  misc_feature (1)..(501): Homolog of NCBI NO: 30684673 NR Description: expressed protein [Arabidopsis thaliana]
  misc_feature (122)..(501): Homolog of NCBI NO: 15220866 NR Description: myrosinase precursor -related [Arabidopsis
  misc_feature (122)..(501): Homolog of NCBI NO: 25372816 NR Description: F23A5.27 [imported] - Arabidopsis thaliana
  misc_feature (1)..(308): Homolog of NCBI NO: 25372816 NR Description: F23A5.27 [imported] - Arabidopsis thaliana
  misc_feature (1)..(308): Homolog of NCBI NO: 15220866 NR Description: myrosinase precursor -related [Arabidopsis
  misc_feature (189)..(501): Homolog of NCBI NO: 18266049 NR Description: myrosinase precursor [Brassica oleracea]
  misc_feature (147)..(501): Homolog of NCBI NO: 38175489 NR Description: putative myrosinase precursor [Oryza sativa
  misc_feature (231)..(492): Homolog of NCBI NO: 14517360 NR Description: At1g80910/F23A5_21 [Arabidopsis thaliana]
MFDLRRGQTEGQELEKILFFYPADLDFSTQLSVIGLSEGLITFTRLFSPEAACEVIEAERHSHVFYEAEPDIWMVMVVEKNKETGAIWRIDALRRVLKEVHSLFVMFHGSIRALIEKEPTGGLTRSLLYPFITDYLSTFQIWSLSEDCCCEFFVGKKLQLPTFRETLRERGTVQMLTLARDTAVEVQSLVQVLDSCAGSLRCHSMILFQDLLVSTTLSADDTVDLFTFAVMRLTSKALSSDTSSWSYLRKGPGSSEISSRSNLAPVGSIDSLHSRNGNNMHHVIRPLQNDKWTKGKDGFLITDIWGLETGGSPDSAIPTIWLQQTQERMYLLAYQHKSLTLLLLMPTNAIVNGDLSISAVKQQVIEDASLRILKIEENISRGWGGENAYHIKGYRYLVVDNDTKVSRSSPSGKVTTLAKESLLALNKLREEVDSEKSRAKGQEKDMEICIRAKNNVWVIARVTRGKELYMALEKGSDTLLDTTDAVGRFSNRYCSGAFLMD

SEQ ID NO: 102766 - DNA, 1549 bp, Arabidopsis thaliana
  misc_feature (1)..(1549): Ceres Seq. ID no. 13611201
  misc_feature: MA Experiment ID: 108462 Result: Down-regulated in Transcription
  misc_feature: MA Experiment 108462 PARAMETER Experiment Name: At_Germinating_Seeds_cDNA_P Parameter: Age (day) Value: 2 vs. 0
  misc_feature: MA Experiment 108462 PARAMETER Experiment Name: At_Germinating_Seeds_cDNA_P Parameter: Tissue Value: Germinating Seeds
  misc_feature: MA Experiment ID: 108463 Result: Down-regulated in Transcription
  misc_feature: MA Experiment 108463 PARAMETER Experiment Name: At_Germinating_Seeds_cDNA_P Parameter: Age (day) Value: 3 vs. 0
  misc_feature: MA Experiment 108463 PARAMETER Experiment Name: At_Germinating_Seeds_cDNA_P Parameter: Tissue Value: Germinating Seeds
  misc_feature: MA Experiment ID: 108464 Result: Down-regulated in Transcription
  misc_feature: MA Experiment 108464 PARAMETER Experiment Name: At_Germinating_Seeds_cDNA_P Parameter: Age (day) Value: 4 vs. 0
  misc_feature: MA Experiment 108464 PARAMETER Experiment Name: At_Germinating_Seeds_cDNA_P Parameter: Tissue Value: Germinating Seeds
  misc_feature: MA Experiment ID: 108469 Result: Up-regulated in Transcription
  misc_feature: MA Experiment ID: 108585 Result: Up-regulated in Transcription
  misc_feature: MA Experiment 108585 PARAMETER Experiment Name: At_5mM_NaNP_cDNA_P Parameter: Timepoint (hr) Value: 6
  misc_feature: MA Experiment 108585 PARAMETER Experiment Name: At_5mM_NaNP_cDNA_P Parameter: Tissue Value: Aerial
  misc_feature: MA Experiment 108585 PARAMETER Experiment Name: At_5mM_NaNP_cDNA_P Parameter: Treatment Value: null
  misc_feature: MA Experiment ID: 108667 Result: Up-regulated in Transcription
  misc_feature: MA Experiment 108667 PARAMETER Experiment Name: At_2mM_SA_cDNA_P Parameter: Plant Line Value: WS
  misc_feature: MA Experiment 108667 PARAMETER Experiment Name: At_2mM_SA_cDNA_P Parameter: Timepoint (hr) Value: 1
  misc_feature: MA Experiment 108667 PARAMETER Experiment Name: At_2mM_SA_cDNA_P Parameter: Treatment Value: 2mM SA vs. No Treatment
  misc_feature: MA Experiment ID: 108668 Result: Up-regulated in Transcription
  misc_feature: MA Experiment 108668 PARAMETER Experiment Name: At_2mM_SA_cDNA_P Parameter: Plant Line Value: WS
  misc_feature: MA Experiment 108668 PARAMETER Experiment Name: At_2mM_SA_cDNA_P Parameter: Timepoint (hr) Value: 6
  misc_feature: MA Experiment 108668 PARAMETER Experiment Name: At_2mM_SA_cDNA_P Parameter: Treatment Value: 2mM SA vs. No Treatment
  misc_feature: MA Experiment ID: 20000182 Result: Up-regulated in Transcription
  misc_feature: MA Experiment 20000182 PARAMETER Experiment Name: At_2mM_SA_P Parameter: Age (day) Value: 14
  misc_feature: MA Experiment 20000182 PARAMETER Experiment Name: At_2mM_SA_P Parameter: Organism Value: A. thaliana
  misc_feature: MA Experiment 20000182 PARAMETER Experiment Name: At_2mM_SA_P Parameter: Plant Line Value: WS
  misc_feature: MA Experiment 20000182 PARAMETER Experiment Name: At_2mM_SA_P Parameter: Timepoint (hr) Value: 6
  misc_feature: MA Experiment 20000182 PARAMETER Experiment Name: At_2mM_SA_P Parameter: Tissue Value: Aerial
  misc_feature: MA Experiment 20000182 PARAMETER Experiment Name: At_2mM_SA_P Parameter: Treatment Value: 2mM SA vs. No Treatment
  misc_feature: MA Experiment ID: 20000185 Result: Up-regulated in Transcription
  misc_feature: MA Experiment 20000185 PARAMETER Experiment Name: At_Roots__P Parameter: Age (day) Value: 7 vs. 21
  misc_feature: MA Experiment 20000185 PARAMETER Experiment Name: At_Roots__P Parameter: Organism Value: A. thaliana
  misc_feature: MA Experiment 20000185 PARAMETER Experiment Name: At_Roots__P Parameter: Tissue Value: Roots vs. Whole Plant
  misc_feature: MA Experiment ID: 20000234 Result: Up-regulated in Transcription
  misc_feature: MA Experiment 20000234 PARAMETER Experiment Name: At_Siliques_P Parameter: Age (day) Value: 21
  misc_feature: MA Experiment 20000234 PARAMETER Experiment Name: At_Siliques_P Parameter: Organism Value: A. thaliana
  misc_feature: MA Experiment 20000234 PARAMETER Experiment Name: At_Siliques_P Parameter: Plant Line Value: WS
  misc_feature: MA Experiment 20000234 PARAMETER Experiment Name: At_Siliques_P Parameter: Tissue Value: Less Than 5mm Siliques vs. Whole Plant
  misc_feature: MA Experiment ID: 20000264 Result: Up-regulated in Transcription
  misc_feature: MA Experiment 20000264 PARAMETER Experiment Name: At_Open_Flower_P Parameter: Age (day) Value: 21
  misc_feature: MA Experiment 20000264 PARAMETER Experiment Name: At_Open_Flower_P Parameter: Plant Line Value: WS
  misc_feature: MA Experiment 20000264 PARAMETER Experiment Name: At_Open_Flower_P Parameter: Tissue Value: Open Flower vs. Whole Plant
  misc_feature: MA Experiment ID: 20000265 Result: Up-regulated in Transcription
  misc_feature: MA Experiment 20000265 PARAMETER Experiment Name: At_Open_Flower_P Parameter: Age (day) Value: 21
  misc_feature: MA Experiment 20000265 PARAMETER Experiment Name: At_Open_Flower_P Parameter: Plant Line Value: WS
  misc_feature: MA Experiment 20000265 PARAMETER Experiment Name: At_Open_Flower_P Parameter: Tissue Value: Closed Flower vs. Whole Plant
  misc_feature: MA Experiment ID: 20000286 Result: Up-regulated in Transcription
  misc_feature: MA Experiment 20000286 PARAMETER Experiment Name: At_Open_Flower_P Parameter: Age (day) Value: 21
  misc_feature: MA Experiment 20000286 PARAMETER Experiment Name: At_Open_Flower_P Parameter: Plant Line Value: WS
  misc_feature: MA Experiment 20000286 PARAMETER Experiment Name: At_Open_Flower_P Parameter: Tissue Value: Half Open vs. Whole Plant
  misc_feature: MA Experiment ID: 20000439 Result: Up-regulated in Transcription
  misc_feature: MA Experiment 20000439 PARAMETER Experiment Name: At_Roots__P Parameter: Age (day) Value: 14 vs. 21
  misc_feature: MA Experiment 20000439 PARAMETER Experiment Name: At_Roots__P Parameter: Organism Value: A. thaliana
  misc_feature: MA Experiment 20000439 PARAMETER Experiment Name: At_Roots__P Parameter: Tissue Value: Roots vs. Whole Plant
  misc_feature: MA Experiment ID: 20000709 Result: Up-regulated in Transcription
  misc_feature: MA Experiment 20000709 PARAMETER Experiment Name: At_15mM_NH4NO3_L-to-H_P Parameter: Age (hr) Value: 14
  misc_feature: MA Experiment 20000709 PARAMETER Experiment Name: At_15mM_NH4NO3_L-to-H_P Parameter: Organism Value: A. thaliana
  misc_feature: MA Experiment 20000709 PARAMETER Experiment Name: At_15mM_NH4NO3_L-to-H_P Parameter: Plant Line Value: WS
  misc_feature: MA Experiment 20000709 PARAMETER Experiment Name: At_15mM_NH4NO3_L-to-H_P Parameter: Timepoint (hr) Value: 4
  misc_feature: MA Experiment 20000709 PARAMETER Experiment Name: At_15mM_NH4NO3_L-to-H_P Parameter: Tissue Value: Aerial
  misc_feature: MA Experiment 20000709 PARAMETER Experiment Name: At_15mM_NH4NO3_L-to-H_P Parameter: Treatment Value: 15mM NH4NO3 vs. 30mM Mannitol
  misc_feature: MA Experiment ID: 20001557 Result: Up-regulated in Transcription
  misc_feature: MA Experiment 20001557 PARAMETER Experiment Name: At_Drought_Soil_Dry_P Parameter: Age (day) Value: 27
  misc_feature: MA Experiment 20001557 PARAMETER Experiment Name: At_Drought_Soil_Dry_P Parameter: Organism Value: A. thaliana
  misc_feature: MA Experiment 20001557 PARAMETER Experiment Name: At_Drought_Soil_Dry_P Parameter: Plant Line Value: WS
  misc_feature: MA Experiment 20001557 PARAMETER Experiment Name: At_Drought_Soil_Dry_P Parameter: Post Timepoint (hr) Value: 3
  misc_feature: MA Experiment 20001557 PARAMETER Experiment Name: At_Drought_Soil_Dry_P Parameter: Post-Treatment Value: Re-Water vs. No Drought
  misc_feature: MA Experiment 20001557 PARAMETER Experiment Name: At_Drought_Soil_Dry_P Parameter: Timepoint (day) Value: 13
  misc_feature: MA Experiment 20001557 PARAMETER Experiment Name: At_Drought_Soil_Dry_P Parameter: Treatment Value: Drought vs. No Drought
  misc_feature: MA Experiment ID: 20001560 Result: Up-regulated in Transcription
  misc_feature: MA Experiment 20001560 PARAMETER Experiment Name: At_Drought_Soil_Dry_P Parameter: Age (day) Value: 28
  misc_feature: MA Experiment 20001560 PARAMETER Experiment Name: At_Drought_Soil_Dry_P Parameter: Organism Value: A. thaliana
  misc_feature: MA Experiment 20001560 PARAMETER Experiment Name: At_Drought_Soil_Dry_P Parameter: Plant Line Value: WS
  misc_feature: MA Experiment 20001560 PARAMETER Experiment Name: At_Drought_Soil_Dry_P Parameter: Post Timepoint (hr) Value: None
  misc_feature: MA Experiment 20001560 PARAMETER Experiment Name: At_Drought_Soil_Dry_P Parameter: Post-Treatment Value: None
  misc_feature: MA Experiment 20001560 PARAMETER Experiment Name: At_Drought_Soil_Dry_P Parameter: Timepoint (day) Value: 14
  misc_feature: MA Experiment 20001560 PARAMETER Experiment Name: At_Drought_Soil_Dry_P Parameter: Treatment Value: Drought vs. No Drought
tttgtctcatttttttactcaaacgaacattttcgtggctccagagctacactcaaaagccattcagcggaaggggttaggatttttggcggcgagatctctctgtttctggtagcttagcaatggccttatcttctctcctcagatctgccgccacttccgccgcagctcctcgtgtcgagctttatccatcgtcatcgtacaatcattctcaggtcacgtcaagtcttggattcagtcatagcctgacctcgtctagattttctggtgctgcagtttcaaccggaaaatacaatgcgaagagggttcaacccatcaaggccacagctacggaagcacctcctgctgttcataggtcaaggagcagtggaaagacaaaggttgggatcaacggttttggtcgaattggaagattggtcctccgcatcgcaacctttagggatgatatcgaggttgtagcagtcaacgatccattcatagatgccaagtacatggcttacatgttcaagtatgattctactcatggaaattacaaaggaactatcaatgtaattgatgattcaactttggagatcaatggaaaacaagtcaaagttgtcagcaagagagacccagctgaaatcccgtgggctgatcttggagctgagtatgttgttgagtcttcaggggtattcaccaccgttggacaagcttcatcacatttgaagggtggtgctaagaaggtcatcatttctgcaccttcagcggacgcgcccatgtttgttgttggagtaaatgaaaagacatacctgcctaacatggatatagtctccaatgcaagttgtaccaccaattgtcttgcacctcttgccaaggtggtgcatgaggaatttggtattcttgaaggcttgatgacaacagtccacgcgaccacagctactcagaaaactgtggacggcccatcaatgaaggactggagaggaggccgaggcgcaagtcaaaacatcattcctagctcaacaggcgctgcaaaggctgttggtaaggtccttccggaactcaatggaaaactaacaggaatggccttccgtgtcccaacaccaaatgtctctgttgtggatttaacttgtcgacttgagaaggatgcatcgtatgaagacgtcaaggcagccataaagtttgcatcagaaggaccacttaggggcattcttggatatacagaagaagatgtcgtctctaatgattttcttggagattcaaggtcaagtatctttgatgctaatgctgggattggattaagcaagtccttcatgaaacttgtctcctggtatgacaacgaatggggttacagcaaccgagtccttgacctgatagaacacatggcgttagttgcagccagccgctaaaaccatatcccgccaacgttcgttaggtagtttttgttacattgggggttcgattactgaaccttccggttttggctccaagttttatgtaaaaccatacgatatctaataatatggggaagattttttttgttgtacgaagaaatattgttagcagctagtcg

SEQ ID NO: 102767 - protein, 420 aa, Arabidopsis thaliana
  peptide (1)..(420): Ceres Seq. ID no. 13611202
  misc_feature (235)..(396): Pfam Name: Glyceraldehyde 3-phosphate dehydrogenase, Pfam Description: Glyceraldehyde 3-phosphate dehydrogenase,
  misc_feature (1)..(420): Homolog of NCBI NO: 15219206 NR Description: glyceraldehyde-3-phosphate dehydrogenase -related
  misc_feature (1)..(420): Homolog of NCBI NO: 21618027 NR Description: putative glyceraldehyde-3-phosphate dehydrogenase
  misc_feature (1)..(420): Homolog of NCBI NO: 27754473 NR Description: putative glyceraldehyde-3-phosphate dehydrogenase
  misc_feature (1)..(420): Homolog of NCBI NO: 25284351 NR Description: hypothetical protein F3O9.10 - Arabidopsis
  misc_feature (1)..(419): Homolog of NCBI NO: 15219406 NR Description: glyceraldehyde-3-phosphate dehydrogenase -related
  misc_feature (1)..(419): Homolog of NCBI NO: 18072805 NR Description: glyceraldehyde-3-phosphate dehydrogenase
  misc_feature (1)..(420): Homolog of NCBI NO: 2129471 NR Description: glyceraldehyde-3-phosphate dehydrogenase
  misc_feature (1)..(420): Homolog of NCBI NO: 2129472 NR Description: glyceraldehyde-3-phosphate dehydrogenase
  misc_feature (58)..(420): Homolog of NCBI NO: 3059140 NR Description: NAD-dependent glyceraldehyde-3-phosphate
  misc_feature (59)..(420): Homolog of NCBI NO: 3059122 NR Description: glyeraldehyde-3-phosphate dehydrogenase [Marsilea
MALSSLLRSAATSAAAPRVELYPSSSYNHSQVTSSLGFSHSLTSSRFSGAAVSTGKYNAKRVQPIKATATEAPPAVHRSRSSGKTKVGINGFGRIGRLVLRIATFRDDIEVVAVNDPFIDAKYMAYMFKYDSTHGNYKGTINVIDDSTLEINGKQVKVVSKRDPAEIPWADLGAEYVVESSGVFTTVGQASSHLKGGAKKVIISAPSADAPMFVVGVNEKTYLPNMDIVSNASCTTNCLAPLAKVVHEEFGILEGLMTTVHATTATQKTVDGPSMKDWRGGRGASQNIIPSSTGAAKAVGKVLPELNGKLTGMAFRVPTPNVSVVDLTCRLEKDASYEDVKAAIKFASEGPLRGILGYTEEDVVSNDFLGDSRSSIFDANAGIGLSKSFMKLVSWYDNEWGYSNRVLDLIEHMALVAASR

SEQ ID NO: 102768 - protein, 297 aa, Arabidopsis thaliana; identical to SEQ ID NO: 38140
  peptide (1)..(297): Ceres Seq. ID no. 13611203
  misc_feature (112)..(273): Pfam Name: Glyceraldehyde 3-phosphate dehydrogenase, Pfam Description: Glyceraldehyde 3-phosphate dehydrogenase,
  misc_feature (1)..(297): Homolog of NCBI NO: 15219206 NR Description: glyceraldehyde-3-phosphate dehydrogenase -related
  misc_feature (1)..(297): Homolog of NCBI NO: 21618027 NR Description: putative glyceraldehyde-3-phosphate dehydrogenase
  misc_feature (1)..(297): Homolog of NCBI NO: 27754473 NR Description: putative glyceraldehyde-3-phosphate dehydrogenase
  misc_feature (1)..(297): Homolog of NCBI NO: 25284351 NR Description: hypothetical protein F3O9.10 - Arabidopsis
  misc_feature (1)..(296): Homolog of NCBI NO: 15219406 NR Description: glyceraldehyde-3-phosphate dehydrogenase -related
  misc_feature (1)..(296): Homolog of NCBI NO: 18072805 NR Description: glyceraldehyde-3-phosphate dehydrogenase
  misc_feature (1)..(297): Homolog of NCBI NO: 2129471 NR Description: glyceraldehyde-3-phosphate dehydrogenase
  misc_feature (1)..(297): Homolog of NCBI NO: 2129472 NR Description: glyceraldehyde-3-phosphate dehydrogenase
  misc_feature (1)..(297): Homolog of NCBI NO: 3059140 NR Description: NAD-dependent glyceraldehyde-3-phosphate
  misc_feature (1)..(297): Homolog of NCBI NO: 3059122 NR Description: glyeraldehyde-3-phosphate dehydrogenase [Marsilea

SEQ ID NO: 102769 - protein, 294 aa, Arabidopsis thaliana; identical to SEQ ID NO: 38141
  peptide (1)..(294): Ceres Seq. ID no. 13611204
  misc_feature (109)..(270): Pfam Name: Glyceraldehyde 3-phosphate dehydrogenase, Pfam Description: Glyceraldehyde 3-phosphate dehydrogenase,
  misc_feature (1)..(294): Homolog of NCBI NO: 15219206 NR Description: glyceraldehyde-3-phosphate dehydrogenase -related
  misc_feature (1)..(294): Homolog of NCBI NO: 21618027 NR Description: putative glyceraldehyde-3-phosphate dehydrogenase
  misc_feature (1)..(294): Homolog of NCBI NO: 27754473 NR Description: putative glyceraldehyde-3-phosphate dehydrogenase
  misc_feature (1)..(294): Homolog of NCBI NO: 25284351 NR Description: hypothetical protein F3O9.10 - Arabidopsis
  misc_feature (1)..(293): Homolog of NCBI NO: 15219406 NR Description: glyceraldehyde-3-phosphate dehydrogenase -related
  misc_feature (1)..(293): Homolog of NCBI NO: 18072805 NR Description: glyceraldehyde-3-phosphate dehydrogenase
  misc_feature (1)..(294): Homolog of NCBI NO: 2129471 NR Description: glyceraldehyde-3-phosphate dehydrogenase
  misc_feature (1)..(294): Homolog of NCBI NO: 2129472 NR Description: glyceraldehyde-3-phosphate dehydrogenase
  misc_feature (1)..(294): Homolog of NCBI NO: 3059140 NR Description: NAD-dependent glyceraldehyde-3-phosphate
  misc_feature (1)..(294): Homolog of NCBI NO: 3059122 NR Description: glyeraldehyde-3-phosphate dehydrogenase [Marsilea

SEQ ID NO: 102770 - DNA, 1122 bp, Arabidopsis thaliana
  misc_feature (1)..(1122): Ceres Seq. ID no. 13611209
  misc_feature: MA Experiment ID: 108434 Result: Down-regulated in Transcription
  misc_feature: MA Experiment 108434 PARAMETER Experiment Name: At_Root_Tips_cDNA_P Parameter: Tissue Value: Root Tips
  misc_feature: MA Experiment ID: 108462 Result: Up-regulated in Transcription
  misc_feature: MA Experiment 108462 PARAMETER Experiment Name: At_Germinating_Seeds_cDNA_P Parameter: Age (day) Value: 2 vs. 0
  misc_feature: MA Experiment 108462 PARAMETER Experiment Name: At_Germinating_Seeds_cDNA_P Parameter: Tissue Value: Germinating Seeds
  misc_feature: MA Experiment ID: 108463 Result: Up-regulated in Transcription
  misc_feature: MA Experiment 108463 PARAMETER Experiment Name: At_Germinating_Seeds_cDNA_P Parameter: Age (day) Value: 3 vs. 0
  misc_feature: MA Experiment 108463 PARAMETER Experiment Name: At_Germinating_Seeds_cDNA_P Parameter: Tissue Value: Germinating Seeds
  misc_feature: MA Experiment ID: 108464 Result: Up-regulated in Transcription
  misc_feature: MA Experiment 108464 PARAMETER Experiment Name: At_Germinating_Seeds_cDNA_P Parameter: Age (day) Value: 4 vs. 0
  misc_feature: MA Experiment 108464 PARAMETER Experiment Name: At_Germinating_Seeds_cDNA_P Parameter: Tissue Value: Germinating Seeds
  misc_feature: MA Experiment ID: 108668 Result: Up-regulated in Transcription
  misc_feature: MA Experiment 108668 PARAMETER Experiment Name: At_2mM_SA_cDNA_P Parameter: Plant Line Value: WS
  misc_feature: MA Experiment 108668 PARAMETER Experiment Name: At_2mM_SA_cDNA_P Parameter: Timepoint (hr) Value: 6
  misc_feature: MA Experiment 108668 PARAMETER Experiment Name: At_2mM_SA_cDNA_P Parameter: Treatment Value: 2mM SA vs. No Treatment
  misc_feature: MA Experiment ID: 20000182 Result: Up-regulated in Transcription
  misc_feature: MA Experiment 20000182 PARAMETER Experiment Name: At_2mM_SA_P Parameter: Age (day) Value: 14
  misc_feature: MA Experiment 20000182 PARAMETER Experiment Name: At_2mM_SA_P Parameter: Organism Value: A. thaliana
  misc_feature: MA Experiment 20000182 PARAMETER Experiment Name: At_2mM_SA_P Parameter: Plant Line Value: WS
  misc_feature: MA Experiment 20000182 PARAMETER Experiment Name: At_2mM_SA_P Parameter: Timepoint (hr) Value: 6
  misc_feature: MA Experiment 20000182 PARAMETER Experiment Name: At_2mM_SA_P Parameter: Tissue Value: Aerial
  misc_feature: MA Experiment 20000182 PARAMETER Experiment Name: At_2mM_SA_P Parameter: Treatment Value: 2mM SA vs. No Treatment
  misc_feature: MA Experiment ID: 20000184 Result: Up-regulated in Transcription
  misc_feature: MA Experiment 20000184 PARAMETER Experiment Name: At_Shoots__P Parameter: Age (day) Value: 7
  misc_feature: MA Experiment 20000184 PARAMETER Experiment Name: At_Shoots__P Parameter: Tissue Value: Shoots vs. Whole Plant
  misc_feature: MA Experiment ID: 20000185 Result: Up-regulated in Transcription
  misc_feature: MA Experiment 20000185 PARAMETER Experiment Name: At_Roots__P Parameter: Age (day) Value: 7 vs. 21
  misc_feature: MA Experiment 20000185 PARAMETER Experiment Name: At_Roots__P Parameter: Organism Value: A. thaliana
  misc_feature: MA Experiment 20000185 PARAMETER Experiment Name: At_Roots__P Parameter: Tissue Value: Roots vs. Whole Plant
  misc_feature: MA Experiment ID: 20000264 Result: Down-regulated in Transcription
  misc_feature: MA Experiment 20000264 PARAMETER Experiment Name: At_Open_Flower_P Parameter: Age (day) Value: 21
  misc_feature: MA Experiment 20000264 PARAMETER Experiment Name: At_Open_Flower_P Parameter: Plant Line Value: WS
  misc_feature: MA Experiment 20000264 PARAMETER Experiment Name: At_Open_Flower_P Parameter: Tissue Value: Open Flower vs. Whole Plant
  misc_feature: MA Experiment ID: 20000265 Result: Down-regulated in Transcription
  misc_feature: MA Experiment 20000265 PARAMETER Experiment Name: At_Open_Flower_P Parameter: Age (day) Value: 21
  misc_feature: MA Experiment 20000265 PARAMETER Experiment Name: At_Open_Flower_P Parameter: Plant Line Value: WS
  misc_feature: MA Experiment 20000265 PARAMETER Experiment Name: At_Open_Flower_P Parameter: Tissue Value: Closed Flower vs. Whole Plant
  misc_feature: MA Experiment ID: 20000286 Result: Down-regulated in Transcription
  misc_feature: MA Experiment 20000286 PARAMETER Experiment Name: At_Open_Flower_P Parameter: Age (day) Value: 21
  misc_feature: MA Experiment 20000286 PARAMETER Experiment Name: At_Open_Flower_P Parameter: Plant Line Value: WS
  misc_feature: MA Experiment 20000286 PARAMETER Experiment Name: At_Open_Flower_P Parameter: Tissue Value: Half Open vs. Whole Plant
  misc_feature: MA Experiment ID: 20000439 Result: Up-regulated in Transcription
  misc_feature: MA Experiment 20000439 PARAMETER Experiment Name: At_Roots__P Parameter: Age (day) Value: 14 vs. 21
  misc_feature: MA Experiment 20000439 PARAMETER Experiment Name: At_Roots__P Parameter: Organism Value: A. thaliana
  misc_feature: MA Experiment 20000439 PARAMETER Experiment Name: At_Roots__P Parameter: Tissue Value: Roots vs. Whole Plant
  misc_feature: MA Experiment ID: 20000527 Result: Down-regulated in Transcription
  misc_feature: MA Experiment 20000527 PARAMETER Experiment Name: At_10percent_PEG_P Parameter: Age (day) Value: 20
  misc_feature: MA Experiment 20000527 PARAMETER Experiment Name: At_10percent_PEG_P Parameter: Organism Value: A. thaliana
  misc_feature: MA Experiment 20000527 PARAMETER Experiment Name: At_10percent_PEG_P Parameter: Plant Line Value: WS
  misc_feature: MA Experiment 20000527 PARAMETER Experiment Name: At_10percent_PEG_P Parameter: Timepoint (day) Value: 20
  misc_feature: MA Experiment 20000527 PARAMETER Experiment Name: At_10percent_PEG_P Parameter: Tissue Value: Whole Plant
  misc_feature: MA Experiment 20000527 PARAMETER Experiment Name: At_10percent_PEG_P Parameter: Treatment Value: 10percent PEG vs. No Treatment
  misc_feature: MA Experiment ID: 20000794 Result: Down-regulated in Transcription
  misc_feature: MA Experiment 20000794 PARAMETER Experiment Name: At_Petals_P Parameter: Age (day) Value: 23-25 days
  misc_feature: MA Experiment 20000794 PARAMETER Experiment Name: At_Petals_P Parameter: Plant Line Value: WS
  misc_feature: MA Experiment 20000794 PARAMETER Experiment Name: At_Petals_P Parameter: Tissue Value: Petals vs. Whole plant
  misc_feature: MA Experiment ID: 20001555 Result: Down-regulated in Transcription
  misc_feature: MA Experiment 20001555 PARAMETER Experiment Name: At_Drought_Soil_Dry_P Parameter: Age (day) Value: 24
  misc_feature: MA Experiment 20001555 PARAMETER Experiment Name: At_Drought_Soil_Dry_P Parameter: Organism Value: A. thaliana
  misc_feature: MA Experiment 20001555 PARAMETER Experiment Name: At_Drought_Soil_Dry_P Parameter: Plant Line Value: WS
  misc_feature: MA Experiment 20001555 PARAMETER Experiment Name: At_Drought_Soil_Dry_P Parameter: Post Timepoint (hr) Value: None
  misc_feature: MA Experiment 20001555 PARAMETER Experiment Name: At_Drought_Soil_Dry_P Parameter: Post-Treatment Value: None
  misc_feature: MA Experiment 20001555 PARAMETER Experiment Name: At_Drought_Soil_Dry_P Parameter: Timepoint (day) Value: 10
  misc_feature: MA Experiment 20001555 PARAMETER Experiment Name: At_Drought_Soil_Dry_P Parameter: Treatment Value: Drought vs. No Drought
  misc_feature: MA Experiment ID: 20001556 Result: Down-regulated in Transcription
  misc_feature: MA Experiment 20001556 PARAMETER Experiment Name: At_Drought_Soil_Dry_P Parameter: Age (day) Value: 26
  misc_feature: MA Experiment 20001556 PARAMETER Experiment Name: At_Drought_Soil_Dry_P Parameter: Organism Value: A. thaliana
  misc_feature: MA Experiment 20001556 PARAMETER Experiment Name: At_Drought_Soil_Dry_P Parameter: Plant Line Value: WS
  misc_feature: MA Experiment 20001556 PARAMETER Experiment Name: At_Drought_Soil_Dry_P Parameter: Post Timepoint (hr) Value: None
  misc_feature: MA Experiment 20001556 PARAMETER Experiment Name: At_Drought_Soil_Dry_P Parameter: Post-Treatment Value: None
  misc_feature: MA Experiment 20001556 PARAMETER Experiment Name: At_Drought_Soil_Dry_P Parameter: Timepoint (day) Value: 12
  misc_feature: MA Experiment 20001556 PARAMETER Experiment Name: At_Drought_Soil_Dry_P Parameter: Treatment Value: Drought vs. No Drought
  misc_feature: MA Experiment ID: 20001558 Result: Down-regulated in Transcription
  misc_feature: MA Experiment 20001558 PARAMETER Experiment Name: At_Drought_Soil_Dry_P Parameter: Age (day) Value: 27
  misc_feature: MA Experiment 20001558 PARAMETER Experiment Name: At_Drought_Soil_Dry_P Parameter: Organism Value: A. thaliana
  misc_feature: MA Experiment 20001558 PARAMETER Experiment Name: At_Drought_Soil_Dry_P Parameter: Plant Line Value: WS
  misc_feature: MA Experiment 20001558 PARAMETER Experiment Name: At_Drought_Soil_Dry_P Parameter: Post Timepoint (hr) Value: 6
  misc_feature: MA Experiment 20001558 PARAMETER Experiment Name: At_Drought_Soil_Dry_P Parameter: Post-Treatment Value: Re-Water vs. No Drought
  misc_feature: MA Experiment 20001558 PARAMETER Experiment Name: At_Drought_Soil_Dry_P Parameter: Timepoint (day) Value: 13
  misc_feature: MA Experiment 20001558 PARAMETER Experiment Name: At_Drought_Soil_Dry_P Parameter: Treatment Value: Drought vs. No Drought
  misc_feature: MA Experiment ID: 20001905 Result: Down-regulated in Transcription
  misc_feature: MA Experiment 20001905 PARAMETER Experiment Name: At_Drought_Reproduction_P Parameter: Age (day) Value: 40
  misc_feature: MA Experiment 20001905 PARAMETER Experiment Name: At_Drought_Reproduction_P Parameter: Organism Value: A. thaliana
  misc_feature: MA Experiment 20001905 PARAMETER Experiment Name: At_Drought_Reproduction_P Parameter: Plant Line Value: WS
  misc_feature: MA Experiment 20001905 PARAMETER Experiment Name: At_Drought_Reproduction_P Parameter: Timepoint (day) Value: 10
  misc_feature: MA Experiment 20001905 PARAMETER Experiment Name: At_Drought_Reproduction_P Parameter: Tissue Value: Rosettes
  misc_feature: MA Experiment 20001905 PARAMETER Experiment Name: At_Drought_Reproduction_P Parameter: Treatment Value: Drought vs. No Drought
ccaaacatatacatcaaagcttgactctctttttctctcccatggaatcaacaaagaagcaagtctcgttggagctacttccatggttagttgtccacaccgatggaacggtagagagactagcgggaaccgaggtttgtcctcccggtttggatccaataaccggggttttctctaaagatatcattatcgaaccgaaaaccggtttatctgcccgaatctatcgacccttctcgattcaacccggtcagaagattcctctcatgctctattttcatggcggtgcatttctcatctcctccacttccttcccctcttaccacaccagtcttaacaaaattgtcaatcaggctaacgtcatagccgtctctgtcaattacagactagcaccagaacatccacttcctacagcgtacgaagactcatggactgcgctaaagaatatccaagccataaacgagccgtggatcaacgactacgccgacttggacagtttattcctagtgggagatagcgcgggagctaatatctcgcaccacctcgcatttcgagccaaacaatctgaccaaaccttgaaaatcaaaggcattggaatgatccacccatatttttgggggacacaacctatcggagcagagatcaaagacgaagcgaggaaacaaatggtggacggatggtgggaattcgtgtgcccatccgagaaaggatccgatgacccgtggattaatccgtttgcggacgggtcaccggatcttggagggttagggtgtgagagagtgatgattactgtggcggagaaagatatattgaatgagagagggaagatgtattacgaaagattggtgaagagtgagtggaaaggaaaggttgagattatggagacgaaagagaaagatcatgtttttcatattttcgagccagattgtgatgaagctatggagatggtacgatgcttggctctctttataaaccaagttgaagcttgatattatttgttttgccaaaatttgatggcttttttaatgtttgtataatttttacatgtttgttaatgttgttgttattgtcttttcttttaaatttgtgtattacatttatatgtggttaaatttgtgttttttc

SEQ ID NO: 102771 - protein, 327 aa, Arabidopsis thaliana
  peptide (1)..(327): Ceres Seq. ID no. 13611210
  misc_feature (73)..(130): Pfam Name: Carboxylesterase Pfam Description: Carboxylesterase
  misc_feature (14)..(327): Homolog of NCBI NO: 18401743 NR Description: expressed protein [Arabidopsis thaliana]
  misc_feature (14)..(327): Homolog of NCBI NO: 21536771 NR Description: unknown [Arabidopsis thaliana]
  misc_feature (20)..(322): Homolog of NCBI NO: 15228426 NR Description: expressed protein [Arabidopsis thaliana]
  misc_feature (18)..(322): Homolog of NCBI NO: 15222795 NR Description: expressed protein [Arabidopsis thaliana]
  misc_feature (21)..(324): Homolog of NCBI NO: 15227669 NR Description: expressed protein [Arabidopsis thaliana]
  misc_feature (21)..(324): Homolog of NCBI NO: 28393060 NR Description: putative esterase [Arabidopsis thaliana]
  misc_feature (26)..(322): Homolog of NCBI NO: 15222791 NR Description: hypothetical protein [Arabidopsis thaliana]
  misc_feature (20)..(322): Homolog of NCBI NO: 15228425 NR Description: expressed protein [Arabidopsis thaliana]
  misc_feature (20)..(322): Homolog of NCBI NO: 18086341 NR Description: AT3g48690/T8P19_200 [Arabidopsis thaliana]
  misc_feature (17)..(322): Homolog of NCBI NO: 21537287 NR Description: putative esterase [Arabidopsis thaliana]
KHIHQSLTLFFSPMESTKKQVSLELLPWLVVHTDGTVERLAGTEVCPPGLDPITGVFSKDIIIEPKTGLSARIYRPFSIQPGQKIPLMLYFHGGAFLISSTSFPSYHTSLNKIVNQANVIAVSVNYRLAPEHPLPTAYEDSWTALKNIQAINEPWINDYADLDSLFLVGDSAGANISHHLAFRAKQSDQTLKIKGIGMIHPYFWGTQPIGAEIKDEARKQMVDGWWEFVCPSEKGSDDPWINPFADGSPDLGGLGCERVMITVAEKDILNERGKMYYERLVKSEWKGKVEIMETKEKDHVFHIFEPDCDEAMEMVRCLALFINQVEA

SEQ ID NO: 102772 - protein, 314 aa, Arabidopsis thaliana
  peptide (1)..(314): Ceres Seq. ID no. 13611211
  misc_feature (60)..(117): Pfam Name: Carboxylesterase Pfam Description: Carboxylesterase
  misc_feature (1)..(314): Homolog of NCBI NO: 18401743 NR Description: expressed protein [Arabidopsis thaliana]
  misc_feature (1)..(314): Homolog of NCBI NO: 21536771 NR Description: unknown [Arabidopsis thaliana]
  misc_feature (7)..(309): Homolog of NCBI NO: 15228426 NR Description: expressed protein [Arabidopsis thaliana]
  misc_feature (5)..(309): Homolog of NCBI NO: 15222795 NR Description: expressed protein [Arabidopsis thaliana]
  misc_feature (8)..(311): Homolog of NCBI NO: 15227669 NR Description: expressed protein [Arabidopsis thaliana]
  misc_feature (8)..(311): Homolog of NCBI NO: 28393060 NR Description: putative esterase [Arabidopsis thaliana]
  misc_feature (13)..(309): Homolog of NCBI NO: 15222791 NR Description: hypothetical protein [Arabidopsis thaliana]
  misc_feature (7)..(309): Homolog of NCBI NO: 15228425 NR Description: expressed protein [Arabidopsis thaliana]
  misc_feature (7)..(309): Homolog of NCBI NO: 18086341 NR Description: AT3g48690/T8P19_200 [Arabidopsis thaliana]
  misc_feature (4)..(309): Homolog of NCBI NO: 21537287 NR Description: putative esterase [Arabidopsis thaliana]
MESTKKQVSLELLPWLVVHTDGTVERLAGTEVCPPGLDPITGVFSKDIIIEPKTGLSARIYRPFSIQPGQKIPLMLYFHGGAFLISSTSFPSYHTSLNKIVNQANVIAVSVNYRLAPEHPLPTAYEDSWTALKNIQAINEPWINDYADLDSLFLVGDSAGANISHHLAFRAKQSDQTLKIKGIGMIHPYFWGTQPIGAEIKDEARKQMVDGWWEFVCPSEKGSDDPWINPFADGSPDLGGLGCERVMITVAEKDILNERGKMYYERLVKSEWKGKVEIMETKEKDHVFHIFEPDCDEAMEMVRCLALFINQVEA

SEQ ID NO: 102773 - protein, 240 aa, Arabidopsis thaliana
  peptide (1)..(240): Ceres Seq. ID no. 13611212
  misc_feature (1)..(43): Pfam Name: Carboxylesterase Pfam Description: Carboxylesterase
  misc_feature (1)..(240): Homolog of NCBI NO: 18401743 NR Description: expressed protein [Arabidopsis thaliana]
  misc_feature (1)..(240): Homolog of NCBI NO: 21536771 NR Description: unknown [Arabidopsis thaliana]
  misc_feature (1)..(235): Homolog of NCBI NO: 15228426 NR Description: expressed protein [Arabidopsis thaliana]
  misc_feature (1)..(235): Homolog of NCBI NO: 15222795 NR Description: expressed protein [Arabidopsis thaliana]
  misc_feature (1)..(237): Homolog of NCBI NO: 15227669 NR Description: expressed protein [Arabidopsis thaliana]
  misc_feature (1)..(237): Homolog of NCBI NO: 28393060 NR Description: putative esterase [Arabidopsis thaliana]
  misc_feature (1)..(235): Homolog of NCBI NO: 15222791 NR Description: hypothetical protein [Arabidopsis thaliana]
  misc_feature (1)..(235): Homolog of NCBI NO: 15228425 NR Description: expressed protein [Arabidopsis thaliana]
  misc_feature (1)..(235): Homolog of NCBI NO: 18086341 NR Description: AT3g48690/T8P19_200 [Arabidopsis thaliana]
  misc_feature (1)..(235): Homolog of NCBI NO: 21537287 NR Description: putative esterase [Arabidopsis thaliana]
MLYFHGGAFLISSTSFPSYHTSLNKIVNQANVIAVSVNYRLAPEHPLPTAYEDSWTALKNIQAINEPWINDYADLDSLFLVGDSAGANISHHLAFRAKQSDQTLKIKGIGMIHPYFWGTQPIGAEIKDEARKQMVDGWWEFVCPSEKGSDDPWINPFADGSPDLGGLGCERVMITVAEKDILNERGKMYYERLVKSEWKGKVEIMETKEKDHVFHIFEPDCDEAMEMVRCLALFINQVEA

SEQ ID NO: 102774 - DNA, 1000 bp, Arabidopsis thaliana
  misc_feature (1)..(1000): Ceres Seq. ID no. 13611217
  misc_feature: MA Experiment ID: 108434 Result: Up-regulated in Transcription
  misc_feature: MA Experiment 108434 PARAMETER Experiment Name: At_Root_Tips_cDNA_P Parameter: Tissue Value: Root Tips
  misc_feature: MA Experiment ID: 20000224 Result: Down-regulated in Transcription
  misc_feature: MA Experiment ID: 20000794 Result: Down-regulated in Transcription
  misc_feature: MA Experiment 20000794 PARAMETER Experiment Name: At_Petals_P Parameter: Age (day) Value: 23-25 days
  misc_feature: MA Experiment 20000794 PARAMETER Experiment Name: At_Petals_P Parameter: Plant Line Value: WS
  misc_feature: MA Experiment 20000794 PARAMETER Experiment Name: At_Petals_P Parameter: Tissue Value: Petals vs. Whole plant
tcttcttcttcaatttcacagcttcacgtcgtcgtctttgagtcgccggagctgtagctactgatttggtaccagaaagagagtgcgacggtggacgatgacgctttttcacttcttcaactgtgcgattctcacattcggtcctcacgcggtctactactccgccactcccttatctgaatatgatacacttggaacctccgtgaaagctgctgttgtttaccttgctactgcattggttaagcttgtttgtttggcgacttttctgcaagtgtctgagactgaagtgtttgacccataccaggaagcattgaaagcgatgattggattcatagatgtcgctggtctgtattatgctctggcccagctgactcacaggaacatctcccaaaaccataagtttcaggctgttggtctcgggtgggcattcgcggattctgttttgcacaggttggcacctctctgggttggtgctcgaggactggagttcacttgggattatgttttgcaagggcttgaagccaatgcaaatctggtgttcacgatatctctagctgcactaggttcattaatgtggctacgcaagaacaagccgaagagtctgatccccatcatatacacatgtgcagtcatcattgcgacaatgccttcgatcacaagctatctaaagagagtcaatggatggcatttcccgaaaattgttgggtttgagctggcgacttctctggtaatggcttttatcagttgtcaactcttcatcctctgtcagagaccgtctttgtgagtgattccacttcccagcagagctttttgttaatgggaaactcttgcgacgcacttgccttgttttctgcaggactcggttccatggaaactttgatctttcccatctttatttgtagaagaatattgaaccatcctttcataacttattgatttgggaagtgtcattcgttaaagcatagacttagaatcataataactaagagatgtttatctt

SEQ ID NO: 102775 - protein, 228 aa, Arabidopsis thaliana; identical to SEQ ID NO: 20891
  peptide (1)..(228): Ceres Seq. ID no. 13611218
  misc_feature (1)..(228): Homolog of NCBI NO: 18401831 NR Description: expressed protein [Arabidopsis thaliana]
  misc_feature (170)..(228): Homolog of NCBI NO: 15220273 NR Description: cytochrome P450 -related [Arabidopsis thaliana]
  misc_feature (109)..(146): Homolog of NCBI NO: 15220273 NR Description: cytochrome P450 -related [Arabidopsis thaliana]
  misc_feature (1)..(220): Homolog of NCBI NO: 17556931 NR Description: Seven transmembrane domain protein like (25.0 kD) elegans] >gi|14574554|gb|AAA50689.2| Hypothetical protein ZK418.5
  misc_feature (1)..(216): Homolog of NCBI NO: 39593965 NR Description: Hypothetical protein CBG16516 [Caenorhabditis
  misc_feature (1)..(220): Homolog of NCBI NO: 7511137 NR Description: hypothetical protein ZK418.5 - Caenorhabditis
  misc_feature (1)..(154): Homolog of NCBI NO: 12841501 NR Description: unnamed protein product [Mus musculus]
  misc_feature (1)..(154): Homolog of NCBI NO: 14249166 NR Description: seven transmembrane domain protein [Homo sapiens]
  misc_feature (1)..(154): Homolog of NCBI NO: 21312420 NR Description: seven transmembrane domain protein [Mus musculus]
  misc_feature (1)..(154): Homolog of NCBI NO: 27731097 NR Description: similar to seven transmembrane domain protein

SEQ ID NO: 102776 - protein, 154 aa, Arabidopsis thaliana; identical to SEQ ID NO: 20892
  peptide (1)..(154): Ceres Seq. ID no. 13611219
  misc_feature (1)..(154): Homolog of NCBI NO: 18401831 NR Description: expressed protein [Arabidopsis thaliana]
  misc_feature (96)..(154): Homolog of NCBI NO: 15220273 NR Description: cytochrome P450 -related [Arabidopsis thaliana]
  misc_feature (35)..(72): Homolog of NCBI NO: 15220273 NR Description: cytochrome P450 -related [Arabidopsis thaliana]
  misc_feature (1)..(146): Homolog of NCBI NO: 17556931 NR Description: Seven transmembrane domain protein like (25.0 kD) elegans] >gi|14574554|gb|AAA50689.2| Hypothetical protein ZK418.5
  misc_feature (1)..(142): Homolog of NCBI NO: 39593965 NR Description: Hypothetical protein CBG16516 [Caenorhabditis
  misc_feature (1)..(146): Homolog of NCBI NO: 7511137 NR Description: hypothetical protein ZK418.5 - Caenorhabditis
  misc_feature (1)..(80): Homolog of NCBI NO: 12841501 NR Description: unnamed protein product [Mus musculus]
  misc_feature (1)..(80): Homolog of NCBI NO: 14249166 NR Description: seven transmembrane domain protein [Homo sapiens]
  misc_feature (1)..(80): Homolog of NCBI NO: 21312420 NR Description: seven transmembrane domain protein [Mus musculus]
  misc_feature (1)..(80): Homolog of NCBI NO: 27731097 NR Description: similar to seven transmembrane domain protein

SEQ ID NO: 102777 - DNA, 1346 bp, Arabidopsis thaliana
  misc_feature (1)..(1346): Ceres Seq. ID no. 13611228
  misc_feature: MA Experiment ID: 108434 Result: Up-regulated in Transcription
  misc_feature: MA Experiment 108434 PARAMETER Experiment Name: At_Root_Tips_cDNA_P Parameter: Tissue Value: Root Tips
  misc_feature: MA Experiment ID: 108577 Result: Down-regulated in Transcription
  misc_feature: MA Experiment 108577 PARAMETER Experiment Name: At_42deg_Heat_cDNA_P Parameter: Temperature (deg C) Value: 42 vs. 22
  misc_feature: MA Experiment 108577 PARAMETER Experiment Name: At_42deg_Heat_cDNA_P Parameter: Timepoint (hr) Value: 6
  misc_feature: MA Experiment 108577 PARAMETER Experiment Name: At_42deg_Heat_cDNA_P Parameter: Tissue Value: Aerial
  misc_feature: MA Experiment ID: 108595 Result: Down-regulated in Transcription
  misc_feature: MA Experiment 108595 PARAMETER Experiment Name: At_Ler-pi_Ovule_cDNA_P Parameter: Plant Line Value: null
  misc_feature: MA Experiment ID: 20000113 Result: Down-regulated in Transcription
  misc_feature: MA Experiment 20000113 PARAMETER Experiment Name: At_42deg_Heat_cDNA_P Parameter: Temperature (deg C) Value: 42 vs. 22
  misc_feature: MA Experiment 20000113 PARAMETER Experiment Name: At_42deg_Heat_cDNA_P Parameter: Timepoint (hr) Value: 8
  misc_feature: MA Experiment 20000113 PARAMETER Experiment Name: At_42deg_Heat_cDNA_P Parameter: Tissue Value: Aerial
  misc_feature: MA Experiment ID: 20000144 Result: Down-regulated in Transcription
  misc_feature: MA Experiment 20000144 PARAMETER Experiment Name: At_42deg_Heat_cDNA_P Parameter: Temperature (deg C) Value: 42 vs. 22
  misc_feature: MA Experiment 20000144 PARAMETER Experiment Name: At_42deg_Heat_cDNA_P Parameter: Timepoint (hr) Value: 1
  misc_feature: MA Experiment 20000144 PARAMETER Experiment Name: At_42deg_Heat_cDNA_P Parameter: Tissue Value: Aerial
  misc_feature: MA Experiment ID: 20000185 Result: Up-regulated in Transcription
  misc_feature: MA Experiment 20000185 PARAMETER Experiment Name: At_Roots__P Parameter: Age (day) Value: 7 vs. 21
  misc_feature: MA Experiment 20000185 PARAMETER Experiment Name: At_Roots__P Parameter: Organism Value: A. thaliana
  misc_feature: MA Experiment 20000185 PARAMETER Experiment Name: At_Roots__P Parameter: Tissue Value: Roots vs. Whole Plant
  misc_feature: MA Experiment ID: 20000437 Result: Down-regulated in Transcription
  misc_feature: MA Experiment 20000437 PARAMETER Experiment Name: At_Drought_P Parameter: Age (day) Value: 8
  misc_feature: MA Experiment 20000437 PARAMETER Experiment Name: At_Drought_P Parameter: Organism Value: A. thaliana
  misc_feature: MA Experiment 20000437 PARAMETER Experiment Name: At_Drought_P Parameter: Plant Line Value: WS
  misc_feature: MA Experiment 20000437 PARAMETER Experiment Name: At_Drought_P Parameter: Timepoint (hr) Value: 24
  misc_feature: MA Experiment 20000437 PARAMETER Experiment Name: At_Drought_P Parameter: Tissue Value: Whole Plant
  misc_feature: MA Experiment 20000437 PARAMETER Experiment Name: At_Drought_P Parameter: Treatment Value: Drought vs. No Drought
  misc_feature: MA Experiment ID: 20001911 Result: Down-regulated in Transcription
  misc_feature: MA Experiment 20001911 PARAMETER Experiment Name: At_Drought_Reproduction_P Parameter: Age (day) Value: 40
  misc_feature: MA Experiment 20001911 PARAMETER Experiment Name: At_Drought_Reproduction_P Parameter: Organism Value: A. thaliana
  misc_feature: MA Experiment 20001911 PARAMETER Experiment Name: At_Drought_Reproduction_P Parameter: Plant Line Value: WS
  misc_feature: MA Experiment 20001911 PARAMETER Experiment Name: At_Drought_Reproduction_P Parameter: Timepoint (day) Value: 10
  misc_feature: MA Experiment 20001911 PARAMETER Experiment Name: At_Drought_Reproduction_P Parameter: Tissue Value: Flowers
  misc_feature: MA Experiment 20001911 PARAMETER Experiment Name: At_Drought_Reproduction_P Parameter: Treatment Value: Drought vs. No Drought
aaaaaaaataaaaaagaagagacaaaggggagagagagaaaagaagagcgaacaaattccttctttttcccctctttctctctctctcccactctctcatcttcttcttcttatgattttcaacttattacaacaacaacaacaacaaaataatcttgcaaagtttcagtctcaggtggttcacagttaatgctacttgcaatgatgaatccatcccaatttcgataacctctactgaggcatccaaatgttgaacggaaaagaagagcctaagcagaagaaaggttggtcagagtcgctgctagaatttcggtcagggtttggggaaaagatgaaagttgtgtcgaagaaacgttggaaatctcttggtcctcttcatctgaaaagcaaatcagttgcacggttttgcttcttttcgaagttgaagtcaaacaaccatggtccaggccgtgcaccagtgtatctcaatgtttatgacttgactcctattaacggatatatctattgggcaggccttggtatatttcactctggtgtagaagttcatggagtagagtatgcttttggtgcccatgattatgcaacgagtggtgtttttgaggttgaaccaaggcaatgcccgggcttcaagttcaagaaatcgatattcattggaaccacgaatttaaacccaacacaagtgagagagtttatggaagacatggcttgcagttactacgggaatatgtatcacttgattgttaagaactgcaaccatttctgccaggacgtttgctacaagcttaccgggaaaaagatcccaaaatgggtgaatcggcttgcacaaataggttctgtgtgcagctgcatacttcccgagtccctcaagataacagcggtctgccacgatccagacgggcaaatcccggaggaagaaaacgaaaagagaagtcttagaagctcattcagctgtttatcatccatctccatgagacaaaaacagctttcaacatcatcattgttcctacaatcacctctcagaggctgcttacctccttggcaactcaaacgctcaaaatctaacagcagctccttgaaagaaaggtagacattccaacaaaaaccattgcggtctctcattcgtttcgttagcaacacaaaccacgatttatccttcttctatctttgtaatggagttcgaaaacagatttcccgcgccatcgcttttcatttgattttaacaggctttcataagccattcttcatcttctttctgtttgtattgcttccaaatttgaatcttttctcattttcaaaatcatgtattgcatcaacgctgtttatatctaaactagctctcttagttc

SEQ ID NO: 102778 - protein, 279 aa, Arabidopsis thaliana; identical to SEQ ID NO: 25551
  peptide (1)..(279): Ceres Seq. ID no. 13611229
  misc_feature (69)..(192): Pfam Name: Eukaryotic protein of unknown function (DUF862) Pfam Description: Eukaryotic protein of unknown function (DUF862)
  misc_feature (1)..(279): Homolog of NCBI NO: 18401869 NR Description: expressed protein [Arabidopsis thaliana] unknown protein [Arabidopsis thaliana]
  misc_feature (1)..(279): Homolog of NCBI NO: 9802596 NR Description: T2E6.19 [Arabidopsis thaliana]
  misc_feature (29)..(279): Homolog of NCBI NO: 21593644 NR Description: unknown [Arabidopsis thaliana]
  misc_feature (66)..(263): Homolog of NCBI NO: 18420889 NR Description: expressed protein [Arabidopsis thaliana]
  misc_feature (54)..(279): Homolog of NCBI NO: 18400749 NR Description: expressed protein [Arabidopsis thaliana]
  misc_feature (67)..(256): Homolog of NCBI NO: 18412886 NR Description: expressed protein [Arabidopsis thaliana]
  misc_feature (64)..(234): Homolog of NCBI NO: 15238059 NR Description: expressed protein [Arabidopsis thaliana]
  misc_feature (70)..(234): Homolog of NCBI NO: 30684058 NR Description: expressed protein [Arabidopsis thaliana] AT4g17486/AT4g17486 [Arabidopsis thaliana]
  misc_feature (67)..(256): Homolog of NCBI NO: 25354458 NR Description: hypothetical protein F23A5.4 [imported] - thaliana >gi|6503281|gb|AAF14657.1|AC011713_5 Contains similarity
  misc_feature (92)..(234): Homolog of NCBI NO: 7488100 NR Description: probable EREBP-4 - Arabidopsis thaliana

SEQ ID NO: 102779 - protein, 251 aa, Arabidopsis thaliana; identical to SEQ ID NO: 25552
  peptide (1)..(251): Ceres Seq. ID no. 13611230
  misc_feature (41)..(164): Pfam Name: Eukaryotic protein of unknown function (DUF862) Pfam Description: Eukaryotic protein of unknown function (DUF862)
  misc_feature (1)..(251): Homolog of NCBI NO: 18401869 NR Description: expressed protein [Arabidopsis thaliana] unknown protein [Arabidopsis thaliana]
  misc_feature (1)..(251): Homolog of NCBI NO: 9802596 NR Description: T2E6.19 [Arabidopsis thaliana]
  misc_feature (1)..(251): Homolog of NCBI NO: 21593644 NR Description: unknown [Arabidopsis thaliana]
  misc_feature (38)..(235): Homolog of NCBI NO: 18420889 NR Description: expressed protein [Arabidopsis thaliana]
  misc_feature (26)..(251): Homolog of NCBI NO: 18400749 NR Description: expressed protein [Arabidopsis thaliana]
  misc_feature (39)..(228): Homolog of NCBI NO: 18412886 NR Description: expressed protein [Arabidopsis thaliana]
  misc_feature (36)..(206): Homolog of NCBI NO: 15238059 NR Description: expressed protein [Arabidopsis thaliana]
  misc_feature (42)..(206): Homolog of NCBI NO: 30684058 NR Description: expressed protein [Arabidopsis thaliana] AT4g17486/AT4g17486 [Arabidopsis thaliana]
  misc_feature (39)..(228): Homolog of NCBI NO: 25354458 NR Description: hypothetical protein F23A5.4 [imported] - thaliana >gi|6503281|gb|AAF14657.1|AC011713_5 Contains similarity
  misc_feature (64)..(206): Homolog of NCBI NO: 7488100 NR Description: probable EREBP-4 - Arabidopsis thaliana

SEQ ID NO: 102780 - DNA, 1127 bp, Arabidopsis thaliana
  misc_feature (1)..(1127): Ceres Seq. ID no. 13611238
  misc_feature: MA Experiment ID: 108461 Result: Down-regulated in Transcription
  misc_feature: MA Experiment 108461 PARAMETER Experiment Name: At_Germinating_Seeds_cDNA_P Parameter: Age (day) Value: 1 vs. 0
  misc_feature: MA Experiment 108461 PARAMETER Experiment Name: At_Germinating_Seeds_cDNA_P Parameter: Tissue Value: Germinating Seeds
  misc_feature: MA Experiment ID: 108463 Result: Up-regulated in Transcription
  misc_feature: MA Experiment 108463 PARAMETER Experiment Name: At_Germinating_Seeds_cDNA_P Parameter: Age (day) Value: 3 vs. 0
  misc_feature: MA Experiment 108463 PARAMETER Experiment Name: At_Germinating_Seeds_cDNA_P Parameter: Tissue Value: Germinating Seeds
  misc_feature: MA Experiment ID: 108464 Result: Up-regulated in Transcription
  misc_feature: MA Experiment 108464 PARAMETER Experiment Name: At_Germinating_Seeds_cDNA_P Parameter: Age (day) Value: 4 vs. 0
  misc_feature: MA Experiment 108464 PARAMETER Experiment Name: At_Germinating_Seeds_cDNA_P Parameter: Tissue Value: Germinating Seeds
  misc_feature: MA Experiment ID: 108474 Result: Down-regulated in Transcription
  misc_feature: MA Experiment 108474 PARAMETER Experiment Name: At_Drought_Flowers_cDNA_P Parameter: Timepoint (hr) Value: null
  misc_feature: MA Experiment 108474 PARAMETER Experiment Name: At_Drought_Flowers_cDNA_P Parameter: Treatment Value: Drought vs. No Drought
  misc_feature: MA Experiment ID: 108501 Result: Down-regulated in Transcription
  misc_feature: MA Experiment 108501 PARAMETER Experiment Name: At_ap2_floral_buds_cDNA_P Parameter: Plant Line Value: ap2 (Ler.)
  misc_feature: MA Experiment 108501 PARAMETER Experiment Name: At_ap2_floral_buds_cDNA_P Parameter: Tissue Value: Closed Flower
  misc_feature: MA Experiment ID: 108668 Result: Down-regulated in Transcription
  misc_feature: MA Experiment 108668 PARAMETER Experiment Name: At_2mM_SA_cDNA_P Parameter: Plant Line Value: WS
  misc_feature: MA Experiment 108668 PARAMETER Experiment Name: At_2mM_SA_cDNA_P Parameter: Timepoint (hr) Value: 6
  misc_feature: MA Experiment 108668 PARAMETER Experiment Name: At_2mM_SA_cDNA_P Parameter: Treatment Value: 2mM SA vs. No Treatment
  misc_feature: MA Experiment ID: 20000224 Result: Up-regulated in Transcription
  misc_feature: MA Experiment ID: 20000265 Result: Up-regulated in Transcription
  misc_feature: MA Experiment 20000265 PARAMETER Experiment Name: At_Open_Flower_P Parameter: Age (day) Value: 21
  misc_feature: MA Experiment 20000265 PARAMETER Experiment Name: At_Open_Flower_P Parameter: Plant Line Value: WS
  misc_feature: MA Experiment 20000265 PARAMETER Experiment Name: At_Open_Flower_P Parameter: Tissue Value: Closed Flower vs. Whole Plant
  misc_feature: MA Experiment ID: 20000437 Result: Up-regulated in Transcription
  misc_feature: MA Experiment 20000437 PARAMETER Experiment Name: At_Drought_P Parameter: Age (day) Value: 8
  misc_feature: MA Experiment 20000437 PARAMETER Experiment Name: At_Drought_P Parameter: Organism Value: A. thaliana
  misc_feature: MA Experiment 20000437 PARAMETER Experiment Name: At_Drought_P Parameter: Plant Line Value: WS
  misc_feature: MA Experiment 20000437 PARAMETER Experiment Name: At_Drought_P Parameter: Timepoint (hr) Value: 24
  misc_feature: MA Experiment 20000437 PARAMETER Experiment Name: At_Drought_P Parameter: Tissue Value: Whole Plant
  misc_feature: MA Experiment 20000437 PARAMETER Experiment Name: At_Drought_P Parameter: Treatment Value: Drought vs. No Drought
  misc_feature: MA Experiment ID: 20001904 Result: Up-regulated in Transcription
  misc_feature: MA Experiment 20001904 PARAMETER Experiment Name: At_Drought_Reproduction_P Parameter: Age (day) Value: 37
  misc_feature: MA Experiment 20001904 PARAMETER Experiment Name: At_Drought_Reproduction_P Parameter: Organism Value: A. thaliana
  misc_feature: MA Experiment 20001904 PARAMETER Experiment Name: At_Drought_Reproduction_P Parameter: Plant Line Value: WS
  misc_feature: MA Experiment 20001904 PARAMETER Experiment Name: At_Drought_Reproduction_P Parameter: Timepoint (day) Value: 7
  misc_feature: MA Experiment 20001904 PARAMETER Experiment Name: At_Drought_Reproduction_P Parameter: Tissue Value: Rosettes
  misc_feature: MA Experiment 20001904 PARAMETER Experiment Name: At_Drought_Reproduction_P Parameter: Treatment Value: Drought vs. No Drought
  misc_feature: MA Experiment ID: 20001905 Result: Up-regulated in Transcription
  misc_feature: MA Experiment 20001905 PARAMETER Experiment Name: At_Drought_Reproduction_P Parameter: Age (day) Value: 40
  misc_feature: MA Experiment 20001905 PARAMETER Experiment Name: At_Drought_Reproduction_P Parameter: Organism Value: A. thaliana
  misc_feature: MA Experiment 20001905 PARAMETER Experiment Name: At_Drought_Reproduction_P Parameter: Plant Line Value: WS
  misc_feature: MA Experiment 20001905 PARAMETER Experiment Name: At_Drought_Reproduction_P Parameter: Timepoint (day) Value: 10
  misc_feature: MA Experiment 20001905 PARAMETER Experiment Name: At_Drought_Reproduction_P Parameter: Tissue Value: Rosettes
  misc_feature: MA Experiment 20001905 PARAMETER Experiment Name: At_Drought_Reproduction_P Parameter: Treatment Value: Drought vs. No Drought
  misc_feature: MA Experiment ID: 20001906 Result: Up-regulated in Transcription
  misc_feature: MA Experiment 20001906 PARAMETER Experiment Name: At_Drought_Reproduction_P Parameter: Age (day) Value: 35
  misc_feature: MA Experiment 20001906 PARAMETER Experiment Name: At_Drought_Reproduction_P Parameter: Organism Value: A. thaliana
  misc_feature: MA Experiment 20001906 PARAMETER Experiment Name: At_Drought_Reproduction_P Parameter: Plant Line Value: WS
  misc_feature: MA Experiment 20001906 PARAMETER Experiment Name: At_Drought_Reproduction_P Parameter: Timepoint (day) Value: 5
  misc_feature: MA Experiment 20001906 PARAMETER Experiment Name: At_Drought_Reproduction_P Parameter: Tissue Value: Siliques
  misc_feature: MA Experiment 20001906 PARAMETER Experiment Name: At_Drought_Reproduction_P Parameter: Treatment Value: Drought vs. No Drought
  misc_feature: MA Experiment ID: 20001911 Result: Up-regulated in Transcription
  misc_feature: MA Experiment 20001911 PARAMETER Experiment Name: At_Drought_Reproduction_P Parameter: Age (day) Value: 40
  misc_feature: MA Experiment 20001911 PARAMETER Experiment Name: At_Drought_Reproduction_P Parameter: Organism Value: A. thaliana
  misc_feature: MA Experiment 20001911 PARAMETER Experiment Name: At_Drought_Reproduction_P Parameter: Plant Line Value: WS
  misc_feature: MA Experiment 20001911 PARAMETER Experiment Name: At_Drought_Reproduction_P Parameter: Timepoint (day) Value: 10
  misc_feature: MA Experiment 20001911 PARAMETER Experiment Name: At_Drought_Reproduction_P Parameter: Tissue Value: Flowers
  misc_feature: MA Experiment 20001911 PARAMETER Experiment Name: At_Drought_Reproduction_P Parameter: Treatment Value: Drought vs. No Drought
agatcataaagaaccaaaaataaaagccaaaacgtttttagacatggcactcacaaaagagagaagaagcttgttggtttcaatggtgttggtgttcttcttcttcaactttcaccatcttcaagtcacgagttgtccagatcaggcgacgacaaactgtacggaccaggacaggaaattattggagtttccattgaatttggagtaccttgaagctgagtttttcttgttcggagcgttagggcttggtcttgataaagtcgcaccaaatctaacaatgggagggccaagtcctattggagctcagaaagccaatctcgatcctttgacaagagatattattttgcagtttgcttggcaagaggttggccacttgagggcaatcaagaaaacggtgaaaggatttgcaaggccacaacttgatttgagtaagaaagcatttgctaaagtgatggataaagcatttggagtaaaatttgtgccgccgttcaatccttatgccaattcttacaattacctcattgcatcgtatttggtcccttatgttggtctcaccggatacgttggcgctaaccctaaactgcaatgtccagcctcaagaaagttagtagcaggacttttgggagtagaatcgggtcaagacgcggtgattagaggtatgttatatgctcgagcggcacacatagtctatccttatggtgtcacggttgcggctttcacggataagatttcggatctaaggaacaaattgggaaaagcgggtgtgaaagatgagggattgatcgtacctaaattcatgggtgcagaaggacaagtgattgggaatgtattggtcggtaatgagctctcgctttcgtttgatagaacacctgaggagattctacggattgtgtatggaagtggaaatgaaagtgttcccggtggattttaccctaaaggagcggatggagaaatcgctaagtcttatttggttactgtcgggagtgagtgaggtttagttttgctttggagtttaatttcctttgtagttcttaggtttttggttatataggagactaatgaaaataattgtcgtattattgtaataaatgttgtgagagtgacatttccataatcgataaaaagtt

SEQ ID NO: 102781 - protein, 329 aa, Arabidopsis thaliana
  peptide (1)..(329): Ceres Seq. ID no. 13611239
  misc_feature (15)..(329): Homolog of NCBI NO: 18401988 NR Description: dessication-related protein -related [Arabidopsis
  misc_feature (15)..(329): Homolog of NCBI NO: 21593191 NR Description: dessication-related protein, putative
  misc_feature (28)..(329): Homolog of NCBI NO: 25357137 NR Description: hypothetical protein T2J15.11 [imported] -
  misc_feature (57)..(323): Homolog of NCBI NO: 38346151 NR Description: OSJNBb0118P14.11 [Oryza sativa (japonica
  misc_feature (27)..(317): Homolog of NCBI NO: 118926 NR Description: Desiccation-related protein PCC13-62 precursor
  misc_feature (44)..(323): Homolog of NCBI NO: 15228845 NR Description: expressed protein [Arabidopsis thaliana]
  misc_feature (184)..(322): Homolog of NCBI NO: 12083528 NR Description: similar to Arabidopsis thaliana hypothetical
  misc_feature (44)..(182): Homolog of NCBI NO: 12083528 NR Description: similar to Arabidopsis thaliana hypothetical
  misc_feature (49)..(321): Homolog of NCBI NO: 22984403 NR Description: hypothetical protein [Burkholderia fungorum]
  misc_feature (70)..(318): Homolog of NCBI NO: 16263242 NR Description: Conserved hypothetical protein [Sinorhizobium
DHKEPKIKAKTFLDMALTKERRSLLVSMVLVFFFFNFHHLQVTSCPDQATTNCTDQDRKLLEFPLNLEYLEAEFFLFGALGLGLDKVAPNLTMGGPSPIGAQKANLDPLTRDIILQFAWQEVGHLRAIKKTVKGFARPQLDLSKKAFAKVMDKAFGVKFVPPFNPYANSYNYLIASYLVPYVGLTGYVGANPKLQCPASRKLVAGLLGVESGQDAVIRGMLYARAAHIVYPYGVTVAAFTDKISDLRNKLGKAGVKDEGLIVPKFMGAEGQVIGNVLVGNELSLSFDRTPEEILRIVYGSGNESVPGGFYPKGADGEIAKSYLVTVGSE

SEQ ID NO: 102782 - protein, 315 aa, Arabidopsis thaliana
  peptide (1)..(315): Ceres Seq. ID no. 13611240
  misc_feature (1)..(315): Homolog of NCBI NO: 18401988 NR Description: dessication-related protein -related [Arabidopsis
  misc_feature (1)..(315): Homolog of NCBI NO: 21593191 NR Description: dessication-related protein, putative
  misc_feature (14)..(315): Homolog of NCBI NO: 25357137 NR Description: hypothetical protein T2J15.11 [imported] -
  misc_feature (43)..(309): Homolog of NCBI NO: 38346151 NR Description: OSJNBb0118P14.11 [Oryza sativa (japonica
  misc_feature (13)..(303): Homolog of NCBI NO: 118926 NR Description: Desiccation-related protein PCC13-62 precursor
  misc_feature (30)..(309): Homolog of NCBI NO: 15228845 NR Description: expressed protein [Arabidopsis thaliana]
  misc_feature (170)..(308): Homolog of NCBI NO: 12083528 NR Description: similar to Arabidopsis thaliana hypothetical
  misc_feature (30)..(168): Homolog of NCBI NO: 12083528 NR Description: similar to Arabidopsis thaliana hypothetical
  misc_feature (35)..(307): Homolog of NCBI NO: 22984403 NR Description: hypothetical protein [Burkholderia fungorum]
  misc_feature (56)..(304): Homolog of NCBI NO: 16263242 NR Description: Conserved hypothetical protein [Sinorhizobium
MALTKERRSLLVSMVLVFFFFNFHHLQVTSCPDQATTNCTDQDRKLLEFPLNLEYLEAEFFLFGALGLGLDKVAPNLTMGGPSPIGAQKANLDPLTRDIILQFAWQEVGHLRAIKKTVKGFARPQLDLSKKAFAKVMDKAFGVKFVPPFNPYANSYNYLIASYLVPYVGLTGYVGANPKLQCPASRKLVAGLLGVESGQDAVIRGMLYARAAHIVYPYGVTVAAFTDKISDLRNKLGKAGVKDEGLIVPKFMGAEGQVIGNVLVGNELSLSFDRTPEEILRIVYGSGNESVPGGFYPKGADGEIAKSYLVTVGSE

SEQ ID NO: 102783 - protein, 302 aa, Arabidopsis thaliana
  peptide (1)..(302): Ceres Seq. ID no. 13611241
  misc_feature (1)..(302): Homolog of NCBI NO: 18401988 NR Description: dessication-related protein -related [Arabidopsis
  misc_feature (1)..(302): Homolog of NCBI NO: 21593191 NR Description: dessication-related protein, putative
  misc_feature (1)..(302): Homolog of NCBI NO: 25357137 NR Description: hypothetical protein T2J15.11 [imported] -
  misc_feature (30)..(296): Homolog of NCBI NO: 38346151 NR Description: OSJNBb0118P14.11 [Oryza sativa (japonica
  misc_feature (1)..(290): Homolog of NCBI NO: 118926 NR Description: Desiccation-related protein PCC13-62 precursor
  misc_feature (17)..(296): Homolog of NCBI NO: 15228845 NR Description: expressed protein [Arabidopsis thaliana]
  misc_feature (157)..(295): Homolog of NCBI NO: 12083528 NR Description: similar to Arabidopsis thaliana hypothetical
  misc_feature (17)..(155): Homolog of NCBI NO: 12083528 NR Description: similar to Arabidopsis thaliana hypothetical
  misc_feature (22)..(294): Homolog of NCBI NO: 22984403 NR Description: hypothetical protein [Burkholderia fungorum]
  misc_feature (43)..(291): Homolog of NCBI NO: 16263242 NR Description: Conserved hypothetical protein [Sinorhizobium
MVLVFFFFNFHHLQVTSCPDQATTNCTDQDRKLLEFPLNLEYLEAEFFLFGALGLGLDKVAPNLTMGGPSPIGAQKANLDPLTRDIILQFAWQEVGHLRAIKKTVKGFARPQLDLSKKAFAKVMDKAFGVKFVPPFNPYANSYNYLIASYLVPYVGLTGYVGANPKLQCPASRKLVAGLLGVESGQDAVIRGMLYARAAHIVYPYGVTVAAFTDKISDLRNKLGKAGVKDEGLIVPKFMGAEGQVIGNVLVGNELSLSFDRTPEEILRIVYGSGNESVPGGFYPKGADGEIAKSYLVTVGSE

SEQ ID NO: 102784 - DNA, 1250 bp, Arabidopsis thaliana
  misc_feature (1)..(1250): Ceres Seq. ID no. 13611266
  misc_feature: MA Experiment ID: 20000307 Result: Up-regulated in Transcription
  misc_feature: MA Experiment 20000307 PARAMETER Experiment Name: At_Germinating_Seeds_Sub_P Parameter: Age (hr) Value: 24 vs. 0
  misc_feature: MA Experiment 20000307 PARAMETER Experiment Name: At_Germinating_Seeds_Sub_P Parameter: Organism Value: A. thaliana
  misc_feature: MA Experiment 20000307 PARAMETER Experiment Name: At_Germinating_Seeds_Sub_P Parameter: Plant Line Value: WS
  misc_feature: MA Experiment 20000307 PARAMETER Experiment Name: At_Germinating_Seeds_Sub_P Parameter: Tissue Value: Germinating Seeds
  misc_feature: MA Experiment ID: 20000314 Result: Down-regulated in Transcription
  misc_feature: MA Experiment 20000314 PARAMETER Experiment Name: At_14day_Shoots-Roots_Sub_P Parameter: Age (day) Value: 14
  misc_feature: MA Experiment 20000314 PARAMETER Experiment Name: At_14day_Shoots-Roots_Sub_P Parameter: Organism Value: A. thaliana
  misc_feature: MA Experiment 20000314 PARAMETER Experiment Name: At_14day_Shoots-Roots_Sub_P Parameter: Plant Line Value: WS
  misc_feature: MA Experiment 20000314 PARAMETER Experiment Name: At_14day_Shoots-Roots_Sub_P Parameter: Tissue Value: Roots vs. Whole Plant
  misc_feature: MA Experiment ID: 20000315 Result: Down-regulated in Transcription
  misc_feature: MA Experiment 20000315 PARAMETER Experiment Name: At_14day_Shoots-Roots_Sub_P Parameter: Age (day) Value: 14
  misc_feature: MA Experiment 20000315 PARAMETER Experiment Name: At_14day_Shoots-Roots_Sub_P Parameter: Organism Value: A. thaliana
  misc_feature: MA Experiment 20000315 PARAMETER Experiment Name: At_14day_Shoots-Roots_Sub_P Parameter: Plant Line Value: WS
  misc_feature: MA Experiment 20000315 PARAMETER Experiment Name: At_14day_Shoots-Roots_Sub_P Parameter: Tissue Value: Shoots vs. Whole Plant
  misc_feature: MA Experiment ID: 20000328 Result: Down-regulated in Transcription
  misc_feature: MA Experiment 20000328 PARAMETER Experiment Name: At_42deg_Heat_Sub_P Parameter: Age (day) Value: 14
  misc_feature: MA Experiment 20000328 PARAMETER Experiment Name: At_42deg_Heat_Sub_P Parameter: Organism Value: A. thaliana
  misc_feature: MA Experiment 20000328 PARAMETER Experiment Name: At_42deg_Heat_Sub_P Parameter: Plant Line Value: WS
  misc_feature: MA Experiment 20000328 PARAMETER Experiment Name: At_42deg_Heat_Sub_P Parameter: Temperature (deg C) Value: 42 vs. 22
  misc_feature: MA Experiment 20000328 PARAMETER Experiment Name: At_42deg_Heat_Sub_P Parameter: Timepoint (hr) Value: 6
  misc_feature: MA Experiment 20000328 PARAMETER Experiment Name: At_42deg_Heat_Sub_P Parameter: Tissue Value: Aerial
  misc_feature: MA Experiment ID: 20000329 Result: Up-regulated in Transcription
  misc_feature: MA Experiment 20000329 PARAMETER Experiment Name: At_4deg_Cold_Sub_P Parameter: Age (day) Value: 14
  misc_feature: MA Experiment 20000329 PARAMETER Experiment Name: At_4deg_Cold_Sub_P Parameter: Organism Value: A. thaliana
  misc_feature: MA Experiment 20000329 PARAMETER Experiment Name: At_4deg_Cold_Sub_P Parameter: Plant Line Value: WS
  misc_feature: MA Experiment 20000329 PARAMETER Experiment Name: At_4deg_Cold_Sub_P Parameter: Temperature (deg C) Value: 4 vs. 22
  misc_feature: MA Experiment 20000329 PARAMETER Experiment Name: At_4deg_Cold_Sub_P Parameter: Timepoint (hr) Value: 6
  misc_feature: MA Experiment 20000329 PARAMETER Experiment Name: At_4deg_Cold_Sub_P Parameter: Tissue Value: Aerial
  misc_feature: MA Experiment ID: 20000348 Result: Down-regulated in Transcription
  misc_feature: MA Experiment 20000348 PARAMETER Experiment Name: At_100uM_ABA_Sub_P Parameter: Age (day) Value: 14
  misc_feature: MA Experiment 20000348 PARAMETER Experiment Name: At_100uM_ABA_Sub_P Parameter: Organism Value: A. thaliana
  misc_feature: MA Experiment 20000348 PARAMETER Experiment Name: At_100uM_ABA_Sub_P Parameter: Plant Line Value: WS
  misc_feature: MA Experiment 20000348 PARAMETER Experiment Name: At_100uM_ABA_Sub_P Parameter: Timepoint (hr) Value: 1
  misc_feature: MA Experiment 20000348 PARAMETER Experiment Name: At_100uM_ABA_Sub_P Parameter: Tissue Value: Aerial
  misc_feature: MA Experiment 20000348 PARAMETER Experiment Name: At_100uM_ABA_Sub_P Parameter: Treatment Value: 100uM ABA vs. No Treatment
  misc_feature: MA Experiment ID: 20000349 Result: Down-regulated in Transcription
  misc_feature: MA Experiment 20000349 PARAMETER Experiment Name: At_100uM_ABA_Sub_P Parameter: Age (day) Value: 14
  misc_feature: MA Experiment 20000349 PARAMETER Experiment Name: At_100uM_ABA_Sub_P Parameter: Organism Value: A. thaliana
  misc_feature: MA Experiment 20000349 PARAMETER Experiment Name: At_100uM_ABA_Sub_P Parameter: Plant Line Value: WS
  misc_feature: MA Experiment 20000349 PARAMETER Experiment Name: At_100uM_ABA_Sub_P Parameter: Timepoint (hr) Value: 6
  misc_feature: MA Experiment 20000349 PARAMETER Experiment Name: At_100uM_ABA_Sub_P Parameter: Tissue Value: Aerial
  misc_feature: MA Experiment 20000349 PARAMETER Experiment Name: At_100uM_ABA_Sub_P Parameter: Treatment Value: 100uM ABA vs. No Treatment
  misc_feature: MA Experiment ID: 20000352 Result: Down-regulated in Transcription
  misc_feature: MA Experiment 20000352 PARAMETER Experiment Name: At_Drought_Sub_P Parameter: Age (day) Value: 7
  misc_feature: MA Experiment 20000352 PARAMETER Experiment Name: At_Drought_Sub_P Parameter: Organism Value: A. thaliana
  misc_feature: MA Experiment 20000352 PARAMETER Experiment Name: At_Drought_Sub_P Parameter: Plant Line Value: WS
  misc_feature: MA Experiment 20000352 PARAMETER Experiment Name: At_Drought_Sub_P Parameter: Timepoint (hr) Value: 6
  misc_feature: MA Experiment 20000352 PARAMETER Experiment Name: At_Drought_Sub_P Parameter: Tissue Value: Whole Plant
  misc_feature: MA Experiment 20000352 PARAMETER Experiment Name: At_Drought_Sub_P Parameter: Treatment Value: Drought vs. No Drought
  misc_feature: MA Experiment ID: 20000355 Result: Down-regulated in Transcription
  misc_feature: MA Experiment 20000355 PARAMETER Experiment Name: At_Siliques_Sub_P Parameter: Age (day) Value: 21
  misc_feature: MA Experiment 20000355 PARAMETER Experiment Name: At_Siliques_Sub_P Parameter: Organism Value: A. thaliana
  misc_feature: MA Experiment 20000355 PARAMETER Experiment Name: At_Siliques_Sub_P Parameter: Plant Line Value: WS
  misc_feature: MA Experiment 20000355 PARAMETER Experiment Name: At_Siliques_Sub_P Parameter: Tissue Value: Less Than 5mm Siliques vs. Whole Plant
  misc_feature: MA Experiment ID: 20000440 Result: Down-regulated in Transcription
  misc_feature: MA Experiment 20000440 PARAMETER Experiment Name: At_Closed-Flower__Sub_P Parameter: Tissue Value: Closed Flower vs. Whole Plant
aagcaaaagttgtgtttctcataaagatctcaaagatattcctactacacatgggttctcttgacttgccttacgcttcatcgttcaagggaggaagtgaaacctttctccagaatgtatttgaaagtatactgaaaacgtatttgaggaagaacccgatggcgaagacgatatgggaactagttaagtcggtggacaacgaaaagatctcttacgaccacttctttttcaggacatttaaggtcgatggttatggaattgattccctggcgagttttttcatggattatggatataaagttggaggcagacttgattttccaaagaagaaagtacaagttctctggctttctcctccggatgttcacttccccgataatggttacggtattggcaatggccctttgccaagacttgttatagctgagcttcttgtggaggaactaagccctgagtcacaggagataataaggaagtatttgaaaccggaaggtggtaagcaagctgttctttcaagtactttggggtctttaatttgggagaagccaacatccaccgatttcaatcaacttgccaaagaaagcgaatttgccgcatggacgcttgtctacggctacacaatgaaccatcttgctttcgcggttcatcgtcttaaacaccgtttcagcgacatcaaatgcgtcaaagagtattttgaagaaaacggtttcgaactcaacaaggatggaggagtcctcaaagtgagtgaagacagtctactgttacaagtgtcggctatgtcggagaaacttgtggttgaatttgcagacggagtaactcaaatcgtcccggcttcatacattgagttcgttgaacgtctagttcttccacagttcaaagatatgccgtgtgatgagatcaaagagtttcatagacgcgagggcttggagcaagctagcgcctaccacataatggaaagcacccgtttcacagcgtaaatatagaaccagcttgttttgttccgctcaatatgtcaagtatgtgtacgtactattaaaatgttttgtatcttatttggacaatttgtgtgtgagatatttctgttcttgtgttgtgaagtgacggtataacttaatattacccgttaccgacgaataatggaaaacaaagtgtcatggtggggtgtggtatttgtggtgtttttgcatgtaatatcttttgatagtaacgtgacacttgattttggtgactcgtaacacctcttggggttg

SEQ ID NO: 102785 - protein, 324 aa, Arabidopsis thaliana
  peptide (1)..(324): Ceres Seq. ID no. 13611267
  misc_feature (17)..(324): Homolog of NCBI NO: 15223410 NR Description: expressed protein [Arabidopsis thaliana]
  misc_feature (17)..(323): Homolog of NCBI NO: 18396149 NR Description: expressed protein [Arabidopsis thaliana] T7N9.9 [Arabidopsis thaliana] >gi|14517458|gb|AAK62619.1| [Arabidopsis thaliana] >gi|21360451|gb|AAM47341.1|
  misc_feature (17)..(320): Homolog of NCBI NO: 18390717 NR Description: expressed protein [Arabidopsis thaliana]
  misc_feature (25)..(320): Homolog of NCBI NO: 37535166 NR Description: unknown protein [Oryza sativa (japonica
  misc_feature (106)..(323): Homolog of NCBI NO: 22973852 NR Description: hypothetical protein [Chloroflexus aurantiacus]
  misc_feature (39)..(305): Homolog of NCBI NO: 15642610 NR Description: conserved hypothetical protein [Vibrio cholerae]
  misc_feature (39)..(285): Homolog of NCBI NO: 28899568 NR Description: conserved hypothetical protein [Vibrio RIMD 2210633] >gi|28807804|dbj|BAC61057.1| conserved hypothetical
  misc_feature (39)..(320): Homolog of NCBI NO: 27364716 NR Description: Conserved hypothetical protein [Vibrio vulnificus >gi|27360861|gb|AAO09771.1|AE016801_90 Conserved hypothetical
  misc_feature (34)..(285): Homolog of NCBI NO: 24372211 NR Description: conserved hypothetical protein [Shewanella MR-1] >gi|24346126|gb|AAN53698.1|AE015509_3 conserved
AKVVFLIKISKIFLLHMGSLDLPYASSFKGGSETFLQNVFESILKTYLRKNPMAKTIWELVKSVDNEKISYDHFFFRTFKVDGYGIDSLASFFMDYGYKVGGRLDFPKKKVQVLWLSPPDVHFPDNGYGIGNGPLPRLVIAELLVEELSPESQEIIRKYLKPEGGKQAVLSSTLGSLIWEKPTSTDFNQLAKESEFAAWTLVYGYTMNHLAFAVHRLKHRFSDIKCVKEYFEENGFELNKDGGVLKVSEDSLLLQVSAMSEKLVVEFADGVTQIVPASYIEFVERLVLPQFKDMPCDEIKEFHRREGLEQASAYHIMESTRFTA

SEQ ID NO: 102786 - protein, 308 aa, Arabidopsis thaliana
  peptide (1)..(308): Ceres Seq. ID no. 13611268
  misc_feature (1)..(308): Homolog of NCBI NO: 15223410 NR Description: expressed protein [Arabidopsis thaliana]
  misc_feature (1)..(307): Homolog of NCBI NO: 18396149 NR Description: expressed protein [Arabidopsis thaliana] T7N9.9 [Arabidopsis thaliana] >gi|14517458|gb|AAK62619.1| [Arabidopsis thaliana] >gi|21360451|gb|AAM47341.1|
  misc_feature (1)..(304): Homolog of NCBI NO: 18390717 NR Description: expressed protein [Arabidopsis thaliana]
  misc_feature (9)..(304): Homolog of NCBI NO: 37535166 NR Description: unknown protein [Oryza sativa (japonica
  misc_feature (90)..(307): Homolog of NCBI NO: 22973852 NR Description: hypothetical protein [Chloroflexus aurantiacus]
  misc_feature (23)..(289): Homolog of NCBI NO: 15642610 NR Description: conserved hypothetical protein [Vibrio cholerae]
  misc_feature (23)..(269): Homolog of NCBI NO: 28899568 NR Description: conserved hypothetical protein [Vibrio RIMD 2210633] >gi|28807804|dbj|BAC61057.1| conserved hypothetical
  misc_feature (23)..(304): Homolog of NCBI NO: 27364716 NR Description: Conserved hypothetical protein [Vibrio vulnificus >gi|27360861|gb|AAO09771.1|AE016801_90 Conserved hypothetical
  misc_feature (18)..(269): Homolog of NCBI NO: 24372211 NR Description: conserved hypothetical protein [Shewanella MR-1] >gi|24346126|gb|AAN53698.1|AE015509_3 conserved
MGSLDLPYASSFKGGSETFLQNVFESILKTYLRKNPMAKTIWELVKSVDNEKISYDHFFFRTFKVDGYGIDSLASFFMDYGYKVGGRLDFPKKKVQVLWLSPPDVHFPDNGYGIGNGPLPRLVIAELLVEELSPESQEIIRKYLKPEGGKQAVLSSTLGSLIWEKPTSTDFNQLAKESEFAAWTLVYGYTMNHLAFAVHRLKHRFSDIKCVKEYFEENGFELNKDGGVLKVSEDSLLLQVSAMSEKLVVEFADGVTQIVPASYIEFVERLVLPQFKDMPCDEIKEFHRREGLEQASAYHIMESTRFTA

SEQ ID NO: 102787 - protein, 272 aa, Arabidopsis thaliana
  peptide (1)..(272): Ceres Seq. ID no. 13611269
  misc_feature (1)..(272): Homolog of NCBI NO: 15223410 NR Description: expressed protein [Arabidopsis thaliana]
  misc_feature (1)..(271): Homolog of NCBI NO: 18396149 NR Description: expressed protein [Arabidopsis thaliana] T7N9.9 [Arabidopsis thaliana] >gi|14517458|gb|AAK62619.1| [Arabidopsis thaliana] >gi|21360451|gb|AAM47341.1|
  misc_feature (1)..(268): Homolog of NCBI NO: 18390717 NR Description: expressed protein [Arabidopsis thaliana]
  misc_feature (1)..(268): Homolog of NCBI NO: 37535166 NR Description: unknown protein [Oryza sativa (japonica
  misc_feature (54)..(271): Homolog of NCBI NO: 22973852 NR Description: hypothetical protein [Chloroflexus aurantiacus]
  misc_feature (1)..(253): Homolog of NCBI NO: 15642610 NR Description: conserved hypothetical protein [Vibrio cholerae]
  misc_feature (1)..(233): Homolog of NCBI NO: 28899568 NR Description: conserved hypothetical protein [Vibrio RIMD 2210633] >gi|28807804|dbj|BAC61057.1| conserved hypothetical
  misc_feature (1)..(268): Homolog of NCBI NO: 27364716 NR Description: Conserved hypothetical protein [Vibrio vulnificus >gi|27360861|gb|AAO09771.1|AE016801_90 Conserved hypothetical
  misc_feature (1)..(233): Homolog of NCBI NO: 24372211 NR Description: conserved hypothetical protein [Shewanella MR-1] >gi|24346126|gb|AAN53698.1|AE015509_3 conserved
MAKTIWELVKSVDNEKISYDHFFFRTFKVDGYGIDSLASFFMDYGYKVGGRLDFPKKKVQVLWLSPPDVHFPDNGYGIGNGPLPRLVIAELLVEELSPESQEIIRKYLKPEGGKQAVLSSTLGSLIWEKPTSTDFNQLAKESEFAAWTLVYGYTMNHLAFAVHRLKHRFSDIKCVKEYFEENGFELNKDGGVLKVSEDSLLLQVSAMSEKLVVEFADGVTQIVPASYIEFVERLVLPQFKDMPCDEIKEFHRREGLEQASAYHIMESTRFTA

SEQ ID NO: 102788 - DNA, 635 bp, Arabidopsis thaliana
  misc_feature (1)..(635): Ceres Seq. ID no. 13611278
  misc_feature: MA Experiment ID: 20001248 Result: Down-regulated in Transcription
  misc_feature: MA Experiment 20001248 PARAMETER Experiment Name: At_Far-red-induction_P Parameter: Age (day) Value: 7
  misc_feature: MA Experiment 20001248 PARAMETER Experiment Name: At_Far-red-induction_P Parameter: Light Value: Far-red vs. White
  misc_feature: MA Experiment 20001248 PARAMETER Experiment Name: At_Far-red-induction_P Parameter: Organism Value: A. thaliana
  misc_feature: MA Experiment 20001248 PARAMETER Experiment Name: At_Far-red-induction_P Parameter: Plant Line Value: Columbia
  misc_feature: MA Experiment 20001248 PARAMETER Experiment Name: At_Far-red-induction_P Parameter: Timepoint (hr) Value: 4
  misc_feature: MA Experiment 20001248 PARAMETER Experiment Name: At_Far-red-induction_P Parameter: Tissue Value: Whole Plant
aatcaatcagacgagaagaagattatccatcgccatgggacaagtctttaacaagctccgaggtaaagagtggagacataagcaggtacaagcgatatgtgatcgtgttttcgatcggttcaagatgcaaaccggaagagccaatcttacgtttgaagagttatacatcgctgttcttctcgtttacaatgacataaacaagagattgcctggtcctcatttcgatccaccttctaaggatctagtcaatagcattatgacggactgtgatatcaacttggatggagaacttgatagggaagagtttgtgaagtttattgagcagattacggctgagacgtttaacgtggttagtcagggtttgatcatagctttgattgttgctcccactgtggctattgcgacgaagaaggccacggaaggtgtccctggagttggcaaagttgtgcagaagctgcctacttcaatctatgcttctcttgtgactcttgcagttatgtgggtgaattctgattcaagttaagcttctcatattgtcaccataataaatgtgtttataactcaactgctacgaaaatatagaaacaacgcacggattggttgaacggttggataatactatttttttctgattt

SEQ ID NO: 102789 - protein, 173 aa, Arabidopsis thaliana
  peptide (1)..(173): Ceres Seq. ID no. 13611279
  misc_feature (81)..(109): Pfam Name: EF hand Pfam Description: EF hand
  misc_feature (12)..(173): Homolog of NCBI NO: 18408144 NR Description: calcium-binding EF-hand family protein
  misc_feature (12)..(166): Homolog of NCBI NO: 38344137 NR Description: OSJNBa0041A02.4 [Oryza sativa (japonica
  misc_feature (12)..(168): Homolog of NCBI NO: 38344138 NR Description: OSJNBa0041A02.5 [Oryza sativa (japonica
  misc_feature (40)..(166): Homolog of NCBI NO: 18420040 NR Description: expressed protein [Arabidopsis thaliana]
  misc_feature (40)..(166): Homolog of NCBI NO: 26453144 NR Description: unknown protein [Arabidopsis thaliana]
INQTRRRLSIAMGQVFNKLRGKEWRHKQVQAICDRVFDRFKMQTGRANLTFEELYIAVLLVYNDINKRLPGPHFDPPSKDLVNSIMTDCDINLDGELDREEFVKFIEQITAETFNVVSQGLIIALIVAPTVAIATKKATEGVPGVGKVVQKLPTSIYASLVTLAVMWVNSDSS

SEQ ID NO: 102790 - protein, 162 aa, Arabidopsis thaliana; identical to SEQ ID NO: 21636
  peptide (1)..(162): Ceres Seq. ID no. 13611280
  misc_feature (70)..(98): Pfam Name: EF hand Pfam Description: EF hand
  misc_feature (1)..(162): Homolog of NCBI NO: 18408144 NR Description: calcium-binding EF-hand family protein
  misc_feature (1)..(155): Homolog of NCBI NO: 38344137 NR Description: OSJNBa0041A02.4 [Oryza sativa (japonica
  misc_feature (1)..(157): Homolog of NCBI NO: 38344138 NR Description: OSJNBa0041A02.5 [Oryza sativa (japonica
  misc_feature (29)..(155): Homolog of NCBI NO: 18420040 NR Description: expressed protein [Arabidopsis thaliana]
  misc_feature (29)..(155): Homolog of NCBI NO: 26453144 NR Description: unknown protein [Arabidopsis thaliana]

SEQ ID NO: 102791 - protein, 132 aa, Arabidopsis thaliana; identical to SEQ ID NO: 21637
  peptide (1)..(132): Ceres Seq. ID no. 13611281
  misc_feature (40)..(68): Pfam Name: EF hand Pfam Description: EF hand
  misc_feature (1)..(132): Homolog of NCBI NO: 18408144 NR Description: calcium-binding EF-hand family protein
  misc_feature (1)..(125): Homolog of NCBI NO: 38344137 NR Description: OSJNBa0041A02.4 [Oryza sativa (japonica
  misc_feature (1)..(127): Homolog of NCBI NO: 38344138 NR Description: OSJNBa0041A02.5 [Oryza sativa (japonica
  misc_feature (1)..(125): Homolog of NCBI NO: 18420040 NR Description: expressed protein [Arabidopsis thaliana]
  misc_feature (1)..(125): Homolog of NCBI NO: 26453144 NR Description: unknown protein [Arabidopsis thaliana]

SEQ ID NO: 102792 - DNA, 1336 bp, Arabidopsis thaliana
  misc_feature (1)..(1336): Ceres Seq. ID no. 13611286
  misc_feature: MA Experiment ID: 108435 Result: Up-regulated in Transcription
  misc_feature: MA Experiment 108435 PARAMETER Experiment Name: At_stm_Mutants_cDNA_P Parameter: Plant Line Value: wt Landsburg vs stm
  misc_feature: MA Experiment 108435 PARAMETER Experiment Name: At_stm_Mutants_cDNA_P Parameter: Tissue Value: Shoot Apical Meristem Region
  misc_feature: MA Experiment ID: 108462 Result: Down-regulated in Transcription
  misc_feature: MA Experiment 108462 PARAMETER Experiment Name: At_Germinating_Seeds_cDNA_P Parameter: Age (day) Value: 2 vs. 0
  misc_feature: MA Experiment 108462 PARAMETER Experiment Name: At_Germinating_Seeds_cDNA_P Parameter: Tissue Value: Germinating Seeds
  misc_feature: MA Experiment ID: 108463 Result: Down-regulated in Transcription
  misc_feature: MA Experiment 108463 PARAMETER Experiment Name: At_Germinating_Seeds_cDNA_P Parameter: Age (day) Value: 3 vs. 0
  misc_feature: MA Experiment 108463 PARAMETER Experiment Name: At_Germinating_Seeds_cDNA_P Parameter: Tissue Value: Germinating Seeds
  misc_feature: MA Experiment ID: 108464 Result: Down-regulated in Transcription
  misc_feature: MA Experiment 108464 PARAMETER Experiment Name: At_Germinating_Seeds_cDNA_P Parameter: Age (day) Value: 4 vs. 0
  misc_feature: MA Experiment 108464 PARAMETER Experiment Name: At_Germinating_Seeds_cDNA_P Parameter: Tissue Value: Germinating Seeds
  misc_feature: MA Experiment ID: 108595 Result: Down-regulated in Transcription
  misc_feature: MA Experiment 108595 PARAMETER Experiment Name: At_Ler-pi_Ovule_cDNA_P Parameter: Plant Line Value: null
  misc_feature: MA Experiment ID: 20000068 Result: Up-regulated in Transcription
  misc_feature: MA Experiment ID: 20000069 Result: Down-regulated in Transcription
  misc_feature: MA Experiment 20000069 PARAMETER Experiment Name: At_100uM_ABA_Mutants_cDNA_P Parameter: Plant Line Value: CS23
  misc_feature: MA Experiment 20000069 PARAMETER Experiment Name: At_100uM_ABA_Mutants_cDNA_P Parameter: Timepoint (hr) Value: 6
  misc_feature: MA Experiment 20000069 PARAMETER Experiment Name: At_100uM_ABA_Mutants_cDNA_P Parameter: Tissue Value: Aerial
  misc_feature: MA Experiment 20000069 PARAMETER Experiment Name: At_100uM_ABA_Mutants_cDNA_P Parameter: Treatment Value: 100uM ABA vs. No Treatment
  misc_feature: MA Experiment ID: 20000070 Result: Down-regulated in Transcription
  misc_feature: MA Experiment 20000070 PARAMETER Experiment Name: At_100uM_ABA_Mutants_cDNA_P Parameter: Plant Line Value: CS24
  misc_feature: MA Experiment 20000070 PARAMETER Experiment Name: At_100uM_ABA_Mutants_cDNA_P Parameter: Timepoint (hr) Value: 6
  misc_feature: MA Experiment 20000070 PARAMETER Experiment Name: At_100uM_ABA_Mutants_cDNA_P Parameter: Tissue Value: Aerial
  misc_feature: MA Experiment 20000070 PARAMETER Experiment Name: At_100uM_ABA_Mutants_cDNA_P Parameter: Treatment Value: 100uM ABA vs. No Treatment
  misc_feature: MA Experiment ID: 20000071 Result: Down-regulated in Transcription
  misc_feature: MA Experiment 20000071 PARAMETER Experiment Name: At_100uM_ABA_Mutants_cDNA_P Parameter: Plant Line Value: CS8104
  misc_feature: MA Experiment 20000071 PARAMETER Experiment Name: At_100uM_ABA_Mutants_cDNA_P Parameter: Timepoint (hr) Value: 6
  misc_feature: MA Experiment 20000071 PARAMETER Experiment Name: At_100uM_ABA_Mutants_cDNA_P Parameter: Tissue Value: Aerial
  misc_feature: MA Experiment 20000071 PARAMETER Experiment Name: At_100uM_ABA_Mutants_cDNA_P Parameter: Treatment Value: 100uM ABA vs. No Treatment
  misc_feature: MA Experiment ID: 20000089 Result: Down-regulated in Transcription
  misc_feature: MA Experiment ID: 20000090 Result: Down-regulated in Transcription
  misc_feature: MA Experiment ID: 20000113 Result: Up-regulated in Transcription
  misc_feature: MA Experiment 20000113 PARAMETER Experiment Name: At_42deg_Heat_cDNA_P Parameter: Temperature (deg C) Value: 42 vs. 22
  misc_feature: MA Experiment 20000113 PARAMETER Experiment Name: At_42deg_Heat_cDNA_P Parameter: Timepoint (hr) Value: 8
  misc_feature: MA Experiment 20000113 PARAMETER Experiment Name: At_42deg_Heat_cDNA_P Parameter: Tissue Value: Aerial
  misc_feature: MA Experiment ID: 20000185 Result: Down-regulated in Transcription
  misc_feature: MA Experiment 20000185 PARAMETER Experiment Name: At_Roots__P Parameter: Age (day) Value: 7 vs. 21
  misc_feature: MA Experiment 20000185 PARAMETER Experiment Name: At_Roots__P Parameter: Organism Value: A. thaliana
  misc_feature: MA Experiment 20000185 PARAMETER Experiment Name: At_Roots__P Parameter: Tissue Value: Roots vs. Whole Plant
  misc_feature: MA Experiment ID: 20000265 Result: Up-regulated in Transcription
  misc_feature: MA Experiment 20000265 PARAMETER Experiment Name: At_Open_Flower_P Parameter: Age (day) Value: 21
  misc_feature: MA Experiment 20000265 PARAMETER Experiment Name: At_Open_Flower_P Parameter: Plant Line Value: WS
  misc_feature: MA Experiment 20000265 PARAMETER Experiment Name: At_Open_Flower_P Parameter: Tissue Value: Closed Flower vs. Whole Plant
  misc_feature: MA Experiment ID: 20000286 Result: Up-regulated in Transcription
  misc_feature: MA Experiment 20000286 PARAMETER Experiment Name: At_Open_Flower_P Parameter: Age (day) Value: 21
  misc_feature: MA Experiment 20000286 PARAMETER Experiment Name: At_Open_Flower_P Parameter: Plant Line Value: WS
  misc_feature: MA Experiment 20000286 PARAMETER Experiment Name: At_Open_Flower_P Parameter: Tissue Value: Half Open vs. Whole Plant
  misc_feature: MA Experiment ID: 20000439 Result: Down-regulated in Transcription
  misc_feature: MA Experiment 20000439 PARAMETER Experiment Name: At_Roots__P Parameter: Age (day) Value: 14 vs. 21
  misc_feature: MA Experiment 20000439 PARAMETER Experiment Name: At_Roots__P Parameter: Organism Value: A. thaliana
  misc_feature: MA Experiment 20000439 PARAMETER Experiment Name: At_Roots__P Parameter: Tissue Value: Roots vs. Whole Plant
  misc_feature: MA Experiment ID: 20000495 Result: Down-regulated in Transcription
  misc_feature: MA Experiment 20000495 PARAMETER Experiment Name: At_Guard_Cells_P Parameter: Harvest Date Value: 8/2/2002
  misc_feature: MA Experiment 20000495 PARAMETER Experiment Name: At_Guard_Cells_P Parameter: Organism Value: A. thaliana
  misc_feature: MA Experiment 20000495 PARAMETER Experiment Name: At_Guard_Cells_P Parameter: Tissue Value: Guard Cells vs. Leaves
  misc_feature: MA Experiment ID: 20000573 Result: Down-regulated in Transcription
  misc_feature: MA Experiment 20000573 PARAMETER Experiment Name: At_100uM_ABA_Mutants__P Parameter: Organism Value: A. thaliana
  misc_feature: MA Experiment 20000573 PARAMETER Experiment Name: At_100uM_ABA_Mutants__P Parameter: Plant Line Value: CS22 vs. Ler wt
  misc_feature: MA Experiment 20000573 PARAMETER Experiment Name: At_100uM_ABA_Mutants__P Parameter: Timepoint (hr) Value: N/A
  misc_feature: MA Experiment 20000573 PARAMETER Experiment Name: At_100uM_ABA_Mutants__P Parameter: Tissue Value: Whole Plant
  misc_feature: MA Experiment 20000573 PARAMETER Experiment Name: At_100uM_ABA_Mutants__P Parameter: Treatment Value: None
  misc_feature: MA Experiment ID: 20000574 Result: Down-regulated in Transcription
  misc_feature: MA Experiment 20000574 PARAMETER Experiment Name: At_100uM_ABA_Mutants__P Parameter: Organism Value: A. thaliana
  misc_feature: MA Experiment 20000574 PARAMETER Experiment Name: At_100uM_ABA_Mutants__P Parameter: Plant Line Value: CS23 vs. Ler wt
  misc_feature: MA Experiment 20000574 PARAMETER Experiment Name: At_100uM_ABA_Mutants__P Parameter: Timepoint (hr) Value: N/A
  misc_feature: MA Experiment 20000574 PARAMETER Experiment Name: At_100uM_ABA_Mutants__P Parameter: Tissue Value: Whole Plant
  misc_feature: MA Experiment 20000574 PARAMETER Experiment Name: At_100uM_ABA_Mutants__P Parameter: Treatment Value: None
  misc_feature: MA Experiment ID: 20001248 Result: Down-regulated in Transcription
  misc_feature: MA Experiment 20001248 PARAMETER Experiment Name: At_Far-red-induction_P Parameter: Age (day) Value: 7
  misc_feature: MA Experiment 20001248 PARAMETER Experiment Name: At_Far-red-induction_P Parameter: Light Value: Far-red vs. White
  misc_feature: MA Experiment 20001248 PARAMETER Experiment Name: At_Far-red-induction_P Parameter: Organism Value: A. thaliana
  misc_feature: MA Experiment 20001248 PARAMETER Experiment Name: At_Far-red-induction_P Parameter: Plant Line Value: Columbia
  misc_feature: MA Experiment 20001248 PARAMETER Experiment Name: At_Far-red-induction_P Parameter: Timepoint (hr) Value: 4
  misc_feature: MA Experiment 20001248 PARAMETER Experiment Name: At_Far-red-induction_P Parameter: Tissue Value: Whole Plant
  misc_feature: MA Experiment ID: 20001557 Result: Down-regulated in Transcription
  misc_feature: MA Experiment 20001557 PARAMETER Experiment Name: At_Drought_Soil_Dry_P Parameter: Age (day) Value: 27
  misc_feature: MA Experiment 20001557 PARAMETER Experiment Name: At_Drought_Soil_Dry_P Parameter: Organism Value: A. thaliana
  misc_feature: MA Experiment 20001557 PARAMETER Experiment Name: At_Drought_Soil_Dry_P Parameter: Plant Line Value: WS
  misc_feature: MA Experiment 20001557 PARAMETER Experiment Name: At_Drought_Soil_Dry_P Parameter: Post Timepoint (hr) Value: 3
  misc_feature: MA Experiment 20001557 PARAMETER Experiment Name: At_Drought_Soil_Dry_P Parameter: Post-Treatment Value: Re-Water vs. No Drought
  misc_feature: MA Experiment 20001557 PARAMETER Experiment Name: At_Drought_Soil_Dry_P Parameter: Timepoint (day) Value: 13
  misc_feature: MA Experiment 20001557 PARAMETER Experiment Name: At_Drought_Soil_Dry_P Parameter: Treatment Value: Drought vs. No Drought
  misc_feature: MA Experiment ID: 20001558 Result: Down-regulated in Transcription
  misc_feature: MA Experiment 20001558 PARAMETER Experiment Name: At_Drought_Soil_Dry_P Parameter: Age (day) Value: 27
  misc_feature: MA Experiment 20001558 PARAMETER Experiment Name: At_Drought_Soil_Dry_P Parameter: Organism Value: A. thaliana
  misc_feature: MA Experiment 20001558 PARAMETER Experiment Name: At_Drought_Soil_Dry_P Parameter: Plant Line Value: WS
  misc_feature: MA Experiment 20001558 PARAMETER Experiment Name: At_Drought_Soil_Dry_P Parameter: Post Timepoint (hr) Value: 6
  misc_feature: MA Experiment 20001558 PARAMETER Experiment Name: At_Drought_Soil_Dry_P Parameter: Post-Treatment Value: Re-Water vs. No Drought
  misc_feature: MA Experiment 20001558 PARAMETER Experiment Name: At_Drought_Soil_Dry_P Parameter: Timepoint (day) Value: 13
  misc_feature: MA Experiment 20001558 PARAMETER Experiment Name: At_Drought_Soil_Dry_P Parameter: Treatment Value: Drought vs. No Drought
  misc_feature: MA Experiment ID: 20001560 Result: Down-regulated in Transcription
  misc_feature: MA Experiment 20001560 PARAMETER Experiment Name: At_Drought_Soil_Dry_P Parameter: Age (day) Value: 28
  misc_feature: MA Experiment 20001560 PARAMETER Experiment Name: At_Drought_Soil_Dry_P Parameter: Organism Value: A. thaliana
  misc_feature: MA Experiment 20001560 PARAMETER Experiment Name: At_Drought_Soil_Dry_P Parameter: Plant Line Value: WS
  misc_feature: MA Experiment 20001560 PARAMETER Experiment Name: At_Drought_Soil_Dry_P Parameter: Post Timepoint (hr) Value: None
  misc_feature: MA Experiment 20001560 PARAMETER Experiment Name: At_Drought_Soil_Dry_P Parameter: Post-Treatment Value: None
  misc_feature: MA Experiment 20001560 PARAMETER Experiment Name: At_Drought_Soil_Dry_P Parameter: Timepoint (day) Value: 14
  misc_feature: MA Experiment 20001560 PARAMETER Experiment Name: At_Drought_Soil_Dry_P Parameter: Treatment Value: Drought vs. No Drought
acactgtaacaataatcaaataatccctgacttcgtcacgtttctttgtatctccaacgtccaataaatgaaagcaactctagcagcaccctcttctctcacaagcctcccttatcgaaccaactcttctttcggctcaaagtcatcgcttctctttcggtctccatcctcctcctcctcagtctctatgacgacaacgcgtggaaacgtggctgtggcggctgctgctacatccactgaggcgctaagaaaaggaatagcggagttctacaatgaaacttcgggtttgtgggaagagatttggggagatcatatgcatcatggcttttatgaccctgattcttctgttcaactttctgattctggtcacaaggaagctcagatccgtatgattgaagagtctctccgttttgccggtgttactgatgaagaggaggagaaaaagataaagaaagtagtggatgttgggtgtgggattggaggaagctcaagatatcttgcctctaaatttggagctgaatgcattggcattactctcagccctgttcaggccaagagagccaatgatctcgcggctgctcaatcactcgctcataaggcttccttccaagttgcggatgcgttggatcagccattcgaagatggaaaattcgatctagtgtggtcgatggagagtggtgagcatatgcctgacaaggccaagtttgtaaaagagttggtacgtgtggcggctccaggaggtaggataataatagtgacatggtgccatagaaatctatctgcgggggaggaagctttgcagccgtgggagcaaaacatcttggacaaaatctgtaagacgttctatctcccggcttggtgctccaccgatgattatgtcaacttgcttcaatcccattctctccaggatattaagtgtgcggattggtcagagaacgtagctcctttctggcctgcggttatacggactgcattaacatggaagggccttgtgtctctgcttcgtagtggtatgaaaagtattaaaggagcattgacaatgccattgatgattgaaggttacaagaaaggtgtcattaagtttggtatcatcacttgccagaagccactctaagtctaaagctatactaggagattgaataagactataagagtagtgtctcatgtgaaagcatgaaattccttaaaaacgtcaatgttaagcctatgcttcgttatttgttttagataaatatcatttcactcttgtctaaggtagtttctataaacaataaataccatgaattagctcatgttatctggtaaactctcggaagtgattgtcatggattaactc

SEQ ID NO: 102793 - protein, 348 aa, Arabidopsis thaliana; identical to SEQ ID NO: 21918
  peptide (1)..(348): Ceres Seq. ID no. 13611287
  misc_feature (1)..(348): Homolog of NCBI NO: 15217804 NR Description: gamma-tocopherol methyltransferase [Arabidopsis
  misc_feature (1)..(348): Homolog of NCBI NO: 24211769 NR Description: Tocopherol O-methyltransferase, chloroplast
  misc_feature (1)..(348): Homolog of NCBI NO: 21592747 NR Description: gamma-tocopherol methyltransferase [Arabidopsis
  misc_feature (1)..(348): Homolog of NCBI NO: 27448218 NR Description: gamma-tocopherol methyltransferase [Brassica
  misc_feature (7)..(347): Homolog of NCBI NO: 17224292 NR Description: gamma-tocopherol methyltransferase [Perilla
  misc_feature (48)..(347): Homolog of NCBI NO: 22208517 NR Description: putative gamma-tocopherol methyltransferase
  misc_feature (57)..(348): Homolog of NCBI NO: 23039419 NR Description: hypothetical protein [Trichodesmium erythraeum
  misc_feature (60)..(346): Homolog of NCBI NO: 23128517 NR Description: hypothetical protein [Nostoc punctiforme]
  misc_feature (60)..(346): Homolog of NCBI NO: 17229295 NR Description: gamma-tocopherol methyltransferase [Nostoc sp.
  misc_feature (48)..(348): Homolog of NCBI NO: 16331764 NR Description: delta(24)-sterol C-methyltransferase

SEQ ID NO: 102794 - protein, 308 aa, Arabidopsis thaliana; identical to SEQ ID NO: 21919
  peptide (1)..(308): Ceres Seq. ID no. 13611288
  misc_feature (1)..(308): Homolog of NCBI NO: 15217804 NR Description: gamma-tocopherol methyltransferase [Arabidopsis
  misc_feature (1)..(308): Homolog of NCBI NO: 24211769 NR Description: Tocopherol O-methyltransferase, chloroplast
  misc_feature (1)..(308): Homolog of NCBI NO: 21592747 NR Description: gamma-tocopherol methyltransferase [Arabidopsis
  misc_feature (1)..(308): Homolog of NCBI NO: 27448218 NR Description: gamma-tocopherol methyltransferase [Brassica
  misc_feature (1)..(307): Homolog of NCBI NO: 17224292 NR Description: gamma-tocopherol methyltransferase [Perilla
  misc_feature (8)..(307): Homolog of NCBI NO: 22208517 NR Description: putative gamma-tocopherol methyltransferase
  misc_feature (17)..(308): Homolog of NCBI NO: 23039419 NR Description: hypothetical protein [Trichodesmium erythraeum
  misc_feature (20)..(306): Homolog of NCBI NO: 23128517 NR Description: hypothetical protein [Nostoc punctiforme]
  misc_feature (20)..(306): Homolog of NCBI NO: 17229295 NR Description: gamma-tocopherol methyltransferase [Nostoc sp.
  misc_feature (8)..(308): Homolog of NCBI NO: 16331764 NR Description: delta(24)-sterol C-methyltransferase

SEQ ID NO: 102795 - protein, 266 aa, Arabidopsis thaliana; identical to SEQ ID NO: 21920
  peptide (1)..(266): Ceres Seq. ID no. 13611289
  misc_feature (1)..(266): Homolog of NCBI NO: 15217804 NR Description: gamma-tocopherol methyltransferase [Arabidopsis
  misc_feature (1)..(266): Homolog of NCBI NO: 24211769 NR Description: Tocopherol O-methyltransferase, chloroplast
  misc_feature (1)..(266): Homolog of NCBI NO: 21592747 NR Description: gamma-tocopherol methyltransferase [Arabidopsis
  misc_feature (1)..(266): Homolog of NCBI NO: 27448218 NR Description: gamma-tocopherol methyltransferase [Brassica
  misc_feature (1)..(265): Homolog of NCBI NO: 17224292 NR Description: gamma-tocopherol methyltransferase [Perilla
  misc_feature (1)..(265): Homolog of NCBI NO: 22208517 NR Description: putative gamma-tocopherol methyltransferase
  misc_feature (1)..(266): Homolog of NCBI NO: 23039419 NR Description: hypothetical protein [Trichodesmium erythraeum
  misc_feature (1)..(264): Homolog of NCBI NO: 23128517 NR Description: hypothetical protein [Nostoc punctiforme]
  misc_feature (1)..(264): Homolog of NCBI NO: 17229295 NR Description: gamma-tocopherol methyltransferase [Nostoc sp.
  misc_feature (1)..(266): Homolog of NCBI NO: 16331764 NR Description: delta(24)-sterol C-methyltransferase

SEQ ID NO: 102796 - DNA, 736 bp, Arabidopsis thaliana
  misc_feature (1)..(736): Ceres Seq. ID no. 13611297
  misc_feature: MA Experiment ID: 108434 Result: Down-regulated in Transcription
  misc_feature: MA Experiment 108434 PARAMETER Experiment Name: At_Root_Tips_cDNA_P Parameter: Tissue Value: Root Tips
  misc_feature: MA Experiment ID: 108462 Result: Up-regulated in Transcription
  misc_feature: MA Experiment 108462 PARAMETER Experiment Name: At_Germinating_Seeds_cDNA_P Parameter: Age (day) Value: 2 vs. 0
  misc_feature: MA Experiment 108462 PARAMETER Experiment Name: At_Germinating_Seeds_cDNA_P Parameter: Tissue Value: Germinating Seeds
  misc_feature: MA Experiment ID: 108577 Result: Down-regulated in Transcription
  misc_feature: MA Experiment 108577 PARAMETER Experiment Name: At_42deg_Heat_cDNA_P Parameter: Temperature (deg C) Value: 42 vs. 22
  misc_feature: MA Experiment 108577 PARAMETER Experiment Name: At_42deg_Heat_cDNA_P Parameter: Timepoint (hr) Value: 6
  misc_feature: MA Experiment 108577 PARAMETER Experiment Name: At_42deg_Heat_cDNA_P Parameter: Tissue Value: Aerial
  misc_feature: MA Experiment ID: 108579 Result: Down-regulated in Transcription
  misc_feature: MA Experiment 108579 PARAMETER Experiment Name: At_4deg_Cold_cDNA_P Parameter: Temperature (deg C) Value: 4 vs. 22
  misc_feature: MA Experiment 108579 PARAMETER Experiment Name: At_4deg_Cold_cDNA_P Parameter: Timepoint (hr) Value: 6
  misc_feature: MA Experiment 108579 PARAMETER Experiment Name: At_4deg_Cold_cDNA_P Parameter: Tissue Value: Aerial
  misc_feature: MA Experiment ID: 108668 Result: Up-regulated in Transcription
  misc_feature: MA Experiment 108668 PARAMETER Experiment Name: At_2mM_SA_cDNA_P Parameter: Plant Line Value: WS
  misc_feature: MA Experiment 108668 PARAMETER Experiment Name: At_2mM_SA_cDNA_P Parameter: Timepoint (hr) Value: 6
  misc_feature: MA Experiment 108668 PARAMETER Experiment Name: At_2mM_SA_cDNA_P Parameter: Treatment Value: 2mM SA vs. No Treatment
  misc_feature: MA Experiment ID: 20000069 Result: Up-regulated in Transcription
  misc_feature: MA Experiment 20000069 PARAMETER Experiment Name: At_100uM_ABA_Mutants_cDNA_P Parameter: Plant Line Value: CS23
  misc_feature: MA Experiment 20000069 PARAMETER Experiment Name: At_100uM_ABA_Mutants_cDNA_P Parameter: Timepoint (hr) Value: 6
  misc_feature: MA Experiment 20000069 PARAMETER Experiment Name: At_100uM_ABA_Mutants_cDNA_P Parameter: Tissue Value: Aerial
  misc_feature: MA Experiment 20000069 PARAMETER Experiment Name: At_100uM_ABA_Mutants_cDNA_P Parameter: Treatment Value: 100uM ABA vs. No Treatment
  misc_feature: MA Experiment ID: 20000070 Result: Up-regulated in Transcription
  misc_feature: MA Experiment 20000070 PARAMETER Experiment Name: At_100uM_ABA_Mutants_cDNA_P Parameter: Plant Line Value: CS24
  misc_feature: MA Experiment 20000070 PARAMETER Experiment Name: At_100uM_ABA_Mutants_cDNA_P Parameter: Timepoint (hr) Value: 6
  misc_feature: MA Experiment 20000070 PARAMETER Experiment Name: At_100uM_ABA_Mutants_cDNA_P Parameter: Tissue Value: Aerial
  misc_feature: MA Experiment 20000070 PARAMETER Experiment Name: At_100uM_ABA_Mutants_cDNA_P Parameter: Treatment Value: 100uM ABA vs. No Treatment
  misc_feature: MA Experiment ID: 20000111 Result: Down-regulated in Transcription
  misc_feature: MA Experiment 20000111 PARAMETER Experiment Name: At_42deg_Heat_cDNA_P Parameter: Temperature (deg C) Value: 42 vs. 22
  misc_feature: MA Experiment 20000111 PARAMETER Experiment Name: At_42deg_Heat_cDNA_P Parameter: Timepoint (hr) Value: 6
  misc_feature: MA Experiment 20000111 PARAMETER Experiment Name: At_42deg_Heat_cDNA_P Parameter: Tissue Value: Aerial
  misc_feature: MA Experiment ID: 20000180 Result: Up-regulated in Transcription
  misc_feature: MA Experiment 20000180 PARAMETER Experiment Name: At_Germinating_Seeds_P Parameter: Age (hr) Value: 24 vs. 0
  misc_feature: MA Experiment 20000180 PARAMETER Experiment Name: At_Germinating_Seeds_P Parameter: Tissue Value: Germinating Seeds
  misc_feature: MA Experiment ID: 20000182 Result: Up-regulated in Transcription
  misc_feature: MA Experiment 20000182 PARAMETER Experiment Name: At_2mM_SA_P Parameter: Age (day) Value: 14
  misc_feature: MA Experiment 20000182 PARAMETER Experiment Name: At_2mM_SA_P Parameter: Organism Value: A. thaliana
  misc_feature: MA Experiment 20000182 PARAMETER Experiment Name: At_2mM_SA_P Parameter: Plant Line Value: WS
  misc_feature: MA Experiment 20000182 PARAMETER Experiment Name: At_2mM_SA_P Parameter: Timepoint (hr) Value: 6
  misc_feature: MA Experiment 20000182 PARAMETER Experiment Name: At_2mM_SA_P Parameter: Tissue Value: Aerial
  misc_feature: MA Experiment 20000182 PARAMETER Experiment Name: At_2mM_SA_P Parameter: Treatment Value: 2mM SA vs. No Treatment
  misc_feature: MA Experiment ID: 20000184 Result: Down-regulated in Transcription
  misc_feature: MA Experiment 20000184 PARAMETER Experiment Name: At_Shoots__P Parameter: Age (day) Value: 7
  misc_feature: MA Experiment 20000184 PARAMETER Experiment Name: At_Shoots__P Parameter: Tissue Value: Shoots vs. Whole Plant
  misc_feature: MA Experiment ID: 20000235 Result: Down-regulated in Transcription
  misc_feature: MA Experiment 20000235 PARAMETER Experiment Name: At_Siliques_P Parameter: Age (day) Value: 21
  misc_feature: MA Experiment 20000235 PARAMETER Experiment Name: At_Siliques_P Parameter: Organism Value: A. thaliana
  misc_feature: MA Experiment 20000235 PARAMETER Experiment Name: At_Siliques_P Parameter: Plant Line Value: WS
  misc_feature: MA Experiment 20000235 PARAMETER Experiment Name: At_Siliques_P Parameter: Tissue Value: 5-10mm Siliques vs. Whole Plant
  misc_feature: MA Experiment ID: 20000265 Result: Down-regulated in Transcription
  misc_feature: MA Experiment 20000265 PARAMETER Experiment Name: At_Open_Flower_P Parameter: Age (day) Value: 21
  misc_feature: MA Experiment 20000265 PARAMETER Experiment Name: At_Open_Flower_P Parameter: Plant Line Value: WS
  misc_feature: MA Experiment 20000265 PARAMETER Experiment Name: At_Open_Flower_P Parameter: Tissue Value: Closed Flower vs. Whole Plant
aaataattttaattagtttcttctgtgcgatagagatcgatcgagagatgggtgcttcatcatcatcatctgtgtcggagaaatcaatccatcaattcaccgtcaaggatagctccggcaaggaggttgacctaagcgtgtatcaagggaaagtgctgctcgtcgtcaacgtcgcttctaaatgcggattcacggagtccaattacacccagctgacggaactttaccggaaatataaagatcaaggttttgtggtattggcgtttccttgcaaccagtttctgtcccaagagcctggcaccagcgaagaggctcatcaatttgcttgtactcgctttaaggctgaataccctgttttccaaaaggtgcgtgtaaatggacaaaacgctgcaccagtctacaaattcctcaaatctaagaaaccctcttttcttggaagtcgtatcaaatggaacttcaccaagttcttggtcggcaaagatggtcaagtcattgatcgttatggcacaactgtttcacctctatccatccagaaagacatcgagaaagcccttgcacaagaattgtgaacacgcacagagatatttgactcctttggaagaaacttctctcatactctcggtcatgcagtcaagtttctacatttcccattgcaccttccatatgggccttgtattcatcttatgtgtaactctactagccatttcttttgtgaaatttgatcaaaggtgattcc

SEQ ID NO: 102797 - protein, 188 aa, Arabidopsis thaliana
  peptide (1)..(188): Ceres Seq. ID no. 13611298
  misc_feature (28)..(137): Pfam Name: Glutathione peroxidase Pfam Description: Glutathione peroxidase
  misc_feature (16)..(188): Homolog of NCBI NO: 15229378 NR Description: glutathione peroxidase, putative [Arabidopsis >gi|20138386|sp|Q9LYB4|GSHZ_ARATH Probable glutathione peroxidase
  misc_feature (16)..(184): Homolog of NCBI NO: 18407538 NR Description: glutathione peroxidase, putative [Arabidopsis >gi|21617962|gb|AAM67012.1| putative glutathione peroxidase thaliana] >gi|26451929|dbj|BAC43057.1| putative glutathione
  misc_feature (16)..(180): Homolog of NCBI NO: 25285637 NR Description: probable glutathione peroxidase [imported] -
  misc_feature (16)..(184): Homolog of NCBI NO: 11544696 NR Description: putative phospholipid hydroperoxide glutathione
  misc_feature (18)..(185): Homolog of NCBI NO: 27544804 NR Description: phospholipid hydroperoxide glutathione
  misc_feature (18)..(185): Homolog of NCBI NO: 6179600 NR Description: GPX12Hv, glutathione peroxidase-like protein
  misc_feature (16)..(184): Homolog of NCBI NO: 22268405 NR Description: putative glutathione peroxidase [Zea mays]
  misc_feature (16)..(184): Homolog of NCBI NO: 6179604 NR Description: glutathione peroxidase-like protein GPX54Hv
  misc_feature (16)..(184): Homolog of NCBI NO: 34334012 NR Description: cytosolic glutathione peroxidase [Triticum
  misc_feature (19)..(184): Homolog of NCBI NO: 20138151 NR Description: Probable phospholipid hydroperoxide glutathione
IILISFFCAIEIDREMGASSSSSVSEKSIHQFTVKDSSGKEVDLSVYQGKVLLVVNVASKCGFTESNYTQLTELYRKYKDQGFVVLAFPCNQFLSQEPGTSEEAHQFACTRFKAEYPVFQKVRVNGQNAAPVYKFLKSKKPSFLGSRIKWNFTKFLVGKDGQVIDRYGTTVSPLSIQKDIEKALAQEL

SEQ ID NO: 102798 - protein, 173 aa, Arabidopsis thaliana; identical to SEQ ID NO: 29112
  peptide (1)..(173): Ceres Seq. ID no. 13611299
  misc_feature (13)..(122): Pfam Name: Glutathione peroxidase Pfam Description: Glutathione peroxidase
  misc_feature (1)..(173): Homolog of NCBI NO: 15229378 NR Description: glutathione peroxidase, putative [Arabidopsis >gi|20138386|sp|Q9LYB4|GSHZ_ARATH Probable glutathione peroxidase
  misc_feature (1)..(169): Homolog of NCBI NO: 18407538 NR Description: glutathione peroxidase, putative [Arabidopsis >gi|21617962|gb|AAM67012.1| putative glutathione peroxidase thaliana] >gi|26451929|dbj|BAC43057.1| putative glutathione
  misc_feature (1)..(165): Homolog of NCBI NO: 25285637 NR Description: probable glutathione peroxidase [imported] -
  misc_feature (1)..(169): Homolog of NCBI NO: 11544696 NR Description: putative phospholipid hydroperoxide glutathione
  misc_feature (3)..(170): Homolog of NCBI NO: 27544804 NR Description: phospholipid hydroperoxide glutathione
  misc_feature (3)..(170): Homolog of NCBI NO: 6179600 NR Description: GPX12Hv, glutathione peroxidase-like protein
  misc_feature (1)..(169): Homolog of NCBI NO: 22268405 NR Description: putative glutathione peroxidase [Zea mays]
  misc_feature (1)..(169): Homolog of NCBI NO: 6179604 NR Description: glutathione peroxidase-like protein GPX54Hv
  misc_feature (1)..(169): Homolog of NCBI NO: 34334012 NR Description: cytosolic glutathione peroxidase [Triticum
  misc_feature (4)..(169): Homolog of NCBI NO: 20138151 NR Description: Probable phospholipid hydroperoxide glutathione

SEQ ID NO: 102799 - protein, 118 aa, Arabidopsis thaliana; identical to SEQ ID NO: 29113
  peptide (1)..(118): Ceres Seq. ID no. 13611300

SEQ ID NO: 102800 - DNA, 970 bp, Arabidopsis thaliana
  misc_feature (1)..(970): Ceres Seq. ID no. 13611305
  misc_feature: MA Experiment ID: 20000179 Result: Up-regulated in Transcription
  misc_feature: MA Experiment 20000179 PARAMETER Experiment Name: At_Germinating_Seeds_P Parameter: Age (hr) Value: 6 vs. 0
  misc_feature: MA Experiment 20000179 PARAMETER Experiment Name: At_Germinating_Seeds_P Parameter: Tissue Value: Germinating Seeds
  misc_feature: MA Experiment ID: 20000227 Result: Up-regulated in Transcription
  misc_feature: MA Experiment 20000227 PARAMETER Experiment Name: At_Root-Tips-vs-Tops_P Parameter: Tissue Value: Root Tips vs. Root Tops
  misc_feature: MA Experiment ID: 20001911 Result: Down-regulated in Transcription
  misc_feature: MA Experiment 20001911 PARAMETER Experiment Name: At_Drought_Reproduction_P Parameter: Age (day) Value: 40
  misc_feature: MA Experiment 20001911 PARAMETER Experiment Name: At_Drought_Reproduction_P Parameter: Organism Value: A. thaliana
  misc_feature: MA Experiment 20001911 PARAMETER Experiment Name: At_Drought_Reproduction_P Parameter: Plant Line Value: WS
  misc_feature: MA Experiment 20001911 PARAMETER Experiment Name: At_Drought_Reproduction_P Parameter: Timepoint (day) Value: 10
  misc_feature: MA Experiment 20001911 PARAMETER Experiment Name: At_Drought_Reproduction_P Parameter: Tissue Value: Flowers
  misc_feature: MA Experiment 20001911 PARAMETER Experiment Name: At_Drought_Reproduction_P Parameter: Treatment Value: Drought vs. No Drought
cacaattcttcgcggcttcttttagcttctaagcttcagagcagcaaaaaaaaaacaatggagaagcgccggagatagatctgctttcttccattctccggaccttctctagttcacgaaccaacttcttccactttattctcattcgttggagaaatggactctctcgcaaccgatccagctttcattgattcggatgtatacctcaggttaggacttattattgagggcaaacgattgaaaaagccaccgactgttctctcacgcctctcttcttctctggagagatctctgttactcaatcatgatgacaagattctgcttggatcgccagactctgttaccgtgtttgacgggagatctccccctgagatcagtattgcacactacttggatcgcattttcaagtactcttgctgcagtccctcctgcttcgtcattgcgcatatctacattgatcactttctccataagacccgagcccttctcaaaccccttaatgtccaccgccttatcattacaactgtcatgttagctgctaaagtcttcgatgataggtatttcaacaatgcatactacgcaagagtgggaggtgtgactacgagagagttaaacagattggagatggagttgttgtttacccttgacttcaagcttcaggtagatcctcagacgtttcacacacactgttgtcagttagaaaagcagaacagagacggcttccagatcgagtggcccataaaagaagcatgccgagccaacaaagagacttggcagaagaggacacccgactcactctgctctcaaaccacagcacgctgatcggcaagggtaagataggattattttgtgttttagtagtgatgattcttttgcatgattgattgtttgtgacaattgtgtgtagtagaaaatctgaaaatttctaccaactcattctttaagaagttgctataatatagtttccttg

SEQ ID NO: 102801 - protein, 221 aa, Arabidopsis thaliana
  peptide (1)..(221): Ceres Seq. ID no. 13611306
  misc_feature (33)..(168): Pfam Name: Cyclin, N-terminal domain Pfam Description: Cyclin, N-terminal domain
  misc_feature (1)..(221): Homolog of NCBI NO: 15229382 NR Description: cyclin family [Arabidopsis thaliana]
  misc_feature (1)..(221): Homolog of NCBI NO: 21593009 NR Description: unknown [Arabidopsis thaliana]
  misc_feature (32)..(184): Homolog of NCBI NO: 25493992 NR Description: PREG-like protein [imported] - Picea mariana
  misc_feature (32)..(184): Homolog of NCBI NO: 15224950 NR Description: cyclin family [Arabidopsis thaliana]
  misc_feature (32)..(184): Homolog of NCBI NO: 15233185 NR Description: cyclin family [Arabidopsis thaliana]
  misc_feature (1)..(192): Homolog of NCBI NO: 15225402 NR Description: cyclin family [Arabidopsis thaliana]
  misc_feature (2)..(192): Homolog of NCBI NO: 15232360 NR Description: cyclin family [Arabidopsis thaliana]
  misc_feature (32)..(184): Homolog of NCBI NO: 15240794 NR Description: cyclin family [Arabidopsis thaliana]
  misc_feature (32)..(184): Homolog of NCBI NO: 15240306 NR Description: cyclin family [Arabidopsis thaliana]
  misc_feature (25)..(184): Homolog of NCBI NO: 37536902 NR Description: hypothetical protein [Oryza sativa (japonica group)] >gi|12597875|gb|AAG60183.1| hypothetical protein [Oryza >gi|31433542|gb|AAP55040.1| hypothetical protein [Oryza sativa
MDSLATDPAFIDSDVYLRLGLIIEGKRLKKPPTVLSRLSSSLERSLLLNHDDKILLGSPDSVTVFDGRSPPEISIAHYLDRIFKYSCCSPSCFVIAHIYIDHFLHKTRALLKPLNVHRLIITTVMLAAKVFDDRYFNNAYYARVGGVTTRELNRLEMELLFTLDFKLQVDPQTFHTHCCQLEKQNRDGFQIEWPIKEACRANKETWQKRTPDSLCSQTTAR

SEQ ID NO: 102802 - DNA, 1578 bp, Arabidopsis thaliana
  misc_feature (1)..(1578): Ceres Seq. ID no. 13611316
  misc_feature: MA Experiment ID: 20000171 Result: Down-regulated in Transcription
  misc_feature: MA Experiment 20000171 PARAMETER Experiment Name: At_42deg_Heat_P Parameter: Age (day) Value: 14
  misc_feature: MA Experiment 20000171 PARAMETER Experiment Name: At_42deg_Heat_P Parameter: Organism Value: A. thaliana
  misc_feature: MA Experiment 20000171 PARAMETER Experiment Name: At_42deg_Heat_P Parameter: Plant Line Value: WS
  misc_feature: MA Experiment 20000171 PARAMETER Experiment Name: At_42deg_Heat_P Parameter: Temperature (deg C) Value: 42 vs. 22
  misc_feature: MA Experiment 20000171 PARAMETER Experiment Name: At_42deg_Heat_P Parameter: Timepoint (hr) Value: 1
  misc_feature: MA Experiment 20000171 PARAMETER Experiment Name: At_42deg_Heat_P Parameter: Tissue Value: Aerial
  misc_feature: MA Experiment ID: 20000173 Result: Down-regulated in Transcription
  misc_feature: MA Experiment 20000173 PARAMETER Experiment Name: At_42deg_Heat_P Parameter: Age (day) Value: 14
  misc_feature: MA Experiment 20000173 PARAMETER Experiment Name: At_42deg_Heat_P Parameter: Organism Value: A. thaliana
  misc_feature: MA Experiment 20000173 PARAMETER Experiment Name: At_42deg_Heat_P Parameter: Plant Line Value: WS
  misc_feature: MA Experiment 20000173 PARAMETER Experiment Name: At_42deg_Heat_P Parameter: Temperature (deg C) Value: 42 vs. 22
  misc_feature: MA Experiment 20000173 PARAMETER Experiment Name: At_42deg_Heat_P Parameter: Timepoint (hr) Value: 6
  misc_feature: MA Experiment 20000173 PARAMETER Experiment Name: At_42deg_Heat_P Parameter: Tissue Value: Aerial
  misc_feature: MA Experiment ID: 20000182 Result: Down-regulated in Transcription
  misc_feature: MA Experiment 20000182 PARAMETER Experiment Name: At_2mM_SA_P Parameter: Age (day) Value: 14
  misc_feature: MA Experiment 20000182 PARAMETER Experiment Name: At_2mM_SA_P Parameter: Organism Value: A. thaliana
  misc_feature: MA Experiment 20000182 PARAMETER Experiment Name: At_2mM_SA_P Parameter: Plant Line Value: WS
  misc_feature: MA Experiment 20000182 PARAMETER Experiment Name: At_2mM_SA_P Parameter: Timepoint (hr) Value: 6
  misc_feature: MA Experiment 20000182 PARAMETER Experiment Name: At_2mM_SA_P Parameter: Tissue Value: Aerial
  misc_feature: MA Experiment 20000182 PARAMETER Experiment Name: At_2mM_SA_P Parameter: Treatment Value: 2mM SA vs. No Treatment
  misc_feature: MA Experiment ID: 20000184 Result: Up-regulated in Transcription
  misc_feature: MA Experiment 20000184 PARAMETER Experiment Name: At_Shoots__P Parameter: Age (day) Value: 7
  misc_feature: MA Experiment 20000184 PARAMETER Experiment Name: At_Shoots__P Parameter: Tissue Value: Shoots vs. Whole Plant
  misc_feature: MA Experiment ID: 20000185 Result: Up-regulated in Transcription
  misc_feature: MA Experiment 20000185 PARAMETER Experiment Name: At_Roots__P Parameter: Age (day) Value: 7 vs. 21
  misc_feature: MA Experiment 20000185 PARAMETER Experiment Name: At_Roots__P Parameter: Organism Value: A. thaliana
  misc_feature: MA Experiment 20000185 PARAMETER Experiment Name: At_Roots__P Parameter: Tissue Value: Roots vs. Whole Plant
  misc_feature: MA Experiment ID: 20000227 Result: Down-regulated in Transcription
  misc_feature: MA Experiment 20000227 PARAMETER Experiment Name: At_Root-Tips-vs-Tops_P Parameter: Tissue Value: Root Tips vs. Root Tops
  misc_feature: MA Experiment ID: 20000234 Result: Up-regulated in Transcription
  misc_feature: MA Experiment 20000234 PARAMETER Experiment Name: At_Siliques_P Parameter: Age (day) Value: 21
  misc_feature: MA Experiment 20000234 PARAMETER Experiment Name: At_Siliques_P Parameter: Organism Value: A. thaliana
  misc_feature: MA Experiment 20000234 PARAMETER Experiment Name: At_Siliques_P Parameter: Plant Line Value: WS
  misc_feature: MA Experiment 20000234 PARAMETER Experiment Name: At_Siliques_P Parameter: Tissue Value: Less Than 5mm Siliques vs. Whole Plant
  misc_feature: MA Experiment ID: 20000235 Result: Up-regulated in Transcription
  misc_feature: MA Experiment 20000235 PARAMETER Experiment Name: At_Siliques_P Parameter: Age (day) Value: 21
  misc_feature: MA Experiment 20000235 PARAMETER Experiment Name: At_Siliques_P Parameter: Organism Value: A. thaliana
  misc_feature: MA Experiment 20000235 PARAMETER Experiment Name: At_Siliques_P Parameter: Plant Line Value: WS
  misc_feature: MA Experiment 20000235 PARAMETER Experiment Name: At_Siliques_P Parameter: Tissue Value: 5-10mm Siliques vs. Whole Plant
  misc_feature: MA Experiment ID: 20000264 Result: Up-regulated in Transcription
  misc_feature: MA Experiment 20000264 PARAMETER Experiment Name: At_Open_Flower_P Parameter: Age (day) Value: 21
  misc_feature: MA Experiment 20000264 PARAMETER Experiment Name: At_Open_Flower_P Parameter: Plant Line Value: WS
  misc_feature: MA Experiment 20000264 PARAMETER Experiment Name: At_Open_Flower_P Parameter: Tissue Value: Open Flower vs. Whole Plant
  misc_feature: MA Experiment ID: 20000437 Result: Down-regulated in Transcription
  misc_feature: MA Experiment 20000437 PARAMETER Experiment Name: At_Drought_P Parameter: Age (day) Value: 8
  misc_feature: MA Experiment 20000437 PARAMETER Experiment Name: At_Drought_P Parameter: Organism Value: A. thaliana
  misc_feature: MA Experiment 20000437 PARAMETER Experiment Name: At_Drought_P Parameter: Plant Line Value: WS
  misc_feature: MA Experiment 20000437 PARAMETER Experiment Name: At_Drought_P Parameter: Timepoint (hr) Value: 24
  misc_feature: MA Experiment 20000437 PARAMETER Experiment Name: At_Drought_P Parameter: Tissue Value: Whole Plant
  misc_feature: MA Experiment 20000437 PARAMETER Experiment Name: At_Drought_P Parameter: Treatment Value: Drought vs. No Drought
  misc_feature: MA Experiment ID: 20000438 Result: Up-regulated in Transcription
  misc_feature: MA Experiment 20000438 PARAMETER Experiment Name: At_Shoots__P Parameter: Age (day) Value: 14
  misc_feature: MA Experiment 20000438 PARAMETER Experiment Name: At_Shoots__P Parameter: Tissue Value: Shoots vs. Whole Plant
  misc_feature: MA Experiment ID: 20000439 Result: Up-regulated in Transcription
  misc_feature: MA Experiment 20000439 PARAMETER Experiment Name: At_Roots__P Parameter: Age (day) Value: 14 vs. 21
  misc_feature: MA Experiment 20000439 PARAMETER Experiment Name: At_Roots__P Parameter: Organism Value: A. thaliana
  misc_feature: MA Experiment 20000439 PARAMETER Experiment Name: At_Roots__P Parameter: Tissue Value: Roots vs. Whole Plant
  misc_feature: MA Experiment ID: 20001248 Result: Down-regulated in Transcription
  misc_feature: MA Experiment 20001248 PARAMETER Experiment Name: At_Far-red-induction_P Parameter: Age (day) Value: 7
  misc_feature: MA Experiment 20001248 PARAMETER Experiment Name: At_Far-red-induction_P Parameter: Light Value: Far-red vs. White
  misc_feature: MA Experiment 20001248 PARAMETER Experiment Name: At_Far-red-induction_P Parameter: Organism Value: A. thaliana
  misc_feature: MA Experiment 20001248 PARAMETER Experiment Name: At_Far-red-induction_P Parameter: Plant Line Value: Columbia
  misc_feature: MA Experiment 20001248 PARAMETER Experiment Name: At_Far-red-induction_P Parameter: Timepoint (hr) Value: 4
  misc_feature: MA Experiment 20001248 PARAMETER Experiment Name: At_Far-red-induction_P Parameter: Tissue Value: Whole Plant
  misc_feature: MA Experiment ID: 20001450 Result: Down-regulated in Transcription
  misc_feature: MA Experiment 20001450 PARAMETER Experiment Name: At_Far-red-induction_P Parameter: Age (day) Value: 7
  misc_feature: MA Experiment 20001450 PARAMETER Experiment Name: At_Far-red-induction_P Parameter: Light Value: Far-red vs. White
  misc_feature: MA Experiment 20001450 PARAMETER Experiment Name: At_Far-red-induction_P Parameter: Organism Value: A. thaliana
  misc_feature: MA Experiment 20001450 PARAMETER Experiment Name: At_Far-red-induction_P Parameter: Plant Line Value: Columbia
  misc_feature: MA Experiment 20001450 PARAMETER Experiment Name: At_Far-red-induction_P Parameter: Timepoint (hr) Value: 8
  misc_feature: MA Experiment 20001450 PARAMETER Experiment Name: At_Far-red-induction_P Parameter: Tissue Value: Whole Plant
  misc_feature: MA Experiment ID: 20001911 Result: Down-regulated in Transcription
  misc_feature: MA Experiment 20001911 PARAMETER Experiment Name: At_Drought_Reproduction_P Parameter: Age (day) Value: 40
  misc_feature: MA Experiment 20001911 PARAMETER Experiment Name: At_Drought_Reproduction_P Parameter: Organism Value: A. thaliana
  misc_feature: MA Experiment 20001911 PARAMETER Experiment Name: At_Drought_Reproduction_P Parameter: Plant Line Value: WS
  misc_feature: MA Experiment 20001911 PARAMETER Experiment Name: At_Drought_Reproduction_P Parameter: Timepoint (day) Value: 10
  misc_feature: MA Experiment 20001911 PARAMETER Experiment Name: At_Drought_Reproduction_P Parameter: Tissue Value: Flowers
  misc_feature: MA Experiment 20001911 PARAMETER Experiment Name: At_Drought_Reproduction_P Parameter: Treatment Value: Drought vs. No Drought
gaatcactcataaaccctttcttcttccttgttcaaatccactcactcttggagagagacgactcaaacgcatagtctctcctctgtatttactcgttatcgtcactgtgagagagagagagagagcgcgcgcattcccccaattaaagcctctctgctccaaaccgtgatatactctttacgttgtttgtttttgcctttatccttccctagttgtgtataattttgttcttttcttatggagatggatctcagcaaggttactcttgacattttcacaaagcttgaacagaaatggctctctcactgcgactcctcccggaagactcgtatccttagcatcgacggtggcggtaccactggcattgtcgccgctgcttctattctccacctcgagcaccagatccgccttcaaaccggcgaccctcacgctcacatctctgatttcttcgacattgtcgccggaactggcatcggaggcattctcgccgccctccttgtcgccgacgacggctccggcaggccgatgttcactgccagagacgcggttaagtttgtcgcggagaagaactcggagctcttcgagatcaggtacaccggagttttcaggaggaacaagagatactcggggaagagcatggagagggttttggagacggcgtttaggagagaggacggtaaggtgttgacgatgaaggacacgtgtaagcctctccttgttccttgctacgacctcaaaacctctgctcctttcgttttctcacgcgccggcgcgtctgagtctccgagcttcgacttcgagctgtggaaagtctgccgtgccacgtcagcaacaccaagcctcttcaagccgttcagtgtagtgtcggtggacgggaaaacctcatgctcagccgtagacggcggtttggtgatgaacaatccaacagcagctgccgtcacgcacgtgctacacaacaaacgagatttcccgtcagtaaacggcgtagatgacttgcttgtactgtcgttgggaaacggtccgtcgaccatgtcatcatcaccagggaggaaactccgtcgtaacggagactattcaacgtcaagtgtggtggacatagtggttgacggcgtttccgataccgtcgatcagatgctggggaacgctttctgctggaaccgtactgattacgttagaatccaggcgaacggtttgacgagcggcggagcggaggagttgctgaaagagagaggtgtggaaacggcgccgtttggggtaaaacggatactaacggagagtaacggagaaagaatagagggtttcgtgcaacgtcttgttgcgtcaggaaagtcaagtctacctccaagtccttgcaaggaatctgccgttaaccctctcgctgacggccgttaagtttcctttattattataaccctccccgtccgtgatgtaagaagtttgtaaccaaacccctgggttaattttttaaccccagccagcatcttcgagttaattaattagcctttctttttttctaatgactttagttgaggaattaataatggttaatgaatgatagtctttacttatttatcact

SEQ ID NO: 102803 - protein, 384 aa, Arabidopsis thaliana
  peptide (1)..(384): Ceres Seq. ID no. 13611317
  misc_feature (33)..(234): Pfam Name: Patatin-like phospholipase Pfam Description: Patatin-like phospholipase
  misc_feature (1)..(384): Homolog of NCBI NO: 18412659 NR Description: patatin-related [Arabidopsis thaliana] AT3g63200/F16M2_50 [Arabidopsis thaliana]
  misc_feature (3)..(384): Homolog of NCBI NO: 11357489 NR Description: hypothetical protein F16M2.50 - Arabidopsis >gi|7523402|emb|CAB86421.1| putative protein [Arabidopsis
  misc_feature (29)..(322): Homolog of NCBI NO: 15225054 NR Description: patatin family [Arabidopsis thaliana]
  misc_feature (309)..(360): Homolog of NCBI NO: 15225054 NR Description: patatin family [Arabidopsis thaliana]
  misc_feature (3)..(322): Homolog of NCBI NO: 15233136 NR Description: patatin-related [Arabidopsis thaliana]
  misc_feature (322)..(360): Homolog of NCBI NO: 15233136 NR Description: patatin-related [Arabidopsis thaliana]
  misc_feature (32)..(322): Homolog of NCBI NO: 30688454 NR Description: patatin-related [Arabidopsis thaliana]
  misc_feature (324)..(371): Homolog of NCBI NO: 30688454 NR Description: patatin-related [Arabidopsis thaliana]
  misc_feature (32)..(322): Homolog of NCBI NO: 7486230 NR Description: hypothetical protein F27B13.40 - Arabidopsis >gi|4914404|emb|CAB43655.1| putative protein [Arabidopsis >gi|7269879|emb|CAB79738.1| putative protein [Arabidopsis
  misc_feature (324)..(371): Homolog of NCBI NO: 7486230 NR Description: hypothetical protein F27B13.40 - Arabidopsis >gi|4914404|emb|CAB43655.1| putative protein [Arabidopsis >gi|7269879|emb|CAB79738.1| putative protein [Arabidopsis
MEMDLSKVTLDIFTKLEQKWLSHCDSSRKTRILSIDGGGTTGIVAAASILHLEHQIRLQTGDPHAHISDFFDIVAGTGIGGILAALLVADDGSGRPMFTARDAVKFVAEKNSELFEIRYTGVFRRNKRYSGKSMERVLETAFRREDGKVLTMKDTCKPLLVPCYDLKTSAPFVFSRAGASESPSFDFELWKVCRATSATPSLFKPFSVVSVDGKTSCSAVDGGLVMNNPTAAAVTHVLHNKRDFPSVNGVDDLLVLSLGNGPSTMSSSPGRKLRRNGDYSTSSVVDIVVDGVSDTVDQMLGNAFCWNRTDYVRIQANGLTSGGAEELLKERGVETAPFGVKRILTESNGERIEGFVQRLVASGKSSLPPSPCKESAVNPLADGR

SEQ ID NO: 102804 - protein, 382 aa, Arabidopsis thaliana
  peptide (1)..(382): Ceres Seq. ID no. 13611318
  misc_feature (31)..(232): Pfam Name: Patatin-like phospholipase Pfam Description: Patatin-like phospholipase
  misc_feature (1)..(382): Homolog of NCBI NO: 18412659 NR Description: patatin-related [Arabidopsis thaliana] AT3g63200/F16M2_50 [Arabidopsis thaliana]
  misc_feature (1)..(382): Homolog of NCBI NO: 11357489 NR Description: hypothetical protein F16M2.50 - Arabidopsis >gi|7523402|emb|CAB86421.1| putative protein [Arabidopsis
  misc_feature (27)..(320): Homolog of NCBI NO: 15225054 NR Description: patatin family [Arabidopsis thaliana]
  misc_feature (307)..(358): Homolog of NCBI NO: 15225054 NR Description: patatin family [Arabidopsis thaliana]
  misc_feature (1)..(320): Homolog of NCBI NO: 15233136 NR Description: patatin-related [Arabidopsis thaliana]
  misc_feature (320)..(358): Homolog of NCBI NO: 15233136 NR Description: patatin-related [Arabidopsis thaliana]
  misc_feature (30)..(320): Homolog of NCBI NO: 30688454 NR Description: patatin-related [Arabidopsis thaliana]
  misc_feature (322)..(369): Homolog of NCBI NO: 30688454 NR Description: patatin-related [Arabidopsis thaliana]
  misc_feature (30)..(320): Homolog of NCBI NO: 7486230 NR Description: hypothetical protein F27B13.40 - Arabidopsis >gi|4914404|emb|CAB43655.1| putative protein [Arabidopsis >gi|7269879|emb|CAB79738.1| putative protein [Arabidopsis
  misc_feature (322)..(369): Homolog of NCBI NO: 7486230 NR Description: hypothetical protein F27B13.40 - Arabidopsis >gi|4914404|emb|CAB43655.1| putative protein [Arabidopsis >gi|7269879|emb|CAB79738.1| putative protein [Arabidopsis
MDLSKVTLDIFTKLEQKWLSHCDSSRKTRILSIDGGGTTGIVAAASILHLEHQIRLQTGDPHAHISDFFDIVAGTGIGGILAALLVADDGSGRPMFTARDAVKFVAEKNSELFEIRYTGVFRRNKRYSGKSMERVLETAFRREDGKVLTMKDTCKPLLVPCYDLKTSAPFVFSRAGASESPSFDFELWKVCRATSATPSLFKPFSVVSVDGKTSCSAVDGGLVMNNPTAAAVTHVLHNKRDFPSVNGVDDLLVLSLGNGPSTMSSSPGRKLRRNGDYSTSSVVDIVVDGVSDTVDQMLGNAFCWNRTDYVRIQANGLTSGGAEELLKERGVETAPFGVKRILTESNGERIEGFVQRLVASGKSSLPPSPCKESAVNPLADGR

SEQ ID NO: 102805 - protein, 288 aa, Arabidopsis thaliana
  peptide (1)..(288): Ceres Seq. ID no. 13611319
  misc_feature (1)..(138): Pfam Name: Patatin-like phospholipase Pfam Description: Patatin-like phospholipase
  misc_feature (1)..(288): Homolog of NCBI NO: 18412659 NR Description: patatin-related [Arabidopsis thaliana] AT3g63200/F16M2_50 [Arabidopsis thaliana]
  misc_feature (1)..(288): Homolog of NCBI NO: 11357489 NR Description: hypothetical protein F16M2.50 - Arabidopsis >gi|7523402|emb|CAB86421.1| putative protein [Arabidopsis
  misc_feature (1)..(226): Homolog of NCBI NO: 15225054 NR Description: patatin family [Arabidopsis thaliana]
  misc_feature (213)..(264): Homolog of NCBI NO: 15225054 NR Description: patatin family [Arabidopsis thaliana]
  misc_feature (1)..(226): Homolog of NCBI NO: 15233136 NR Description: patatin-related [Arabidopsis thaliana]
  misc_feature (226)..(264): Homolog of NCBI NO: 15233136 NR Description: patatin-related [Arabidopsis thaliana]
  misc_feature (1)..(226): Homolog of NCBI NO: 30688454 NR Description: patatin-related [Arabidopsis thaliana]
  misc_feature (228)..(275): Homolog of NCBI NO: 30688454 NR Description: patatin-related [Arabidopsis thaliana]
  misc_feature (1)..(226): Homolog of NCBI NO: 7486230 NR Description: hypothetical protein F27B13.40 - Arabidopsis >gi|4914404|emb|CAB43655.1| putative protein [Arabidopsis >gi|7269879|emb|CAB79738.1| putative protein [Arabidopsis
  misc_feature (228)..(275): Homolog of NCBI NO: 7486230 NR Description: hypothetical protein F27B13.40 - Arabidopsis >gi|4914404|emb|CAB43655.1| putative protein [Arabidopsis >gi|7269879|emb|CAB79738.1| putative protein [Arabidopsis
MFTARDAVKFVAEKNSELFEIRYTGVFRRNKRYSGKSMERVLETAFRREDGKVLTMKDTCKPLLVPCYDLKTSAPFVFSRAGASESPSFDFELWKVCRATSATPSLFKPFSVVSVDGKTSCSAVDGGLVMNNPTAAAVTHVLHNKRDFPSVNGVDDLLVLSLGNGPSTMSSSPGRKLRRNGDYSTSSVVDIVVDGVSDTVDQMLGNAFCWNRTDYVRIQANGLTSGGAEELLKERGVETAPFGVKRILTESNGERIEGFVQRLVASGKSSLPPSPCKESAVNPLADGR

SEQ ID NO: 102806 - DNA, 1266 bp, Arabidopsis thaliana
  misc_feature (1)..(1266): Ceres Seq. ID no. 13611324
  misc_feature: MA Experiment ID: 108572 Result: Up-regulated in Transcription
  misc_feature: MA Experiment 108572 PARAMETER Experiment Name: At_Drought_cDNA_P Parameter: Timepoint (hr) Value: 1
  misc_feature: MA Experiment 108572 PARAMETER Experiment Name: At_Drought_cDNA_P Parameter: Tissue Value: Aerial
  misc_feature: MA Experiment 108572 PARAMETER Experiment Name: At_Drought_cDNA_P Parameter: Treatment Value: Drought vs. No Drought
  misc_feature: MA Experiment ID: 20000224 Result: Down-regulated in Transcription
  misc_feature: MA Experiment ID: 20001451 Result: Up-regulated in Transcription
  misc_feature: MA Experiment 20001451 PARAMETER Experiment Name: At_Far-red-induction_P Parameter: Age (day) Value: 7
  misc_feature: MA Experiment 20001451 PARAMETER Experiment Name: At_Far-red-induction_P Parameter: Light Value: Far-red vs. White
  misc_feature: MA Experiment 20001451 PARAMETER Experiment Name: At_Far-red-induction_P Parameter: Organism Value: A. thaliana
  misc_feature: MA Experiment 20001451 PARAMETER Experiment Name: At_Far-red-induction_P Parameter: Plant Line Value: Columbia
  misc_feature: MA Experiment 20001451 PARAMETER Experiment Name: At_Far-red-induction_P Parameter: Timepoint (hr) Value: 24
  misc_feature: MA Experiment 20001451 PARAMETER Experiment Name: At_Far-red-induction_P Parameter: Tissue Value: Whole Plant
aacttgtttctcccgagagatatctatcatcacaatctccttccttcgtgttcatcaatctcccgccgcgcttcagacaagaaacaatgtctgggctgctggatggaatccccgaagcagtggctctgagatgcctggctcatgtgcctttacaccttcatcccaatttagaactcgtctctcgctcctggcgagctgctatccgcagtcatgagctcttcagagtccgtaaagagctccgatcttctgagcatctcctctgcgtctgtgctttcgatcctgagaacatctggcaagtctacagtcccaactgtgatcgctggctcaccctccctctccttccttctcgtatccgccaccttgcccatttcggtgctgtcactactgccggcatgctctttgtcttaggcggtggcagcgacgctgtcagccctgttaccggggatcacgacggtacctttgctactgaccaggtctggtcttacgactttgtacagagacagtggactcctcgcgcttcaatgctcgtgcctcgtgctatgttcgcctgctgcgttcttcaagggaagattgttgttgctggcggattcaccacttgcaggaaatccatatctggagcggagatgtatgatcctgagaatgacgtctggacatccatcccagatctccaccagactcataactctgcctgctcgggtctagtggtaaacgggaaagtccacgtcttgcacaaaggcttgtccacggtgcaggttcttgagagcgttaaactcgggtgggatgtcaaagactatggctggccgcaaggtccaatggtggtcgttgaggacgtgctttacgtgatgagccatgggctggtgttcaagcaagaaggtgacacgtggaagatggttgcatcggcctcagagtttaagcggaggatcggaatggcgatgacgagtttgagtgatgaggttttgatcgtaggaggagtgatcggacctgataggctcaattgggacatcaagcccttgtcagatgtcgacgctttgacagttgggaatgatcgtccggcctggaggagtgtggcgccgatgacaaggtgtcgtgggacgatccttggctgcacgcagttgacaatctgatggatgggaatgtggcttcattatgacgtctttcagttcttttttgttttgtattttcttcctgtttgttaactgttgtgagcattattgtttttaaatcttctttgagaaatgaaaataaacgaatagcagctatgtcttg

SEQ ID NO: 102807 - protein, 373 aa, Arabidopsis thaliana
  peptide (1)..(373): Ceres Seq. ID no. 13611325
  misc_feature (119)..(175): Pfam Name: Kelch motif Pfam Description: Kelch motif
  misc_feature (29)..(373): Homolog of NCBI NO: 15229392 NR Description: Kelch repeat containing F-box protein family
  misc_feature (94)..(373): Homolog of NCBI NO: 37533892 NR Description: putative protein [Oryza sativa (japonica
  misc_feature (27)..(267): Homolog of NCBI NO: 22329607 NR Description: Kelch repeat containing F-box protein family
  misc_feature (36)..(267): Homolog of NCBI NO: 25518477 NR Description: hypothetical protein F3O9.5 - Arabidopsis >gi|4966346|gb|AAD34677.1|AC006341_5 Contains two PF|01344 Kelch
  misc_feature (18)..(320): Homolog of NCBI NO: 15220452 NR Description: Kelch repeat containing F-box protein family
  misc_feature (18)..(320): Homolog of NCBI NO: 7487225 NR Description: hypothetical protein T1F15.5 - Arabidopsis >gi|3176664|gb|AAC18788.1|AAC18788 Contains similarity to beta gb|Z47541 from Limulus polyphemus. ESTs gb|T04493 and gb|AA585955
  misc_feature (158)..(266): Homolog of NCBI NO: 15239366 NR Description: Kelch repeat containing F-box protein family thaliana] >gi|9757759|dbj|BAB08240.1|
  misc_feature (23)..(114): Homolog of NCBI NO: 15239366 NR Description: Kelch repeat containing F-box protein family thaliana] >gi|9757759|dbj|BAB08240.1|
  misc_feature (25)..(356): Homolog of NCBI NO: 37534254 NR Description: unknown protein [Oryza sativa (japonica
  misc_feature (25)..(279): Homolog of NCBI NO: 19071626 NR Description: putative Kelch motif containing protein [Oryza
LVSPERYLSSQSPSFVFINLPPRFRQETMSGLLDGIPEAVALRCLAHVPLHLHPNLELVSRSWRAAIRSHELFRVRKELRSSEHLLCVCAFDPENIWQVYSPNCDRWLTLPLLPSRIRHLAHFGAVTTAGMLFVLGGGSDAVSPVTGDHDGTFATDQVWSYDFVQRQWTPRASMLVPRAMFACCVLQGKIVVAGGFTTCRKSISGAEMYDPENDVWTSIPDLHQTHNSACSGLVVNGKVHVLHKGLSTVQVLESVKLGWDVKDYGWPQGPMVVVEDVLYVMSHGLVFKQEGDTWKMVASASEFKRRIGMAMTSLSDEVLIVGGVIGPDRLNWDIKPLSDVDALTVGNDRPAWRSVAPMTRCRGTILGCTQLTI

SEQ ID NO: 102808 - protein, 345 aa, Arabidopsis thaliana; identical to SEQ ID NO: 24271
  peptide (1)..(345): Ceres Seq. ID no. 13611326
  misc_feature (91)..(147): Pfam Name: Kelch motif Pfam Description: Kelch motif
  misc_feature (1)..(345): Homolog of NCBI NO: 15229392 NR Description: Kelch repeat containing F-box protein family
  misc_feature (66)..(345): Homolog of NCBI NO: 37533892 NR Description: putative protein [Oryza sativa (japonica
  misc_feature (1)..(239): Homolog of NCBI NO: 22329607 NR Description: Kelch repeat containing F-box protein family
  misc_feature (8)..(239): Homolog of NCBI NO: 25518477 NR Description: hypothetical protein F3O9.5 - Arabidopsis >gi|4966346|gb|AAD34677.1|AC006341_5 Contains two PF|01344 Kelch
  misc_feature (1)..(292): Homolog of NCBI NO: 15220452 NR Description: Kelch repeat containing F-box protein family
  misc_feature (1)..(292): Homolog of NCBI NO: 7487225 NR Description: hypothetical protein T1F15.5 - Arabidopsis >gi|3176664|gb|AAC18788.1|AAC18788 Contains similarity to beta gb|Z47541 from Limulus polyphemus. ESTs gb|T04493 and gb|AA585955
  misc_feature (130)..(238): Homolog of NCBI NO: 15239366 NR Description: Kelch repeat containing F-box protein family thaliana] >gi|9757759|dbj|BAB08240.1|
  misc_feature (1)..(86): Homolog of NCBI NO: 15239366 NR Description: Kelch repeat containing F-box protein family thaliana] >gi|9757759|dbj|BAB08240.1|
  misc_feature (1)..(328): Homolog of NCBI NO: 37534254 NR Description: unknown protein [Oryza sativa (japonica
  misc_feature (1)..(251): Homolog of NCBI NO: 19071626 NR Description: putative Kelch motif containing protein [Oryza

SEQ ID NO: 102809 - protein, 243 aa, Arabidopsis thaliana; identical to SEQ ID NO: 24272
  peptide (1)..(243): Ceres Seq. ID no. 13611327
  misc_feature (1)..(45): Pfam Name: Kelch motif Pfam Description: Kelch motif
  misc_feature (1)..(243): Homolog of NCBI NO: 15229392 NR Description: Kelch repeat containing F-box protein family
  misc_feature (1)..(243): Homolog of NCBI NO: 37533892 NR Description: putative protein [Oryza sativa (japonica
  misc_feature (1)..(137): Homolog of NCBI NO: 22329607 NR Description: Kelch repeat containing F-box protein family
  misc_feature (1)..(137): Homolog of NCBI NO: 25518477 NR Description: hypothetical protein F3O9.5 - Arabidopsis >gi|4966346|gb|AAD34677.1|AC006341_5 Contains two PF|01344 Kelch
  misc_feature (1)..(190): Homolog of NCBI NO: 15220452 NR Description: Kelch repeat containing F-box protein family
  misc_feature (1)..(190): Homolog of NCBI NO: 7487225 NR Description: hypothetical protein T1F15.5 - Arabidopsis >gi|3176664|gb|AAC18788.1|AAC18788 Contains similarity to beta gb|Z47541 from Limulus polyphemus. ESTs gb|T04493 and gb|AA585955
  misc_feature (28)..(136): Homolog of NCBI NO: 15239366 NR Description: Kelch repeat containing F-box protein family thaliana] >gi|9757759|dbj|BAB08240.1|
  misc_feature (1)..(226): Homolog of NCBI NO: 37534254 NR Description: unknown protein [Oryza sativa (japonica
  misc_feature (1)..(149): Homolog of NCBI NO: 19071626 NR Description: putative Kelch motif containing protein [Oryza
  misc_feature (1)..(195): Homolog of NCBI NO: 18400571 NR Description: Kelch repeat containing F-box protein family

SEQ ID NO: 102810 - DNA, 1266 bp, Arabidopsis thaliana
  misc_feature (1)..(1266): Ceres Seq. ID no. 13611328
  misc_feature: MA Experiment ID: 108434 Result: Up-regulated in Transcription
  misc_feature: MA Experiment 108434 PARAMETER Experiment Name: At_Root_Tips_cDNA_P Parameter: Tissue Value: Root Tips
  misc_feature: MA Experiment ID: 20000794 Result: Down-regulated in Transcription
  misc_feature: MA Experiment 20000794 PARAMETER Experiment Name: At_Petals_P Parameter: Age (day) Value: 23-25 days
  misc_feature: MA Experiment 20000794 PARAMETER Experiment Name: At_Petals_P Parameter: Plant Line Value: WS
  misc_feature: MA Experiment 20000794 PARAMETER Experiment Name: At_Petals_P Parameter: Tissue Value: Petals vs. Whole plant
gtttctctctacagttttttgtgtttatcgtatgtttcacacagtacacgcttcagtgggagttgttgggtgatcggtccgaggcgacatacaagatgaccggaaactcttttaactcgatgaaagatttcctgaagcagacaggcggctatgcggtaatagacggagggcttgcaacggagttcgagagacatggagcagatctcaacgatcctctctggagcgccaaatgccttgtcacctctcctcacctcattcacaccgtgcatctcgattaccttgaagctggtgctgatatcatctccagcgcttcttatcaggccacgattcaggggtttgaagcaaagggattttctagagaagagagcgaatctttgcttaaaaagagcgtagaaatagcgactgaagctcggaactcgtattatgacaaatgcggaactagctcttccatggatgataagattctcaaaaagcgccctatattagttgcagcatcagttggtagctacggtgcatacttggctgatgggtctgaatacagtggaatctatggtgattcgatcacgctggaaaagctgaaggattttcaccgcagacgactccaagttctggcggaatctggtgctgatttaatagcatttgagaccattccaaacaagatagaggctcaggcatttgctgatctattagaagagggagatgtgaagattcctgggtggttttcattcaactcaaaggatggcgtaaacgtggttagcggggattccatcaaggagtgtatctccatagctgaaaattgtgagaaagtagtggcggttggaatcaactgtacccctccaagattcatagaggggctagttttggagatagaaaaggtgacaagcaagcccatactagtgtacccaaacagcggagaaagctatgatgctgatcggaaggagtgggtggaaaacaccggagttggggatgaagactttgtatcatacgtagagaaatggatggatgcaggagtgtctctcctgggaggttgctgccgcacaacaccaaccaccatcagagccatccacaagagactcgtcaaccgcagatctctttagcattcaacttcactctcttctatgaatctctagaaccttggcaatagatttctaccaaaaacatgaatgtttgtcttccctttgccaattacaaatctaatttcaaggataggcgtgactgcatttaagcttggatgttaatttgaaagttttcatcttgcatgagaag

SEQ ID NO: 102811 - protein, 364 aa, Arabidopsis thaliana; identical to SEQ ID NO: 27840
  peptide (1)..(364): Ceres Seq. ID no. 13611329
  misc_feature (50)..(360): Pfam Name: Homocysteine S-methyltransferase Pfam Description: Homocysteine S-methyltransferase
  misc_feature (32)..(364): Homolog of NCBI NO: 15229396 NR Description: homocysteine S-methyltransferase AtHMT-2
  misc_feature (32)..(364): Homolog of NCBI NO: 25453566 NR Description: homocysteine S-methyltransferase (EC 2.1.1.10)
  misc_feature (42)..(363): Homolog of NCBI NO: 6094303 NR Description: Selenocysteine methyltransferase
  misc_feature (40)..(363): Homolog of NCBI NO: 18403505 NR Description: selenocysteine methyltransferase -related thaliana] >gi|9279692|dbj|BAB01249.1| cysteine methyltransferase
  misc_feature (40)..(363): Homolog of NCBI NO: 21593147 NR Description: putative selenocysteine methyltransferase
  misc_feature (40)..(358): Homolog of NCBI NO: 37534456 NR Description: putative homocysteine S-methyltransferase-2
  misc_feature (34)..(358): Homolog of NCBI NO: 10732787 NR Description: homocysteine S-methyltransferase-2 [Zea mays]
  misc_feature (34)..(358): Homolog of NCBI NO: 10732789 NR Description: homocysteine S-methyltransferase-3 [Zea mays]
  misc_feature (39)..(354): Homolog of NCBI NO: 10732791 NR Description: homocysteine S-methyltransferase-4 [Zea mays]
  misc_feature (39)..(363): Homolog of NCBI NO: 22748320 NR Description: Putative homocysteine S-methyltransferase-1

SEQ ID NO: 102812 - protein, 333 aa, Arabidopsis thaliana; identical to SEQ ID NO: 27841
  peptide (1)..(333): Ceres Seq. ID no. 13611330
  misc_feature (19)..(329): Pfam Name: Homocysteine S-methyltransferase Pfam Description: Homocysteine S-methyltransferase
  misc_feature (1)..(333): Homolog of NCBI NO: 15229396 NR Description: homocysteine S-methyltransferase AtHMT-2
  misc_feature (1)..(333): Homolog of NCBI NO: 25453566 NR Description: homocysteine S-methyltransferase (EC 2.1.1.10)
  misc_feature (11)..(332): Homolog of NCBI NO: 6094303 NR Description: Selenocysteine methyltransferase
  misc_feature (9)..(332): Homolog of NCBI NO: 18403505 NR Description: selenocysteine methyltransferase -related thaliana] >gi|9279692|dbj|BAB01249.1| cysteine methyltransferase
  misc_feature (9)..(332): Homolog of NCBI NO: 21593147 NR Description: putative selenocysteine methyltransferase
  misc_feature (9)..(327): Homolog of NCBI NO: 37534456 NR Description: putative homocysteine S-methyltransferase-2
  misc_feature (3)..(327): Homolog of NCBI NO: 10732787 NR Description: homocysteine S-methyltransferase-2 [Zea mays]
  misc_feature (3)..(327): Homolog of NCBI NO: 10732789 NR Description: homocysteine S-methyltransferase-3 [Zea mays]
  misc_feature (8)..(323): Homolog of NCBI NO: 10732791 NR Description: homocysteine S-methyltransferase-4 [Zea mays]
  misc_feature (8)..(332): Homolog of NCBI NO: 22748320 NR Description: Putative homocysteine S-methyltransferase-1

SEQ ID NO: 102813 - protein, 325 aa, Arabidopsis thaliana; identical to SEQ ID NO: 27842
  peptide (1)..(325): Ceres Seq. ID no. 13611331
  misc_feature (11)..(321): Pfam Name: Homocysteine S-methyltransferase Pfam Description: Homocysteine S-methyltransferase
  misc_feature (1)..(325): Homolog of NCBI NO: 15229396 NR Description: homocysteine S-methyltransferase AtHMT-2
  misc_feature (1)..(325): Homolog of NCBI NO: 25453566 NR Description: homocysteine S-methyltransferase (EC 2.1.1.10)
  misc_feature (3)..(324): Homolog of NCBI NO: 6094303 NR Description: Selenocysteine methyltransferase
  misc_feature (1)..(324): Homolog of NCBI NO: 18403505 NR Description: selenocysteine methyltransferase -related thaliana] >gi|9279692|dbj|BAB01249.1| cysteine methyltransferase
  misc_feature (1)..(324): Homolog of NCBI NO: 21593147 NR Description: putative selenocysteine methyltransferase
  misc_feature (1)..(319): Homolog of NCBI NO: 37534456 NR Description: putative homocysteine S-methyltransferase-2
  misc_feature (1)..(319): Homolog of NCBI NO: 10732787 NR Description: homocysteine S-methyltransferase-2 [Zea mays]
  misc_feature (1)..(319): Homolog of NCBI NO: 10732789 NR Description: homocysteine S-methyltransferase-3 [Zea mays]
  misc_feature (1)..(315): Homolog of NCBI NO: 10732791 NR Description: homocysteine S-methyltransferase-4 [Zea mays]
  misc_feature (1)..(324): Homolog of NCBI NO: 22748320 NR Description: Putative homocysteine S-methyltransferase-1

SEQ ID NO: 102814 - DNA, 1645 bp, Arabidopsis thaliana
  misc_feature (1)..(1645): Ceres Seq. ID no. 13611332
  misc_feature: MA Experiment ID: 108434 Result: Down-regulated in Transcription
  misc_feature: MA Experiment 108434 PARAMETER Experiment Name: At_Root_Tips_cDNA_P Parameter: Tissue Value: Root Tips
  misc_feature: MA Experiment ID: 108573 Result: Up-regulated in Transcription
  misc_feature: MA Experiment 108573 PARAMETER Experiment Name: At_Drought_cDNA_P Parameter: Timepoint (hr) Value: 6
  misc_feature: MA Experiment 108573 PARAMETER Experiment Name: At_Drought_cDNA_P Parameter: Tissue Value: Aerial
  misc_feature: MA Experiment 108573 PARAMETER Experiment Name: At_Drought_cDNA_P Parameter: Treatment Value: Drought vs. No Drought
  misc_feature: MA Experiment ID: 20000089 Result: Down-regulated in Transcription
  misc_feature: MA Experiment ID: 20000113 Result: Down-regulated in Transcription
  misc_feature: MA Experiment 20000113 PARAMETER Experiment Name: At_42deg_Heat_cDNA_P Parameter: Temperature (deg C) Value: 42 vs. 22
  misc_feature: MA Experiment 20000113 PARAMETER Experiment Name: At_42deg_Heat_cDNA_P Parameter: Timepoint (hr) Value: 8
  misc_feature: MA Experiment 20000113 PARAMETER Experiment Name: At_42deg_Heat_cDNA_P Parameter: Tissue Value: Aerial
  misc_feature: MA Experiment ID: 20000224 Result: Down-regulated in Transcription
ccaccaccaccttcgatcgatttctactaacttgttcttcttcttctttctcaactctcttgtcttttgtctctccaccaattttttcttgttctttctctctccaccacataaaaaaaaaaaacctagctttgtcccctcaactcactgattgaactgcttgattttcgattgatcatctgggtggttttgaatcgaagagtattgttgtattagtggctggtggctctccaaaagagtaaggccggagagagaaatcaatggcctctggcggcggagaggcggataaatcacttgaaatcgggtccgggaccgcggatcccaaaataggcggtactgggagcaggagcgccggagaagaacgatacttcagggcagatacactggatttcagtaaatgggatttgcatatgggtcaaacctctactagcagcgtcctcaccaattccgcttccacgagcgctcccgcaccggcgatgcaggaatgggagattgacctctccaaactcgatatgaagcacgtcctcgctcacggtacttacggcactgtctaccgcggtgtctacgccggccaagaagtcgcagtgaaagtgttagattggggagaagatggttacgccacaccagctgaaactacagctctccgtgcttccttcgagcaagaggtcgccgtctggcagaagctcgatcatcccaacgttaccaagtttataggagcatccatgggaacctctgatctgcggatccctcctgctggtgatactggcggacgtggtaacggtgcacatcctgcgagggcctgttgtgttgtggttgaatatgttgccggaggcacgcttaagaagttcctcatcaagaaatatagggccaaactacccatcaaggatgtcattcagctcgctttggatctcgctagagggcttagttacctccactccaaggcgattgtacatagggacgtgaagtcagagaacatgctgttacagcctaacaagacgctgaagatcgctgatttcggggtagctagagttgaagctcagaaccctcaagacatgacgggtgaaactggaacacttggatacatggcaccagaggttcttgaaggaaagccttacaacaggaaatgcgatgtctatagctttggggtatgcctctgggaaatatactgctgtgacatgccctatgctgactgtagttttgctgagatctctcacgccgttgttcataggaatctgagaccagagattccgaaatgctgcccgcatgcggtggcaaacatcatgaagagatgctgggacccgaatccagacaggcgtccggagatggaggaggtggtgaagctgcttgaagccatagacacaagcaaaggtggtggaatgatagctccggaccagtttcaggggtgcctctgtttcttcaaacctcgaggcccctgaatctctctccctctctttcctttttgctccgtgtctgatatattcttgagagctgcgtgattctttggattttgtatttactttgagctatgggagttggattggtgtgggttttgtcataagaatctttctgcgctctatgtatttatatacttaacacagtcgtgtataattcgattaagctttattttattttttgatgttgattc

SEQ ID NO: 102815 - protein, 391 aa, Arabidopsis thaliana; identical to SEQ ID NO: 36667
  peptide (1)..(391): Ceres Seq. ID no. 13611333
  misc_feature (1)..(391): Homolog of NCBI NO: 15229398 NR Description: protein kinase, putative (ATMRK1) [Arabidopsis
  misc_feature (1)..(391): Homolog of NCBI NO: 21554375 NR Description: ATMRK1 [Arabidopsis thaliana]
  misc_feature (24)..(391): Homolog of NCBI NO: 18403507 NR Description: protein kinase, putative [Arabidopsis thaliana]
  misc_feature (74)..(391): Homolog of NCBI NO: 15232131 NR Description: protein kinase, putative [Arabidopsis thaliana] putative protein kinase [Arabidopsis thaliana]
  misc_feature (33)..(391): Homolog of NCBI NO: 15233574 NR Description: protein kinase, putative [Arabidopsis thaliana]
  misc_feature (52)..(391): Homolog of NCBI NO: 15240597 NR Description: protein kinase, putative [Arabidopsis thaliana]
  misc_feature (52)..(391): Homolog of NCBI NO: 21553402 NR Description: protein kinase [Arabidopsis thaliana]
  misc_feature (74)..(391): Homolog of NCBI NO: 34911620 NR Description: protein kinase -like [Oryza sativa (japonica
  misc_feature (74)..(391): Homolog of NCBI NO: 29367399 NR Description: putative protein kinase [Oryza sativa (japonica
  misc_feature (2)..(390): Homolog of NCBI NO: 14626298 NR Description: putative protein kinase [Oryza sativa (japonica

SEQ ID NO: 102816 - protein, 341 aa, Arabidopsis thaliana; identical to SEQ ID NO: 36668
  peptide (1)..(341): Ceres Seq. ID no. 13611334
  misc_feature (1)..(341): Homolog of NCBI NO: 15229398 NR Description: protein kinase, putative (ATMRK1) [Arabidopsis
  misc_feature (1)..(341): Homolog of NCBI NO: 21554375 NR Description: ATMRK1 [Arabidopsis thaliana]
  misc_feature (1)..(341): Homolog of NCBI NO: 18403507 NR Description: protein kinase, putative [Arabidopsis thaliana]
  misc_feature (24)..(341): Homolog of NCBI NO: 15232131 NR Description: protein kinase, putative [Arabidopsis thaliana] putative protein kinase [Arabidopsis thaliana]
  misc_feature (1)..(341): Homolog of NCBI NO: 15233574 NR Description: protein kinase, putative [Arabidopsis thaliana]
  misc_feature (2)..(341): Homolog of NCBI NO: 15240597 NR Description: protein kinase, putative [Arabidopsis thaliana]
  misc_feature (2)..(341): Homolog of NCBI NO: 21553402 NR Description: protein kinase [Arabidopsis thaliana]
  misc_feature (24)..(341): Homolog of NCBI NO: 34911620 NR Description: protein kinase -like [Oryza sativa (japonica
  misc_feature (24)..(341): Homolog of NCBI NO: 29367399 NR Description: putative protein kinase [Oryza sativa (japonica
  misc_feature (1)..(340): Homolog of NCBI NO: 14626298 NR Description: putative protein kinase [Oryza sativa (japonica

SEQ ID NO: 102817 - protein, 319 aa, Arabidopsis thaliana; identical to SEQ ID NO: 36669
  peptide (1)..(319): Ceres Seq. ID no. 13611335
  misc_feature (1)..(319): Homolog of NCBI NO: 15229398 NR Description: protein kinase, putative (ATMRK1) [Arabidopsis
  misc_feature (1)..(319): Homolog of NCBI NO: 21554375 NR Description: ATMRK1 [Arabidopsis thaliana]
  misc_feature (1)..(319): Homolog of NCBI NO: 18403507 NR Description: protein kinase, putative [Arabidopsis thaliana]
  misc_feature (2)..(319): Homolog of NCBI NO: 15232131 NR Description: protein kinase, putative [Arabidopsis thaliana] putative protein kinase [Arabidopsis thaliana]
  misc_feature (1)..(319): Homolog of NCBI NO: 15233574 NR Description: protein kinase, putative [Arabidopsis thaliana]
  misc_feature (1)..(319): Homolog of NCBI NO: 15240597 NR Description: protein kinase, putative [Arabidopsis thaliana]
  misc_feature (1)..(319): Homolog of NCBI NO: 21553402 NR Description: protein kinase [Arabidopsis thaliana]
  misc_feature (2)..(319): Homolog of NCBI NO: 34911620 NR Description: protein kinase -like [Oryza sativa (japonica
  misc_feature (2)..(319): Homolog of NCBI NO: 29367399 NR Description: putative protein kinase [Oryza sativa (japonica
  misc_feature (1)..(318): Homolog of NCBI NO: 14626298 NR Description: putative protein kinase [Oryza sativa (japonica

SEQ ID NO: 102818 - DNA, 1169 bp, Arabidopsis thaliana
  misc_feature (1)..(1169): Ceres Seq. ID no. 13611336
  misc_feature: MA Experiment ID: 108434 Result: Up-regulated in Transcription
  misc_feature: MA Experiment 108434 PARAMETER Experiment Name: At_Root_Tips_cDNA_P Parameter: Tissue Value: Root Tips
  misc_feature: MA Experiment ID: 108488 Result: Up-regulated in Transcription
  misc_feature: MA Experiment ID: 108573 Result: Up-regulated in Transcription
  misc_feature: MA Experiment 108573 PARAMETER Experiment Name: At_Drought_cDNA_P Parameter: Timepoint (hr) Value: 6
  misc_feature: MA Experiment 108573 PARAMETER Experiment Name: At_Drought_cDNA_P Parameter: Tissue Value: Aerial
  misc_feature: MA Experiment 108573 PARAMETER Experiment Name: At_Drought_cDNA_P Parameter: Treatment Value: Drought vs. No Drought
  misc_feature: MA Experiment ID: 108595 Result: Down-regulated in Transcription
  misc_feature: MA Experiment 108595 PARAMETER Experiment Name: At_Ler-pi_Ovule_cDNA_P Parameter: Plant Line Value: null
  misc_feature: MA Experiment ID: 20000069 Result: Down-regulated in Transcription
  misc_feature: MA Experiment 20000069 PARAMETER Experiment Name: At_100uM_ABA_Mutants_cDNA_P Parameter: Plant Line Value: CS23
  misc_feature: MA Experiment 20000069 PARAMETER Experiment Name: At_100uM_ABA_Mutants_cDNA_P Parameter: Timepoint (hr) Value: 6
  misc_feature: MA Experiment 20000069 PARAMETER Experiment Name: At_100uM_ABA_Mutants_cDNA_P Parameter: Tissue Value: Aerial
  misc_feature: MA Experiment 20000069 PARAMETER Experiment Name: At_100uM_ABA_Mutants_cDNA_P Parameter: Treatment Value: 100uM ABA vs. No Treatment
  misc_feature: MA Experiment ID: 20000070 Result: Down-regulated in Transcription
  misc_feature: MA Experiment 20000070 PARAMETER Experiment Name: At_100uM_ABA_Mutants_cDNA_P Parameter: Plant Line Value: CS24
  misc_feature: MA Experiment 20000070 PARAMETER Experiment Name: At_100uM_ABA_Mutants_cDNA_P Parameter: Timepoint (hr) Value: 6
  misc_feature: MA Experiment 20000070 PARAMETER Experiment Name: At_100uM_ABA_Mutants_cDNA_P Parameter: Tissue Value: Aerial
  misc_feature: MA Experiment 20000070 PARAMETER Experiment Name: At_100uM_ABA_Mutants_cDNA_P Parameter: Treatment Value: 100uM ABA vs. No Treatment
  misc_feature: MA Experiment ID: 20000071 Result: Down-regulated in Transcription
  misc_feature: MA Experiment 20000071 PARAMETER Experiment Name: At_100uM_ABA_Mutants_cDNA_P Parameter: Plant Line Value: CS8104
  misc_feature: MA Experiment 20000071 PARAMETER Experiment Name: At_100uM_ABA_Mutants_cDNA_P Parameter: Timepoint (hr) Value: 6
  misc_feature: MA Experiment 20000071 PARAMETER Experiment Name: At_100uM_ABA_Mutants_cDNA_P Parameter: Tissue Value: Aerial
  misc_feature: MA Experiment 20000071 PARAMETER Experiment Name: At_100uM_ABA_Mutants_cDNA_P Parameter: Treatment Value: 100uM ABA vs. No Treatment
  misc_feature: MA Experiment ID: 20000072 Result: Down-regulated in Transcription
  misc_feature: MA Experiment 20000072 PARAMETER Experiment Name: At_100uM_ABA_Mutants_cDNA_P Parameter: Plant Line Value: CS8105
  misc_feature: MA Experiment 20000072 PARAMETER Experiment Name: At_100uM_ABA_Mutants_cDNA_P Parameter: Timepoint (hr) Value: 6
  misc_feature: MA Experiment 20000072 PARAMETER Experiment Name: At_100uM_ABA_Mutants_cDNA_P Parameter: Tissue Value: Aerial
  misc_feature: MA Experiment 20000072 PARAMETER Experiment Name: At_100uM_ABA_Mutants_cDNA_P Parameter: Treatment Value: 100uM ABA vs. No Treatment
  misc_feature: MA Experiment ID: 20000086 Result: Down-regulated in Transcription
  misc_feature: MA Experiment 20000086 PARAMETER Experiment Name: At_100uM_ABA_Mutants_cDNA_P Parameter: Plant Line Value: CS22
  misc_feature: MA Experiment 20000086 PARAMETER Experiment Name: At_100uM_ABA_Mutants_cDNA_P Parameter: Timepoint (hr) Value: 6
  misc_feature: MA Experiment 20000086 PARAMETER Experiment Name: At_100uM_ABA_Mutants_cDNA_P Parameter: Tissue Value: Aerial
  misc_feature: MA Experiment 20000086 PARAMETER Experiment Name: At_100uM_ABA_Mutants_cDNA_P Parameter: Treatment Value: 100uM ABA vs. No Treatment
  misc_feature: MA Experiment ID: 20000087 Result: Down-regulated in Transcription
  misc_feature: MA Experiment 20000087 PARAMETER Experiment Name: At_100uM_ABA_Mutants_cDNA_P Parameter: Plant Line Value: WS
  misc_feature: MA Experiment 20000087 PARAMETER Experiment Name: At_100uM_ABA_Mutants_cDNA_P Parameter: Timepoint (hr) Value: 6
  misc_feature: MA Experiment 20000087 PARAMETER Experiment Name: At_100uM_ABA_Mutants_cDNA_P Parameter: Tissue Value: Aerial
  misc_feature: MA Experiment 20000087 PARAMETER Experiment Name: At_100uM_ABA_Mutants_cDNA_P Parameter: Treatment Value: 100uM ABA vs. No Treatment
  misc_feature: MA Experiment ID: 20000088 Result: Down-regulated in Transcription
  misc_feature: MA Experiment 20000088 PARAMETER Experiment Name: At_100uM_ABA_Mutants_cDNA_P Parameter: Plant Line Value: Landsberg
  misc_feature: MA Experiment 20000088 PARAMETER Experiment Name: At_100uM_ABA_Mutants_cDNA_P Parameter: Timepoint (hr) Value: 6
  misc_feature: MA Experiment 20000088 PARAMETER Experiment Name: At_100uM_ABA_Mutants_cDNA_P Parameter: Tissue Value: Aerial
  misc_feature: MA Experiment 20000088 PARAMETER Experiment Name: At_100uM_ABA_Mutants_cDNA_P Parameter: Treatment Value: 100uM ABA vs. No Treatment
  misc_feature: MA Experiment ID: 20000089 Result: Down-regulated in Transcription
  misc_feature: MA Experiment ID: 20000090 Result: Down-regulated in Transcription
  misc_feature: MA Experiment ID: 20000117 Result: Down-regulated in Transcription
  misc_feature: MA Experiment 20000117 PARAMETER Experiment Name: At_100uM_ABA_Mutants_cDNA_P Parameter: Plant Line Value: Columbia
  misc_feature: MA Experiment 20000117 PARAMETER Experiment Name: At_100uM_ABA_Mutants_cDNA_P Parameter: Timepoint (hr) Value: 6
  misc_feature: MA Experiment 20000117 PARAMETER Experiment Name: At_100uM_ABA_Mutants_cDNA_P Parameter: Tissue Value: Aerial
  misc_feature: MA Experiment 20000117 PARAMETER Experiment Name: At_100uM_ABA_Mutants_cDNA_P Parameter: Treatment Value: 100uM ABA vs. No Treatment
  misc_feature: MA Experiment ID: 20000184 Result: Up-regulated in Transcription
  misc_feature: MA Experiment 20000184 PARAMETER Experiment Name: At_Shoots__P Parameter: Age (day) Value: 7
  misc_feature: MA Experiment 20000184 PARAMETER Experiment Name: At_Shoots__P Parameter: Tissue Value: Shoots vs. Whole Plant
  misc_feature: MA Experiment ID: 20000185 Result: Down-regulated in Transcription
  misc_feature: MA Experiment 20000185 PARAMETER Experiment Name: At_Roots__P Parameter: Age (day) Value: 7 vs. 21
  misc_feature: MA Experiment 20000185 PARAMETER Experiment Name: At_Roots__P Parameter: Organism Value: A. thaliana
  misc_feature: MA Experiment 20000185 PARAMETER Experiment Name: At_Roots__P Parameter: Tissue Value: Roots vs. Whole Plant
  misc_feature: MA Experiment ID: 20000437 Result: Down-regulated in Transcription
  misc_feature: MA Experiment 20000437 PARAMETER Experiment Name: At_Drought_P Parameter: Age (day) Value: 8
  misc_feature: MA Experiment 20000437 PARAMETER Experiment Name: At_Drought_P Parameter: Organism Value: A. thaliana
  misc_feature: MA Experiment 20000437 PARAMETER Experiment Name: At_Drought_P Parameter: Plant Line Value: WS
  misc_feature: MA Experiment 20000437 PARAMETER Experiment Name: At_Drought_P Parameter: Timepoint (hr) Value: 24
  misc_feature: MA Experiment 20000437 PARAMETER Experiment Name: At_Drought_P Parameter: Tissue Value: Whole Plant
  misc_feature: MA Experiment 20000437 PARAMETER Experiment Name: At_Drought_P Parameter: Treatment Value: Drought vs. No Drought
  misc_feature: MA Experiment ID: 20000438 Result: Up-regulated in Transcription
  misc_feature: MA Experiment 20000438 PARAMETER Experiment Name: At_Shoots__P Parameter: Age (day) Value: 14
  misc_feature: MA Experiment 20000438 PARAMETER Experiment Name: At_Shoots__P Parameter: Tissue Value: Shoots vs. Whole Plant
  misc_feature: MA Experiment ID: 20000439 Result: Down-regulated in Transcription
  misc_feature: MA Experiment 20000439 PARAMETER Experiment Name: At_Roots__P Parameter: Age (day) Value: 14 vs. 21
  misc_feature: MA Experiment 20000439 PARAMETER Experiment Name: At_Roots__P Parameter: Organism Value: A. thaliana
  misc_feature: MA Experiment 20000439 PARAMETER Experiment Name: At_Roots__P Parameter: Tissue Value: Roots vs. Whole Plant
  misc_feature: MA Experiment ID: 20000794 Result: Down-regulated in Transcription
  misc_feature: MA Experiment 20000794 PARAMETER Experiment Name: At_Petals_P Parameter: Age (day) Value: 23-25 days
  misc_feature: MA Experiment 20000794 PARAMETER Experiment Name: At_Petals_P Parameter: Plant Line Value: WS
  misc_feature: MA Experiment 20000794 PARAMETER Experiment Name: At_Petals_P Parameter: Tissue Value: Petals vs. Whole plant
  misc_feature: MA Experiment ID: 20001451 Result: Down-regulated in Transcription
  misc_feature: MA Experiment 20001451 PARAMETER Experiment Name: At_Far-red-induction_P Parameter: Age (day) Value: 7
  misc_feature: MA Experiment 20001451 PARAMETER Experiment Name: At_Far-red-induction_P Parameter: Light Value: Far-red vs. White
  misc_feature: MA Experiment 20001451 PARAMETER Experiment Name: At_Far-red-induction_P Parameter: Organism Value: A. thaliana
  misc_feature: MA Experiment 20001451 PARAMETER Experiment Name: At_Far-red-induction_P Parameter: Plant Line Value: Columbia
  misc_feature: MA Experiment 20001451 PARAMETER Experiment Name: At_Far-red-induction_P Parameter: Timepoint (hr) Value: 24
  misc_feature: MA Experiment 20001451 PARAMETER Experiment Name: At_Far-red-induction_P Parameter: Tissue Value: Whole Plant
  misc_feature: MA Experiment ID: 20001757 Result: Up-regulated in Transcription
  misc_feature: MA Experiment 20001757 PARAMETER Experiment Name: At_50mM_NH4NO3_L-to-H_P Parameter: Timepoint (hr) Value: 6
  misc_feature: MA Experiment 20001757 PARAMETER Experiment Name: At_50mM_NH4NO3_L-to-H_P Parameter: Tissue Value: Leaf
  misc_feature: MA Experiment 20001757 PARAMETER Experiment Name: At_50mM_NH4NO3_L-to-H_P Parameter: Treatment Value: 50mM NH4NO3 vs 100mM Mannitol
tcgtttgtgtttttgattggcggagaattggtgatagataagcttcttcttccctcttctcaacttggtggatctgtcatcgatggcctctttgatgctcaacggggccattaccttccccaaaggtttaggttcccctggttccaatttgcatgccagatcgattcctcggccgaccttactctcagttacccgaacctccacacctagactctcggtggctactagatgcagcagcagcagcgtgtcgtcttcccggccatcggcgcaacctaggttcattcagcacaagaaggaggcttactggttctacaggttcttatccatcgtatacgaccatgtcatcaatcctgggcattggaccgaggatatgagagacgacgctcttgagccagcggatctcagccatccggacatgcgagtggtcgatgtcggcggcggaactggtttcactactctgggcatagtcaagacagtgaaggccaagaatgtgaccattctggaccagtcgccacatcagctggccaaagcaaagcaaaaggagccgttgaaagaatgcaagatcgtcgagggagatgctgaggatcttccttttccaaccgattatgctgacagatacgtttctgctggaagcattgagtactggccggacccgcagaggggaataagggaagcgtacagggttctcaagatcggtggcaaagcgtgtctcatcggccctgtctacccaaccttctggctctctcgcttcttttctgatgtctggatgctcttccccaaggaggaagagtacattgagtggttcaagaatgccggtttcaaggacgttcagctcaagaggattggccccaagtggtaccgtggtgttcgcaggcacggccttatcatgggatgttctgtcactggtgttaaacctgcctccggtgactctcctctccagcttggtccaaaggaagaggacgtagagaagcctgtcaacaaccccttctccttcttgggacgcttcctcctgggaactctagcagctgcctggtttgtgttaatccctatctacatgtggatcaaggatcagatcgttcccaaagaccaacccatctgatccttctcttctaggacatgatcattgtatcattgtaaacccctcttgtggtaaagaaagattcgagtcc

SEQ ID NO: 102819 - protein, 338 aa, Arabidopsis thaliana
  peptide (1)..(338): Ceres Seq. ID no. 13611337
  misc_feature (67)..(257): Pfam Name: ubiE/COQ5 methyltransferase family Pfam Description: ubiE/COQ5 methyltransferase family
  misc_feature (1)..(338): Homolog of NCBI NO: 15229430 NR Description: chloroplast inner envelope membrane protein, [Arabidopsis thaliana] >gi|11358638|pir||T49182 probable
  misc_feature (1)..(338): Homolog of NCBI NO: 15005009 NR Description: APG1 [Arabidopsis thaliana]
  misc_feature (1)..(338): Homolog of NCBI NO: 21553996 NR Description: putative chloroplast inner envelope protein
  misc_feature (1)..(338): Homolog of NCBI NO: 7489166 NR Description: membrane protein, 37K, precursor, chloroplast
  misc_feature (1)..(338): Homolog of NCBI NO: 124429 NR Description: 37 KD INNER ENVELOPE MEMBRANE PROTEIN, PRECURSOR (E37) >gi|99543|pir||S14409 membrane protein, 37K,
  misc_feature (46)..(338): Homolog of NCBI NO: 34393472 NR Description: putative 37kDa chloroplast inner envelope membrane
  misc_feature (21)..(335): Homolog of NCBI NO: 37265798 NR Description: MPBQ/MSBQ methyltransferase [Chlamydomonas
  misc_feature (1)..(186): Homolog of NCBI NO: 25458195 NR Description: membrane protein, 37K, chloroplast inner envelope
  misc_feature (67)..(260): Homolog of NCBI NO: 11498123 NR Description: chloroplast inner envelope membrane protein
  misc_feature (67)..(250): Homolog of NCBI NO: 15790980 NR Description: membrane protein; Hmp [Halobacterium sp. NRC-1]
MASLMLNGAITFPKGLGSPGSNLHARSIPRPTLLSVTRTSTPRLSVATRCSSSSVSSSRPSAQPRFIQHKKEAYWFYRFLSIVYDHVINPGHWTEDMRDDALEPADLSHPDMRVVDVGGGTGFTTLGIVKTVKAKNVTILDQSPHQLAKAKQKEPLKECKIVEGDAEDLPFPTDYADRYVSAGSIEYWPDPQRGIREAYRVLKIGGKACLIGPVYPTFWLSRFFSDVWMLFPKEEEYIEWFKNAGFKDVQLKRIGPKWYRGVRRHGLIMGCSVTGVKPASGDSPLQLGPKEEDVEKPVNNPFSFLGRFLLGTLAAAWFVLIPIYMWIKDQIVPKDQPI

SEQ ID NO: 102820 - protein, 334 aa, Arabidopsis thaliana
  peptide (1)..(334): Ceres Seq. ID no. 13611338
  misc_feature (63)..(253): Pfam Name: ubiE/COQ5 methyltransferase family Pfam Description: ubiE/COQ5 methyltransferase family
  misc_feature (1)..(334): Homolog of NCBI NO: 15229430 NR Description: chloroplast inner envelope membrane protein, [Arabidopsis thaliana] >gi|11358638|pir||T49182 probable
  misc_feature (1)..(334): Homolog of NCBI NO: 15005009 NR Description: APG1 [Arabidopsis thaliana]
  misc_feature (1)..(334): Homolog of NCBI NO: 21553996 NR Description: putative chloroplast inner envelope protein
  misc_feature (1)..(334): Homolog of NCBI NO: 7489166 NR Description: membrane protein, 37K, precursor, chloroplast
  misc_feature (1)..(334): Homolog of NCBI NO: 124429 NR Description: 37 KD INNER ENVELOPE MEMBRANE PROTEIN, PRECURSOR (E37) >gi|99543|pir||S14409 membrane protein, 37K,
  misc_feature (42)..(334): Homolog of NCBI NO: 34393472 NR Description: putative 37kDa chloroplast inner envelope membrane
  misc_feature (17)..(331): Homolog of NCBI NO: 37265798 NR Description: MPBQ/MSBQ methyltransferase [Chlamydomonas
  misc_feature (1)..(182): Homolog of NCBI NO: 25458195 NR Description: membrane protein, 37K, chloroplast inner envelope
  misc_feature (63)..(256): Homolog of NCBI NO: 11498123 NR Description: chloroplast inner envelope membrane protein
  misc_feature (63)..(246): Homolog of NCBI NO: 15790980 NR Description: membrane protein; Hmp [Halobacterium sp. NRC-1]
MLNGAITFPKGLGSPGSNLHARSIPRPTLLSVTRTSTPRLSVATRCSSSSVSSSRPSAQPRFIQHKKEAYWFYRFLSIVYDHVINPGHWTEDMRDDALEPADLSHPDMRVVDVGGGTGFTTLGIVKTVKAKNVTILDQSPHQLAKAKQKEPLKECKIVEGDAEDLPFPTDYADRYVSAGSIEYWPDPQRGIREAYRVLKIGGKACLIGPVYPTFWLSRFFSDVWMLFPKEEEYIEWFKNAGFKDVQLKRIGPKWYRGVRRHGLIMGCSVTGVKPASGDSPLQLGPKEEDVEKPVNNPFSFLGRFLLGTLAAAWFVLIPIYMWIKDQIVPKDQPI

SEQ ID NO: 102821 - protein, 242 aa, Arabidopsis thaliana
  peptide (1)..(242): Ceres Seq. ID no. 13611339
  misc_feature (1)..(161): Pfam Name: ubiE/COQ5 methyltransferase family Pfam Description: ubiE/COQ5 methyltransferase family
  misc_feature (1)..(242): Homolog of NCBI NO: 15229430 NR Description: chloroplast inner envelope membrane protein, [Arabidopsis thaliana] >gi|11358638|pir||T49182 probable
  misc_feature (1)..(242): Homolog of NCBI NO: 15005009 NR Description: APG1 [Arabidopsis thaliana]
  misc_feature (1)..(242): Homolog of NCBI NO: 21553996 NR Description: putative chloroplast inner envelope protein
  misc_feature (1)..(242): Homolog of NCBI NO: 7489166 NR Description: membrane protein, 37K, precursor, chloroplast
  misc_feature (1)..(242): Homolog of NCBI NO: 124429 NR Description: 37 KD INNER ENVELOPE MEMBRANE PROTEIN, PRECURSOR (E37) >gi|99543|pir||S14409 membrane protein, 37K,
  misc_feature (1)..(242): Homolog of NCBI NO: 34393472 NR Description: putative 37kDa chloroplast inner envelope membrane
  misc_feature (1)..(239): Homolog of NCBI NO: 37265798 NR Description: MPBQ/MSBQ methyltransferase [Chlamydomonas
  misc_feature (1)..(90): Homolog of NCBI NO: 25458195 NR Description: membrane protein, 37K, chloroplast inner envelope
  misc_feature (1)..(164): Homolog of NCBI NO: 11498123 NR Description: chloroplast inner envelope membrane protein
  misc_feature (1)..(154): Homolog of NCBI NO: 15790980 NR Description: membrane protein; Hmp [Halobacterium sp. NRC-1]
MRDDALEPADLSHPDMRVVDVGGGTGFTTLGIVKTVKAKNVTILDQSPHQLAKAKQKEPLKECKIVEGDAEDLPFPTDYADRYVSAGSIEYWPDPQRGIREAYRVLKIGGKACLIGPVYPTFWLSRFFSDVWMLFPKEEEYIEWFKNAGFKDVQLKRIGPKWYRGVRRHGLIMGCSVTGVKPASGDSPLQLGPKEEDVEKPVNNPFSFLGRFLLGTLAAAWFVLIPIYMWIKDQIVPKDQPI

SEQ ID NO: 102822 - DNA, 1680 bp, Arabidopsis thaliana
  misc_feature (1)..(1680): Ceres Seq. ID no. 13611343
  misc_feature: MA Experiment ID: 108434 Result: Up-regulated in Transcription
  misc_feature: MA Experiment 108434 PARAMETER Experiment Name: At_Root_Tips_cDNA_P Parameter: Tissue Value: Root Tips
  misc_feature: MA Experiment ID: 108595 Result: Up-regulated in Transcription
  misc_feature: MA Experiment 108595 PARAMETER Experiment Name: At_Ler-pi_Ovule_cDNA_P Parameter: Plant Line Value: null
  misc_feature: MA Experiment ID: 20000179 Result: Up-regulated in Transcription
  misc_feature: MA Experiment 20000179 PARAMETER Experiment Name: At_Germinating_Seeds_P Parameter: Age (hr) Value: 6 vs. 0
  misc_feature: MA Experiment 20000179 PARAMETER Experiment Name: At_Germinating_Seeds_P Parameter: Tissue Value: Germinating Seeds
  misc_feature: MA Experiment ID: 20000180 Result: Up-regulated in Transcription
  misc_feature: MA Experiment 20000180 PARAMETER Experiment Name: At_Germinating_Seeds_P Parameter: Age (hr) Value: 24 vs. 0
  misc_feature: MA Experiment 20000180 PARAMETER Experiment Name: At_Germinating_Seeds_P Parameter: Tissue Value: Germinating Seeds
  misc_feature: MA Experiment ID: 20000573 Result: Up-regulated in Transcription
  misc_feature: MA Experiment 20000573 PARAMETER Experiment Name: At_100uM_ABA_Mutants__P Parameter: Organism Value: A. thaliana
  misc_feature: MA Experiment 20000573 PARAMETER Experiment Name: At_100uM_ABA_Mutants__P Parameter: Plant Line Value: CS22 vs. Ler wt
  misc_feature: MA Experiment 20000573 PARAMETER Experiment Name: At_100uM_ABA_Mutants__P Parameter: Timepoint (hr) Value: N/A
  misc_feature: MA Experiment 20000573 PARAMETER Experiment Name: At_100uM_ABA_Mutants__P Parameter: Tissue Value: Whole Plant
  misc_feature: MA Experiment 20000573 PARAMETER Experiment Name: At_100uM_ABA_Mutants__P Parameter: Treatment Value: None
agatttcgagtttcttctttcccgcccgtaagagaaaccctactctgactctccactccatttgagagactgagctcgttccgataaggagaggagatgtctaacgtaaccgtctgtgcgcgattcaggccgcgaagctctaaagagatgcgcgatcccagcagagatggtgtctgtgctcgacccatcgacgctgaaaccttcgttttccaagatgacaaggaagatgaatttacatttagcctcgatagagttttttatgaggactctacccaagctgcggtttatgagtttctggctctccccatcatgagagacgctgtaaatggtataaacggaacaatcatcacttatggacagacaggggctgggaagacttattccatggagggaccaggcatccaggactgtgatgagcacaataaaggacttcttccaagagtggtccatgggatgtttgagcaaatcagctcttccaatgatattgcaagatacactgttaaattgtctatggttgagatctacatggagaaagtcagggacctgttggacttatcaaaagcaaacatacagatcaaggagaacaaaacacaaggaatactcttgtcaggcgttacagaggctagcttcattgtgcctgtatcagattcggtggaggcattacaacatctatgcaccggtttagctaaccgcgcagttggggaaacccaaatgaatatgtccagcagtagaagccactgcgcctacttgttcacaatccagcaggattcagttaaagataaaagggtaaaaacaggaaaactgattcttgtcgacctggctggctcagagaaagcagacaaaactggagcagaaggtagggttcttgaagaagcgaagacgatcaataaatcgctctcagccttggggaacgtgataaacgctctcactagtgggccatctagcaaagggaatcacataccatatcgtgactccaagcttactcgcatcttacaggatgccctgggtggaaattctcgaatggcgctgctttgctgttgctcaccaagcactttaaatgcatctgagacgctctcaactctcaggtttggcatgagggcaaaacacataaaagcatcaccacgtgctagtgaagtgaaatctgcgaaggcacaggaggaaccctcctcggttaccaaagatgaaaaatgtgggaggatcctagaaaagatgaaagagaggatgagcaacgaagacatcaaaatgctagaagatgtgtttatacaggaagggatcattttcagcctagattcgatggctgaagtggaaaccgtatacgaagatattgtatcaaaaactatacaatccttacagcaggctgttgatgaactccaacagaaagtcaaaaagttagaagcagaaaacataggtattcaggaacaagcattgcgcaatcacgaacctggttcggtcggaaagatgtcaaggttcatcagttcttggtatgcatcgttctttacgtcctaaagatgataaaatgaatatactatcttggtaatgtagaagatgtggacaagtagatggtaaagagataagtttctctttttaggtcgtgagagcaaaacagatattaacattcaaaggtatgtaatgaaatagtagataaaaaatggatgggaggatgaataaaagctaattaag

SEQ ID NO: 102823 - protein, 469 aa, Arabidopsis thaliana
  peptide (1)..(469): Ceres Seq. ID no. 13611344
  misc_feature (1)..(469): Homolog of NCBI NO: 18412812 NR Description: kinesin heavy chain, putative [Arabidopsis
  misc_feature (1)..(469): Homolog of NCBI NO: 21553553 NR Description: kinesin heavy chain-like protein [Arabidopsis
  misc_feature (1)..(469): Homolog of NCBI NO: 30695816 NR Description: kinesin heavy chain, putative [Arabidopsis >gi|26453185|dbj|BAC43667.1| putative kinesin heavy chain thaliana] >gi|28951063|gb|AAO63455.1| At3g63480 [Arabidopsis
  misc_feature (224)..(469): Homolog of NCBI NO: 11358473 NR Description: kinesin heavy chain-like protein - Arabidopsis
  misc_feature (1)..(180): Homolog of NCBI NO: 11358473 NR Description: kinesin heavy chain-like protein - Arabidopsis
  misc_feature (1)..(350): Homolog of NCBI NO: 27261501 NR Description: kinesin 1 [Dictyostelium discoideum]
  misc_feature (1)..(350): Homolog of NCBI NO: 40074457 NR Description: kinesin family member 3 [Dictyostelium discoideum]
  misc_feature (2)..(339): Homolog of NCBI NO: 6016438 NR Description: KINESIN HEAVY CHAIN (SYNKIN)
  misc_feature (2)..(354): Homolog of NCBI NO: 6016437 NR Description: Kinesin heavy chain >gi|7441386|pir||T10164
  misc_feature (2)..(354): Homolog of NCBI NO: 17942987 NR Description: Chain A, Structure Of A Fast Kinesin:
MSNVTVCARFRPRSSKEMRDPSRDGVCARPIDAETFVFQDDKEDEFTFSLDRVFYEDSTQAAVYEFLALPIMRDAVNGINGTIITYGQTGAGKTYSMEGPGIQDCDEHNKGLLPRVVHGMFEQISSSNDIARYTVKLSMVEIYMEKVRDLLDLSKANIQIKENKTQGILLSGVTEASFIVPVSDSVEALQHLCTGLANRAVGETQMNMSSSRSHCAYLFTIQQDSVKDKRVKTGKLILVDLAGSEKADKTGAEGRVLEEAKTINKSLSALGNVINALTSGPSSKGNHIPYRDSKLTRILQDALGGNSRMALLCCCSPSTLNASETLSTLRFGMRAKHIKASPRASEVKSAKAQEEPSSVTKDEKCGRILEKMKERMSNEDIKMLEDVFIQEGIIFSLDSMAEVETVYEDIVSKTIQSLQQAVDELQQKVKKLEAENIGIQEQALRNHEPGSVGKMSRFISSWYASFFTS

SEQ ID NO: 102824 - protein, 452 aa, Arabidopsis thaliana
  peptide (1)..(452): Ceres Seq. ID no. 13611345
  misc_feature (1)..(452): Homolog of NCBI NO: 18412812 NR Description: kinesin heavy chain, putative [Arabidopsis
  misc_feature (1)..(452): Homolog of NCBI NO: 21553553 NR Description: kinesin heavy chain-like protein [Arabidopsis
  misc_feature (1)..(452): Homolog of NCBI NO: 30695816 NR Description: kinesin heavy chain, putative [Arabidopsis >gi|26453185|dbj|BAC43667.1| putative kinesin heavy chain thaliana] >gi|28951063|gb|AAO63455.1| At3g63480 [Arabidopsis
  misc_feature (207)..(452): Homolog of NCBI NO: 11358473 NR Description: kinesin heavy chain-like protein - Arabidopsis
  misc_feature (1)..(163): Homolog of NCBI NO: 11358473 NR Description: kinesin heavy chain-like protein - Arabidopsis
  misc_feature (1)..(333): Homolog of NCBI NO: 27261501 NR Description: kinesin 1 [Dictyostelium discoideum]
  misc_feature (1)..(333): Homolog of NCBI NO: 40074457 NR Description: kinesin family member 3 [Dictyostelium discoideum]
  misc_feature (1)..(322): Homolog of NCBI NO: 6016438 NR Description: KINESIN HEAVY CHAIN (SYNKIN)
  misc_feature (1)..(337): Homolog of NCBI NO: 6016437 NR Description: Kinesin heavy chain >gi|7441386|pir||T10164
  misc_feature (1)..(337): Homolog of NCBI NO: 17942987 NR Description: Chain A, Structure Of A Fast Kinesin:
MRDPSRDGVCARPIDAETFVFQDDKEDEFTFSLDRVFYEDSTQAAVYEFLALPIMRDAVNGINGTIITYGQTGAGKTYSMEGPGIQDCDEHNKGLLPRVVHGMFEQISSSNDIARYTVKLSMVEIYMEKVRDLLDLSKANIQIKENKTQGILLSGVTEASFIVPVSDSVEALQHLCTGLANRAVGETQMNMSSSRSHCAYLFTIQQDSVKDKRVKTGKLILVDLAGSEKADKTGAEGRVLEEAKTINKSLSALGNVINALTSGPSSKGNHIPYRDSKLTRILQDALGGNSRMALLCCCSPSTLNASETLSTLRFGMRAKHIKASPRASEVKSAKAQEEPSSVTKDEKCGRILEKMKERMSNEDIKMLEDVFIQEGIIFSLDSMAEVETVYEDIVSKTIQSLQQAVDELQQKVKKLEAENIGIQEQALRNHEPGSVGKMSRFISSWYASFFTS

SEQ ID NO: 102825 - protein, 398 aa, Arabidopsis thaliana
  peptide (1)..(398): Ceres Seq. ID no. 13611346
  misc_feature (1)..(398): Homolog of NCBI NO: 18412812 NR Description: kinesin heavy chain, putative [Arabidopsis
  misc_feature (1)..(398): Homolog of NCBI NO: 21553553 NR Description: kinesin heavy chain-like protein [Arabidopsis
  misc_feature (1)..(398): Homolog of NCBI NO: 30695816 NR Description: kinesin heavy chain, putative [Arabidopsis >gi|26453185|dbj|BAC43667.1| putative kinesin heavy chain thaliana] >gi|28951063|gb|AAO63455.1| At3g63480 [Arabidopsis
  misc_feature (153)..(398): Homolog of NCBI NO: 11358473 NR Description: kinesin heavy chain-like protein - Arabidopsis
  misc_feature (1)..(109): Homolog of NCBI NO: 11358473 NR Description: kinesin heavy chain-like protein - Arabidopsis
  misc_feature (1)..(279): Homolog of NCBI NO: 27261501 NR Description: kinesin 1 [Dictyostelium discoideum]
  misc_feature (1)..(279): Homolog of NCBI NO: 40074457 NR Description: kinesin family member 3 [Dictyostelium discoideum]
  misc_feature (1)..(268): Homolog of NCBI NO: 6016438 NR Description: KINESIN HEAVY CHAIN (SYNKIN)
  misc_feature (1)..(283): Homolog of NCBI NO: 6016437 NR Description: Kinesin heavy chain >gi|7441386|pir||T10164
  misc_feature (1)..(283): Homolog of NCBI NO: 17942987 NR Description: Chain A, Structure Of A Fast Kinesin:
MRDAVNGINGTIITYGQTGAGKTYSMEGPGIQDCDEHNKGLLPRVVHGMFEQISSSNDIARYTVKLSMVEIYMEKVRDLLDLSKANIQIKENKTQGILLSGVTEASFIVPVSDSVEALQHLCTGLANRAVGETQMNMSSSRSHCAYLFTIQQDSVKDKRVKTGKLILVDLAGSEKADKTGAEGRVLEEAKTINKSLSALGNVINALTSGPSSKGNHIPYRDSKLTRILQDALGGNSRMALLCCCSPSTLNASETLSTLRFGMRAKHIKASPRASEVKSAKAQEEPSSVTKDEKCGRILEKMKERMSNEDIKMLEDVFIQEGIIFSLDSMAEVETVYEDIVSKTIQSLQQAVDELQQKVKKLEAENIGIQEQALRNHEPGSVGKMSRFISSWYASFFTS

SEQ ID NO: 102826 - DNA, 1697 bp, Arabidopsis thaliana
  misc_feature (1)..(1697): Ceres Seq. ID no. 13611351
  misc_feature: MA Experiment ID: 108434 Result: Up-regulated in Transcription
  misc_feature: MA Experiment 108434 PARAMETER Experiment Name: At_Root_Tips_cDNA_P Parameter: Tissue Value: Root Tips
  misc_feature: MA Experiment ID: 108462 Result: Down-regulated in Transcription
  misc_feature: MA Experiment 108462 PARAMETER Experiment Name: At_Germinating_Seeds_cDNA_P Parameter: Age (day) Value: 2 vs. 0
  misc_feature: MA Experiment 108462 PARAMETER Experiment Name: At_Germinating_Seeds_cDNA_P Parameter: Tissue Value: Germinating Seeds
  misc_feature: MA Experiment ID: 108463 Result: Down-regulated in Transcription
  misc_feature: MA Experiment 108463 PARAMETER Experiment Name: At_Germinating_Seeds_cDNA_P Parameter: Age (day) Value: 3 vs. 0
  misc_feature: MA Experiment 108463 PARAMETER Experiment Name: At_Germinating_Seeds_cDNA_P Parameter: Tissue Value: Germinating Seeds
  misc_feature: MA Experiment ID: 108464 Result: Down-regulated in Transcription
  misc_feature: MA Experiment 108464 PARAMETER Experiment Name: At_Germinating_Seeds_cDNA_P Parameter: Age (day) Value: 4 vs. 0
  misc_feature: MA Experiment 108464 PARAMETER Experiment Name: At_Germinating_Seeds_cDNA_P Parameter: Tissue Value: Germinating Seeds
  misc_feature: MA Experiment ID: 108573 Result: Up-regulated in Transcription
  misc_feature: MA Experiment 108573 PARAMETER Experiment Name: At_Drought_cDNA_P Parameter: Timepoint (hr) Value: 6
  misc_feature: MA Experiment 108573 PARAMETER Experiment Name: At_Drought_cDNA_P Parameter: Tissue Value: Aerial
  misc_feature: MA Experiment 108573 PARAMETER Experiment Name: At_Drought_cDNA_P Parameter: Treatment Value: Drought vs. No Drought
  misc_feature: MA Experiment ID: 20000112 Result: Up-regulated in Transcription
  misc_feature: MA Experiment 20000112 PARAMETER Experiment Name: At_42deg_Heat_cDNA_P Parameter: Temperature (deg C) Value: 42 vs. 22
  misc_feature: MA Experiment 20000112 PARAMETER Experiment Name: At_42deg_Heat_cDNA_P Parameter: Timepoint (hr) Value: 2
  misc_feature: MA Experiment 20000112 PARAMETER Experiment Name: At_42deg_Heat_cDNA_P Parameter: Tissue Value: Aerial
  misc_feature: MA Experiment ID: 20000144 Result: Up-regulated in Transcription
  misc_feature: MA Experiment 20000144 PARAMETER Experiment Name: At_42deg_Heat_cDNA_P Parameter: Temperature (deg C) Value: 42 vs. 22
  misc_feature: MA Experiment 20000144 PARAMETER Experiment Name: At_42deg_Heat_cDNA_P Parameter: Timepoint (hr) Value: 1
  misc_feature: MA Experiment 20000144 PARAMETER Experiment Name: At_42deg_Heat_cDNA_P Parameter: Tissue Value: Aerial
  misc_feature: MA Experiment ID: 20001557 Result: Up-regulated in Transcription
  misc_feature: MA Experiment 20001557 PARAMETER Experiment Name: At_Drought_Soil_Dry_P Parameter: Age (day) Value: 27
  misc_feature: MA Experiment 20001557 PARAMETER Experiment Name: At_Drought_Soil_Dry_P Parameter: Organism Value: A. thaliana
  misc_feature: MA Experiment 20001557 PARAMETER Experiment Name: At_Drought_Soil_Dry_P Parameter: Plant Line Value: WS
  misc_feature: MA Experiment 20001557 PARAMETER Experiment Name: At_Drought_Soil_Dry_P Parameter: Post Timepoint (hr) Value: 3
  misc_feature: MA Experiment 20001557 PARAMETER Experiment Name: At_Drought_Soil_Dry_P Parameter: Post-Treatment Value: Re-Water vs. No Drought
  misc_feature: MA Experiment 20001557 PARAMETER Experiment Name: At_Drought_Soil_Dry_P Parameter: Timepoint (day) Value: 13
  misc_feature: MA Experiment 20001557 PARAMETER Experiment Name: At_Drought_Soil_Dry_P Parameter: Treatment Value: Drought vs. No Drought
aagctaagctctagaaacaccgcctttaacgtctcgctgcaccatttttcatcgttgatcagtcgtcgatcctcttgagtgatttgattttagactttctagttatcaaactcgaaagatggattctgtccttgtagtgggcattgcatcggttattctcggtgcgttgatcgctgtactcttcttcggtagctacttccggaagcggacatcggaggtgcaatccatggccaaagcggagcctcaggatccgatccggaatccaaagtcgaatcatcctgctccgaagaagaatcatcccaaatctcaagcgtccgataagaatcagaacaaacggcatcatcctttagatttaaacacgttgaaaggccacggtgatgctgttactggactctgtttctcgtccgatggaaagagcttggccacagcttgcgctgatggagtaatcagggtgttcaagctagatgatgcatcaagcaaaagcttcaaatttttaaggataaatcttcctgctggaggacatccaaccgccgtggcatttgctgacgatgcctcatctattgttgtggcttgtcatcatatgtctggttcatctttgtacatgtacggtgaagataagcaaaaggatcagcaagggaagcttcctcttcctagtatcaaatgggaccaccatcatattcatgagaagagatcagtgcttaccatctctggagctactgcaacttacggtactgctgatggaagtgttgtcattgcctcttgttctgaagggactgatatcgtcctttggcatgggaaaactgggaggaatttgggacatgttgatacaaaccagttgaagaaccacatggcagctgtatcaccaaatggacgttttttggcagctgcagcatttactgcagatgtgaaagtgtgggaaattgtgtatcagaaagatggttctgtgaaagaggtttcaagagttatgcaacttaaaggccacaagagtgcagtgacttggttatgcttttctccaaactcagagcaaatcatcaccgcttcaaaagatggttcaataagagtctggaacatcaatgtccgttatcatcttgatgaggatccaaagactttgaaggtgttcccgattccactttgcgactcaggaggcaatccgttgcactatgatcgtctcagcttatgcccagagggaaagatattggcagcaagccatggttccacattgcagtggttatgtgctgaaactggaaatgtcttggacacagctgagaaagcccacgaaggggatatcacatgcatatcttgggcacccaaggctattacagttggggaaagacatgccatggttttggggacatcaggcgatgacaagaaagtgaagctgtgggaagctccaaagtcgcaatctttgtaggctctcgcatacacgtagtcccttgatgacatgaggcgtatttaaacggtacaacttgcgaggaaaaaaactctaataggttttgtttcgagtcccaagttgggatcaaatgaagggtggtttaaagtccttcttgttaccaagtgtcttttaacttctgaagttttgaattttgctcataggactagtacaacactcacagtcttctatgttttccaaattaaggaaatttaaaaagcacacaacaacactaagaaatatgaatcgattaaaattattatacgca

SEQ ID NO: 102827 - protein, 430 aa, Arabidopsis thaliana; identical to SEQ ID NO: 31004
  peptide (1)..(430): Ceres Seq. ID no. 13611352
  misc_feature (1)..(430): Homolog of NCBI NO: 18411222 NR Description: transducin / WD-40 repeat protein family thaliana] >gi|15912317|gb|AAL08292.1| AT4g00090/F6N15_8 thaliana] >gi|23506101|gb|AAN28910.1| At4g00090/F6N15_8
  misc_feature (123)..(430): Homolog of NCBI NO: 7486549 NR Description: hypothetical protein F6N15.8 - Arabidopsis
  misc_feature (1)..(141): Homolog of NCBI NO: 7486549 NR Description: hypothetical protein F6N15.8 - Arabidopsis
  misc_feature (3)..(429): Homolog of NCBI NO: 30102987 NR Description: putative WD repeat protein [Oryza sativa
  misc_feature (253)..(425): Homolog of NCBI NO: 14091657 NR Description: F6N15.8-like protein [Mangifera indica]
  misc_feature (43)..(390): Homolog of NCBI NO: 27696175 NR Description: Similar to transducin (beta)-like 2 [Xenopus
  misc_feature (6)..(394): Homolog of NCBI NO: 7549793 NR Description: transducin (beta)-like 2 isoform 1; syndrome chromosome region 13 [Homo sapiens]
  misc_feature (6)..(394): Homolog of NCBI NO: 15277891 NR Description: Similar to transducin (beta)-like 2 [Homo sapiens]
  misc_feature (6)..(394): Homolog of NCBI NO: 22760172 NR Description: unnamed protein product [Homo sapiens]
  misc_feature (50)..(394): Homolog of NCBI NO: 4704417 NR Description: WS beta-transducin repeats protein [Homo sapiens]

SEQ ID NO: 102828 - protein, 394 aa, Arabidopsis thaliana; identical to SEQ ID NO: 31005
  peptide (1)..(394): Ceres Seq. ID no. 13611353
  misc_feature (1)..(394): Homolog of NCBI NO: 18411222 NR Description: transducin / WD-40 repeat protein family thaliana] >gi|15912317|gb|AAL08292.1| AT4g00090/F6N15_8 thaliana] >gi|23506101|gb|AAN28910.1| At4g00090/F6N15_8
  misc_feature (87)..(394): Homolog of NCBI NO: 7486549 NR Description: hypothetical protein F6N15.8 - Arabidopsis
  misc_feature (1)..(105): Homolog of NCBI NO: 7486549 NR Description: hypothetical protein F6N15.8 - Arabidopsis
  misc_feature (1)..(393): Homolog of NCBI NO: 30102987 NR Description: putative WD repeat protein [Oryza sativa
  misc_feature (217)..(389): Homolog of NCBI NO: 14091657 NR Description: F6N15.8-like protein [Mangifera indica]
  misc_feature (7)..(354): Homolog of NCBI NO: 27696175 NR Description: Similar to transducin (beta)-like 2 [Xenopus
  misc_feature (1)..(358): Homolog of NCBI NO: 7549793 NR Description: transducin (beta)-like 2 isoform 1; syndrome chromosome region 13 [Homo sapiens]
  misc_feature (1)..(358): Homolog of NCBI NO: 22760172 NR Description: unnamed protein product [Homo sapiens]
  misc_feature (1)..(358): Homolog of NCBI NO: 15277891 NR Description: Similar to transducin (beta)-like 2 [Homo sapiens]
  misc_feature (14)..(358): Homolog of NCBI NO: 4704417 NR Description: WS beta-transducin repeats protein [Homo sapiens]

SEQ ID NO: 102829 - protein, 276 aa, Arabidopsis thaliana; identical to SEQ ID NO: 31006
  peptide (1)..(276): Ceres Seq. ID no. 13611354
  misc_feature (1)..(276): Homolog of NCBI NO: 18411222 NR Description: transducin / WD-40 repeat protein family thaliana] >gi|15912317|gb|AAL08292.1| AT4g00090/F6N15_8 thaliana] >gi|23506101|gb|AAN28910.1| At4g00090/F6N15_8
  misc_feature (1)..(276): Homolog of NCBI NO: 7486549 NR Description: hypothetical protein F6N15.8 - Arabidopsis
  misc_feature (1)..(275): Homolog of NCBI NO: 30102987 NR Description: putative WD repeat protein [Oryza sativa
  misc_feature (99)..(271): Homolog of NCBI NO: 14091657 NR Description: F6N15.8-like protein [Mangifera indica]
  misc_feature (1)..(236): Homolog of NCBI NO: 27696175 NR Description: Similar to transducin (beta)-like 2 [Xenopus
  misc_feature (1)..(240): Homolog of NCBI NO: 7549793 NR Description: transducin (beta)-like 2 isoform 1; syndrome chromosome region 13 [Homo sapiens]
  misc_feature (1)..(240): Homolog of NCBI NO: 22760172 NR Description: unnamed protein product [Homo sapiens]
  misc_feature (1)..(240): Homolog of NCBI NO: 15277891 NR Description: Similar to transducin (beta)-like 2 [Homo sapiens]
  misc_feature (1)..(240): Homolog of NCBI NO: 4704417 NR Description: WS beta-transducin repeats protein [Homo sapiens]
  misc_feature (1)..(240): Homolog of NCBI NO: 34873382 NR Description: similar to transducin (beta)-like 2 [Rattus

SEQ ID NO: 102830 - DNA, 719 bp, Arabidopsis thaliana
  misc_feature (1)..(719): Ceres Seq. ID no. 13611355
  misc_feature: MA Experiment ID: 108434 Result: Up-regulated in Transcription
  misc_feature: MA Experiment 108434 PARAMETER Experiment Name: At_Root_Tips_cDNA_P Parameter: Tissue Value: Root Tips
  misc_feature: MA Experiment ID: 108462 Result: Down-regulated in Transcription
  misc_feature: MA Experiment 108462 PARAMETER Experiment Name: At_Germinating_Seeds_cDNA_P Parameter: Age (day) Value: 2 vs. 0
  misc_feature: MA Experiment 108462 PARAMETER Experiment Name: At_Germinating_Seeds_cDNA_P Parameter: Tissue Value: Germinating Seeds
  misc_feature: MA Experiment ID: 108463 Result: Down-regulated in Transcription
  misc_feature: MA Experiment 108463 PARAMETER Experiment Name: At_Germinating_Seeds_cDNA_P Parameter: Age (day) Value: 3 vs. 0
  misc_feature: MA Experiment 108463 PARAMETER Experiment Name: At_Germinating_Seeds_cDNA_P Parameter: Tissue Value: Germinating Seeds
  misc_feature: MA Experiment ID: 20000173 Result: Up-regulated in Transcription
  misc_feature: MA Experiment 20000173 PARAMETER Experiment Name: At_42deg_Heat_P Parameter: Age (day) Value: 14
  misc_feature: MA Experiment 20000173 PARAMETER Experiment Name: At_42deg_Heat_P Parameter: Organism Value: A. thaliana
  misc_feature: MA Experiment 20000173 PARAMETER Experiment Name: At_42deg_Heat_P Parameter: Plant Line Value: WS
  misc_feature: MA Experiment 20000173 PARAMETER Experiment Name: At_42deg_Heat_P Parameter: Temperature (deg C) Value: 42 vs. 22
  misc_feature: MA Experiment 20000173 PARAMETER Experiment Name: At_42deg_Heat_P Parameter: Timepoint (hr) Value: 6
  misc_feature: MA Experiment 20000173 PARAMETER Experiment Name: At_42deg_Heat_P Parameter: Tissue Value: Aerial
  misc_feature: MA Experiment ID: 20000184 Result: Up-regulated in Transcription
  misc_feature: MA Experiment 20000184 PARAMETER Experiment Name: At_Shoots__P Parameter: Age (day) Value: 7
  misc_feature: MA Experiment 20000184 PARAMETER Experiment Name: At_Shoots__P Parameter: Tissue Value: Shoots vs. Whole Plant
  misc_feature: MA Experiment ID: 20000234 Result: Up-regulated in Transcription
  misc_feature: MA Experiment 20000234 PARAMETER Experiment Name: At_Siliques_P Parameter: Age (day) Value: 21
  misc_feature: MA Experiment 20000234 PARAMETER Experiment Name: At_Siliques_P Parameter: Organism Value: A. thaliana
  misc_feature: MA Experiment 20000234 PARAMETER Experiment Name: At_Siliques_P Parameter: Plant Line Value: WS
  misc_feature: MA Experiment 20000234 PARAMETER Experiment Name: At_Siliques_P Parameter: Tissue Value: Less Than 5mm Siliques vs. Whole Plant
  misc_feature: MA Experiment ID: 20000437 Result: Down-regulated in Transcription
  misc_feature: MA Experiment 20000437 PARAMETER Experiment Name: At_Drought_P Parameter: Age (day) Value: 8
  misc_feature: MA Experiment 20000437 PARAMETER Experiment Name: At_Drought_P Parameter: Organism Value: A. thaliana
  misc_feature: MA Experiment 20000437 PARAMETER Experiment Name: At_Drought_P Parameter: Plant Line Value: WS
  misc_feature: MA Experiment 20000437 PARAMETER Experiment Name: At_Drought_P Parameter: Timepoint (hr) Value: 24
  misc_feature: MA Experiment 20000437 PARAMETER Experiment Name: At_Drought_P Parameter: Tissue Value: Whole Plant
  misc_feature: MA Experiment 20000437 PARAMETER Experiment Name: At_Drought_P Parameter: Treatment Value: Drought vs. No Drought
  misc_feature: MA Experiment ID: 20000495 Result: Up-regulated in Transcription
  misc_feature: MA Experiment 20000495 PARAMETER Experiment Name: At_Guard_Cells_P Parameter: Harvest Date Value: 8/2/2002
  misc_feature: MA Experiment 20000495 PARAMETER Experiment Name: At_Guard_Cells_P Parameter: Organism Value: A. thaliana
  misc_feature: MA Experiment 20000495 PARAMETER Experiment Name: At_Guard_Cells_P Parameter: Tissue Value: Guard Cells vs. Leaves
  misc_feature: MA Experiment ID: 20001558 Result: Up-regulated in Transcription
  misc_feature: MA Experiment 20001558 PARAMETER Experiment Name: At_Drought_Soil_Dry_P Parameter: Age (day) Value: 27
  misc_feature: MA Experiment 20001558 PARAMETER Experiment Name: At_Drought_Soil_Dry_P Parameter: Organism Value: A. thaliana
  misc_feature: MA Experiment 20001558 PARAMETER Experiment Name: At_Drought_Soil_Dry_P Parameter: Plant Line Value: WS
  misc_feature: MA Experiment 20001558 PARAMETER Experiment Name: At_Drought_Soil_Dry_P Parameter: Post Timepoint (hr) Value: 6
  misc_feature: MA Experiment 20001558 PARAMETER Experiment Name: At_Drought_Soil_Dry_P Parameter: Post-Treatment Value: Re-Water vs. No Drought
  misc_feature: MA Experiment 20001558 PARAMETER Experiment Name: At_Drought_Soil_Dry_P Parameter: Timepoint (day) Value: 13
  misc_feature: MA Experiment 20001558 PARAMETER Experiment Name: At_Drought_Soil_Dry_P Parameter: Treatment Value: Drought vs. No Drought
  misc_feature: MA Experiment ID: 20001757 Result: Up-regulated in Transcription
  misc_feature: MA Experiment 20001757 PARAMETER Experiment Name: At_50mM_NH4NO3_L-to-H_P Parameter: Timepoint (hr) Value: 6
  misc_feature: MA Experiment 20001757 PARAMETER Experiment Name: At_50mM_NH4NO3_L-to-H_P Parameter: Tissue Value: Leaf
  misc_feature: MA Experiment 20001757 PARAMETER Experiment Name: At_50mM_NH4NO3_L-to-H_P Parameter: Treatment Value: 50mM NH4NO3 vs 100mM Mannitol
agccagaattagggtttctctttgtcttcagcagtcagtgcgcatccgtaggagaaaagtgtgagaatctgccaccatgggtcgtatgcacagtcgaggaaagggtatttcagcctctgcgttgccttacaagagatcgtctccgagctggctcaagaccacctctcaggatgttgatgaatcaatctgcaaatttgccaaaaagggattgaccccttcccagattggtgtgattctccgtgactctcacggtatccctcaggtcaagagtgttactggaagcaagatcttgaggatactcaaagctcatggccttgctcctgagatccctgaggatctgtaccatctaattaagaaggctgttgccatccgtaaacatctcgagaggaacaggaaggacaaggattccaagttcaggctcatcttggttgagagcaggattcaccgcctcgctcgctattacaagaagaccaagaagctccctcccgtctggaagtacgaatccactaccgcgagcacccttgtggcttaagctggagtctggaggaggattctactagtctgttgcttcccttttgttttgatgaattctcaactttagtcttaatgtgtcagcaggatttttgtgtttgcctctcttttttttccggaatcttatgctcccttgtttaagagaatcgtatgatcttgaatttactattgaatatgcttttgcatcc

SEQ ID NO: 102831 - protein, 151 aa, Arabidopsis thaliana [sequence omitted]

SEQ ID NO: 102832 - protein, 148 aa, Arabidopsis thaliana; identical to SEQ ID NO: 26854
  peptide (1)..(148): Ceres Seq. ID no. 13611357
  misc_feature (1)..(148): Homolog of NCBI NO: 18411224 NR Description: 40S ribosomal protein S13 (RPS13B) [Arabidopsis
  misc_feature (1)..(148): Homolog of NCBI NO: 18411716 NR Description: 40S ribosomal protein S13 (RPS13A) [Arabidopsis
  misc_feature (1)..(148): Homolog of NCBI NO: 14190367 NR Description: AT3g60770/T4C21_180 [Arabidopsis thaliana]
  misc_feature (1)..(148): Homolog of NCBI NO: 7440402 NR Description: ribosomal protein S13, cytosolic - Arabidopsis >gi|3193323|gb|AAC19305.1| similar to ribosomal protein S13 S15.hmm, score: 78.35); identical to Arabidopsis 40S ribosomal
  misc_feature (1)..(148): Homolog of NCBI NO: 11276609 NR Description: ribosomal protein S13-like - Arabidopsis thaliana
  misc_feature (1)..(148): Homolog of NCBI NO: 8131699 NR Description: cytoplasmic ribosomal protein S13 [Panax ginseng]
  misc_feature (1)..(148): Homolog of NCBI NO: 1173198 NR Description: 40S RIBOSOMAL PROTEIN S13 >gi|480095|pir||S36423
  misc_feature (1)..(148): Homolog of NCBI NO: 464705 NR Description: 40S RIBOSOMAL PROTEIN S13 >gi|419802|pir||S30146
  misc_feature (1)..(148): Homolog of NCBI NO: 4506685 NR Description: ribosomal protein S13; 40S ribosomal protein S13 sapiens] >gi|13386034|ref|NP_080809.1| ribosomal protein S13 [Mus >gi|27660014|ref|XP_215019.1| ribosomal protein S13 [Rattus
  misc_feature (1)..(115): Homolog of NCBI NO: 34857390 NR Description: similar to Rps13 protein [Rattus norvegicus]

SEQ ID NO: 102833 - DNA, 1480 bp, Arabidopsis thaliana
  misc_feature (1)..(1480): Ceres Seq. ID no. 13611362
  misc_feature: MA Experiment ID: 20000180 Result: Up-regulated in Transcription
  misc_feature: MA Experiment 20000180 PARAMETER Experiment Name: At_Germinating_Seeds_P Parameter: Age (hr) Value: 24 vs. 0
  misc_feature: MA Experiment 20000180 PARAMETER Experiment Name: At_Germinating_Seeds_P Parameter: Tissue Value: Germinating Seeds
  misc_feature: MA Experiment ID: 20000185 Result: Down-regulated in Transcription
  misc_feature: MA Experiment 20000185 PARAMETER Experiment Name: At_Roots__P Parameter: Age (day) Value: 7 vs. 21
  misc_feature: MA Experiment 20000185 PARAMETER Experiment Name: At_Roots__P Parameter: Organism Value: A. thaliana
  misc_feature: MA Experiment 20000185 PARAMETER Experiment Name: At_Roots__P Parameter: Tissue Value: Roots vs. Whole Plant
  misc_feature: MA Experiment ID: 20000234 Result: Down-regulated in Transcription
  misc_feature: MA Experiment 20000234 PARAMETER Experiment Name: At_Siliques_P Parameter: Age (day) Value: 21
  misc_feature: MA Experiment 20000234 PARAMETER Experiment Name: At_Siliques_P Parameter: Organism Value: A. thaliana
  misc_feature: MA Experiment 20000234 PARAMETER Experiment Name: At_Siliques_P Parameter: Plant Line Value: WS
  misc_feature: MA Experiment 20000234 PARAMETER Experiment Name: At_Siliques_P Parameter: Tissue Value: Less Than 5mm Siliques vs. Whole Plant
  misc_feature: MA Experiment ID: 20000264 Result: Down-regulated in Transcription
  misc_feature: MA Experiment 20000264 PARAMETER Experiment Name: At_Open_Flower_P Parameter: Age (day) Value: 21
  misc_feature: MA Experiment 20000264 PARAMETER Experiment Name: At_Open_Flower_P Parameter: Plant Line Value: WS
  misc_feature: MA Experiment 20000264 PARAMETER Experiment Name: At_Open_Flower_P Parameter: Tissue Value: Open Flower vs. Whole Plant
  misc_feature: MA Experiment ID: 20000265 Result: Down-regulated in Transcription
  misc_feature: MA Experiment 20000265 PARAMETER Experiment Name: At_Open_Flower_P Parameter: Age (day) Value: 21
  misc_feature: MA Experiment 20000265 PARAMETER Experiment Name: At_Open_Flower_P Parameter: Plant Line Value: WS
  misc_feature: MA Experiment 20000265 PARAMETER Experiment Name: At_Open_Flower_P Parameter: Tissue Value: Closed Flower vs. Whole Plant
  misc_feature: MA Experiment ID: 20000438 Result: Down-regulated in Transcription
  misc_feature: MA Experiment 20000438 PARAMETER Experiment Name: At_Shoots__P Parameter: Age (day) Value: 14
  misc_feature: MA Experiment 20000438 PARAMETER Experiment Name: At_Shoots__P Parameter: Tissue Value: Shoots vs. Whole Plant
  misc_feature: MA Experiment ID: 20000439 Result: Down-regulated in Transcription
  misc_feature: MA Experiment 20000439 PARAMETER Experiment Name: At_Roots__P Parameter: Age (day) Value: 14 vs. 21
  misc_feature: MA Experiment 20000439 PARAMETER Experiment Name: At_Roots__P Parameter: Organism Value: A. thaliana
  misc_feature: MA Experiment 20000439 PARAMETER Experiment Name: At_Roots__P Parameter: Tissue Value: Roots vs. Whole Plant
  misc_feature: MA Experiment ID: 20000495 Result: Down-regulated in Transcription
  misc_feature: MA Experiment 20000495 PARAMETER Experiment Name: At_Guard_Cells_P Parameter: Harvest Date Value: 8/2/2002
  misc_feature: MA Experiment 20000495 PARAMETER Experiment Name: At_Guard_Cells_P Parameter: Organism Value: A. thaliana
  misc_feature: MA Experiment 20000495 PARAMETER Experiment Name: At_Guard_Cells_P Parameter: Tissue Value: Guard Cells vs. Leaves
  misc_feature: MA Experiment ID: 20000794 Result: Down-regulated in Transcription
  misc_feature: MA Experiment 20000794 PARAMETER Experiment Name: At_Petals_P Parameter: Age (day) Value: 23-25 days
  misc_feature: MA Experiment 20000794 PARAMETER Experiment Name: At_Petals_P Parameter: Plant Line Value: WS
  misc_feature: MA Experiment 20000794 PARAMETER Experiment Name: At_Petals_P Parameter: Tissue Value: Petals vs. Whole plant
  misc_feature: MA Experiment ID: 20001247 Result: Up-regulated in Transcription
  misc_feature: MA Experiment 20001247 PARAMETER Experiment Name: At_Far-red-induction_P Parameter: Age (day) Value: 7
  misc_feature: MA Experiment 20001247 PARAMETER Experiment Name: At_Far-red-induction_P Parameter: Light Value: Far-red vs. White
  misc_feature: MA Experiment 20001247 PARAMETER Experiment Name: At_Far-red-induction_P Parameter: Organism Value: A. thaliana
  misc_feature: MA Experiment 20001247 PARAMETER Experiment Name: At_Far-red-induction_P Parameter: Plant Line Value: Columbia
  misc_feature: MA Experiment 20001247 PARAMETER Experiment Name: At_Far-red-induction_P Parameter: Timepoint (hr) Value: 1
  misc_feature: MA Experiment 20001247 PARAMETER Experiment Name: At_Far-red-induction_P Parameter: Tissue Value: Whole Plant
  misc_feature: MA Experiment ID: 20001451 Result: Down-regulated in Transcription
  misc_feature: MA Experiment 20001451 PARAMETER Experiment Name: At_Far-red-induction_P Parameter: Age (day) Value: 7
  misc_feature: MA Experiment 20001451 PARAMETER Experiment Name: At_Far-red-induction_P Parameter: Light Value: Far-red vs. White
  misc_feature: MA Experiment 20001451 PARAMETER Experiment Name: At_Far-red-induction_P Parameter: Organism Value: A. thaliana
  misc_feature: MA Experiment 20001451 PARAMETER Experiment Name: At_Far-red-induction_P Parameter: Plant Line Value: Columbia
  misc_feature: MA Experiment 20001451 PARAMETER Experiment Name: At_Far-red-induction_P Parameter: Timepoint (hr) Value: 24
  misc_feature: MA Experiment 20001451 PARAMETER Experiment Name: At_Far-red-induction_P Parameter: Tissue Value: Whole Plant
  misc_feature: MA Experiment ID: 20001554 Result: Down-regulated in Transcription
  misc_feature: MA Experiment 20001554 PARAMETER Experiment Name: At_Drought_Soil_Dry_P Parameter: Age (day) Value: 21
  misc_feature: MA Experiment 20001554 PARAMETER Experiment Name: At_Drought_Soil_Dry_P Parameter: Organism Value: A. thaliana
  misc_feature: MA Experiment 20001554 PARAMETER Experiment Name: At_Drought_Soil_Dry_P Parameter: Plant Line Value: WS
  misc_feature: MA Experiment 20001554 PARAMETER Experiment Name: At_Drought_Soil_Dry_P Parameter: Post Timepoint (hr) Value: None
  misc_feature: MA Experiment 20001554 PARAMETER Experiment Name: At_Drought_Soil_Dry_P Parameter: Post-Treatment Value: None
  misc_feature: MA Experiment 20001554 PARAMETER Experiment Name: At_Drought_Soil_Dry_P Parameter: Timepoint (day) Value: 7
  misc_feature: MA Experiment 20001554 PARAMETER Experiment Name: At_Drought_Soil_Dry_P Parameter: Treatment Value: Drought vs. No Drought
  misc_feature: MA Experiment ID: 20001555 Result: Down-regulated in Transcription
  misc_feature: MA Experiment 20001555 PARAMETER Experiment Name: At_Drought_Soil_Dry_P Parameter: Age (day) Value: 24
  misc_feature: MA Experiment 20001555 PARAMETER Experiment Name: At_Drought_Soil_Dry_P Parameter: Organism Value: A. thaliana
  misc_feature: MA Experiment 20001555 PARAMETER Experiment Name: At_Drought_Soil_Dry_P Parameter: Plant Line Value: WS
  misc_feature: MA Experiment 20001555 PARAMETER Experiment Name: At_Drought_Soil_Dry_P Parameter: Post Timepoint (hr) Value: None
  misc_feature: MA Experiment 20001555 PARAMETER Experiment Name: At_Drought_Soil_Dry_P Parameter: Post-Treatment Value: None
  misc_feature: MA Experiment 20001555 PARAMETER Experiment Name: At_Drought_Soil_Dry_P Parameter: Timepoint (day) Value: 10
  misc_feature: MA Experiment 20001555 PARAMETER Experiment Name: At_Drought_Soil_Dry_P Parameter: Treatment Value: Drought vs. No Drought
  misc_feature: MA Experiment ID: 20001556 Result: Down-regulated in Transcription
  misc_feature: MA Experiment 20001556 PARAMETER Experiment Name: At_Drought_Soil_Dry_P Parameter: Age (day) Value: 26
  misc_feature: MA Experiment 20001556 PARAMETER Experiment Name: At_Drought_Soil_Dry_P Parameter: Organism Value: A. thaliana
  misc_feature: MA Experiment 20001556 PARAMETER Experiment Name: At_Drought_Soil_Dry_P Parameter: Plant Line Value: WS
  misc_feature: MA Experiment 20001556 PARAMETER Experiment Name: At_Drought_Soil_Dry_P Parameter: Post Timepoint (hr) Value: None
  misc_feature: MA Experiment 20001556 PARAMETER Experiment Name: At_Drought_Soil_Dry_P Parameter: Post-Treatment Value: None
  misc_feature: MA Experiment 20001556 PARAMETER Experiment Name: At_Drought_Soil_Dry_P Parameter: Timepoint (day) Value: 12
  misc_feature: MA Experiment 20001556 PARAMETER Experiment Name: At_Drought_Soil_Dry_P Parameter: Treatment Value: Drought vs. No Drought
  misc_feature: MA Experiment ID: 20001904 Result: Down-regulated in Transcription
  misc_feature: MA Experiment 20001904 PARAMETER Experiment Name: At_Drought_Reproduction_P Parameter: Age (day) Value: 37
  misc_feature: MA Experiment 20001904 PARAMETER Experiment Name: At_Drought_Reproduction_P Parameter: Organism Value: A. thaliana
  misc_feature: MA Experiment 20001904 PARAMETER Experiment Name: At_Drought_Reproduction_P Parameter: Plant Line Value: WS
  misc_feature: MA Experiment 20001904 PARAMETER Experiment Name: At_Drought_Reproduction_P Parameter: Timepoint (day) Value: 7
  misc_feature: MA Experiment 20001904 PARAMETER Experiment Name: At_Drought_Reproduction_P Parameter: Tissue Value: Rosettes
  misc_feature: MA Experiment 20001904 PARAMETER Experiment Name: At_Drought_Reproduction_P Parameter: Treatment Value: Drought vs. No Drought
  misc_feature: MA Experiment ID: 20001906 Result: Down-regulated in Transcription
  misc_feature: MA Experiment 20001906 PARAMETER Experiment Name: At_Drought_Reproduction_P Parameter: Age (day) Value: 35
  misc_feature: MA Experiment 20001906 PARAMETER Experiment Name: At_Drought_Reproduction_P Parameter: Organism Value: A. thaliana
  misc_feature: MA Experiment 20001906 PARAMETER Experiment Name: At_Drought_Reproduction_P Parameter: Plant Line Value: WS
  misc_feature: MA Experiment 20001906 PARAMETER Experiment Name: At_Drought_Reproduction_P Parameter: Timepoint (day) Value: 5
  misc_feature: MA Experiment 20001906 PARAMETER Experiment Name: At_Drought_Reproduction_P Parameter: Tissue Value: Siliques
  misc_feature: MA Experiment 20001906 PARAMETER Experiment Name: At_Drought_Reproduction_P Parameter: Treatment Value: Drought vs. No Drought
aaattcgacgactgcaaaaatttgtgctaatctttccacgacaatggcgatcctctacacaagaatcgtattccttctcttcgtcttccttgtatcttcttctgcatttgcctctttctctcctgtcgacgagtacctcgtcaactgcggctccgacgttgactccaccgtcgataaccgccgcttcgtcggcgacgcatcgtcatcaaacgtccaattcttctcctctgaaggatcaatcgctctcaaaggagaaaatctacctcagaacgttccccaaatctacagaaccgctaggatattcgcacaacaagcgaaatacaagttcaatgtcaacgagaaagggactcatatggtacgtctccatttcaatcgtctctattcctctagaatcgatctcaatgacgctctatttcacgttaccgttaacggtcacgtcgtcctaaggaattttagcggcgactcgtcatctgattttgaatctagggttagagaattcttgatttgggttgatgttggagaggttgttattaggtttgttcctagtaaagattcgaactttgcattcgttaatgctattgaagttatctctgcgcctaaggatttgattggtgacgttgcaacctctgtatctcatgatgggactgagaaattcaatggtttagctaaacaagcaatggaggttgtgtatagagtcaatgttggtggtagaaaagttactccttttaatgacacattgtggaggacttgggttactgatgaaggattcttgaaaaccggtgatgggtcgtctgagaaaagttacttcaccgggaggattaagtataggcgtggaggggcgagtcgtgaagttggtcctgataatgtttacaacactgctcgtgttggtaaaagaagcaatggattggttgatatgagttggggtttcaaggtgaatgtgggttacaagtatctcatccggatgcatttctgtgacatagctagcaaatctctcggcaggctttatttcaatgtctacattaacgggaacttggcgtatgaagatttcgatatctcatacgctgcggataatgtccttgcttctccgtattacattgatttcgtggtggatgctactgctgatgacaacaacccttcaggatcgtcgataaccgttagtgttggaccatcaaacaagactagtgttgatggaaatggagtggatgcgatattgaacggtgttgagatcatgaagatgaataactcgatgggtagtcttgatgggtatgtttcaacagagatgattctgagtacttgcccaaataggagaaacctgagcatatttatcgcaatgttggcgtttatgtgtatatttatgagcttctacattgtgactcaaagaaagagagttaaggatcagtatggctggacaaagctgtccatggacgtgcttgaagataattccaagtcagggaatcaatttacagcaagaaaggcttga

SEQ ID NO: 102834 - protein, 492 aa, Arabidopsis thaliana
  peptide (1)..(492): Ceres Seq. ID no. 13611363
  misc_feature (174)..(492): Homolog of NCBI NO: 18411279 NR Description: fringe-related protein [Arabidopsis thaliana]
  misc_feature (15)..(332): Homolog of NCBI NO: 24417422 NR Description: unknown [Arabidopsis thaliana]
  misc_feature (25)..(483): Homolog of NCBI NO: 15237872 NR Description: protein kinase family [Arabidopsis thaliana]
  misc_feature (14)..(421): Homolog of NCBI NO: 15234944 NR Description: protein kinase family [Arabidopsis thaliana]
  misc_feature (39)..(488): Homolog of NCBI NO: 15231393 NR Description: protein kinase, putative [Arabidopsis thaliana]
  misc_feature (15)..(421): Homolog of NCBI NO: 15226565 NR Description: protein kinase family [Arabidopsis thaliana]
  misc_feature (23)..(471): Homolog of NCBI NO: 15240228 NR Description: rprotein kinase family [Arabidopsis thaliana]
  misc_feature (24)..(488): Homolog of NCBI NO: 15238498 NR Description: protein kinase, putative [Arabidopsis thaliana]
  misc_feature (18)..(471): Homolog of NCBI NO: 14488367 NR Description: putative protein kinase [Oryza sativa (japonica
  misc_feature (15)..(424): Homolog of NCBI NO: 24796812 NR Description: putative receptor-like protein kinase [Oryza
NSTTAKICANLSTTMAILYTRIVFLLFVFLVSSSAFASFSPVDEYLVNCGSDVDSTVDNRRFVGDASSSNVQFFSSEGSIALKGENLPQNVPQIYRTARIFAQQAKYKFNVNEKGTHMVRLHFNRLYSSRIDLNDALFHVTVNGHVVLRNFSGDSSSDFESRVREFLIWVDVGEVVIRFVPSKDSNFAFVNAIEVISAPKDLIGDVATSVSHDGTEKFNGLAKQAMEVVYRVNVGGRKVTPFNDTLWRTWVTDEGFLKTGDGSSEKSYFTGRIKYRRGGASREVGPDNVYNTARVGKRSNGLVDMSWGFKVNVGYKYLIRMHFCDIASKSLGRLYFNVYINGNLAYEDFDISYAADNVLASPYYIDFVVDATADDNNPSGSSITVSVGPSNKTSVDGNGVDAILNGVEIMKMNNSMGSLDGYVSTEMILSTCPNRRNLSIFIAMLAFMCIFMSFYIVTQRKRVKDQYGWTKLSMDVLEDNSKSGNQFTARKA

SEQ ID NO: 102835 - protein, 478 aa, Arabidopsis thaliana
  peptide (1)..(478): Ceres Seq. ID no. 13611364
  misc_feature (160)..(478): Homolog of NCBI NO: 18411279 NR Description: fringe-related protein [Arabidopsis thaliana]
  misc_feature (1)..(318): Homolog of NCBI NO: 24417422 NR Description: unknown [Arabidopsis thaliana]
  misc_feature (11)..(469): Homolog of NCBI NO: 15237872 NR Description: protein kinase family [Arabidopsis thaliana]
  misc_feature (1)..(407): Homolog of NCBI NO: 15234944 NR Description: protein kinase family [Arabidopsis thaliana]
  misc_feature (25)..(474): Homolog of NCBI NO: 15231393 NR Description: protein kinase, putative [Arabidopsis thaliana]
  misc_feature (1)..(407): Homolog of NCBI NO: 15226565 NR Description: protein kinase family [Arabidopsis thaliana]
  misc_feature (9)..(457): Homolog of NCBI NO: 15240228 NR Description: rprotein kinase family [Arabidopsis thaliana]
  misc_feature (10)..(474): Homolog of NCBI NO: 15238498 NR Description: protein kinase, putative [Arabidopsis thaliana]
  misc_feature (4)..(457): Homolog of NCBI NO: 14488367 NR Description: putative protein kinase [Oryza sativa (japonica
  misc_feature (1)..(410): Homolog of NCBI NO: 24796812 NR Description: putative receptor-like protein kinase [Oryza
MAILYTRIVFLLFVFLVSSSAFASFSPVDEYLVNCGSDVDSTVDNRRFVGDASSSNVQFFSSEGSIALKGENLPQNVPQIYRTARIFAQQAKYKFNVNEKGTHMVRLHFNRLYSSRIDLNDALFHVTVNGHVVLRNFSGDSSSDFESRVREFLIWVDVGEVVIRFVPSKDSNFAFVNAIEVISAPKDLIGDVATSVSHDGTEKFNGLAKQAMEVVYRVNVGGRKVTPFNDTLWRTWVTDEGFLKTGDGSSEKSYFTGRIKYRRGGASREVGPDNVYNTARVGKRSNGLVDMSWGFKVNVGYKYLIRMHFCDIASKSLGRLYFNVYINGNLAYEDFDISYAADNVLASPYYIDFVVDATADDNNPSGSSITVSVGPSNKTSVDGNGVDAILNGVEIMKMNNSMGSLDGYVSTEMILSTCPNRRNLSIFIAMLAFMCIFMSFYIVTQRKRVKDQYGWTKLSMDVLEDNSKSGNQFTARKA

SEQ ID NO: 102836 - protein, 375 aa, Arabidopsis thaliana
  peptide (1)..(375): Ceres Seq. ID no. 13611365
  misc_feature (57)..(375): Homolog of NCBI NO: 18411279 NR Description: fringe-related protein [Arabidopsis thaliana]
  misc_feature (1)..(215): Homolog of NCBI NO: 24417422 NR Description: unknown [Arabidopsis thaliana]
  misc_feature (1)..(366): Homolog of NCBI NO: 15237872 NR Description: protein kinase family [Arabidopsis thaliana]
  misc_feature (1)..(304): Homolog of NCBI NO: 15234944 NR Description: protein kinase family [Arabidopsis thaliana]
  misc_feature (1)..(371): Homolog of NCBI NO: 15231393 NR Description: protein kinase, putative [Arabidopsis thaliana]
  misc_feature (1)..(304): Homolog of NCBI NO: 15226565 NR Description: protein kinase family [Arabidopsis thaliana]
  misc_feature (1)..(354): Homolog of NCBI NO: 15240228 NR Description: rprotein kinase family [Arabidopsis thaliana]
  misc_feature (1)..(371): Homolog of NCBI NO: 15238498 NR Description: protein kinase, putative [Arabidopsis thaliana]
  misc_feature (1)..(354): Homolog of NCBI NO: 14488367 NR Description: putative protein kinase [Oryza sativa (japonica
  misc_feature (1)..(307): Homolog of NCBI NO: 24796812 NR Description: putative receptor-like protein kinase [Oryza
MVRLHFNRLYSSRIDLNDALFHVTVNGHVVLRNFSGDSSSDFESRVREFLIWVDVGEVVIRFVPSKDSNFAFVNAIEVISAPKDLIGDVATSVSHDGTEKFNGLAKQAMEVVYRVNVGGRKVTPFNDTLWRTWVTDEGFLKTGDGSSEKSYFTGRIKYRRGGASREVGPDNVYNTARVGKRSNGLVDMSWGFKVNVGYKYLIRMHFCDIASKSLGRLYFNVYINGNLAYEDFDISYAADNVLASPYYIDFVVDATADDNNPSGSSITVSVGPSNKTSVDGNGVDAILNGVEIMKMNNSMGSLDGYVSTEMILSTCPNRRNLSIFIAMLAFMCIFMSFYIVTQRKRVKDQYGWTKLSMDVLEDNSKSGNQFTARKA

SEQ ID NO: 102837 - DNA, 2199 bp, Arabidopsis thaliana
  misc_feature (1)..(2199): Ceres Seq. ID no. 13611377
  misc_feature: MA Experiment ID: 20000180 Result: Up-regulated in Transcription
  misc_feature: MA Experiment 20000180 PARAMETER Experiment Name: At_Germinating_Seeds_P Parameter: Age (hr) Value: 24 vs. 0
  misc_feature: MA Experiment 20000180 PARAMETER Experiment Name: At_Germinating_Seeds_P Parameter: Tissue Value: Germinating Seeds
  misc_feature: MA Experiment ID: 20001451 Result: Down-regulated in Transcription
  misc_feature: MA Experiment 20001451 PARAMETER Experiment Name: At_Far-red-induction_P Parameter: Age (day) Value: 7
  misc_feature: MA Experiment 20001451 PARAMETER Experiment Name: At_Far-red-induction_P Parameter: Light Value: Far-red vs. White
  misc_feature: MA Experiment 20001451 PARAMETER Experiment Name: At_Far-red-induction_P Parameter: Organism Value: A. thaliana
  misc_feature: MA Experiment 20001451 PARAMETER Experiment Name: At_Far-red-induction_P Parameter: Plant Line Value: Columbia
  misc_feature: MA Experiment 20001451 PARAMETER Experiment Name: At_Far-red-induction_P Parameter: Timepoint (hr) Value: 24
  misc_feature: MA Experiment 20001451 PARAMETER Experiment Name: At_Far-red-induction_P Parameter: Tissue Value: Whole Plant
gagaagaggaggagaacacaaatccaattcacactggaaactgttgggtcggatcctgagtgatatttcgagaccgatgatgtggaagaacattgctgggttgtcgaaggcagcggcagcggcaagaacacacggatctcggcggtgcttttccacagcgattcctggtccttgcatcgtccacaagcgtggtgctgatattcttcacgatccatggttcaataaggacacaggttttcctttgactgagagagatagattagggatacgaggcttgcttcctcctcgtgttatgacctgtgtacagcaatgtgatcgtttcattgagtcgtttcgttcgctagagaacaacacaaaaggagagcctgaaaacgttgttgcattagctaaatggaggatgttgaatagattgcatgaccgtaatgagactttgtactaccgagttcttattgataacatcaaagattttgcccccattatatacactcctacggttggacttgtttgtcagaactattctggtttgtatagaagaccaagaggaatgtacttcagcgccaaagacaaaggagagatgatgtctatgatttataactggcctgctccgcaggtagatatgattgtcatcactgatggtagccgtattttgggcttaggagaccttggagtacagggaattgggattcctattggaaagctcgacatgtatgtcgctgctgcaggaatcaatccacagagagttttgccaattatgttggatgtaggcacaaataatgaaaagctcctacagaatgatctctatttaggagtcagacaacctaggttggaaggagaggagtaccttgagattattgatgaatttatggaagctgcatttacacgttggccaaaggccgtcgtacagttcgaagatttccaagcgaaatgggctttcggaacattggaaagatatcggaagaaattttgcatgttcaatgatgatgtccagggaactgctggtgttgcactggctggactattgggaactgtaagagctcaaggtcggccgatatccgactttgtgaaccaaaagattgttgtggtgggagctggaagtgctgggcttggtgtaactaagatggcagtacaggcagttgccagaatggcaggtatcagcgagagtgaagcaacaaaaaacttttacctgatagataaagatggtcttgtcaccacggagaggacaaaacttgacccaggagctgtactttttgccaaaaatccagctgagatacgcgagggagcaagtatcgttgaagtggtgaagaaagtgaggccacatgttcttcttggtttatctggagttggtggtatctttaatgaagaagttctcaaggcgatgcgagaatctgactcatgcaagcctgccatttttgccatgtcgaatcccactttgaatgccgagtgcactgctgctgatgctttcaaacacgccggaggaaacattgtctttgcaagtggaagtccatttgagaacgttgaacttgagaatggtaaagtaggacatgtgaatcaggctaacaacatgtatttattcccggggatcgggctagggactcttctctctggtgcacgtatcgtaactgatggaatgctacaagcagcttctgaatgccttgcgtcctacatgaccgatgaagaagtccaaaaaggcatcctttacccttcaatcaacaacatccgacacataacagctgaagtcggggcagctgttctacgagctgcggtgactgatgacattgcagaaggacatggtgatgttggtcccaaagatctcagccacatgtctaaggaggatacagtgaattacattacacgcaacatgtggttccctgtttacagccctctcgttcacgagaaatagacaacaactctatataactcttctcaggtttcatagaaagccaaaagacaaaaaatcttcgcttcatcttttatttgtgatcaacattctttttttcttcaaaatgtgatatgttttaagaaaaacaatgccaaaaagagggcttaagaacaagaacagggttagttctaggtcaacctgtacttttcctttttttttttggacatttttccaacttcttacgattatttctgatgataatgattacaactttatatactgttttggcaataataagccaataatgatatctttcttct

SEQ ID NO: 102838 - protein, 632 aa, Arabidopsis thaliana
  peptide (1)..(632): Ceres Seq. ID no. 13611378
  misc_feature (328)..(588): Pfam Name: Malic enzyme, NAD binding domain Pfam Description: Malic enzyme, NAD binding domain
  misc_feature (37)..(631): Homolog of NCBI NO: 585452 NR Description: NAD-DEPENDENT MALIC ENZYME 59 KDA ISOFORM,
  misc_feature (53)..(549): Homolog of NCBI NO: 37535816 NR Description: putative mitochondrial NAD+-dependent malic
  misc_feature (48)..(632): Homolog of NCBI NO: 34393731 NR Description: putative malate dehydrogenase [Oryza sativa
  misc_feature (36)..(632): Homolog of NCBI NO: 585451 NR Description: NAD-DEPENDENT MALIC ENZYME 62 KDA ISOFORM,
  misc_feature (48)..(631): Homolog of NCBI NO: 15225438 NR Description: malate oxidoreductase (malic enzyme), putative thaliana] >gi|25283678|pir||E84508 malate oxidoreductase (malic
  misc_feature (46)..(632): Homolog of NCBI NO: 585450 NR Description: NAD-DEPENDENT MALIC ENZYME 65 KDA ISOFORM,
  misc_feature (333)..(632): Homolog of NCBI NO: 8894554 NR Description: NAD-dependent malic enzyme (malate
  misc_feature (67)..(595): Homolog of NCBI NO: 27381580 NR Description: malic enzyme [Bradyrhizobium japonicum]
  misc_feature (19)..(629): Homolog of NCBI NO: 1698596 NR Description: malic enzyme precursor [Neocallimastix frontalis]
  misc_feature (62)..(614): Homolog of NCBI NO: 126732 NR Description: NAD-DEPENDENT MALIC ENZYME, MITOCHONDRIAL
RRGGEHKSNSHWKLLGRILSDISRPMMWKNIAGLSKAAAAARTHGSRRCFSTAIPGPCIVHKRGADILHDPWFNKDTGFPLTERDRLGIRGLLPPRVMTCVQQCDRFIESFRSLENNTKGEPENVVALAKWRMLNRLHDRNETLYYRVLIDNIKDFAPIIYTPTVGLVCQNYSGLYRRPRGMYFSAKDKGEMMSMIYNWPAPQVDMIVITDGSRILGLGDLGVQGIGIPIGKLDMYVAAAGINPQRVLPIMLDVGTNNEKLLQNDLYLGVRQPRLEGEEYLEIIDEFMEAAFTRWPKAVVQFEDFQAKWAFGTLERYRKKFCMFNDDVQGTAGVALAGLLGTVRAQGRPISDFVNQKIVVVGAGSAGLGVTKMAVQAVARMAGISESEATKNFYLIDKDGLVTTERTKLDPGAVLFAKNPAEIREGASIVEVVKKVRPHVLLGLSGVGGIFNEEVLKAMRESDSCKPAIFAMSNPTLNAECTAADAFKHAGGNIVFASGSPFENVELENGKVGHVNQANNMYLFPGIGLGTLLSGARIVTDGMLQAASECLASYMTDEEVQKGILYPSINNIRHITAEVGAAVLRAAVTDDIAEGHGDVGPKDLSHMSKEDTVNYITRNMWFPVYSPLVHEK

SEQ ID NO: 102839 - protein, 607 aa, Arabidopsis thaliana
  peptide (1)..(607): Ceres Seq. ID no. 13611379
  misc_feature (303)..(563): Pfam Name: Malic enzyme, NAD binding domain Pfam Description: Malic enzyme, NAD binding domain
  misc_feature (12)..(606): Homolog of NCBI NO: 585452 NR Description: NAD-DEPENDENT MALIC ENZYME 59 KDA ISOFORM,
  misc_feature (28)..(524): Homolog of NCBI NO: 37535816 NR Description: putative mitochondrial NAD+-dependent malic
  misc_feature (23)..(607): Homolog of NCBI NO: 34393731 NR Description: putative malate dehydrogenase [Oryza sativa
  misc_feature (11)..(607): Homolog of NCBI NO: 585451 NR Description: NAD-DEPENDENT MALIC ENZYME 62 KDA ISOFORM,
  misc_feature (23)..(606): Homolog of NCBI NO: 15225438 NR Description: malate oxidoreductase (malic enzyme), putative thaliana] >gi|25283678|pir||E84508 malate oxidoreductase (malic
  misc_feature (21)..(607): Homolog of NCBI NO: 585450 NR Description: NAD-DEPENDENT MALIC ENZYME 65 KDA ISOFORM,
  misc_feature (308)..(607): Homolog of NCBI NO: 8894554 NR Description: NAD-dependent malic enzyme (malate
  misc_feature (42)..(570): Homolog of NCBI NO: 27381580 NR Description: malic enzyme [Bradyrhizobium japonicum]
  misc_feature (1)..(604): Homolog of NCBI NO: 1698596 NR Description: malic enzyme precursor [Neocallimastix frontalis]
  misc_feature (37)..(589): Homolog of NCBI NO: 126732 NR Description: NAD-DEPENDENT MALIC ENZYME, MITOCHONDRIAL
MMWKNIAGLSKAAAAARTHGSRRCFSTAIPGPCIVHKRGADILHDPWFNKDTGFPLTERDRLGIRGLLPPRVMTCVQQCDRFIESFRSLENNTKGEPENVVALAKWRMLNRLHDRNETLYYRVLIDNIKDFAPIIYTPTVGLVCQNYSGLYRRPRGMYFSAKDKGEMMSMIYNWPAPQVDMIVITDGSRILGLGDLGVQGIGIPIGKLDMYVAAAGINPQRVLPIMLDVGTNNEKLLQNDLYLGVRQPRLEGEEYLEIIDEFMEAAFTRWPKAVVQFEDFQAKWAFGTLERYRKKFCMFNDDVQGTAGVALAGLLGTVRAQGRPISDFVNQKIVVVGAGSAGLGVTKMAVQAVARMAGISESEATKNFYLIDKDGLVTTERTKLDPGAVLFAKNPAEIREGASIVEVVKKVRPHVLLGLSGVGGIFNEEVLKAMRESDSCKPAIFAMSNPTLNAECTAADAFKHAGGNIVFASGSPFENVELENGKVGHVNQANNMYLFPGIGLGTLLSGARIVTDGMLQAASECLASYMTDEEVQKGILYPSINNIRHITAEVGAAVLRAAVTDDIAEGHGDVGPKDLSHMSKEDTVNYITRNMWFPVYSPLVHEK

SEQ ID NO: 102840 - protein, 606 aa, Arabidopsis thaliana
  peptide (1)..(606): Ceres Seq. ID no. 13611380
  misc_feature (302)..(562): Pfam Name: Malic enzyme, NAD binding domain Pfam Description: Malic enzyme, NAD binding domain
  misc_feature (11)..(605): Homolog of NCBI NO: 585452 NR Description: NAD-DEPENDENT MALIC ENZYME 59 KDA ISOFORM,
  misc_feature (27)..(523): Homolog of NCBI NO: 37535816 NR Description: putative mitochondrial NAD+-dependent malic
  misc_feature (22)..(606): Homolog of NCBI NO: 34393731 NR Description: putative malate dehydrogenase [Oryza sativa
  misc_feature (10)..(606): Homolog of NCBI NO: 585451 NR Description: NAD-DEPENDENT MALIC ENZYME 62 KDA ISOFORM,
  misc_feature (22)..(605): Homolog of NCBI NO: 15225438 NR Description: malate oxidoreductase (malic enzyme), putative thaliana] >gi|25283678|pir||E84508 malate oxidoreductase (malic
  misc_feature (20)..(606): Homolog of NCBI NO: 585450 NR Description: NAD-DEPENDENT MALIC ENZYME 65 KDA ISOFORM,
  misc_feature (307)..(606): Homolog of NCBI NO: 8894554 NR Description: NAD-dependent malic enzyme (malate
  misc_feature (41)..(569): Homolog of NCBI NO: 27381580 NR Description: malic enzyme [Bradyrhizobium japonicum]
  misc_feature (1)..(603): Homolog of NCBI NO: 1698596 NR Description: malic enzyme precursor [Neocallimastix frontalis]
  misc_feature (36)..(588): Homolog of NCBI NO: 126732 NR Description: NAD-DEPENDENT MALIC ENZYME, MITOCHONDRIAL
MWKNIAGLSKAAAAARTHGSRRCFSTAIPGPCIVHKRGADILHDPWFNKDTGFPLTERDRLGIRGLLPPRVMTCVQQCDRFIESFRSLENNTKGEPENVVALAKWRMLNRLHDRNETLYYRVLIDNIKDFAPIIYTPTVGLVCQNYSGLYRRPRGMYFSAKDKGEMMSMIYNWPAPQVDMIVITDGSRILGLGDLGVQGIGIPIGKLDMYVAAAGINPQRVLPIMLDVGTNNEKLLQNDLYLGVRQPRLEGEEYLEIIDEFMEAAFTRWPKAVVQFEDFQAKWAFGTLERYRKKFCMFNDDVQGTAGVALAGLLGTVRAQGRPISDFVNQKIVVVGAGSAGLGVTKMAVQAVARMAGISESEATKNFYLIDKDGLVTTERTKLDPGAVLFAKNPAEIREGASIVEVVKKVRPHVLLGLSGVGGIFNEEVLKAMRESDSCKPAIFAMSNPTLNAECTAADAFKHAGGNIVFASGSPFENVELENGKVGHVNQANNMYLFPGIGLGTLLSGARIVTDGMLQAASECLASYMTDEEVQKGILYPSINNIRHITAEVGAAVLRAAVTDDIAEGHGDVGPKDLSHMSKEDTVNYITRNMWFPVYSPLVHEK

SEQ ID NO: 102841 - DNA, 1042 bp, Arabidopsis thaliana
  misc_feature (1)..(1042): Ceres Seq. ID no. 13611381
  misc_feature: MA Experiment ID: 20000235 Result: Down-regulated in Transcription
  misc_feature: MA Experiment 20000235 PARAMETER Experiment Name: At_Siliques_P Parameter: Age (day) Value: 21
  misc_feature: MA Experiment 20000235 PARAMETER Experiment Name: At_Siliques_P Parameter: Organism Value: A. thaliana
  misc_feature: MA Experiment 20000235 PARAMETER Experiment Name: At_Siliques_P Parameter: Plant Line Value: WS
  misc_feature: MA Experiment 20000235 PARAMETER Experiment Name: At_Siliques_P Parameter: Tissue Value: 5-10mm Siliques vs. Whole Plant
  misc_feature: MA Experiment ID: 20000264 Result: Up-regulated in Transcription
  misc_feature: MA Experiment 20000264 PARAMETER Experiment Name: At_Open_Flower_P Parameter: Age (day) Value: 21
  misc_feature: MA Experiment 20000264 PARAMETER Experiment Name: At_Open_Flower_P Parameter: Plant Line Value: WS
  misc_feature: MA Experiment 20000264 PARAMETER Experiment Name: At_Open_Flower_P Parameter: Tissue Value: Open Flower vs. Whole Plant
  misc_feature: MA Experiment ID: 20000265 Result: Up-regulated in Transcription
  misc_feature: MA Experiment 20000265 PARAMETER Experiment Name: At_Open_Flower_P Parameter: Age (day) Value: 21
  misc_feature: MA Experiment 20000265 PARAMETER Experiment Name: At_Open_Flower_P Parameter: Plant Line Value: WS
  misc_feature: MA Experiment 20000265 PARAMETER Experiment Name: At_Open_Flower_P Parameter: Tissue Value: Closed Flower vs. Whole Plant
  misc_feature: MA Experiment ID: 20000286 Result: Up-regulated in Transcription
  misc_feature: MA Experiment 20000286 PARAMETER Experiment Name: At_Open_Flower_P Parameter: Age (day) Value: 21
  misc_feature: MA Experiment 20000286 PARAMETER Experiment Name: At_Open_Flower_P Parameter: Plant Line Value: WS
  misc_feature: MA Experiment 20000286 PARAMETER Experiment Name: At_Open_Flower_P Parameter: Tissue Value: Half Open vs. Whole Plant
  misc_feature: MA Experiment ID: 20000438 Result: Down-regulated in Transcription
  misc_feature: MA Experiment 20000438 PARAMETER Experiment Name: At_Shoots__P Parameter: Age (day) Value: 14
  misc_feature: MA Experiment 20000438 PARAMETER Experiment Name: At_Shoots__P Parameter: Tissue Value: Shoots vs. Whole Plant
  misc_feature: MA Experiment ID: 20000794 Result: Up-regulated in Transcription
  misc_feature: MA Experiment 20000794 PARAMETER Experiment Name: At_Petals_P Parameter: Age (day) Value: 23-25 days
  misc_feature: MA Experiment 20000794 PARAMETER Experiment Name: At_Petals_P Parameter: Plant Line Value: WS
  misc_feature: MA Experiment 20000794 PARAMETER Experiment Name: At_Petals_P Parameter: Tissue Value: Petals vs. Whole plant
  misc_feature: MA Experiment ID: 20001910 Result: Down-regulated in Transcription
  misc_feature: MA Experiment 20001910 PARAMETER Experiment Name: At_Drought_Reproduction_P Parameter: Age (day) Value: 37
  misc_feature: MA Experiment 20001910 PARAMETER Experiment Name: At_Drought_Reproduction_P Parameter: Organism Value: A. thaliana
  misc_feature: MA Experiment 20001910 PARAMETER Experiment Name: At_Drought_Reproduction_P Parameter: Plant Line Value: WS
  misc_feature: MA Experiment 20001910 PARAMETER Experiment Name: At_Drought_Reproduction_P Parameter: Timepoint (day) Value: 7
  misc_feature: MA Experiment 20001910 PARAMETER Experiment Name: At_Drought_Reproduction_P Parameter: Tissue Value: Flowers
  misc_feature: MA Experiment 20001910 PARAMETER Experiment Name: At_Drought_Reproduction_P Parameter: Treatment Value: Drought vs. No Drought
aaatagccttcgcttgtaaaataaaagtttgaatatttaaaccagaaagctaagtagagaggttgtgatgggtctgcaaacatggatatgcttcacactattctcaattttcttcttcctcctcttactatcagttttctcgtcctattttacccattttatctttttaccaaacttatgagttgtcttaagcaccttcactttgaaaacgttactgggaaagtagttctaatcaccggagcttcctccggcatcggagagcatgtggcatacgagtacgcaaagaaaggagcaaaattagctcttgttgctcgaagaaaggatcgtctagagattgtagcagaaacatcacgtcaattaggatctggcgatgtcatcatcatacctggtgatgtttctaatgttgaggactgcaagaagttcatcgacgaaacgattcatcatttcggaaaactggaccacctgatcaacaatgctggagtacctcaaactgttatattcgaagatttcacacaaattcaagacgctaattctataatggatatcaacttttggggctcaacgtacatcacttattttgctattcctcatcttcgaaaaagcaaaggaaaaattgttgtgatttcttctgctacggcaattatacctttgcaagcggcaagcgtctattcagcaagcaaagcagctttagtaaaattctttgaaacattaagagttgagatcagtcccgatatcaaaataacaatcgctcttcccggatttatatctacggatatgaccactcctcagtttaaagaaatgtatggttcagatttcatactttcggaatcagtgagtcgatgcgcaaaagcgatcttcagaggtattggtagaggagaggcatacgtcatagagccatcttggataaaatggatctttttgataaaaaatgtttgtcctgagatcgttgactacttactcgactatatatttgttagttatctaaaaccttatttcaagcgtgattgatcatatcgatctatccaagttctctctggttttc

SEQ ID NO: 102842 - protein, 308 aa, Arabidopsis thaliana
  peptide (1)..(308): Ceres Seq. ID no. 13611382
  misc_feature (1)..(308): Homolog of NCBI NO: 15232777 NR Description: short-chain dehydrogenase/reductase family protein
  misc_feature (1)..(308): Homolog of NCBI NO: 15232779 NR Description: short-chain dehydrogenase/reductase family protein
  misc_feature (1)..(289): Homolog of NCBI NO: 15241203 NR Description: short-chain dehydrogenase/reductase family protein
  misc_feature (1)..(289): Homolog of NCBI NO: 8777392 NR Description: 11-beta-hydroxysteroid dehydrogenase-like
  misc_feature (1)..(299): Homolog of NCBI NO: 15824408 NR Description: steroleosin [Sesamum indicum]
  misc_feature (1)..(291): Homolog of NCBI NO: 18423187 NR Description: short-chain dehydrogenase/reductase family protein
  misc_feature (1)..(305): Homolog of NCBI NO: 15241261 NR Description: short-chain dehydrogenase/reductase family [Arabidopsis thaliana] >gi|8777400|dbj|BAA96990.1| contains
  misc_feature (1)..(299): Homolog of NCBI NO: 21311775 NR Description: steroleosin-B [Sesamum indicum]
  misc_feature (1)..(289): Homolog of NCBI NO: 15234888 NR Description: short-chain dehydrogenase/reductase family protein
  misc_feature (42)..(228): Homolog of NCBI NO: 24372033 NR Description: oxidoreductase, short chain
MDMLHTILNFLLPPLTISFLVLFYPFYLFTKLMSCLKHLHFENVTGKVVLITGASSGIGEHVAYEYAKKGAKLALVARRKDRLEIVAETSRQLGSGDVIIIPGDVSNVEDCKKFIDETIHHFGKLDHLINNAGVPQTVIFEDFTQIQDANSIMDINFWGSTYITYFAIPHLRKSKGKIVVISSATAIIPLQAASVYSASKAALVKFFETLRVEISPDIKITIALPGFISTDMTTPQFKEMYGSDFILSESVSRCAKAIFRGIGRGEAYVIEPSWIKWIFLIKNVCPEIVDYLLDYIFVSYLKPYFKRD

SEQ ID NO: 102843 - protein, 306 aa, Arabidopsis thaliana
  peptide (1)..(306): Ceres Seq. ID no. 13611383
  misc_feature (1)..(306): Homolog of NCBI NO: 15232777 NR Description: short-chain dehydrogenase/reductase family protein
  misc_feature (1)..(306): Homolog of NCBI NO: 15232779 NR Description: short-chain dehydrogenase/reductase family protein
  misc_feature (1)..(287): Homolog of NCBI NO: 15241203 NR Description: short-chain dehydrogenase/reductase family protein
  misc_feature (1)..(287): Homolog of NCBI NO: 8777392 NR Description: 11-beta-hydroxysteroid dehydrogenase-like
  misc_feature (1)..(297): Homolog of NCBI NO: 15824408 NR Description: steroleosin [Sesamum indicum]
  misc_feature (1)..(289): Homolog of NCBI NO: 18423187 NR Description: short-chain dehydrogenase/reductase family protein
  misc_feature (1)..(303): Homolog of NCBI NO: 15241261 NR Description: short-chain dehydrogenase/reductase family [Arabidopsis thaliana] >gi|8777400|dbj|BAA96990.1| contains
  misc_feature (1)..(297): Homolog of NCBI NO: 21311775 NR Description: steroleosin-B [Sesamum indicum]
  misc_feature (1)..(287): Homolog of NCBI NO: 15234888 NR Description: short-chain dehydrogenase/reductase family protein
  misc_feature (40)..(226): Homolog of NCBI NO: 24372033 NR Description: oxidoreductase, short chain
MLHTILNFLLPPLTISFLVLFYPFYLFTKLMSCLKHLHFENVTGKVVLITGASSGIGEHVAYEYAKKGAKLALVARRKDRLEIVAETSRQLGSGDVIIIPGDVSNVEDCKKFIDETIHHFGKLDHLINNAGVPQTVIFEDFTQIQDANSIMDINFWGSTYITYFAIPHLRKSKGKIVVISSATAIIPLQAASVYSASKAALVKFFETLRVEISPDIKITIALPGFISTDMTTPQFKEMYGSDFILSESVSRCAKAIFRGIGRGEAYVIEPSWIKWIFLIKNVCPEIVDYLLDYIFVSYLKPYFKRD

SEQ ID NO: 102844 - protein, 276 aa, Arabidopsis thaliana
  peptide (1)..(276): Ceres Seq. ID no. 13611384
  misc_feature (1)..(276): Homolog of NCBI NO: 15232777 NR Description: short-chain dehydrogenase/reductase family protein
  misc_feature (1)..(276): Homolog of NCBI NO: 15232779 NR Description: short-chain dehydrogenase/reductase family protein
  misc_feature (1)..(257): Homolog of NCBI NO: 15241203 NR Description: short-chain dehydrogenase/reductase family protein
  misc_feature (1)..(257): Homolog of NCBI NO: 8777392 NR Description: 11-beta-hydroxysteroid dehydrogenase-like
  misc_feature (1)..(267): Homolog of NCBI NO: 15824408 NR Description: steroleosin [Sesamum indicum]
  misc_feature (1)..(259): Homolog of NCBI NO: 18423187 NR Description: short-chain dehydrogenase/reductase family protein
  misc_feature (1)..(273): Homolog of NCBI NO: 15241261 NR Description: short-chain dehydrogenase/reductase family [Arabidopsis thaliana] >gi|8777400|dbj|BAA96990.1| contains
  misc_feature (1)..(267): Homolog of NCBI NO: 21311775 NR Description: steroleosin-B [Sesamum indicum]
  misc_feature (1)..(257): Homolog of NCBI NO: 15234888 NR Description: short-chain dehydrogenase/reductase family protein
  misc_feature (10)..(196): Homolog of NCBI NO: 24372033 NR Description: oxidoreductase, short chain
MSCLKHLHFENVTGKVVLITGASSGIGEHVAYEYAKKGAKLALVARRKDRLEIVAETSRQLGSGDVIIIPGDVSNVEDCKKFIDETIHHFGKLDHLINNAGVPQTVIFEDFTQIQDANSIMDINFWGSTYITYFAIPHLRKSKGKIVVISSATAIIPLQAASVYSASKAALVKFFETLRVEISPDIKITIALPGFISTDMTTPQFKEMYGSDFILSESVSRCAKAIFRGIGRGEAYVIEPSWIKWIFLIKNVCPEIVDYLLDYIFVSYLKPYFKRD

SEQ ID NO: 102845 - DNA, 874 bp, Arabidopsis thaliana
  misc_feature (1)..(874): Ceres Seq. ID no. 13611385
  misc_feature: MA Experiment ID: 108488 Result: Up-regulated in Transcription
  misc_feature: MA Experiment ID: 108595 Result: Down-regulated in Transcription
  misc_feature: MA Experiment 108595 PARAMETER Experiment Name: At_Ler-pi_Ovule_cDNA_P Parameter: Plant Line Value: null
  misc_feature: MA Experiment ID: 20000069 Result: Down-regulated in Transcription
  misc_feature: MA Experiment 20000069 PARAMETER Experiment Name: At_100uM_ABA_Mutants_cDNA_P Parameter: Plant Line Value: CS23
  misc_feature: MA Experiment 20000069 PARAMETER Experiment Name: At_100uM_ABA_Mutants_cDNA_P Parameter: Timepoint (hr) Value: 6
  misc_feature: MA Experiment 20000069 PARAMETER Experiment Name: At_100uM_ABA_Mutants_cDNA_P Parameter: Tissue Value: Aerial
  misc_feature: MA Experiment 20000069 PARAMETER Experiment Name: At_100uM_ABA_Mutants_cDNA_P Parameter: Treatment Value: 100uM ABA vs. No Treatment
  misc_feature: MA Experiment ID: 20000070 Result: Down-regulated in Transcription
  misc_feature: MA Experiment 20000070 PARAMETER Experiment Name: At_100uM_ABA_Mutants_cDNA_P Parameter: Plant Line Value: CS24
  misc_feature: MA Experiment 20000070 PARAMETER Experiment Name: At_100uM_ABA_Mutants_cDNA_P Parameter: Timepoint (hr) Value: 6
  misc_feature: MA Experiment 20000070 PARAMETER Experiment Name: At_100uM_ABA_Mutants_cDNA_P Parameter: Tissue Value: Aerial
  misc_feature: MA Experiment 20000070 PARAMETER Experiment Name: At_100uM_ABA_Mutants_cDNA_P Parameter: Treatment Value: 100uM ABA vs. No Treatment
  misc_feature: MA Experiment ID: 20000071 Result: Down-regulated in Transcription
  misc_feature: MA Experiment 20000071 PARAMETER Experiment Name: At_100uM_ABA_Mutants_cDNA_P Parameter: Plant Line Value: CS8104
  misc_feature: MA Experiment 20000071 PARAMETER Experiment Name: At_100uM_ABA_Mutants_cDNA_P Parameter: Timepoint (hr) Value: 6
  misc_feature: MA Experiment 20000071 PARAMETER Experiment Name: At_100uM_ABA_Mutants_cDNA_P Parameter: Tissue Value: Aerial
  misc_feature: MA Experiment 20000071 PARAMETER Experiment Name: At_100uM_ABA_Mutants_cDNA_P Parameter: Treatment Value: 100uM ABA vs. No Treatment
  misc_feature: MA Experiment ID: 20000072 Result: Down-regulated in Transcription
  misc_feature: MA Experiment 20000072 PARAMETER Experiment Name: At_100uM_ABA_Mutants_cDNA_P Parameter: Plant Line Value: CS8105
  misc_feature: MA Experiment 20000072 PARAMETER Experiment Name: At_100uM_ABA_Mutants_cDNA_P Parameter: Timepoint (hr) Value: 6
  misc_feature: MA Experiment 20000072 PARAMETER Experiment Name: At_100uM_ABA_Mutants_cDNA_P Parameter: Tissue Value: Aerial
  misc_feature: MA Experiment 20000072 PARAMETER Experiment Name: At_100uM_ABA_Mutants_cDNA_P Parameter: Treatment Value: 100uM ABA vs. No Treatment
  misc_feature: MA Experiment ID: 20000086 Result: Down-regulated in Transcription
  misc_feature: MA Experiment 20000086 PARAMETER Experiment Name: At_100uM_ABA_Mutants_cDNA_P Parameter: Plant Line Value: CS22
  misc_feature: MA Experiment 20000086 PARAMETER Experiment Name: At_100uM_ABA_Mutants_cDNA_P Parameter: Timepoint (hr) Value: 6
  misc_feature: MA Experiment 20000086 PARAMETER Experiment Name: At_100uM_ABA_Mutants_cDNA_P Parameter: Tissue Value: Aerial
  misc_feature: MA Experiment 20000086 PARAMETER Experiment Name: At_100uM_ABA_Mutants_cDNA_P Parameter: Treatment Value: 100uM ABA vs. No Treatment
  misc_feature: MA Experiment ID: 20000087 Result: Down-regulated in Transcription
  misc_feature: MA Experiment 20000087 PARAMETER Experiment Name: At_100uM_ABA_Mutants_cDNA_P Parameter: Plant Line Value: WS
  misc_feature: MA Experiment 20000087 PARAMETER Experiment Name: At_100uM_ABA_Mutants_cDNA_P Parameter: Timepoint (hr) Value: 6
  misc_feature: MA Experiment 20000087 PARAMETER Experiment Name: At_100uM_ABA_Mutants_cDNA_P Parameter: Tissue Value: Aerial
  misc_feature: MA Experiment 20000087 PARAMETER Experiment Name: At_100uM_ABA_Mutants_cDNA_P Parameter: Treatment Value: 100uM ABA vs. No Treatment
  misc_feature: MA Experiment ID: 20000088 Result: Down-regulated in Transcription
  misc_feature: MA Experiment 20000088 PARAMETER Experiment Name: At_100uM_ABA_Mutants_cDNA_P Parameter: Plant Line Value: Landsberg
  misc_feature: MA Experiment 20000088 PARAMETER Experiment Name: At_100uM_ABA_Mutants_cDNA_P Parameter: Timepoint (hr) Value: 6
  misc_feature: MA Experiment 20000088 PARAMETER Experiment Name: At_100uM_ABA_Mutants_cDNA_P Parameter: Tissue Value: Aerial
  misc_feature: MA Experiment 20000088 PARAMETER Experiment Name: At_100uM_ABA_Mutants_cDNA_P Parameter: Treatment Value: 100uM ABA vs. No Treatment
  misc_feature: MA Experiment ID: 20000089 Result: Down-regulated in Transcription
  misc_feature: MA Experiment ID: 20000090 Result: Down-regulated in Transcription
  misc_feature: MA Experiment ID: 20000111 Result: Up-regulated in Transcription
  misc_feature: MA Experiment 20000111 PARAMETER Experiment Name: At_42deg_Heat_cDNA_P Parameter: Temperature (deg C) Value: 42 vs. 22
  misc_feature: MA Experiment 20000111 PARAMETER Experiment Name: At_42deg_Heat_cDNA_P Parameter: Timepoint (hr) Value: 6
  misc_feature: MA Experiment 20000111 PARAMETER Experiment Name: At_42deg_Heat_cDNA_P Parameter: Tissue Value: Aerial
  misc_feature: MA Experiment ID: 20000112 Result: Up-regulated in Transcription
  misc_feature: MA Experiment 20000112 PARAMETER Experiment Name: At_42deg_Heat_cDNA_P Parameter: Temperature (deg C) Value: 42 vs. 22
  misc_feature: MA Experiment 20000112 PARAMETER Experiment Name: At_42deg_Heat_cDNA_P Parameter: Timepoint (hr) Value: 2
  misc_feature: MA Experiment 20000112 PARAMETER Experiment Name: At_42deg_Heat_cDNA_P Parameter: Tissue Value: Aerial
  misc_feature: MA Experiment ID: 20000113 Result: Up-regulated in Transcription
  misc_feature: MA Experiment 20000113 PARAMETER Experiment Name: At_42deg_Heat_cDNA_P Parameter: Temperature (deg C) Value: 42 vs. 22
  misc_feature: MA Experiment 20000113 PARAMETER Experiment Name: At_42deg_Heat_cDNA_P Parameter: Timepoint (hr) Value: 8
  misc_feature: MA Experiment 20000113 PARAMETER Experiment Name: At_42deg_Heat_cDNA_P Parameter: Tissue Value: Aerial
  misc_feature: MA Experiment ID: 20000117 Result: Down-regulated in Transcription
  misc_feature: MA Experiment 20000117 PARAMETER Experiment Name: At_100uM_ABA_Mutants_cDNA_P Parameter: Plant Line Value: Columbia
  misc_feature: MA Experiment 20000117 PARAMETER Experiment Name: At_100uM_ABA_Mutants_cDNA_P Parameter: Timepoint (hr) Value: 6
  misc_feature: MA Experiment 20000117 PARAMETER Experiment Name: At_100uM_ABA_Mutants_cDNA_P Parameter: Tissue Value: Aerial
  misc_feature: MA Experiment 20000117 PARAMETER Experiment Name: At_100uM_ABA_Mutants_cDNA_P Parameter: Treatment Value: 100uM ABA vs. No Treatment
  misc_feature: MA Experiment ID: 20000173 Result: Up-regulated in Transcription
  misc_feature: MA Experiment 20000173 PARAMETER Experiment Name: At_42deg_Heat_P Parameter: Age (day) Value: 14
  misc_feature: MA Experiment 20000173 PARAMETER Experiment Name: At_42deg_Heat_P Parameter: Organism Value: A. thaliana
  misc_feature: MA Experiment 20000173 PARAMETER Experiment Name: At_42deg_Heat_P Parameter: Plant Line Value: WS
  misc_feature: MA Experiment 20000173 PARAMETER Experiment Name: At_42deg_Heat_P Parameter: Temperature (deg C) Value: 42 vs. 22
  misc_feature: MA Experiment 20000173 PARAMETER Experiment Name: At_42deg_Heat_P Parameter: Timepoint (hr) Value: 6
  misc_feature: MA Experiment 20000173 PARAMETER Experiment Name: At_42deg_Heat_P Parameter: Tissue Value: Aerial
  misc_feature: MA Experiment ID: 20000179 Result: Up-regulated in Transcription
  misc_feature: MA Experiment 20000179 PARAMETER Experiment Name: At_Germinating_Seeds_P Parameter: Age (hr) Value: 6 vs. 0
  misc_feature: MA Experiment 20000179 PARAMETER Experiment Name: At_Germinating_Seeds_P Parameter: Tissue Value: Germinating Seeds
  misc_feature: MA Experiment ID: 20000184 Result: Up-regulated in Transcription
  misc_feature: MA Experiment 20000184 PARAMETER Experiment Name: At_Shoots__P Parameter: Age (day) Value: 7
  misc_feature: MA Experiment 20000184 PARAMETER Experiment Name: At_Shoots__P Parameter: Tissue Value: Shoots vs. Whole Plant
  misc_feature: MA Experiment ID: 20000438 Result: Up-regulated in Transcription
  misc_feature: MA Experiment 20000438 PARAMETER Experiment Name: At_Shoots__P Parameter: Age (day) Value: 14
  misc_feature: MA Experiment 20000438 PARAMETER Experiment Name: At_Shoots__P Parameter: Tissue Value: Shoots vs. Whole Plant
  misc_feature: MA Experiment ID: 20000439 Result: Down-regulated in Transcription
  misc_feature: MA Experiment 20000439 PARAMETER Experiment Name: At_Roots__P Parameter: Age (day) Value: 14 vs. 21
  misc_feature: MA Experiment 20000439 PARAMETER Experiment Name: At_Roots__P Parameter: Organism Value: A. thaliana
  misc_feature: MA Experiment 20000439 PARAMETER Experiment Name: At_Roots__P Parameter: Tissue Value: Roots vs. Whole Plant
  misc_feature: MA Experiment ID: 20000460 Result: Down-regulated in Transcription
  misc_feature: MA Experiment 20000460 PARAMETER Experiment Name: At_10percent_PEG_P Parameter: Age (day) Value: 12
  misc_feature: MA Experiment 20000460 PARAMETER Experiment Name: At_10percent_PEG_P Parameter: Organism Value: A. thaliana
  misc_feature: MA Experiment 20000460 PARAMETER Experiment Name: At_10percent_PEG_P Parameter: Plant Line Value: WS
  misc_feature: MA Experiment 20000460 PARAMETER Experiment Name: At_10percent_PEG_P Parameter: Timepoint (day) Value: 12
  misc_feature: MA Experiment 20000460 PARAMETER Experiment Name: At_10percent_PEG_P Parameter: Tissue Value: Whole Plant
  misc_feature: MA Experiment 20000460 PARAMETER Experiment Name: At_10percent_PEG_P Parameter: Treatment Value: 10percent PEG vs. No Treatment
  misc_feature: MA Experiment ID: 20000794 Result: Down-regulated in Transcription
  misc_feature: MA Experiment 20000794 PARAMETER Experiment Name: At_Petals_P Parameter: Age (day) Value: 23-25 days
  misc_feature: MA Experiment 20000794 PARAMETER Experiment Name: At_Petals_P Parameter: Plant Line Value: WS
  misc_feature: MA Experiment 20000794 PARAMETER Experiment Name: At_Petals_P Parameter: Tissue Value: Petals vs. Whole plant
  misc_feature: MA Experiment ID: 20001248 Result: Down-regulated in Transcription
  misc_feature: MA Experiment 20001248 PARAMETER Experiment Name: At_Far-red-induction_P Parameter: Age (day) Value: 7
  misc_feature: MA Experiment 20001248 PARAMETER Experiment Name: At_Far-red-induction_P Parameter: Light Value: Far-red vs. White
  misc_feature: MA Experiment 20001248 PARAMETER Experiment Name: At_Far-red-induction_P Parameter: Organism Value: A. thaliana
  misc_feature: MA Experiment 20001248 PARAMETER Experiment Name: At_Far-red-induction_P Parameter: Plant Line Value: Columbia
  misc_feature: MA Experiment 20001248 PARAMETER Experiment Name: At_Far-red-induction_P Parameter: Timepoint (hr) Value: 4
  misc_feature: MA Experiment 20001248 PARAMETER Experiment Name: At_Far-red-induction_P Parameter: Tissue Value: Whole Plant
  misc_feature: MA Experiment ID: 20001450 Result: Down-regulated in Transcription
  misc_feature: MA Experiment 20001450 PARAMETER Experiment Name: At_Far-red-induction_P Parameter: Age (day) Value: 7
  misc_feature: MA Experiment 20001450 PARAMETER Experiment Name: At_Far-red-induction_P Parameter: Light Value: Far-red vs. White
  misc_feature: MA Experiment 20001450 PARAMETER Experiment Name: At_Far-red-induction_P Parameter: Organism Value: A. thaliana
  misc_feature: MA Experiment 20001450 PARAMETER Experiment Name: At_Far-red-induction_P Parameter: Plant Line Value: Columbia
  misc_feature: MA Experiment 20001450 PARAMETER Experiment Name: At_Far-red-induction_P Parameter: Timepoint (hr) Value: 8
  misc_feature: MA Experiment 20001450 PARAMETER Experiment Name: At_Far-red-induction_P Parameter: Tissue Value: Whole Plant
  misc_feature: MA Experiment ID: 20001560 Result: Down-regulated in Transcription
  misc_feature: MA Experiment 20001560 PARAMETER Experiment Name: At_Drought_Soil_Dry_P Parameter: Age (day) Value: 28
  misc_feature: MA Experiment 20001560 PARAMETER Experiment Name: At_Drought_Soil_Dry_P Parameter: Organism Value: A. thaliana
  misc_feature: MA Experiment 20001560 PARAMETER Experiment Name: At_Drought_Soil_Dry_P Parameter: Plant Line Value: WS
  misc_feature: MA Experiment 20001560 PARAMETER Experiment Name: At_Drought_Soil_Dry_P Parameter: Post Timepoint (hr) Value: None
  misc_feature: MA Experiment 20001560 PARAMETER Experiment Name: At_Drought_Soil_Dry_P Parameter: Post-Treatment Value: None
  misc_feature: MA Experiment 20001560 PARAMETER Experiment Name: At_Drought_Soil_Dry_P Parameter: Timepoint (day) Value: 14
  misc_feature: MA Experiment 20001560 PARAMETER Experiment Name: At_Drought_Soil_Dry_P Parameter: Treatment Value: Drought vs. No Drought
aaaacccgattgtttcgagcacaaacgtcacttgtggtttacatcgtcttcatcatctccataacttcatatctcctctccttccgctgccaccgttagcgatgtctttggacactgtggacaaactggtggtgttcttggccaagagagacggaatagacaagcttgtgaagacattccaatacgtggccaagctcgcgtgctggcatgttgaagccacacgacccgaagccgccgataggttcaagaagtgggaggtcgcctccggtctcagccgcaaagccttcaggaccgggagatctctcacggggttcaatgcgctgagacgaaaccccggggcaaccccgatgatccgtttcttggcggtcctagccaattcaggggaaatggtttacttcttctttgatcattttctttggttatcaagaattggttcaatagacgccaagctcgccaagaaaatgagtttcatatccgcttttggcgaatctttcggctacactttcttcatcatcattgattgcatcttcataaagcaaagactcaaatccttaaaaaagctccagcattcgaccgatgaaccgaaagaagaaatcggcgccaaaattagcgagattcggggagatatagtaatgaggttgatgggaatttcagccaacgttgcggatttacttatagcattggcagaaattcacccaaaccccttttgtaaccacaccattacactcggtataagcggtttagtttcagcttgggccggttggtataggaactggccatcgtgagatgtaataaaatcaaatgtttgttgttttgaatgaacgtatcaaacgtgtaatgtaactcacttgaatatatgaaacatttctatttt

SEQ ID NO: 102846 - protein, 260 aa, Arabidopsis thaliana; identical to SEQ ID NO: 21051
  peptide (1)..(260): Ceres Seq. ID no. 13611386
  misc_feature (39)..(258): Pfam Name: Peroxisomal biogenesis factor 11 (PEX11) Pfam Description: Peroxisomal biogenesis factor 11 (PEX11)
  misc_feature (34)..(260): Homolog of NCBI NO: 15232797 NR Description: expressed protein [Arabidopsis thaliana]
  misc_feature (37)..(260): Homolog of NCBI NO: 38605902 NR Description: OSJNBb0020O11.14 [Oryza sativa (japonica
  misc_feature (37)..(260): Homolog of NCBI NO: 18401872 NR Description: expressed protein [Arabidopsis thaliana]
  misc_feature (37)..(260): Homolog of NCBI NO: 21536511 NR Description: unknown [Arabidopsis thaliana]

SEQ ID NO: 102847 - protein, 227 aa, Arabidopsis thaliana; identical to SEQ ID NO: 21052
  peptide (1)..(227): Ceres Seq. ID no. 13611387
  misc_feature (6)..(225): Pfam Name: Peroxisomal biogenesis factor 11 (PEX11) Pfam Description: Peroxisomal biogenesis factor 11 (PEX11)
  misc_feature (1)..(227): Homolog of NCBI NO: 15232797 NR Description: expressed protein [Arabidopsis thaliana]
  misc_feature (4)..(227): Homolog of NCBI NO: 38605902 NR Description: OSJNBb0020O11.14 [Oryza sativa (japonica
  misc_feature (4)..(227): Homolog of NCBI NO: 18401872 NR Description: expressed protein [Arabidopsis thaliana]
  misc_feature (4)..(227): Homolog of NCBI NO: 21536511 NR Description: unknown [Arabidopsis thaliana]

SEQ ID NO: 102848 - protein, 145 aa, Arabidopsis thaliana; identical to SEQ ID NO: 21053
  peptide (1)..(145): Ceres Seq. ID no. 13611388
  misc_feature (1)..(143): Pfam Name: Peroxisomal biogenesis factor 11 (PEX11) Pfam Description: Peroxisomal biogenesis factor 11 (PEX11)
  misc_feature (1)..(145): Homolog of NCBI NO: 15232797 NR Description: expressed protein [Arabidopsis thaliana]
  misc_feature (1)..(145): Homolog of NCBI NO: 38605902 NR Description: OSJNBb0020O11.14 [Oryza sativa (japonica
  misc_feature (1)..(145): Homolog of NCBI NO: 18401872 NR Description: expressed protein [Arabidopsis thaliana]
  misc_feature (1)..(145): Homolog of NCBI NO: 21536511 NR Description: unknown [Arabidopsis thaliana]

SEQ ID NO: 102849 - DNA, 2879 bp, Arabidopsis thaliana
  misc_feature (1)..(2879): Ceres Seq. ID no. 13611392
  misc_feature: MA Experiment ID: 20000315 Result: Up-regulated in Transcription
  misc_feature: MA Experiment 20000315 PARAMETER Experiment Name: At_14day_Shoots-Roots_Sub_P Parameter: Age (day) Value: 14
  misc_feature: MA Experiment 20000315 PARAMETER Experiment Name: At_14day_Shoots-Roots_Sub_P Parameter: Organism Value: A. thaliana
  misc_feature: MA Experiment 20000315 PARAMETER Experiment Name: At_14day_Shoots-Roots_Sub_P Parameter: Plant Line Value: WS
  misc_feature: MA Experiment 20000315 PARAMETER Experiment Name: At_14day_Shoots-Roots_Sub_P Parameter: Tissue Value: Shoots vs. Whole Plant
atggatcgagaaaagtgttcgaggaagcacaagggtaagtgcatccaaacatacccaaaggtcgcccatggatgcaatcttaccggtaaagggagaaagcaccaagaatgggtaaggaacgtgattcaccacataggatcaatatcgcggctaccttcatgtatcgatctcctctgccatggtaaaaccgatcggagatcggtaagaccaaagggtgactcgacggataaccaacgtgaaagtctacgccgaaagatttacagaccaccatggaccggacggagattggttcatcaattcacgatcggatacgagtcgttgaacgaatggagtaaggcgacaaatgggctaaggaatcaaatccgcatattggccaagcctcgtaaaggcaattctatgttgaatcgcgaaaaattaagagattcggccatgaagaggcgcaaacgtgagtccaaggttcccggacaccgagacgtccgggacggggtctcacaagttggtattagagcatgcttgatcctaggatggataagtgctcgggaaaacgtcatatgggtagatatattcggagatggaccgatatcaatggaatttggatctagtcagaacttgactaagatcgggtacagacttagtcgggttttgactatttctagagttttgatcttattggagattgaccaagatcaaggaaaaaacaacaaggtcgaaaacagacctatatcgggaatattgaccgagtccggtggggaccaaggaccgtctggatggtgcaaccgtttgttggtacccgctcgttggtacccgcacgacccaacgtttaaactcgttaaactaaagaggagaaaatggggtcgggagcgagcggaagctgtgaaagccgaggtagagaaactgttaaggatcaattccatcaccgaggcaaactaccccaattggcgcgcaaatccagtcgtggtaatgaagaaaaatggcaaatggagagtctgcgtagacttcactgacctcaacaaagcctgcccaaaggacagtttcccattaccgcatatcgatcgcctcgaggaatcaacctctggaaacaaattgctatcattcatggacgttttcgctggctacaaccaaatcatgatgaaccccgaagaccaagagaaaaccactttttacacagaacaaggaatgttttgctaccgagtgatgccgttcgggcttaagaacgtcggggcaacttatcaacgcttcgtcaataaaatctttgcactacatatcgggaggacaatggaagtatacatcgacgatatgctggttaaatccatggaagaggaagaacacatatcccatttgcgcgaatgtttccagcagctcaacctcaacaacgtcaaacttaacccagccaagtgccgcttcgggcaaattgaggcattattaggaatgatatcgcctcaagacaagcgagaagtacagcgcctaactggaagagttgcagcccttaaccgattcatctcccgatccaccgacaaatgcttggctttttacgatgtgctccgggaaaacatgaaattcgaatggacaacccgatgcgaagaggcttttcaggaactcaagaggtatctggcgaccccaccaatcctcgcaaaacctgtagtcgcggaaccactctactttccaagccaatcgggatgcttggctaaatgggcaatcgagctcaacgaacatgacatcgagtataggaacaaaacatgtgcaaaatcacaggtcctagccgattttatcgtcgaactacccacaaaggagacccgggagaacccgctcgatacaacttggctaatgcatgtagacggctcgtcatcaaagcaaggctcgggcgtgggcatccatctcacttcgccaacgggagaagttctcgaaaaatcattcagattgaactttgaggctaccaacaacgtgggcgagtacgaagcgctcgtgatcggacttaatctaactcgagggctaaaaatcgcgaaaatccgagctttttgtgactctcagctcatcgcaaatcaattcaatggagaatacccagctcggataacggctcacagttcatatcaagccgcttccaaggcttctgcgataagtggggaattcgacttagcaaatcaacaccacgatatccccaaggaaacggccaagctgaggccgcaaacaaaacaatcctcgaaggtttgaagaaacggctcgatgctaacaatggctcgtggtccgacgaactcgaaggcgtgcttttgtcacatccgacaactcctcgccgagccacaggagaaacccctttcgccttagtctacgggacagtgcataattccggccgagatgatagttccaagcctacgacgaagcctatccccggagaacactcctgataactctcaaaggctcctcgacgaacttgatctgattgacgaacgaagagattcgtccctggttcgaatacaaaattatcagaatgaaacggctcgtcattacaattcaaatgttcggcaacgaagattccacgaaggaaatcgggtcctccgaaaagtttaccagaacactgccgaaccgaacgctggaaaactcgggacgaactggaaggaccatacttaatttcaaaagtcatccgacccggagtgtatgagctcgctgacttaaacggtaaagccgttccaagatcatggaacgcaatgcacccaaggaaatactacaactaaatccgaggtgactaaacttgaactacgaggtggcttgatccctgaaaagggtacgtaggcagctcgtcttcggacgagttcagtacgtgggtccgtatattcatactcccatttttactatcaaaaattaaaaattcaactttttactcgtct

SEQ ID NO: 102850 - protein, 735 aa, Arabidopsis thaliana
  peptide (1)..(735): Ceres Seq. ID no. 15220751
  misc_feature (311)..(469): Pfam Name: Reverse transcriptase (RNA-dependent DNA polymerase) Pfam Description: Reverse transcriptase (RNA-dependent DNA
  misc_feature (271)..(496): Homolog of NCBI NO: 30686804 NR Description: retrotransposon gag protein family [Arabidopsis
  misc_feature (531)..(696): Homolog of NCBI NO: 30686804 NR Description: retrotransposon gag protein family [Arabidopsis
  misc_feature (470)..(553): Homolog of NCBI NO: 30686804 NR Description: retrotransposon gag protein family [Arabidopsis
  misc_feature (271)..(469): Homolog of NCBI NO: 15226511 NR Description: retrotransposon gag protein family [Arabidopsis
  misc_feature (470)..(538): Homolog of NCBI NO: 15226511 NR Description: retrotransposon gag protein family [Arabidopsis
  misc_feature (642)..(696): Homolog of NCBI NO: 15226511 NR Description: retrotransposon gag protein family [Arabidopsis
  misc_feature (499)..(583): Homolog of NCBI NO: 15226511 NR Description: retrotransposon gag protein family [Arabidopsis
  misc_feature (262)..(469): Homolog of NCBI NO: 30693475 NR Description: GAG-POL precursor (gypsy_Ty3-element) [Oryza
  misc_feature (614)..(696): Homolog of NCBI NO: 30693475 NR Description: GAG-POL precursor (gypsy_Ty3-element) [Oryza
  misc_feature (470)..(489): Homolog of NCBI NO: 30693475 NR Description: GAG-POL precursor (gypsy_Ty3-element) [Oryza
MDREKCSRKHKGKCIQTYPKVAHGCNLTGKGRKHQEWVRNVIHHIGSISRLPSCIDLLCHGKTDRRSVRPKGDSTDNQRESLRRKIYRPPWTGRRLVHQFTIGYESLNEWSKATNGLRNQIRILAKPRKGNSMLNREKLRDSAMKRRKRESKVPGHRDVRDGVSQVGIRACLILGWISARENVIWVDIFGDGPISMEFGSSQNLTKIGYRLSRVLTISRVLILLEIDQDQGKNNKVENRPISGILTESGGDQGPSGWCNRLLVPARWYPHDPTFKLVKLKRRKWGRERAEAVKAEVEKLLRINSITEANYPNWRANPVVVMKKNGKWRVCVDFTDLNKACPKDSFPLPHIDRLEESTSGNKLLSFMDVFAGYNQIMMNPEDQEKTTFYTEQGMFCYRVMPFGLKNVGATYQRFVNKIFALHIGRTMEVYIDDMLVKSMEEEEHISHLRECFQQLNLNNVKLNPAKCRFGQIEALLGMISPQDKREVQRLTGRVAALNRFISRSTDKCLAFYDVLRENMKFEWTTRCEEAFQELKRYLATPPILAKPVVAEPLYFPSQSGCLAKWAIELNEHDIEYRNKTCAKSQVLADFIVELPTKETRENPLDTTWLMHVDGSSSKQGSGVGIHLTSPTGEVLEKSFRLNFEATNNVGEYEALVIGLNLTRGLKIAKIRAFCDSQLIANQFNGEYPARITAHSSYQAASKASAISGEFDLANQHHDIPKETAKLRPQTKQSSKV

SEQ ID NO: 102851 - protein, 603 aa, Arabidopsis thaliana
  peptide (1)..(603): Ceres Seq. ID no. 15220752
  misc_feature (179)..(337): Pfam Name: Reverse transcriptase (RNA-dependent DNA polymerase) Pfam Description: Reverse transcriptase (RNA-dependent DNA
  misc_feature (139)..(364): Homolog of NCBI NO: 30686804 NR Description: retrotransposon gag protein family [Arabidopsis
  misc_feature (399)..(564): Homolog of NCBI NO: 30686804 NR Description: retrotransposon gag protein family [Arabidopsis
  misc_feature (338)..(421): Homolog of NCBI NO: 30686804 NR Description: retrotransposon gag protein family [Arabidopsis
  misc_feature (139)..(337): Homolog of NCBI NO: 15226511 NR Description: retrotransposon gag protein family [Arabidopsis
  misc_feature (338)..(406): Homolog of NCBI NO: 15226511 NR Description: retrotransposon gag protein family [Arabidopsis
  misc_feature (510)..(564): Homolog of NCBI NO: 15226511 NR Description: retrotransposon gag protein family [Arabidopsis
  misc_feature (367)..(451): Homolog of NCBI NO: 15226511 NR Description: retrotransposon gag protein family [Arabidopsis
  misc_feature (130)..(337): Homolog of NCBI NO: 30693475 NR Description: GAG-POL precursor (gypsy_Ty3-element) [Oryza
  misc_feature (482)..(564): Homolog of NCBI NO: 30693475 NR Description: GAG-POL precursor (gypsy_Ty3-element) [Oryza
  misc_feature (338)..(357): Homolog of NCBI NO: 30693475 NR Description: GAG-POL precursor (gypsy_Ty3-element) [Oryza
MLNREKLRDSAMKRRKRESKVPGHRDVRDGVSQVGIRACLILGWISARENVIWVDIFGDGPISMEFGSSQNLTKIGYRLSRVLTISRVLILLEIDQDQGKNNKVENRPISGILTESGGDQGPSGWCNRLLVPARWYPHDPTFKLVKLKRRKWGRERAEAVKAEVEKLLRINSITEANYPNWRANPVVVMKKNGKWRVCVDFTDLNKACPKDSFPLPHIDRLEESTSGNKLLSFMDVFAGYNQIMMNPEDQEKTTFYTEQGMFCYRVMPFGLKNVGATYQRFVNKIFALHIGRTMEVYIDDMLVKSMEEEEHISHLRECFQQLNLNNVKLNPAKCRFGQIEALLGMISPQDKREVQRLTGRVAALNRFISRSTDKCLAFYDVLRENMKFEWTTRCEEAFQELKRYLATPPILAKPVVAEPLYFPSQSGCLAKWAIELNEHDIEYRNKTCAKSQVLADFIVELPTKETRENPLDTTWLMHVDGSSSKQGSGVGIHLTSPTGEVLEKSFRLNFEATNNVGEYEALVIGLNLTRGLKIAKIRAFCDSQLIANQFNGEYPARITAHSSYQAASKASAISGEFDLANQHHDIPKETAKLRPQTKQSSKV

SEQ ID NO: 102852 - protein, 592 aa, Arabidopsis thaliana
  peptide (1)..(592): Ceres Seq. ID no. 15220753
  misc_feature (168)..(326): Pfam Name: Reverse transcriptase (RNA-dependent DNA polymerase) Pfam Description: Reverse transcriptase (RNA-dependent DNA
  misc_feature (128)..(353): Homolog of NCBI NO: 30686804 NR Description: retrotransposon gag protein family [Arabidopsis
  misc_feature (388)..(553): Homolog of NCBI NO: 30686804 NR Description: retrotransposon gag protein family [Arabidopsis
  misc_feature (327)..(410): Homolog of NCBI NO: 30686804 NR Description: retrotransposon gag protein family [Arabidopsis
  misc_feature (128)..(326): Homolog of NCBI NO: 15226511 NR Description: retrotransposon gag protein family [Arabidopsis
  misc_feature (327)..(395): Homolog of NCBI NO: 15226511 NR Description: retrotransposon gag protein family [Arabidopsis
  misc_feature (499)..(553): Homolog of NCBI NO: 15226511 NR Description: retrotransposon gag protein family [Arabidopsis
  misc_feature (356)..(440): Homolog of NCBI NO: 15226511 NR Description: retrotransposon gag protein family [Arabidopsis
  misc_feature (119)..(326): Homolog of NCBI NO: 30693475 NR Description: GAG-POL precursor (gypsy_Ty3-element) [Oryza
  misc_feature (471)..(553): Homolog of NCBI NO: 30693475 NR Description: GAG-POL precursor (gypsy_Ty3-element) [Oryza
  misc_feature (327)..(346): Homolog of NCBI NO: 30693475 NR Description: GAG-POL precursor (gypsy_Ty3-element) [Oryza
MKRRKRESKVPGHRDVRDGVSQVGIRACLILGWISARENVIWVDIFGDGPISMEFGSSQNLTKIGYRLSRVLTISRVLILLEIDQDQGKNNKVENRPISGILTESGGDQGPSGWCNRLLVPARWYPHDPTFKLVKLKRRKWGRERAEAVKAEVEKLLRINSITEANYPNWRANPVVVMKKNGKWRVCVDFTDLNKACPKDSFPLPHIDRLEESTSGNKLLSFMDVFAGYNQIMMNPEDQEKTTFYTEQGMFCYRVMPFGLKNVGATYQRFVNKIFALHIGRTMEVYIDDMLVKSMEEEEHISHLRECFQQLNLNNVKLNPAKCRFGQIEALLGMISPQDKREVQRLTGRVAALNRFISRSTDKCLAFYDVLRENMKFEWTTRCEEAFQELKRYLATPPILAKPVVAEPLYFPSQSGCLAKWAIELNEHDIEYRNKTCAKSQVLADFIVELPTKETRENPLDTTWLMHVDGSSSKQGSGVGIHLTSPTGEVLEKSFRLNFEATNNVGEYEALVIGLNLTRGLKIAKIRAFCDSQLIANQFNGEYPARITAHSSYQAASKASAISGEFDLANQHHDIPKETAKLRPQTKQSSKV

SEQ ID NO: 102853 - DNA, 1472 bp, Arabidopsis thaliana
  misc_feature (1)..(1472): Ceres Seq. ID no. 13611393
  misc_feature: MA Experiment ID: 108585 Result: Down-regulated in Transcription
  misc_feature: MA Experiment 108585 PARAMETER Experiment Name: At_5mM_NaNP_cDNA_P Parameter: Timepoint (hr) Value: 6
  misc_feature: MA Experiment 108585 PARAMETER Experiment Name: At_5mM_NaNP_cDNA_P Parameter: Tissue Value: Aerial
  misc_feature: MA Experiment 108585 PARAMETER Experiment Name: At_5mM_NaNP_cDNA_P Parameter: Treatment Value: null
  misc_feature: MA Experiment ID: 108595 Result: Down-regulated in Transcription
  misc_feature: MA Experiment 108595 PARAMETER Experiment Name: At_Ler-pi_Ovule_cDNA_P Parameter: Plant Line Value: null
  misc_feature: MA Experiment ID: 20000113 Result: Down-regulated in Transcription
  misc_feature: MA Experiment 20000113 PARAMETER Experiment Name: At_42deg_Heat_cDNA_P Parameter: Temperature (deg C) Value: 42 vs. 22
  misc_feature: MA Experiment 20000113 PARAMETER Experiment Name: At_42deg_Heat_cDNA_P Parameter: Timepoint (hr) Value: 8
  misc_feature: MA Experiment 20000113 PARAMETER Experiment Name: At_42deg_Heat_cDNA_P Parameter: Tissue Value: Aerial
  misc_feature: MA Experiment ID: 20000224 Result: Down-regulated in Transcription
  misc_feature: MA Experiment ID: 20000286 Result: Down-regulated in Transcription
  misc_feature: MA Experiment 20000286 PARAMETER Experiment Name: At_Open_Flower_P Parameter: Age (day) Value: 21
  misc_feature: MA Experiment 20000286 PARAMETER Experiment Name: At_Open_Flower_P Parameter: Plant Line Value: WS
  misc_feature: MA Experiment 20000286 PARAMETER Experiment Name: At_Open_Flower_P Parameter: Tissue Value: Half Open vs. Whole Plant
  misc_feature: MA Experiment ID: 20000439 Result: Down-regulated in Transcription
  misc_feature: MA Experiment 20000439 PARAMETER Experiment Name: At_Roots__P Parameter: Age (day) Value: 14 vs. 21
  misc_feature: MA Experiment 20000439 PARAMETER Experiment Name: At_Roots__P Parameter: Organism Value: A. thaliana
  misc_feature: MA Experiment 20000439 PARAMETER Experiment Name: At_Roots__P Parameter: Tissue Value: Roots vs. Whole Plant
  misc_feature: MA Experiment ID: 20000451 Result: Down-regulated in Transcription
  misc_feature: MA Experiment 20000451 PARAMETER Experiment Name: At_CS6879_Shoots-Roots_P Parameter: Age (day) Value: 14
  misc_feature: MA Experiment 20000451 PARAMETER Experiment Name: At_CS6879_Shoots-Roots_P Parameter: Organism Value: A. thaliana
  misc_feature: MA Experiment 20000451 PARAMETER Experiment Name: At_CS6879_Shoots-Roots_P Parameter: Plant Line Value: CS6879 vs. WS
  misc_feature: MA Experiment 20000451 PARAMETER Experiment Name: At_CS6879_Shoots-Roots_P Parameter: Tissue Value: Roots
atctattaatcatctaggtggcagaagcagcatcgttgagaacgaagaagcttgaaaaagttgcgagctcagagaatctggaagtagcaaaatttggcggctttaactcagcaatttgttctgtacatggtattttgagaagagagcattcagctcacagttacgctctgcctatccagcttctaaatctactcactttggtcgagtcatggcttcttctggatctgaggcaaaagctaattacgcacccatatctaccaatgaacctgttgtgtctgttgattggctccactctaatcttggagatgctgatataaaggttttggatgcctcatggtacatggcacatgagcaaagaaatccaatccaagagtatcaagttgctcatattccaggtgctctcttctttgatttgaatggaatagcagatcgaaaaacaaatagattcccattaatagctttggcaagccttctggctgtgagcttctatgtgtctgtatgcgcaacaaccaaaaagtattgtatattatttgaattacatgtgcagttacgacacatgctaccatctgaggaagcttttgctgctggttgttctgctcttggaatcgagaacaacgatggagtggttgtgtatgatggaatggggctctttagtgcagctcgtgtatggtggatgtttagagtctttggacatgacaaagtatgggtacttgatggaggcttgccgaaatggcgtgcttcaggctatgacgttgaatccagtgtttcaaatgatgccattttgaaagccagtgcagcaactgaggctatagagaagatctatcaaggacaaacaattagcccaataacttttcagacgaagttccggccacatcttgtattggcacttgatcaggtgaaggaaaacatcgaggataagacttatcagcacatcgatgcgcgttcaaaggctagatttgacggtattgctccagaaccttggaagggtttaccgagtggtcatatacccggtagcaagtgtgtcccttttcccctaatgtttgattcctctcaaacactgttaccagcagaggagctgaagaagcagtttgaacaggaagacatatctctggacagtccgattgcggcctcatgtggaaccggtgtaacagcttgtattttggcattgggactttatcgtctgggaaaaactaatgtggcaatctatgatgggtcttggactgaatgggcaactgcaccaaacttgcccatagtgggttcttcttcataagaaagtccaagaaaaagctacaagatcacaagccagtggatatatatttataagcttagcttggttcaatccatttctgtgttaaactttaacaaattgctgggagggttgtattagtattatacatcagtattcaggattcttgagtttggtctcatctttgtggagattgattaaaagtcttaatgttcttgttgtttgt

SEQ ID NO: 102854 - protein, 353 aa, Arabidopsis thaliana
  peptide (1)..(353): Ceres Seq. ID no. 13611394
  misc_feature (23)..(78): Pfam Name: Rhodanese-like domain Pfam Description: Rhodanese-like domain
  misc_feature (113)..(353): Homolog of NCBI NO: 25456716 NR Description: thiosulfate sulfurtransferase (EC 2.8.1.1)
  misc_feature (1)..(83): Homolog of NCBI NO: 25456716 NR Description: thiosulfate sulfurtransferase (EC 2.8.1.1)
  misc_feature (114)..(353): Homolog of NCBI NO: 30684873 NR Description: mercaptopyruvate sulfurtransferase (Mst2/Rdh2)
  misc_feature (1)..(78): Homolog of NCBI NO: 30684873 NR Description: mercaptopyruvate sulfurtransferase (Mst2/Rdh2)
  misc_feature (114)..(353): Homolog of NCBI NO: 18394364 NR Description: mercaptopyruvate sulfurtransferase (Mst2/Rdh2) thaliana] >gi|25288790|pir||T52663 thiosulfate sulfurtransferase
  misc_feature (1)..(78): Homolog of NCBI NO: 18394364 NR Description: mercaptopyruvate sulfurtransferase (Mst2/Rdh2) thaliana] >gi|25288790|pir||T52663 thiosulfate sulfurtransferase
  misc_feature (114)..(353): Homolog of NCBI NO: 25288797 NR Description: hypothetical protein F3O9.26 [imported] - thaliana >gi|4966366|gb|AAD34697.1|AC006341_25 Similar to thiosulfate sulfurtransferase (TST) from Datisca glomerata and
  misc_feature (1)..(78): Homolog of NCBI NO: 25288797 NR Description: hypothetical protein F3O9.26 [imported] - thaliana >gi|4966366|gb|AAD34697.1|AC006341_25 Similar to thiosulfate sulfurtransferase (TST) from Datisca glomerata and
  misc_feature (114)..(353): Homolog of NCBI NO: 18412307 NR Description: mercaptopyruvate sulfurtransferase (Mst1/Rdh1) thaliana] >gi|7488372|pir||T01034 thiosulfate sulfurtransferase
  misc_feature (1)..(78): Homolog of NCBI NO: 18412307 NR Description: mercaptopyruvate sulfurtransferase (Mst1/Rdh1) thaliana] >gi|7488372|pir||T01034 thiosulfate sulfurtransferase
MASSGSEAKANYAPISTNEPVVSVDWLHSNLGDADIKVLDASWYMAHEQRNPIQEYQVAHIPGALFFDLNGIADRKTNRFPLIALASLLAVSFYVSVCATTKKYCILFELHVQLRHMLPSEEAFAAGCSALGIENNDGVVVYDGMGLFSAARVWWMFRVFGHDKVWVLDGGLPKWRASGYDVESSVSNDAILKASAATEAIEKIYQGQTISPITFQTKFRPHLVLALDQVKENIEDKTYQHIDARSKARFDGIAPEPWKGLPSGHIPGSKCVPFPLMFDSSQTLLPAEELKKQFEQEDISLDSPIAASCGTGVTACILALGLYRLGKTNVAIYDGSWTEWATAPNLPIVGSSS

SEQ ID NO: 102855 - protein, 309 aa, Arabidopsis thaliana
  peptide (1)..(309): Ceres Seq. ID no. 13611395
  misc_feature (70)..(134): Pfam Name: Rhodanese-like domain Pfam Description: Rhodanese-like domain
  misc_feature (69)..(309): Homolog of NCBI NO: 25456716 NR Description: thiosulfate sulfurtransferase (EC 2.8.1.1)
  misc_feature (1)..(39): Homolog of NCBI NO: 25456716 NR Description: thiosulfate sulfurtransferase (EC 2.8.1.1)
  misc_feature (70)..(309): Homolog of NCBI NO: 30684873 NR Description: mercaptopyruvate sulfurtransferase (Mst2/Rdh2)
  misc_feature (1)..(34): Homolog of NCBI NO: 30684873 NR Description: mercaptopyruvate sulfurtransferase (Mst2/Rdh2)
  misc_feature (70)..(309): Homolog of NCBI NO: 18394364 NR Description: mercaptopyruvate sulfurtransferase (Mst2/Rdh2) thaliana] >gi|25288790|pir||T52663 thiosulfate sulfurtransferase
  misc_feature (1)..(34): Homolog of NCBI NO: 18394364 NR Description: mercaptopyruvate sulfurtransferase (Mst2/Rdh2) thaliana] >gi|25288790|pir||T52663 thiosulfate sulfurtransferase
  misc_feature (70)..(309): Homolog of NCBI NO: 25288797 NR Description: hypothetical protein F3O9.26 [imported] - thaliana >gi|4966366|gb|AAD34697.1|AC006341_25 Similar to thiosulfate sulfurtransferase (TST) from Datisca glomerata and
  misc_feature (1)..(34): Homolog of NCBI NO: 25288797 NR Description: hypothetical protein F3O9.26 [imported] - thaliana >gi|4966366|gb|AAD34697.1|AC006341_25 Similar to thiosulfate sulfurtransferase (TST) from Datisca glomerata and
  misc_feature (70)..(309): Homolog of NCBI NO: 18412307 NR Description: mercaptopyruvate sulfurtransferase (Mst1/Rdh1) thaliana] >gi|7488372|pir||T01034 thiosulfate sulfurtransferase
  misc_feature (1)..(34): Homolog of NCBI NO: 18412307 NR Description: mercaptopyruvate sulfurtransferase (Mst1/Rdh1) thaliana] >gi|7488372|pir||T01034 thiosulfate sulfurtransferase
MAHEQRNPIQEYQVAHIPGALFFDLNGIADRKTNRFPLIALASLLAVSFYVSVCATTKKYCILFELHVQLRHMLPSEEAFAAGCSALGIENNDGVVVYDGMGLFSAARVWWMFRVFGHDKVWVLDGGLPKWRASGYDVESSVSNDAILKASAATEAIEKIYQGQTISPITFQTKFRPHLVLALDQVKENIEDKTYQHIDARSKARFDGIAPEPWKGLPSGHIPGSKCVPFPLMFDSSQTLLPAEELKKQFEQEDISLDSPIAASCGTGVTACILALGLYRLGKTNVAIYDGSWTEWATAPNLPIVGSSS

SEQ ID NO: 102856 - protein, 237 aa, Arabidopsis thaliana; identical to SEQ ID NO: 24976
  peptide (1)..(237): Ceres Seq. ID no. 13611396
  misc_feature (1)..(62): Pfam Name: Rhodanese-like domain Pfam Description: Rhodanese-like domain
  misc_feature (1)..(237): Homolog of NCBI NO: 25456716 NR Description: thiosulfate sulfurtransferase (EC 2.8.1.1)
  misc_feature (1)..(237): Homolog of NCBI NO: 30684873 NR Description: mercaptopyruvate sulfurtransferase (Mst2/Rdh2)
  misc_feature (1)..(237): Homolog of NCBI NO: 18394364 NR Description: mercaptopyruvate sulfurtransferase (Mst2/Rdh2) thaliana] >gi|25288790|pir||T52663 thiosulfate sulfurtransferase
  misc_feature (1)..(237): Homolog of NCBI NO: 25288797 NR Description: hypothetical protein F3O9.26 [imported] - thaliana >gi|4966366|gb|AAD34697.1|AC006341_25 Similar to thiosulfate sulfurtransferase (TST) from Datisca glomerata and
  misc_feature (1)..(237): Homolog of NCBI NO: 18412307 NR Description: mercaptopyruvate sulfurtransferase (Mst1/Rdh1) thaliana] >gi|7488372|pir||T01034 thiosulfate sulfurtransferase
  misc_feature (1)..(237): Homolog of NCBI NO: 25288794 NR Description: thiosulfate sulfurtransferase (EC 2.8.1.1) Mst1
  misc_feature (1)..(232): Homolog of NCBI NO: 4406372 NR Description: thiosulfate sulfurtransferase [Datisca glomerata]
  misc_feature (1)..(236): Homolog of NCBI NO: 14571545 NR Description: thiosulfate transferase [Triticum aestivum]
  misc_feature (96)..(232): Homolog of NCBI NO: 27381801 NR Description: thiosulfate sulfurtransferase [Bradyrhizobium >gi|27354970|dbj|BAC51955.1| thiosulfate sulfurtransferase
  misc_feature (1)..(90): Homolog of NCBI NO: 27381801 NR Description: thiosulfate sulfurtransferase [Bradyrhizobium >gi|27354970|dbj|BAC51955.1| thiosulfate sulfurtransferase

SEQ ID NO: 102857 - DNA, 1178 bp, Arabidopsis thaliana
  misc_feature (1)..(1178): Ceres Seq. ID no. 13611397
  misc_feature: MA Experiment ID: 20000235 Result: Up-regulated in Transcription
  misc_feature: MA Experiment 20000235 PARAMETER Experiment Name: At_Siliques_P Parameter: Age (day) Value: 21
  misc_feature: MA Experiment 20000235 PARAMETER Experiment Name: At_Siliques_P Parameter: Organism Value: A. thaliana
  misc_feature: MA Experiment 20000235 PARAMETER Experiment Name: At_Siliques_P Parameter: Plant Line Value: WS
  misc_feature: MA Experiment 20000235 PARAMETER Experiment Name: At_Siliques_P Parameter: Tissue Value: 5-10mm Siliques vs. Whole Plant
gtgacatttgtcaatgtctgtggtttataacatgtttctcaatgtcaggatcacacacaccacttctcatgtataaatacacataaaagcaattggatttggtaagagggaatctcaaaagtgtgtgtctgtgagagaggagagagagaatatgggcaaaggaagagcaccatgttgtgacaaaaccaaagtgaagagaggaccatggagccatgatgaagacttgaaactcatctctttcattcacaagaatggtcatgagaattggagatctctcccaaagcaagctggattgttgaggtgtggcaagagttgtcgtctgcgatggattaattacctcagacctgatgtgaaacgtggcaatttcagtgcagaggaagaagacaccatcatcaaacttcaccagagctttggtaacaagtggtcgaagattgcttctaagctgcctggaagaacagacaatgagatcaagaatgtgtggcatacacatctcaagaaaagattgagctcggaaactaaccttaatgccgatgaagcgggttcaaaaggttctttgaatgaagaagagaactctcaagagtcatctccaaatgcttcaatgtcttttgctggttccaacatttcaagcaaagacgatgatgcacagataagtcaaatgtttgagcacattctaacttatagcgagtttacggggatgttacaagaggtagacaaaccagagctgctggagatgccttttgatttagatcctgacatttggagtttcatagatggttcagactcattccaacaaccagagaacagagctcttcaagagtctgaagaagatgaagttgataaatggtttaagcacctggaaagcgaactcgggttagaagaaaacgataaccaacaacaacaacaacagcataaacagggaacagaagatgaacattcatcatcactcttggagagttacgagctcctcatacattaatgaagccataaagcaagtcattttcaccttgaaaatggaattattagctaacttattggcattattagtatataagcaagatcagataggcgcatgtagtagcaacaacgaagaaacgtcgaattgtagacaaaatgtagatattacagagttgaaagattgtattttgcaaatgattgctttgtagtgaaatcaagttatc

SEQ ID NO: 102858 - protein, 274 aa, Arabidopsis thaliana
  peptide (1)..(274): Ceres Seq. ID no. 13611398
  misc_feature (16)..(63): Pfam Name: Myb-like DNA-binding domain Pfam Description: Myb-like DNA-binding domain
  misc_feature (1)..(274): Homolog of NCBI NO: 15219259 NR Description: myb family transcription factor [Arabidopsis
  misc_feature (1)..(274): Homolog of NCBI NO: 21553594 NR Description: putative myb-related transcription factor
  misc_feature (73)..(274): Homolog of NCBI NO: 11358546 NR Description: myb-related transcription factor MYB58 [imported] Arabidopsis thaliana (fragment) >gi|3941478|gb|AAC83615.1|
  misc_feature (1)..(214): Homolog of NCBI NO: 15219313 NR Description: myb family transcription factor [Arabidopsis
  misc_feature (44)..(214): Homolog of NCBI NO: 7438354 NR Description: myb-related protein YUP8H12R.21 - Arabidopsis
  misc_feature (1)..(48): Homolog of NCBI NO: 7438354 NR Description: myb-related protein YUP8H12R.21 - Arabidopsis
  misc_feature (119)..(274): Homolog of NCBI NO: 7438354 NR Description: myb-related protein YUP8H12R.21 - Arabidopsis
  misc_feature (1)..(213): Homolog of NCBI NO: 15230600 NR Description: myb family transcription factor [Arabidopsis
  misc_feature (1)..(214): Homolog of NCBI NO: 15223463 NR Description: myb family transcription factor [Arabidopsis
  misc_feature (4)..(243): Homolog of NCBI NO: 15224628 NR Description: myb family transcription factor [Arabidopsis
MGKGRAPCCDKTKVKRGPWSHDEDLKLISFIHKNGHENWRSLPKQAGLLRCGKSCRLRWINYLRPDVKRGNFSAEEEDTIIKLHQSFGNKWSKIASKLPGRTDNEIKNVWHTHLKKRLSSETNLNADEAGSKGSLNEEENSQESSPNASMSFAGSNISSKDDDAQISQMFEHILTYSEFTGMLQEVDKPELLEMPFDLDPDIWSFIDGSDSFQQPENRALQESEEDEVDKWFKHLESELGLEENDNQQQQQQHKQGTEDEHSSSLLESYELLIH

SEQ ID NO: 102859 - DNA, 1587 bp, Arabidopsis thaliana
  misc_feature (1)..(1587): Ceres Seq. ID no. 13611399
  misc_feature: MA Experiment ID: 108434 Result: Up-regulated in Transcription
  misc_feature: MA Experiment 108434 PARAMETER Experiment Name: At_Root_Tips_cDNA_P Parameter: Tissue Value: Root Tips
  misc_feature: MA Experiment ID: 108461 Result: Down-regulated in Transcription
  misc_feature: MA Experiment 108461 PARAMETER Experiment Name: At_Germinating_Seeds_cDNA_P Parameter: Age (day) Value: 1 vs. 0
  misc_feature: MA Experiment 108461 PARAMETER Experiment Name: At_Germinating_Seeds_cDNA_P Parameter: Tissue Value: Germinating Seeds
  misc_feature: MA Experiment ID: 108462 Result: Down-regulated in Transcription
  misc_feature: MA Experiment 108462 PARAMETER Experiment Name: At_Germinating_Seeds_cDNA_P Parameter: Age (day) Value: 2 vs. 0
  misc_feature: MA Experiment 108462 PARAMETER Experiment Name: At_Germinating_Seeds_cDNA_P Parameter: Tissue Value: Germinating Seeds
  misc_feature: MA Experiment ID: 108463 Result: Down-regulated in Transcription
  misc_feature: MA Experiment 108463 PARAMETER Experiment Name: At_Germinating_Seeds_cDNA_P Parameter: Age (day) Value: 3 vs. 0
  misc_feature: MA Experiment 108463 PARAMETER Experiment Name: At_Germinating_Seeds_cDNA_P Parameter: Tissue Value: Germinating Seeds
  misc_feature: MA Experiment ID: 108585 Result: Up-regulated in Transcription
  misc_feature: MA Experiment 108585 PARAMETER Experiment Name: At_5mM_NaNP_cDNA_P Parameter: Timepoint (hr) Value: 6
  misc_feature: MA Experiment 108585 PARAMETER Experiment Name: At_5mM_NaNP_cDNA_P Parameter: Tissue Value: Aerial
  misc_feature: MA Experiment 108585 PARAMETER Experiment Name: At_5mM_NaNP_cDNA_P Parameter: Treatment Value: null
  misc_feature: MA Experiment ID: 108595 Result: Up-regulated in Transcription
  misc_feature: MA Experiment 108595 PARAMETER Experiment Name: At_Ler-pi_Ovule_cDNA_P Parameter: Plant Line Value: null
  misc_feature: MA Experiment ID: 20000180 Result: Down-regulated in Transcription
  misc_feature: MA Experiment 20000180 PARAMETER Experiment Name: At_Germinating_Seeds_P Parameter: Age (hr) Value: 24 vs. 0
  misc_feature: MA Experiment 20000180 PARAMETER Experiment Name: At_Germinating_Seeds_P Parameter: Tissue Value: Germinating Seeds
  misc_feature: MA Experiment ID: 20000184 Result: Up-regulated in Transcription
  misc_feature: MA Experiment 20000184 PARAMETER Experiment Name: At_Shoots__P Parameter: Age (day) Value: 7
  misc_feature: MA Experiment 20000184 PARAMETER Experiment Name: At_Shoots__P Parameter: Tissue Value: Shoots vs. Whole Plant
  misc_feature: MA Experiment ID: 20000234 Result: Up-regulated in Transcription
  misc_feature: MA Experiment 20000234 PARAMETER Experiment Name: At_Siliques_P Parameter: Age (day) Value: 21
  misc_feature: MA Experiment 20000234 PARAMETER Experiment Name: At_Siliques_P Parameter: Organism Value: A. thaliana
  misc_feature: MA Experiment 20000234 PARAMETER Experiment Name: At_Siliques_P Parameter: Plant Line Value: WS
  misc_feature: MA Experiment 20000234 PARAMETER Experiment Name: At_Siliques_P Parameter: Tissue Value: Less Than 5mm Siliques vs. Whole Plant
  misc_feature: MA Experiment ID: 20000264 Result: Up-regulated in Transcription
  misc_feature: MA Experiment 20000264 PARAMETER Experiment Name: At_Open_Flower_P Parameter: Age (day) Value: 21
  misc_feature: MA Experiment 20000264 PARAMETER Experiment Name: At_Open_Flower_P Parameter: Plant Line Value: WS
  misc_feature: MA Experiment 20000264 PARAMETER Experiment Name: At_Open_Flower_P Parameter: Tissue Value: Open Flower vs. Whole Plant
  misc_feature: MA Experiment ID: 20000265 Result: Up-regulated in Transcription
  misc_feature: MA Experiment 20000265 PARAMETER Experiment Name: At_Open_Flower_P Parameter: Age (day) Value: 21
  misc_feature: MA Experiment 20000265 PARAMETER Experiment Name: At_Open_Flower_P Parameter: Plant Line Value: WS
  misc_feature: MA Experiment 20000265 PARAMETER Experiment Name: At_Open_Flower_P Parameter: Tissue Value: Closed Flower vs. Whole Plant
  misc_feature: MA Experiment ID: 20000286 Result: Up-regulated in Transcription
  misc_feature: MA Experiment 20000286 PARAMETER Experiment Name: At_Open_Flower_P Parameter: Age (day) Value: 21
  misc_feature: MA Experiment 20000286 PARAMETER Experiment Name: At_Open_Flower_P Parameter: Plant Line Value: WS
  misc_feature: MA Experiment 20000286 PARAMETER Experiment Name: At_Open_Flower_P Parameter: Tissue Value: Half Open vs. Whole Plant
  misc_feature: MA Experiment ID: 20001557 Result: Up-regulated in Transcription
  misc_feature: MA Experiment 20001557 PARAMETER Experiment Name: At_Drought_Soil_Dry_P Parameter: Age (day) Value: 27
  misc_feature: MA Experiment 20001557 PARAMETER Experiment Name: At_Drought_Soil_Dry_P Parameter: Organism Value: A. thaliana
  misc_feature: MA Experiment 20001557 PARAMETER Experiment Name: At_Drought_Soil_Dry_P Parameter: Plant Line Value: WS
  misc_feature: MA Experiment 20001557 PARAMETER Experiment Name: At_Drought_Soil_Dry_P Parameter: Post Timepoint (hr) Value: 3
  misc_feature: MA Experiment 20001557 PARAMETER Experiment Name: At_Drought_Soil_Dry_P Parameter: Post-Treatment Value: Re-Water vs. No Drought
  misc_feature: MA Experiment 20001557 PARAMETER Experiment Name: At_Drought_Soil_Dry_P Parameter: Timepoint (day) Value: 13
  misc_feature: MA Experiment 20001557 PARAMETER Experiment Name: At_Drought_Soil_Dry_P Parameter: Treatment Value: Drought vs. No Drought
gtctgtctgtctctctcctctaatcttttttatccgctagggttttgaagcaaggtttctcgcgattttctcgatatctctcgcccatggcgaaaccaagtcgtggccgtcgttccccctccgtgtctggctcgtcatctcgttccagttccagatctcgttcgggttcgagcccctccaggtctatttcccgctcacgctcccgttctagatcgctctcttcatcttcatctccttcgcgaagcgtcagttctgggagtcgcagtcctccacgtcgtggaaaaagtcctgctggacctgctaggcgaggtcgctctcctcctcctccaccatctaaaggagcatcttcaccttccaagaaagctgttcaagaatctcttgttctccatgttgattctcttagcaggaatgtgaatgaagcccatctcaaagaaatctttggcaactttggtgaagttatacatgtcgaaattgcgatggatcgagctgttaatcttccaagaggacatggttatgttgagttcaaggcaagagctgatgctgagaaagctcagctctacatggatggtgcccaaattgatggaaaggttgttaaagcaacgttcacactaccacctcgtcagaaagtatcttcaccccctaaacctgtctcagctgcaccaaaaagagatgctccaaaatctgataatgctgctgctgacgctgagaaagatggtggtcccaggcgcccaagagagacatctcctcaacggaaaacagggctttctccgagaaggcgatcacctctacctaggagaggcttatcacctagaaggcgatcacctgattctccccatcgccggaggccgggctctcctatccgccgtcgcggtgatacacctcctagacgtaggccagcatcaccatctagaggccgttctccatcttctccccctccaagacgatatagatctcctccaaggggctcccctagaagaattcgtggcagtcctgttcgaagaaggtctcctcttcctctaagacgaaggtctccacctccaaggagactacgcagtcctcccagaagatctccaatccgtaggcgtagccgatccccaattcgtaggcctggtcgctctcgttcaagttccatctcaccccgcaagggacgaggtccagctgggagacgtgggaggtcatcttcttactctagttcaccaagtcccagaaggattcctaggaagatttcaaggagccgcagtcctaagaggccactgagaggaaaaagaagcagcagtaacagcagcagcagcagttcaccgccaccaccacctccacctcgtaaaacttaaaggtgataaaaattaaaaaaaaaaaaaaaaaaacttgagtcttgatgtagctctctttctccatctttatcgttatcatctgtctcagcctcttttcttagaacagataaaatgtttaccagtgaccaaatgagagttgtggtttttgtagtgtttggatgtttaatcttcttttgtggatctcctcattagatgcaacgataatgacttggttcttttagctggttgtaattccctaatatattcagtcttgttg

SEQ ID NO: 102860 - protein, 414 aa, Arabidopsis thaliana; identical to SEQ ID NO: 27767
  peptide (1)..(414): Ceres Seq. ID no. 13611400
  misc_feature (100)..(171): Pfam Name: RNA recognition motif. (a.k.a. RRM, RBD, or RNP domain) Pfam Description: RNA recognition motif. (a.k.a. RRM, RBD, or RNP
  misc_feature (1)..(414): Homolog of NCBI NO: 15219287 NR Description: arginine/serine-rich protein, putative
  misc_feature (1)..(414): Homolog of NCBI NO: 15027957 NR Description: putative arginine/serine-rich protein
  misc_feature (119)..(379): Homolog of NCBI NO: 34905768 NR Description: P0401G10.10 [Oryza sativa (japonica
  misc_feature (5)..(414): Homolog of NCBI NO: 25143299 NR Description: pre-mRNA splicing SR protein related RSR-1 (68.2
  misc_feature (212)..(414): Homolog of NCBI NO: 30684163 NR Description: proline-rich protein -related [Arabidopsis >gi|21928131|gb|AAM78093.1| At2g29210/F16P2.41 [Arabidopsis >gi|23308459|gb|AAN18199.1| At2g29210/F16P2.41 [Arabidopsis
  misc_feature (1)..(78): Homolog of NCBI NO: 30684163 NR Description: proline-rich protein -related [Arabidopsis >gi|21928131|gb|AAM78093.1| At2g29210/F16P2.41 [Arabidopsis >gi|23308459|gb|AAN18199.1| At2g29210/F16P2.41 [Arabidopsis
  misc_feature (212)..(414): Homolog of NCBI NO: 9843651 NR Description: SRM102 [Arabidopsis thaliana]
  misc_feature (1)..(78): Homolog of NCBI NO: 9843651 NR Description: SRM102 [Arabidopsis thaliana]
  misc_feature (182)..(414): Homolog of NCBI NO: 23274133 NR Description: Similar to serine/arginine repetitive matrix 1
  misc_feature (1)..(106): Homolog of NCBI NO: 23274133 NR Description: Similar to serine/arginine repetitive matrix 1

SEQ ID NO: 102861 - protein, 284 aa, Arabidopsis thaliana; identical to SEQ ID NO: 27768
  peptide (1)..(284): Ceres Seq. ID no. 13611401
  misc_feature (85)..(283): Pfam Name: Extensin-like region Pfam Description: Extensin-like region
  misc_feature (1)..(284): Homolog of NCBI NO: 15219287 NR Description: arginine/serine-rich protein, putative
  misc_feature (1)..(284): Homolog of NCBI NO: 15027957 NR Description: putative arginine/serine-rich protein
  misc_feature (1)..(249): Homolog of NCBI NO: 34905768 NR Description: P0401G10.10 [Oryza sativa (japonica
  misc_feature (1)..(284): Homolog of NCBI NO: 25143299 NR Description: pre-mRNA splicing SR protein related RSR-1 (68.2
  misc_feature (82)..(284): Homolog of NCBI NO: 30684163 NR Description: proline-rich protein -related [Arabidopsis >gi|21928131|gb|AAM78093.1| At2g29210/F16P2.41 [Arabidopsis >gi|23308459|gb|AAN18199.1| At2g29210/F16P2.41 [Arabidopsis
  misc_feature (82)..(284): Homolog of NCBI NO: 9843651 NR Description: SRM102 [Arabidopsis thaliana]
  misc_feature (52)..(284): Homolog of NCBI NO: 23274133 NR Description: Similar to serine/arginine repetitive matrix 1
  misc_feature (52)..(284): Homolog of NCBI NO: 5032119 NR Description: Ser/Arg-related nuclear matrix protein (plenty of
  misc_feature (1)..(126): Homolog of NCBI NO: 3253165 NR Description: SR protein [Homo sapiens]
  misc_feature (48)..(281): Homolog of NCBI NO: 23274133 NR Description: Similar to serine/arginine repetitive matrix 1

SEQ ID NO: 102862 - protein, 256 aa, Arabidopsis thaliana; identical to SEQ ID NO: 27769
  peptide (1)..(256): Ceres Seq. ID no. 13611402
  misc_feature (57)..(255): Pfam Name: Extensin-like region Pfam Description: Extensin-like region
  misc_feature (1)..(256): Homolog of NCBI NO: 15219287 NR Description: arginine/serine-rich protein, putative
  misc_feature (1)..(256): Homolog of NCBI NO: 15027957 NR Description: putative arginine/serine-rich protein
  misc_feature (1)..(221): Homolog of NCBI NO: 34905768 NR Description: P0401G10.10 [Oryza sativa (japonica
  misc_feature (1)..(256): Homolog of NCBI NO: 25143299 NR Description: pre-mRNA splicing SR protein related RSR-1 (68.2
  misc_feature (54)..(256): Homolog of NCBI NO: 30684163 NR Description: proline-rich protein -related [Arabidopsis >gi|21928131|gb|AAM78093.1| At2g29210/F16P2.41 [Arabidopsis >gi|23308459|gb|AAN18199.1| At2g29210/F16P2.41 [Arabidopsis
  misc_feature (54)..(256): Homolog of NCBI NO: 9843651 NR Description: SRM102 [Arabidopsis thaliana]
  misc_feature (24)..(256): Homolog of NCBI NO: 23274133 NR Description: Similar to serine/arginine repetitive matrix 1
  misc_feature (24)..(256): Homolog of NCBI NO: 5032119 NR Description: Ser/Arg-related nuclear matrix protein (plenty of
  misc_feature (1)..(98): Homolog of NCBI NO: 3253165 NR Description: SR protein [Homo sapiens]
  misc_feature (20)..(253): Homolog of NCBI NO: 23274133 NR Description: Similar to serine/arginine repetitive matrix 1

SEQ ID NO: 102863 - DNA, 894 bp, Arabidopsis thaliana
  misc_feature (1)..(894): Ceres Seq. ID no. 13611406
  misc_feature: MA Experiment ID: 108434 Result: Up-regulated in Transcription
  misc_feature: MA Experiment 108434 PARAMETER Experiment Name: At_Root_Tips_cDNA_P Parameter: Tissue Value: Root Tips
  misc_feature: MA Experiment ID: 108561 Result: Down-regulated in Transcription
  misc_feature: MA Experiment 108561 PARAMETER Experiment Name: At_100uM_ABA_cDNA_P Parameter: Timepoint (hr) Value: 6
  misc_feature: MA Experiment 108561 PARAMETER Experiment Name: At_100uM_ABA_cDNA_P Parameter: Tissue Value: Aerial
  misc_feature: MA Experiment 108561 PARAMETER Experiment Name: At_100uM_ABA_cDNA_P Parameter: Treatment Value: 100uM ABA vs. No Treatment
  misc_feature: MA Experiment ID: 20000180 Result: Up-regulated in Transcription
  misc_feature: MA Experiment 20000180 PARAMETER Experiment Name: At_Germinating_Seeds_P Parameter: Age (hr) Value: 24 vs. 0
  misc_feature: MA Experiment 20000180 PARAMETER Experiment Name: At_Germinating_Seeds_P Parameter: Tissue Value: Germinating Seeds
  misc_feature: MA Experiment ID: 20000496 Result: Up-regulated in Transcription
  misc_feature: MA Experiment 20000496 PARAMETER Experiment Name: At_Guard_Cells_P Parameter: Harvest Date Value: 7/19/2002
  misc_feature: MA Experiment 20000496 PARAMETER Experiment Name: At_Guard_Cells_P Parameter: Organism Value: Canola
  misc_feature: MA Experiment 20000496 PARAMETER Experiment Name: At_Guard_Cells_P Parameter: Tissue Value: Guard Cells vs. Leaves
  misc_feature: MA Experiment ID: 20000794 Result: Down-regulated in Transcription
  misc_feature: MA Experiment 20000794 PARAMETER Experiment Name: At_Petals_P Parameter: Age (day) Value: 23-25 days
  misc_feature: MA Experiment 20000794 PARAMETER Experiment Name: At_Petals_P Parameter: Plant Line Value: WS
  misc_feature: MA Experiment 20000794 PARAMETER Experiment Name: At_Petals_P Parameter: Tissue Value: Petals vs. Whole plant
  misc_feature: MA Experiment ID: 20001558 Result: Up-regulated in Transcription
  misc_feature: MA Experiment 20001558 PARAMETER Experiment Name: At_Drought_Soil_Dry_P Parameter: Age (day) Value: 27
  misc_feature: MA Experiment 20001558 PARAMETER Experiment Name: At_Drought_Soil_Dry_P Parameter: Organism Value: A. thaliana
  misc_feature: MA Experiment 20001558 PARAMETER Experiment Name: At_Drought_Soil_Dry_P Parameter: Plant Line Value: WS
  misc_feature: MA Experiment 20001558 PARAMETER Experiment Name: At_Drought_Soil_Dry_P Parameter: Post Timepoint (hr) Value: 6
  misc_feature: MA Experiment 20001558 PARAMETER Experiment Name: At_Drought_Soil_Dry_P Parameter: Post-Treatment Value: Re-Water vs. No Drought
  misc_feature: MA Experiment 20001558 PARAMETER Experiment Name: At_Drought_Soil_Dry_P Parameter: Timepoint (day) Value: 13
  misc_feature: MA Experiment 20001558 PARAMETER Experiment Name: At_Drought_Soil_Dry_P Parameter: Treatment Value: Drought vs. No Drought
  misc_feature: MA Experiment ID: 20001560 Result: Up-regulated in Transcription
  misc_feature: MA Experiment 20001560 PARAMETER Experiment Name: At_Drought_Soil_Dry_P Parameter: Age (day) Value: 28
  misc_feature: MA Experiment 20001560 PARAMETER Experiment Name: At_Drought_Soil_Dry_P Parameter: Organism Value: A. thaliana
  misc_feature: MA Experiment 20001560 PARAMETER Experiment Name: At_Drought_Soil_Dry_P Parameter: Plant Line Value: WS
  misc_feature: MA Experiment 20001560 PARAMETER Experiment Name: At_Drought_Soil_Dry_P Parameter: Post Timepoint (hr) Value: None
  misc_feature: MA Experiment 20001560 PARAMETER Experiment Name: At_Drought_Soil_Dry_P Parameter: Post-Treatment Value: None
  misc_feature: MA Experiment 20001560 PARAMETER Experiment Name: At_Drought_Soil_Dry_P Parameter: Timepoint (day) Value: 14
  misc_feature: MA Experiment 20001560 PARAMETER Experiment Name: At_Drought_Soil_Dry_P Parameter: Treatment Value: Drought vs. No Drought
  misc_feature: MA Experiment ID: 20001911 Result: Down-regulated in Transcription
  misc_feature: MA Experiment 20001911 PARAMETER Experiment Name: At_Drought_Reproduction_P Parameter: Age (day) Value: 40
  misc_feature: MA Experiment 20001911 PARAMETER Experiment Name: At_Drought_Reproduction_P Parameter: Organism Value: A. thaliana
  misc_feature: MA Experiment 20001911 PARAMETER Experiment Name: At_Drought_Reproduction_P Parameter: Plant Line Value: WS
  misc_feature: MA Experiment 20001911 PARAMETER Experiment Name: At_Drought_Reproduction_P Parameter: Timepoint (day) Value: 10
  misc_feature: MA Experiment 20001911 PARAMETER Experiment Name: At_Drought_Reproduction_P Parameter: Tissue Value: Flowers
  misc_feature: MA Experiment 20001911 PARAMETER Experiment Name: At_Drought_Reproduction_P Parameter: Treatment Value: Drought vs. No Drought
aaatctcagtttacaccttcacactgctgcgtctctctctctctctctctttctttctcagattaatcgctgagaagaagcaaccacctggagacggcggagatggcagggtacagagtggaagatgactacgattacctcttcaaagttgttcttataggcgattctggagttggcaaatccaatctcctttccagattcactaaaaacgagttcaatctagagtctaaatccaccattggcgtcgaattcgccactcgtaccttaaaagtcgatggcaaagtcgttaaagctcagatttgggacactgctggtcaggagaggtaccgtgccatcactagtgcatattaccgtggagccgtgggtgcactcctagtatatgatgtaactcgccgtgcaacatttgagaacgtagatcggtggttaaaggagctcaagaaccacacagatccaaacattgtagtgatgctggttggtaacaaatctgatctccgccacttgctagctgttcctacagaagacgggaagtcctatgcggaacaagaatcgctctgcttcatggaaacatctgcccttgaagctaccaatgtggaggacgcatttgcagaggtgttgacacaaatttatcgcatcacaagcaagaagcaagtggaagctggtgaagatgggaacgcctctgtcccgaaaggtgagaaaatcgaagttaaaaacgatgtctctgcgctgaagaaactcgggtgctgctcaaattgaagcctttttttgttttcactgttgagagagaattataacccccatggtccattgtttgattatgtccttgttttgtaacactatcgacatttgtatgagttttagaccatacactacataatgtttatttaactttatttc

SEQ ID NO: 102864 - protein, 216 aa, Arabidopsis thaliana; identical to SEQ ID NO: 26500
  peptide (1)..(216): Ceres Seq. ID no. 13611407
  misc_feature (15)..(176): Pfam Name: Ras family Pfam Description: Ras family
  misc_feature (1)..(216): Homolog of NCBI NO: 15219955 NR Description: GTP binding protein, putative [Arabidopsis
  misc_feature (1)..(216): Homolog of NCBI NO: 21555752 NR Description: guanine nucleotide regulatory protein, putative
  misc_feature (1)..(216): Homolog of NCBI NO: 541979 NR Description: GTP-binding protein, ras-like - fava bean

SEQ ID NO: 102865 - DNA, 950 bp, Arabidopsis thaliana
  misc_feature (1)..(950): Ceres Seq. ID no. 13611423
  misc_feature: MA Experiment ID: 108433 Result: Up-regulated in Transcription
  misc_feature: MA Experiment 108433 PARAMETER Experiment Name: At_rhl_Mutant2_cDNA_P Parameter: Age (day) Value: 7
  misc_feature: MA Experiment 108433 PARAMETER Experiment Name: At_rhl_Mutant2_cDNA_P Parameter: Organism Value: A. thaliana
  misc_feature: MA Experiment 108433 PARAMETER Experiment Name: At_rhl_Mutant2_cDNA_P Parameter: Plant Line Value: rhl Mutant vs. wt landsburg
  misc_feature: MA Experiment 108433 PARAMETER Experiment Name: At_rhl_Mutant2_cDNA_P Parameter: Tissue Value: Roots
  misc_feature: MA Experiment ID: 108434 Result: Down-regulated in Transcription
  misc_feature: MA Experiment 108434 PARAMETER Experiment Name: At_Root_Tips_cDNA_P Parameter: Tissue Value: Root Tips
  misc_feature: MA Experiment ID: 108461 Result: Up-regulated in Transcription
  misc_feature: MA Experiment 108461 PARAMETER Experiment Name: At_Germinating_Seeds_cDNA_P Parameter: Age (day) Value: 1 vs. 0
  misc_feature: MA Experiment 108461 PARAMETER Experiment Name: At_Germinating_Seeds_cDNA_P Parameter: Tissue Value: Germinating Seeds
  misc_feature: MA Experiment ID: 108462 Result: Up-regulated in Transcription
  misc_feature: MA Experiment 108462 PARAMETER Experiment Name: At_Germinating_Seeds_cDNA_P Parameter: Age (day) Value: 2 vs. 0
  misc_feature: MA Experiment 108462 PARAMETER Experiment Name: At_Germinating_Seeds_cDNA_P Parameter: Tissue Value: Germinating Seeds
  misc_feature: MA Experiment ID: 108488 Result: Down-regulated in Transcription
  misc_feature: MA Experiment ID: 108579 Result: Down-regulated in Transcription
  misc_feature: MA Experiment 108579 PARAMETER Experiment Name: At_4deg_Cold_cDNA_P Parameter: Temperature (deg C) Value: 4 vs. 22
  misc_feature: MA Experiment 108579 PARAMETER Experiment Name: At_4deg_Cold_cDNA_P Parameter: Timepoint (hr) Value: 6
  misc_feature: MA Experiment 108579 PARAMETER Experiment Name: At_4deg_Cold_cDNA_P Parameter: Tissue Value: Aerial
  misc_feature: MA Experiment ID: 108595 Result: Down-regulated in Transcription
  misc_feature: MA Experiment 108595 PARAMETER Experiment Name: At_Ler-pi_Ovule_cDNA_P Parameter: Plant Line Value: null
  misc_feature: MA Experiment ID: 20000179 Result: Up-regulated in Transcription
  misc_feature: MA Experiment 20000179 PARAMETER Experiment Name: At_Germinating_Seeds_P Parameter: Age (hr) Value: 6 vs. 0
  misc_feature: MA Experiment 20000179 PARAMETER Experiment Name: At_Germinating_Seeds_P Parameter: Tissue Value: Germinating Seeds
  misc_feature: MA Experiment ID: 20000180 Result: Up-regulated in Transcription
  misc_feature: MA Experiment 20000180 PARAMETER Experiment Name: At_Germinating_Seeds_P Parameter: Age (hr) Value: 24 vs. 0
  misc_feature: MA Experiment 20000180 PARAMETER Experiment Name: At_Germinating_Seeds_P Parameter: Tissue Value: Germinating Seeds
  misc_feature: MA Experiment ID: 20000214 Result: Down-regulated in Transcription
  misc_feature: MA Experiment 20000214 PARAMETER Experiment Name: At_4deg_Cold_P Parameter: Timepoint (hr) Value: 6
  misc_feature: MA Experiment ID: 20000452 Result: Down-regulated in Transcription
  misc_feature: MA Experiment 20000452 PARAMETER Experiment Name: At_CS6879_Shoots-Roots_P Parameter: Age (day) Value: 14
  misc_feature: MA Experiment 20000452 PARAMETER Experiment Name: At_CS6879_Shoots-Roots_P Parameter: Organism Value: A. thaliana
  misc_feature: MA Experiment 20000452 PARAMETER Experiment Name: At_CS6879_Shoots-Roots_P Parameter: Plant Line Value: CS6879 vs. WS
  misc_feature: MA Experiment 20000452 PARAMETER Experiment Name: At_CS6879_Shoots-Roots_P Parameter: Tissue Value: Shoots
  misc_feature: MA Experiment ID: 20000573 Result: Down-regulated in Transcription
  misc_feature: MA Experiment 20000573 PARAMETER Experiment Name: At_100uM_ABA_Mutants__P Parameter: Organism Value: A. thaliana
  misc_feature: MA Experiment 20000573 PARAMETER Experiment Name: At_100uM_ABA_Mutants__P Parameter: Plant Line Value: CS22 vs. Ler wt
  misc_feature: MA Experiment 20000573 PARAMETER Experiment Name: At_100uM_ABA_Mutants__P Parameter: Timepoint (hr) Value: N/A
  misc_feature: MA Experiment 20000573 PARAMETER Experiment Name: At_100uM_ABA_Mutants__P Parameter: Tissue Value: Whole Plant
  misc_feature: MA Experiment 20000573 PARAMETER Experiment Name: At_100uM_ABA_Mutants__P Parameter: Treatment Value: None
  misc_feature: MA Experiment ID: 20001248 Result: Up-regulated in Transcription
  misc_feature: MA Experiment 20001248 PARAMETER Experiment Name: At_Far-red-induction_P Parameter: Age (day) Value: 7
  misc_feature: MA Experiment 20001248 PARAMETER Experiment Name: At_Far-red-induction_P Parameter: Light Value: Far-red vs. White
  misc_feature: MA Experiment 20001248 PARAMETER Experiment Name: At_Far-red-induction_P Parameter: Organism Value: A. thaliana
  misc_feature: MA Experiment 20001248 PARAMETER Experiment Name: At_Far-red-induction_P Parameter: Plant Line Value: Columbia
  misc_feature: MA Experiment 20001248 PARAMETER Experiment Name: At_Far-red-induction_P Parameter: Timepoint (hr) Value: 4
  misc_feature: MA Experiment 20001248 PARAMETER Experiment Name: At_Far-red-induction_P Parameter: Tissue Value: Whole Plant
  misc_feature: MA Experiment ID: 20001450 Result: Up-regulated in Transcription
  misc_feature: MA Experiment 20001450 PARAMETER Experiment Name: At_Far-red-induction_P Parameter: Age (day) Value: 7
  misc_feature: MA Experiment 20001450 PARAMETER Experiment Name: At_Far-red-induction_P Parameter: Light Value: Far-red vs. White
  misc_feature: MA Experiment 20001450 PARAMETER Experiment Name: At_Far-red-induction_P Parameter: Organism Value: A. thaliana
  misc_feature: MA Experiment 20001450 PARAMETER Experiment Name: At_Far-red-induction_P Parameter: Plant Line Value: Columbia
  misc_feature: MA Experiment 20001450 PARAMETER Experiment Name: At_Far-red-induction_P Parameter: Timepoint (hr) Value: 8
  misc_feature: MA Experiment 20001450 PARAMETER Experiment Name: At_Far-red-induction_P Parameter: Tissue Value: Whole Plant
  misc_feature: MA Experiment ID: 20001451 Result: Up-regulated in Transcription
  misc_feature: MA Experiment 20001451 PARAMETER Experiment Name: At_Far-red-induction_P Parameter: Age (day) Value: 7
  misc_feature: MA Experiment 20001451 PARAMETER Experiment Name: At_Far-red-induction_P Parameter: Light Value: Far-red vs. White
  misc_feature: MA Experiment 20001451 PARAMETER Experiment Name: At_Far-red-induction_P Parameter: Organism Value: A. thaliana
  misc_feature: MA Experiment 20001451 PARAMETER Experiment Name: At_Far-red-induction_P Parameter: Plant Line Value: Columbia
  misc_feature: MA Experiment 20001451 PARAMETER Experiment Name: At_Far-red-induction_P Parameter: Timepoint (hr) Value: 24
  misc_feature: MA Experiment 20001451 PARAMETER Experiment Name: At_Far-red-induction_P Parameter: Tissue Value: Whole Plant
  misc_feature: MA Experiment ID: 20001557 Result: Down-regulated in Transcription
  misc_feature: MA Experiment 20001557 PARAMETER Experiment Name: At_Drought_Soil_Dry_P Parameter: Age (day) Value: 27
  misc_feature: MA Experiment 20001557 PARAMETER Experiment Name: At_Drought_Soil_Dry_P Parameter: Organism Value: A. thaliana
  misc_feature: MA Experiment 20001557 PARAMETER Experiment Name: At_Drought_Soil_Dry_P Parameter: Plant Line Value: WS
  misc_feature: MA Experiment 20001557 PARAMETER Experiment Name: At_Drought_Soil_Dry_P Parameter: Post Timepoint (hr) Value: 3
  misc_feature: MA Experiment 20001557 PARAMETER Experiment Name: At_Drought_Soil_Dry_P Parameter: Post-Treatment Value: Re-Water vs. No Drought
  misc_feature: MA Experiment 20001557 PARAMETER Experiment Name: At_Drought_Soil_Dry_P Parameter: Timepoint (day) Value: 13
  misc_feature: MA Experiment 20001557 PARAMETER Experiment Name: At_Drought_Soil_Dry_P Parameter: Treatment Value: Drought vs. No Drought
  misc_feature: MA Experiment ID: 20001905 Result: Up-regulated in Transcription
  misc_feature: MA Experiment 20001905 PARAMETER Experiment Name: At_Drought_Reproduction_P Parameter: Age (day) Value: 40
  misc_feature: MA Experiment 20001905 PARAMETER Experiment Name: At_Drought_Reproduction_P Parameter: Organism Value: A. thaliana
  misc_feature: MA Experiment 20001905 PARAMETER Experiment Name: At_Drought_Reproduction_P Parameter: Plant Line Value: WS
  misc_feature: MA Experiment 20001905 PARAMETER Experiment Name: At_Drought_Reproduction_P Parameter: Timepoint (day) Value: 10
  misc_feature: MA Experiment 20001905 PARAMETER Experiment Name: At_Drought_Reproduction_P Parameter: Tissue Value: Rosettes
  misc_feature: MA Experiment 20001905 PARAMETER Experiment Name: At_Drought_Reproduction_P Parameter: Treatment Value: Drought vs. No Drought
acaaattcactttccacaattaatctctctcccaaatctcaattttggactcgtctgcttttgtttatataaacacttctcttcttcttcaatctccacacacaccacacaaaaccacctaccttcttcgatttctccagaaatcctccttcaagttcatactcatggaagaagctaaagtggaagcaaaagatggtaccatctccgtagcttctgcattttccggtcaccaacaagctgttcacgatagcgaccataaattcctaacgcaagctgttgaagaagcttacaagggagtggactgtggtgatggtggcccatttggtgcggtgattgtgcataataacgaggttgtcgctagctgccacaatatggttttgaaatatactgacccaactgcacatgctgaagtcactgccattagagaggcatgtaagaaacttaacaaaatcgagttatcagaatgcgagatttacgcatcttgtgagccatgtccgatgtgcttcggagccatccatctctcgagactcaagaggttggtttatggagccaaagccgaagcagctatagccatcgggtttgatgacttcatagctgatgctttgagaggcacgggggtttaccagaaatctagtctggagatcaagaaagcagacgggaatggcgctgcgattgcggagcaagttttccagaacacaaaggagaagttccgtttatactaaagcacttctccattaccacattcttcttcttcttctccttcatgatggtaattagaagtagtagaagaagaactgcacttgctttaacttaaataaatctctgtttcaaattgttcattttaaaaacagaaggaaacgaaaaaaaaaatcaatttcggttcttgttgacacgatttgtaatttcttttcttcatttgaattgaactggtaaatactttcttctctgtc

SEQ ID NO: 102866 - protein, 185 aa, Arabidopsis thaliana; identical to SEQ ID NO: 23876
  peptide (1)..(185): Ceres Seq. ID no. 13611424
  misc_feature (27)..(129): Pfam Name: Cytidine and deoxycytidylate deaminase Pfam Description: Cytidine and deoxycytidylate deaminase
  misc_feature (1)..(185): Homolog of NCBI NO: 15241124 NR Description: putative cytidine deaminase - like [Arabidopsis >gi|14532498|gb|AAK63977.1| AT5g28050/F15F15_120 [Arabidopsis >gi|22137296|gb|AAM91493.1| AT5g28050/F15F15_120 [Arabidopsis
  misc_feature (1)..(185): Homolog of NCBI NO: 18266045 NR Description: deoxycytidine deaminase [Brassica oleracea]
  misc_feature (1)..(185): Homolog of NCBI NO: 40714681 NR Description: putative deoxycytidine deaminase [Oryza sativa
  misc_feature (6)..(185): Homolog of NCBI NO: 3204108 NR Description: putative cytidine deaminase; putative
  misc_feature (6)..(185): Homolog of NCBI NO: 23928436 NR Description: putative cytidine deaminase [Zea mays]
  misc_feature (70)..(184): Homolog of NCBI NO: 15229953 NR Description: hypothetical protein [Arabidopsis thaliana]
  misc_feature (33)..(158): Homolog of NCBI NO: 23021911 NR Description: hypothetical protein [Clostridium thermocellum
  misc_feature (32)..(164): Homolog of NCBI NO: 17554608 NR Description: Cytidine, cytosine, dCTP et al deaminase elegans] >gi|15144367|gb|AAK84461.1|AC006679_2 Hypothetical
  misc_feature (32)..(164): Homolog of NCBI NO: 39582012 NR Description: Hypothetical protein CBG09150 [Caenorhabditis
  misc_feature (30)..(181): Homolog of NCBI NO: 39591749 NR Description: Hypothetical protein CBG18226 [Caenorhabditis

SEQ ID NO: 102867 - protein, 116 aa, Arabidopsis thaliana; identical to SEQ ID NO: 23877
  peptide (1)..(116): Ceres Seq. ID no. 13611425
  misc_feature (1)..(60): Pfam Name: Cytidine and deoxycytidylate deaminase Pfam Description: Cytidine and deoxycytidylate deaminase
  misc_feature (1)..(116): Homolog of NCBI NO: 15241124 NR Description: putative cytidine deaminase - like [Arabidopsis >gi|14532498|gb|AAK63977.1| AT5g28050/F15F15_120 [Arabidopsis >gi|22137296|gb|AAM91493.1| AT5g28050/F15F15_120 [Arabidopsis
  misc_feature (1)..(116): Homolog of NCBI NO: 18266045 NR Description: deoxycytidine deaminase [Brassica oleracea]
  misc_feature (1)..(116): Homolog of NCBI NO: 40714681 NR Description: putative deoxycytidine deaminase [Oryza sativa
  misc_feature (1)..(116): Homolog of NCBI NO: 3204108 NR Description: putative cytidine deaminase; putative
  misc_feature (1)..(116): Homolog of NCBI NO: 23928436 NR Description: putative cytidine deaminase [Zea mays]
  misc_feature (1)..(115): Homolog of NCBI NO: 15229953 NR Description: hypothetical protein [Arabidopsis thaliana]
  misc_feature (1)..(89): Homolog of NCBI NO: 23021911 NR Description: hypothetical protein [Clostridium thermocellum
  misc_feature (1)..(95): Homolog of NCBI NO: 17554608 NR Description: Cytidine, cytosine, dCTP et al deaminase elegans] >gi|15144367|gb|AAK84461.1|AC006679_2 Hypothetical
  misc_feature (1)..(95): Homolog of NCBI NO: 39582012 NR Description: Hypothetical protein CBG09150 [Caenorhabditis
  misc_feature (1)..(112): Homolog of NCBI NO: 39591749 NR Description: Hypothetical protein CBG18226 [Caenorhabditis

SEQ ID NO: 102868 - DNA, 738 bp, Arabidopsis thaliana
  misc_feature (1)..(738): Ceres Seq. ID no. 13611426
  misc_feature: MA Experiment ID: 108434 Result: Up-regulated in Transcription
  misc_feature: MA Experiment 108434 PARAMETER Experiment Name: At_Root_Tips_cDNA_P Parameter: Tissue Value: Root Tips
  misc_feature: MA Experiment ID: 20000111 Result: Up-regulated in Transcription
  misc_feature: MA Experiment 20000111 PARAMETER Experiment Name: At_42deg_Heat_cDNA_P Parameter: Temperature (deg C) Value: 42 vs. 22
  misc_feature: MA Experiment 20000111 PARAMETER Experiment Name: At_42deg_Heat_cDNA_P Parameter: Timepoint (hr) Value: 6
  misc_feature: MA Experiment 20000111 PARAMETER Experiment Name: At_42deg_Heat_cDNA_P Parameter: Tissue Value: Aerial
  misc_feature: MA Experiment ID: 20000113 Result: Up-regulated in Transcription
  misc_feature: MA Experiment 20000113 PARAMETER Experiment Name: At_42deg_Heat_cDNA_P Parameter: Temperature (deg C) Value: 42 vs. 22
  misc_feature: MA Experiment 20000113 PARAMETER Experiment Name: At_42deg_Heat_cDNA_P Parameter: Timepoint (hr) Value: 8
  misc_feature: MA Experiment 20000113 PARAMETER Experiment Name: At_42deg_Heat_cDNA_P Parameter: Tissue Value: Aerial
  misc_feature: MA Experiment ID: 20000179 Result: Up-regulated in Transcription
  misc_feature: MA Experiment 20000179 PARAMETER Experiment Name: At_Germinating_Seeds_P Parameter: Age (hr) Value: 6 vs. 0
  misc_feature: MA Experiment 20000179 PARAMETER Experiment Name: At_Germinating_Seeds_P Parameter: Tissue Value: Germinating Seeds
  misc_feature: MA Experiment ID: 20000794 Result: Down-regulated in Transcription
  misc_feature: MA Experiment 20000794 PARAMETER Experiment Name: At_Petals_P Parameter: Age (day) Value: 23-25 days
  misc_feature: MA Experiment 20000794 PARAMETER Experiment Name: At_Petals_P Parameter: Plant Line Value: WS
  misc_feature: MA Experiment 20000794 PARAMETER Experiment Name: At_Petals_P Parameter: Tissue Value: Petals vs. Whole plant
attcgtataatttttcagtaaattatctaaccctctcgatcctctctcgcctgttgaaaaagcacgacgcaagagctaaggatcaaaaaggaagacgaagaaagagatggatccagacgctgttgcaaaggctttcgttgagcactactactccaccttcgatgcaaatcgtccagggttggtttctctataccaagaaggatccatgttgaccttcgaaggccagaagatccagggctctcagaacatcgtcgctaagctcaccggcctccctttccagcagtgtaagcacaacatcaccaccgtcgattgtcagccttctggtcccgccggtggtatgctcgtctttgtctccggcaatcttcagctcgctggtgaacaacacgctctcaagttcagccagatgttccatttgatatcgaatcagggaaactactacgtgttcaatgacatattcaggttgaactatgcctgaggaatttgatgccagaggtacatggaaccattattggaagctgaaaagagagtggtggaaagtttgggactattcaaaaactgtttgagttggttttagatttggaacattaagctttgtttcaggtggtttgctgtctgtttttattttaatcaatggagctatttgttactttgtttgagatgactccttttgttttcgggcactgaaccatgattcagtaagggtaaaacaaaagattttttgaaatacggttctctttt

SEQ ID NO: 102869 - protein, 122 aa, Arabidopsis thaliana [sequence omitted]

SEQ ID NO: 102870 - protein, 89 aa, Arabidopsis thaliana; identical to SEQ ID NO: 36259
  peptide (1)..(89): Ceres Seq. ID no. 13611428
  misc_feature (1)..(86): Pfam Name: Nuclear transport factor 2 (NTF2) domain Pfam Description: Nuclear transport factor 2 (NTF2) domain
  misc_feature (1)..(89): Homolog of NCBI NO: 15223491 NR Description: nuclear transport factor -related [Arabidopsis
  misc_feature (1)..(89): Homolog of NCBI NO: 15217779 NR Description: nuclear transport factor 2 -related [Arabidopsis
  misc_feature (1)..(89): Homolog of NCBI NO: 21555203 NR Description: nuclear transport factor 2, putative [Arabidopsis
  misc_feature (1)..(88): Homolog of NCBI NO: 15214179 NR Description: Nuclear transport factor 2 (NTF-2)
  misc_feature (1)..(88): Homolog of NCBI NO: 34908774 NR Description: putative Nuclear transport factor 2 [Oryza sativa
  misc_feature (1)..(88): Homolog of NCBI NO: 19114665 NR Description: nuclear transport factor, NTF2 homolog pombe] >gi|19862916|sp|Q10100|NTF2_SCHPO Probable nuclear
  misc_feature (1)..(88): Homolog of NCBI NO: 25402667 NR Description: protein T23J18.22 [imported] - Arabidopsis >gi|6554189|gb|AAF16635.1|AC011661_13 T23J18.22 [Arabidopsis
  misc_feature (1)..(89): Homolog of NCBI NO: 6320846 NR Description: May coordinate the Ran-dependent (GSP1/GSP2) and disassociation reactions of nuclear import; human homolog yeast mutants; Ntf2p [Saccharomyces cerevisiae] (Nuclear
  misc_feature (1)..(89): Homolog of NCBI NO: 21730277 NR Description: Chain A, N77y Point Mutant Of S.Cerevisiae Ntf2 Chain B, N77y Point Mutant Of S.Cerevisiae Ntf2 Chain C, N77y Point Mutant Of S.Cerevisiae Ntf2
  misc_feature (1)..(89): Homolog of NCBI NO: 15214172 NR Description: Nuclear transport factor 2 (NTF-2)

SEQ ID NO: 102871 - protein, 69 aa, Arabidopsis thaliana
  peptide (1)..(69): Ceres Seq. ID no. 13611429
SYNFSVNYLTLSILSRLLKKHDARAKDQKGRRRKRWIQTLLQRLSLSTTTPPSMQIVQGWFLYTKKDPC

SEQ ID NO: 102872 - DNA, 1394 bp, Arabidopsis thaliana
  misc_feature (1)..(1394): Ceres Seq. ID no. 13611450
  misc_feature: MA Experiment ID: 108569 Result: Up-regulated in Transcription
  misc_feature: MA Experiment 108569 PARAMETER Experiment Name: At_0.001%_MeJA__cDNA_P Parameter: Timepoint (hr) Value: 6
  misc_feature: MA Experiment 108569 PARAMETER Experiment Name: At_0.001%_MeJA__cDNA_P Parameter: Tissue Value: Aerial
  misc_feature: MA Experiment 108569 PARAMETER Experiment Name: At_0.001%_MeJA__cDNA_P Parameter: Treatment Value: 0.001% MeJA vs. No Treatment
  misc_feature: MA Experiment ID: 108573 Result: Up-regulated in Transcription
  misc_feature: MA Experiment 108573 PARAMETER Experiment Name: At_Drought_cDNA_P Parameter: Timepoint (hr) Value: 6
  misc_feature: MA Experiment 108573 PARAMETER Experiment Name: At_Drought_cDNA_P Parameter: Tissue Value: Aerial
  misc_feature: MA Experiment 108573 PARAMETER Experiment Name: At_Drought_cDNA_P Parameter: Treatment Value: Drought vs. No Drought
  misc_feature: MA Experiment ID: 20000070 Result: Up-regulated in Transcription
  misc_feature: MA Experiment 20000070 PARAMETER Experiment Name: At_100uM_ABA_Mutants_cDNA_P Parameter: Plant Line Value: CS24
  misc_feature: MA Experiment 20000070 PARAMETER Experiment Name: At_100uM_ABA_Mutants_cDNA_P Parameter: Timepoint (hr) Value: 6
  misc_feature: MA Experiment 20000070 PARAMETER Experiment Name: At_100uM_ABA_Mutants_cDNA_P Parameter: Tissue Value: Aerial
  misc_feature: MA Experiment 20000070 PARAMETER Experiment Name: At_100uM_ABA_Mutants_cDNA_P Parameter: Treatment Value: 100uM ABA vs. No Treatment
  misc_feature: MA Experiment ID: 20000071 Result: Up-regulated in Transcription
  misc_feature: MA Experiment 20000071 PARAMETER Experiment Name: At_100uM_ABA_Mutants_cDNA_P Parameter: Plant Line Value: CS8104
  misc_feature: MA Experiment 20000071 PARAMETER Experiment Name: At_100uM_ABA_Mutants_cDNA_P Parameter: Timepoint (hr) Value: 6
  misc_feature: MA Experiment 20000071 PARAMETER Experiment Name: At_100uM_ABA_Mutants_cDNA_P Parameter: Tissue Value: Aerial
  misc_feature: MA Experiment 20000071 PARAMETER Experiment Name: At_100uM_ABA_Mutants_cDNA_P Parameter: Treatment Value: 100uM ABA vs. No Treatment
  misc_feature: MA Experiment ID: 20000087 Result: Up-regulated in Transcription
  misc_feature: MA Experiment 20000087 PARAMETER Experiment Name: At_100uM_ABA_Mutants_cDNA_P Parameter: Plant Line Value: WS
  misc_feature: MA Experiment 20000087 PARAMETER Experiment Name: At_100uM_ABA_Mutants_cDNA_P Parameter: Timepoint (hr) Value: 6
  misc_feature: MA Experiment 20000087 PARAMETER Experiment Name: At_100uM_ABA_Mutants_cDNA_P Parameter: Tissue Value: Aerial
  misc_feature: MA Experiment 20000087 PARAMETER Experiment Name: At_100uM_ABA_Mutants_cDNA_P Parameter: Treatment Value: 100uM ABA vs. No Treatment
  misc_feature: MA Experiment ID: 20000093 Result: Down-regulated in Transcription
  misc_feature: MA Experiment 20000093 PARAMETER Experiment Name: At_42deg_Heat_cDNA_P Parameter: Temperature (deg C) Value: 42 vs. 22
  misc_feature: MA Experiment 20000093 PARAMETER Experiment Name: At_42deg_Heat_cDNA_P Parameter: Timepoint (hr) Value: 0.5
  misc_feature: MA Experiment 20000093 PARAMETER Experiment Name: At_42deg_Heat_cDNA_P Parameter: Tissue Value: Aerial
  misc_feature: MA Experiment ID: 20000111 Result: Down-regulated in Transcription
  misc_feature: MA Experiment 20000111 PARAMETER Experiment Name: At_42deg_Heat_cDNA_P Parameter: Temperature (deg C) Value: 42 vs. 22
  misc_feature: MA Experiment 20000111 PARAMETER Experiment Name: At_42deg_Heat_cDNA_P Parameter: Timepoint (hr) Value: 6
  misc_feature: MA Experiment 20000111 PARAMETER Experiment Name: At_42deg_Heat_cDNA_P Parameter: Tissue Value: Aerial
  misc_feature: MA Experiment ID: 20000112 Result: Down-regulated in Transcription
  misc_feature: MA Experiment 20000112 PARAMETER Experiment Name: At_42deg_Heat_cDNA_P Parameter: Temperature (deg C) Value: 42 vs. 22
  misc_feature: MA Experiment 20000112 PARAMETER Experiment Name: At_42deg_Heat_cDNA_P Parameter: Timepoint (hr) Value: 2
  misc_feature: MA Experiment 20000112 PARAMETER Experiment Name: At_42deg_Heat_cDNA_P Parameter: Tissue Value: Aerial
  misc_feature: MA Experiment ID: 20000117 Result: Up-regulated in Transcription
  misc_feature: MA Experiment 20000117 PARAMETER Experiment Name: At_100uM_ABA_Mutants_cDNA_P Parameter: Plant Line Value: Columbia
  misc_feature: MA Experiment 20000117 PARAMETER Experiment Name: At_100uM_ABA_Mutants_cDNA_P Parameter: Timepoint (hr) Value: 6
  misc_feature: MA Experiment 20000117 PARAMETER Experiment Name: At_100uM_ABA_Mutants_cDNA_P Parameter: Tissue Value: Aerial
  misc_feature: MA Experiment 20000117 PARAMETER Experiment Name: At_100uM_ABA_Mutants_cDNA_P Parameter: Treatment Value: 100uM ABA vs. No Treatment
  misc_feature: MA Experiment ID: 20000144 Result: Down-regulated in Transcription
  misc_feature: MA Experiment 20000144 PARAMETER Experiment Name: At_42deg_Heat_cDNA_P Parameter: Temperature (deg C) Value: 42 vs. 22
  misc_feature: MA Experiment 20000144 PARAMETER Experiment Name: At_42deg_Heat_cDNA_P Parameter: Timepoint (hr) Value: 1
  misc_feature: MA Experiment 20000144 PARAMETER Experiment Name: At_42deg_Heat_cDNA_P Parameter: Tissue Value: Aerial
  misc_feature: MA Experiment ID: 20000171 Result: Down-regulated in Transcription
  misc_feature: MA Experiment 20000171 PARAMETER Experiment Name: At_42deg_Heat_P Parameter: Age (day) Value: 14
  misc_feature: MA Experiment 20000171 PARAMETER Experiment Name: At_42deg_Heat_P Parameter: Organism Value: A. thaliana
  misc_feature: MA Experiment 20000171 PARAMETER Experiment Name: At_42deg_Heat_P Parameter: Plant Line Value: WS
  misc_feature: MA Experiment 20000171 PARAMETER Experiment Name: At_42deg_Heat_P Parameter: Temperature (deg C) Value: 42 vs. 22
  misc_feature: MA Experiment 20000171 PARAMETER Experiment Name: At_42deg_Heat_P Parameter: Timepoint (hr) Value: 1
  misc_feature: MA Experiment 20000171 PARAMETER Experiment Name: At_42deg_Heat_P Parameter: Tissue Value: Aerial
  misc_feature: MA Experiment ID: 20000173 Result: Down-regulated in Transcription
  misc_feature: MA Experiment 20000173 PARAMETER Experiment Name: At_42deg_Heat_P Parameter: Age (day) Value: 14
  misc_feature: MA Experiment 20000173 PARAMETER Experiment Name: At_42deg_Heat_P Parameter: Organism Value: A. thaliana
  misc_feature: MA Experiment 20000173 PARAMETER Experiment Name: At_42deg_Heat_P Parameter: Plant Line Value: WS
  misc_feature: MA Experiment 20000173 PARAMETER Experiment Name: At_42deg_Heat_P Parameter: Temperature (deg C) Value: 42 vs. 22
  misc_feature: MA Experiment 20000173 PARAMETER Experiment Name: At_42deg_Heat_P Parameter: Timepoint (hr) Value: 6
  misc_feature: MA Experiment 20000173 PARAMETER Experiment Name: At_42deg_Heat_P Parameter: Tissue Value: Aerial
  misc_feature: MA Experiment ID: 20000179 Result: Up-regulated in Transcription
  misc_feature: MA Experiment 20000179 PARAMETER Experiment Name: At_Germinating_Seeds_P Parameter: Age (hr) Value: 6 vs. 0
  misc_feature: MA Experiment 20000179 PARAMETER Experiment Name: At_Germinating_Seeds_P Parameter: Tissue Value: Germinating Seeds
  misc_feature: MA Experiment ID: 20000180 Result: Up-regulated in Transcription
  misc_feature: MA Experiment 20000180 PARAMETER Experiment Name: At_Germinating_Seeds_P Parameter: Age (hr) Value: 24 vs. 0
  misc_feature: MA Experiment 20000180 PARAMETER Experiment Name: At_Germinating_Seeds_P Parameter: Tissue Value: Germinating Seeds
  misc_feature: MA Experiment ID: 20000213 Result: Up-regulated in Transcription
  misc_feature: MA Experiment 20000213 PARAMETER Experiment Name: At_4deg_Cold_P Parameter: Timepoint (hr) Value: 2
  misc_feature: MA Experiment ID: 20000224 Result: Down-regulated in Transcription
agcaaaccgaagtgggaacgaaaccccatgctccaagtccaattaaataacatatgtccacagaaatgttttcaaaattcgaataagccacagcaacgtgtcttgttcatatatccactataacccaaagctgcttcaatggtcggatatggacacgtgtcagttaatcagaccatctccaagaaaaaatatcccaaatctttcttccctattcagtcccccaatcaacaatcctcttcacatttctattttctcctccgaggtcgtctctcgaccaaaccacaaaaaccagaacaaaaataactaaaaaacaatcagatctgagatcgaacaaaacaacatgaacacgttaatcccatcggagaaaagatggatcatcaccggcgttttactagccggtttagttggcggtgctttgcttttcacaagcttcatacgagccgctgacgaaacgctcttcctctgttccacagcaagcgccaaaagcagagcggtggctgcggcagctgattacgaagcgactccgattcagcttcaagcgatcgtccactacgcgacatctaacgttgtcccacaacagaatcttgctgagatctcgatctctttcaacatcttgaaaaagctagctccggctaactttctcgtgttcggtctcggtcgtgactcgctcatgtgggcttctttaaatccacgtggcaaaaccttgttcttggaagaagatcttgaatggtttcagaaagtgaccaaagactctcctttcttacgtgcgcatcacgtgcgttacaggacgcagcttcaacaagccgattcgcttctacgttcgtacaaaacggagcctaagtgttttccggcgaaatcttatctccggggaaacgagaagtgtaagctagctctcacgggactgcccgatgagttctacgatacagagtgggatctgctgatggtcgatgctcctaaaggttacttcgcagaagctccgggaagaatggcggcgattttctcggcggctgttatggctaggaaccggaagaaaccgggagttacgcacgtgttcttgcacgatgttaatcggagggtggagaagacttttgccgaggagtttttatgccggaagtatagagtcaacgccgccgggaggttatggcattttgctattcctccggcggctgcgaacgctacgattgactctggtgattataggttttgctaagattgcgacacgatttatcttcttatttcctcttttgcccttttattttacttttttgaggaattttattacagcattgggttcacttattatctgatttagtgccgacagttttggatctgcatctcgtgtttcgttatttttagttacaggctttccaaaatttcatggggcattatatttc

SEQ ID NO: 102873 - protein, 289 aa, Arabidopsis thaliana; identical to SEQ ID NO: 21458
  peptide (1)..(289): Ceres Seq. ID no. 13611451
  misc_feature (42)..(289): Pfam Name: Protein of unknown function (DUF579) Pfam Description: Protein of unknown function (DUF579)
  misc_feature (1)..(289): Homolog of NCBI NO: 18396558 NR Description: expressed protein [Arabidopsis thaliana]
  misc_feature (1)..(289): Homolog of NCBI NO: 21537399 NR Description: unknown [Arabidopsis thaliana]
  misc_feature (8)..(289): Homolog of NCBI NO: 15220402 NR Description: expressed protein [Arabidopsis thaliana]
  misc_feature (29)..(289): Homolog of NCBI NO: 18409879 NR Description: expressed protein [Arabidopsis thaliana]
  misc_feature (29)..(289): Homolog of NCBI NO: 25354648 NR Description: hypothetical protein F14O23.3 [imported] - thaliana >gi|7239492|gb|AAF43218.1|AC012654_2 EST gb|AI999169
  misc_feature (16)..(289): Homolog of NCBI NO: 15217566 NR Description: hypothetical protein [Arabidopsis thaliana]
  misc_feature (62)..(279): Homolog of NCBI NO: 18398986 NR Description: expressed protein [Arabidopsis thaliana]
  misc_feature (48)..(289): Homolog of NCBI NO: 25402555 NR Description: hypothetical protein [imported] - Arabidopsis >gi|3482933|gb|AAC33218.1| Similar to cdc2 protein kinases
  misc_feature (1)..(278): Homolog of NCBI NO: 15234881 NR Description: expressed protein [Arabidopsis thaliana]
  misc_feature (43)..(289): Homolog of NCBI NO: 18397819 NR Description: expressed protein [Arabidopsis thaliana]

SEQ ID NO: 102874 - protein, 179 aa, Arabidopsis thaliana; identical to SEQ ID NO: 21459
  peptide (1)..(179): Ceres Seq. ID no. 13611452
  misc_feature (1)..(179): Pfam Name: Protein of unknown function (DUF579) Pfam Description: Protein of unknown function (DUF579)
  misc_feature (1)..(179): Homolog of NCBI NO: 18396558 NR Description: expressed protein [Arabidopsis thaliana]
  misc_feature (1)..(179): Homolog of NCBI NO: 21537399 NR Description: unknown [Arabidopsis thaliana]
  misc_feature (1)..(179): Homolog of NCBI NO: 15220402 NR Description: expressed protein [Arabidopsis thaliana]
  misc_feature (1)..(179): Homolog of NCBI NO: 18409879 NR Description: expressed protein [Arabidopsis thaliana]
  misc_feature (1)..(179): Homolog of NCBI NO: 25354648 NR Description: hypothetical protein F14O23.3 [imported] - thaliana >gi|7239492|gb|AAF43218.1|AC012654_2 EST gb|AI999169
  misc_feature (1)..(179): Homolog of NCBI NO: 15217566 NR Description: hypothetical protein [Arabidopsis thaliana]
  misc_feature (1)..(169): Homolog of NCBI NO: 18398986 NR Description: expressed protein [Arabidopsis thaliana]
  misc_feature (1)..(179): Homolog of NCBI NO: 25402555 NR Description: hypothetical protein [imported] - Arabidopsis >gi|3482933|gb|AAC33218.1| Similar to cdc2 protein kinases
  misc_feature (1)..(168): Homolog of NCBI NO: 15234881 NR Description: expressed protein [Arabidopsis thaliana]
  misc_feature (1)..(179): Homolog of NCBI NO: 18397819 NR Description: expressed protein [Arabidopsis thaliana]

SEQ ID NO: 102875 - DNA, 619 bp, Arabidopsis thaliana
  misc_feature (1)..(619): Ceres Seq. ID no. 13611457
  misc_feature: MA Experiment ID: 108462 Result: Down-regulated in Transcription
  misc_feature: MA Experiment 108462 PARAMETER Experiment Name: At_Germinating_Seeds_cDNA_P Parameter: Age (day) Value: 2 vs. 0
  misc_feature: MA Experiment 108462 PARAMETER Experiment Name: At_Germinating_Seeds_cDNA_P Parameter: Tissue Value: Germinating Seeds
  misc_feature: MA Experiment ID: 108463 Result: Down-regulated in Transcription
  misc_feature: MA Experiment 108463 PARAMETER Experiment Name: At_Germinating_Seeds_cDNA_P Parameter: Age (day) Value: 3 vs. 0
  misc_feature: MA Experiment 108463 PARAMETER Experiment Name: At_Germinating_Seeds_cDNA_P Parameter: Tissue Value: Germinating Seeds
  misc_feature: MA Experiment ID: 108573 Result: Up-regulated in Transcription
  misc_feature: MA Experiment 108573 PARAMETER Experiment Name: At_Drought_cDNA_P Parameter: Timepoint (hr) Value: 6
  misc_feature: MA Experiment 108573 PARAMETER Experiment Name: At_Drought_cDNA_P Parameter: Tissue Value: Aerial
  misc_feature: MA Experiment 108573 PARAMETER Experiment Name: At_Drought_cDNA_P Parameter: Treatment Value: Drought vs. No Drought
  misc_feature: MA Experiment ID: 108585 Result: Up-regulated in Transcription
  misc_feature: MA Experiment 108585 PARAMETER Experiment Name: At_5mM_NaNP_cDNA_P Parameter: Timepoint (hr) Value: 6
  misc_feature: MA Experiment 108585 PARAMETER Experiment Name: At_5mM_NaNP_cDNA_P Parameter: Tissue Value: Aerial
  misc_feature: MA Experiment 108585 PARAMETER Experiment Name: At_5mM_NaNP_cDNA_P Parameter: Treatment Value: null
  misc_feature: MA Experiment ID: 108595 Result: Down-regulated in Transcription
  misc_feature: MA Experiment 108595 PARAMETER Experiment Name: At_Ler-pi_Ovule_cDNA_P Parameter: Plant Line Value: null
  misc_feature: MA Experiment ID: 20001451 Result: Up-regulated in Transcription
  misc_feature: MA Experiment 20001451 PARAMETER Experiment Name: At_Far-red-induction_P Parameter: Age (day) Value: 7
  misc_feature: MA Experiment 20001451 PARAMETER Experiment Name: At_Far-red-induction_P Parameter: Light Value: Far-red vs. White
  misc_feature: MA Experiment 20001451 PARAMETER Experiment Name: At_Far-red-induction_P Parameter: Organism Value: A. thaliana
  misc_feature: MA Experiment 20001451 PARAMETER Experiment Name: At_Far-red-induction_P Parameter: Plant Line Value: Columbia
  misc_feature: MA Experiment 20001451 PARAMETER Experiment Name: At_Far-red-induction_P Parameter: Timepoint (hr) Value: 24
  misc_feature: MA Experiment 20001451 PARAMETER Experiment Name: At_Far-red-induction_P Parameter: Tissue Value: Whole Plant
aatcctctcaatcctctgctgctcaatctctcatcatcggcatcgctctctctaaaaatgtctcagatggatcccgacgctgtatctaaggccttcgtcgaacattactattccaccttcgacaccaaccgtgtcggtctcgctggtctctatcaggaagcttctatgctcaccttcgaaggtcaaaagatccaaggagtccagagcatcgtcgctaagctcacctctcttcctttccagcagtgcaagcatcacatctccaccgttgattgtcagccttctggtcctgcttccggtatgctcgttttcgtctccggtaatctccagctcgccggagaagaacacgctctcaagttcagccagatgtttcatttgatgccgacgccacaaggaagcttttacgtgttcaacgatatattcagttggagattgcttcaagttttcaataatttatttacttgataagcattgcaagtgtcaagcacaaaagttgcagattcccacaaaccaaataagaaagatcaattttgatgtagaattttgcttctttttcagaagaaaagtctcagcttcactgattcgaccgttgattcaatttctatggcagttcataattttc

SEQ ID NO: 102876 - protein, 153 aa, Arabidopsis thaliana
  peptide (1)..(153): Ceres Seq. ID no. 13611458
  misc_feature (28)..(140): Pfam Name: Nuclear transport factor 2 (NTF2) domain Pfam Description: Nuclear transport factor 2 (NTF2) domain
  misc_feature (20)..(140): Homolog of NCBI NO: 15217779 NR Description: nuclear transport factor 2 -related [Arabidopsis
  misc_feature (23)..(140): Homolog of NCBI NO: 21555203 NR Description: nuclear transport factor 2, putative [Arabidopsis
  misc_feature (23)..(140): Homolog of NCBI NO: 15223491 NR Description: nuclear transport factor -related [Arabidopsis
  misc_feature (23)..(140): Homolog of NCBI NO: 15214179 NR Description: Nuclear transport factor 2 (NTF-2)
  misc_feature (26)..(140): Homolog of NCBI NO: 34908774 NR Description: putative Nuclear transport factor 2 [Oryza sativa
  misc_feature (26)..(140): Homolog of NCBI NO: 25402667 NR Description: protein T23J18.22 [imported] - Arabidopsis >gi|6554189|gb|AAF16635.1|AC011661_13 T23J18.22 [Arabidopsis
  misc_feature (24)..(140): Homolog of NCBI NO: 14700035 NR Description: nuclear transport factor 2 [Aspergillus nidulans]
  misc_feature (24)..(140): Homolog of NCBI NO: 19114665 NR Description: nuclear transport factor, NTF2 homolog pombe] >gi|19862916|sp|Q10100|NTF2_SCHPO Probable nuclear
  misc_feature (23)..(140): Homolog of NCBI NO: 15214172 NR Description: Nuclear transport factor 2 (NTF-2)
  misc_feature (24)..(140): Homolog of NCBI NO: 21748151 NR Description: putative nuclear transport factor 2 [Cladosporium
NPLNPLLLNLSSSASLSLKMSQMDPDAVSKAFVEHYYSTFDTNRVGLAGLYQEASMLTFEGQKIQGVQSIVAKLTSLPFQQCKHHISTVDCQPSGPASGMLVFVSGNLQLAGEEHALKFSQMFHLMPTPQGSFYVFNDIFSWRLLQVFNNLFT

SEQ ID NO: 102877 - protein, 134 aa, Arabidopsis thaliana
  peptide (1)..(134): Ceres Seq. ID no. 13611459
  misc_feature (9)..(121): Pfam Name: Nuclear transport factor 2 (NTF2) domain Pfam Description: Nuclear transport factor 2 (NTF2) domain
  misc_feature (1)..(121): Homolog of NCBI NO: 15217779 NR Description: nuclear transport factor 2 -related [Arabidopsis
  misc_feature (4)..(121): Homolog of NCBI NO: 21555203 NR Description: nuclear transport factor 2, putative [Arabidopsis
  misc_feature (4)..(121): Homolog of NCBI NO: 15223491 NR Description: nuclear transport factor -related [Arabidopsis
  misc_feature (4)..(121): Homolog of NCBI NO: 15214179 NR Description: Nuclear transport factor 2 (NTF-2)
  misc_feature (7)..(121): Homolog of NCBI NO: 34908774 NR Description: putative Nuclear transport factor 2 [Oryza sativa
  misc_feature (7)..(121): Homolog of NCBI NO: 25402667 NR Description: protein T23J18.22 [imported] - Arabidopsis >gi|6554189|gb|AAF16635.1|AC011661_13 T23J18.22 [Arabidopsis
  misc_feature (5)..(121): Homolog of NCBI NO: 14700035 NR Description: nuclear transport factor 2 [Aspergillus nidulans]
  misc_feature (5)..(121): Homolog of NCBI NO: 19114665 NR Description: nuclear transport factor, NTF2 homolog pombe] >gi|19862916|sp|Q10100|NTF2_SCHPO Probable nuclear
  misc_feature (4)..(121): Homolog of NCBI NO: 15214172 NR Description: Nuclear transport factor 2 (NTF-2)
  misc_feature (5)..(121): Homolog of NCBI NO: 21748151 NR Description: putative nuclear transport factor 2 [Cladosporium
MSQMDPDAVSKAFVEHYYSTFDTNRVGLAGLYQEASMLTFEGQKIQGVQSIVAKLTSLPFQQCKHHISTVDCQPSGPASGMLVFVSGNLQLAGEEHALKFSQMFHLMPTPQGSFYVFNDIFSWRLLQVFNNLFT

SEQ ID NO: 102878 - protein, 131 aa, Arabidopsis thaliana
  peptide (1)..(131): Ceres Seq. ID no. 13611460
  misc_feature (6)..(118): Pfam Name: Nuclear transport factor 2 (NTF2) domain Pfam Description: Nuclear transport factor 2 (NTF2) domain
  misc_feature (1)..(118): Homolog of NCBI NO: 15217779 NR Description: nuclear transport factor 2 -related [Arabidopsis
  misc_feature (1)..(118): Homolog of NCBI NO: 21555203 NR Description: nuclear transport factor 2, putative [Arabidopsis
  misc_feature (1)..(118): Homolog of NCBI NO: 15223491 NR Description: nuclear transport factor -related [Arabidopsis
  misc_feature (1)..(118): Homolog of NCBI NO: 15214179 NR Description: Nuclear transport factor 2 (NTF-2)
  misc_feature (4)..(118): Homolog of NCBI NO: 34908774 NR Description: putative Nuclear transport factor 2 [Oryza sativa
  misc_feature (4)..(118): Homolog of NCBI NO: 25402667 NR Description: protein T23J18.22 [imported] - Arabidopsis >gi|6554189|gb|AAF16635.1|AC011661_13 T23J18.22 [Arabidopsis
  misc_feature (2)..(118): Homolog of NCBI NO: 14700035 NR Description: nuclear transport factor 2 [Aspergillus nidulans]
  misc_feature (2)..(118): Homolog of NCBI NO: 19114665 NR Description: nuclear transport factor, NTF2 homolog pombe] >gi|19862916|sp|Q10100|NTF2_SCHPO Probable nuclear
  misc_feature (1)..(118): Homolog of NCBI NO: 15214172 NR Description: Nuclear transport factor 2 (NTF-2)
  misc_feature (2)..(118): Homolog of NCBI NO: 21748151 NR Description: putative nuclear transport factor 2 [Cladosporium
MDPDAVSKAFVEHYYSTFDTNRVGLAGLYQEASMLTFEGQKIQGVQSIVAKLTSLPFQQCKHHISTVDCQPSGPASGMLVFVSGNLQLAGEEHALKFSQMFHLMPTPQGSFYVFNDIFSWRLLQVFNNLFT

SEQ ID NO: 102879 - DNA, 1180 bp, Arabidopsis thaliana
  misc_feature (1)..(1180): Ceres Seq. ID no. 13611461
  misc_feature: MA Experiment ID: 20000179 Result: Down-regulated in Transcription
  misc_feature: MA Experiment 20000179 PARAMETER Experiment Name: At_Germinating_Seeds_P Parameter: Age (hr) Value: 6 vs. 0
  misc_feature: MA Experiment 20000179 PARAMETER Experiment Name: At_Germinating_Seeds_P Parameter: Tissue Value: Germinating Seeds
  misc_feature: MA Experiment ID: 20000180 Result: Down-regulated in Transcription
  misc_feature: MA Experiment 20000180 PARAMETER Experiment Name: At_Germinating_Seeds_P Parameter: Age (hr) Value: 24 vs. 0
  misc_feature: MA Experiment 20000180 PARAMETER Experiment Name: At_Germinating_Seeds_P Parameter: Tissue Value: Germinating Seeds
  misc_feature: MA Experiment ID: 20000437 Result: Up-regulated in Transcription
  misc_feature: MA Experiment 20000437 PARAMETER Experiment Name: At_Drought_P Parameter: Age (day) Value: 8
  misc_feature: MA Experiment 20000437 PARAMETER Experiment Name: At_Drought_P Parameter: Organism Value: A. thaliana
  misc_feature: MA Experiment 20000437 PARAMETER Experiment Name: At_Drought_P Parameter: Plant Line Value: WS
  misc_feature: MA Experiment 20000437 PARAMETER Experiment Name: At_Drought_P Parameter: Timepoint (hr) Value: 24
  misc_feature: MA Experiment 20000437 PARAMETER Experiment Name: At_Drought_P Parameter: Tissue Value: Whole Plant
  misc_feature: MA Experiment 20000437 PARAMETER Experiment Name: At_Drought_P Parameter: Treatment Value: Drought vs. No Drought
  misc_feature: MA Experiment ID: 20000451 Result: Up-regulated in Transcription
  misc_feature: MA Experiment 20000451 PARAMETER Experiment Name: At_CS6879_Shoots-Roots_P Parameter: Age (day) Value: 14
  misc_feature: MA Experiment 20000451 PARAMETER Experiment Name: At_CS6879_Shoots-Roots_P Parameter: Organism Value: A. thaliana
  misc_feature: MA Experiment 20000451 PARAMETER Experiment Name: At_CS6879_Shoots-Roots_P Parameter: Plant Line Value: CS6879 vs. WS
  misc_feature: MA Experiment 20000451 PARAMETER Experiment Name: At_CS6879_Shoots-Roots_P Parameter: Tissue Value: Roots
  misc_feature: MA Experiment ID: 20000527 Result: Up-regulated in Transcription
  misc_feature: MA Experiment 20000527 PARAMETER Experiment Name: At_10percent_PEG_P Parameter: Age (day) Value: 20
  misc_feature: MA Experiment 20000527 PARAMETER Experiment Name: At_10percent_PEG_P Parameter: Organism Value: A. thaliana
  misc_feature: MA Experiment 20000527 PARAMETER Experiment Name: At_10percent_PEG_P Parameter: Plant Line Value: WS
  misc_feature: MA Experiment 20000527 PARAMETER Experiment Name: At_10percent_PEG_P Parameter: Timepoint (day) Value: 20
  misc_feature: MA Experiment 20000527 PARAMETER Experiment Name: At_10percent_PEG_P Parameter: Tissue Value: Whole Plant
  misc_feature: MA Experiment 20000527 PARAMETER Experiment Name: At_10percent_PEG_P Parameter: Treatment Value: 10percent PEG vs. No Treatment
  misc_feature: MA Experiment ID: 20001557 Result: Down-regulated in Transcription
  misc_feature: MA Experiment 20001557 PARAMETER Experiment Name: At_Drought_Soil_Dry_P Parameter: Age (day) Value: 27
  misc_feature: MA Experiment 20001557 PARAMETER Experiment Name: At_Drought_Soil_Dry_P Parameter: Organism Value: A. thaliana
  misc_feature: MA Experiment 20001557 PARAMETER Experiment Name: At_Drought_Soil_Dry_P Parameter: Plant Line Value: WS
  misc_feature: MA Experiment 20001557 PARAMETER Experiment Name: At_Drought_Soil_Dry_P Parameter: Post Timepoint (hr) Value: 3
  misc_feature: MA Experiment 20001557 PARAMETER Experiment Name: At_Drought_Soil_Dry_P Parameter: Post-Treatment Value: Re-Water vs. No Drought
  misc_feature: MA Experiment 20001557 PARAMETER Experiment Name: At_Drought_Soil_Dry_P Parameter: Timepoint (day) Value: 13
  misc_feature: MA Experiment 20001557 PARAMETER Experiment Name: At_Drought_Soil_Dry_P Parameter: Treatment Value: Drought vs. No Drought
acattcttatccatttgaatcatcatgtcaggcgtgtctcttgcggttggtccaagaaccgacgtggacaaaacggcgtcatccagtgagaagggacggtggtcggggatgacggcgataggaggtggcagtggaggtttgatggggtcgttaagggttatagagctacagctagtcgcgttcatactagttttctcagcaagcggtctcgtaccaatacttgacatgctttttccagcgtttgcgtctatctatataatcgccctctcgcgtttagctttcccttctcacggcgtttccaccgcttcccccgaagtcttccgcggcagcaaactcttcaggttccaaatccatcacaagaaaacaaaagaatgtctcttttaactctcgcttccacaatatttttaccactttagataaccaatcatactcttttactactagtatgatttttttgaattttatgttggttctgtatttttgagatcaaatgtaacattacagattctgactagtacattttttttctgttgcaatatttgggataatgaaaggttgtacgtgatttcggggacaacgattggtctgttcttgcctctagcttacgtattaggtggttttgcaagaggagatgatcatgcggtaagatcagcaacaccacacttgtttctactgtcgtgtcaaatcctgacagagaatgtaataagtggcctttctctgttctcgccaccggtaagagctctcgtcccattgctctacacagtctggagaatctttgtcatcattggttggtctaaagatgtttggttcaacaagtctttaccaatcaatgctacacccaatgtggttacatggttctggtttggaaggtatttagcactagcaaacttaggctacttcggagtgaatctactctgtttcttgatccctaggttcctgcctcgtgctttcgagcaatacttcagagagagagacgagatcttggcgaaaagccaagaagacaagccagttcaagttcctagatcaaaaccttctaaccacaaatctgattgatcatcttttttgttctgaaggtgtaatgtaacgaactaagagttgtttattatgaagattgtaatgaaattttattagtagggcaaacgaaacaatgtggttgtgaatatacaaagttttgcttctc

SEQ ID NO: 102880 - protein, 119 aa, Arabidopsis thaliana
  peptide (1)..(119): Ceres Seq. ID no. 13611462
  misc_feature (1)..(109): Homolog of NCBI NO: 15217782 NR Description: expressed protein [Arabidopsis thaliana]
  misc_feature (1)..(106): Homolog of NCBI NO: 38347228 NR Description: OSJNBa0044M19.10 [Oryza sativa (japonica
  misc_feature (1)..(119): Homolog of NCBI NO: 26449376 NR Description: unknown protein [Arabidopsis thaliana]
  misc_feature (1)..(109): Homolog of NCBI NO: 15146256 NR Description: AT5g52420/K24M7_17 [Arabidopsis thaliana]
  misc_feature (1)..(109): Homolog of NCBI NO: 18423389 NR Description: expressed protein [Arabidopsis thaliana]
MSGVSLAVGPRTDVDKTASSSEKGRWSGMTAIGGGSGGLMGSLRVIELQLVAFILVFSASGLVPILDMLFPAFASIYIIALSRLAFPSHGVSTASPEVFRGSKLFRFQIHHKKTKECLF

SEQ ID NO: 102881 - protein, 91 aa, Arabidopsis thaliana
  peptide (1)..(91): Ceres Seq. ID no. 13611463
  misc_feature (1)..(81): Homolog of NCBI NO: 15217782 NR Description: expressed protein [Arabidopsis thaliana]
  misc_feature (1)..(78): Homolog of NCBI NO: 38347228 NR Description: OSJNBa0044M19.10 [Oryza sativa (japonica
  misc_feature (1)..(91): Homolog of NCBI NO: 26449376 NR Description: unknown protein [Arabidopsis thaliana]
  misc_feature (1)..(81): Homolog of NCBI NO: 15146256 NR Description: AT5g52420/K24M7_17 [Arabidopsis thaliana]
  misc_feature (1)..(81): Homolog of NCBI NO: 18423389 NR Description: expressed protein [Arabidopsis thaliana]
MTAIGGGSGGLMGSLRVIELQLVAFILVFSASGLVPILDMLFPAFASIYIIALSRLAFPSHGVSTASPEVFRGSKLFRFQIHHKKTKECLF

SEQ ID NO: 102882 - protein, 80 aa, Arabidopsis thaliana
  peptide (1)..(80): Ceres Seq. ID no. 13611464
  misc_feature (1)..(70): Homolog of NCBI NO: 15217782 NR Description: expressed protein [Arabidopsis thaliana]
  misc_feature (1)..(67): Homolog of NCBI NO: 38347228 NR Description: OSJNBa0044M19.10 [Oryza sativa (japonica
  misc_feature (1)..(80): Homolog of NCBI NO: 26449376 NR Description: unknown protein [Arabidopsis thaliana]
  misc_feature (1)..(70): Homolog of NCBI NO: 15146256 NR Description: AT5g52420/K24M7_17 [Arabidopsis thaliana]
  misc_feature (1)..(70): Homolog of NCBI NO: 18423389 NR Description: expressed protein [Arabidopsis thaliana]
MGSLRVIELQLVAFILVFSASGLVPILDMLFPAFASIYIIALSRLAFPSHGVSTASPEVFRGSKLFRFQIHHKKTKECLF

SEQ ID NO: 102883 - DNA, 1095 bp, Arabidopsis thaliana
  misc_feature (1)..(1095): Ceres Seq. ID no. 13611475
  misc_feature: MA Experiment ID: 108461 Result: Up-regulated in Transcription
  misc_feature: MA Experiment 108461 PARAMETER Experiment Name: At_Germinating_Seeds_cDNA_P Parameter: Age (day) Value: 1 vs. 0
  misc_feature: MA Experiment 108461 PARAMETER Experiment Name: At_Germinating_Seeds_cDNA_P Parameter: Tissue Value: Germinating Seeds
  misc_feature: MA Experiment ID: 108462 Result: Up-regulated in Transcription
  misc_feature: MA Experiment 108462 PARAMETER Experiment Name: At_Germinating_Seeds_cDNA_P Parameter: Age (day) Value: 2 vs. 0
  misc_feature: MA Experiment 108462 PARAMETER Experiment Name: At_Germinating_Seeds_cDNA_P Parameter: Tissue Value: Germinating Seeds
  misc_feature: MA Experiment ID: 108463 Result: Up-regulated in Transcription
  misc_feature: MA Experiment 108463 PARAMETER Experiment Name: At_Germinating_Seeds_cDNA_P Parameter: Age (day) Value: 3 vs. 0
  misc_feature: MA Experiment 108463 PARAMETER Experiment Name: At_Germinating_Seeds_cDNA_P Parameter: Tissue Value: Germinating Seeds
  misc_feature: MA Experiment ID: 108464 Result: Up-regulated in Transcription
  misc_feature: MA Experiment 108464 PARAMETER Experiment Name: At_Germinating_Seeds_cDNA_P Parameter: Age (day) Value: 4 vs. 0
  misc_feature: MA Experiment 108464 PARAMETER Experiment Name: At_Germinating_Seeds_cDNA_P Parameter: Tissue Value: Germinating Seeds
  misc_feature: MA Experiment ID: 20000185 Result: Up-regulated in Transcription
  misc_feature: MA Experiment 20000185 PARAMETER Experiment Name: At_Roots__P Parameter: Age (day) Value: 7 vs. 21
  misc_feature: MA Experiment 20000185 PARAMETER Experiment Name: At_Roots__P Parameter: Organism Value: A. thaliana
  misc_feature: MA Experiment 20000185 PARAMETER Experiment Name: At_Roots__P Parameter: Tissue Value: Roots vs. Whole Plant
  misc_feature: MA Experiment ID: 20000227 Result: Down-regulated in Transcription
  misc_feature: MA Experiment 20000227 PARAMETER Experiment Name: At_Root-Tips-vs-Tops_P Parameter: Tissue Value: Root Tips vs. Root Tops
  misc_feature: MA Experiment ID: 20000264 Result: Down-regulated in Transcription
  misc_feature: MA Experiment 20000264 PARAMETER Experiment Name: At_Open_Flower_P Parameter: Age (day) Value: 21
  misc_feature: MA Experiment 20000264 PARAMETER Experiment Name: At_Open_Flower_P Parameter: Plant Line Value: WS
  misc_feature: MA Experiment 20000264 PARAMETER Experiment Name: At_Open_Flower_P Parameter: Tissue Value: Open Flower vs. Whole Plant
  misc_feature: MA Experiment ID: 20000438 Result: Down-regulated in Transcription
  misc_feature: MA Experiment 20000438 PARAMETER Experiment Name: At_Shoots__P Parameter: Age (day) Value: 14
  misc_feature: MA Experiment 20000438 PARAMETER Experiment Name: At_Shoots__P Parameter: Tissue Value: Shoots vs. Whole Plant
  misc_feature: MA Experiment ID: 20000439 Result: Up-regulated in Transcription
  misc_feature: MA Experiment 20000439 PARAMETER Experiment Name: At_Roots__P Parameter: Age (day) Value: 14 vs. 21
  misc_feature: MA Experiment 20000439 PARAMETER Experiment Name: At_Roots__P Parameter: Organism Value: A. thaliana
  misc_feature: MA Experiment 20000439 PARAMETER Experiment Name: At_Roots__P Parameter: Tissue Value: Roots vs. Whole Plant
gttttatcttttgatagttctgattgtaattagattttggtaggtcacttgtatagagagatcagtaaaataagaaggatgagttggtgtgatggttcagatgataactacgatcttaatcttgaaagagtatcgaacactgatcatccatcggttcaactcaaagaccaatctcaatcatgtgtaacgagccgtccagattccaagattagcgctgaaactcccatcacgacttgtccttcttgcggacacaagctccatcatcaccaagacgaccaggttggtagcatcaaagatttaccaagcttaccggcaggagtcaaattcgatccgtcggataaagagatccttatgcatttggaggcgaaggtatcatccgataagcgaaaacttcatccgttgattgatgaatttatacctacgcttgaaggagagaatggaatttgttatacgcatcctgagaaacttcctggagtaagcaaggacgggcaagtacggcacttcttccaccggccatcaaaggcttatacgaccggaacacgaaaacgaagaaaagtgagcacagatgaggaaggccatgaaacaaggtggcacaaaacaggcaagactcgacctgttttgtctcaatcaggagaaaccggtttcaagaagatcctagtgctctacaccaactatggtcgccagaagaagcctgagaagacgaattgggtgatgcatcagtatcatttaggtagcagcgaggacgaaaaagacggtgaaccagtcctctctaaagtcttctaccaaacacagcctaggcaatgcggttcgatggaacctaaaccgaaaaatctcgtaaacctaaaccggtttagttatgaaaatattcaggccggtttcgggtatgagcatggtggtaaaagtgaagagacgacgcaggtgattcgagagttggtagttcgtgaaggcgatgggtcatgttcgtttcttagttttacttgtgatgcaagtaagggtaaagaaagcttcatgaagaatcaatagaacataacatatataatatatataaatggaggtgctttgttggagtaaagatgaggaaaagaatgagagagc

SEQ ID NO: 102884 - protein, 314 aa, Arabidopsis thaliana
  peptide (1)..(314): Ceres Seq. ID no. 13611476
  misc_feature (77)..(218): Pfam Name: No apical meristem (NAM) protein Pfam Description: No apical meristem (NAM) protein
  misc_feature (1)..(314): Homolog of NCBI NO: 18396807 NR Description: No apical meristem (NAM) protein family
  misc_feature (1)..(314): Homolog of NCBI NO: 21554371 NR Description: NAM protein, putative [Arabidopsis thaliana]
  misc_feature (64)..(314): Homolog of NCBI NO: 6560767 NR Description: F3M18.9 [Arabidopsis thaliana]
  misc_feature (1)..(265): Homolog of NCBI NO: 34911014 NR Description: OJ1125_C04.12 [Oryza sativa (japonica
  misc_feature (46)..(243): Homolog of NCBI NO: 15235314 NR Description: No apical meristem (NAM) protein family
  misc_feature (53)..(242): Homolog of NCBI NO: 15233497 NR Description: No apical meristem (NAM) protein family
  misc_feature (53)..(244): Homolog of NCBI NO: 15241889 NR Description: No apical meristem (NAM) protein family thaliana] >gi|10176766|dbj|BAB09880.1|
  misc_feature (32)..(242): Homolog of NCBI NO: 34906416 NR Description: P0710E05.22 [Oryza sativa (japonica
  misc_feature (22)..(241): Homolog of NCBI NO: 12320749 NR Description: unknown protein [Arabidopsis thaliana]
  misc_feature (22)..(241): Homolog of NCBI NO: 30689293 NR Description: No apical meristem (NAM) protein family
MSWCDGSDDNYDLNLERVSNTDHPSVQLKDQSQSCVTSRPDSKISAETPITTCPSCGHKLHHHQDDQVGSIKDLPSLPAGVKFDPSDKEILMHLEAKVSSDKRKLHPLIDEFIPTLEGENGICYTHPEKLPGVSKDGQVRHFFHRPSKAYTTGTRKRRKVSTDEEGHETRWHKTGKTRPVLSQSGETGFKKILVLYTNYGRQKKPEKTNWVMHQYHLGSSEDEKDGEPVLSKVFYQTQPRQCGSMEPKPKNLVNLNRFSYENIQAGFGYEHGGKSEETTQVIRELVVREGDGSCSFLSFTCDASKGKESFMKNQ

SEQ ID NO: 102885 - protein, 223 aa, Arabidopsis thaliana; identical to SEQ ID NO: 35867
  peptide (1)..(223): Ceres Seq. ID no. 13611477
  misc_feature (1)..(127): Pfam Name: No apical meristem (NAM) protein Pfam Description: No apical meristem (NAM) protein
  misc_feature (1)..(223): Homolog of NCBI NO: 18396807 NR Description: No apical meristem (NAM) protein family
  misc_feature (1)..(223): Homolog of NCBI NO: 21554371 NR Description: NAM protein, putative [Arabidopsis thaliana]
  misc_feature (1)..(223): Homolog of NCBI NO: 6560767 NR Description: F3M18.9 [Arabidopsis thaliana]
  misc_feature (1)..(174): Homolog of NCBI NO: 34911014 NR Description: OJ1125_C04.12 [Oryza sativa (japonica
  misc_feature (1)..(152): Homolog of NCBI NO: 15235314 NR Description: No apical meristem (NAM) protein family
  misc_feature (1)..(151): Homolog of NCBI NO: 15233497 NR Description: No apical meristem (NAM) protein family
  misc_feature (1)..(153): Homolog of NCBI NO: 15241889 NR Description: No apical meristem (NAM) protein family thaliana] >gi|10176766|dbj|BAB09880.1|
  misc_feature (1)..(151): Homolog of NCBI NO: 34906416 NR Description: P0710E05.22 [Oryza sativa (japonica
  misc_feature (1)..(150): Homolog of NCBI NO: 12320749 NR Description: unknown protein [Arabidopsis thaliana]
  misc_feature (1)..(150): Homolog of NCBI NO: 30689293 NR Description: No apical meristem (NAM) protein family

SEQ ID NO: 102886 - DNA, 959 bp, Arabidopsis thaliana
  misc_feature (1)..(959): Ceres Seq. ID no. 13611480
  misc_feature: MA Experiment ID: 108462 Result: Up-regulated in Transcription
  misc_feature: MA Experiment 108462 PARAMETER Experiment Name: At_Germinating_Seeds_cDNA_P Parameter: Age (day) Value: 2 vs. 0
  misc_feature: MA Experiment 108462 PARAMETER Experiment Name: At_Germinating_Seeds_cDNA_P Parameter: Tissue Value: Germinating Seeds
  misc_feature: MA Experiment ID: 108463 Result: Up-regulated in Transcription
  misc_feature: MA Experiment 108463 PARAMETER Experiment Name: At_Germinating_Seeds_cDNA_P Parameter: Age (day) Value: 3 vs. 0
  misc_feature: MA Experiment 108463 PARAMETER Experiment Name: At_Germinating_Seeds_cDNA_P Parameter: Tissue Value: Germinating Seeds
  misc_feature: MA Experiment ID: 108464 Result: Up-regulated in Transcription
  misc_feature: MA Experiment 108464 PARAMETER Experiment Name: At_Germinating_Seeds_cDNA_P Parameter: Age (day) Value: 4 vs. 0
  misc_feature: MA Experiment 108464 PARAMETER Experiment Name: At_Germinating_Seeds_cDNA_P Parameter: Tissue Value: Germinating Seeds
  misc_feature: MA Experiment ID: 108561 Result: Up-regulated in Transcription
  misc_feature: MA Experiment 108561 PARAMETER Experiment Name: At_100uM_ABA_cDNA_P Parameter: Timepoint (hr) Value: 6
  misc_feature: MA Experiment 108561 PARAMETER Experiment Name: At_100uM_ABA_cDNA_P Parameter: Tissue Value: Aerial
  misc_feature: MA Experiment 108561 PARAMETER Experiment Name: At_100uM_ABA_cDNA_P Parameter: Treatment Value: 100uM ABA vs. No Treatment
  misc_feature: MA Experiment ID: 108573 Result: Up-regulated in Transcription
  misc_feature: MA Experiment 108573 PARAMETER Experiment Name: At_Drought_cDNA_P Parameter: Timepoint (hr) Value: 6
  misc_feature: MA Experiment 108573 PARAMETER Experiment Name: At_Drought_cDNA_P Parameter: Tissue Value: Aerial
  misc_feature: MA Experiment 108573 PARAMETER Experiment Name: At_Drought_cDNA_P Parameter: Treatment Value: Drought vs. No Drought
  misc_feature: MA Experiment ID: 108579 Result: Down-regulated in Transcription
  misc_feature: MA Experiment 108579 PARAMETER Experiment Name: At_4deg_Cold_cDNA_P Parameter: Temperature (deg C) Value: 4 vs. 22
  misc_feature: MA Experiment 108579 PARAMETER Experiment Name: At_4deg_Cold_cDNA_P Parameter: Timepoint (hr) Value: 6
  misc_feature: MA Experiment 108579 PARAMETER Experiment Name: At_4deg_Cold_cDNA_P Parameter: Tissue Value: Aerial
  misc_feature: MA Experiment ID: 108605 Result: Up-regulated in Transcription
  misc_feature: MA Experiment 108605 PARAMETER Experiment Name: At_100uM_ABA_cDNA_P Parameter: Timepoint (hr) Value: 6
  misc_feature: MA Experiment 108605 PARAMETER Experiment Name: At_100uM_ABA_cDNA_P Parameter: Tissue Value: Aerial
  misc_feature: MA Experiment 108605 PARAMETER Experiment Name: At_100uM_ABA_cDNA_P Parameter: Treatment Value: 100uM ABA vs. No Treatment
  misc_feature: MA Experiment ID: 108607 Result: Up-regulated in Transcription
  misc_feature: MA Experiment 108607 PARAMETER Experiment Name: At_100uM_ABA_cDNA_P Parameter: Timepoint (hr) Value: 4
  misc_feature: MA Experiment 108607 PARAMETER Experiment Name: At_100uM_ABA_cDNA_P Parameter: Tissue Value: Aerial
  misc_feature: MA Experiment 108607 PARAMETER Experiment Name: At_100uM_ABA_cDNA_P Parameter: Treatment Value: 100uM ABA vs. No Treatment
  misc_feature: MA Experiment ID: 20000069 Result: Up-regulated in Transcription
  misc_feature: MA Experiment 20000069 PARAMETER Experiment Name: At_100uM_ABA_Mutants_cDNA_P Parameter: Plant Line Value: CS23
  misc_feature: MA Experiment 20000069 PARAMETER Experiment Name: At_100uM_ABA_Mutants_cDNA_P Parameter: Timepoint (hr) Value: 6
  misc_feature: MA Experiment 20000069 PARAMETER Experiment Name: At_100uM_ABA_Mutants_cDNA_P Parameter: Tissue Value: Aerial
  misc_feature: MA Experiment 20000069 PARAMETER Experiment Name: At_100uM_ABA_Mutants_cDNA_P Parameter: Treatment Value: 100uM ABA vs. No Treatment
  misc_feature: MA Experiment ID: 20000070 Result: Up-regulated in Transcription
  misc_feature: MA Experiment 20000070 PARAMETER Experiment Name: At_100uM_ABA_Mutants_cDNA_P Parameter: Plant Line Value: CS24
  misc_feature: MA Experiment 20000070 PARAMETER Experiment Name: At_100uM_ABA_Mutants_cDNA_P Parameter: Timepoint (hr) Value: 6
  misc_feature: MA Experiment 20000070 PARAMETER Experiment Name: At_100uM_ABA_Mutants_cDNA_P Parameter: Tissue Value: Aerial
  misc_feature: MA Experiment 20000070 PARAMETER Experiment Name: At_100uM_ABA_Mutants_cDNA_P Parameter: Treatment Value: 100uM ABA vs. No Treatment
  misc_feature: MA Experiment ID: 20000071 Result: Up-regulated in Transcription
  misc_feature: MA Experiment 20000071 PARAMETER Experiment Name: At_100uM_ABA_Mutants_cDNA_P Parameter: Plant Line Value: CS8104
  misc_feature: MA Experiment 20000071 PARAMETER Experiment Name: At_100uM_ABA_Mutants_cDNA_P Parameter: Timepoint (hr) Value: 6
  misc_feature: MA Experiment 20000071 PARAMETER Experiment Name: At_100uM_ABA_Mutants_cDNA_P Parameter: Tissue Value: Aerial
  misc_feature: MA Experiment 20000071 PARAMETER Experiment Name: At_100uM_ABA_Mutants_cDNA_P Parameter: Treatment Value: 100uM ABA vs. No Treatment
  misc_feature: MA Experiment ID: 20000113 Result: Up-regulated in Transcription
  misc_feature: MA Experiment 20000113 PARAMETER Experiment Name: At_42deg_Heat_cDNA_P Parameter: Temperature (deg C) Value: 42 vs. 22
  misc_feature: MA Experiment 20000113 PARAMETER Experiment Name: At_42deg_Heat_cDNA_P Parameter: Timepoint (hr) Value: 8
  misc_feature: MA Experiment 20000113 PARAMETER Experiment Name: At_42deg_Heat_cDNA_P Parameter: Tissue Value: Aerial
  misc_feature: MA Experiment ID: 20000234 Result: Down-regulated in Transcription
  misc_feature: MA Experiment 20000234 PARAMETER Experiment Name: At_Siliques_P Parameter: Age (day) Value: 21
  misc_feature: MA Experiment 20000234 PARAMETER Experiment Name: At_Siliques_P Parameter: Organism Value: A. thaliana
  misc_feature: MA Experiment 20000234 PARAMETER Experiment Name: At_Siliques_P Parameter: Plant Line Value: WS
  misc_feature: MA Experiment 20000234 PARAMETER Experiment Name: At_Siliques_P Parameter: Tissue Value: Less Than 5mm Siliques vs. Whole Plant
  misc_feature: MA Experiment ID: 20000436 Result: Up-regulated in Transcription
  misc_feature: MA Experiment 20000436 PARAMETER Experiment Name: At_Drought_P Parameter: Age (day) Value: 7
  misc_feature: MA Experiment 20000436 PARAMETER Experiment Name: At_Drought_P Parameter: Organism Value: A. thaliana
  misc_feature: MA Experiment 20000436 PARAMETER Experiment Name: At_Drought_P Parameter: Plant Line Value: WS
  misc_feature: MA Experiment 20000436 PARAMETER Experiment Name: At_Drought_P Parameter: Timepoint (hr) Value: 12
  misc_feature: MA Experiment 20000436 PARAMETER Experiment Name: At_Drought_P Parameter: Tissue Value: Whole Plant
  misc_feature: MA Experiment 20000436 PARAMETER Experiment Name: At_Drought_P Parameter: Treatment Value: Drought vs. No Drought
  misc_feature: MA Experiment ID: 20000437 Result: Up-regulated in Transcription
  misc_feature: MA Experiment 20000437 PARAMETER Experiment Name: At_Drought_P Parameter: Age (day) Value: 8
  misc_feature: MA Experiment 20000437 PARAMETER Experiment Name: At_Drought_P Parameter: Organism Value: A. thaliana
  misc_feature: MA Experiment 20000437 PARAMETER Experiment Name: At_Drought_P Parameter: Plant Line Value: WS
  misc_feature: MA Experiment 20000437 PARAMETER Experiment Name: At_Drought_P Parameter: Timepoint (hr) Value: 24
  misc_feature: MA Experiment 20000437 PARAMETER Experiment Name: At_Drought_P Parameter: Tissue Value: Whole Plant
  misc_feature: MA Experiment 20000437 PARAMETER Experiment Name: At_Drought_P Parameter: Treatment Value: Drought vs. No Drought
  misc_feature: MA Experiment ID: 20001450 Result: Up-regulated in Transcription
  misc_feature: MA Experiment 20001450 PARAMETER Experiment Name: At_Far-red-induction_P Parameter: Age (day) Value: 7
  misc_feature: MA Experiment 20001450 PARAMETER Experiment Name: At_Far-red-induction_P Parameter: Light Value: Far-red vs. White
  misc_feature: MA Experiment 20001450 PARAMETER Experiment Name: At_Far-red-induction_P Parameter: Organism Value: A. thaliana
  misc_feature: MA Experiment 20001450 PARAMETER Experiment Name: At_Far-red-induction_P Parameter: Plant Line Value: Columbia
  misc_feature: MA Experiment 20001450 PARAMETER Experiment Name: At_Far-red-induction_P Parameter: Timepoint (hr) Value: 8
  misc_feature: MA Experiment 20001450 PARAMETER Experiment Name: At_Far-red-induction_P Parameter: Tissue Value: Whole Plant
atatgattgatctacacagaatccatttccgcaaatcggattcatgtttttgctttatcgtaggcttccttcatttgcacgaacaacaacaacaacccttctctgcaaatctatggagcctgcgataacagcgacttcttcttcttctttcggtggtggctcttctcgtctcgccgctttagcccagcaacttcgccaatacaagcccccaccttcttcatcgttcgatgactccgaggagatgcagacagatcaggagaccgctgggaaagtcgtttctcaggttgggtttcaggaatctattgctcctctttcgaaagaccctgataggtttaaacccaagagagccgctgtgttgatctgtctctttgaaggagatgatggtgatttgcgtgttattcttactaagagatcttccaaattgtctactcactctggagaagtttcattgccaggtggtaaagcggaggaggatgataaagatgatgggatgactgctaccagagaggctgaggaagagattggattggacccttctcttgttgatgttgttacttctcttgaaccatttctgtctaagcatcttcttagagtaattcctgtgataggcatcttgagggacaaaaataaattcaatccgataccaaatcctggggaagtggaagctgtgtttgatgcacccttggaaatgttccttaaggatgagaatcgaagatctgaagagagagagtggatgggtgaaaagtatttgatccattactttgactacagaacaggagataaggattatatgatatggggtttaactgctgggattttgatcagagctgcatctgtgacttatgaaagaccacctgcttttatcgagcagtgcccgaagtttaagtaccctaaaatggtagaaaaacatacttgtatgccttaatgaacataatttttcgaatgatgctttcctagac

SEQ ID NO: 102887 - protein, 293 aa, Arabidopsis thaliana
  peptide (1)..(293): Ceres Seq. ID no. 13611481
  misc_feature (100)..(233): Pfam Name: NUDIX domain Pfam Description: NUDIX domain
  misc_feature (1)..(293): Homolog of NCBI NO: 18396900 NR Description: MutT/nudix family protein [Arabidopsis thaliana]
  misc_feature (1)..(285): Homolog of NCBI NO: 30690557 NR Description: MutT/nudix family protein [Arabidopsis thaliana]
  misc_feature (1)..(285): Homolog of NCBI NO: 26450576 NR Description: unknown protein [Arabidopsis thaliana]
  misc_feature (24)..(293): Homolog of NCBI NO: 10764850 NR Description: F1K23.5 [Arabidopsis thaliana]
  misc_feature (22)..(285): Homolog of NCBI NO: 18403412 NR Description: MutT/nudix family protein [Arabidopsis thaliana] unknown protein [Arabidopsis thaliana] unknown protein [Arabidopsis thaliana]
  misc_feature (97)..(293): Homolog of NCBI NO: 40253324 NR Description: putative phosphohydrolase [Oryza sativa (japonica group)] >gi|40253358|dbj|BAD05290.1| putative phosphohydrolase
  misc_feature (97)..(280): Homolog of NCBI NO: 21553389 NR Description: unknown [Arabidopsis thaliana]
  misc_feature (97)..(280): Homolog of NCBI NO: 15242543 NR Description: MutT/nudix family protein [Arabidopsis thaliana] gb|AAF24540.1~gene_id:K15I22.14~similar to unknown protein
  misc_feature (22)..(179): Homolog of NCBI NO: 25370770 NR Description: hypothetical protein At2g33980 [imported] -
  misc_feature (92)..(265): Homolog of NCBI NO: 22969068 NR Description: hypothetical protein [Rhodospirillum rubrum]
MFLLYRRLPSFARTTTTTLLCKSMEPAITATSSSSFGGGSSRLAALAQQLRQYKPPPSSSFDDSEEMQTDQETAGKVVSQVGFQESIAPLSKDPDRFKPKRAAVLICLFEGDDGDLRVILTKRSSKLSTHSGEVSLPGGKAEEDDKDDGMTATREAEEEIGLDPSLVDVVTSLEPFLSKHLLRVIPVIGILRDKNKFNPIPNPGEVEAVFDAPLEMFLKDENRRSEEREWMGEKYLIHYFDYRTGDKDYMIWGLTAGILIRAASVTYERPPAFIEQCPKFKYPKMVEKHTCMP

SEQ ID NO: 102888 - protein, 270 aa, Arabidopsis thaliana
  peptide (1)..(270): Ceres Seq. ID no. 13611482
  misc_feature (77)..(210): Pfam Name: NUDIX domain Pfam Description: NUDIX domain
  misc_feature (1)..(270): Homolog of NCBI NO: 18396900 NR Description: MutT/nudix family protein [Arabidopsis thaliana]
  misc_feature (1)..(262): Homolog of NCBI NO: 30690557 NR Description: MutT/nudix family protein [Arabidopsis thaliana]
  misc_feature (1)..(262): Homolog of NCBI NO: 26450576 NR Description: unknown protein [Arabidopsis thaliana]
  misc_feature (1)..(270): Homolog of NCBI NO: 10764850 NR Description: F1K23.5 [Arabidopsis thaliana]
  misc_feature (1)..(262): Homolog of NCBI NO: 18403412 NR Description: MutT/nudix family protein [Arabidopsis thaliana] unknown protein [Arabidopsis thaliana] unknown protein [Arabidopsis thaliana]
  misc_feature (74)..(270): Homolog of NCBI NO: 40253324 NR Description: putative phosphohydrolase [Oryza sativa (japonica group)] >gi|40253358|dbj|BAD05290.1| putative phosphohydrolase
  misc_feature (74)..(257): Homolog of NCBI NO: 21553389 NR Description: unknown [Arabidopsis thaliana]
  misc_feature (74)..(257): Homolog of NCBI NO: 15242543 NR Description: MutT/nudix family protein [Arabidopsis thaliana] gb|AAF24540.1~gene_id:K15I22.14~similar to unknown protein
  misc_feature (1)..(156): Homolog of NCBI NO: 25370770 NR Description: hypothetical protein At2g33980 [imported] -
  misc_feature (69)..(242): Homolog of NCBI NO: 22969068 NR Description: hypothetical protein [Rhodospirillum rubrum]
MEPAITATSSSSFGGGSSRLAALAQQLRQYKPPPSSSFDDSEEMQTDQETAGKVVSQVGFQESIAPLSKDPDRFKPKRAAVLICLFEGDDGDLRVILTKRSSKLSTHSGEVSLPGGKAEEDDKDDGMTATREAEEEIGLDPSLVDVVTSLEPFLSKHLLRVIPVIGILRDKNKFNPIPNPGEVEAVFDAPLEMFLKDENRRSEEREWMGEKYLIHYFDYRTGDKDYMIWGLTAGILIRAASVTYERPPAFIEQCPKFKYPKMVEKHTCMP

SEQ ID NO: 102889 - protein, 227 aa, Arabidopsis thaliana
  peptide (1)..(227): Ceres Seq. ID no. 13611483
  misc_feature (34)..(167): Pfam Name: NUDIX domain Pfam Description: NUDIX domain
  misc_feature (1)..(227): Homolog of NCBI NO: 18396900 NR Description: MutT/nudix family protein [Arabidopsis thaliana]
  misc_feature (1)..(219): Homolog of NCBI NO: 30690557 NR Description: MutT/nudix family protein [Arabidopsis thaliana]
  misc_feature (1)..(219): Homolog of NCBI NO: 26450576 NR Description: unknown protein [Arabidopsis thaliana]
  misc_feature (1)..(227): Homolog of NCBI NO: 10764850 NR Description: F1K23.5 [Arabidopsis thaliana]
  misc_feature (1)..(219): Homolog of NCBI NO: 18403412 NR Description: MutT/nudix family protein [Arabidopsis thaliana] unknown protein [Arabidopsis thaliana] unknown protein [Arabidopsis thaliana]
  misc_feature (31)..(227): Homolog of NCBI NO: 40253324 NR Description: putative phosphohydrolase [Oryza sativa (japonica group)] >gi|40253358|dbj|BAD05290.1| putative phosphohydrolase
  misc_feature (31)..(214): Homolog of NCBI NO: 21553389 NR Description: unknown [Arabidopsis thaliana]
  misc_feature (31)..(214): Homolog of NCBI NO: 15242543 NR Description: MutT/nudix family protein [Arabidopsis thaliana] gb|AAF24540.1~gene_id:K15I22.14~similar to unknown protein
  misc_feature (1)..(113): Homolog of NCBI NO: 25370770 NR Description: hypothetical protein At2g33980 [imported] -
  misc_feature (26)..(199): Homolog of NCBI NO: 22969068 NR Description: hypothetical protein [Rhodospirillum rubrum]
MQTDQETAGKVVSQVGFQESIAPLSKDPDRFKPKRAAVLICLFEGDDGDLRVILTKRSSKLSTHSGEVSLPGGKAEEDDKDDGMTATREAEEEIGLDPSLVDVVTSLEPFLSKHLLRVIPVIGILRDKNKFNPIPNPGEVEAVFDAPLEMFLKDENRRSEEREWMGEKYLIHYFDYRTGDKDYMIWGLTAGILIRAASVTYERPPAFIEQCPKFKYPKMVEKHTCMP

SEQ ID NO: 102890 - DNA, 1330 bp, Arabidopsis thaliana
  misc_feature (1)..(1330): Ceres Seq. ID no. 13611484
  misc_feature: MA Experiment ID: 108434 Result: Down-regulated in Transcription
  misc_feature: MA Experiment 108434 PARAMETER Experiment Name: At_Root_Tips_cDNA_P Parameter: Tissue Value: Root Tips
  misc_feature: MA Experiment ID: 108435 Result: Up-regulated in Transcription
  misc_feature: MA Experiment 108435 PARAMETER Experiment Name: At_stm_Mutants_cDNA_P Parameter: Plant Line Value: wt Landsburg vs stm
  misc_feature: MA Experiment 108435 PARAMETER Experiment Name: At_stm_Mutants_cDNA_P Parameter: Tissue Value: Shoot Apical Meristem Region
  misc_feature: MA Experiment ID: 108461 Result: Up-regulated in Transcription
  misc_feature: MA Experiment 108461 PARAMETER Experiment Name: At_Germinating_Seeds_cDNA_P Parameter: Age (day) Value: 1 vs. 0
  misc_feature: MA Experiment 108461 PARAMETER Experiment Name: At_Germinating_Seeds_cDNA_P Parameter: Tissue Value: Germinating Seeds
  misc_feature: MA Experiment ID: 108462 Result: Up-regulated in Transcription
  misc_feature: MA Experiment 108462 PARAMETER Experiment Name: At_Germinating_Seeds_cDNA_P Parameter: Age (day) Value: 2 vs. 0
  misc_feature: MA Experiment 108462 PARAMETER Experiment Name: At_Germinating_Seeds_cDNA_P Parameter: Tissue Value: Germinating Seeds
  misc_feature: MA Experiment ID: 108463 Result: Up-regulated in Transcription
  misc_feature: MA Experiment 108463 PARAMETER Experiment Name: At_Germinating_Seeds_cDNA_P Parameter: Age (day) Value: 3 vs. 0
  misc_feature: MA Experiment 108463 PARAMETER Experiment Name: At_Germinating_Seeds_cDNA_P Parameter: Tissue Value: Germinating Seeds
  misc_feature: MA Experiment ID: 108464 Result: Up-regulated in Transcription
  misc_feature: MA Experiment 108464 PARAMETER Experiment Name: At_Germinating_Seeds_cDNA_P Parameter: Age (day) Value: 4 vs. 0
  misc_feature: MA Experiment 108464 PARAMETER Experiment Name: At_Germinating_Seeds_cDNA_P Parameter: Tissue Value: Germinating Seeds
  misc_feature: MA Experiment ID: 108561 Result: Up-regulated in Transcription
  misc_feature: MA Experiment 108561 PARAMETER Experiment Name: At_100uM_ABA_cDNA_P Parameter: Timepoint (hr) Value: 6
  misc_feature: MA Experiment 108561 PARAMETER Experiment Name: At_100uM_ABA_cDNA_P Parameter: Tissue Value: Aerial
  misc_feature: MA Experiment 108561 PARAMETER Experiment Name: At_100uM_ABA_cDNA_P Parameter: Treatment Value: 100uM ABA vs. No Treatment
  misc_feature: MA Experiment ID: 108573 Result: Up-regulated in Transcription
  misc_feature: MA Experiment 108573 PARAMETER Experiment Name: At_Drought_cDNA_P Parameter: Timepoint (hr) Value: 6
  misc_feature: MA Experiment 108573 PARAMETER Experiment Name: At_Drought_cDNA_P Parameter: Tissue Value: Aerial
  misc_feature: MA Experiment 108573 PARAMETER Experiment Name: At_Drought_cDNA_P Parameter: Treatment Value: Drought vs. No Drought
  misc_feature: MA Experiment ID: 20000070 Result: Up-regulated in Transcription
  misc_feature: MA Experiment 20000070 PARAMETER Experiment Name: At_100uM_ABA_Mutants_cDNA_P Parameter: Plant Line Value: CS24
  misc_feature: MA Experiment 20000070 PARAMETER Experiment Name: At_100uM_ABA_Mutants_cDNA_P Parameter: Timepoint (hr) Value: 6
  misc_feature: MA Experiment 20000070 PARAMETER Experiment Name: At_100uM_ABA_Mutants_cDNA_P Parameter: Tissue Value: Aerial
  misc_feature: MA Experiment 20000070 PARAMETER Experiment Name: At_100uM_ABA_Mutants_cDNA_P Parameter: Treatment Value: 100uM ABA vs. No Treatment
  misc_feature: MA Experiment ID: 20000090 Result: Down-regulated in Transcription
  misc_feature: MA Experiment ID: 20000179 Result: Up-regulated in Transcription
  misc_feature: MA Experiment 20000179 PARAMETER Experiment Name: At_Germinating_Seeds_P Parameter: Age (hr) Value: 6 vs. 0
  misc_feature: MA Experiment 20000179 PARAMETER Experiment Name: At_Germinating_Seeds_P Parameter: Tissue Value: Germinating Seeds
  misc_feature: MA Experiment ID: 20000180 Result: Up-regulated in Transcription
  misc_feature: MA Experiment 20000180 PARAMETER Experiment Name: At_Germinating_Seeds_P Parameter: Age (hr) Value: 24 vs. 0
  misc_feature: MA Experiment 20000180 PARAMETER Experiment Name: At_Germinating_Seeds_P Parameter: Tissue Value: Germinating Seeds
  misc_feature: MA Experiment ID: 20000184 Result: Down-regulated in Transcription
  misc_feature: MA Experiment 20000184 PARAMETER Experiment Name: At_Shoots__P Parameter: Age (day) Value: 7
  misc_feature: MA Experiment 20000184 PARAMETER Experiment Name: At_Shoots__P Parameter: Tissue Value: Shoots vs. Whole Plant
  misc_feature: MA Experiment ID: 20000224 Result: Up-regulated in Transcription
  misc_feature: MA Experiment ID: 20000234 Result: Down-regulated in Transcription
  misc_feature: MA Experiment 20000234 PARAMETER Experiment Name: At_Siliques_P Parameter: Age (day) Value: 21
  misc_feature: MA Experiment 20000234 PARAMETER Experiment Name: At_Siliques_P Parameter: Organism Value: A. thaliana
  misc_feature: MA Experiment 20000234 PARAMETER Experiment Name: At_Siliques_P Parameter: Plant Line Value: WS
  misc_feature: MA Experiment 20000234 PARAMETER Experiment Name: At_Siliques_P Parameter: Tissue Value: Less Than 5mm Siliques vs. Whole Plant
  misc_feature: MA Experiment ID: 20000438 Result: Down-regulated in Transcription
  misc_feature: MA Experiment 20000438 PARAMETER Experiment Name: At_Shoots__P Parameter: Age (day) Value: 14
  misc_feature: MA Experiment 20000438 PARAMETER Experiment Name: At_Shoots__P Parameter: Tissue Value: Shoots vs. Whole Plant
  misc_feature: MA Experiment ID: 20000527 Result: Down-regulated in Transcription
  misc_feature: MA Experiment 20000527 PARAMETER Experiment Name: At_10percent_PEG_P Parameter: Age (day) Value: 20
  misc_feature: MA Experiment 20000527 PARAMETER Experiment Name: At_10percent_PEG_P Parameter: Organism Value: A. thaliana
  misc_feature: MA Experiment 20000527 PARAMETER Experiment Name: At_10percent_PEG_P Parameter: Plant Line Value: WS
  misc_feature: MA Experiment 20000527 PARAMETER Experiment Name: At_10percent_PEG_P Parameter: Timepoint (day) Value: 20
  misc_feature: MA Experiment 20000527 PARAMETER Experiment Name: At_10percent_PEG_P Parameter: Tissue Value: Whole Plant
  misc_feature: MA Experiment 20000527 PARAMETER Experiment Name: At_10percent_PEG_P Parameter: Treatment Value: 10percent PEG vs. No Treatment
  misc_feature: MA Experiment ID: 20000794 Result: Up-regulated in Transcription
  misc_feature: MA Experiment 20000794 PARAMETER Experiment Name: At_Petals_P Parameter: Age (day) Value: 23-25 days
  misc_feature: MA Experiment 20000794 PARAMETER Experiment Name: At_Petals_P Parameter: Plant Line Value: WS
  misc_feature: MA Experiment 20000794 PARAMETER Experiment Name: At_Petals_P Parameter: Tissue Value: Petals vs. Whole plant
  misc_feature: MA Experiment ID: 20001556 Result: Down-regulated in Transcription
  misc_feature: MA Experiment 20001556 PARAMETER Experiment Name: At_Drought_Soil_Dry_P Parameter: Age (day) Value: 26
  misc_feature: MA Experiment 20001556 PARAMETER Experiment Name: At_Drought_Soil_Dry_P Parameter: Organism Value: A. thaliana
  misc_feature: MA Experiment 20001556 PARAMETER Experiment Name: At_Drought_Soil_Dry_P Parameter: Plant Line Value: WS
  misc_feature: MA Experiment 20001556 PARAMETER Experiment Name: At_Drought_Soil_Dry_P Parameter: Post Timepoint (hr) Value: None
  misc_feature: MA Experiment 20001556 PARAMETER Experiment Name: At_Drought_Soil_Dry_P Parameter: Post-Treatment Value: None
  misc_feature: MA Experiment 20001556 PARAMETER Experiment Name: At_Drought_Soil_Dry_P Parameter: Timepoint (day) Value: 12
  misc_feature: MA Experiment 20001556 PARAMETER Experiment Name: At_Drought_Soil_Dry_P Parameter: Treatment Value: Drought vs. No Drought
  misc_feature: MA Experiment ID: 20001905 Result: Down-regulated in Transcription
  misc_feature: MA Experiment 20001905 PARAMETER Experiment Name: At_Drought_Reproduction_P Parameter: Age (day) Value: 40
  misc_feature: MA Experiment 20001905 PARAMETER Experiment Name: At_Drought_Reproduction_P Parameter: Organism Value: A. thaliana
  misc_feature: MA Experiment 20001905 PARAMETER Experiment Name: At_Drought_Reproduction_P Parameter: Plant Line Value: WS
  misc_feature: MA Experiment 20001905 PARAMETER Experiment Name: At_Drought_Reproduction_P Parameter: Timepoint (day) Value: 10
  misc_feature: MA Experiment 20001905 PARAMETER Experiment Name: At_Drought_Reproduction_P Parameter: Tissue Value: Rosettes
  misc_feature: MA Experiment 20001905 PARAMETER Experiment Name: At_Drought_Reproduction_P Parameter: Treatment Value: Drought vs. No Drought
atcacaaaaacccaaaacctttgatatttgtctaattttacaaagatgggtttcaaactcatctctctcctccttctttttcttccacttctaacagtcacaatcttgtcgggagtcgagcaggcctttgcttccgacaaggcactcctcgtgaccggccgcaacatcacggctgacggtggaaggtcgtcactgagagggaagaagcagaggagagcatcaggatgtaacttgttccaaggccgatgggtgttcgatgcttcttaccctttctatgactcgtccaagtgtcctttcatcgacggcgagtttgactgtctcaagttcggccgaccagacaaacagttcctcaagtactcttggcaacctgaatcttgcaccatcccaaggttcgacggtggggcatttctgaggaaatacagaggaaaacgagtcatgttcgtcggagactcactgagtttaaacatgtgggaatcgttggcctgtatgatccatgcgtcggtaccaaacgccaagaccacttttctcaagcgtaccccactctctactctcactttccaggaatatggagtaacgttatatctatatagaacaccatacatagtagatatatccaaagagagagttgggcgtgtgcttaaccttggagctattgaaggaggtgctgatgcttggaaaaacatggacgttcttgtcttcaactcttggcattggtggactcacaaaggccaatctcaagggtgggattatattagagatgggtcgtctttggtgagagacatgaaccgtcttgacgctttctacaaaggactcagtacttgggctcgatgggttgatcaaaacgtcgatacggccaaaactcgagttttcttccaaggcatttctcccactcattacgagggaagggaatggaacgagccgaggaagacttgtagtgggcaaatgcagccgttgggtggatcaagttacccaagtggtcagcctccatcctcaggagtagtgtcgaaagtgttgagttcgatgaaaaagccagtgaccttgctcgatatcacaactttgtctcagttgagaaaagatgctcatccttcttcttatggtggcgatggaggaacagattgcagccattggtgcctcccagggttgcctgatacatggaaccaacttctctacgcagctcttacgatgtgaagtgttaagatactaaaaagaaagtgcataacacctttattctgtaaatgacattcgtaaatcttctagtgttgtgtgatgctatagaaaacagatttataacaaaagagacattctcagtataaaataacacattggtttg

SEQ ID NO: 102891 - protein, 380 aa, Arabidopsis thaliana; identical to SEQ ID NO: 21494
  peptide (1)..(380): Ceres Seq. ID no. 13611485
  misc_feature (1)..(380): Homolog of NCBI NO: 18396930 NR Description: expressed protein [Arabidopsis thaliana] unknown protein [Arabidopsis thaliana]
  misc_feature (1)..(380): Homolog of NCBI NO: 25366741 NR Description: F28N24.24 protein - Arabidopsis thaliana
  misc_feature (1)..(380): Homolog of NCBI NO: 18403435 NR Description: expressed protein [Arabidopsis thaliana] expressed protein [Arabidopsis thaliana]
  misc_feature (214)..(380): Homolog of NCBI NO: 25408325 NR Description: hypothetical protein At2g34070 [imported] -
  misc_feature (1)..(151): Homolog of NCBI NO: 25408325 NR Description: hypothetical protein At2g34070 [imported] -
  misc_feature (1)..(378): Homolog of NCBI NO: 34911864 NR Description: OSJNBb0032K15.9 [Oryza sativa (japonica
  misc_feature (54)..(378): Homolog of NCBI NO: 18406003 NR Description: expressed protein [Arabidopsis thaliana]
  misc_feature (61)..(379): Homolog of NCBI NO: 21593142 NR Description: unknown [Arabidopsis thaliana]
  misc_feature (61)..(379): Homolog of NCBI NO: 28393769 NR Description: unknown protein [Arabidopsis thaliana]
  misc_feature (170)..(379): Homolog of NCBI NO: 34904010 NR Description: unnamed protein product [Oryza sativa (japonica group)] >gi|7523484|dbj|BAA94212.1| unnamed protein product

SEQ ID NO: 102892 - protein, 250 aa, Arabidopsis thaliana; identical to SEQ ID NO: 21495
  peptide (1)..(250): Ceres Seq. ID no. 13611486
  misc_feature (1)..(250): Homolog of NCBI NO: 18396930 NR Description: expressed protein [Arabidopsis thaliana] unknown protein [Arabidopsis thaliana]
  misc_feature (1)..(250): Homolog of NCBI NO: 25366741 NR Description: F28N24.24 protein - Arabidopsis thaliana
  misc_feature (1)..(250): Homolog of NCBI NO: 18403435 NR Description: expressed protein [Arabidopsis thaliana] expressed protein [Arabidopsis thaliana]
  misc_feature (84)..(250): Homolog of NCBI NO: 25408325 NR Description: hypothetical protein At2g34070 [imported] -
  misc_feature (1)..(21): Homolog of NCBI NO: 25408325 NR Description: hypothetical protein At2g34070 [imported] -
  misc_feature (1)..(248): Homolog of NCBI NO: 34911864 NR Description: OSJNBb0032K15.9 [Oryza sativa (japonica
  misc_feature (1)..(248): Homolog of NCBI NO: 18406003 NR Description: expressed protein [Arabidopsis thaliana]
  misc_feature (1)..(249): Homolog of NCBI NO: 21593142 NR Description: unknown [Arabidopsis thaliana]
  misc_feature (1)..(249): Homolog of NCBI NO: 28393769 NR Description: unknown protein [Arabidopsis thaliana]
  misc_feature (40)..(249): Homolog of NCBI NO: 34904010 NR Description: unnamed protein product [Oryza sativa (japonica group)] >gi|7523484|dbj|BAA94212.1| unnamed protein product

SEQ ID NO: 102893 - protein, 240 aa, Arabidopsis thaliana; identical to SEQ ID NO: 21496
  peptide (1)..(240): Ceres Seq. ID no. 13611487
  misc_feature (1)..(240): Homolog of NCBI NO: 18396930 NR Description: expressed protein [Arabidopsis thaliana] unknown protein [Arabidopsis thaliana]
  misc_feature (1)..(240): Homolog of NCBI NO: 25366741 NR Description: F28N24.24 protein - Arabidopsis thaliana
  misc_feature (1)..(240): Homolog of NCBI NO: 18403435 NR Description: expressed protein [Arabidopsis thaliana] expressed protein [Arabidopsis thaliana]
  misc_feature (74)..(240): Homolog of NCBI NO: 25408325 NR Description: hypothetical protein At2g34070 [imported] -
  misc_feature (1)..(11): Homolog of NCBI NO: 25408325 NR Description: hypothetical protein At2g34070 [imported] -
  misc_feature (1)..(238): Homolog of NCBI NO: 34911864 NR Description: OSJNBb0032K15.9 [Oryza sativa (japonica
  misc_feature (1)..(238): Homolog of NCBI NO: 18406003 NR Description: expressed protein [Arabidopsis thaliana]
  misc_feature (1)..(239): Homolog of NCBI NO: 21593142 NR Description: unknown [Arabidopsis thaliana]
  misc_feature (1)..(239): Homolog of NCBI NO: 28393769 NR Description: unknown protein [Arabidopsis thaliana]
  misc_feature (30)..(239): Homolog of NCBI NO: 34904010 NR Description: unnamed protein product [Oryza sativa (japonica group)] >gi|7523484|dbj|BAA94212.1| unnamed protein product

SEQ ID NO: 102894 - DNA, 1309 bp, Arabidopsis thaliana
  misc_feature (1)..(1309): Ceres Seq. ID no. 13611499
  misc_feature: MA Experiment ID: 108461 Result: Down-regulated in Transcription
  misc_feature: MA Experiment 108461 PARAMETER Experiment Name: At_Germinating_Seeds_cDNA_P Parameter: Age (day) Value: 1 vs. 0
  misc_feature: MA Experiment 108461 PARAMETER Experiment Name: At_Germinating_Seeds_cDNA_P Parameter: Tissue Value: Germinating Seeds
  misc_feature: MA Experiment ID: 108462 Result: Down-regulated in Transcription
  misc_feature: MA Experiment 108462 PARAMETER Experiment Name: At_Germinating_Seeds_cDNA_P Parameter: Age (day) Value: 2 vs. 0
  misc_feature: MA Experiment 108462 PARAMETER Experiment Name: At_Germinating_Seeds_cDNA_P Parameter: Tissue Value: Germinating Seeds
  misc_feature: MA Experiment ID: 108464 Result: Down-regulated in Transcription
  misc_feature: MA Experiment 108464 PARAMETER Experiment Name: At_Germinating_Seeds_cDNA_P Parameter: Age (day) Value: 4 vs. 0
  misc_feature: MA Experiment 108464 PARAMETER Experiment Name: At_Germinating_Seeds_cDNA_P Parameter: Tissue Value: Germinating Seeds
  misc_feature: MA Experiment ID: 20000180 Result: Down-regulated in Transcription
  misc_feature: MA Experiment 20000180 PARAMETER Experiment Name: At_Germinating_Seeds_P Parameter: Age (hr) Value: 24 vs. 0
  misc_feature: MA Experiment 20000180 PARAMETER Experiment Name: At_Germinating_Seeds_P Parameter: Tissue Value: Germinating Seeds
  misc_feature: MA Experiment ID: 20000184 Result: Down-regulated in Transcription
  misc_feature: MA Experiment 20000184 PARAMETER Experiment Name: At_Shoots__P Parameter: Age (day) Value: 7
  misc_feature: MA Experiment 20000184 PARAMETER Experiment Name: At_Shoots__P Parameter: Tissue Value: Shoots vs. Whole Plant
  misc_feature: MA Experiment ID: 20000224 Result: Up-regulated in Transcription
  misc_feature: MA Experiment ID: 20000227 Result: Up-regulated in Transcription
  misc_feature: MA Experiment 20000227 PARAMETER Experiment Name: At_Root-Tips-vs-Tops_P Parameter: Tissue Value: Root Tips vs. Root Tops
  misc_feature: MA Experiment ID: 20000794 Result: Up-regulated in Transcription
  misc_feature: MA Experiment 20000794 PARAMETER Experiment Name: At_Petals_P Parameter: Age (day) Value: 23-25 days
  misc_feature: MA Experiment 20000794 PARAMETER Experiment Name: At_Petals_P Parameter: Plant Line Value: WS
  misc_feature: MA Experiment 20000794 PARAMETER Experiment Name: At_Petals_P Parameter: Tissue Value: Petals vs. Whole plant
  misc_feature: MA Experiment ID: 20001911 Result: Up-regulated in Transcription
  misc_feature: MA Experiment 20001911 PARAMETER Experiment Name: At_Drought_Reproduction_P Parameter: Age (day) Value: 40
  misc_feature: MA Experiment 20001911 PARAMETER Experiment Name: At_Drought_Reproduction_P Parameter: Organism Value: A. thaliana
  misc_feature: MA Experiment 20001911 PARAMETER Experiment Name: At_Drought_Reproduction_P Parameter: Plant Line Value: WS
  misc_feature: MA Experiment 20001911 PARAMETER Experiment Name: At_Drought_Reproduction_P Parameter: Timepoint (day) Value: 10
  misc_feature: MA Experiment 20001911 PARAMETER Experiment Name: At_Drought_Reproduction_P Parameter: Tissue Value: Flowers
  misc_feature: MA Experiment 20001911 PARAMETER Experiment Name: At_Drought_Reproduction_P Parameter: Treatment Value: Drought vs. No Drought
gattcagaatcaaaccatttttgaagaaccctaaaagttctcttcttcccccaaatttgaatttgttcttgcaatcggattcgaaatccgaaagtcttagtctcgaatttgagctcaacagtttcttatggctccgaagaagtctgaaggaatcgctttgctttccgtttacagtgatgaagatgacgaagagatggaagacgccgaggaagaggaagaagaggatgagaagcagagaaatcaggaagagagtgaaaaaataattgaagaagatcaggtagaagaagcgaattatatggatgaagaagagaaaggaagaggaggagaagattctagaacgccgaggctattagatggtgttggagcttcttctagtgctcatgggactcctcgttcacttgataacgatgaatcatcgagacctgattggagtaatcgaatgattggtgagtctggagttgcggatggtgagagaggtgatgatgcttcaggggaaagtagtgatacgttattggatcagtttcttccgccaagaccgagagagaggtgctctgaggagctgcaaaggaaaatagataagtttctgagcttgaaaaagatggggaagagtttcaattcagaagtgaggaataggaaggaatacaggaatcctgacttcctattgcatgctgtatcttaccaagacattgaccagattggttcgtgtttcagtaaagatgtatttgatcccagtggatatgacccaagtgacttctgtgatgcaatagaaatcgacatgaagaatgagagggaaaggaaggaacaagaaagcaagaagaaccagaagcttgactttgtttctgctggtactcaacctggggcggttttcgctgctcaaaagcctaacatccccattccaggtattccagctttagctactagtggattgccttccataccaaccgaaattgctgctcgtgatggtagaccgaacaagaaatccaaatgggataaggttgatggggacgtaaagaatcctcctctagcagctggaactcaggattctatatcctcaatccggtctaatgcagctcttgtatctgctacaagtgctggttctggatactcagcttttgcgcaacaacggagacgagaggtggaaggaagaagatcttccgagaggaaattggagagaagaagttgagagacataaccagaacgaagcttttctatgttgtgattcatgtagcaagagtttctaaagaggttctagttcaatgtttcataacgagtacaaacttaaaatcaatgatatacagtaccttcattc

SEQ ID NO: 102895 - protein, 351 aa, Arabidopsis thaliana
  peptide (1)..(351): Ceres Seq. ID no. 13611500
  misc_feature (1)..(351): Homolog of NCBI NO: 18396997 NR Description: expressed protein [Arabidopsis thaliana]
  misc_feature (1)..(244): Homolog of NCBI NO: 28856236 NR Description: Similar to transcriptional regulator protein
  misc_feature (1)..(244): Homolog of NCBI NO: 9994179 NR Description: transcriptional regulator protein [Homo sapiens] transcriptional regulator protein HCNGP [Homo sapiens]
  misc_feature (26)..(244): Homolog of NCBI NO: 20086427 NR Description: HCNGP [Homo sapiens]
  misc_feature (1)..(244): Homolog of NCBI NO: 34875136 NR Description: similar to transcriptional regulator protein
  misc_feature (58)..(244): Homolog of NCBI NO: 21754486 NR Description: unnamed protein product [Homo sapiens]
  misc_feature (18)..(279): Homolog of NCBI NO: 19921898 NR Description: CG2063-PA [Drosophila melanogaster]
  misc_feature (17)..(242): Homolog of NCBI NO: 23613824 NR Description: hypothetical protein [Plasmodium falciparum 3D7]
MAPKKSEGIALLSVYSDEDDEEMEDAEEEEEEDEKQRNQEESEKIIEEDQVEEANYMDEEEKGRGGEDSRTPRLLDGVGASSSAHGTPRSLDNDESSRPDWSNRMIGESGVADGERGDDASGESSDTLLDQFLPPRPRERCSEELQRKIDKFLSLKKMGKSFNSEVRNRKEYRNPDFLLHAVSYQDIDQIGSCFSKDVFDPSGYDPSDFCDAIEIDMKNERERKEQESKKNQKLDFVSAGTQPGAVFAAQKPNIPIPGIPALATSGLPSIPTEIAARDGRPNKKSKWDKVDGDVKNPPLAAGTQDSISSIRSNAALVSATSAGSGYSAFAQQRRREVEGRRSSERKLERRS

SEQ ID NO: 102896 - protein, 329 aa, Arabidopsis thaliana
  peptide (1)..(329): Ceres Seq. ID no. 13611501
  misc_feature (1)..(329): Homolog of NCBI NO: 18396997 NR Description: expressed protein [Arabidopsis thaliana]
  misc_feature (1)..(222): Homolog of NCBI NO: 28856236 NR Description: Similar to transcriptional regulator protein
  misc_feature (1)..(222): Homolog of NCBI NO: 9994179 NR Description: transcriptional regulator protein [Homo sapiens] transcriptional regulator protein HCNGP [Homo sapiens]
  misc_feature (4)..(222): Homolog of NCBI NO: 20086427 NR Description: HCNGP [Homo sapiens]
  misc_feature (1)..(222): Homolog of NCBI NO: 34875136 NR Description: similar to transcriptional regulator protein
  misc_feature (36)..(222): Homolog of NCBI NO: 21754486 NR Description: unnamed protein product [Homo sapiens]
  misc_feature (1)..(257): Homolog of NCBI NO: 19921898 NR Description: CG2063-PA [Drosophila melanogaster]
  misc_feature (1)..(220): Homolog of NCBI NO: 23613824 NR Description: hypothetical protein [Plasmodium falciparum 3D7]
MEDAEEEEEEDEKQRNQEESEKIIEEDQVEEANYMDEEEKGRGGEDSRTPRLLDGVGASSSAHGTPRSLDNDESSRPDWSNRMIGESGVADGERGDDASGESSDTLLDQFLPPRPRERCSEELQRKIDKFLSLKKMGKSFNSEVRNRKEYRNPDFLLHAVSYQDIDQIGSCFSKDVFDPSGYDPSDFCDAIEIDMKNERERKEQESKKNQKLDFVSAGTQPGAVFAAQKPNIPIPGIPALATSGLPSIPTEIAARDGRPNKKSKWDKVDGDVKNPPLAAGTQDSISSIRSNAALVSATSAGSGYSAFAQQRRREVEGRRSSERKLERRS

SEQ ID NO: 102897 - protein, 295 aa, Arabidopsis thaliana; identical to SEQ ID NO: 34885
  peptide (1)..(295): Ceres Seq. ID no. 13611502
  misc_feature (1)..(295): Homolog of NCBI NO: 18396997 NR Description: expressed protein [Arabidopsis thaliana]
  misc_feature (1)..(188): Homolog of NCBI NO: 28856236 NR Description: Similar to transcriptional regulator protein
  misc_feature (1)..(188): Homolog of NCBI NO: 9994179 NR Description: transcriptional regulator protein [Homo sapiens] transcriptional regulator protein HCNGP [Homo sapiens]
  misc_feature (1)..(188): Homolog of NCBI NO: 20086427 NR Description: HCNGP [Homo sapiens]
  misc_feature (1)..(188): Homolog of NCBI NO: 34875136 NR Description: similar to transcriptional regulator protein
  misc_feature (2)..(188): Homolog of NCBI NO: 21754486 NR Description: unnamed protein product [Homo sapiens]
  misc_feature (1)..(223): Homolog of NCBI NO: 19921898 NR Description: CG2063-PA [Drosophila melanogaster]
  misc_feature (1)..(186): Homolog of NCBI NO: 23613824 NR Description: hypothetical protein [Plasmodium falciparum 3D7]

SEQ ID NO: 102898 - DNA, 1514 bp, Arabidopsis thaliana
  misc_feature (1)..(1514): Ceres Seq. ID no. 13611503
  misc_feature: MA Experiment ID: 108434 Result: Up-regulated in Transcription
  misc_feature: MA Experiment 108434 PARAMETER Experiment Name: At_Root_Tips_cDNA_P Parameter: Tissue Value: Root Tips
  misc_feature: MA Experiment ID: 108576 Result: Up-regulated in Transcription
  misc_feature: MA Experiment 108576 PARAMETER Experiment Name: At_42deg_Heat_cDNA_P Parameter: Temperature (deg C) Value: 42 vs. 22
  misc_feature: MA Experiment 108576 PARAMETER Experiment Name: At_42deg_Heat_cDNA_P Parameter: Timepoint (hr) Value: 1
  misc_feature: MA Experiment 108576 PARAMETER Experiment Name: At_42deg_Heat_cDNA_P Parameter: Tissue Value: Aerial
  misc_feature: MA Experiment ID: 108595 Result: Up-regulated in Transcription
  misc_feature: MA Experiment 108595 PARAMETER Experiment Name: At_Ler-pi_Ovule_cDNA_P Parameter: Plant Line Value: null
  misc_feature: MA Experiment ID: 20000093 Result: Up-regulated in Transcription
  misc_feature: MA Experiment 20000093 PARAMETER Experiment Name: At_42deg_Heat_cDNA_P Parameter: Temperature (deg C) Value: 42 vs. 22
  misc_feature: MA Experiment 20000093 PARAMETER Experiment Name: At_42deg_Heat_cDNA_P Parameter: Timepoint (hr) Value: 0.5
  misc_feature: MA Experiment 20000093 PARAMETER Experiment Name: At_42deg_Heat_cDNA_P Parameter: Tissue Value: Aerial
  misc_feature: MA Experiment ID: 20000111 Result: Up-regulated in Transcription
  misc_feature: MA Experiment 20000111 PARAMETER Experiment Name: At_42deg_Heat_cDNA_P Parameter: Temperature (deg C) Value: 42 vs. 22
  misc_feature: MA Experiment 20000111 PARAMETER Experiment Name: At_42deg_Heat_cDNA_P Parameter: Timepoint (hr) Value: 6
  misc_feature: MA Experiment 20000111 PARAMETER Experiment Name: At_42deg_Heat_cDNA_P Parameter: Tissue Value: Aerial
  misc_feature: MA Experiment ID: 20000112 Result: Up-regulated in Transcription
  misc_feature: MA Experiment 20000112 PARAMETER Experiment Name: At_42deg_Heat_cDNA_P Parameter: Temperature (deg C) Value: 42 vs. 22
  misc_feature: MA Experiment 20000112 PARAMETER Experiment Name: At_42deg_Heat_cDNA_P Parameter: Timepoint (hr) Value: 2
  misc_feature: MA Experiment 20000112 PARAMETER Experiment Name: At_42deg_Heat_cDNA_P Parameter: Tissue Value: Aerial
  misc_feature: MA Experiment ID: 20000227 Result: Up-regulated in Transcription
  misc_feature: MA Experiment 20000227 PARAMETER Experiment Name: At_Root-Tips-vs-Tops_P Parameter: Tissue Value: Root Tips vs. Root Tops
aagttcagcttcgtacctgagccaaagagtgtttcaggatggagctaaggtcgagaatgctcaaagactgtctcttggaagattccaactcatgttcctcaaacgggttcaaatcgattcccagacggcatcctctcaaccctttcccaatgataccaaagaggaaacaatccaatgcattgcaggctgtgattaacgccatcaagaacctccattccaacaccatcaaatccgctccatcggggatcttaccaaggagcctttctcggcggttagcaaccaagaacaaagcagaaaaccaagcaagcatcaccgttattcgagtcaaagacatcgtgcgatggcactcgtctaaggacctgcatgaggacatatcacattttgaacctcatcagtacacaaccaagaacacgacaacaaccacaggatcctccaccaccagcggcacatcctgcagcagttggtctgacttggattttacatcggagtttttaccatcatcatggggaagtaacgttgaggagtgcggtgaaaaacagagtgttaaaaacaacttacactgcgtcggcgaagattcttgcacagcagtaatactagccgacactgaagtgggacctgaggagaacttacagtgtgaaaaggagcacaacagccctgtctcagtgtttgagattcaacatgaggaatatgacgaaacatcagactcttctttcagtcaatgccttgacaatgtggaaagaaccaaacaaaagctcatgcaaacgattcagcggtttgagtctttggccaacattagtcctttcaatttggatgaatggggctcaatggatgaagcatcttgcatggaaggaggacaagagacagataccaagtatgatgatgatgagaattgtgatactgttgatagagagagtgaagatgaatacaatgatgaggttgaagagaaggcagcacagctatggaaccgagtcaaagaaagacacgccatttggatccacgaagaacatctgataatggactatttcagagatgaattgatgcaaaggacaaactcattccacgaaactcaacactttgagaaccaattggtatgcgaggcaaaaggatggttgcagggaaagagagaatcagagcttgaacgcggaacaagtgagcagaggagacaagcatgtgctagagaaatcgaaagacgagactggaatgagaaacagatagaggaggagcacgaagtggtggttacacagattgaggaagaactcttcagcctgttaatggacgaaactttaacaacgctctctaccaaaactgattccagtccacctgaacatcacaaaacagtaacatcaatgcttaagctttagaaattagaaagcaaaaacatttttgaataaggctttgacttaaaagctcaggtttttttagctctacttttgtaagaatgaagcaaacgaataatacaatgtatattgacctctaaaaccatatatatatatatgcctaattcatatttctgc

SEQ ID NO: 102899 - protein, 440 aa, Arabidopsis thaliana
  peptide (1)..(440): Ceres Seq. ID no. 13611504
  misc_feature (1)..(440): Homolog of NCBI NO: 18411440 NR Description: expressed protein [Arabidopsis thaliana]
  misc_feature (7)..(440): Homolog of NCBI NO: 21593216 NR Description: unknown [Arabidopsis thaliana]
  misc_feature (240)..(440): Homolog of NCBI NO: 7485281 NR Description: hypothetical protein A_TM018A10.11 - Arabidopsis >gi|2252858|gb|AAB62856.1| A_TM018A10.11 gene product thaliana] >gi|7267416|emb|CAB80886.1| AT4g00770 [Arabidopsis
MELRSRMLKDCLLEDSNSCSSNGFKSIPRRHPLNPFPMIPKRKQSNALQAVINAIKNLHSNTIKSAPSGILPRSLSRRLATKNKAENQASITVIRVKDIVRWHSSKDLHEDISHFEPHQYTTKNTTTTTGSSTTSGTSCSSWSDLDFTSEFLPSSWGSNVEECGEKQSVKNNLHCVGEDSCTAVILADTEVGPEENLQCEKEHNSPVSVFEIQHEEYDETSDSSFSQCLDNVERTKQKLMQTIQRFESLANISPFNLDEWGSMDEASCMEGGQETDTKYDDDENCDTVDRESEDEYNDEVEEKAAQLWNRVKERHAIWIHEEHLIMDYFRDELMQRTNSFHETQHFENQLVCEAKGWLQGKRESELERGTSEQRRQACAREIERRDWNEKQIEEEHEVVVTQIEEELFSLLMDETLTTLSTKTDSSPPEHHKTVTSMLKL

SEQ ID NO: 102900 - protein, 434 aa, Arabidopsis thaliana
  peptide (1)..(434): Ceres Seq. ID no. 13611505
  misc_feature (1)..(434): Homolog of NCBI NO: 18411440 NR Description: expressed protein [Arabidopsis thaliana]
  misc_feature (1)..(434): Homolog of NCBI NO: 21593216 NR Description: unknown [Arabidopsis thaliana]
  misc_feature (234)..(434): Homolog of NCBI NO: 7485281 NR Description: hypothetical protein A_TM018A10.11 - Arabidopsis >gi|2252858|gb|AAB62856.1| A_TM018A10.11 gene product thaliana] >gi|7267416|emb|CAB80886.1| AT4g00770 [Arabidopsis
MLKDCLLEDSNSCSSNGFKSIPRRHPLNPFPMIPKRKQSNALQAVINAIKNLHSNTIKSAPSGILPRSLSRRLATKNKAENQASITVIRVKDIVRWHSSKDLHEDISHFEPHQYTTKNTTTTTGSSTTSGTSCSSWSDLDFTSEFLPSSWGSNVEECGEKQSVKNNLHCVGEDSCTAVILADTEVGPEENLQCEKEHNSPVSVFEIQHEEYDETSDSSFSQCLDNVERTKQKLMQTIQRFESLANISPFNLDEWGSMDEASCMEGGQETDTKYDDDENCDTVDRESEDEYNDEVEEKAAQLWNRVKERHAIWIHEEHLIMDYFRDELMQRTNSFHETQHFENQLVCEAKGWLQGKRESELERGTSEQRRQACAREIERRDWNEKQIEEEHEVVVTQIEEELFSLLMDETLTTLSTKTDSSPPEHHKTVTSMLKL

SEQ ID NO: 102901 - protein, 403 aa, Arabidopsis thaliana
  peptide (1)..(403): Ceres Seq. ID no. 13611506
  misc_feature (1)..(403): Homolog of NCBI NO: 18411440 NR Description: expressed protein [Arabidopsis thaliana]
  misc_feature (1)..(403): Homolog of NCBI NO: 21593216 NR Description: unknown [Arabidopsis thaliana]
  misc_feature (203)..(403): Homolog of NCBI NO: 7485281 NR Description: hypothetical protein A_TM018A10.11 - Arabidopsis >gi|2252858|gb|AAB62856.1| A_TM018A10.11 gene product thaliana] >gi|7267416|emb|CAB80886.1| AT4g00770 [Arabidopsis
MIPKRKQSNALQAVINAIKNLHSNTIKSAPSGILPRSLSRRLATKNKAENQASITVIRVKDIVRWHSSKDLHEDISHFEPHQYTTKNTTTTTGSSTTSGTSCSSWSDLDFTSEFLPSSWGSNVEECGEKQSVKNNLHCVGEDSCTAVILADTEVGPEENLQCEKEHNSPVSVFEIQHEEYDETSDSSFSQCLDNVERTKQKLMQTIQRFESLANISPFNLDEWGSMDEASCMEGGQETDTKYDDDENCDTVDRESEDEYNDEVEEKAAQLWNRVKERHAIWIHEEHLIMDYFRDELMQRTNSFHETQHFENQLVCEAKGWLQGKRESELERGTSEQRRQACAREIERRDWNEKQIEEEHEVVVTQIEEELFSLLMDETLTTLSTKTDSSPPEHHKTVTSMLKL

SEQ ID NO: 102902 - DNA, 1483 bp, Arabidopsis thaliana
  misc_feature (1)..(1483): Ceres Seq. ID no. 13611519
  misc_feature: MA Experiment ID: 108473 Result: Down-regulated in Transcription
  misc_feature: MA Experiment 108473 PARAMETER Experiment Name: At_Drought_Flowers_cDNA_P Parameter: Timepoint (hr) Value: 7 d
  misc_feature: MA Experiment 108473 PARAMETER Experiment Name: At_Drought_Flowers_cDNA_P Parameter: Tissue Value: Flower
  misc_feature: MA Experiment 108473 PARAMETER Experiment Name: At_Drought_Flowers_cDNA_P Parameter: Treatment Value: Drought vs. No Drought
  misc_feature: MA Experiment ID: 108474 Result: Down-regulated in Transcription
  misc_feature: MA Experiment 108474 PARAMETER Experiment Name: At_Drought_Flowers_cDNA_P Parameter: Timepoint (hr) Value: null
  misc_feature: MA Experiment 108474 PARAMETER Experiment Name: At_Drought_Flowers_cDNA_P Parameter: Treatment Value: Drought vs. No Drought
  misc_feature: MA Experiment ID: 108489 Result: Down-regulated in Transcription
  misc_feature: MA Experiment ID: 108501 Result: Up-regulated in Transcription
  misc_feature: MA Experiment 108501 PARAMETER Experiment Name: At_ap2_floral_buds_cDNA_P Parameter: Plant Line Value: ap2 (Ler.)
  misc_feature: MA Experiment 108501 PARAMETER Experiment Name: At_ap2_floral_buds_cDNA_P Parameter: Tissue Value: Closed Flower
  misc_feature: MA Experiment ID: 108569 Result: Up-regulated in Transcription
  misc_feature: MA Experiment 108569 PARAMETER Experiment Name: At_0.001%_MeJA__cDNA_P Parameter: Timepoint (hr) Value: 6
  misc_feature: MA Experiment 108569 PARAMETER Experiment Name: At_0.001%_MeJA__cDNA_P Parameter: Tissue Value: Aerial
  misc_feature: MA Experiment 108569 PARAMETER Experiment Name: At_0.001%_MeJA__cDNA_P Parameter: Treatment Value: 0.001% MeJA vs. No Treatment
  misc_feature: MA Experiment ID: 108572 Result: Down-regulated in Transcription
  misc_feature: MA Experiment 108572 PARAMETER Experiment Name: At_Drought_cDNA_P Parameter: Timepoint (hr) Value: 1
  misc_feature: MA Experiment 108572 PARAMETER Experiment Name: At_Drought_cDNA_P Parameter: Tissue Value: Aerial
  misc_feature: MA Experiment 108572 PARAMETER Experiment Name: At_Drought_cDNA_P Parameter: Treatment Value: Drought vs. No Drought
  misc_feature: MA Experiment ID: 108573 Result: Down-regulated in Transcription
  misc_feature: MA Experiment 108573 PARAMETER Experiment Name: At_Drought_cDNA_P Parameter: Timepoint (hr) Value: 6
  misc_feature: MA Experiment 108573 PARAMETER Experiment Name: At_Drought_cDNA_P Parameter: Tissue Value: Aerial
  misc_feature: MA Experiment 108573 PARAMETER Experiment Name: At_Drought_cDNA_P Parameter: Treatment Value: Drought vs. No Drought
  misc_feature: MA Experiment ID: 108574 Result: Up-regulated in Transcription
  misc_feature: MA Experiment 108574 PARAMETER Experiment Name: At_Wounding__cDNA_P Parameter: Timepoint (hr) Value: 1
  misc_feature: MA Experiment 108574 PARAMETER Experiment Name: At_Wounding__cDNA_P Parameter: Tissue Value: Aerial
  misc_feature: MA Experiment 108574 PARAMETER Experiment Name: At_Wounding__cDNA_P Parameter: Treatment Value: Wounding vs. No Wounding
  misc_feature: MA Experiment ID: 108595 Result: Up-regulated in Transcription
  misc_feature: MA Experiment 108595 PARAMETER Experiment Name: At_Ler-pi_Ovule_cDNA_P Parameter: Plant Line Value: null
  misc_feature: MA Experiment ID: 20000069 Result: Down-regulated in Transcription
  misc_feature: MA Experiment 20000069 PARAMETER Experiment Name: At_100uM_ABA_Mutants_cDNA_P Parameter: Plant Line Value: CS23
  misc_feature: MA Experiment 20000069 PARAMETER Experiment Name: At_100uM_ABA_Mutants_cDNA_P Parameter: Timepoint (hr) Value: 6
  misc_feature: MA Experiment 20000069 PARAMETER Experiment Name: At_100uM_ABA_Mutants_cDNA_P Parameter: Tissue Value: Aerial
  misc_feature: MA Experiment 20000069 PARAMETER Experiment Name: At_100uM_ABA_Mutants_cDNA_P Parameter: Treatment Value: 100uM ABA vs. No Treatment
  misc_feature: MA Experiment ID: 20000070 Result: Down-regulated in Transcription
  misc_feature: MA Experiment 20000070 PARAMETER Experiment Name: At_100uM_ABA_Mutants_cDNA_P Parameter: Plant Line Value: CS24
  misc_feature: MA Experiment 20000070 PARAMETER Experiment Name: At_100uM_ABA_Mutants_cDNA_P Parameter: Timepoint (hr) Value: 6
  misc_feature: MA Experiment 20000070 PARAMETER Experiment Name: At_100uM_ABA_Mutants_cDNA_P Parameter: Tissue Value: Aerial
  misc_feature: MA Experiment 20000070 PARAMETER Experiment Name: At_100uM_ABA_Mutants_cDNA_P Parameter: Treatment Value: 100uM ABA vs. No Treatment
  misc_feature: MA Experiment ID: 20000071 Result: Down-regulated in Transcription
  misc_feature: MA Experiment 20000071 PARAMETER Experiment Name: At_100uM_ABA_Mutants_cDNA_P Parameter: Plant Line Value: CS8104
  misc_feature: MA Experiment 20000071 PARAMETER Experiment Name: At_100uM_ABA_Mutants_cDNA_P Parameter: Timepoint (hr) Value: 6
  misc_feature: MA Experiment 20000071 PARAMETER Experiment Name: At_100uM_ABA_Mutants_cDNA_P Parameter: Tissue Value: Aerial
  misc_feature: MA Experiment 20000071 PARAMETER Experiment Name: At_100uM_ABA_Mutants_cDNA_P Parameter: Treatment Value: 100uM ABA vs. No Treatment
  misc_feature: MA Experiment ID: 20000087 Result: Down-regulated in Transcription
  misc_feature: MA Experiment 20000087 PARAMETER Experiment Name: At_100uM_ABA_Mutants_cDNA_P Parameter: Plant Line Value: WS
  misc_feature: MA Experiment 20000087 PARAMETER Experiment Name: At_100uM_ABA_Mutants_cDNA_P Parameter: Timepoint (hr) Value: 6
  misc_feature: MA Experiment 20000087 PARAMETER Experiment Name: At_100uM_ABA_Mutants_cDNA_P Parameter: Tissue Value: Aerial
  misc_feature: MA Experiment 20000087 PARAMETER Experiment Name: At_100uM_ABA_Mutants_cDNA_P Parameter: Treatment Value: 100uM ABA vs. No Treatment
  misc_feature: MA Experiment ID: 20000089 Result: Down-regulated in Transcription
  misc_feature: MA Experiment ID: 20000117 Result: Down-regulated in Transcription
  misc_feature: MA Experiment 20000117 PARAMETER Experiment Name: At_100uM_ABA_Mutants_cDNA_P Parameter: Plant Line Value: Columbia
  misc_feature: MA Experiment 20000117 PARAMETER Experiment Name: At_100uM_ABA_Mutants_cDNA_P Parameter: Timepoint (hr) Value: 6
  misc_feature: MA Experiment 20000117 PARAMETER Experiment Name: At_100uM_ABA_Mutants_cDNA_P Parameter: Tissue Value: Aerial
  misc_feature: MA Experiment 20000117 PARAMETER Experiment Name: At_100uM_ABA_Mutants_cDNA_P Parameter: Treatment Value: 100uM ABA vs. No Treatment
  misc_feature: MA Experiment ID: 20000171 Result: Down-regulated in Transcription
  misc_feature: MA Experiment 20000171 PARAMETER Experiment Name: At_42deg_Heat_P Parameter: Age (day) Value: 14
  misc_feature: MA Experiment 20000171 PARAMETER Experiment Name: At_42deg_Heat_P Parameter: Organism Value: A. thaliana
  misc_feature: MA Experiment 20000171 PARAMETER Experiment Name: At_42deg_Heat_P Parameter: Plant Line Value: WS
  misc_feature: MA Experiment 20000171 PARAMETER Experiment Name: At_42deg_Heat_P Parameter: Temperature (deg C) Value: 42 vs. 22
  misc_feature: MA Experiment 20000171 PARAMETER Experiment Name: At_42deg_Heat_P Parameter: Timepoint (hr) Value: 1
  misc_feature: MA Experiment 20000171 PARAMETER Experiment Name: At_42deg_Heat_P Parameter: Tissue Value: Aerial
  misc_feature: MA Experiment ID: 20000211 Result: Up-regulated in Transcription
  misc_feature: MA Experiment 20000211 PARAMETER Experiment Name: At_0.001percent_MeJA__P Parameter: Age (day) Value: 14
  misc_feature: MA Experiment 20000211 PARAMETER Experiment Name: At_0.001percent_MeJA__P Parameter: Organism Value: A. thaliana
  misc_feature: MA Experiment 20000211 PARAMETER Experiment Name: At_0.001percent_MeJA__P Parameter: Plant Line Value: WS
  misc_feature: MA Experiment 20000211 PARAMETER Experiment Name: At_0.001percent_MeJA__P Parameter: Timepoint (hr) Value: 1
  misc_feature: MA Experiment 20000211 PARAMETER Experiment Name: At_0.001percent_MeJA__P Parameter: Tissue Value: Aerial
  misc_feature: MA Experiment 20000211 PARAMETER Experiment Name: At_0.001percent_MeJA__P Parameter: Treatment Value: 0.001percent MeJA vs. No Treatment
  misc_feature: MA Experiment ID: 20000234 Result: Up-regulated in Transcription
  misc_feature: MA Experiment 20000234 PARAMETER Experiment Name: At_Siliques_P Parameter: Age (day) Value: 21
  misc_feature: MA Experiment 20000234 PARAMETER Experiment Name: At_Siliques_P Parameter: Organism Value: A. thaliana
  misc_feature: MA Experiment 20000234 PARAMETER Experiment Name: At_Siliques_P Parameter: Plant Line Value: WS
  misc_feature: MA Experiment 20000234 PARAMETER Experiment Name: At_Siliques_P Parameter: Tissue Value: Less Than 5mm Siliques vs. Whole Plant
  misc_feature: MA Experiment ID: 20000235 Result: Up-regulated in Transcription
  misc_feature: MA Experiment 20000235 PARAMETER Experiment Name: At_Siliques_P Parameter: Age (day) Value: 21
  misc_feature: MA Experiment 20000235 PARAMETER Experiment Name: At_Siliques_P Parameter: Organism Value: A. thaliana
  misc_feature: MA Experiment 20000235 PARAMETER Experiment Name: At_Siliques_P Parameter: Plant Line Value: WS
  misc_feature: MA Experiment 20000235 PARAMETER Experiment Name: At_Siliques_P Parameter: Tissue Value: 5-10mm Siliques vs. Whole Plant
  misc_feature: MA Experiment ID: 20000264 Result: Up-regulated in Transcription
  misc_feature: MA Experiment 20000264 PARAMETER Experiment Name: At_Open_Flower_P Parameter: Age (day) Value: 21
  misc_feature: MA Experiment 20000264 PARAMETER Experiment Name: At_Open_Flower_P Parameter: Plant Line Value: WS
  misc_feature: MA Experiment 20000264 PARAMETER Experiment Name: At_Open_Flower_P Parameter: Tissue Value: Open Flower vs. Whole Plant
  misc_feature: MA Experiment ID: 20000265 Result: Up-regulated in Transcription
  misc_feature: MA Experiment 20000265 PARAMETER Experiment Name: At_Open_Flower_P Parameter: Age (day) Value: 21
  misc_feature: MA Experiment 20000265 PARAMETER Experiment Name: At_Open_Flower_P Parameter: Plant Line Value: WS
  misc_feature: MA Experiment 20000265 PARAMETER Experiment Name: At_Open_Flower_P Parameter: Tissue Value: Closed Flower vs. Whole Plant
  misc_feature: MA Experiment ID: 20000286 Result: Up-regulated in Transcription
  misc_feature: MA Experiment 20000286 PARAMETER Experiment Name: At_Open_Flower_P Parameter: Age (day) Value: 21
  misc_feature: MA Experiment 20000286 PARAMETER Experiment Name: At_Open_Flower_P Parameter: Plant Line Value: WS
  misc_feature: MA Experiment 20000286 PARAMETER Experiment Name: At_Open_Flower_P Parameter: Tissue Value: Half Open vs. Whole Plant
  misc_feature: MA Experiment ID: 20000437 Result: Down-regulated in Transcription
  misc_feature: MA Experiment 20000437 PARAMETER Experiment Name: At_Drought_P Parameter: Age (day) Value: 8
  misc_feature: MA Experiment 20000437 PARAMETER Experiment Name: At_Drought_P Parameter: Organism Value: A. thaliana
  misc_feature: MA Experiment 20000437 PARAMETER Experiment Name: At_Drought_P Parameter: Plant Line Value: WS
  misc_feature: MA Experiment 20000437 PARAMETER Experiment Name: At_Drought_P Parameter: Timepoint (hr) Value: 24
  misc_feature: MA Experiment 20000437 PARAMETER Experiment Name: At_Drought_P Parameter: Tissue Value: Whole Plant
  misc_feature: MA Experiment 20000437 PARAMETER Experiment Name: At_Drought_P Parameter: Treatment Value: Drought vs. No Drought
  misc_feature: MA Experiment ID: 20000441 Result: Down-regulated in Transcription
  misc_feature: MA Experiment 20000441 PARAMETER Experiment Name: At_1uM_BR-BRZ__P Parameter: Tissue Value: Shoot Apices
  misc_feature: MA Experiment 20000441 PARAMETER Experiment Name: At_1uM_BR-BRZ__P Parameter: Treatment Value: 1uM BR vs. No Treatment
  misc_feature: MA Experiment ID: 20000443 Result: Down-regulated in Transcription
  misc_feature: MA Experiment 20000443 PARAMETER Experiment Name: At_1uM_BR-BRZ__P Parameter: Tissue Value: Shoot Apices
  misc_feature: MA Experiment 20000443 PARAMETER Experiment Name: At_1uM_BR-BRZ__P Parameter: Treatment Value: 1uM BRZ vs. No Treatment
  misc_feature: MA Experiment ID: 20000495 Result: Down-regulated in Transcription
  misc_feature: MA Experiment 20000495 PARAMETER Experiment Name: At_Guard_Cells_P Parameter: Harvest Date Value: 8/2/2002
  misc_feature: MA Experiment 20000495 PARAMETER Experiment Name: At_Guard_Cells_P Parameter: Organism Value: A. thaliana
  misc_feature: MA Experiment 20000495 PARAMETER Experiment Name: At_Guard_Cells_P Parameter: Tissue Value: Guard Cells vs. Leaves
  misc_feature: MA Experiment ID: 20001248 Result: Down-regulated in Transcription
  misc_feature: MA Experiment 20001248 PARAMETER Experiment Name: At_Far-red-induction_P Parameter: Age (day) Value: 7
  misc_feature: MA Experiment 20001248 PARAMETER Experiment Name: At_Far-red-induction_P Parameter: Light Value: Far-red vs. White
  misc_feature: MA Experiment 20001248 PARAMETER Experiment Name: At_Far-red-induction_P Parameter: Organism Value: A. thaliana
  misc_feature: MA Experiment 20001248 PARAMETER Experiment Name: At_Far-red-induction_P Parameter: Plant Line Value: Columbia
  misc_feature: MA Experiment 20001248 PARAMETER Experiment Name: At_Far-red-induction_P Parameter: Timepoint (hr) Value: 4
  misc_feature: MA Experiment 20001248 PARAMETER Experiment Name: At_Far-red-induction_P Parameter: Tissue Value: Whole Plant
  misc_feature: MA Experiment ID: 20001757 Result: Down-regulated in Transcription
  misc_feature: MA Experiment 20001757 PARAMETER Experiment Name: At_50mM_NH4NO3_L-to-H_P Parameter: Timepoint (hr) Value: 6
  misc_feature: MA Experiment 20001757 PARAMETER Experiment Name: At_50mM_NH4NO3_L-to-H_P Parameter: Tissue Value: Leaf
  misc_feature: MA Experiment 20001757 PARAMETER Experiment Name: At_50mM_NH4NO3_L-to-H_P Parameter: Treatment Value: 50mM NH4NO3 vs 100mM Mannitol
  misc_feature: MA Experiment ID: 20001770 Result: Up-regulated in Transcription
  misc_feature: MA Experiment 20001770 PARAMETER Experiment Name: At_Far-red-enriched-adult_P Parameter: Age (day) Value: 28
  misc_feature: MA Experiment 20001770 PARAMETER Experiment Name: At_Far-red-enriched-adult_P Parameter: Light Value: Far-red enriched vs. White
  misc_feature: MA Experiment 20001770 PARAMETER Experiment Name: At_Far-red-enriched-adult_P Parameter: Organism Value: A. thaliana
  misc_feature: MA Experiment 20001770 PARAMETER Experiment Name: At_Far-red-enriched-adult_P Parameter: Plant Line Value: Columbia
  misc_feature: MA Experiment 20001770 PARAMETER Experiment Name: At_Far-red-enriched-adult_P Parameter: Timepoint (hr) Value: 8
  misc_feature: MA Experiment 20001770 PARAMETER Experiment Name: At_Far-red-enriched-adult_P Parameter: Tissue Value: Aerial
  misc_feature: MA Experiment ID: 20001906 Result: Down-regulated in Transcription
  misc_feature: MA Experiment 20001906 PARAMETER Experiment Name: At_Drought_Reproduction_P Parameter: Age (day) Value: 35
  misc_feature: MA Experiment 20001906 PARAMETER Experiment Name: At_Drought_Reproduction_P Parameter: Organism Value: A. thaliana
  misc_feature: MA Experiment 20001906 PARAMETER Experiment Name: At_Drought_Reproduction_P Parameter: Plant Line Value: WS
  misc_feature: MA Experiment 20001906 PARAMETER Experiment Name: At_Drought_Reproduction_P Parameter: Timepoint (day) Value: 5
  misc_feature: MA Experiment 20001906 PARAMETER Experiment Name: At_Drought_Reproduction_P Parameter: Tissue Value: Siliques
  misc_feature: MA Experiment 20001906 PARAMETER Experiment Name: At_Drought_Reproduction_P Parameter: Treatment Value: Drought vs. No Drought
  misc_feature: MA Experiment ID: 20001911 Result: Down-regulated in Transcription
  misc_feature: MA Experiment 20001911 PARAMETER Experiment Name: At_Drought_Reproduction_P Parameter: Age (day) Value: 40
  misc_feature: MA Experiment 20001911 PARAMETER Experiment Name: At_Drought_Reproduction_P Parameter: Organism Value: A. thaliana
  misc_feature: MA Experiment 20001911 PARAMETER Experiment Name: At_Drought_Reproduction_P Parameter: Plant Line Value: WS
  misc_feature: MA Experiment 20001911 PARAMETER Experiment Name: At_Drought_Reproduction_P Parameter: Timepoint (day) Value: 10
  misc_feature: MA Experiment 20001911 PARAMETER Experiment Name: At_Drought_Reproduction_P Parameter: Tissue Value: Flowers
  misc_feature: MA Experiment 20001911 PARAMETER Experiment Name: At_Drought_Reproduction_P Parameter: Treatment Value: Drought vs. No Drought
cactgtgctctcttcttcaatggaacaacaattaaccttagtattgcttgatagcccaaaaggcgccaaatatgtagaaacctttgaagaagccgcttcttcttcttcttcttcttcttcttcttctgttccctcctgcactgatcaccgccatcgaaccttcgtcaaattcttcctttacttctctctcgtcgctcttgcttactatttcatcatctccagtctcgccgtctctccaattcccccaacattgccgcaatcttctcccggaaacgtttcatcagcaaagtgtgatcttttcaccggagattggataccagatccaacaggtcctctgtacacaaatgtcacttgtcgtcacattcaagattttcagaactgcctattgaatggacgaccagatgtgaattatctcttctggagatggaagcctcgtgattgtgatcttcctaggtttagtccatcgcagtttcttgcttcagtgaagaacaaatggtgggcttttatcggtgattccattgctcgtaatcatgtccagtctctcatctgcattctctctcaggtggaagaagtggaggaaatctatcacgataaggagttcagatccaagatatggagattcccttctcacaacttcacactatcagtcatttggtctcctttccttctcaaatccgaaacatctagcaactcggatattcagctttacctcgaccagcttgaccacaaatggactgtccaatacccgaaattcgactacgttgttatctctggaggcaaatggtttcttaaaacaacaattttccatgaaaacaacgtagtcacgggctgtcattactgccaaggaagaaacaacctaactgatctcggctatgattactcctaccgcaaaaccctaaaccttctccgtgacttcgtcctaaactcaacccacaaaccgctggttctgtttcgaacaacaacgcctgaccatttcgaaaacggagagtggaacactggtgggtattgcaacagaacgatgccgtttaaagaaggccaagcaaatatgaaaactgtagatgatgtgatgcgtgatgttgagcttgaggtgtttcagaaatttgggaaaggttttggcttaggttccaacatcaggctattagacacgactggaatgtctcttctccgtccagacgggcatccgggaccataccggcatccaaatccttttgctggagttaagaataagagcaatgttcagaatgattgtctgcattggtgcttacctggtccaattgattcatggaatgatgtgatggtggaaaccacgcttaaccgggaacgggaactatacgatttaaccggttaatgtaccacgatatcgcttgtagctagttacagtcaatagccattccacttgtcaatgtctcgtatatgatagttctatattttaattttgtaatggttctaaacaagaataaacgatgcaaaattttgcagtgtg

SEQ ID NO: 102903 - protein, 448 aa, Arabidopsis thaliana
  peptide (1)..(448): Ceres Seq. ID no. 13611520
  misc_feature (262)..(436): Pfam Name: Arabidopsis proteins of unknown function Pfam Description: Arabidopsis proteins of unknown function
  misc_feature (7)..(448): Homolog of NCBI NO: 15234058 NR Description: expressed protein [Arabidopsis thaliana]
  misc_feature (7)..(448): Homolog of NCBI NO: 28393189 NR Description: unknown protein [Arabidopsis thaliana]
  misc_feature (81)..(442): Homolog of NCBI NO: 30678135 NR Description: expressed protein [Arabidopsis thaliana] unknown protein [Arabidopsis thaliana]
  misc_feature (35)..(93): Homolog of NCBI NO: 30678135 NR Description: expressed protein [Arabidopsis thaliana] unknown protein [Arabidopsis thaliana]
  misc_feature (35)..(442): Homolog of NCBI NO: 25518737 NR Description: hypothetical protein F6F3.23 [imported] - thaliana >gi|9665154|gb|AAF97338.1|AC023628_19 Unknown protein
  misc_feature (52)..(438): Homolog of NCBI NO: 15237044 NR Description: expressed protein [Arabidopsis thaliana]
  misc_feature (54)..(438): Homolog of NCBI NO: 7486743 NR Description: hypothetical protein F9D16.260 - Arabidopsis >gi|4454048|emb|CAA23045.1| putative protein [Arabidopsis >gi|7269228|emb|CAB81297.1| putative protein [Arabidopsis
  misc_feature (54)..(438): Homolog of NCBI NO: 30686312 NR Description: expressed protein [Arabidopsis thaliana]
  misc_feature (78)..(434): Homolog of NCBI NO: 15237211 NR Description: expressed protein [Arabidopsis thaliana]
  misc_feature (97)..(434): Homolog of NCBI NO: 15223079 NR Description: expressed protein [Arabidopsis thaliana]
TVLSSSMEQQLTLVLLDSPKGAKYVETFEEAASSSSSSSSSSVPSCTDHRHRTFVKFFLYFSLVALAYYFIISSLAVSPIPPTLPQSSPGNVSSAKCDLFTGDWIPDPTGPLYTNVTCRHIQDFQNCLLNGRPDVNYLFWRWKPRDCDLPRFSPSQFLASVKNKWWAFIGDSIARNHVQSLICILSQVEEVEEIYHDKEFRSKIWRFPSHNFTLSVIWSPFLLKSETSSNSDIQLYLDQLDHKWTVQYPKFDYVVISGGKWFLKTTIFHENNVVTGCHYCQGRNNLTDLGYDYSYRKTLNLLRDFVLNSTHKPLVLFRTTTPDHFENGEWNTGGYCNRTMPFKEGQANMKTVDDVMRDVELEVFQKFGKGFGLGSNIRLLDTTGMSLLRPDGHPGPYRHPNPFAGVKNKSNVQNDCLHWCLPGPIDSWNDVMVETTLNRERELYDLTG

SEQ ID NO: 102904 - protein, 442 aa, Arabidopsis thaliana
  peptide (1)..(442): Ceres Seq. ID no. 13611521
  misc_feature (256)..(430): Pfam Name: Arabidopsis proteins of unknown function Pfam Description: Arabidopsis proteins of unknown function
  misc_feature (1)..(442): Homolog of NCBI NO: 15234058 NR Description: expressed protein [Arabidopsis thaliana]
  misc_feature (1)..(442): Homolog of NCBI NO: 28393189 NR Description: unknown protein [Arabidopsis thaliana]
  misc_feature (75)..(436): Homolog of NCBI NO: 30678135 NR Description: expressed protein [Arabidopsis thaliana] unknown protein [Arabidopsis thaliana]
  misc_feature (29)..(87): Homolog of NCBI NO: 30678135 NR Description: expressed protein [Arabidopsis thaliana] unknown protein [Arabidopsis thaliana]
  misc_feature (29)..(436): Homolog of NCBI NO: 25518737 NR Description: hypothetical protein F6F3.23 [imported] - thaliana >gi|9665154|gb|AAF97338.1|AC023628_19 Unknown protein
  misc_feature (46)..(432): Homolog of NCBI NO: 15237044 NR Description: expressed protein [Arabidopsis thaliana]
  misc_feature (48)..(432): Homolog of NCBI NO: 7486743 NR Description: hypothetical protein F9D16.260 - Arabidopsis >gi|4454048|emb|CAA23045.1| putative protein [Arabidopsis >gi|7269228|emb|CAB81297.1| putative protein [Arabidopsis
  misc_feature (48)..(432): Homolog of NCBI NO: 30686312 NR Description: expressed protein [Arabidopsis thaliana]
  misc_feature (72)..(428): Homolog of NCBI NO: 15237211 NR Description: expressed protein [Arabidopsis thaliana]
  misc_feature (91)..(428): Homolog of NCBI NO: 15223079 NR Description: expressed protein [Arabidopsis thaliana]
MEQQLTLVLLDSPKGAKYVETFEEAASSSSSSSSSSVPSCTDHRHRTFVKFFLYFSLVALAYYFIISSLAVSPIPPTLPQSSPGNVSSAKCDLFTGDWIPDPTGPLYTNVTCRHIQDFQNCLLNGRPDVNYLFWRWKPRDCDLPRFSPSQFLASVKNKWWAFIGDSIARNHVQSLICILSQVEEVEEIYHDKEFRSKIWRFPSHNFTLSVIWSPFLLKSETSSNSDIQLYLDQLDHKWTVQYPKFDYVVISGGKWFLKTTIFHENNVVTGCHYCQGRNNLTDLGYDYSYRKTLNLLRDFVLNSTHKPLVLFRTTTPDHFENGEWNTGGYCNRTMPFKEGQANMKTVDDVMRDVELEVFQKFGKGFGLGSNIRLLDTTGMSLLRPDGHPGPYRHPNPFAGVKNKSNVQNDCLHWCLPGPIDSWNDVMVETTLNRERELYDLTG

SEQ ID NO: 102905 - DNA, 760 bp, Arabidopsis thaliana
  misc_feature (1)..(760): Ceres Seq. ID no. 13611522
  misc_feature: MA Experiment ID: 108461 Result: Up-regulated in Transcription
  misc_feature: MA Experiment 108461 PARAMETER Experiment Name: At_Germinating_Seeds_cDNA_P Parameter: Age (day) Value: 1 vs. 0
  misc_feature: MA Experiment 108461 PARAMETER Experiment Name: At_Germinating_Seeds_cDNA_P Parameter: Tissue Value: Germinating Seeds
  misc_feature: MA Experiment ID: 20000113 Result: Up-regulated in Transcription
  misc_feature: MA Experiment 20000113 PARAMETER Experiment Name: At_42deg_Heat_cDNA_P Parameter: Temperature (deg C) Value: 42 vs. 22
  misc_feature: MA Experiment 20000113 PARAMETER Experiment Name: At_42deg_Heat_cDNA_P Parameter: Timepoint (hr) Value: 8
  misc_feature: MA Experiment 20000113 PARAMETER Experiment Name: At_42deg_Heat_cDNA_P Parameter: Tissue Value: Aerial
  misc_feature: MA Experiment ID: 20000180 Result: Up-regulated in Transcription
  misc_feature: MA Experiment 20000180 PARAMETER Experiment Name: At_Germinating_Seeds_P Parameter: Age (hr) Value: 24 vs. 0
  misc_feature: MA Experiment 20000180 PARAMETER Experiment Name: At_Germinating_Seeds_P Parameter: Tissue Value: Germinating Seeds
  misc_feature: MA Experiment ID: 20000185 Result: Down-regulated in Transcription
  misc_feature: MA Experiment 20000185 PARAMETER Experiment Name: At_Roots__P Parameter: Age (day) Value: 7 vs. 21
  misc_feature: MA Experiment 20000185 PARAMETER Experiment Name: At_Roots__P Parameter: Organism Value: A. thaliana
  misc_feature: MA Experiment 20000185 PARAMETER Experiment Name: At_Roots__P Parameter: Tissue Value: Roots vs. Whole Plant
  misc_feature: MA Experiment ID: 20000264 Result: Down-regulated in Transcription
  misc_feature: MA Experiment 20000264 PARAMETER Experiment Name: At_Open_Flower_P Parameter: Age (day) Value: 21
  misc_feature: MA Experiment 20000264 PARAMETER Experiment Name: At_Open_Flower_P Parameter: Plant Line Value: WS
  misc_feature: MA Experiment 20000264 PARAMETER Experiment Name: At_Open_Flower_P Parameter: Tissue Value: Open Flower vs. Whole Plant
  misc_feature: MA Experiment ID: 20000439 Result: Down-regulated in Transcription
  misc_feature: MA Experiment 20000439 PARAMETER Experiment Name: At_Roots__P Parameter: Age (day) Value: 14 vs. 21
  misc_feature: MA Experiment 20000439 PARAMETER Experiment Name: At_Roots__P Parameter: Organism Value: A. thaliana
  misc_feature: MA Experiment 20000439 PARAMETER Experiment Name: At_Roots__P Parameter: Tissue Value: Roots vs. Whole Plant
  misc_feature: MA Experiment ID: 20000794 Result: Down-regulated in Transcription
  misc_feature: MA Experiment 20000794 PARAMETER Experiment Name: At_Petals_P Parameter: Age (day) Value: 23-25 days
  misc_feature: MA Experiment 20000794 PARAMETER Experiment Name: At_Petals_P Parameter: Plant Line Value: WS
  misc_feature: MA Experiment 20000794 PARAMETER Experiment Name: At_Petals_P Parameter: Tissue Value: Petals vs. Whole plant
  misc_feature: MA Experiment ID: 20001248 Result: Down-regulated in Transcription
  misc_feature: MA Experiment 20001248 PARAMETER Experiment Name: At_Far-red-induction_P Parameter: Age (day) Value: 7
  misc_feature: MA Experiment 20001248 PARAMETER Experiment Name: At_Far-red-induction_P Parameter: Light Value: Far-red vs. White
  misc_feature: MA Experiment 20001248 PARAMETER Experiment Name: At_Far-red-induction_P Parameter: Organism Value: A. thaliana
  misc_feature: MA Experiment 20001248 PARAMETER Experiment Name: At_Far-red-induction_P Parameter: Plant Line Value: Columbia
  misc_feature: MA Experiment 20001248 PARAMETER Experiment Name: At_Far-red-induction_P Parameter: Timepoint (hr) Value: 4
  misc_feature: MA Experiment 20001248 PARAMETER Experiment Name: At_Far-red-induction_P Parameter: Tissue Value: Whole Plant
  misc_feature: MA Experiment ID: 20001451 Result: Down-regulated in Transcription
  misc_feature: MA Experiment 20001451 PARAMETER Experiment Name: At_Far-red-induction_P Parameter: Age (day) Value: 7
  misc_feature: MA Experiment 20001451 PARAMETER Experiment Name: At_Far-red-induction_P Parameter: Light Value: Far-red vs. White
  misc_feature: MA Experiment 20001451 PARAMETER Experiment Name: At_Far-red-induction_P Parameter: Organism Value: A. thaliana
  misc_feature: MA Experiment 20001451 PARAMETER Experiment Name: At_Far-red-induction_P Parameter: Plant Line Value: Columbia
  misc_feature: MA Experiment 20001451 PARAMETER Experiment Name: At_Far-red-induction_P Parameter: Timepoint (hr) Value: 24
  misc_feature: MA Experiment 20001451 PARAMETER Experiment Name: At_Far-red-induction_P Parameter: Tissue Value: Whole Plant
  misc_feature: MA Experiment ID: 20001557 Result: Down-regulated in Transcription
  misc_feature: MA Experiment 20001557 PARAMETER Experiment Name: At_Drought_Soil_Dry_P Parameter: Age (day) Value: 27
  misc_feature: MA Experiment 20001557 PARAMETER Experiment Name: At_Drought_Soil_Dry_P Parameter: Organism Value: A. thaliana
  misc_feature: MA Experiment 20001557 PARAMETER Experiment Name: At_Drought_Soil_Dry_P Parameter: Plant Line Value: WS
  misc_feature: MA Experiment 20001557 PARAMETER Experiment Name: At_Drought_Soil_Dry_P Parameter: Post Timepoint (hr) Value: 3
  misc_feature: MA Experiment 20001557 PARAMETER Experiment Name: At_Drought_Soil_Dry_P Parameter: Post-Treatment Value: Re-Water vs. No Drought
  misc_feature: MA Experiment 20001557 PARAMETER Experiment Name: At_Drought_Soil_Dry_P Parameter: Timepoint (day) Value: 13
  misc_feature: MA Experiment 20001557 PARAMETER Experiment Name: At_Drought_Soil_Dry_P Parameter: Treatment Value: Drought vs. No Drought
  misc_feature: MA Experiment ID: 20001558 Result: Down-regulated in Transcription
  misc_feature: MA Experiment 20001558 PARAMETER Experiment Name: At_Drought_Soil_Dry_P Parameter: Age (day) Value: 27
  misc_feature: MA Experiment 20001558 PARAMETER Experiment Name: At_Drought_Soil_Dry_P Parameter: Organism Value: A. thaliana
  misc_feature: MA Experiment 20001558 PARAMETER Experiment Name: At_Drought_Soil_Dry_P Parameter: Plant Line Value: WS
  misc_feature: MA Experiment 20001558 PARAMETER Experiment Name: At_Drought_Soil_Dry_P Parameter: Post Timepoint (hr) Value: 6
  misc_feature: MA Experiment 20001558 PARAMETER Experiment Name: At_Drought_Soil_Dry_P Parameter: Post-Treatment Value: Re-Water vs. No Drought
  misc_feature: MA Experiment 20001558 PARAMETER Experiment Name: At_Drought_Soil_Dry_P Parameter: Timepoint (day) Value: 13
  misc_feature: MA Experiment 20001558 PARAMETER Experiment Name: At_Drought_Soil_Dry_P Parameter: Treatment Value: Drought vs. No Drought
  misc_feature: MA Experiment ID: 20001757 Result: Up-regulated in Transcription
  misc_feature: MA Experiment 20001757 PARAMETER Experiment Name: At_50mM_NH4NO3_L-to-H_P Parameter: Timepoint (hr) Value: 6
  misc_feature: MA Experiment 20001757 PARAMETER Experiment Name: At_50mM_NH4NO3_L-to-H_P Parameter: Tissue Value: Leaf
  misc_feature: MA Experiment 20001757 PARAMETER Experiment Name: At_50mM_NH4NO3_L-to-H_P Parameter: Treatment Value: 50mM NH4NO3 vs 100mM Mannitol
  misc_feature: MA Experiment ID: 20001904 Result: Down-regulated in Transcription
  misc_feature: MA Experiment 20001904 PARAMETER Experiment Name: At_Drought_Reproduction_P Parameter: Age (day) Value: 37
  misc_feature: MA Experiment 20001904 PARAMETER Experiment Name: At_Drought_Reproduction_P Parameter: Organism Value: A. thaliana
  misc_feature: MA Experiment 20001904 PARAMETER Experiment Name: At_Drought_Reproduction_P Parameter: Plant Line Value: WS
  misc_feature: MA Experiment 20001904 PARAMETER Experiment Name: At_Drought_Reproduction_P Parameter: Timepoint (day) Value: 7
  misc_feature: MA Experiment 20001904 PARAMETER Experiment Name: At_Drought_Reproduction_P Parameter: Tissue Value: Rosettes
  misc_feature: MA Experiment 20001904 PARAMETER Experiment Name: At_Drought_Reproduction_P Parameter: Treatment Value: Drought vs. No Drought
  misc_feature: MA Experiment ID: 20001905 Result: Down-regulated in Transcription
  misc_feature: MA Experiment 20001905 PARAMETER Experiment Name: At_Drought_Reproduction_P Parameter: Age (day) Value: 40
  misc_feature: MA Experiment 20001905 PARAMETER Experiment Name: At_Drought_Reproduction_P Parameter: Organism Value: A. thaliana
  misc_feature: MA Experiment 20001905 PARAMETER Experiment Name: At_Drought_Reproduction_P Parameter: Plant Line Value: WS
  misc_feature: MA Experiment 20001905 PARAMETER Experiment Name: At_Drought_Reproduction_P Parameter: Timepoint (day) Value: 10
  misc_feature: MA Experiment 20001905 PARAMETER Experiment Name: At_Drought_Reproduction_P Parameter: Tissue Value: Rosettes
  misc_feature: MA Experiment 20001905 PARAMETER Experiment Name: At_Drought_Reproduction_P Parameter: Treatment Value: Drought vs. No Drought
  misc_feature: MA Experiment ID: 20001906 Result: Down-regulated in Transcription
  misc_feature: MA Experiment 20001906 PARAMETER Experiment Name: At_Drought_Reproduction_P Parameter: Age (day) Value: 35
  misc_feature: MA Experiment 20001906 PARAMETER Experiment Name: At_Drought_Reproduction_P Parameter: Organism Value: A. thaliana
  misc_feature: MA Experiment 20001906 PARAMETER Experiment Name: At_Drought_Reproduction_P Parameter: Plant Line Value: WS
  misc_feature: MA Experiment 20001906 PARAMETER Experiment Name: At_Drought_Reproduction_P Parameter: Timepoint (day) Value: 5
  misc_feature: MA Experiment 20001906 PARAMETER Experiment Name: At_Drought_Reproduction_P Parameter: Tissue Value: Siliques
  misc_feature: MA Experiment 20001906 PARAMETER Experiment Name: At_Drought_Reproduction_P Parameter: Treatment Value: Drought vs. No Drought
  misc_feature: MA Experiment ID: 20001908 Result: Down-regulated in Transcription
  misc_feature: MA Experiment 20001908 PARAMETER Experiment Name: At_Drought_Reproduction_P Parameter: Age (day) Value: 40
  misc_feature: MA Experiment 20001908 PARAMETER Experiment Name: At_Drought_Reproduction_P Parameter: Organism Value: A. thaliana
  misc_feature: MA Experiment 20001908 PARAMETER Experiment Name: At_Drought_Reproduction_P Parameter: Plant Line Value: WS
  misc_feature: MA Experiment 20001908 PARAMETER Experiment Name: At_Drought_Reproduction_P Parameter: Timepoint (day) Value: 10
  misc_feature: MA Experiment 20001908 PARAMETER Experiment Name: At_Drought_Reproduction_P Parameter: Tissue Value: Siliques
  misc_feature: MA Experiment 20001908 PARAMETER Experiment Name: At_Drought_Reproduction_P Parameter: Treatment Value: Drought vs. No Drought
gaggagcgaccaataagagcgcgaggagcttccacgtgttactacacgaatcttgtttagtaaaaagcgcagctgcaaaaaaaatcgagtagagaagaagtaggcagacaaagaagaagaagaagaagttctcggcgtgcttcaatggcgatatcagtagcagcttcgtcctctatggccgtgatggttccacgtgttcccgccgtatccacccgttgctccgccgtcccttatcttcctcctcgctcctttggccgatcctctttcaccgttccgttgaagcttgtttcagggaatggattgcaaaaagttgaattgttgaagacaagagcttcttcagaagagacctcgtccattgataccaacgaactcatcacagatttgaaggaaaagtgggatggtcttgagaacaaatctactgtacttatatatggaggaggagccattgttgctgtttggttatcttccattgttgttggtgccatcaactctgttcctctgcttccgaaagttatggaacttgtcggtctcgggtacactggatggtttgtctacagataccttctcttcaagtcaagcagaaaggaattggctgaggatattgaatccttgaagaagaagatcgcaggaagcgaatagattcattttcaaataaaaccagctttctctctgtatgttttcctgtaatatcgtgttatattatacaatgtctctgtttcaacattgtatctgttgcatctgaaactattatcttggatcc

SEQ ID NO: 102906 - protein, 164 aa, Arabidopsis thaliana; identical to SEQ ID NO: 43971
  peptide (1)..(164): Ceres Seq. ID no. 13611523
  misc_feature (1)..(164): Homolog of NCBI NO: 18411555 NR Description: expressed protein [Arabidopsis thaliana]
  misc_feature (1)..(164): Homolog of NCBI NO: 687677 NR Description: unknown
  misc_feature (11)..(164): Homolog of NCBI NO: 38175474 NR Description: unknown protein [Oryza sativa (japonica
  misc_feature (62)..(164): Homolog of NCBI NO: 7485852 NR Description: hypothetical protein F20D10.220 - Arabidopsis >gi|4467116|emb|CAB37550.1| hypothetical protein [Arabidopsis >gi|7270793|emb|CAB80475.1| hypothetical protein [Arabidopsis
  misc_feature (62)..(164): Homolog of NCBI NO: 18420175 NR Description: expressed protein [Arabidopsis thaliana]
  misc_feature (4)..(163): Homolog of NCBI NO: 18407178 NR Description: expressed protein [Arabidopsis thaliana]
  misc_feature (4)..(163): Homolog of NCBI NO: 21555057 NR Description: unknown [Arabidopsis thaliana]
  misc_feature (20)..(163): Homolog of NCBI NO: 34393236 NR Description: unknown protein [Oryza sativa (japonica
  misc_feature (6)..(160): Homolog of NCBI NO: 37536446 NR Description: hypothetical protein [Oryza sativa (japonica group)] >gi|18057096|gb|AAL58119.1| hypothetical protein [Oryza
  misc_feature (4)..(161): Homolog of NCBI NO: 18403896 NR Description: expressed protein [Arabidopsis thaliana]

SEQ ID NO: 102907 - protein, 154 aa, Arabidopsis thaliana; identical to SEQ ID NO: 43972
  peptide (1)..(154): Ceres Seq. ID no. 13611524
  misc_feature (1)..(154): Homolog of NCBI NO: 18411555 NR Description: expressed protein [Arabidopsis thaliana]
  misc_feature (1)..(154): Homolog of NCBI NO: 687677 NR Description: unknown
  misc_feature (1)..(154): Homolog of NCBI NO: 38175474 NR Description: unknown protein [Oryza sativa (japonica
  misc_feature (52)..(154): Homolog of NCBI NO: 7485852 NR Description: hypothetical protein F20D10.220 - Arabidopsis >gi|4467116|emb|CAB37550.1| hypothetical protein [Arabidopsis >gi|7270793|emb|CAB80475.1| hypothetical protein [Arabidopsis
  misc_feature (52)..(154): Homolog of NCBI NO: 18420175 NR Description: expressed protein [Arabidopsis thaliana]
  misc_feature (1)..(153): Homolog of NCBI NO: 18407178 NR Description: expressed protein [Arabidopsis thaliana]
  misc_feature (1)..(153): Homolog of NCBI NO: 21555057 NR Description: unknown [Arabidopsis thaliana]
  misc_feature (10)..(153): Homolog of NCBI NO: 34393236 NR Description: unknown protein [Oryza sativa (japonica
  misc_feature (1)..(150): Homolog of NCBI NO: 37536446 NR Description: hypothetical protein [Oryza sativa (japonica group)] >gi|18057096|gb|AAL58119.1| hypothetical protein [Oryza
  misc_feature (1)..(151): Homolog of NCBI NO: 18403896 NR Description: expressed protein [Arabidopsis thaliana]

SEQ ID NO: 102908 - protein, 151 aa, Arabidopsis thaliana; identical to SEQ ID NO: 43973
  peptide (1)..(151): Ceres Seq. ID no. 13611525
  misc_feature (1)..(151): Homolog of NCBI NO: 18411555 NR Description: expressed protein [Arabidopsis thaliana]
  misc_feature (1)..(151): Homolog of NCBI NO: 687677 NR Description: unknown
  misc_feature (1)..(151): Homolog of NCBI NO: 38175474 NR Description: unknown protein [Oryza sativa (japonica
  misc_feature (49)..(151): Homolog of NCBI NO: 7485852 NR Description: hypothetical protein F20D10.220 - Arabidopsis >gi|4467116|emb|CAB37550.1| hypothetical protein [Arabidopsis >gi|7270793|emb|CAB80475.1| hypothetical protein [Arabidopsis
  misc_feature (49)..(151): Homolog of NCBI NO: 18420175 NR Description: expressed protein [Arabidopsis thaliana]
  misc_feature (1)..(150): Homolog of NCBI NO: 18407178 NR Description: expressed protein [Arabidopsis thaliana]
  misc_feature (1)..(150): Homolog of NCBI NO: 21555057 NR Description: unknown [Arabidopsis thaliana]
  misc_feature (7)..(150): Homolog of NCBI NO: 34393236 NR Description: unknown protein [Oryza sativa (japonica
  misc_feature (1)..(147): Homolog of NCBI NO: 37536446 NR Description: hypothetical protein [Oryza sativa (japonica group)] >gi|18057096|gb|AAL58119.1| hypothetical protein [Oryza
  misc_feature (1)..(148): Homolog of NCBI NO: 18403896 NR Description: expressed protein [Arabidopsis thaliana]

SEQ ID NO: 102909 - DNA, 1008 bp, Arabidopsis thaliana
  misc_feature (1)..(1008): Ceres Seq. ID no. 13611534
  misc_feature: MA Experiment ID: 108434 Result: Up-regulated in Transcription
  misc_feature: MA Experiment 108434 PARAMETER Experiment Name: At_Root_Tips_cDNA_P Parameter: Tissue Value: Root Tips
  misc_feature: MA Experiment ID: 108461 Result: Down-regulated in Transcription
  misc_feature: MA Experiment 108461 PARAMETER Experiment Name: At_Germinating_Seeds_cDNA_P Parameter: Age (day) Value: 1 vs. 0
  misc_feature: MA Experiment 108461 PARAMETER Experiment Name: At_Germinating_Seeds_cDNA_P Parameter: Tissue Value: Germinating Seeds
  misc_feature: MA Experiment ID: 108462 Result: Down-regulated in Transcription
  misc_feature: MA Experiment 108462 PARAMETER Experiment Name: At_Germinating_Seeds_cDNA_P Parameter: Age (day) Value: 2 vs. 0
  misc_feature: MA Experiment 108462 PARAMETER Experiment Name: At_Germinating_Seeds_cDNA_P Parameter: Tissue Value: Germinating Seeds
  misc_feature: MA Experiment ID: 108463 Result: Down-regulated in Transcription
  misc_feature: MA Experiment 108463 PARAMETER Experiment Name: At_Germinating_Seeds_cDNA_P Parameter: Age (day) Value: 3 vs. 0
  misc_feature: MA Experiment 108463 PARAMETER Experiment Name: At_Germinating_Seeds_cDNA_P Parameter: Tissue Value: Germinating Seeds
  misc_feature: MA Experiment ID: 108464 Result: Down-regulated in Transcription
  misc_feature: MA Experiment 108464 PARAMETER Experiment Name: At_Germinating_Seeds_cDNA_P Parameter: Age (day) Value: 4 vs. 0
  misc_feature: MA Experiment 108464 PARAMETER Experiment Name: At_Germinating_Seeds_cDNA_P Parameter: Tissue Value: Germinating Seeds
  misc_feature: MA Experiment ID: 20000179 Result: Down-regulated in Transcription
  misc_feature: MA Experiment 20000179 PARAMETER Experiment Name: At_Germinating_Seeds_P Parameter: Age (hr) Value: 6 vs. 0
  misc_feature: MA Experiment 20000179 PARAMETER Experiment Name: At_Germinating_Seeds_P Parameter: Tissue Value: Germinating Seeds
atatacacatctctgattcaactccaccgaattcagaagatcgaagaagatgagtagaggaagcggcgctggttatgatcgtcacatcactatcttctcaccggaaggtcgtctctttcaagttgaatatgccttcaaggccgtgaaaacagctggtattacttcaatcggagttcgtgggaaagattcggtttgcgtcgttacccagaagaaagttcctgacaagcttttggatcagtctagtgttacacatctgttccctatcaccaagtacattggattggtagctactggcattacagctgatgcaaggtctttggttcaacaagcaaggaatcaagcagctgaatttcggttcacttatggatatgagatgcctgttgacattcttgctaaatggatagcggacaagtcacaggtctacactcaacatgcttacatgagaccccttggagttgtcgctatggtaatgggtgttgatgaagagaatggtcccttactttacaaatgtgacccagctggacatttttacggtcacaaggcaactagtgctggtatgaaggaacaagaagcagtcaatttcttggagaagaaaatgaaagaaaacccatctttcacatttgatgaaaccgtgcagactgccatatcggctttgcaatctgttcttcaagaagacttcaaggctactgagattgaggtaggtgtggtgagagcagagaacccggaattccgtgcattgacaacggaggagattgaggagcatttgacagccattagtgaacgagactgatcaacttagtgaaacaagtgtgagttacgttgcttcgcttctatcagacattcctctaaagtgaccactctccatcgatcttttgtttggtcttccttccataatttaatttacttagtcaacccagcaaacttgaaaaacaaaaatgcactgtaatgcttaaggctgtgagagtttccgagtcttttgactcttcagaaatgacaccaactttactc

SEQ ID NO: 102910 - protein, 246 aa, Arabidopsis thaliana
  peptide (1)..(246): Ceres Seq. ID no. 13611535
  misc_feature (32)..(220): Pfam Name: Proteasome A-type and B-type Pfam Description: Proteasome A-type and B-type
  misc_feature (1)..(246): Homolog of NCBI NO: 15238554 NR Description: 20S proteasome alpha subunit A1 (PAA1)
  misc_feature (1)..(246): Homolog of NCBI NO: 20260140 NR Description: multicatalytic endopeptidase complex alpha [Arabidopsis thaliana] >gi|21386959|gb|AAM47883.1| multicatalytic
  misc_feature (2)..(246): Homolog of NCBI NO: 2511588 NR Description: multicatalytic endopeptidase complex, proteasome
  misc_feature (1)..(246): Homolog of NCBI NO: 3421070 NR Description: 20S proteasome subunit PAA1 [Arabidopsis thaliana]
  misc_feature (1)..(246): Homolog of NCBI NO: 15224993 NR Description: 20S proteasome alpha subunit A2 (PAA2)
MSRGSGAGYDRHITIFSPEGRLFQVEYAFKAVKTAGITSIGVRGKDSVCVVTQKKVPDKLLDQSSVTHLFPITKYIGLVATGITADARSLVQQARNQAAEFRFTYGYEMPVDILAKWIADKSQVYTQHAYMRPLGVVAMVMGVDEENGPLLYKCDPAGHFYGHKATSAGMKEQEAVNFLEKKMKENPSFTFDETVQTAISALQSVLQEDFKATEIEVGVVRAENPEFRALTTEEIEEHLTAISERD

SEQ ID NO: 102911 - protein, 138 aa, Arabidopsis thaliana; identical to SEQ ID NO: 28382
  peptide (1)..(138): Ceres Seq. ID no. 13611536
  misc_feature (1)..(112): Pfam Name: Proteasome A-type and B-type Pfam Description: Proteasome A-type and B-type
  misc_feature (1)..(138): Homolog of NCBI NO: 15238554 NR Description: 20S proteasome alpha subunit A1 (PAA1)
  misc_feature (1)..(138): Homolog of NCBI NO: 20260140 NR Description: multicatalytic endopeptidase complex alpha [Arabidopsis thaliana] >gi|21386959|gb|AAM47883.1| multicatalytic
  misc_feature (1)..(138): Homolog of NCBI NO: 2511588 NR Description: multicatalytic endopeptidase complex, proteasome
  misc_feature (1)..(138): Homolog of NCBI NO: 3421070 NR Description: 20S proteasome subunit PAA1 [Arabidopsis thaliana]
  misc_feature (1)..(138): Homolog of NCBI NO: 15224993 NR Description: 20S proteasome alpha subunit A2 (PAA2)

SEQ ID NO: 102912 - DNA, 1500 bp, Arabidopsis thaliana
  misc_feature (1)..(1500): Ceres Seq. ID no. 13611537
  misc_feature: MA Experiment ID: 20000173 Result: Down-regulated in Transcription
  misc_feature: MA Experiment 20000173 PARAMETER Experiment Name: At_42deg_Heat_P Parameter: Age (day) Value: 14
  misc_feature: MA Experiment 20000173 PARAMETER Experiment Name: At_42deg_Heat_P Parameter: Organism Value: A. thaliana
  misc_feature: MA Experiment 20000173 PARAMETER Experiment Name: At_42deg_Heat_P Parameter: Plant Line Value: WS
  misc_feature: MA Experiment 20000173 PARAMETER Experiment Name: At_42deg_Heat_P Parameter: Temperature (deg C) Value: 42 vs. 22
  misc_feature: MA Experiment 20000173 PARAMETER Experiment Name: At_42deg_Heat_P Parameter: Timepoint (hr) Value: 6
  misc_feature: MA Experiment 20000173 PARAMETER Experiment Name: At_42deg_Heat_P Parameter: Tissue Value: Aerial
  misc_feature: MA Experiment ID: 20000184 Result: Down-regulated in Transcription
  misc_feature: MA Experiment 20000184 PARAMETER Experiment Name: At_Shoots__P Parameter: Age (day) Value: 7
  misc_feature: MA Experiment 20000184 PARAMETER Experiment Name: At_Shoots__P Parameter: Tissue Value: Shoots vs. Whole Plant
  misc_feature: MA Experiment ID: 20000227 Result: Up-regulated in Transcription
  misc_feature: MA Experiment 20000227 PARAMETER Experiment Name: At_Root-Tips-vs-Tops_P Parameter: Tissue Value: Root Tips vs. Root Tops
  misc_feature: MA Experiment ID: 20000234 Result: Up-regulated in Transcription
  misc_feature: MA Experiment 20000234 PARAMETER Experiment Name: At_Siliques_P Parameter: Age (day) Value: 21
  misc_feature: MA Experiment 20000234 PARAMETER Experiment Name: At_Siliques_P Parameter: Organism Value: A. thaliana
  misc_feature: MA Experiment 20000234 PARAMETER Experiment Name: At_Siliques_P Parameter: Plant Line Value: WS
  misc_feature: MA Experiment 20000234 PARAMETER Experiment Name: At_Siliques_P Parameter: Tissue Value: Less Than 5mm Siliques vs. Whole Plant
  misc_feature: MA Experiment ID: 20000235 Result: Up-regulated in Transcription
  misc_feature: MA Experiment 20000235 PARAMETER Experiment Name: At_Siliques_P Parameter: Age (day) Value: 21
  misc_feature: MA Experiment 20000235 PARAMETER Experiment Name: At_Siliques_P Parameter: Organism Value: A. thaliana
  misc_feature: MA Experiment 20000235 PARAMETER Experiment Name: At_Siliques_P Parameter: Plant Line Value: WS
  misc_feature: MA Experiment 20000235 PARAMETER Experiment Name: At_Siliques_P Parameter: Tissue Value: 5-10mm Siliques vs. Whole Plant
  misc_feature: MA Experiment ID: 20000264 Result: Up-regulated in Transcription
  misc_feature: MA Experiment 20000264 PARAMETER Experiment Name: At_Open_Flower_P Parameter: Age (day) Value: 21
  misc_feature: MA Experiment 20000264 PARAMETER Experiment Name: At_Open_Flower_P Parameter: Plant Line Value: WS
  misc_feature: MA Experiment 20000264 PARAMETER Experiment Name: At_Open_Flower_P Parameter: Tissue Value: Open Flower vs. Whole Plant
  misc_feature: MA Experiment ID: 20000265 Result: Up-regulated in Transcription
  misc_feature: MA Experiment 20000265 PARAMETER Experiment Name: At_Open_Flower_P Parameter: Age (day) Value: 21
  misc_feature: MA Experiment 20000265 PARAMETER Experiment Name: At_Open_Flower_P Parameter: Plant Line Value: WS
  misc_feature: MA Experiment 20000265 PARAMETER Experiment Name: At_Open_Flower_P Parameter: Tissue Value: Closed Flower vs. Whole Plant
  misc_feature: MA Experiment ID: 20000438 Result: Down-regulated in Transcription
  misc_feature: MA Experiment 20000438 PARAMETER Experiment Name: At_Shoots__P Parameter: Age (day) Value: 14
  misc_feature: MA Experiment 20000438 PARAMETER Experiment Name: At_Shoots__P Parameter: Tissue Value: Shoots vs. Whole Plant
  misc_feature: MA Experiment ID: 20000495 Result: Up-regulated in Transcription
  misc_feature: MA Experiment 20000495 PARAMETER Experiment Name: At_Guard_Cells_P Parameter: Harvest Date Value: 8/2/2002
  misc_feature: MA Experiment 20000495 PARAMETER Experiment Name: At_Guard_Cells_P Parameter: Organism Value: A. thaliana
  misc_feature: MA Experiment 20000495 PARAMETER Experiment Name: At_Guard_Cells_P Parameter: Tissue Value: Guard Cells vs. Leaves
atttctcaattcccaagttctttatccaaattgttctgaaacatagagagaaacaatgggtgttacaggaggattagtcagaagcattttcttcaggaacaaatcatttggagctcatgactacaacaatggaagaggcaatctaggagagaagaaacgatggagctcggttagatcatacctttgcggagatgaatttaactctgttcgcgctgtgaatgattcagaatcgataaaggattctgaggctcttcttacaatgtctcagcaactgagttcagagttcggtatgccttttggttcggttatcgcaatcgaagattcagcttctgtgagacatttggaggatgaggactctggttccgttaagagctctgaggcaacagtgactcaacctttactggaggagaaatcgaaaggactggattgttatctaaaagaagaagatgttgaagataaccaaagcgaagcaacagagacacacatacccaagaagcatcagactactccaatctccaagttgttcctcgaagaagacgctgcagtcataattcagtcagcattcaggagttacctggcaatacgccggagcaaagaagaagaggaaacatttgctaaggaggagagcttctcaggagaggaatctcaagacaatgcatccatggggacatcactagaagctcagacaggtaattccgtgaaagcaccatttttcaggagaaagcgagtatctgcgaatcgaagaacactacagaagaacaacactcaagttctgaggataaaggaagactgggatgatagtacagtgagcagcaccatatcaaaatcaaggattcaaagcagagtcgaagcaatgacaaaacgggagagagcacttgcgtatgcattttcacagcagctaagaatttgctcaaagaagaaacaaatagatcgtagcagtgaagatgattccaatatcggttggagttggttagaacgctggatggcaacccgtgtaccagacagcattccaattgaaccaagaacagatgttgcaacgaaaaatcaaagcttgataagaaagaatagagcttttggtacagctggcgagttggagagctgtgcttccaacgacctacctctccattttgaaagcatatcagagacacaaggagatgcaactacagttttgcagaccgaaaaaagtagttttaaaccaagtatatctaagcgtaaatctgttccaagctacaaaagccagagaaagcatcacaagcttcaggccaccaaaagtgatctgcaacaacaaacaaagaaagcaaagaaggccaaaaccacacccacaagctgcaaaacaggaaacgaatgcgaagaaacctcacataagctaaatagcagcacctaagataagcattacctgtaaatctttgcatttaaatcacaaaagtttgttctttcgaatcagataacaactttctgtaaattatttagggattcaaatcaaaccagtaatagtaaggg

SEQ ID NO: 102913 - protein, 442 aa, Arabidopsis thaliana
  peptide (1)..(442): Ceres Seq. ID no. 13611538
  misc_feature (1)..(442): Homolog of NCBI NO: 18421483 NR Description: calmodulin-binding protein family [Arabidopsis
  misc_feature (1)..(442): Homolog of NCBI NO: 9758640 NR Description: gene_id:MXH1.1~pir||T00974~similar to unknown
  misc_feature (158)..(407): Homolog of NCBI NO: 15231175 NR Description: expressed protein [Arabidopsis thaliana]
  misc_feature (150)..(428): Homolog of NCBI NO: 15225299 NR Description: SF16 protein {Helianthus annuus} -related thaliana] >gi|7487891|pir||T00974 probable SF16 protein
  misc_feature (159)..(442): Homolog of NCBI NO: 15232741 NR Description: SF16 protein -related [Arabidopsis thaliana]
  misc_feature (159)..(414): Homolog of NCBI NO: 15982840 NR Description: AT5g03040/F15A17_70 [Arabidopsis thaliana]
  misc_feature (152)..(440): Homolog of NCBI NO: 15231733 NR Description: expressed protein [Arabidopsis thaliana]
  misc_feature (159)..(317): Homolog of NCBI NO: 18414094 NR Description: expressed protein [Arabidopsis thaliana]
  misc_feature (155)..(337): Homolog of NCBI NO: 15225258 NR Description: SF16 protein {Helianthus annuus} -related thaliana] >gi|25367166|pir||D84657 probable SF16 protein
  misc_feature (159)..(442): Homolog of NCBI NO: 34903518 NR Description: P0001B06.11 [Oryza sativa (japonica
MGVTGGLVRSIFFRNKSFGAHDYNNGRGNLGEKKRWSSVRSYLCGDEFNSVRAVNDSESIKDSEALLTMSQQLSSEFGMPFGSVIAIEDSASVRHLEDEDSGSVKSSEATVTQPLLEEKSKGLDCYLKEEDVEDNQSEATETHIPKKHQTTPISKLFLEEDAAVIIQSAFRSYLAIRRSKEEEETFAKEESFSGEESQDNASMGTSLEAQTGNSVKAPFFRRKRVSANRRTLQKNNTQVLRIKEDWDDSTVSSTISKSRIQSRVEAMTKRERALAYAFSQQLRICSKKKQIDRSSEDDSNIGWSWLERWMATRVPDSIPIEPRTDVATKNQSLIRKNRAFGTAGELESCASNDLPLHFESISETQGDATTVLQTEKSSFKPSISKRKSVPSYKSQRKHHKLQATKSDLQQQTKKAKKAKTTPTSCKTGNECEETSHKLNSST

SEQ ID NO: 102914 - protein, 374 aa, Arabidopsis thaliana
  peptide (1)..(374): Ceres Seq. ID no. 13611539
  misc_feature (1)..(374): Homolog of NCBI NO: 18421483 NR Description: calmodulin-binding protein family [Arabidopsis
  misc_feature (1)..(374): Homolog of NCBI NO: 9758640 NR Description: gene_id:MXH1.1~pir||T00974~similar to unknown
  misc_feature (90)..(339): Homolog of NCBI NO: 15231175 NR Description: expressed protein [Arabidopsis thaliana]
  misc_feature (82)..(360): Homolog of NCBI NO: 15225299 NR Description: SF16 protein {Helianthus annuus} -related thaliana] >gi|7487891|pir||T00974 probable SF16 protein
  misc_feature (91)..(374): Homolog of NCBI NO: 15232741 NR Description: SF16 protein -related [Arabidopsis thaliana]
  misc_feature (91)..(346): Homolog of NCBI NO: 15982840 NR Description: AT5g03040/F15A17_70 [Arabidopsis thaliana]
  misc_feature (84)..(372): Homolog of NCBI NO: 15231733 NR Description: expressed protein [Arabidopsis thaliana]
  misc_feature (91)..(249): Homolog of NCBI NO: 18414094 NR Description: expressed protein [Arabidopsis thaliana]
  misc_feature (87)..(269): Homolog of NCBI NO: 15225258 NR Description: SF16 protein {Helianthus annuus} -related thaliana] >gi|25367166|pir||D84657 probable SF16 protein
  misc_feature (91)..(374): Homolog of NCBI NO: 34903518 NR Description: P0001B06.11 [Oryza sativa (japonica
MSQQLSSEFGMPFGSVIAIEDSASVRHLEDEDSGSVKSSEATVTQPLLEEKSKGLDCYLKEEDVEDNQSEATETHIPKKHQTTPISKLFLEEDAAVIIQSAFRSYLAIRRSKEEEETFAKEESFSGEESQDNASMGTSLEAQTGNSVKAPFFRRKRVSANRRTLQKNNTQVLRIKEDWDDSTVSSTISKSRIQSRVEAMTKRERALAYAFSQQLRICSKKKQIDRSSEDDSNIGWSWLERWMATRVPDSIPIEPRTDVATKNQSLIRKNRAFGTAGELESCASNDLPLHFESISETQGDATTVLQTEKSSFKPSISKRKSVPSYKSQRKHHKLQATKSDLQQQTKKAKKAKTTPTSCKTGNECEETSHKLNSST

SEQ ID NO: 102915 - protein, 364 aa, Arabidopsis thaliana
  peptide (1)..(364): Ceres Seq. ID no. 13611540
  misc_feature (1)..(364): Homolog of NCBI NO: 18421483 NR Description: calmodulin-binding protein family [Arabidopsis
  misc_feature (1)..(364): Homolog of NCBI NO: 9758640 NR Description: gene_id:MXH1.1~pir||T00974~similar to unknown
  misc_feature (80)..(329): Homolog of NCBI NO: 15231175 NR Description: expressed protein [Arabidopsis thaliana]
  misc_feature (72)..(350): Homolog of NCBI NO: 15225299 NR Description: SF16 protein {Helianthus annuus} -related thaliana] >gi|7487891|pir||T00974 probable SF16 protein
  misc_feature (81)..(364): Homolog of NCBI NO: 15232741 NR Description: SF16 protein -related [Arabidopsis thaliana]
  misc_feature (81)..(336): Homolog of NCBI NO: 15982840 NR Description: AT5g03040/F15A17_70 [Arabidopsis thaliana]
  misc_feature (74)..(362): Homolog of NCBI NO: 15231733 NR Description: expressed protein [Arabidopsis thaliana]
  misc_feature (81)..(239): Homolog of NCBI NO: 18414094 NR Description: expressed protein [Arabidopsis thaliana]
  misc_feature (77)..(259): Homolog of NCBI NO: 15225258 NR Description: SF16 protein {Helianthus annuus} -related thaliana] >gi|25367166|pir||D84657 probable SF16 protein
  misc_feature (81)..(364): Homolog of NCBI NO: 34903518 NR Description: P0001B06.11 [Oryza sativa (japonica
MPFGSVIAIEDSASVRHLEDEDSGSVKSSEATVTQPLLEEKSKGLDCYLKEEDVEDNQSEATETHIPKKHQTTPISKLFLEEDAAVIIQSAFRSYLAIRRSKEEEETFAKEESFSGEESQDNASMGTSLEAQTGNSVKAPFFRRKRVSANRRTLQKNNTQVLRIKEDWDDSTVSSTISKSRIQSRVEAMTKRERALAYAFSQQLRICSKKKQIDRSSEDDSNIGWSWLERWMATRVPDSIPIEPRTDVATKNQSLIRKNRAFGTAGELESCASNDLPLHFESISETQGDATTVLQTEKSSFKPSISKRKSVPSYKSQRKHHKLQATKSDLQQQTKKAKKAKTTPTSCKTGNECEETSHKLNSST

SEQ ID NO: 102916 - DNA, 1427 bp, Arabidopsis thaliana
  misc_feature (1)..(1427): Ceres Seq. ID no. 13611541
  misc_feature: MA Experiment ID: 20000173 Result: Down-regulated in Transcription
  misc_feature: MA Experiment 20000173 PARAMETER Experiment Name: At_42deg_Heat_P Parameter: Age (day) Value: 14
  misc_feature: MA Experiment 20000173 PARAMETER Experiment Name: At_42deg_Heat_P Parameter: Organism Value: A. thaliana
  misc_feature: MA Experiment 20000173 PARAMETER Experiment Name: At_42deg_Heat_P Parameter: Plant Line Value: WS
  misc_feature: MA Experiment 20000173 PARAMETER Experiment Name: At_42deg_Heat_P Parameter: Temperature (deg C) Value: 42 vs. 22
  misc_feature: MA Experiment 20000173 PARAMETER Experiment Name: At_42deg_Heat_P Parameter: Timepoint (hr) Value: 6
  misc_feature: MA Experiment 20000173 PARAMETER Experiment Name: At_42deg_Heat_P Parameter: Tissue Value: Aerial
  misc_feature: MA Experiment ID: 20000182 Result: Up-regulated in Transcription
  misc_feature: MA Experiment 20000182 PARAMETER Experiment Name: At_2mM_SA_P Parameter: Age (day) Value: 14
  misc_feature: MA Experiment 20000182 PARAMETER Experiment Name: At_2mM_SA_P Parameter: Organism Value: A. thaliana
  misc_feature: MA Experiment 20000182 PARAMETER Experiment Name: At_2mM_SA_P Parameter: Plant Line Value: WS
  misc_feature: MA Experiment 20000182 PARAMETER Experiment Name: At_2mM_SA_P Parameter: Timepoint (hr) Value: 6
  misc_feature: MA Experiment 20000182 PARAMETER Experiment Name: At_2mM_SA_P Parameter: Tissue Value: Aerial
  misc_feature: MA Experiment 20000182 PARAMETER Experiment Name: At_2mM_SA_P Parameter: Treatment Value: 2mM SA vs. No Treatment
  misc_feature: MA Experiment ID: 20000184 Result: Down-regulated in Transcription
  misc_feature: MA Experiment 20000184 PARAMETER Experiment Name: At_Shoots__P Parameter: Age (day) Value: 7
  misc_feature: MA Experiment 20000184 PARAMETER Experiment Name: At_Shoots__P Parameter: Tissue Value: Shoots vs. Whole Plant
  misc_feature: MA Experiment ID: 20000185 Result: Down-regulated in Transcription
  misc_feature: MA Experiment 20000185 PARAMETER Experiment Name: At_Roots__P Parameter: Age (day) Value: 7 vs. 21
  misc_feature: MA Experiment 20000185 PARAMETER Experiment Name: At_Roots__P Parameter: Organism Value: A. thaliana
  misc_feature: MA Experiment 20000185 PARAMETER Experiment Name: At_Roots__P Parameter: Tissue Value: Roots vs. Whole Plant
  misc_feature: MA Experiment ID: 20000213 Result: Up-regulated in Transcription
  misc_feature: MA Experiment 20000213 PARAMETER Experiment Name: At_4deg_Cold_P Parameter: Timepoint (hr) Value: 2
  misc_feature: MA Experiment ID: 20000234 Result: Down-regulated in Transcription
  misc_feature: MA Experiment 20000234 PARAMETER Experiment Name: At_Siliques_P Parameter: Age (day) Value: 21
  misc_feature: MA Experiment 20000234 PARAMETER Experiment Name: At_Siliques_P Parameter: Organism Value: A. thaliana
  misc_feature: MA Experiment 20000234 PARAMETER Experiment Name: At_Siliques_P Parameter: Plant Line Value: WS
  misc_feature: MA Experiment 20000234 PARAMETER Experiment Name: At_Siliques_P Parameter: Tissue Value: Less Than 5mm Siliques vs. Whole Plant
  misc_feature: MA Experiment ID: 20000264 Result: Down-regulated in Transcription
  misc_feature: MA Experiment 20000264 PARAMETER Experiment Name: At_Open_Flower_P Parameter: Age (day) Value: 21
  misc_feature: MA Experiment 20000264 PARAMETER Experiment Name: At_Open_Flower_P Parameter: Plant Line Value: WS
  misc_feature: MA Experiment 20000264 PARAMETER Experiment Name: At_Open_Flower_P Parameter: Tissue Value: Open Flower vs. Whole Plant
  misc_feature: MA Experiment ID: 20000265 Result: Down-regulated in Transcription
  misc_feature: MA Experiment 20000265 PARAMETER Experiment Name: At_Open_Flower_P Parameter: Age (day) Value: 21
  misc_feature: MA Experiment 20000265 PARAMETER Experiment Name: At_Open_Flower_P Parameter: Plant Line Value: WS
  misc_feature: MA Experiment 20000265 PARAMETER Experiment Name: At_Open_Flower_P Parameter: Tissue Value: Closed Flower vs. Whole Plant
  misc_feature: MA Experiment ID: 20000286 Result: Down-regulated in Transcription
  misc_feature: MA Experiment 20000286 PARAMETER Experiment Name: At_Open_Flower_P Parameter: Age (day) Value: 21
  misc_feature: MA Experiment 20000286 PARAMETER Experiment Name: At_Open_Flower_P Parameter: Plant Line Value: WS
  misc_feature: MA Experiment 20000286 PARAMETER Experiment Name: At_Open_Flower_P Parameter: Tissue Value: Half Open vs. Whole Plant
  misc_feature: MA Experiment ID: 20000438 Result: Down-regulated in Transcription
  misc_feature: MA Experiment 20000438 PARAMETER Experiment Name: At_Shoots__P Parameter: Age (day) Value: 14
  misc_feature: MA Experiment 20000438 PARAMETER Experiment Name: At_Shoots__P Parameter: Tissue Value: Shoots vs. Whole Plant
  misc_feature: MA Experiment ID: 20000439 Result: Down-regulated in Transcription
  misc_feature: MA Experiment 20000439 PARAMETER Experiment Name: At_Roots__P Parameter: Age (day) Value: 14 vs. 21
  misc_feature: MA Experiment 20000439 PARAMETER Experiment Name: At_Roots__P Parameter: Organism Value: A. thaliana
  misc_feature: MA Experiment 20000439 PARAMETER Experiment Name: At_Roots__P Parameter: Tissue Value: Roots vs. Whole Plant
  misc_feature: MA Experiment ID: 20000495 Result: Down-regulated in Transcription
  misc_feature: MA Experiment 20000495 PARAMETER Experiment Name: At_Guard_Cells_P Parameter: Harvest Date Value: 8/2/2002
  misc_feature: MA Experiment 20000495 PARAMETER Experiment Name: At_Guard_Cells_P Parameter: Organism Value: A. thaliana
  misc_feature: MA Experiment 20000495 PARAMETER Experiment Name: At_Guard_Cells_P Parameter: Tissue Value: Guard Cells vs. Leaves
  misc_feature: MA Experiment ID: 20000576 Result: Down-regulated in Transcription
  misc_feature: MA Experiment 20000576 PARAMETER Experiment Name: At_100uM_ABA_Mutants__P Parameter: Organism Value: A. thaliana
  misc_feature: MA Experiment 20000576 PARAMETER Experiment Name: At_100uM_ABA_Mutants__P Parameter: Plant Line Value: CS23
  misc_feature: MA Experiment 20000576 PARAMETER Experiment Name: At_100uM_ABA_Mutants__P Parameter: Timepoint (hr) Value: 6
  misc_feature: MA Experiment 20000576 PARAMETER Experiment Name: At_100uM_ABA_Mutants__P Parameter: Tissue Value: Whole Plant
  misc_feature: MA Experiment 20000576 PARAMETER Experiment Name: At_100uM_ABA_Mutants__P Parameter: Treatment Value: 1uM ABA vs. No Treatment
  misc_feature: MA Experiment ID: 20000709 Result: Up-regulated in Transcription
  misc_feature: MA Experiment 20000709 PARAMETER Experiment Name: At_15mM_NH4NO3_L-to-H_P Parameter: Age (hr) Value: 14
  misc_feature: MA Experiment 20000709 PARAMETER Experiment Name: At_15mM_NH4NO3_L-to-H_P Parameter: Organism Value: A. thaliana
  misc_feature: MA Experiment 20000709 PARAMETER Experiment Name: At_15mM_NH4NO3_L-to-H_P Parameter: Plant Line Value: WS
  misc_feature: MA Experiment 20000709 PARAMETER Experiment Name: At_15mM_NH4NO3_L-to-H_P Parameter: Timepoint (hr) Value: 4
  misc_feature: MA Experiment 20000709 PARAMETER Experiment Name: At_15mM_NH4NO3_L-to-H_P Parameter: Tissue Value: Aerial
  misc_feature: MA Experiment 20000709 PARAMETER Experiment Name: At_15mM_NH4NO3_L-to-H_P Parameter: Treatment Value: 15mM NH4NO3 vs. 30mM Mannitol
  misc_feature: MA Experiment ID: 20000794 Result: Down-regulated in Transcription
  misc_feature: MA Experiment 20000794 PARAMETER Experiment Name: At_Petals_P Parameter: Age (day) Value: 23-25 days
  misc_feature: MA Experiment 20000794 PARAMETER Experiment Name: At_Petals_P Parameter: Plant Line Value: WS
  misc_feature: MA Experiment 20000794 PARAMETER Experiment Name: At_Petals_P Parameter: Tissue Value: Petals vs. Whole plant
  misc_feature: MA Experiment ID: 20001247 Result: Down-regulated in Transcription
  misc_feature: MA Experiment 20001247 PARAMETER Experiment Name: At_Far-red-induction_P Parameter: Age (day) Value: 7
  misc_feature: MA Experiment 20001247 PARAMETER Experiment Name: At_Far-red-induction_P Parameter: Light Value: Far-red vs. White
  misc_feature: MA Experiment 20001247 PARAMETER Experiment Name: At_Far-red-induction_P Parameter: Organism Value: A. thaliana
  misc_feature: MA Experiment 20001247 PARAMETER Experiment Name: At_Far-red-induction_P Parameter: Plant Line Value: Columbia
  misc_feature: MA Experiment 20001247 PARAMETER Experiment Name: At_Far-red-induction_P Parameter: Timepoint (hr) Value: 1
  misc_feature: MA Experiment 20001247 PARAMETER Experiment Name: At_Far-red-induction_P Parameter: Tissue Value: Whole Plant
  misc_feature: MA Experiment ID: 20001450 Result: Down-regulated in Transcription
  misc_feature: MA Experiment 20001450 PARAMETER Experiment Name: At_Far-red-induction_P Parameter: Age (day) Value: 7
  misc_feature: MA Experiment 20001450 PARAMETER Experiment Name: At_Far-red-induction_P Parameter: Light Value: Far-red vs. White
  misc_feature: MA Experiment 20001450 PARAMETER Experiment Name: At_Far-red-induction_P Parameter: Organism Value: A. thaliana
  misc_feature: MA Experiment 20001450 PARAMETER Experiment Name: At_Far-red-induction_P Parameter: Plant Line Value: Columbia
  misc_feature: MA Experiment 20001450 PARAMETER Experiment Name: At_Far-red-induction_P Parameter: Timepoint (hr) Value: 8
  misc_feature: MA Experiment 20001450 PARAMETER Experiment Name: At_Far-red-induction_P Parameter: Tissue Value: Whole Plant
  misc_feature: MA Experiment ID: 20001451 Result: Down-regulated in Transcription
  misc_feature: MA Experiment 20001451 PARAMETER Experiment Name: At_Far-red-induction_P Parameter: Age (day) Value: 7
  misc_feature: MA Experiment 20001451 PARAMETER Experiment Name: At_Far-red-induction_P Parameter: Light Value: Far-red vs. White
  misc_feature: MA Experiment 20001451 PARAMETER Experiment Name: At_Far-red-induction_P Parameter: Organism Value: A. thaliana
  misc_feature: MA Experiment 20001451 PARAMETER Experiment Name: At_Far-red-induction_P Parameter: Plant Line Value: Columbia
  misc_feature: MA Experiment 20001451 PARAMETER Experiment Name: At_Far-red-induction_P Parameter: Timepoint (hr) Value: 24
  misc_feature: MA Experiment 20001451 PARAMETER Experiment Name: At_Far-red-induction_P Parameter: Tissue Value: Whole Plant
  misc_feature: MA Experiment ID: 20001555 Result: Down-regulated in Transcription
  misc_feature: MA Experiment 20001555 PARAMETER Experiment Name: At_Drought_Soil_Dry_P Parameter: Age (day) Value: 24
  misc_feature: MA Experiment 20001555 PARAMETER Experiment Name: At_Drought_Soil_Dry_P Parameter: Organism Value: A. thaliana
  misc_feature: MA Experiment 20001555 PARAMETER Experiment Name: At_Drought_Soil_Dry_P Parameter: Plant Line Value: WS
  misc_feature: MA Experiment 20001555 PARAMETER Experiment Name: At_Drought_Soil_Dry_P Parameter: Post Timepoint (hr) Value: None
  misc_feature: MA Experiment 20001555 PARAMETER Experiment Name: At_Drought_Soil_Dry_P Parameter: Post-Treatment Value: None
  misc_feature: MA Experiment 20001555 PARAMETER Experiment Name: At_Drought_Soil_Dry_P Parameter: Timepoint (day) Value: 10
  misc_feature: MA Experiment 20001555 PARAMETER Experiment Name: At_Drought_Soil_Dry_P Parameter: Treatment Value: Drought vs. No Drought
  misc_feature: MA Experiment ID: 20001907 Result: Down-regulated in Transcription
  misc_feature: MA Experiment 20001907 PARAMETER Experiment Name: At_Drought_Reproduction_P Parameter: Age (day) Value: 37
  misc_feature: MA Experiment 20001907 PARAMETER Experiment Name: At_Drought_Reproduction_P Parameter: Organism Value: A. thaliana
  misc_feature: MA Experiment 20001907 PARAMETER Experiment Name: At_Drought_Reproduction_P Parameter: Plant Line Value: WS
  misc_feature: MA Experiment 20001907 PARAMETER Experiment Name: At_Drought_Reproduction_P Parameter: Timepoint (day) Value: 7
  misc_feature: MA Experiment 20001907 PARAMETER Experiment Name: At_Drought_Reproduction_P Parameter: Tissue Value: Siliques
  misc_feature: MA Experiment 20001907 PARAMETER Experiment Name: At_Drought_Reproduction_P Parameter: Treatment Value: Drought vs. No Drought
aaatatcttcgaaaccccattactctcaaatccaaccaacctttcaaaacagaacacgaagacatggaccgaacacaatctccaaagacagctctgttcgccgtgttggcaacactccttgtcttaaccgtgaacggccagtcactttgtaacacacacaggttcaccaataacctcgccttcgcagattgctctgacctctcggccttaggctctttccttcactggacctacaatgaacaaaacggtaccgtctcaatcgcctatcgccaccctggaacctctgcttcttcttgggttgcttggggacttaacccaagtagtactcagatggttgggacgcaagctctcgtagccttcacaaacacaacaactaaccaattccaggcctatacctcttccgtgagttcctatggtacgcggcttgaacgtagtagcctaagtttcggtgtgagtggcctctccgcgactctggtcagtggcgaggttacgatctttgcaactcttgagttgtctccgaatctgatcacggccaaccagctttggcaggtgggacctgttgtcaacggtgttcctgcgagtcatcaaacctcaggagataatatgagatcgagtggtaggattgatttccggactggtcaggcatcagctggtggtggtggttccggtgacaggctgaggaagagaaacacgcatggagtactaaatgcggtcagctggggagtactaatgccaatgggagcaatgatggctcggtacatgaaagtcttcgccgatccaacatggttctatctccacattgcctttcaagtgtcgggttacgtcatcggggtagccggttgggccaccggaatcaagcttggtaacgactcaccaggcacatcttactcaacccatcgtaaccttggaatagcactcttcacatttgccacacttcaagtatttgctctgcttgtaaggccaaagccagaccacaaatatcgaacgtactggaacgtgtaccatcacaccgttggatacacaaccatcatcctctctattgtcaacattttcaaaggattcgacattttggacccggaggataaatggcgatgggcttacattgggatcctcatctttcttggtgcttgtgtccttattctcgagccactcacttggttcattgttcttcgccgtaagagccgtggaggtaacacagtcgctgcaccaacttcgagcaagtactctaacggcgtcaatggtaccaccaccactggaccacatcaccaggacgcctagtttcactttttgtttctacacttgttcttgtttgttctacttctactcgattttggattcttttttgatttgatattttgtaggctcatgtatgtattatgtatacaattttattcattgtgttatagatatatcgatttatggagtca

SEQ ID NO: 102917 - protein, 425 aa, Arabidopsis thaliana; identical to SEQ ID NO: 22043
  peptide (1)..(425): Ceres Seq. ID no. 13611542
  misc_feature (111)..(239): Pfam Name: Protein of unknown function (DUF568) Pfam Description: Protein of unknown function (DUF568)
  misc_feature (22)..(425): Homolog of NCBI NO: 18421491 NR Description: auxin-induced protein family [Arabidopsis >gi|9758647|dbj|BAB09271.1| gene_id:MXH1.11~pir||T10200~similar unknown protein [Arabidopsis thaliana]
  misc_feature (22)..(425): Homolog of NCBI NO: 21592781 NR Description: putative membrane protein [Arabidopsis thaliana]
  misc_feature (32)..(425): Homolog of NCBI NO: 13785209 NR Description: putative membrane protein [Solanum tuberosum]
  misc_feature (30)..(423): Homolog of NCBI NO: 13785211 NR Description: putative membrane protein [Solanum tuberosum]
  misc_feature (30)..(423): Homolog of NCBI NO: 13785207 NR Description: putative membrane protein [Solanum tuberosum]
  misc_feature (30)..(423): Homolog of NCBI NO: 13785213 NR Description: putative membrane protein [Solanum tuberosum]
  misc_feature (34)..(399): Homolog of NCBI NO: 18086563 NR Description: AT4g17280/dl4675c [Arabidopsis thaliana]
  misc_feature (50)..(410): Homolog of NCBI NO: 15238124 NR Description: auxin-induced protein, putative [Arabidopsis >gi|9758781|dbj|BAB09079.1| gene_id:MNJ7.12~pir||H71441~similar
  misc_feature (32)..(411): Homolog of NCBI NO: 24414270 NR Description: Putative membrane protein [Oryza sativa (japonica
  misc_feature (22)..(394): Homolog of NCBI NO: 15235545 NR Description: auxin-induced protein, putative [Arabidopsis

SEQ ID NO: 102918 - protein, 404 aa, Arabidopsis thaliana; identical to SEQ ID NO: 22044
  peptide (1)..(404): Ceres Seq. ID no. 13611543
  misc_feature (90)..(218): Pfam Name: Protein of unknown function (DUF568) Pfam Description: Protein of unknown function (DUF568)
  misc_feature (1)..(404): Homolog of NCBI NO: 18421491 NR Description: auxin-induced protein family [Arabidopsis >gi|9758647|dbj|BAB09271.1| gene_id:MXH1.11~pir||T10200~similar unknown protein [Arabidopsis thaliana]
  misc_feature (1)..(404): Homolog of NCBI NO: 21592781 NR Description: putative membrane protein [Arabidopsis thaliana]
  misc_feature (11)..(404): Homolog of NCBI NO: 13785209 NR Description: putative membrane protein [Solanum tuberosum]
  misc_feature (9)..(402): Homolog of NCBI NO: 13785211 NR Description: putative membrane protein [Solanum tuberosum]
  misc_feature (9)..(402): Homolog of NCBI NO: 13785207 NR Description: putative membrane protein [Solanum tuberosum]
  misc_feature (9)..(402): Homolog of NCBI NO: 13785213 NR Description: putative membrane protein [Solanum tuberosum]
  misc_feature (13)..(378): Homolog of NCBI NO: 18086563 NR Description: AT4g17280/dl4675c [Arabidopsis thaliana]
  misc_feature (29)..(389): Homolog of NCBI NO: 15238124 NR Description: auxin-induced protein, putative [Arabidopsis >gi|9758781|dbj|BAB09079.1| gene_id:MNJ7.12~pir||H71441~similar
  misc_feature (11)..(390): Homolog of NCBI NO: 24414270 NR Description: Putative membrane protein [Oryza sativa (japonica
  misc_feature (1)..(373): Homolog of NCBI NO: 15235545 NR Description: auxin-induced protein, putative [Arabidopsis

SEQ ID NO: 102919 - protein, 315 aa, Arabidopsis thaliana; identical to SEQ ID NO: 22045
  peptide (1)..(315): Ceres Seq. ID no. 13611544
  misc_feature (1)..(129): Pfam Name: Protein of unknown function (DUF568) Pfam Description: Protein of unknown function (DUF568)
  misc_feature (1)..(315): Homolog of NCBI NO: 18421491 NR Description: auxin-induced protein family [Arabidopsis >gi|9758647|dbj|BAB09271.1| gene_id:MXH1.11~pir||T10200~similar unknown protein [Arabidopsis thaliana]
  misc_feature (1)..(315): Homolog of NCBI NO: 21592781 NR Description: putative membrane protein [Arabidopsis thaliana]
  misc_feature (1)..(315): Homolog of NCBI NO: 13785209 NR Description: putative membrane protein [Solanum tuberosum]
  misc_feature (1)..(313): Homolog of NCBI NO: 13785211 NR Description: putative membrane protein [Solanum tuberosum]
  misc_feature (1)..(313): Homolog of NCBI NO: 13785207 NR Description: putative membrane protein [Solanum tuberosum]
  misc_feature (1)..(313): Homolog of NCBI NO: 13785213 NR Description: putative membrane protein [Solanum tuberosum]
  misc_feature (1)..(289): Homolog of NCBI NO: 18086563 NR Description: AT4g17280/dl4675c [Arabidopsis thaliana]
  misc_feature (1)..(300): Homolog of NCBI NO: 15238124 NR Description: auxin-induced protein, putative [Arabidopsis >gi|9758781|dbj|BAB09079.1| gene_id:MNJ7.12~pir||H71441~similar
  misc_feature (1)..(301): Homolog of NCBI NO: 24414270 NR Description: Putative membrane protein [Oryza sativa (japonica
  misc_feature (1)..(284): Homolog of NCBI NO: 15235545 NR Description: auxin-induced protein, putative [Arabidopsis

SEQ ID NO: 102920 - DNA, 1438 bp, Arabidopsis thaliana
  misc_feature (1)..(1438): Ceres Seq. ID no. 13611545
  misc_feature: MA Experiment ID: 108434 Result: Down-regulated in Transcription
  misc_feature: MA Experiment 108434 PARAMETER Experiment Name: At_Root_Tips_cDNA_P Parameter: Tissue Value: Root Tips
  misc_feature: MA Experiment ID: 108461 Result: Up-regulated in Transcription
  misc_feature: MA Experiment 108461 PARAMETER Experiment Name: At_Germinating_Seeds_cDNA_P Parameter: Age (day) Value: 1 vs. 0
  misc_feature: MA Experiment 108461 PARAMETER Experiment Name: At_Germinating_Seeds_cDNA_P Parameter: Tissue Value: Germinating Seeds
  misc_feature: MA Experiment ID: 108462 Result: Up-regulated in Transcription
  misc_feature: MA Experiment 108462 PARAMETER Experiment Name: At_Germinating_Seeds_cDNA_P Parameter: Age (day) Value: 2 vs. 0
  misc_feature: MA Experiment 108462 PARAMETER Experiment Name: At_Germinating_Seeds_cDNA_P Parameter: Tissue Value: Germinating Seeds
  misc_feature: MA Experiment ID: 108463 Result: Up-regulated in Transcription
  misc_feature: MA Experiment 108463 PARAMETER Experiment Name: At_Germinating_Seeds_cDNA_P Parameter: Age (day) Value: 3 vs. 0
  misc_feature: MA Experiment 108463 PARAMETER Experiment Name: At_Germinating_Seeds_cDNA_P Parameter: Tissue Value: Germinating Seeds
  misc_feature: MA Experiment ID: 108464 Result: Up-regulated in Transcription
  misc_feature: MA Experiment 108464 PARAMETER Experiment Name: At_Germinating_Seeds_cDNA_P Parameter: Age (day) Value: 4 vs. 0
  misc_feature: MA Experiment 108464 PARAMETER Experiment Name: At_Germinating_Seeds_cDNA_P Parameter: Tissue Value: Germinating Seeds
  misc_feature: MA Experiment ID: 108488 Result: Down-regulated in Transcription
  misc_feature: MA Experiment ID: 108585 Result: Up-regulated in Transcription
  misc_feature: MA Experiment 108585 PARAMETER Experiment Name: At_5mM_NaNP_cDNA_P Parameter: Timepoint (hr) Value: 6
  misc_feature: MA Experiment 108585 PARAMETER Experiment Name: At_5mM_NaNP_cDNA_P Parameter: Tissue Value: Aerial
  misc_feature: MA Experiment 108585 PARAMETER Experiment Name: At_5mM_NaNP_cDNA_P Parameter: Treatment Value: null
  misc_feature: MA Experiment ID: 108594 Result: Down-regulated in Transcription
  misc_feature: MA Experiment 108594 PARAMETER Experiment Name: At_Ler-rhl_Root_cDNA_P Parameter: Plant Line Value: null
  misc_feature: MA Experiment ID: 108595 Result: Up-regulated in Transcription
  misc_feature: MA Experiment 108595 PARAMETER Experiment Name: At_Ler-pi_Ovule_cDNA_P Parameter: Plant Line Value: null
  misc_feature: MA Experiment ID: 108668 Result: Up-regulated in Transcription
  misc_feature: MA Experiment 108668 PARAMETER Experiment Name: At_2mM_SA_cDNA_P Parameter: Plant Line Value: WS
  misc_feature: MA Experiment 108668 PARAMETER Experiment Name: At_2mM_SA_cDNA_P Parameter: Timepoint (hr) Value: 6
  misc_feature: MA Experiment 108668 PARAMETER Experiment Name: At_2mM_SA_cDNA_P Parameter: Treatment Value: 2mM SA vs. No Treatment
  misc_feature: MA Experiment ID: 20000182 Result: Up-regulated in Transcription
  misc_feature: MA Experiment 20000182 PARAMETER Experiment Name: At_2mM_SA_P Parameter: Age (day) Value: 14
  misc_feature: MA Experiment 20000182 PARAMETER Experiment Name: At_2mM_SA_P Parameter: Organism Value: A. thaliana
  misc_feature: MA Experiment 20000182 PARAMETER Experiment Name: At_2mM_SA_P Parameter: Plant Line Value: WS
  misc_feature: MA Experiment 20000182 PARAMETER Experiment Name: At_2mM_SA_P Parameter: Timepoint (hr) Value: 6
  misc_feature: MA Experiment 20000182 PARAMETER Experiment Name: At_2mM_SA_P Parameter: Tissue Value: Aerial
  misc_feature: MA Experiment 20000182 PARAMETER Experiment Name: At_2mM_SA_P Parameter: Treatment Value: 2mM SA vs. No Treatment
  misc_feature: MA Experiment ID: 20000227 Result: Down-regulated in Transcription
  misc_feature: MA Experiment 20000227 PARAMETER Experiment Name: At_Root-Tips-vs-Tops_P Parameter: Tissue Value: Root Tips vs. Root Tops
  misc_feature: MA Experiment ID: 20000264 Result: Up-regulated in Transcription
  misc_feature: MA Experiment 20000264 PARAMETER Experiment Name: At_Open_Flower_P Parameter: Age (day) Value: 21
  misc_feature: MA Experiment 20000264 PARAMETER Experiment Name: At_Open_Flower_P Parameter: Plant Line Value: WS
  misc_feature: MA Experiment 20000264 PARAMETER Experiment Name: At_Open_Flower_P Parameter: Tissue Value: Open Flower vs. Whole Plant
  misc_feature: MA Experiment ID: 20000437 Result: Up-regulated in Transcription
  misc_feature: MA Experiment 20000437 PARAMETER Experiment Name: At_Drought_P Parameter: Age (day) Value: 8
  misc_feature: MA Experiment 20000437 PARAMETER Experiment Name: At_Drought_P Parameter: Organism Value: A. thaliana
  misc_feature: MA Experiment 20000437 PARAMETER Experiment Name: At_Drought_P Parameter: Plant Line Value: WS
  misc_feature: MA Experiment 20000437 PARAMETER Experiment Name: At_Drought_P Parameter: Timepoint (hr) Value: 24
  misc_feature: MA Experiment 20000437 PARAMETER Experiment Name: At_Drought_P Parameter: Tissue Value: Whole Plant
  misc_feature: MA Experiment 20000437 PARAMETER Experiment Name: At_Drought_P Parameter: Treatment Value: Drought vs. No Drought
  misc_feature: MA Experiment ID: 20000438 Result: Down-regulated in Transcription
  misc_feature: MA Experiment 20000438 PARAMETER Experiment Name: At_Shoots__P Parameter: Age (day) Value: 14
  misc_feature: MA Experiment 20000438 PARAMETER Experiment Name: At_Shoots__P Parameter: Tissue Value: Shoots vs. Whole Plant
  misc_feature: MA Experiment ID: 20000495 Result: Up-regulated in Transcription
  misc_feature: MA Experiment 20000495 PARAMETER Experiment Name: At_Guard_Cells_P Parameter: Harvest Date Value: 8/2/2002
  misc_feature: MA Experiment 20000495 PARAMETER Experiment Name: At_Guard_Cells_P Parameter: Organism Value: A. thaliana
  misc_feature: MA Experiment 20000495 PARAMETER Experiment Name: At_Guard_Cells_P Parameter: Tissue Value: Guard Cells vs. Leaves
  misc_feature: MA Experiment ID: 20000527 Result: Down-regulated in Transcription
  misc_feature: MA Experiment 20000527 PARAMETER Experiment Name: At_10percent_PEG_P Parameter: Age (day) Value: 20
  misc_feature: MA Experiment 20000527 PARAMETER Experiment Name: At_10percent_PEG_P Parameter: Organism Value: A. thaliana
  misc_feature: MA Experiment 20000527 PARAMETER Experiment Name: At_10percent_PEG_P Parameter: Plant Line Value: WS
  misc_feature: MA Experiment 20000527 PARAMETER Experiment Name: At_10percent_PEG_P Parameter: Timepoint (day) Value: 20
  misc_feature: MA Experiment 20000527 PARAMETER Experiment Name: At_10percent_PEG_P Parameter: Tissue Value: Whole Plant
  misc_feature: MA Experiment 20000527 PARAMETER Experiment Name: At_10percent_PEG_P Parameter: Treatment Value: 10percent PEG vs. No Treatment
  misc_feature: MA Experiment ID: 20000794 Result: Up-regulated in Transcription
  misc_feature: MA Experiment 20000794 PARAMETER Experiment Name: At_Petals_P Parameter: Age (day) Value: 23-25 days
  misc_feature: MA Experiment 20000794 PARAMETER Experiment Name: At_Petals_P Parameter: Plant Line Value: WS
  misc_feature: MA Experiment 20000794 PARAMETER Experiment Name: At_Petals_P Parameter: Tissue Value: Petals vs. Whole plant
  misc_feature: MA Experiment ID: 20001757 Result: Down-regulated in Transcription
  misc_feature: MA Experiment 20001757 PARAMETER Experiment Name: At_50mM_NH4NO3_L-to-H_P Parameter: Timepoint (hr) Value: 6
  misc_feature: MA Experiment 20001757 PARAMETER Experiment Name: At_50mM_NH4NO3_L-to-H_P Parameter: Tissue Value: Leaf
  misc_feature: MA Experiment 20001757 PARAMETER Experiment Name: At_50mM_NH4NO3_L-to-H_P Parameter: Treatment Value: 50mM NH4NO3 vs 100mM Mannitol
  misc_feature: MA Experiment ID: 20001905 Result: Up-regulated in Transcription
  misc_feature: MA Experiment 20001905 PARAMETER Experiment Name: At_Drought_Reproduction_P Parameter: Age (day) Value: 40
  misc_feature: MA Experiment 20001905 PARAMETER Experiment Name: At_Drought_Reproduction_P Parameter: Organism Value: A. thaliana
  misc_feature: MA Experiment 20001905 PARAMETER Experiment Name: At_Drought_Reproduction_P Parameter: Plant Line Value: WS
  misc_feature: MA Experiment 20001905 PARAMETER Experiment Name: At_Drought_Reproduction_P Parameter: Timepoint (day) Value: 10
  misc_feature: MA Experiment 20001905 PARAMETER Experiment Name: At_Drought_Reproduction_P Parameter: Tissue Value: Rosettes
  misc_feature: MA Experiment 20001905 PARAMETER Experiment Name: At_Drought_Reproduction_P Parameter: Treatment Value: Drought vs. No Drought
taggaagagcacaagcctccacaagtggtgttgcccctctgttcctaactcctttctcttatataaaattgtgtatcctccatacatacaacaaagagagaaacttttgatatggggttaaagatgtcagaatcagccaagccttactttgcaatggtttgtcttcaattcggatacgccggcatgaacctcgtgacgaaggttgtgctagaccgcggcatgagccattacgtccttgtggcttaccgtaatgcctttgccacggctgctatcgcaccttttgctctactctccgagaggaaagtgaggccgaagatgacatttccaatattcatgcagatttttgttctagctcttctcgggcctttgatcgatcaaaatttatattacgccggtctcaaacttacttcaccaacttttgccggcgcagtcacaaatatcgttccagctttgacctttatcatttccataatttgcaggatggagaaggtggagatgagaaaagtaagattccaagcaaaagtggtggggacattagtgatagtggttggagccatgttgatgattttattcaaaattcctctaatcacctttctccgatctcacctcaccggccatgctttgtcgccggcaggtgaggactacctcaaagccaccgtcttcctcctcatcgcctcattttcttgggcttcctttttcgttcttcaggcggctacgttgaagagatactcatctcacctttcattatcgacgatggtgtgtttcatgggcacgttacagtccacagccttaacgtttgtgatggagccaaacctttctgcatggaacattggctttgacatgaaccttcttgcctctgcttatgcgggcataatgtcgtcgagcatagcgtactacgttcaaggaatgatgacgaagcaaaagagtgttatctttgttactgcttttaatcctcttgttgtcataatcggatccatcattggcttcctcatcctcaaccaaactttaaaccttggcggggttcttggaatggcaattttagtggtgggagtttgcacggttctttggggaaaggaaggagatatcgatgaagaagagaacattgaggagaagtttgtagaaattgtcaagtgttgcaaccgctgcgatatcaaggttctctcgatgatgccaagaatcgatgaggaagtagacgttgaaatgcaatccgcaggaacagctaaagtggcggtgggtttctcgtaacctctcgtgtgtggaaaaagatgttcacgaccttaattagatcttttcaagtcttttttttttaacaaaattttagatagaggagcaactttttctttgttctatatcattgctccaactttttattttctttgtaggttttgttttataatcttcattagaagggtaattattattattaaataaatgttcc

SEQ ID NO: 102921 - protein, 377 aa, Arabidopsis thaliana
  peptide (1)..(377): Ceres Seq. ID no. 13611546
  misc_feature (20)..(153): Pfam Name: Integral membrane protein DUF6 Pfam Description: Integral membrane protein DUF6
  misc_feature (1)..(377): Homolog of NCBI NO: 15228980 NR Description: nodulin MtN21 family protein [Arabidopsis
  misc_feature (5)..(377): Homolog of NCBI NO: 21592817 NR Description: nodulin-like protein [Arabidopsis thaliana]
  misc_feature (1)..(371): Homolog of NCBI NO: 30688451 NR Description: nodulin MtN21 family protein [Arabidopsis
  misc_feature (1)..(371): Homolog of NCBI NO: 7487973 NR Description: probable integral membrane protein nodulin
  misc_feature (7)..(329): Homolog of NCBI NO: 34908998 NR Description: nodulin-like protein [Oryza sativa (japonica
  misc_feature (8)..(322): Homolog of NCBI NO: 15240683 NR Description: nodulin MtN21 family protein [Arabidopsis
  misc_feature (7)..(321): Homolog of NCBI NO: 2598575 NR Description: MtN21 [Medicago truncatula]
  misc_feature (1)..(330): Homolog of NCBI NO: 15219123 NR Description: nodulin N21 family protein [Arabidopsis thaliana]
  misc_feature (1)..(330): Homolog of NCBI NO: 17529004 NR Description: putative nodulin protein [Arabidopsis thaliana]
  misc_feature (1)..(330): Homolog of NCBI NO: 6552743 NR Description: T26F17.11 [Arabidopsis thaliana]
MGLKMSESAKPYFAMVCLQFGYAGMNLVTKVVLDRGMSHYVLVAYRNAFATAAIAPFALLSERKVRPKMTFPIFMQIFVLALLGPLIDQNLYYAGLKLTSPTFAGAVTNIVPALTFIISIICRMEKVEMRKVRFQAKVVGTLVIVVGAMLMILFKIPLITFLRSHLTGHALSPAGEDYLKATVFLLIASFSWASFFVLQAATLKRYSSHLSLSTMVCFMGTLQSTALTFVMEPNLSAWNIGFDMNLLASAYAGIMSSSIAYYVQGMMTKQKSVIFVTAFNPLVVIIGSIIGFLILNQTLNLGGVLGMAILVVGVCTVLWGKEGDIDEEENIEEKFVEIVKCCNRCDIKVLSMMPRIDEEVDVEMQSAGTAKVAVGFS

SEQ ID NO: 102922 - protein, 373 aa, Arabidopsis thaliana
  peptide (1)..(373): Ceres Seq. ID no. 13611547
  misc_feature (16)..(149): Pfam Name: Integral membrane protein DUF6 Pfam Description: Integral membrane protein DUF6
  misc_feature (1)..(373): Homolog of NCBI NO: 15228980 NR Description: nodulin MtN21 family protein [Arabidopsis
  misc_feature (1)..(373): Homolog of NCBI NO: 21592817 NR Description: nodulin-like protein [Arabidopsis thaliana]
  misc_feature (1)..(367): Homolog of NCBI NO: 30688451 NR Description: nodulin MtN21 family protein [Arabidopsis
  misc_feature (1)..(367): Homolog of NCBI NO: 7487973 NR Description: probable integral membrane protein nodulin
  misc_feature (3)..(325): Homolog of NCBI NO: 34908998 NR Description: nodulin-like protein [Oryza sativa (japonica
  misc_feature (4)..(318): Homolog of NCBI NO: 15240683 NR Description: nodulin MtN21 family protein [Arabidopsis
  misc_feature (3)..(317): Homolog of NCBI NO: 2598575 NR Description: MtN21 [Medicago truncatula]
  misc_feature (1)..(326): Homolog of NCBI NO: 15219123 NR Description: nodulin N21 family protein [Arabidopsis thaliana]
  misc_feature (1)..(326): Homolog of NCBI NO: 17529004 NR Description: putative nodulin protein [Arabidopsis thaliana]
  misc_feature (1)..(326): Homolog of NCBI NO: 6552743 NR Description: T26F17.11 [Arabidopsis thaliana]
MSESAKPYFAMVCLQFGYAGMNLVTKVVLDRGMSHYVLVAYRNAFATAAIAPFALLSERKVRPKMTFPIFMQIFVLALLGPLIDQNLYYAGLKLTSPTFAGAVTNIVPALTFIISIICRMEKVEMRKVRFQAKVVGTLVIVVGAMLMILFKIPLITFLRSHLTGHALSPAGEDYLKATVFLLIASFSWASFFVLQAATLKRYSSHLSLSTMVCFMGTLQSTALTFVMEPNLSAWNIGFDMNLLASAYAGIMSSSIAYYVQGMMTKQKSVIFVTAFNPLVVIIGSIIGFLILNQTLNLGGVLGMAILVVGVCTVLWGKEGDIDEEENIEEKFVEIVKCCNRCDIKVLSMMPRIDEEVDVEMQSAGTAKVAVGFS

SEQ ID NO: 102923 - protein, 363 aa, Arabidopsis thaliana
  peptide (1)..(363): Ceres Seq. ID no. 13611548
  misc_feature (6)..(139): Pfam Name: Integral membrane protein DUF6 Pfam Description: Integral membrane protein DUF6
  misc_feature (1)..(363): Homolog of NCBI NO: 15228980 NR Description: nodulin MtN21 family protein [Arabidopsis
  misc_feature (1)..(363): Homolog of NCBI NO: 21592817 NR Description: nodulin-like protein [Arabidopsis thaliana]
  misc_feature (1)..(357): Homolog of NCBI NO: 30688451 NR Description: nodulin MtN21 family protein [Arabidopsis
  misc_feature (1)..(357): Homolog of NCBI NO: 7487973 NR Description: probable integral membrane protein nodulin
  misc_feature (1)..(315): Homolog of NCBI NO: 34908998 NR Description: nodulin-like protein [Oryza sativa (japonica
  misc_feature (1)..(308): Homolog of NCBI NO: 15240683 NR Description: nodulin MtN21 family protein [Arabidopsis
  misc_feature (1)..(307): Homolog of NCBI NO: 2598575 NR Description: MtN21 [Medicago truncatula]
  misc_feature (1)..(316): Homolog of NCBI NO: 15219123 NR Description: nodulin N21 family protein [Arabidopsis thaliana]
  misc_feature (1)..(316): Homolog of NCBI NO: 17529004 NR Description: putative nodulin protein [Arabidopsis thaliana]
  misc_feature (1)..(316): Homolog of NCBI NO: 6552743 NR Description: T26F17.11 [Arabidopsis thaliana]
MVCLQFGYAGMNLVTKVVLDRGMSHYVLVAYRNAFATAAIAPFALLSERKVRPKMTFPIFMQIFVLALLGPLIDQNLYYAGLKLTSPTFAGAVTNIVPALTFIISIICRMEKVEMRKVRFQAKVVGTLVIVVGAMLMILFKIPLITFLRSHLTGHALSPAGEDYLKATVFLLIASFSWASFFVLQAATLKRYSSHLSLSTMVCFMGTLQSTALTFVMEPNLSAWNIGFDMNLLASAYAGIMSSSIAYYVQGMMTKQKSVIFVTAFNPLVVIIGSIIGFLILNQTLNLGGVLGMAILVVGVCTVLWGKEGDIDEEENIEEKFVEIVKCCNRCDIKVLSMMPRIDEEVDVEMQSAGTAKVAVGFS

SEQ ID NO: 102924 - DNA, 2316 bp, Arabidopsis thaliana
  misc_feature (1)..(2316): Ceres Seq. ID no. 13611551
  misc_feature: MA Experiment ID: 108461 Result: Down-regulated in Transcription
  misc_feature: MA Experiment 108461 PARAMETER Experiment Name: At_Germinating_Seeds_cDNA_P Parameter: Age (day) Value: 1 vs. 0
  misc_feature: MA Experiment 108461 PARAMETER Experiment Name: At_Germinating_Seeds_cDNA_P Parameter: Tissue Value: Germinating Seeds
  misc_feature: MA Experiment ID: 108462 Result: Down-regulated in Transcription
  misc_feature: MA Experiment 108462 PARAMETER Experiment Name: At_Germinating_Seeds_cDNA_P Parameter: Age (day) Value: 2 vs. 0
  misc_feature: MA Experiment 108462 PARAMETER Experiment Name: At_Germinating_Seeds_cDNA_P Parameter: Tissue Value: Germinating Seeds
  misc_feature: MA Experiment ID: 108463 Result: Down-regulated in Transcription
  misc_feature: MA Experiment 108463 PARAMETER Experiment Name: At_Germinating_Seeds_cDNA_P Parameter: Age (day) Value: 3 vs. 0
  misc_feature: MA Experiment 108463 PARAMETER Experiment Name: At_Germinating_Seeds_cDNA_P Parameter: Tissue Value: Germinating Seeds
  misc_feature: MA Experiment ID: 108464 Result: Down-regulated in Transcription
  misc_feature: MA Experiment 108464 PARAMETER Experiment Name: At_Germinating_Seeds_cDNA_P Parameter: Age (day) Value: 4 vs. 0
  misc_feature: MA Experiment 108464 PARAMETER Experiment Name: At_Germinating_Seeds_cDNA_P Parameter: Tissue Value: Germinating Seeds
  misc_feature: MA Experiment ID: 20000180 Result: Down-regulated in Transcription
  misc_feature: MA Experiment 20000180 PARAMETER Experiment Name: At_Germinating_Seeds_P Parameter: Age (hr) Value: 24 vs. 0
  misc_feature: MA Experiment 20000180 PARAMETER Experiment Name: At_Germinating_Seeds_P Parameter: Tissue Value: Germinating Seeds
  misc_feature: MA Experiment ID: 20000224 Result: Up-regulated in Transcription
  misc_feature: MA Experiment ID: 20000574 Result: Up-regulated in Transcription
  misc_feature: MA Experiment 20000574 PARAMETER Experiment Name: At_100uM_ABA_Mutants__P Parameter: Organism Value: A. thaliana
  misc_feature: MA Experiment 20000574 PARAMETER Experiment Name: At_100uM_ABA_Mutants__P Parameter: Plant Line Value: CS23 vs. Ler wt
  misc_feature: MA Experiment 20000574 PARAMETER Experiment Name: At_100uM_ABA_Mutants__P Parameter: Timepoint (hr) Value: N/A
  misc_feature: MA Experiment 20000574 PARAMETER Experiment Name: At_100uM_ABA_Mutants__P Parameter: Tissue Value: Whole Plant
  misc_feature: MA Experiment 20000574 PARAMETER Experiment Name: At_100uM_ABA_Mutants__P Parameter: Treatment Value: None
  misc_feature: MA Experiment ID: 20001458 Result: Up-regulated in Transcription
  misc_feature: MA Experiment 20001458 PARAMETER Experiment Name: At_50mM_NH4NO3_L-to-H_P Parameter: Age (day) Value: Undefined
  misc_feature: MA Experiment 20001458 PARAMETER Experiment Name: At_50mM_NH4NO3_L-to-H_P Parameter: Organism Value: Undefined
  misc_feature: MA Experiment 20001458 PARAMETER Experiment Name: At_50mM_NH4NO3_L-to-H_P Parameter: Plant Line Value: Undefined
  misc_feature: MA Experiment 20001458 PARAMETER Experiment Name: At_50mM_NH4NO3_L-to-H_P Parameter: Timepoint (hr) Value: 2
  misc_feature: MA Experiment 20001458 PARAMETER Experiment Name: At_50mM_NH4NO3_L-to-H_P Parameter: Tissue Value: Siliques
  misc_feature: MA Experiment 20001458 PARAMETER Experiment Name: At_50mM_NH4NO3_L-to-H_P Parameter: Treatment Value: 50mM NH4NO3 vs. 100mM Manitol
  misc_feature: MA Experiment ID: 20001557 Result: Up-regulated in Transcription
  misc_feature: MA Experiment 20001557 PARAMETER Experiment Name: At_Drought_Soil_Dry_P Parameter: Age (day) Value: 27
  misc_feature: MA Experiment 20001557 PARAMETER Experiment Name: At_Drought_Soil_Dry_P Parameter: Organism Value: A. thaliana
  misc_feature: MA Experiment 20001557 PARAMETER Experiment Name: At_Drought_Soil_Dry_P Parameter: Plant Line Value: WS
  misc_feature: MA Experiment 20001557 PARAMETER Experiment Name: At_Drought_Soil_Dry_P Parameter: Post Timepoint (hr) Value: 3
  misc_feature: MA Experiment 20001557 PARAMETER Experiment Name: At_Drought_Soil_Dry_P Parameter: Post-Treatment Value: Re-Water vs. No Drought
  misc_feature: MA Experiment 20001557 PARAMETER Experiment Name: At_Drought_Soil_Dry_P Parameter: Timepoint (day) Value: 13
  misc_feature: MA Experiment 20001557 PARAMETER Experiment Name: At_Drought_Soil_Dry_P Parameter: Treatment Value: Drought vs. No Drought
tttttggcttcaatttttgcgttttctctgcaactcgccgtcaagggtagaagaattaggggttcctgttcttaactgcttgaagatgacgtcttatggagatagactgaagtcgacctccattaatggagttaagttatacaatgtttcttctgctcccaatgttcctacttggcttaatcctaagaagcaacgagctctccgcaaaaaccctcattatatgcaaagagtggagctgattcaggagttgaagtttgagactgccactactagaatcaaagcgactccagacggagagtatctgattgcttcaggcatatatccaccacaggtaaaagtttatgagctaaatcagcttgctttgaagtttgagaggcatttggactcggaaatagttgatttcgagatattggatgatgacttctcaaagcttgccttcttatgtgctgatcgttctattaatttacacgccaaatacgggaaacaccacactttacgaattccaaggatggggagagatatgacatatgattcctggtcttgtgatcttctttgcgctgcttcctcacctgatctatatagaatcaatttggagcagggaagatttctttctcctctcagcactcaatccccagcgcttaatgtcgtttctcgaagcaacctccatggattagttgcttgtggtggtgaggatggtgctgtggaattttttgatatgagaatgaaatcatctgctgctagaattaacgcggtcacacatggtggtgatgctgctgcggaggttactgctatagagtttgatgacagtgaaggtcttcaagtagctgtcgggagtagcgcgggaaaggtattcatatacgacttgcgtacttcaactcccataagagtgaaggatcacatgtacgagagcccaattttgaatattaagtggcaacggactcttaatactcaacaacctaagttgattactaccaacaaacacattgttagaatatgggatccaaacacgggagaaggtatgaccagcattgaaccgactcaaggaggaataaacgacatttgtgtgttccgtggaagcggacttatgcttcttgctttagactctagcctaatcccatcttacttcatacctgaactcggtcctgcccccaaatggtgttctcctcttgaaaatctaacggaagagttggaggaaagtgcacagacaactatttatgataattacaaatttttggcaatggaagatctggagaagttgcagctaactcatttgattggaacagatcttttgaaagcatctatgcatggatattttattaattaccatttgtacaaaaaggctttagcagtgattgaaccttttgcatttgatgattacttagaacgtaggaagcaagagaagttagaagagcagcgtacgcagagaatcacaaaaaagagacggttgccaaaggttaaccgagaccttgcagcaaggcttcatggggacgaatcagaggaggaaaataaaactgccgaggatggggaggccaccaagaaagtgctgaaaaagaagaaacccatacttactgacgagcatttcgtagatggtcggtttggttcgatgttccaaaatccggacttccaaattgataaggactcatatgaatatggtgtcctacaccctgttgcttcttcgaagaagcaaccttctctgttagatgaacactttgaagctgtatcagatgatgacgagaacagtgattctgatgcatcacagccttcagatgacgaggccgacgatggagacgcaactaggccaagcaagaaagcgagaactccgaagttgtatgaagtgaaagatgagcggcatgccgcagcttatcacaaccgcacttcactggctaaagaagatagtcttcctatgggcgagcgtgtcaaggctatagagaaccggcgtggcaactttggaggctcgaaagatatcaaattcggtcctggaggatcacgggagttttctttcaaggcgagagggtcatcaaagtacaaagaagatagagacgatgagtatgaagatgggcaaagaaacaagaggagaggagttcagtctcttggactgaaatcaacaaatattagaggcggtttcagaggtagaggaggtggtggttttagagggagaggaggcggcggttcccggggaaaaggtggccgtggtggtgggcgtggaagaggccggcaatgataaatgtagcttttcaggggctttattagatttgaaaaatgtgtcacctactattgagaatcttgaaacttaattgatcacatatacaattttgg

SEQ ID NO: 102925 - protein, 739 aa, Arabidopsis thaliana
  peptide (1)..(739): Ceres Seq. ID no. 13611552
  misc_feature (36)..(616): Homolog of NCBI NO: 33416707 NR Description: Unknown (protein for MGC:69094) [Xenopus laevis]
  misc_feature (36)..(697): Homolog of NCBI NO: 38049298 NR Description: similar to FLJ14075 protein [Mus musculus]
  misc_feature (36)..(706): Homolog of NCBI NO: 13477303 NR Description: Similar to hypothetical protein FLJ14075 [Homo
  misc_feature (36)..(596): Homolog of NCBI NO: 28502998 NR Description: Similar to hypothetical protein FLJ14075 [Danio
  misc_feature (714)..(739): Homolog of NCBI NO: 28502998 NR Description: Similar to hypothetical protein FLJ14075 [Danio
  misc_feature (705)..(737): Homolog of NCBI NO: 28502998 NR Description: Similar to hypothetical protein FLJ14075 [Danio
  misc_feature (36)..(501): Homolog of NCBI NO: 27694778 NR Description: Similar to hypothetical protein FLJ14075 [Xenopus
  misc_feature (36)..(608): Homolog of NCBI NO: 19075209 NR Description: conserved hypothetical protein.
  misc_feature (36)..(645): Homolog of NCBI NO: 17540118 NR Description: Putative nuclear protein, with a coiled coil of eukaryotic origin (85.4 kD) [Caenorhabditis elegans]
  misc_feature (36)..(705): Homolog of NCBI NO: 6321584 NR Description: Essential Nucleolar Protein 2; Ygr145wp
FWLQFLRFLCNSPSRVEELGVPVLNCLKMTSYGDRLKSTSINGVKLYNVSSAPNVPTWLNPKKQRALRKNPHYMQRVELIQELKFETATTRIKATPDGEYLIASGIYPPQVKVYELNQLALKFERHLDSEIVDFEILDDDFSKLAFLCADRSINLHAKYGKHHTLRIPRMGRDMTYDSWSCDLLCAASSPDLYRINLEQGRFLSPLSTQSPALNVVSRSNLHGLVACGGEDGAVEFFDMRMKSSAARINAVTHGGDAAAEVTAIEFDDSEGLQVAVGSSAGKVFIYDLRTSTPIRVKDHMYESPILNIKWQRTLNTQQPKLITTNKHIVRIWDPNTGEGMTSIEPTQGGINDICVFRGSGLMLLALDSSLIPSYFIPELGPAPKWCSPLENLTEELEESAQTTIYDNYKFLAMEDLEKLQLTHLIGTDLLKASMHGYFINYHLYKKALAVIEPFAFDDYLERRKQEKLEEQRTQRITKKRRLPKVNRDLAARLHGDESEEENKTAEDGEATKKVLKKKKPILTDEHFVDGRFGSMFQNPDFQIDKDSYEYGVLHPVASSKKQPSLLDEHFEAVSDDDENSDSDASQPSDDEADDGDATRPSKKARTPKLYEVKDERHAAAYHNRTSLAKEDSLPMGERVKAIENRRGNFGGSKDIKFGPGGSREFSFKARGSSKYKEDRDDEYEDGQRNKRRGVQSLGLKSTNIRGGFRGRGGGGFRGRGGGGSRGKGGRGGGRGRGRQ

SEQ ID NO: 102926 - protein, 711 aa, Arabidopsis thaliana
  peptide (1)..(711): Ceres Seq. ID no. 13611553
  misc_feature (8)..(588): Homolog of NCBI NO: 33416707 NR Description: Unknown (protein for MGC:69094) [Xenopus laevis]
  misc_feature (8)..(669): Homolog of NCBI NO: 38049298 NR Description: similar to FLJ14075 protein [Mus musculus]
  misc_feature (8)..(678): Homolog of NCBI NO: 13477303 NR Description: Similar to hypothetical protein FLJ14075 [Homo
  misc_feature (8)..(568): Homolog of NCBI NO: 28502998 NR Description: Similar to hypothetical protein FLJ14075 [Danio
  misc_feature (686)..(711): Homolog of NCBI NO: 28502998 NR Description: Similar to hypothetical protein FLJ14075 [Danio
  misc_feature (677)..(709): Homolog of NCBI NO: 28502998 NR Description: Similar to hypothetical protein FLJ14075 [Danio
  misc_feature (8)..(473): Homolog of NCBI NO: 27694778 NR Description: Similar to hypothetical protein FLJ14075 [Xenopus
  misc_feature (8)..(580): Homolog of NCBI NO: 19075209 NR Description: conserved hypothetical protein.
  misc_feature (8)..(617): Homolog of NCBI NO: 17540118 NR Description: Putative nuclear protein, with a coiled coil of eukaryotic origin (85.4 kD) [Caenorhabditis elegans]
  misc_feature (8)..(677): Homolog of NCBI NO: 6321584 NR Description: Essential Nucleolar Protein 2; Ygr145wp
MTSYGDRLKSTSINGVKLYNVSSAPNVPTWLNPKKQRALRKNPHYMQRVELIQELKFETATTRIKATPDGEYLIASGIYPPQVKVYELNQLALKFERHLDSEIVDFEILDDDFSKLAFLCADRSINLHAKYGKHHTLRIPRMGRDMTYDSWSCDLLCAASSPDLYRINLEQGRFLSPLSTQSPALNVVSRSNLHGLVACGGEDGAVEFFDMRMKSSAARINAVTHGGDAAAEVTAIEFDDSEGLQVAVGSSAGKVFIYDLRTSTPIRVKDHMYESPILNIKWQRTLNTQQPKLITTNKHIVRIWDPNTGEGMTSIEPTQGGINDICVFRGSGLMLLALDSSLIPSYFIPELGPAPKWCSPLENLTEELEESAQTTIYDNYKFLAMEDLEKLQLTHLIGTDLLKASMHGYFINYHLYKKALAVIEPFAFDDYLERRKQEKLEEQRTQRITKKRRLPKVNRDLAARLHGDESEEENKTAEDGEATKKVLKKKKPILTDEHFVDGRFGSMFQNPDFQIDKDSYEYGVLHPVASSKKQPSLLDEHFEAVSDDDENSDSDASQPSDDEADDGDATRPSKKARTPKLYEVKDERHAAAYHNRTSLAKEDSLPMGERVKAIENRRGNFGGSKDIKFGPGGSREFSFKARGSSKYKEDRDDEYEDGQRNKRRGVQSLGLKSTNIRGGFRGRGGGGFRGRGGGGSRGKGGRGGGRGRGRQ

SEQ ID NO: 102927 - protein, 666 aa, Arabidopsis thaliana
  peptide (1)..(666): Ceres Seq. ID no. 13611554
  misc_feature (1)..(543): Homolog of NCBI NO: 33416707 NR Description: Unknown (protein for MGC:69094) [Xenopus laevis]
  misc_feature (1)..(624): Homolog of NCBI NO: 38049298 NR Description: similar to FLJ14075 protein [Mus musculus]
  misc_feature (1)..(633): Homolog of NCBI NO: 13477303 NR Description: Similar to hypothetical protein FLJ14075 [Homo
  misc_feature (1)..(523): Homolog of NCBI NO: 28502998 NR Description: Similar to hypothetical protein FLJ14075 [Danio
  misc_feature (641)..(666): Homolog of NCBI NO: 28502998 NR Description: Similar to hypothetical protein FLJ14075 [Danio
  misc_feature (632)..(664): Homolog of NCBI NO: 28502998 NR Description: Similar to hypothetical protein FLJ14075 [Danio
  misc_feature (1)..(428): Homolog of NCBI NO: 27694778 NR Description: Similar to hypothetical protein FLJ14075 [Xenopus
  misc_feature (1)..(535): Homolog of NCBI NO: 19075209 NR Description: conserved hypothetical protein.
  misc_feature (1)..(572): Homolog of NCBI NO: 17540118 NR Description: Putative nuclear protein, with a coiled coil of eukaryotic origin (85.4 kD) [Caenorhabditis elegans]
  misc_feature (1)..(632): Homolog of NCBI NO: 6321584 NR Description: Essential Nucleolar Protein 2; Ygr145wp
MQRVELIQELKFETATTRIKATPDGEYLIASGIYPPQVKVYELNQLALKFERHLDSEIVDFEILDDDFSKLAFLCADRSINLHAKYGKHHTLRIPRMGRDMTYDSWSCDLLCAASSPDLYRINLEQGRFLSPLSTQSPALNVVSRSNLHGLVACGGEDGAVEFFDMRMKSSAARINAVTHGGDAAAEVTAIEFDDSEGLQVAVGSSAGKVFIYDLRTSTPIRVKDHMYESPILNIKWQRTLNTQQPKLITTNKHIVRIWDPNTGEGMTSIEPTQGGINDICVFRGSGLMLLALDSSLIPSYFIPELGPAPKWCSPLENLTEELEESAQTTIYDNYKFLAMEDLEKLQLTHLIGTDLLKASMHGYFINYHLYKKALAVIEPFAFDDYLERRKQEKLEEQRTQRITKKRRLPKVNRDLAARLHGDESEEENKTAEDGEATKKVLKKKKPILTDEHFVDGRFGSMFQNPDFQIDKDSYEYGVLHPVASSKKQPSLLDEHFEAVSDDDENSDSDASQPSDDEADDGDATRPSKKARTPKLYEVKDERHAAAYHNRTSLAKEDSLPMGERVKAIENRRGNFGGSKDIKFGPGGSREFSFKARGSSKYKEDRDDEYEDGQRNKRRGVQSLGLKSTNIRGGFRGRGGGGFRGRGGGGSRGKGGRGGGRGRGRQ

SEQ ID NO: 102928 - DNA, 1196 bp, Arabidopsis thaliana
  misc_feature (1)..(1196): Ceres Seq. ID no. 13611555
  misc_feature: MA Experiment ID: 108434 Result: Up-regulated in Transcription
  misc_feature: MA Experiment 108434 PARAMETER Experiment Name: At_Root_Tips_cDNA_P Parameter: Tissue Value: Root Tips
  misc_feature: MA Experiment ID: 108462 Result: Down-regulated in Transcription
  misc_feature: MA Experiment 108462 PARAMETER Experiment Name: At_Germinating_Seeds_cDNA_P Parameter: Age (day) Value: 2 vs. 0
  misc_feature: MA Experiment 108462 PARAMETER Experiment Name: At_Germinating_Seeds_cDNA_P Parameter: Tissue Value: Germinating Seeds
  misc_feature: MA Experiment ID: 108463 Result: Down-regulated in Transcription
  misc_feature: MA Experiment 108463 PARAMETER Experiment Name: At_Germinating_Seeds_cDNA_P Parameter: Age (day) Value: 3 vs. 0
  misc_feature: MA Experiment 108463 PARAMETER Experiment Name: At_Germinating_Seeds_cDNA_P Parameter: Tissue Value: Germinating Seeds
  misc_feature: MA Experiment ID: 108464 Result: Down-regulated in Transcription
  misc_feature: MA Experiment 108464 PARAMETER Experiment Name: At_Germinating_Seeds_cDNA_P Parameter: Age (day) Value: 4 vs. 0
  misc_feature: MA Experiment 108464 PARAMETER Experiment Name: At_Germinating_Seeds_cDNA_P Parameter: Tissue Value: Germinating Seeds
  misc_feature: MA Experiment ID: 108488 Result: Up-regulated in Transcription
  misc_feature: MA Experiment ID: 20000179 Result: Down-regulated in Transcription
  misc_feature: MA Experiment 20000179 PARAMETER Experiment Name: At_Germinating_Seeds_P Parameter: Age (hr) Value: 6 vs. 0
  misc_feature: MA Experiment 20000179 PARAMETER Experiment Name: At_Germinating_Seeds_P Parameter: Tissue Value: Germinating Seeds
  misc_feature: MA Experiment ID: 20000180 Result: Down-regulated in Transcription
  misc_feature: MA Experiment 20000180 PARAMETER Experiment Name: At_Germinating_Seeds_P Parameter: Age (hr) Value: 24 vs. 0
  misc_feature: MA Experiment 20000180 PARAMETER Experiment Name: At_Germinating_Seeds_P Parameter: Tissue Value: Germinating Seeds
  misc_feature: MA Experiment ID: 20000224 Result: Up-regulated in Transcription
  misc_feature: MA Experiment ID: 20001557 Result: Up-regulated in Transcription
  misc_feature: MA Experiment 20001557 PARAMETER Experiment Name: At_Drought_Soil_Dry_P Parameter: Age (day) Value: 27
  misc_feature: MA Experiment 20001557 PARAMETER Experiment Name: At_Drought_Soil_Dry_P Parameter: Organism Value: A. thaliana
  misc_feature: MA Experiment 20001557 PARAMETER Experiment Name: At_Drought_Soil_Dry_P Parameter: Plant Line Value: WS
  misc_feature: MA Experiment 20001557 PARAMETER Experiment Name: At_Drought_Soil_Dry_P Parameter: Post Timepoint (hr) Value: 3
  misc_feature: MA Experiment 20001557 PARAMETER Experiment Name: At_Drought_Soil_Dry_P Parameter: Post-Treatment Value: Re-Water vs. No Drought
  misc_feature: MA Experiment 20001557 PARAMETER Experiment Name: At_Drought_Soil_Dry_P Parameter: Timepoint (day) Value: 13
  misc_feature: MA Experiment 20001557 PARAMETER Experiment Name: At_Drought_Soil_Dry_P Parameter: Treatment Value: Drought vs. No Drought
  misc_feature: MA Experiment ID: 20001558 Result: Up-regulated in Transcription
  misc_feature: MA Experiment 20001558 PARAMETER Experiment Name: At_Drought_Soil_Dry_P Parameter: Age (day) Value: 27
  misc_feature: MA Experiment 20001558 PARAMETER Experiment Name: At_Drought_Soil_Dry_P Parameter: Organism Value: A. thaliana
  misc_feature: MA Experiment 20001558 PARAMETER Experiment Name: At_Drought_Soil_Dry_P Parameter: Plant Line Value: WS
  misc_feature: MA Experiment 20001558 PARAMETER Experiment Name: At_Drought_Soil_Dry_P Parameter: Post Timepoint (hr) Value: 6
  misc_feature: MA Experiment 20001558 PARAMETER Experiment Name: At_Drought_Soil_Dry_P Parameter: Post-Treatment Value: Re-Water vs. No Drought
  misc_feature: MA Experiment 20001558 PARAMETER Experiment Name: At_Drought_Soil_Dry_P Parameter: Timepoint (day) Value: 13
  misc_feature: MA Experiment 20001558 PARAMETER Experiment Name: At_Drought_Soil_Dry_P Parameter: Treatment Value: Drought vs. No Drought
acaaaaaataaaaaaacgcctacctttaacttcgaattagggtttatcaggattcagtcgcctgctcacttgaatttcttcgcaagctcaaaaagttccgaaatttttgaaggaagatggtgaggccgtatgggattaaagtgaacaagagaaaggagagagaagagaggtatgataaggaagaagatgaagtagaggagcaaccaaagtttgagcaaaaacaaaaggcaagagaaagttcgaagaaagctaaaaaagaaagcacttcaagagcagaggaagataatgacgaggaggaagtaactgtggaagcaactgcagcagcagaggatattgtgggagggatacctattgtccttaatgctcctaacaaggaaaagtctggcattgtattcgtgcttgagaaggcctctcttgaagttgccaaagttggaaagacttaccagctactgaactcggatgatcatgctaatttcttgaaaaagaataacagaaatccggctgattaccgaccagacattactcatcaggcgcttcttatgattttggatagtccggttaataaagctgggaggttgaaagctgtttatgttagaacagaaaaaggtgtcctttttgaagttaagccacatgttcgtataccaagaactttcaaacgatttgccggaatcatgttgcaactgctacaaaagctgagcattactgcagttaacagccgtgagaagcttctacggtgtgtcaagaaccctatcgaagaacatcatctaccggttaactcccacagaataggcttctcgcatagctctgagaaactcgtcaatatgcagaaacacctagctactgtatgtgatgatgatagagacacagtttttgtggtaggcgcaatggcacacgggaaaatagactgcaactatatcgatgaatttgtgtcggtttcagagtatccattgagcgcagcctactgtatctcaagaatctgcgaggcattagcaacaaattggaatattatataaaagaatgattataaggtcctttgttttcctctctactgctctaatggtaggaactactttaagctatgttgttgtgatacacattgtttatctactatcgagtttataacttttcgtttgaaattttgactccactattttattcaaacgtaatataaagtaaaagaaagagatgttcctgtg

SEQ ID NO: 102929 - protein, 298 aa, Arabidopsis thaliana
  peptide (1)..(298): Ceres Seq. ID no. 13611556
  misc_feature (125)..(293): Pfam Name: Suppressor Mra1 Pfam Description: Suppressor Mra1
  misc_feature (1)..(298): Homolog of NCBI NO: 15230180 NR Description: expressed protein [Arabidopsis thaliana]
  misc_feature (1)..(298): Homolog of NCBI NO: 21593563 NR Description: unknown [Arabidopsis thaliana]
  misc_feature (91)..(298): Homolog of NCBI NO: 27713326 NR Description: similar to gene rich cluster, C2f gene [Mus
  misc_feature (91)..(298): Homolog of NCBI NO: 7305109 NR Description: gene rich cluster, C2f gene [Mus musculus] Probable ribosome biogenesis protein NEP1 (C2f protein) C2F [Mus musculus] >gi|12805095|gb|AAH02004.1| gene rich cluster,
  misc_feature (81)..(298): Homolog of NCBI NO: 2276396 NR Description: C2f [Homo sapiens]
  misc_feature (68)..(298): Homolog of NCBI NO: 6323215 NR Description: Essential for Mitotic Growth; Emg1p cerevisiae] >gi|20532165|sp|Q06287|NEP1_YEAST Nucleolar essential
  misc_feature (81)..(298): Homolog of NCBI NO: 24639698 NR Description: CG3527-PA [Drosophila melanogaster]
  misc_feature (86)..(298): Homolog of NCBI NO: 39591849 NR Description: Hypothetical protein CBG18338 [Caenorhabditis
  misc_feature (39)..(297): Homolog of NCBI NO: 20532182 NR Description: Nucleolar essential protein 1
  misc_feature (91)..(291): Homolog of NCBI NO: 19114583 NR Description: downstream factor of ras [Schizosaccharomyces >gi|6016598|sp|Q10107|MRA1_SCHPO Multicopy suppressor of ras1
MVRPYGIKVNKRKEREERYDKEEDEVEEQPKFEQKQKARESSKKAKKESTSRAEEDNDEEEVTVEATAAAEDIVGGIPIVLNAPNKEKSGIVFVLEKASLEVAKVGKTYQLLNSDDHANFLKKNNRNPADYRPDITHQALLMILDSPVNKAGRLKAVYVRTEKGVLFEVKPHVRIPRTFKRFAGIMLQLLQKLSITAVNSREKLLRCVKNPIEEHHLPVNSHRIGFSHSSEKLVNMQKHLATVCDDDRDTVFVVGAMAHGKIDCNYIDEFVSVSEYPLSAAYCISRICEALATNWNII

SEQ ID NO: 102930 - protein, 157 aa, Arabidopsis thaliana; identical to SEQ ID NO: 25228
  peptide (1)..(157): Ceres Seq. ID no. 13611557
  misc_feature (1)..(152): Pfam Name: Suppressor Mra1 Pfam Description: Suppressor Mra1
  misc_feature (1)..(157): Homolog of NCBI NO: 15230180 NR Description: expressed protein [Arabidopsis thaliana]
  misc_feature (1)..(157): Homolog of NCBI NO: 21593563 NR Description: unknown [Arabidopsis thaliana]
  misc_feature (1)..(157): Homolog of NCBI NO: 27713326 NR Description: similar to gene rich cluster, C2f gene [Mus
  misc_feature (1)..(157): Homolog of NCBI NO: 7305109 NR Description: gene rich cluster, C2f gene [Mus musculus] Probable ribosome biogenesis protein NEP1 (C2f protein) C2F [Mus musculus] >gi|12805095|gb|AAH02004.1| gene rich cluster,
  misc_feature (1)..(157): Homolog of NCBI NO: 2276396 NR Description: C2f [Homo sapiens]
  misc_feature (1)..(157): Homolog of NCBI NO: 6323215 NR Description: Essential for Mitotic Growth; Emg1p cerevisiae] >gi|20532165|sp|Q06287|NEP1_YEAST Nucleolar essential
  misc_feature (1)..(157): Homolog of NCBI NO: 24639698 NR Description: CG3527-PA [Drosophila melanogaster]
  misc_feature (1)..(157): Homolog of NCBI NO: 39591849 NR Description: Hypothetical protein CBG18338 [Caenorhabditis
  misc_feature (1)..(156): Homolog of NCBI NO: 20532182 NR Description: Nucleolar essential protein 1
  misc_feature (1)..(150): Homolog of NCBI NO: 19114583 NR Description: downstream factor of ras [Schizosaccharomyces >gi|6016598|sp|Q10107|MRA1_SCHPO Multicopy suppressor of ras1

SEQ ID NO: 102931 - DNA, 1354 bp, Arabidopsis thaliana
  misc_feature (1)..(1354): Ceres Seq. ID no. 13611558
  misc_feature: MA Experiment ID: 108435 Result: Down-regulated in Transcription
  misc_feature: MA Experiment 108435 PARAMETER Experiment Name: At_stm_Mutants_cDNA_P Parameter: Plant Line Value: wt Landsburg vs stm
  misc_feature: MA Experiment 108435 PARAMETER Experiment Name: At_stm_Mutants_cDNA_P Parameter: Tissue Value: Shoot Apical Meristem Region
  misc_feature: MA Experiment ID: 108461 Result: Up-regulated in Transcription
  misc_feature: MA Experiment 108461 PARAMETER Experiment Name: At_Germinating_Seeds_cDNA_P Parameter: Age (day) Value: 1 vs. 0
  misc_feature: MA Experiment 108461 PARAMETER Experiment Name: At_Germinating_Seeds_cDNA_P Parameter: Tissue Value: Germinating Seeds
  misc_feature: MA Experiment ID: 108462 Result: Up-regulated in Transcription
  misc_feature: MA Experiment 108462 PARAMETER Experiment Name: At_Germinating_Seeds_cDNA_P Parameter: Age (day) Value: 2 vs. 0
  misc_feature: MA Experiment 108462 PARAMETER Experiment Name: At_Germinating_Seeds_cDNA_P Parameter: Tissue Value: Germinating Seeds
  misc_feature: MA Experiment ID: 108463 Result: Up-regulated in Transcription
  misc_feature: MA Experiment 108463 PARAMETER Experiment Name: At_Germinating_Seeds_cDNA_P Parameter: Age (day) Value: 3 vs. 0
  misc_feature: MA Experiment 108463 PARAMETER Experiment Name: At_Germinating_Seeds_cDNA_P Parameter: Tissue Value: Germinating Seeds
  misc_feature: MA Experiment ID: 108464 Result: Up-regulated in Transcription
  misc_feature: MA Experiment 108464 PARAMETER Experiment Name: At_Germinating_Seeds_cDNA_P Parameter: Age (day) Value: 4 vs. 0
  misc_feature: MA Experiment 108464 PARAMETER Experiment Name: At_Germinating_Seeds_cDNA_P Parameter: Tissue Value: Germinating Seeds
  misc_feature: MA Experiment ID: 108561 Result: Up-regulated in Transcription
  misc_feature: MA Experiment 108561 PARAMETER Experiment Name: At_100uM_ABA_cDNA_P Parameter: Timepoint (hr) Value: 6
  misc_feature: MA Experiment 108561 PARAMETER Experiment Name: At_100uM_ABA_cDNA_P Parameter: Tissue Value: Aerial
  misc_feature: MA Experiment 108561 PARAMETER Experiment Name: At_100uM_ABA_cDNA_P Parameter: Treatment Value: 100uM ABA vs. No Treatment
  misc_feature: MA Experiment ID: 108573 Result: Up-regulated in Transcription
  misc_feature: MA Experiment 108573 PARAMETER Experiment Name: At_Drought_cDNA_P Parameter: Timepoint (hr) Value: 6
  misc_feature: MA Experiment 108573 PARAMETER Experiment Name: At_Drought_cDNA_P Parameter: Tissue Value: Aerial
  misc_feature: MA Experiment 108573 PARAMETER Experiment Name: At_Drought_cDNA_P Parameter: Treatment Value: Drought vs. No Drought
  misc_feature: MA Experiment ID: 108574 Result: Up-regulated in Transcription
  misc_feature: MA Experiment 108574 PARAMETER Experiment Name: At_Wounding__cDNA_P Parameter: Timepoint (hr) Value: 1
  misc_feature: MA Experiment 108574 PARAMETER Experiment Name: At_Wounding__cDNA_P Parameter: Tissue Value: Aerial
  misc_feature: MA Experiment 108574 PARAMETER Experiment Name: At_Wounding__cDNA_P Parameter: Treatment Value: Wounding vs. No Wounding
  misc_feature: MA Experiment ID: 108579 Result: Up-regulated in Transcription
  misc_feature: MA Experiment 108579 PARAMETER Experiment Name: At_4deg_Cold_cDNA_P Parameter: Temperature (deg C) Value: 4 vs. 22
  misc_feature: MA Experiment 108579 PARAMETER Experiment Name: At_4deg_Cold_cDNA_P Parameter: Timepoint (hr) Value: 6
  misc_feature: MA Experiment 108579 PARAMETER Experiment Name: At_4deg_Cold_cDNA_P Parameter: Tissue Value: Aerial
  misc_feature: MA Experiment ID: 108585 Result: Up-regulated in Transcription
  misc_feature: MA Experiment 108585 PARAMETER Experiment Name: At_5mM_NaNP_cDNA_P Parameter: Timepoint (hr) Value: 6
  misc_feature: MA Experiment 108585 PARAMETER Experiment Name: At_5mM_NaNP_cDNA_P Parameter: Tissue Value: Aerial
  misc_feature: MA Experiment 108585 PARAMETER Experiment Name: At_5mM_NaNP_cDNA_P Parameter: Treatment Value: null
  misc_feature: MA Experiment ID: 108594 Result: Down-regulated in Transcription
  misc_feature: MA Experiment 108594 PARAMETER Experiment Name: At_Ler-rhl_Root_cDNA_P Parameter: Plant Line Value: null
  misc_feature: MA Experiment ID: 108595 Result: Down-regulated in Transcription
  misc_feature: MA Experiment 108595 PARAMETER Experiment Name: At_Ler-pi_Ovule_cDNA_P Parameter: Plant Line Value: null
  misc_feature: MA Experiment ID: 108607 Result: Up-regulated in Transcription
  misc_feature: MA Experiment 108607 PARAMETER Experiment Name: At_100uM_ABA_cDNA_P Parameter: Timepoint (hr) Value: 4
  misc_feature: MA Experiment 108607 PARAMETER Experiment Name: At_100uM_ABA_cDNA_P Parameter: Tissue Value: Aerial
  misc_feature: MA Experiment 108607 PARAMETER Experiment Name: At_100uM_ABA_cDNA_P Parameter: Treatment Value: 100uM ABA vs. No Treatment
  misc_feature: MA Experiment ID: 108608 Result: Up-regulated in Transcription
  misc_feature: MA Experiment 108608 PARAMETER Experiment Name: At_100uM_ABA_cDNA_P Parameter: Timepoint (hr) Value: 1
  misc_feature: MA Experiment 108608 PARAMETER Experiment Name: At_100uM_ABA_cDNA_P Parameter: Tissue Value: Aerial
  misc_feature: MA Experiment 108608 PARAMETER Experiment Name: At_100uM_ABA_cDNA_P Parameter: Treatment Value: 100uM ABA vs. No Treatment
  misc_feature: MA Experiment ID: 108668 Result: Up-regulated in Transcription
  misc_feature: MA Experiment 108668 PARAMETER Experiment Name: At_2mM_SA_cDNA_P Parameter: Plant Line Value: WS
  misc_feature: MA Experiment 108668 PARAMETER Experiment Name: At_2mM_SA_cDNA_P Parameter: Timepoint (hr) Value: 6
  misc_feature: MA Experiment 108668 PARAMETER Experiment Name: At_2mM_SA_cDNA_P Parameter: Treatment Value: 2mM SA vs. No Treatment
  misc_feature: MA Experiment ID: 20000113 Result: Up-regulated in Transcription
  misc_feature: MA Experiment 20000113 PARAMETER Experiment Name: At_42deg_Heat_cDNA_P Parameter: Temperature (deg C) Value: 42 vs. 22
  misc_feature: MA Experiment 20000113 PARAMETER Experiment Name: At_42deg_Heat_cDNA_P Parameter: Timepoint (hr) Value: 8
  misc_feature: MA Experiment 20000113 PARAMETER Experiment Name: At_42deg_Heat_cDNA_P Parameter: Tissue Value: Aerial
  misc_feature: MA Experiment ID: 20000166 Result: Up-regulated in Transcription
  misc_feature: MA Experiment 20000166 PARAMETER Experiment Name: At_100uM_ABA_P Parameter: Age (day) Value: 14
  misc_feature: MA Experiment 20000166 PARAMETER Experiment Name: At_100uM_ABA_P Parameter: Organism Value: A. thaliana
  misc_feature: MA Experiment 20000166 PARAMETER Experiment Name: At_100uM_ABA_P Parameter: Plant Line Value: WS
  misc_feature: MA Experiment 20000166 PARAMETER Experiment Name: At_100uM_ABA_P Parameter: Timepoint (hr) Value: 1
  misc_feature: MA Experiment 20000166 PARAMETER Experiment Name: At_100uM_ABA_P Parameter: Tissue Value: Aerial
  misc_feature: MA Experiment 20000166 PARAMETER Experiment Name: At_100uM_ABA_P Parameter: Treatment Value: 100uM ABA vs. No Treatment
  misc_feature: MA Experiment ID: 20000179 Result: Up-regulated in Transcription
  misc_feature: MA Experiment 20000179 PARAMETER Experiment Name: At_Germinating_Seeds_P Parameter: Age (hr) Value: 6 vs. 0
  misc_feature: MA Experiment 20000179 PARAMETER Experiment Name: At_Germinating_Seeds_P Parameter: Tissue Value: Germinating Seeds
  misc_feature: MA Experiment ID: 20000180 Result: Up-regulated in Transcription
  misc_feature: MA Experiment 20000180 PARAMETER Experiment Name: At_Germinating_Seeds_P Parameter: Age (hr) Value: 24 vs. 0
  misc_feature: MA Experiment 20000180 PARAMETER Experiment Name: At_Germinating_Seeds_P Parameter: Tissue Value: Germinating Seeds
  misc_feature: MA Experiment ID: 20000182 Result: Up-regulated in Transcription
  misc_feature: MA Experiment 20000182 PARAMETER Experiment Name: At_2mM_SA_P Parameter: Age (day) Value: 14
  misc_feature: MA Experiment 20000182 PARAMETER Experiment Name: At_2mM_SA_P Parameter: Organism Value: A. thaliana
  misc_feature: MA Experiment 20000182 PARAMETER Experiment Name: At_2mM_SA_P Parameter: Plant Line Value: WS
  misc_feature: MA Experiment 20000182 PARAMETER Experiment Name: At_2mM_SA_P Parameter: Timepoint (hr) Value: 6
  misc_feature: MA Experiment 20000182 PARAMETER Experiment Name: At_2mM_SA_P Parameter: Tissue Value: Aerial
  misc_feature: MA Experiment 20000182 PARAMETER Experiment Name: At_2mM_SA_P Parameter: Treatment Value: 2mM SA vs. No Treatment
  misc_feature: MA Experiment ID: 20000184 Result: Up-regulated in Transcription
  misc_feature: MA Experiment 20000184 PARAMETER Experiment Name: At_Shoots__P Parameter: Age (day) Value: 7
  misc_feature: MA Experiment 20000184 PARAMETER Experiment Name: At_Shoots__P Parameter: Tissue Value: Shoots vs. Whole Plant
  misc_feature: MA Experiment ID: 20000185 Result: Up-regulated in Transcription
  misc_feature: MA Experiment 20000185 PARAMETER Experiment Name: At_Roots__P Parameter: Age (day) Value: 7 vs. 21
  misc_feature: MA Experiment 20000185 PARAMETER Experiment Name: At_Roots__P Parameter: Organism Value: A. thaliana
  misc_feature: MA Experiment 20000185 PARAMETER Experiment Name: At_Roots__P Parameter: Tissue Value: Roots vs. Whole Plant
  misc_feature: MA Experiment ID: 20000213 Result: Up-regulated in Transcription
  misc_feature: MA Experiment 20000213 PARAMETER Experiment Name: At_4deg_Cold_P Parameter: Timepoint (hr) Value: 2
  misc_feature: MA Experiment ID: 20000224 Result: Up-regulated in Transcription
  misc_feature: MA Experiment ID: 20000267 Result: Up-regulated in Transcription
  misc_feature: MA Experiment 20000267 PARAMETER Experiment Name: At_Drought_P Parameter: Age (day) Value: 7
  misc_feature: MA Experiment 20000267 PARAMETER Experiment Name: At_Drought_P Parameter: Organism Value: A. thaliana
  misc_feature: MA Experiment 20000267 PARAMETER Experiment Name: At_Drought_P Parameter: Plant Line Value: WS
  misc_feature: MA Experiment 20000267 PARAMETER Experiment Name: At_Drought_P Parameter: Timepoint (hr) Value: 6
  misc_feature: MA Experiment 20000267 PARAMETER Experiment Name: At_Drought_P Parameter: Tissue Value: Whole Plant
  misc_feature: MA Experiment 20000267 PARAMETER Experiment Name: At_Drought_P Parameter: Treatment Value: Drought vs. No Drought
  misc_feature: MA Experiment ID: 20000436 Result: Up-regulated in Transcription
  misc_feature: MA Experiment 20000436 PARAMETER Experiment Name: At_Drought_P Parameter: Age (day) Value: 7
  misc_feature: MA Experiment 20000436 PARAMETER Experiment Name: At_Drought_P Parameter: Organism Value: A. thaliana
  misc_feature: MA Experiment 20000436 PARAMETER Experiment Name: At_Drought_P Parameter: Plant Line Value: WS
  misc_feature: MA Experiment 20000436 PARAMETER Experiment Name: At_Drought_P Parameter: Timepoint (hr) Value: 12
  misc_feature: MA Experiment 20000436 PARAMETER Experiment Name: At_Drought_P Parameter: Tissue Value: Whole Plant
  misc_feature: MA Experiment 20000436 PARAMETER Experiment Name: At_Drought_P Parameter: Treatment Value: Drought vs. No Drought
  misc_feature: MA Experiment ID: 20000438 Result: Up-regulated in Transcription
  misc_feature: MA Experiment 20000438 PARAMETER Experiment Name: At_Shoots__P Parameter: Age (day) Value: 14
  misc_feature: MA Experiment 20000438 PARAMETER Experiment Name: At_Shoots__P Parameter: Tissue Value: Shoots vs. Whole Plant
  misc_feature: MA Experiment ID: 20000439 Result: Up-regulated in Transcription
  misc_feature: MA Experiment 20000439 PARAMETER Experiment Name: At_Roots__P Parameter: Age (day) Value: 14 vs. 21
  misc_feature: MA Experiment 20000439 PARAMETER Experiment Name: At_Roots__P Parameter: Organism Value: A. thaliana
  misc_feature: MA Experiment 20000439 PARAMETER Experiment Name: At_Roots__P Parameter: Tissue Value: Roots vs. Whole Plant
  misc_feature: MA Experiment ID: 20000441 Result: Up-regulated in Transcription
  misc_feature: MA Experiment 20000441 PARAMETER Experiment Name: At_1uM_BR-BRZ__P Parameter: Tissue Value: Shoot Apices
  misc_feature: MA Experiment 20000441 PARAMETER Experiment Name: At_1uM_BR-BRZ__P Parameter: Treatment Value: 1uM BR vs. No Treatment
  misc_feature: MA Experiment ID: 20000443 Result: Up-regulated in Transcription
  misc_feature: MA Experiment 20000443 PARAMETER Experiment Name: At_1uM_BR-BRZ__P Parameter: Tissue Value: Shoot Apices
  misc_feature: MA Experiment 20000443 PARAMETER Experiment Name: At_1uM_BR-BRZ__P Parameter: Treatment Value: 1uM BRZ vs. No Treatment
  misc_feature: MA Experiment ID: 20000453 Result: Up-regulated in Transcription
  misc_feature: MA Experiment 20000453 PARAMETER Experiment Name: At_100uM_ABA_P Parameter: Age (day) Value: 15
  misc_feature: MA Experiment 20000453 PARAMETER Experiment Name: At_100uM_ABA_P Parameter: Organism Value: A. thaliana
  misc_feature: MA Experiment 20000453 PARAMETER Experiment Name: At_100uM_ABA_P Parameter: Plant Line Value: WS
  misc_feature: MA Experiment 20000453 PARAMETER Experiment Name: At_100uM_ABA_P Parameter: Timepoint (hr) Value: 24
  misc_feature: MA Experiment 20000453 PARAMETER Experiment Name: At_100uM_ABA_P Parameter: Tissue Value: Aerial
  misc_feature: MA Experiment 20000453 PARAMETER Experiment Name: At_100uM_ABA_P Parameter: Treatment Value: 100uM ABA vs. No Treatment
  misc_feature: MA Experiment ID: 20000709 Result: Up-regulated in Transcription
  misc_feature: MA Experiment 20000709 PARAMETER Experiment Name: At_15mM_NH4NO3_L-to-H_P Parameter: Age (hr) Value: 14
  misc_feature: MA Experiment 20000709 PARAMETER Experiment Name: At_15mM_NH4NO3_L-to-H_P Parameter: Organism Value: A. thaliana
  misc_feature: MA Experiment 20000709 PARAMETER Experiment Name: At_15mM_NH4NO3_L-to-H_P Parameter: Plant Line Value: WS
  misc_feature: MA Experiment 20000709 PARAMETER Experiment Name: At_15mM_NH4NO3_L-to-H_P Parameter: Timepoint (hr) Value: 4
  misc_feature: MA Experiment 20000709 PARAMETER Experiment Name: At_15mM_NH4NO3_L-to-H_P Parameter: Tissue Value: Aerial
  misc_feature: MA Experiment 20000709 PARAMETER Experiment Name: At_15mM_NH4NO3_L-to-H_P Parameter: Treatment Value: 15mM NH4NO3 vs. 30mM Mannitol
  misc_feature: MA Experiment ID: 20001248 Result: Down-regulated in Transcription
  misc_feature: MA Experiment 20001248 PARAMETER Experiment Name: At_Far-red-induction_P Parameter: Age (day) Value: 7
  misc_feature: MA Experiment 20001248 PARAMETER Experiment Name: At_Far-red-induction_P Parameter: Light Value: Far-red vs. White
  misc_feature: MA Experiment 20001248 PARAMETER Experiment Name: At_Far-red-induction_P Parameter: Organism Value: A. thaliana
  misc_feature: MA Experiment 20001248 PARAMETER Experiment Name: At_Far-red-induction_P Parameter: Plant Line Value: Columbia
  misc_feature: MA Experiment 20001248 PARAMETER Experiment Name: At_Far-red-induction_P Parameter: Timepoint (hr) Value: 4
  misc_feature: MA Experiment 20001248 PARAMETER Experiment Name: At_Far-red-induction_P Parameter: Tissue Value: Whole Plant
  misc_feature: MA Experiment ID: 20001451 Result: Up-regulated in Transcription
  misc_feature: MA Experiment 20001451 PARAMETER Experiment Name: At_Far-red-induction_P Parameter: Age (day) Value: 7
  misc_feature: MA Experiment 20001451 PARAMETER Experiment Name: At_Far-red-induction_P Parameter: Light Value: Far-red vs. White
  misc_feature: MA Experiment 20001451 PARAMETER Experiment Name: At_Far-red-induction_P Parameter: Organism Value: A. thaliana
  misc_feature: MA Experiment 20001451 PARAMETER Experiment Name: At_Far-red-induction_P Parameter: Plant Line Value: Columbia
  misc_feature: MA Experiment 20001451 PARAMETER Experiment Name: At_Far-red-induction_P Parameter: Timepoint (hr) Value: 24
  misc_feature: MA Experiment 20001451 PARAMETER Experiment Name: At_Far-red-induction_P Parameter: Tissue Value: Whole Plant
  misc_feature: MA Experiment ID: 20001503 Result: Up-regulated in Transcription
  misc_feature: MA Experiment 20001503 PARAMETER Experiment Name: At_Far-red-enriched_P Parameter: Age (day) Value: 7
  misc_feature: MA Experiment 20001503 PARAMETER Experiment Name: At_Far-red-enriched_P Parameter: Light Value: Far-red enriched vs. White
  misc_feature: MA Experiment 20001503 PARAMETER Experiment Name: At_Far-red-enriched_P Parameter: Organism Value: A. thaliana
  misc_feature: MA Experiment 20001503 PARAMETER Experiment Name: At_Far-red-enriched_P Parameter: Plant Line Value: Columbia
  misc_feature: MA Experiment 20001503 PARAMETER Experiment Name: At_Far-red-enriched_P Parameter: Timepoint (day) Value: 3
  misc_feature: MA Experiment 20001503 PARAMETER Experiment Name: At_Far-red-enriched_P Parameter: Tissue Value: Whole Plant
  misc_feature: MA Experiment ID: 20001554 Result: Up-regulated in Transcription
  misc_feature: MA Experiment 20001554 PARAMETER Experiment Name: At_Drought_Soil_Dry_P Parameter: Age (day) Value: 21
  misc_feature: MA Experiment 20001554 PARAMETER Experiment Name: At_Drought_Soil_Dry_P Parameter: Organism Value: A. thaliana
  misc_feature: MA Experiment 20001554 PARAMETER Experiment Name: At_Drought_Soil_Dry_P Parameter: Plant Line Value: WS
  misc_feature: MA Experiment 20001554 PARAMETER Experiment Name: At_Drought_Soil_Dry_P Parameter: Post Timepoint (hr) Value: None
  misc_feature: MA Experiment 20001554 PARAMETER Experiment Name: At_Drought_Soil_Dry_P Parameter: Post-Treatment Value: None
  misc_feature: MA Experiment 20001554 PARAMETER Experiment Name: At_Drought_Soil_Dry_P Parameter: Timepoint (day) Value: 7
  misc_feature: MA Experiment 20001554 PARAMETER Experiment Name: At_Drought_Soil_Dry_P Parameter: Treatment Value: Drought vs. No Drought
  misc_feature: MA Experiment ID: 20001559 Result: Up-regulated in Transcription
  misc_feature: MA Experiment 20001559 PARAMETER Experiment Name: At_Drought_Soil_Dry_P Parameter: Age (day) Value: 28
  misc_feature: MA Experiment 20001559 PARAMETER Experiment Name: At_Drought_Soil_Dry_P Parameter: Organism Value: A. thaliana
  misc_feature: MA Experiment 20001559 PARAMETER Experiment Name: At_Drought_Soil_Dry_P Parameter: Plant Line Value: WS
  misc_feature: MA Experiment 20001559 PARAMETER Experiment Name: At_Drought_Soil_Dry_P Parameter: Post Timepoint (hr) Value: 29
  misc_feature: MA Experiment 20001559 PARAMETER Experiment Name: At_Drought_Soil_Dry_P Parameter: Post-Treatment Value: Re-Water vs. No Drought
  misc_feature: MA Experiment 20001559 PARAMETER Experiment Name: At_Drought_Soil_Dry_P Parameter: Timepoint (day) Value: 14
  misc_feature: MA Experiment 20001559 PARAMETER Experiment Name: At_Drought_Soil_Dry_P Parameter: Treatment Value: Drought vs. No Drought
  misc_feature: MA Experiment ID: 20001771 Result: Up-regulated in Transcription
  misc_feature: MA Experiment 20001771 PARAMETER Experiment Name: At_Far-red-enriched-adult_P Parameter: Age (day) Value: 28
  misc_feature: MA Experiment 20001771 PARAMETER Experiment Name: At_Far-red-enriched-adult_P Parameter: Light Value: Far-red enriched vs. White
  misc_feature: MA Experiment 20001771 PARAMETER Experiment Name: At_Far-red-enriched-adult_P Parameter: Organism Value: A. thaliana
  misc_feature: MA Experiment 20001771 PARAMETER Experiment Name: At_Far-red-enriched-adult_P Parameter: Plant Line Value: Columbia
  misc_feature: MA Experiment 20001771 PARAMETER Experiment Name: At_Far-red-enriched-adult_P Parameter: Timepoint (hr) Value: 16
  misc_feature: MA Experiment 20001771 PARAMETER Experiment Name: At_Far-red-enriched-adult_P Parameter: Tissue Value: Aerial
  misc_feature: MA Experiment ID: 20001904 Result: Up-regulated in Transcription
  misc_feature: MA Experiment 20001904 PARAMETER Experiment Name: At_Drought_Reproduction_P Parameter: Age (day) Value: 37
  misc_feature: MA Experiment 20001904 PARAMETER Experiment Name: At_Drought_Reproduction_P Parameter: Organism Value: A. thaliana
  misc_feature: MA Experiment 20001904 PARAMETER Experiment Name: At_Drought_Reproduction_P Parameter: Plant Line Value: WS
  misc_feature: MA Experiment 20001904 PARAMETER Experiment Name: At_Drought_Reproduction_P Parameter: Timepoint (day) Value: 7
  misc_feature: MA Experiment 20001904 PARAMETER Experiment Name: At_Drought_Reproduction_P Parameter: Tissue Value: Rosettes
  misc_feature: MA Experiment 20001904 PARAMETER Experiment Name: At_Drought_Reproduction_P Parameter: Treatment Value: Drought vs. No Drought
  misc_feature: MA Experiment ID: 20001905 Result: Up-regulated in Transcription
  misc_feature: MA Experiment 20001905 PARAMETER Experiment Name: At_Drought_Reproduction_P Parameter: Age (day) Value: 40
  misc_feature: MA Experiment 20001905 PARAMETER Experiment Name: At_Drought_Reproduction_P Parameter: Organism Value: A. thaliana
  misc_feature: MA Experiment 20001905 PARAMETER Experiment Name: At_Drought_Reproduction_P Parameter: Plant Line Value: WS
  misc_feature: MA Experiment 20001905 PARAMETER Experiment Name: At_Drought_Reproduction_P Parameter: Timepoint (day) Value: 10
  misc_feature: MA Experiment 20001905 PARAMETER Experiment Name: At_Drought_Reproduction_P Parameter: Tissue Value: Rosettes
  misc_feature: MA Experiment 20001905 PARAMETER Experiment Name: At_Drought_Reproduction_P Parameter: Treatment Value: Drought vs. No Drought
  misc_feature: MA Experiment ID: 20001906 Result: Up-regulated in Transcription
  misc_feature: MA Experiment 20001906 PARAMETER Experiment Name: At_Drought_Reproduction_P Parameter: Age (day) Value: 35
  misc_feature: MA Experiment 20001906 PARAMETER Experiment Name: At_Drought_Reproduction_P Parameter: Organism Value: A. thaliana
  misc_feature: MA Experiment 20001906 PARAMETER Experiment Name: At_Drought_Reproduction_P Parameter: Plant Line Value: WS
  misc_feature: MA Experiment 20001906 PARAMETER Experiment Name: At_Drought_Reproduction_P Parameter: Timepoint (day) Value: 5
  misc_feature: MA Experiment 20001906 PARAMETER Experiment Name: At_Drought_Reproduction_P Parameter: Tissue Value: Siliques
  misc_feature: MA Experiment 20001906 PARAMETER Experiment Name: At_Drought_Reproduction_P Parameter: Treatment Value: Drought vs. No Drought
  misc_feature: MA Experiment ID: 20001908 Result: Up-regulated in Transcription
  misc_feature: MA Experiment 20001908 PARAMETER Experiment Name: At_Drought_Reproduction_P Parameter: Age (day) Value: 40
  misc_feature: MA Experiment 20001908 PARAMETER Experiment Name: At_Drought_Reproduction_P Parameter: Organism Value: A. thaliana
  misc_feature: MA Experiment 20001908 PARAMETER Experiment Name: At_Drought_Reproduction_P Parameter: Plant Line Value: WS
  misc_feature: MA Experiment 20001908 PARAMETER Experiment Name: At_Drought_Reproduction_P Parameter: Timepoint (day) Value: 10
  misc_feature: MA Experiment 20001908 PARAMETER Experiment Name: At_Drought_Reproduction_P Parameter: Tissue Value: Siliques
  misc_feature: MA Experiment 20001908 PARAMETER Experiment Name: At_Drought_Reproduction_P Parameter: Treatment Value: Drought vs. No Drought
  misc_feature: MA Experiment ID: 20001910 Result: Up-regulated in Transcription
  misc_feature: MA Experiment 20001910 PARAMETER Experiment Name: At_Drought_Reproduction_P Parameter: Age (day) Value: 37
  misc_feature: MA Experiment 20001910 PARAMETER Experiment Name: At_Drought_Reproduction_P Parameter: Organism Value: A. thaliana
  misc_feature: MA Experiment 20001910 PARAMETER Experiment Name: At_Drought_Reproduction_P Parameter: Plant Line Value: WS
  misc_feature: MA Experiment 20001910 PARAMETER Experiment Name: At_Drought_Reproduction_P Parameter: Timepoint (day) Value: 7
  misc_feature: MA Experiment 20001910 PARAMETER Experiment Name: At_Drought_Reproduction_P Parameter: Tissue Value: Flowers
  misc_feature: MA Experiment 20001910 PARAMETER Experiment Name: At_Drought_Reproduction_P Parameter: Treatment Value: Drought vs. No Drought
  misc_feature: MA Experiment ID: 20001911 Result: Up-regulated in Transcription
  misc_feature: MA Experiment 20001911 PARAMETER Experiment Name: At_Drought_Reproduction_P Parameter: Age (day) Value: 40
  misc_feature: MA Experiment 20001911 PARAMETER Experiment Name: At_Drought_Reproduction_P Parameter: Organism Value: A. thaliana
  misc_feature: MA Experiment 20001911 PARAMETER Experiment Name: At_Drought_Reproduction_P Parameter: Plant Line Value: WS
  misc_feature: MA Experiment 20001911 PARAMETER Experiment Name: At_Drought_Reproduction_P Parameter: Timepoint (day) Value: 10
  misc_feature: MA Experiment 20001911 PARAMETER Experiment Name: At_Drought_Reproduction_P Parameter: Tissue Value: Flowers
  misc_feature: MA Experiment 20001911 PARAMETER Experiment Name: At_Drought_Reproduction_P Parameter: Treatment Value: Drought vs. No Drought
atacataccaacagtcaacaatatctcttgttccggcggaaaaatgcccattaatcagaaaattccgacttggtttgccgttccggctgtttttgctgtcttgtccgtaatctcgtatcaaaccttaattgtgccggaaaatttagagggcgccaaaaatgtattgacaatggctaagaccataccaattcctgtcgctggaccggagagcattgagtttgacccaaaaggagaaggtccttatgctgcggtcgtggacggccgtattctcaagtggcgcggcgatgatctcggctgggttgattttgcctacacatctcctcacagagggaactgttcaaaaactgaagtagtgcctacttgtggaaggccattaggacttactttcgagaagaaaacgggagatttgtacatatgtgatggttacttggggctcatgaaagttggaccagagggaggcttggccgagttaattgttgatgaagccgaaggtcgtaaagttatgtttgctaaccaaggggatatagacgaagaggaagatgtcttttacttcaatgatagtagtgacaagtatcatttcagggacgtatttttcgtggctgtcagtggggagcggtcgggaagagtgatcagatacgataagaagacgaaagaagccaaagttatcatggacaatctcgtttgtaacaacggtttggctctaaacaaagaccggtcttttctaattacatgcgagtccggcacaagtcttgtccaccgatactggattaaaggtcccaaagccgggactcgtgatatctttgcgaaggtcccaggttaccctgacaacatccggctgacatcaactggagacttttggattggtttacactgcaagaaaaatctgatagggagattgattgtgaagtacaaatggcttgggaaattggtagaaaagacaatgaaactggagtacgtgattgcttttattaacggatttaaaccgcacggagtcgccgtgaaaatctccggcgagacgggagaggtacttgagttacttgaggacaaagaaggaaagacaatgaagtatgtaagcgaggcttatgaaagagatgatggaaagttgtggtttgggtctgtttactggccagccgtttgggttcttgatcgcaaatgagtgatcatgttgtatctacttataattatgttcgttttgtatattaataaatgtttatctgagttaaatcagcatttgtttgttgcgggaaaataaatgtgaatcctactttttcaaattgttttttttttctttgtattaatgctcccaagatgtttattgaactgaacacactagaatgaattatagcttttgtaa

SEQ ID NO: 102932 - protein, 384 aa, Arabidopsis thaliana
  peptide (1)..(384): Ceres Seq. ID no. 13611559
  misc_feature (65)..(378): Pfam Name: Strictosidine synthase Pfam Description: Strictosidine synthase
  misc_feature (15)..(384): Homolog of NCBI NO: 15230200 NR Description: strictosidine synthase-related [Arabidopsis
  misc_feature (15)..(382): Homolog of NCBI NO: 15230182 NR Description: strictosidine synthase-related [Arabidopsis
  misc_feature (15)..(382): Homolog of NCBI NO: 13877837 NR Description: unknown protein [Arabidopsis thaliana]
  misc_feature (42)..(382): Homolog of NCBI NO: 6759491 NR Description: hypothetical protein [Arabidopsis thaliana]
  misc_feature (74)..(384): Homolog of NCBI NO: 15227324 NR Description: strictosidine synthase-related [Arabidopsis
  misc_feature (27)..(382): Homolog of NCBI NO: 11280567 NR Description: hypothetical protein F24I3.110 - Arabidopsis >gi|6911873|emb|CAB72173.1| putative protein [Arabidopsis
  misc_feature (27)..(382): Homolog of NCBI NO: 30694556 NR Description: strictosidine synthase-related [Arabidopsis
  misc_feature (65)..(382): Homolog of NCBI NO: 18390900 NR Description: strictosidine synthase-related [Arabidopsis >gi|16930481|gb|AAL31926.1|AF419594_1 At1g08470/T27G7_9 thaliana] >gi|17381182|gb|AAL36403.1| unknown protein
  misc_feature (65)..(254): Homolog of NCBI NO: 25335889 NR Description: protein T27G7.16 [imported] - Arabidopsis >gi|6664319|gb|AAF22901.1|AC006932_18 T27G7.16 [Arabidopsis
  misc_feature (251)..(382): Homolog of NCBI NO: 25335889 NR Description: protein T27G7.16 [imported] - Arabidopsis >gi|6664319|gb|AAF22901.1|AC006932_18 T27G7.16 [Arabidopsis
YIPTVNNISCSGGKMPINQKIPTWFAVPAVFAVLSVISYQTLIVPENLEGAKNVLTMAKTIPIPVAGPESIEFDPKGEGPYAAVVDGRILKWRGDDLGWVDFAYTSPHRGNCSKTEVVPTCGRPLGLTFEKKTGDLYICDGYLGLMKVGPEGGLAELIVDEAEGRKVMFANQGDIDEEEDVFYFNDSSDKYHFRDVFFVAVSGERSGRVIRYDKKTKEAKVIMDNLVCNNGLALNKDRSFLITCESGTSLVHRYWIKGPKAGTRDIFAKVPGYPDNIRLTSTGDFWIGLHCKKNLIGRLIVKYKWLGKLVEKTMKLEYVIAFINGFKPHGVAVKISGETGEVLELLEDKEGKTMKYVSEAYERDDGKLWFGSVYWPAVWVLDRK

SEQ ID NO: 102933 - protein, 370 aa, Arabidopsis thaliana
  peptide (1)..(370): Ceres Seq. ID no. 13611560
  misc_feature (51)..(364): Pfam Name: Strictosidine synthase Pfam Description: Strictosidine synthase
  misc_feature (1)..(370): Homolog of NCBI NO: 15230200 NR Description: strictosidine synthase-related [Arabidopsis
  misc_feature (1)..(368): Homolog of NCBI NO: 15230182 NR Description: strictosidine synthase-related [Arabidopsis
  misc_feature (1)..(368): Homolog of NCBI NO: 13877837 NR Description: unknown protein [Arabidopsis thaliana]
  misc_feature (28)..(368): Homolog of NCBI NO: 6759491 NR Description: hypothetical protein [Arabidopsis thaliana]
  misc_feature (60)..(370): Homolog of NCBI NO: 15227324 NR Description: strictosidine synthase-related [Arabidopsis
  misc_feature (13)..(368): Homolog of NCBI NO: 11280567 NR Description: hypothetical protein F24I3.110 - Arabidopsis >gi|6911873|emb|CAB72173.1| putative protein [Arabidopsis
  misc_feature (13)..(368): Homolog of NCBI NO: 30694556 NR Description: strictosidine synthase-related [Arabidopsis
  misc_feature (51)..(368): Homolog of NCBI NO: 18390900 NR Description: strictosidine synthase-related [Arabidopsis >gi|16930481|gb|AAL31926.1|AF419594_1 At1g08470/T27G7_9 thaliana] >gi|17381182|gb|AAL36403.1| unknown protein
  misc_feature (51)..(240): Homolog of NCBI NO: 25335889 NR Description: protein T27G7.16 [imported] - Arabidopsis >gi|6664319|gb|AAF22901.1|AC006932_18 T27G7.16 [Arabidopsis
  misc_feature (237)..(368): Homolog of NCBI NO: 25335889 NR Description: protein T27G7.16 [imported] - Arabidopsis >gi|6664319|gb|AAF22901.1|AC006932_18 T27G7.16 [Arabidopsis
MPINQKIPTWFAVPAVFAVLSVISYQTLIVPENLEGAKNVLTMAKTIPIPVAGPESIEFDPKGEGPYAAVVDGRILKWRGDDLGWVDFAYTSPHRGNCSKTEVVPTCGRPLGLTFEKKTGDLYICDGYLGLMKVGPEGGLAELIVDEAEGRKVMFANQGDIDEEEDVFYFNDSSDKYHFRDVFFVAVSGERSGRVIRYDKKTKEAKVIMDNLVCNNGLALNKDRSFLITCESGTSLVHRYWIKGPKAGTRDIFAKVPGYPDNIRLTSTGDFWIGLHCKKNLIGRLIVKYKWLGKLVEKTMKLEYVIAFINGFKPHGVAVKISGETGEVLELLEDKEGKTMKYVSEAYERDDGKLWFGSVYWPAVWVLDRK

SEQ ID NO: 102934 - protein, 328 aa, Arabidopsis thaliana
  peptide (1)..(328): Ceres Seq. ID no. 13611561
  misc_feature (9)..(322): Pfam Name: Strictosidine synthase Pfam Description: Strictosidine synthase
  misc_feature (1)..(328): Homolog of NCBI NO: 15230200 NR Description: strictosidine synthase-related [Arabidopsis
  misc_feature (1)..(326): Homolog of NCBI NO: 15230182 NR Description: strictosidine synthase-related [Arabidopsis
  misc_feature (1)..(326): Homolog of NCBI NO: 13877837 NR Description: unknown protein [Arabidopsis thaliana]
  misc_feature (1)..(326): Homolog of NCBI NO: 6759491 NR Description: hypothetical protein [Arabidopsis thaliana]
  misc_feature (18)..(328): Homolog of NCBI NO: 15227324 NR Description: strictosidine synthase-related [Arabidopsis
  misc_feature (1)..(326): Homolog of NCBI NO: 11280567 NR Description: hypothetical protein F24I3.110 - Arabidopsis >gi|6911873|emb|CAB72173.1| putative protein [Arabidopsis
  misc_feature (1)..(326): Homolog of NCBI NO: 30694556 NR Description: strictosidine synthase-related [Arabidopsis
  misc_feature (9)..(326): Homolog of NCBI NO: 18390900 NR Description: strictosidine synthase-related [Arabidopsis >gi|16930481|gb|AAL31926.1|AF419594_1 At1g08470/T27G7_9 thaliana] >gi|17381182|gb|AAL36403.1| unknown protein
  misc_feature (9)..(198): Homolog of NCBI NO: 25335889 NR Description: protein T27G7.16 [imported] - Arabidopsis >gi|6664319|gb|AAF22901.1|AC006932_18 T27G7.16 [Arabidopsis
  misc_feature (195)..(326): Homolog of NCBI NO: 25335889 NR Description: protein T27G7.16 [imported] - Arabidopsis >gi|6664319|gb|AAF22901.1|AC006932_18 T27G7.16 [Arabidopsis
MAKTIPIPVAGPESIEFDPKGEGPYAAVVDGRILKWRGDDLGWVDFAYTSPHRGNCSKTEVVPTCGRPLGLTFEKKTGDLYICDGYLGLMKVGPEGGLAELIVDEAEGRKVMFANQGDIDEEEDVFYFNDSSDKYHFRDVFFVAVSGERSGRVIRYDKKTKEAKVIMDNLVCNNGLALNKDRSFLITCESGTSLVHRYWIKGPKAGTRDIFAKVPGYPDNIRLTSTGDFWIGLHCKKNLIGRLIVKYKWLGKLVEKTMKLEYVIAFINGFKPHGVAVKISGETGEVLELLEDKEGKTMKYVSEAYERDDGKLWFGSVYWPAVWVLDRK

SEQ ID NO: 102935 - DNA, 748 bp, Arabidopsis thaliana
  misc_feature (1)..(748): Ceres Seq. ID no. 13611566
  misc_feature: MA Experiment ID: 108434 Result: Up-regulated in Transcription
  misc_feature: MA Experiment 108434 PARAMETER Experiment Name: At_Root_Tips_cDNA_P Parameter: Tissue Value: Root Tips
  misc_feature: MA Experiment ID: 108573 Result: Down-regulated in Transcription
  misc_feature: MA Experiment 108573 PARAMETER Experiment Name: At_Drought_cDNA_P Parameter: Timepoint (hr) Value: 6
  misc_feature: MA Experiment 108573 PARAMETER Experiment Name: At_Drought_cDNA_P Parameter: Tissue Value: Aerial
  misc_feature: MA Experiment 108573 PARAMETER Experiment Name: At_Drought_cDNA_P Parameter: Treatment Value: Drought vs. No Drought
  misc_feature: MA Experiment ID: 20000227 Result: Down-regulated in Transcription
  misc_feature: MA Experiment 20000227 PARAMETER Experiment Name: At_Root-Tips-vs-Tops_P Parameter: Tissue Value: Root Tips vs. Root Tops
  misc_feature: MA Experiment ID: 20000437 Result: Down-regulated in Transcription
  misc_feature: MA Experiment 20000437 PARAMETER Experiment Name: At_Drought_P Parameter: Age (day) Value: 8
  misc_feature: MA Experiment 20000437 PARAMETER Experiment Name: At_Drought_P Parameter: Organism Value: A. thaliana
  misc_feature: MA Experiment 20000437 PARAMETER Experiment Name: At_Drought_P Parameter: Plant Line Value: WS
  misc_feature: MA Experiment 20000437 PARAMETER Experiment Name: At_Drought_P Parameter: Timepoint (hr) Value: 24
  misc_feature: MA Experiment 20000437 PARAMETER Experiment Name: At_Drought_P Parameter: Tissue Value: Whole Plant
  misc_feature: MA Experiment 20000437 PARAMETER Experiment Name: At_Drought_P Parameter: Treatment Value: Drought vs. No Drought
  misc_feature: MA Experiment ID: 20000496 Result: Up-regulated in Transcription
  misc_feature: MA Experiment 20000496 PARAMETER Experiment Name: At_Guard_Cells_P Parameter: Harvest Date Value: 7/19/2002
  misc_feature: MA Experiment 20000496 PARAMETER Experiment Name: At_Guard_Cells_P Parameter: Organism Value: Canola
  misc_feature: MA Experiment 20000496 PARAMETER Experiment Name: At_Guard_Cells_P Parameter: Tissue Value: Guard Cells vs. Leaves
  misc_feature: MA Experiment ID: 20001905 Result: Down-regulated in Transcription
  misc_feature: MA Experiment 20001905 PARAMETER Experiment Name: At_Drought_Reproduction_P Parameter: Age (day) Value: 40
  misc_feature: MA Experiment 20001905 PARAMETER Experiment Name: At_Drought_Reproduction_P Parameter: Organism Value: A. thaliana
  misc_feature: MA Experiment 20001905 PARAMETER Experiment Name: At_Drought_Reproduction_P Parameter: Plant Line Value: WS
  misc_feature: MA Experiment 20001905 PARAMETER Experiment Name: At_Drought_Reproduction_P Parameter: Timepoint (day) Value: 10
  misc_feature: MA Experiment 20001905 PARAMETER Experiment Name: At_Drought_Reproduction_P Parameter: Tissue Value: Rosettes
  misc_feature: MA Experiment 20001905 PARAMETER Experiment Name: At_Drought_Reproduction_P Parameter: Treatment Value: Drought vs. No Drought
agataagggagacaaaaatggaagtgaaagggaaagagacagcttcggttctgtgtctgagcaaatacgtggatctatcgagtgaagagagtcatagatactatcttgcgcggcgaaatggcttgcagatgctccgagacagaggctacgaagtctccgacgaagatatcaatctctcccttcacgattttcgaactgtttacggtgaacgtcccgatgttgatcgtcttcgcatctccgctctgcatcgctccgattctaccaaaaaggtaaaaattgtcttttttggtactagtatggttaaagtcaacgcaatccgcagtgtagtagcggatatacttagccaagaaaccataactgggctgatattggttctgcaaaaccatgtaaccaatcaagccttgaaagccattgaacttttttctttcaaggtcgagatattccagataacggatctgctagtcaacataaccaaacattcactgaagccacaacatcaggtgttgaatgatgaagagaagacaacacttctcaagaagttcagcattgaggaaaaacagcttcctcggatttcaaagaaagatgctatcgtccggtactacggattagagaaagggcaagttgtgaaggtgaattacagaggcgaactcacggaatcgcatgttgccttccgatgtgtgtggtgaagaaaccaattaaaaaccatcttgtgtacttattttcaggaaaaaataacttgtatgtttct

SEQ ID NO: 102936 - protein, 227 aa, Arabidopsis thaliana
  peptide (1)..(227): Ceres Seq. ID no. 13611567
  misc_feature (23)..(113): Pfam Name: RNA polymerase Rpb5, N-terminal domain Pfam Description: RNA polymerase Rpb5, N-terminal domain
  misc_feature (6)..(227): Homolog of NCBI NO: 15230206 NR Description: eukaryotic rpb5 RNA polymerase subunit family
  misc_feature (6)..(227): Homolog of NCBI NO: 21617912 NR Description: putative DNA-directed RNA polymerase 23kD subunit
  misc_feature (6)..(226): Homolog of NCBI NO: 15227327 NR Description: eukaryotic rpb5 RNA polymerase subunit family
  misc_feature (6)..(227): Homolog of NCBI NO: 8896071 NR Description: RPB5d [Brassica napus]
  misc_feature (18)..(226): Homolog of NCBI NO: 15232524 NR Description: eukaryotic rpb5 RNA polymerase subunit family
  misc_feature (26)..(226): Homolog of NCBI NO: 38344231 NR Description: OJ991113_30.8 [Oryza sativa (japonica
  misc_feature (25)..(226): Homolog of NCBI NO: 15228724 NR Description: DNA-directed RNA polymerase (RNA polymerase),
  misc_feature (28)..(226): Homolog of NCBI NO: 28497750 NR Description: polymerase (RNA) II (DNA directed) polypeptide E musculus] >gi|28374319|gb|AAH45521.1| Polr2e protein [Mus
  misc_feature (28)..(226): Homolog of NCBI NO: 1173134 NR Description: DNA-directed RNA polymerase II 23 kDa polypeptide
  misc_feature (28)..(226): Homolog of NCBI NO: 14589951 NR Description: DNA directed RNA polymerase II polypeptide E; (RNA) II (DNA directed) polypeptide E (25kD); DNA directed RNA II 23 kda polypeptide [Homo sapiens] >gi|678549|gb|AAA62401.1|
IRETKMEVKGKETASVLCLSKYVDLSSEESHRYYLARRNGLQMLRDRGYEVSDEDINLSLHDFRTVYGERPDVDRLRISALHRSDSTKKVKIVFFGTSMVKVNAIRSVVADILSQETITGLILVLQNHVTNQALKAIELFSFKVEIFQITDLLVNITKHSLKPQHQVLNDEEKTTLLKKFSIEEKQLPRISKKDAIVRYYGLEKGQVVKVNYRGELTESHVAFRCVW

SEQ ID NO: 102937 - protein, 222 aa, Arabidopsis thaliana; identical to SEQ ID NO: 28138
  peptide (1)..(222): Ceres Seq. ID no. 13611568
  misc_feature (18)..(108): Pfam Name: RNA polymerase Rpb5, N-terminal domain Pfam Description: RNA polymerase Rpb5, N-terminal domain
  misc_feature (1)..(222): Homolog of NCBI NO: 15230206 NR Description: eukaryotic rpb5 RNA polymerase subunit family
  misc_feature (1)..(222): Homolog of NCBI NO: 21617912 NR Description: putative DNA-directed RNA polymerase 23kD subunit
  misc_feature (1)..(221): Homolog of NCBI NO: 15227327 NR Description: eukaryotic rpb5 RNA polymerase subunit family
  misc_feature (1)..(222): Homolog of NCBI NO: 8896071 NR Description: RPB5d [Brassica napus]
  misc_feature (13)..(221): Homolog of NCBI NO: 15232524 NR Description: eukaryotic rpb5 RNA polymerase subunit family
  misc_feature (21)..(221): Homolog of NCBI NO: 38344231 NR Description: OJ991113_30.8 [Oryza sativa (japonica
  misc_feature (20)..(221): Homolog of NCBI NO: 15228724 NR Description: DNA-directed RNA polymerase (RNA polymerase),
  misc_feature (23)..(221): Homolog of NCBI NO: 28497750 NR Description: polymerase (RNA) II (DNA directed) polypeptide E musculus] >gi|28374319|gb|AAH45521.1| Polr2e protein [Mus
  misc_feature (23)..(221): Homolog of NCBI NO: 1173134 NR Description: DNA-directed RNA polymerase II 23 kDa polypeptide
  misc_feature (23)..(221): Homolog of NCBI NO: 14589951 NR Description: DNA directed RNA polymerase II polypeptide E; (RNA) II (DNA directed) polypeptide E (25kD); DNA directed RNA II 23 kda polypeptide [Homo sapiens] >gi|678549|gb|AAA62401.1|

SEQ ID NO: 102938 - protein, 185 aa, Arabidopsis thaliana; identical to SEQ ID NO: 28139
  peptide (1)..(185): Ceres Seq. ID no. 13611569
  misc_feature (1)..(71): Pfam Name: RNA polymerase Rpb5, N-terminal domain Pfam Description: RNA polymerase Rpb5, N-terminal domain
  misc_feature (1)..(185): Homolog of NCBI NO: 15230206 NR Description: eukaryotic rpb5 RNA polymerase subunit family
  misc_feature (1)..(185): Homolog of NCBI NO: 21617912 NR Description: putative DNA-directed RNA polymerase 23kD subunit
  misc_feature (1)..(184): Homolog of NCBI NO: 15227327 NR Description: eukaryotic rpb5 RNA polymerase subunit family
  misc_feature (1)..(185): Homolog of NCBI NO: 8896071 NR Description: RPB5d [Brassica napus]
  misc_feature (1)..(184): Homolog of NCBI NO: 15232524 NR Description: eukaryotic rpb5 RNA polymerase subunit family
  misc_feature (1)..(184): Homolog of NCBI NO: 38344231 NR Description: OJ991113_30.8 [Oryza sativa (japonica
  misc_feature (1)..(184): Homolog of NCBI NO: 15228724 NR Description: DNA-directed RNA polymerase (RNA polymerase),
  misc_feature (1)..(184): Homolog of NCBI NO: 28497750 NR Description: polymerase (RNA) II (DNA directed) polypeptide E musculus] >gi|28374319|gb|AAH45521.1| Polr2e protein [Mus
  misc_feature (1)..(184): Homolog of NCBI NO: 1173134 NR Description: DNA-directed RNA polymerase II 23 kDa polypeptide
  misc_feature (1)..(184): Homolog of NCBI NO: 14589951 NR Description: DNA directed RNA polymerase II polypeptide E; (RNA) II (DNA directed) polypeptide E (25kD); DNA directed RNA II 23 kda polypeptide [Homo sapiens] >gi|678549|gb|AAA62401.1|

SEQ ID NO: 102939 - DNA, 1136 bp, Arabidopsis thaliana
  misc_feature (1)..(1136): Ceres Seq. ID no. 13611574
  misc_feature: MA Experiment ID: 20000314 Result: Down-regulated in Transcription
  misc_feature: MA Experiment 20000314 PARAMETER Experiment Name: At_14day_Shoots-Roots_Sub_P Parameter: Age (day) Value: 14
  misc_feature: MA Experiment 20000314 PARAMETER Experiment Name: At_14day_Shoots-Roots_Sub_P Parameter: Organism Value: A. thaliana
  misc_feature: MA Experiment 20000314 PARAMETER Experiment Name: At_14day_Shoots-Roots_Sub_P Parameter: Plant Line Value: WS
  misc_feature: MA Experiment 20000314 PARAMETER Experiment Name: At_14day_Shoots-Roots_Sub_P Parameter: Tissue Value: Roots vs. Whole Plant
  misc_feature: MA Experiment ID: 20000315 Result: Down-regulated in Transcription
  misc_feature: MA Experiment 20000315 PARAMETER Experiment Name: At_14day_Shoots-Roots_Sub_P Parameter: Age (day) Value: 14
  misc_feature: MA Experiment 20000315 PARAMETER Experiment Name: At_14day_Shoots-Roots_Sub_P Parameter: Organism Value: A. thaliana
  misc_feature: MA Experiment 20000315 PARAMETER Experiment Name: At_14day_Shoots-Roots_Sub_P Parameter: Plant Line Value: WS
  misc_feature: MA Experiment 20000315 PARAMETER Experiment Name: At_14day_Shoots-Roots_Sub_P Parameter: Tissue Value: Shoots vs. Whole Plant
  misc_feature: MA Experiment ID: 20000327 Result: Down-regulated in Transcription
  misc_feature: MA Experiment 20000327 PARAMETER Experiment Name: At_42deg_Heat_Sub_P Parameter: Age (day) Value: 14
  misc_feature: MA Experiment 20000327 PARAMETER Experiment Name: At_42deg_Heat_Sub_P Parameter: Organism Value: A. thaliana
  misc_feature: MA Experiment 20000327 PARAMETER Experiment Name: At_42deg_Heat_Sub_P Parameter: Plant Line Value: WS
  misc_feature: MA Experiment 20000327 PARAMETER Experiment Name: At_42deg_Heat_Sub_P Parameter: Temperature (deg C) Value: 42 vs. 22
  misc_feature: MA Experiment 20000327 PARAMETER Experiment Name: At_42deg_Heat_Sub_P Parameter: Timepoint (hr) Value: 1
  misc_feature: MA Experiment 20000327 PARAMETER Experiment Name: At_42deg_Heat_Sub_P Parameter: Tissue Value: Aerial
  misc_feature: MA Experiment ID: 20000329 Result: Up-regulated in Transcription
  misc_feature: MA Experiment 20000329 PARAMETER Experiment Name: At_4deg_Cold_Sub_P Parameter: Age (day) Value: 14
  misc_feature: MA Experiment 20000329 PARAMETER Experiment Name: At_4deg_Cold_Sub_P Parameter: Organism Value: A. thaliana
  misc_feature: MA Experiment 20000329 PARAMETER Experiment Name: At_4deg_Cold_Sub_P Parameter: Plant Line Value: WS
  misc_feature: MA Experiment 20000329 PARAMETER Experiment Name: At_4deg_Cold_Sub_P Parameter: Temperature (deg C) Value: 4 vs. 22
  misc_feature: MA Experiment 20000329 PARAMETER Experiment Name: At_4deg_Cold_Sub_P Parameter: Timepoint (hr) Value: 6
  misc_feature: MA Experiment 20000329 PARAMETER Experiment Name: At_4deg_Cold_Sub_P Parameter: Tissue Value: Aerial
  misc_feature: MA Experiment ID: 20000347 Result: Up-regulated in Transcription
  misc_feature: MA Experiment 20000347 PARAMETER Experiment Name: At_2mM_SA_Sub_P Parameter: Age (day) Value: 14
  misc_feature: MA Experiment 20000347 PARAMETER Experiment Name: At_2mM_SA_Sub_P Parameter: Organism Value: A. thaliana
  misc_feature: MA Experiment 20000347 PARAMETER Experiment Name: At_2mM_SA_Sub_P Parameter: Plant Line Value: WS
  misc_feature: MA Experiment 20000347 PARAMETER Experiment Name: At_2mM_SA_Sub_P Parameter: Timepoint (hr) Value: 6
  misc_feature: MA Experiment 20000347 PARAMETER Experiment Name: At_2mM_SA_Sub_P Parameter: Tissue Value: Aerial
  misc_feature: MA Experiment 20000347 PARAMETER Experiment Name: At_2mM_SA_Sub_P Parameter: Treatment Value: 2mM SA vs. No Treatment
  misc_feature: MA Experiment ID: 20000440 Result: Down-regulated in Transcription
  misc_feature: MA Experiment 20000440 PARAMETER Experiment Name: At_Closed-Flower__Sub_P Parameter: Tissue Value: Closed Flower vs. Whole Plant
atgtgtaatggatccagtttcttagcctcattaccactgttattgcttcttctcagcttcatattggcttccttcttcgacacggcagtgtgctacgggagaaatggaaacaacctgcgacccgcgtccgaagtcgtggcgctttaccaacaacggaacatccggcggatgcggctgtacgatcccaaccaggagactctcaacgctctccgcggctccaatatcgagctcgtgctcgatgttccaaaccctgatctccagcgtctcgcctccagccaagcggaagccgacacatgggtccgcaacaacgtccgcaactatgcaaacgtcacatttcgctacatctctgtcgggaacgaggtacagccctcagaccaagctgcgagctttgtcctccccgcgatgcagaacatagagagagcagtttcaagcctcgggatcaaggtctcgacggctatagacaccagaggcatttccgggtttccgccgtcaagtgggacgttcacaccggagtttaggagctttatcgcaccggtgataagtttcttgtcaagcaagcaatctcctctgctcgtgaataattacccttacttcagctacacgggaaacatgcgagacatccggttagactacactctgttcaccgcaccgtcaactgtagtcaatgacggacaaaaccaatatcgaaacctattccacgcaatcttagacactgtttacgcatcattagagaaagctggaggtggttcgttggagatcgtggtgtccgagagtggttggccgacagcgggaggagcagcgacgggtgtggataatgcgagaacttatgtgaacaatttgatacaaactgtgaaaaatggatctccgaggagaccagggagagctacagagacttatatatttgctatgttcgatgagaattcgaagcagggtcccgagactgagaagttttggggactgtttcttccaaatctacagcctaagtatgttgtcaatttcaactaatatccttgaagacacttcacgataaagcgatatgagataaatgacttgtatcgtaaaagtttcctaagagtatgggagcttattgtaatagtaaggaatagactaatgagaccagaaaaataagaaaagcc

SEQ ID NO: 102940 - protein, 334 aa, Arabidopsis thaliana
  peptide (1)..(334): Ceres Seq. ID no. 13611575
  misc_feature (57)..(333): Pfam Name: Glycosyl hydrolases family 17 Pfam Description: Glycosyl hydrolases family 17
  misc_feature (57)..(334): Homolog of NCBI NO: 15230260 NR Description: glycosyl hydrolase family 17 (beta-1,3-glucanase
  misc_feature (57)..(334): Homolog of NCBI NO: 553038 NR Description: beta-1,3-glucanase
  misc_feature (10)..(334): Homolog of NCBI NO: 16903144 NR Description: beta-1,3-glucanase [Prunus persica]
  misc_feature (5)..(334): Homolog of NCBI NO: 21554264 NR Description: beta-1,3-glucanase 2 (BG2) (PR-2) [Arabidopsis
  misc_feature (5)..(334): Homolog of NCBI NO: 15230262 NR Description: glycosyl hydrolase family 17 [Arabidopsis
  misc_feature (11)..(334): Homolog of NCBI NO: 7801384 NR Description: beta 1-3 glucanase [Vitis vinifera]
  misc_feature (12)..(334): Homolog of NCBI NO: 7447980 NR Description: glucan endo-1,3-beta-D-glucosidase (EC 3.2.1.39)
  misc_feature (8)..(334): Homolog of NCBI NO: 16903142 NR Description: beta-1,3-glucanase [Prunus persica]
  misc_feature (5)..(332): Homolog of NCBI NO: 11279332 NR Description: beta-1,3 glucanase (EC 3.2.1.-) [imported] -
  misc_feature (3)..(334): Homolog of NCBI NO: 1706548 NR Description: Glucan endo-1,3-beta-glucosidase, basic isoform
MCNGSSFLASLPLLLLLLSFILASFFDTAVCYGRNGNNLRPASEVVALYQQRNIRRMRLYDPNQETLNALRGSNIELVLDVPNPDLQRLASSQAEADTWVRNNVRNYANVTFRYISVGNEVQPSDQAASFVLPAMQNIERAVSSLGIKVSTAIDTRGISGFPPSSGTFTPEFRSFIAPVISFLSSKQSPLLVNNYPYFSYTGNMRDIRLDYTLFTAPSTVVNDGQNQYRNLFHAILDTVYASLEKAGGGSLEIVVSESGWPTAGGAATGVDNARTYVNNLIQTVKNGSPRRPGRATETYIFAMFDENSKQGPETEKFWGLFLPNLQPKYVVNFN

SEQ ID NO: 102941 - protein, 278 aa, Arabidopsis thaliana; identical to SEQ ID NO: 72448
  peptide (1)..(278): Ceres Seq. ID no. 13611576
  misc_feature (1)..(277): Pfam Name: Glycosyl hydrolases family 17 Pfam Description: Glycosyl hydrolases family 17
  misc_feature (1)..(278): Homolog of NCBI NO: 15230260 NR Description: glycosyl hydrolase family 17 (beta-1,3-glucanase
  misc_feature (1)..(278): Homolog of NCBI NO: 553038 NR Description: beta-1,3-glucanase
  misc_feature (1)..(278): Homolog of NCBI NO: 16903144 NR Description: beta-1,3-glucanase [Prunus persica]
  misc_feature (1)..(278): Homolog of NCBI NO: 21554264 NR Description: beta-1,3-glucanase 2 (BG2) (PR-2) [Arabidopsis
  misc_feature (1)..(278): Homolog of NCBI NO: 15230262 NR Description: glycosyl hydrolase family 17 [Arabidopsis
  misc_feature (1)..(278): Homolog of NCBI NO: 7801384 NR Description: beta 1-3 glucanase [Vitis vinifera]
  misc_feature (1)..(278): Homolog of NCBI NO: 7447980 NR Description: glucan endo-1,3-beta-D-glucosidase (EC 3.2.1.39)
  misc_feature (1)..(278): Homolog of NCBI NO: 16903142 NR Description: beta-1,3-glucanase [Prunus persica]
  misc_feature (1)..(276): Homolog of NCBI NO: 11279332 NR Description: beta-1,3 glucanase (EC 3.2.1.-) [imported] -
  misc_feature (1)..(278): Homolog of NCBI NO: 1706548 NR Description: Glucan endo-1,3-beta-glucosidase, basic isoform

SEQ ID NO: 102942 - protein, 200 aa, Arabidopsis thaliana; identical to SEQ ID NO: 72449
  peptide (1)..(200): Ceres Seq. ID no. 13611577
  misc_feature (1)..(199): Pfam Name: Glycosyl hydrolases family 17 Pfam Description: Glycosyl hydrolases family 17
  misc_feature (1)..(200): Homolog of NCBI NO: 15230260 NR Description: glycosyl hydrolase family 17 (beta-1,3-glucanase
  misc_feature (1)..(200): Homolog of NCBI NO: 553038 NR Description: beta-1,3-glucanase
  misc_feature (1)..(200): Homolog of NCBI NO: 16903144 NR Description: beta-1,3-glucanase [Prunus persica]
  misc_feature (1)..(200): Homolog of NCBI NO: 21554264 NR Description: beta-1,3-glucanase 2 (BG2) (PR-2) [Arabidopsis
  misc_feature (1)..(200): Homolog of NCBI NO: 15230262 NR Description: glycosyl hydrolase family 17 [Arabidopsis
  misc_feature (1)..(200): Homolog of NCBI NO: 7801384 NR Description: beta 1-3 glucanase [Vitis vinifera]
  misc_feature (1)..(200): Homolog of NCBI NO: 7447980 NR Description: glucan endo-1,3-beta-D-glucosidase (EC 3.2.1.39)
  misc_feature (1)..(200): Homolog of NCBI NO: 16903142 NR Description: beta-1,3-glucanase [Prunus persica]
  misc_feature (1)..(198): Homolog of NCBI NO: 11279332 NR Description: beta-1,3 glucanase (EC 3.2.1.-) [imported] -
  misc_feature (1)..(200): Homolog of NCBI NO: 1706548 NR Description: Glucan endo-1,3-beta-glucosidase, basic isoform

SEQ ID NO: 102943 - DNA, 1193 bp, Arabidopsis thaliana
  misc_feature (1)..(1193): Ceres Seq. ID no. 13611578
  misc_feature: MA Experiment ID: 108572 Result: Up-regulated in Transcription
  misc_feature: MA Experiment 108572 PARAMETER Experiment Name: At_Drought_cDNA_P Parameter: Timepoint (hr) Value: 1
  misc_feature: MA Experiment 108572 PARAMETER Experiment Name: At_Drought_cDNA_P Parameter: Tissue Value: Aerial
  misc_feature: MA Experiment 108572 PARAMETER Experiment Name: At_Drought_cDNA_P Parameter: Treatment Value: Drought vs. No Drought
  misc_feature: MA Experiment ID: 20000234 Result: Up-regulated in Transcription
  misc_feature: MA Experiment 20000234 PARAMETER Experiment Name: At_Siliques_P Parameter: Age (day) Value: 21
  misc_feature: MA Experiment 20000234 PARAMETER Experiment Name: At_Siliques_P Parameter: Organism Value: A. thaliana
  misc_feature: MA Experiment 20000234 PARAMETER Experiment Name: At_Siliques_P Parameter: Plant Line Value: WS
  misc_feature: MA Experiment 20000234 PARAMETER Experiment Name: At_Siliques_P Parameter: Tissue Value: Less Than 5mm Siliques vs. Whole Plant
  misc_feature: MA Experiment ID: 20000235 Result: Up-regulated in Transcription
  misc_feature: MA Experiment 20000235 PARAMETER Experiment Name: At_Siliques_P Parameter: Age (day) Value: 21
  misc_feature: MA Experiment 20000235 PARAMETER Experiment Name: At_Siliques_P Parameter: Organism Value: A. thaliana
  misc_feature: MA Experiment 20000235 PARAMETER Experiment Name: At_Siliques_P Parameter: Plant Line Value: WS
  misc_feature: MA Experiment 20000235 PARAMETER Experiment Name: At_Siliques_P Parameter: Tissue Value: 5-10mm Siliques vs. Whole Plant
  misc_feature: MA Experiment ID: 20001760 Result: Up-regulated in Transcription
  misc_feature: MA Experiment 20001760 PARAMETER Experiment Name: At_50mM_NH4NO3_L-to-H_P Parameter: Timepoint (hr) Value: 2
  misc_feature: MA Experiment 20001760 PARAMETER Experiment Name: At_50mM_NH4NO3_L-to-H_P Parameter: Tissue Value: Siliques
  misc_feature: MA Experiment 20001760 PARAMETER Experiment Name: At_50mM_NH4NO3_L-to-H_P Parameter: Treatment Value: 50mM NH4NO3 vs 100mM Mannitol
gtcataacagtaaatgatttccacctcgctcttaattttctacaaatcatctctttcttcacctaacgacgatggatctccgattcttggcgtccttgacccttcttctcggtctattcttcgtcaatacaaatccaacaggtggacaagtcggcgtttgctatggaagaaacggcaacaacctcccttcaccagcagaaaccattgcgctcttcaaacagaaaaacatccaacgagttaggctatacagtccggaccacgacgttctagccgccctacgtggctccaacatcgaggtaacgctgggtcttcccaactcttacctacagagcgtggcctcgagccaatcacaagctaacgcgtgggtacaaacctacgtcatgaactacgcgaatggcgtcaggttccgttacatatctgttgggaatgaagttaaaatctccgactcttacgcacagttcctagtccctgccatggaaaacattgaccgggcggttttagcagccggactcggtggtcgtatcaaggtatccacatcggtagacatgggagtgctccgagagtcttatccaccatcgaaaggttcgtttaggggagatgttatggtggtaatggaaccaatcatacgtttcttggtaagcaagaactctcctttactcttaaacctctacacttacttcagctacgcgggcaatgtaggccaaatccggctcgattacgctctcttcacggctccttcaggaatcgtttcggaccctcctagatcttaccaaaacctatttgatgcgatgctcgatgcgatgtactcggctctagagaaatcgggtggcgcatcattggaaatagttgtggcggagactggatggccaacgggaggaggaaccgatacaaacatagagaatgcgagaatttataacaataatttgattaagcatgtgaagaatgggacaccgaagagaccagggaaagaaatcgagacatatttatttgccatttatgacgagaatcaaaagccgactcctccttatgttgagaagttttggggattgttctatcccaacaagcagcctaagtatgatattaacttttattgagccgaaccaatattctatcaagggaatggtatatttatatttgaaaactaatatagatattggtactatcattcattatacaataaataaagtttgagg

SEQ ID NO: 102944 - protein, 340 aa, Arabidopsis thaliana
  peptide (1)..(340): Ceres Seq. ID no. 13611579
  misc_feature (27)..(339): Pfam Name: Glycosyl hydrolases family 17 Pfam Description: Glycosyl hydrolases family 17
  misc_feature (1)..(340): Homolog of NCBI NO: 15230263 NR Description: glycosyl hydrolase family 17 [Arabidopsis
  misc_feature (1)..(340): Homolog of NCBI NO: 21536773 NR Description: glucan endo-1,3-beta-D-glucosidase-like protein
  misc_feature (6)..(339): Homolog of NCBI NO: 16903144 NR Description: beta-1,3-glucanase [Prunus persica]
  misc_feature (6)..(338): Homolog of NCBI NO: 11279332 NR Description: beta-1,3 glucanase (EC 3.2.1.-) [imported] -
  misc_feature (6)..(339): Homolog of NCBI NO: 1706546 NR Description: GLUCAN ENDO-1,3-BETA-GLUCOSIDASE PRECURSOR
  misc_feature (6)..(339): Homolog of NCBI NO: 7447980 NR Description: glucan endo-1,3-beta-D-glucosidase (EC 3.2.1.39)
MDLRFLASLTLLLGLFFVNTNPTGGQVGVCYGRNGNNLPSPAETIALFKQKNIQRVRLYSPDHDVLAALRGSNIEVTLGLPNSYLQSVASSQSQANAWVQTYVMNYANGVRFRYISVGNEVKISDSYAQFLVPAMENIDRAVLAAGLGGRIKVSTSVDMGVLRESYPPSKGSFRGDVMVVMEPIIRFLVSKNSPLLLNLYTYFSYAGNVGQIRLDYALFTAPSGIVSDPPRSYQNLFDAMLDAMYSALEKSGGASLEIVVAETGWPTGGGTDTNIENARIYNNNLIKHVKNGTPKRPGKEIETYLFAIYDENQKPTPPYVEKFWGLFYPNKQPKYDINFY

SEQ ID NO: 102945 - protein, 237 aa, Arabidopsis thaliana
  peptide (1)..(237): Ceres Seq. ID no. 13611580
  misc_feature (1)..(236): Pfam Name: Glycosyl hydrolases family 17 Pfam Description: Glycosyl hydrolases family 17
  misc_feature (1)..(237): Homolog of NCBI NO: 15230263 NR Description: glycosyl hydrolase family 17 [Arabidopsis
  misc_feature (1)..(237): Homolog of NCBI NO: 21536773 NR Description: glucan endo-1,3-beta-D-glucosidase-like protein
  misc_feature (1)..(236): Homolog of NCBI NO: 16903144 NR Description: beta-1,3-glucanase [Prunus persica]
  misc_feature (1)..(235): Homolog of NCBI NO: 11279332 NR Description: beta-1,3 glucanase (EC 3.2.1.-) [imported] -
  misc_feature (1)..(236): Homolog of NCBI NO: 1706546 NR Description: GLUCAN ENDO-1,3-BETA-GLUCOSIDASE PRECURSOR
  misc_feature (1)..(236): Homolog of NCBI NO: 7447980 NR Description: glucan endo-1,3-beta-D-glucosidase (EC 3.2.1.39)
MNYANGVRFRYISVGNEVKISDSYAQFLVPAMENIDRAVLAAGLGGRIKVSTSVDMGVLRESYPPSKGSFRGDVMVVMEPIIRFLVSKNSPLLLNLYTYFSYAGNVGQIRLDYALFTAPSGIVSDPPRSYQNLFDAMLDAMYSALEKSGGASLEIVVAETGWPTGGGTDTNIENARIYNNNLIKHVKNGTPKRPGKEIETYLFAIYDENQKPTPPYVEKFWGLFYPNKQPKYDINFY

SEQ ID NO: 102946 - protein, 206 aa, Arabidopsis thaliana
  peptide (1)..(206): Ceres Seq. ID no. 13611581
  misc_feature (1)..(205): Pfam Name: Glycosyl hydrolases family 17 Pfam Description: Glycosyl hydrolases family 17
  misc_feature (1)..(206): Homolog of NCBI NO: 15230263 NR Description: glycosyl hydrolase family 17 [Arabidopsis
  misc_feature (1)..(206): Homolog of NCBI NO: 21536773 NR Description: glucan endo-1,3-beta-D-glucosidase-like protein
  misc_feature (1)..(205): Homolog of NCBI NO: 16903144 NR Description: beta-1,3-glucanase [Prunus persica]
  misc_feature (1)..(204): Homolog of NCBI NO: 11279332 NR Description: beta-1,3 glucanase (EC 3.2.1.-) [imported] -
  misc_feature (1)..(205): Homolog of NCBI NO: 1706546 NR Description: GLUCAN ENDO-1,3-BETA-GLUCOSIDASE PRECURSOR
  misc_feature (1)..(205): Homolog of NCBI NO: 7447980 NR Description: glucan endo-1,3-beta-D-glucosidase (EC 3.2.1.39)
MENIDRAVLAAGLGGRIKVSTSVDMGVLRESYPPSKGSFRGDVMVVMEPIIRFLVSKNSPLLLNLYTYFSYAGNVGQIRLDYALFTAPSGIVSDPPRSYQNLFDAMLDAMYSALEKSGGASLEIVVAETGWPTGGGTDTNIENARIYNNNLIKHVKNGTPKRPGKEIETYLFAIYDENQKPTPPYVEKFWGLFYPNKQPKYDINFY

SEQ ID NO: 102947 - DNA, 943 bp, Arabidopsis thaliana
  misc_feature (1)..(943): Ceres Seq. ID no. 13611582
  misc_feature: MA Experiment ID: 108434 Result: Down-regulated in Transcription
  misc_feature: MA Experiment 108434 PARAMETER Experiment Name: At_Root_Tips_cDNA_P Parameter: Tissue Value: Root Tips
  misc_feature: MA Experiment ID: 108464 Result: Up-regulated in Transcription
  misc_feature: MA Experiment 108464 PARAMETER Experiment Name: At_Germinating_Seeds_cDNA_P Parameter: Age (day) Value: 4 vs. 0
  misc_feature: MA Experiment 108464 PARAMETER Experiment Name: At_Germinating_Seeds_cDNA_P Parameter: Tissue Value: Germinating Seeds
  misc_feature: MA Experiment ID: 108569 Result: Up-regulated in Transcription
  misc_feature: MA Experiment 108569 PARAMETER Experiment Name: At_0.001%_MeJA__cDNA_P Parameter: Timepoint (hr) Value: 6
  misc_feature: MA Experiment 108569 PARAMETER Experiment Name: At_0.001%_MeJA__cDNA_P Parameter: Tissue Value: Aerial
  misc_feature: MA Experiment 108569 PARAMETER Experiment Name: At_0.001%_MeJA__cDNA_P Parameter: Treatment Value: 0.001% MeJA vs. No Treatment
  misc_feature: MA Experiment ID: 108573 Result: Up-regulated in Transcription
  misc_feature: MA Experiment 108573 PARAMETER Experiment Name: At_Drought_cDNA_P Parameter: Timepoint (hr) Value: 6
  misc_feature: MA Experiment 108573 PARAMETER Experiment Name: At_Drought_cDNA_P Parameter: Tissue Value: Aerial
  misc_feature: MA Experiment 108573 PARAMETER Experiment Name: At_Drought_cDNA_P Parameter: Treatment Value: Drought vs. No Drought
  misc_feature: MA Experiment ID: 108585 Result: Up-regulated in Transcription
  misc_feature: MA Experiment 108585 PARAMETER Experiment Name: At_5mM_NaNP_cDNA_P Parameter: Timepoint (hr) Value: 6
  misc_feature: MA Experiment 108585 PARAMETER Experiment Name: At_5mM_NaNP_cDNA_P Parameter: Tissue Value: Aerial
  misc_feature: MA Experiment 108585 PARAMETER Experiment Name: At_5mM_NaNP_cDNA_P Parameter: Treatment Value: null
  misc_feature: MA Experiment ID: 20000072 Result: Up-regulated in Transcription
  misc_feature: MA Experiment 20000072 PARAMETER Experiment Name: At_100uM_ABA_Mutants_cDNA_P Parameter: Plant Line Value: CS8105
  misc_feature: MA Experiment 20000072 PARAMETER Experiment Name: At_100uM_ABA_Mutants_cDNA_P Parameter: Timepoint (hr) Value: 6
  misc_feature: MA Experiment 20000072 PARAMETER Experiment Name: At_100uM_ABA_Mutants_cDNA_P Parameter: Tissue Value: Aerial
  misc_feature: MA Experiment 20000072 PARAMETER Experiment Name: At_100uM_ABA_Mutants_cDNA_P Parameter: Treatment Value: 100uM ABA vs. No Treatment
  misc_feature: MA Experiment ID: 20000087 Result: Up-regulated in Transcription
  misc_feature: MA Experiment 20000087 PARAMETER Experiment Name: At_100uM_ABA_Mutants_cDNA_P Parameter: Plant Line Value: WS
  misc_feature: MA Experiment 20000087 PARAMETER Experiment Name: At_100uM_ABA_Mutants_cDNA_P Parameter: Timepoint (hr) Value: 6
  misc_feature: MA Experiment 20000087 PARAMETER Experiment Name: At_100uM_ABA_Mutants_cDNA_P Parameter: Tissue Value: Aerial
  misc_feature: MA Experiment 20000087 PARAMETER Experiment Name: At_100uM_ABA_Mutants_cDNA_P Parameter: Treatment Value: 100uM ABA vs. No Treatment
  misc_feature: MA Experiment ID: 20000090 Result: Up-regulated in Transcription
  misc_feature: MA Experiment ID: 20000234 Result: Down-regulated in Transcription
  misc_feature: MA Experiment 20000234 PARAMETER Experiment Name: At_Siliques_P Parameter: Age (day) Value: 21
  misc_feature: MA Experiment 20000234 PARAMETER Experiment Name: At_Siliques_P Parameter: Organism Value: A. thaliana
  misc_feature: MA Experiment 20000234 PARAMETER Experiment Name: At_Siliques_P Parameter: Plant Line Value: WS
  misc_feature: MA Experiment 20000234 PARAMETER Experiment Name: At_Siliques_P Parameter: Tissue Value: Less Than 5mm Siliques vs. Whole Plant
  misc_feature: MA Experiment ID: 20000235 Result: Down-regulated in Transcription
  misc_feature: MA Experiment 20000235 PARAMETER Experiment Name: At_Siliques_P Parameter: Age (day) Value: 21
  misc_feature: MA Experiment 20000235 PARAMETER Experiment Name: At_Siliques_P Parameter: Organism Value: A. thaliana
  misc_feature: MA Experiment 20000235 PARAMETER Experiment Name: At_Siliques_P Parameter: Plant Line Value: WS
  misc_feature: MA Experiment 20000235 PARAMETER Experiment Name: At_Siliques_P Parameter: Tissue Value: 5-10mm Siliques vs. Whole Plant
  misc_feature: MA Experiment ID: 20000264 Result: Down-regulated in Transcription
  misc_feature: MA Experiment 20000264 PARAMETER Experiment Name: At_Open_Flower_P Parameter: Age (day) Value: 21
  misc_feature: MA Experiment 20000264 PARAMETER Experiment Name: At_Open_Flower_P Parameter: Plant Line Value: WS
  misc_feature: MA Experiment 20000264 PARAMETER Experiment Name: At_Open_Flower_P Parameter: Tissue Value: Open Flower vs. Whole Plant
  misc_feature: MA Experiment ID: 20000265 Result: Down-regulated in Transcription
  misc_feature: MA Experiment 20000265 PARAMETER Experiment Name: At_Open_Flower_P Parameter: Age (day) Value: 21
  misc_feature: MA Experiment 20000265 PARAMETER Experiment Name: At_Open_Flower_P Parameter: Plant Line Value: WS
  misc_feature: MA Experiment 20000265 PARAMETER Experiment Name: At_Open_Flower_P Parameter: Tissue Value: Closed Flower vs. Whole Plant
  misc_feature: MA Experiment ID: 20000286 Result: Down-regulated in Transcription
  misc_feature: MA Experiment 20000286 PARAMETER Experiment Name: At_Open_Flower_P Parameter: Age (day) Value: 21
  misc_feature: MA Experiment 20000286 PARAMETER Experiment Name: At_Open_Flower_P Parameter: Plant Line Value: WS
  misc_feature: MA Experiment 20000286 PARAMETER Experiment Name: At_Open_Flower_P Parameter: Tissue Value: Half Open vs. Whole Plant
  misc_feature: MA Experiment ID: 20000438 Result: Down-regulated in Transcription
  misc_feature: MA Experiment 20000438 PARAMETER Experiment Name: At_Shoots__P Parameter: Age (day) Value: 14
  misc_feature: MA Experiment 20000438 PARAMETER Experiment Name: At_Shoots__P Parameter: Tissue Value: Shoots vs. Whole Plant
aaccactccatctctcgtgctgaccacgctccgattctccatttctttcccttttgacttttcacttccaatttttcggtatcagatctggacgatggcttcacaaatctctcagcttgcttgtttctcatccaccaatcgccaatttcacttccaaagccgatcgtttccatgccctatgattcgtccccagtcttttgtagttaaaagtgttgatgggaatagctctgaaacaccagcttctctaagctatacagctgaggtttcaaaacctgttgttgagaaaacatccaaaccgtattccactgttgatgaaactgctaccaataaagagagcatcacagagccagtagaggaagatgttgccacacaaccaataagagcagcaaagatccacgacttctgtttcggcattccttatggtggtctcgttgtgagtggagggcttcttggttttgcgttttcacgaaatcttacaagtttaagtactggtgtcctctatggtggtggccttctagcccttagtacactgagcttaaagatttggcgagagggaaaatctagtttcccttatatactaggacaagcagtgctttcagctgtcgtcttctggaagaacttcacagcttattcgatgactaagaagctgtttccggccggggtttttgctgtcatcagtgcttgcatgttgtgtttctattcatatgtggtgctctctggaggaaacccacctccaaagaaattgaaaccatctgcgactagtccttcatactgaagggactttacataggtttagatttaaaaaagtggagatcttctctcttttgataactctggtctgttggattactggtgtaattttatactctttacgaattgatacacttggttttgtttgtgacctgttctttccagtgtcataatctaaagttttgattttctt

SEQ ID NO: 102948 - protein, 257 aa, Arabidopsis thaliana; identical to SEQ ID NO: 29559
  peptide (1)..(257): Ceres Seq. ID no. 13611583
  misc_feature (134)..(237): Pfam Name: Uncharacterised protein family (UPF0136) Pfam Description: Uncharacterised protein family (UPF0136)
  misc_feature (32)..(257): Homolog of NCBI NO: 18410685 NR Description: expressed protein [Arabidopsis thaliana] AT3g57280/F28O9_130 [Arabidopsis thaliana] AT3g57280/F28O9_130 [Arabidopsis thaliana]
  misc_feature (32)..(257): Homolog of NCBI NO: 11290570 NR Description: hypothetical protein F28O9.130 - Arabidopsis >gi|6735307|emb|CAB68134.1| hypothetical protein [Arabidopsis
  misc_feature (88)..(256): Homolog of NCBI NO: 38344745 NR Description: OSJNBa0089K21.3 [Oryza sativa (japonica
  misc_feature (131)..(247): Homolog of NCBI NO: 15232290 NR Description: expressed protein [Arabidopsis thaliana] emb|CAB68134.1~gene_id:K10D20.5~similar to unknown protein
  misc_feature (131)..(246): Homolog of NCBI NO: 18403201 NR Description: expressed protein [Arabidopsis thaliana]
  misc_feature (131)..(247): Homolog of NCBI NO: 34896628 NR Description: hypothetical protein [Oryza sativa]
  misc_feature (113)..(247): Homolog of NCBI NO: 7488560 NR Description: inner envelope membrane protein precursor,
  misc_feature (92)..(235): Homolog of NCBI NO: 25365973 NR Description: hypothetical protein At2g38550 [imported] -
  misc_feature (92)..(235): Homolog of NCBI NO: 21554522 NR Description: putative non-green plastid inner envelope
  misc_feature (92)..(235): Homolog of NCBI NO: 18404784 NR Description: non-green plastid inner envelope membrane protein

SEQ ID NO: 102949 - protein, 226 aa, Arabidopsis thaliana; identical to SEQ ID NO: 29560
  peptide (1)..(226): Ceres Seq. ID no. 13611584
  misc_feature (103)..(206): Pfam Name: Uncharacterised protein family (UPF0136) Pfam Description: Uncharacterised protein family (UPF0136)
  misc_feature (1)..(226): Homolog of NCBI NO: 18410685 NR Description: expressed protein [Arabidopsis thaliana] AT3g57280/F28O9_130 [Arabidopsis thaliana] AT3g57280/F28O9_130 [Arabidopsis thaliana]
  misc_feature (1)..(226): Homolog of NCBI NO: 11290570 NR Description: hypothetical protein F28O9.130 - Arabidopsis >gi|6735307|emb|CAB68134.1| hypothetical protein [Arabidopsis
  misc_feature (57)..(225): Homolog of NCBI NO: 38344745 NR Description: OSJNBa0089K21.3 [Oryza sativa (japonica
  misc_feature (100)..(216): Homolog of NCBI NO: 15232290 NR Description: expressed protein [Arabidopsis thaliana] emb|CAB68134.1~gene_id:K10D20.5~similar to unknown protein
  misc_feature (100)..(215): Homolog of NCBI NO: 18403201 NR Description: expressed protein [Arabidopsis thaliana]
  misc_feature (100)..(216): Homolog of NCBI NO: 34896628 NR Description: hypothetical protein [Oryza sativa]
  misc_feature (82)..(216): Homolog of NCBI NO: 7488560 NR Description: inner envelope membrane protein precursor,
  misc_feature (61)..(204): Homolog of NCBI NO: 25365973 NR Description: hypothetical protein At2g38550 [imported] -
  misc_feature (61)..(204): Homolog of NCBI NO: 21554522 NR Description: putative non-green plastid inner envelope
  misc_feature (61)..(204): Homolog of NCBI NO: 18404784 NR Description: non-green plastid inner envelope membrane protein

SEQ ID NO: 102950 - protein, 198 aa, Arabidopsis thaliana; identical to SEQ ID NO: 29561
  peptide (1)..(198): Ceres Seq. ID no. 13611585
  misc_feature (75)..(178): Pfam Name: Uncharacterised protein family (UPF0136) Pfam Description: Uncharacterised protein family (UPF0136)
  misc_feature (1)..(198): Homolog of NCBI NO: 18410685 NR Description: expressed protein [Arabidopsis thaliana] AT3g57280/F28O9_130 [Arabidopsis thaliana] AT3g57280/F28O9_130 [Arabidopsis thaliana]
  misc_feature (1)..(198): Homolog of NCBI NO: 11290570 NR Description: hypothetical protein F28O9.130 - Arabidopsis >gi|6735307|emb|CAB68134.1| hypothetical protein [Arabidopsis
  misc_feature (29)..(197): Homolog of NCBI NO: 38344745 NR Description: OSJNBa0089K21.3 [Oryza sativa (japonica
  misc_feature (72)..(188): Homolog of NCBI NO: 15232290 NR Description: expressed protein [Arabidopsis thaliana] emb|CAB68134.1~gene_id:K10D20.5~similar to unknown protein
  misc_feature (72)..(187): Homolog of NCBI NO: 18403201 NR Description: expressed protein [Arabidopsis thaliana]
  misc_feature (72)..(188): Homolog of NCBI NO: 34896628 NR Description: hypothetical protein [Oryza sativa]
  misc_feature (54)..(188): Homolog of NCBI NO: 7488560 NR Description: inner envelope membrane protein precursor,
  misc_feature (33)..(176): Homolog of NCBI NO: 25365973 NR Description: hypothetical protein At2g38550 [imported] -
  misc_feature (33)..(176): Homolog of NCBI NO: 21554522 NR Description: putative non-green plastid inner envelope
  misc_feature (33)..(176): Homolog of NCBI NO: 18404784 NR Description: non-green plastid inner envelope membrane protein

SEQ ID NO: 102951 - DNA, 1152 bp, Arabidopsis thaliana
  misc_feature (1)..(1152): Ceres Seq. ID no. 13611590
  misc_feature: MA Experiment ID: 108595 Result: Up-regulated in Transcription
  misc_feature: MA Experiment 108595 PARAMETER Experiment Name: At_Ler-pi_Ovule_cDNA_P Parameter: Plant Line Value: null
  misc_feature: MA Experiment ID: 20000264 Result: Up-regulated in Transcription
  misc_feature: MA Experiment 20000264 PARAMETER Experiment Name: At_Open_Flower_P Parameter: Age (day) Value: 21
  misc_feature: MA Experiment 20000264 PARAMETER Experiment Name: At_Open_Flower_P Parameter: Plant Line Value: WS
  misc_feature: MA Experiment 20000264 PARAMETER Experiment Name: At_Open_Flower_P Parameter: Tissue Value: Open Flower vs. Whole Plant
  misc_feature: MA Experiment ID: 20001908 Result: Up-regulated in Transcription
  misc_feature: MA Experiment 20001908 PARAMETER Experiment Name: At_Drought_Reproduction_P Parameter: Age (day) Value: 40
  misc_feature: MA Experiment 20001908 PARAMETER Experiment Name: At_Drought_Reproduction_P Parameter: Organism Value: A. thaliana
  misc_feature: MA Experiment 20001908 PARAMETER Experiment Name: At_Drought_Reproduction_P Parameter: Plant Line Value: WS
  misc_feature: MA Experiment 20001908 PARAMETER Experiment Name: At_Drought_Reproduction_P Parameter: Timepoint (day) Value: 10
  misc_feature: MA Experiment 20001908 PARAMETER Experiment Name: At_Drought_Reproduction_P Parameter: Tissue Value: Siliques
  misc_feature: MA Experiment 20001908 PARAMETER Experiment Name: At_Drought_Reproduction_P Parameter: Treatment Value: Drought vs. No Drought
agcccctttcccaatatttgatcaatttctaaagaaaaccccttcctctactagtcctcctcctatatatacaaaatcttaagaaatctctctacttgtttcctctgttatcataatctcttctctctatatctcttctcttcttcttttaccctgttttttttttcattccacagagcccaggttgattgattttgttattcagagatatggggagaggaaggattgagattaagaagattgagaatatcaacagtcgtcaagtcactttctctaagagacgaaacggtttgatcaagaaggctaaagagctttcgattctctgtgacgccgaggttgctcttatcatcttctccagcaccggcaagatttacgatttctccagcgtctgtatggagcaaattctttctagatatggatacactactgcgtccactgagcataaacaacaaagagaacaccaacttctaatttgtgcttcacatggaaatgaagctgtgttgcgaaatgatgattctatgaagggggaacttgaaagattacagcttgcaattgagagacttaagggtaaggagcttgaaggtatgagtttcccggatcttatttctcttgaaaaccagttgaacgagagcttgcatagtgtcaaggatcaaaagacacaaatcctgctcaaccagattgagagatccaggatacaggagaaaaaagcattggaagaaaaccaaatcttgcgcaaacaggttgagatgttggggagaggttcaggaccaaaagtgttgaatgaaaggcctcaagattctagcccagaagccgatcccgagagctcttcatcagaagaggatgagaatgacaacgaggagcaccattccgacacttccttgcagttggggttgtcgtcgacggggtattgcacaaagagaaagaagccgaagatcgaactggtctgcgataactctgggagtcaagtggcttctgattgatggaatcgattatttttctaattctggttgtttaggggtctctatgtgtcttcttgtttctggctgttcttttgctttatttcatctcaagtagagttttcttaatgtttaggtggaacatttttccataatcaagaagggatttgatcaatcaataacattagattttctt

SEQ ID NO: 102952 - protein, 256 aa, Arabidopsis thaliana
  peptide (1)..(256): Ceres Seq. ID no. 13611591
  misc_feature (102)..(180): Pfam Name: K-box region Pfam Description: K-box region
  misc_feature (1)..(256): Homolog of NCBI NO: 15230284 NR Description: MADS-box protein [Arabidopsis thaliana]
  misc_feature (1)..(256): Homolog of NCBI NO: 21593229 NR Description: MADS transcription factor-like protein
  misc_feature (1)..(254): Homolog of NCBI NO: 15240706 NR Description: floral homeotic protein, AGL15 [Arabidopsis
  misc_feature (7)..(254): Homolog of NCBI NO: 862646 NR Description: MADS-box protein AGL15
  misc_feature (1)..(243): Homolog of NCBI NO: 7446561 NR Description: MADS box protein AGL15 (type 2) - rape
  misc_feature (1)..(239): Homolog of NCBI NO: 3831486 NR Description: Agamous-like MADS box protein AGL15
  misc_feature (1)..(227): Homolog of NCBI NO: 21396795 NR Description: MADS-box gene 2 protein [Lycopodium annotinum]
  misc_feature (1)..(227): Homolog of NCBI NO: 21396803 NR Description: MADS-box gene 6 protein [Lycopodium annotinum]
  misc_feature (1)..(233): Homolog of NCBI NO: 9956938 NR Description: MADS-domain protein PPM1 [Physcomitrella patens]
  misc_feature (1)..(232): Homolog of NCBI NO: 33342042 NR Description: MADS-box transcription factor [Houttuynia cordata]
MGRGRIEIKKIENINSRQVTFSKRRNGLIKKAKELSILCDAEVALIIFSSTGKIYDFSSVCMEQILSRYGYTTASTEHKQQREHQLLICASHGNEAVLRNDDSMKGELERLQLAIERLKGKELEGMSFPDLISLENQLNESLHSVKDQKTQILLNQIERSRIQEKKALEENQILRKQVEMLGRGSGPKVLNERPQDSSPEADPESSSSEEDENDNEEHHSDTSLQLGLSSTGYCTKRKKPKIELVCDNSGSQVASD

SEQ ID NO: 102953 - protein, 195 aa, Arabidopsis thaliana
  peptide (1)..(195): Ceres Seq. ID no. 13611592
  misc_feature (41)..(119): Pfam Name: K-box region Pfam Description: K-box region
  misc_feature (1)..(195): Homolog of NCBI NO: 15230284 NR Description: MADS-box protein [Arabidopsis thaliana]
  misc_feature (1)..(195): Homolog of NCBI NO: 21593229 NR Description: MADS transcription factor-like protein
  misc_feature (1)..(193): Homolog of NCBI NO: 15240706 NR Description: floral homeotic protein, AGL15 [Arabidopsis
  misc_feature (1)..(193): Homolog of NCBI NO: 862646 NR Description: MADS-box protein AGL15
  misc_feature (1)..(182): Homolog of NCBI NO: 7446561 NR Description: MADS box protein AGL15 (type 2) - rape
  misc_feature (1)..(178): Homolog of NCBI NO: 3831486 NR Description: Agamous-like MADS box protein AGL15
  misc_feature (1)..(166): Homolog of NCBI NO: 21396795 NR Description: MADS-box gene 2 protein [Lycopodium annotinum]
  misc_feature (1)..(166): Homolog of NCBI NO: 21396803 NR Description: MADS-box gene 6 protein [Lycopodium annotinum]
  misc_feature (1)..(172): Homolog of NCBI NO: 9956938 NR Description: MADS-domain protein PPM1 [Physcomitrella patens]
  misc_feature (1)..(171): Homolog of NCBI NO: 33342042 NR Description: MADS-box transcription factor [Houttuynia cordata]
MEQILSRYGYTTASTEHKQQREHQLLICASHGNEAVLRNDDSMKGELERLQLAIERLKGKELEGMSFPDLISLENQLNESLHSVKDQKTQILLNQIERSRIQEKKALEENQILRKQVEMLGRGSGPKVLNERPQDSSPEADPESSSSEEDENDNEEHHSDTSLQLGLSSTGYCTKRKKPKIELVCDNSGSQVASD

SEQ ID NO: 102954 - protein, 153 aa, Arabidopsis thaliana
  peptide (1)..(153): Ceres Seq. ID no. 13611593
  misc_feature (1)..(77): Pfam Name: K-box region Pfam Description: K-box region
  misc_feature (1)..(153): Homolog of NCBI NO: 15230284 NR Description: MADS-box protein [Arabidopsis thaliana]
  misc_feature (1)..(153): Homolog of NCBI NO: 21593229 NR Description: MADS transcription factor-like protein
  misc_feature (1)..(151): Homolog of NCBI NO: 15240706 NR Description: floral homeotic protein, AGL15 [Arabidopsis
  misc_feature (1)..(151): Homolog of NCBI NO: 862646 NR Description: MADS-box protein AGL15
  misc_feature (1)..(140): Homolog of NCBI NO: 7446561 NR Description: MADS box protein AGL15 (type 2) - rape
  misc_feature (1)..(136): Homolog of NCBI NO: 3831486 NR Description: Agamous-like MADS box protein AGL15
  misc_feature (1)..(124): Homolog of NCBI NO: 21396795 NR Description: MADS-box gene 2 protein [Lycopodium annotinum]
  misc_feature (1)..(124): Homolog of NCBI NO: 21396803 NR Description: MADS-box gene 6 protein [Lycopodium annotinum]
  misc_feature (1)..(130): Homolog of NCBI NO: 9956938 NR Description: MADS-domain protein PPM1 [Physcomitrella patens]
  misc_feature (1)..(129): Homolog of NCBI NO: 33342042 NR Description: MADS-box transcription factor [Houttuynia cordata]
MKGELERLQLAIERLKGKELEGMSFPDLISLENQLNESLHSVKDQKTQILLNQIERSRIQEKKALEENQILRKQVEMLGRGSGPKVLNERPQDSSPEADPESSSSEEDENDNEEHHSDTSLQLGLSSTGYCTKRKKPKIELVCDNSGSQVASD

SEQ ID NO: 102955 - DNA, 2841 bp, Arabidopsis thaliana
  misc_feature (1)..(2841): Ceres Seq. ID no. 13611594
  misc_feature: MA Experiment ID: 20000314 Result: Down-regulated in Transcription
  misc_feature: MA Experiment 20000314 PARAMETER Experiment Name: At_14day_Shoots-Roots_Sub_P Parameter: Age (day) Value: 14
  misc_feature: MA Experiment 20000314 PARAMETER Experiment Name: At_14day_Shoots-Roots_Sub_P Parameter: Organism Value: A. thaliana
  misc_feature: MA Experiment 20000314 PARAMETER Experiment Name: At_14day_Shoots-Roots_Sub_P Parameter: Plant Line Value: WS
  misc_feature: MA Experiment 20000314 PARAMETER Experiment Name: At_14day_Shoots-Roots_Sub_P Parameter: Tissue Value: Roots vs. Whole Plant
  misc_feature: MA Experiment ID: 20000315 Result: Down-regulated in Transcription
  misc_feature: MA Experiment 20000315 PARAMETER Experiment Name: At_14day_Shoots-Roots_Sub_P Parameter: Age (day) Value: 14
  misc_feature: MA Experiment 20000315 PARAMETER Experiment Name: At_14day_Shoots-Roots_Sub_P Parameter: Organism Value: A. thaliana
  misc_feature: MA Experiment 20000315 PARAMETER Experiment Name: At_14day_Shoots-Roots_Sub_P Parameter: Plant Line Value: WS
  misc_feature: MA Experiment 20000315 PARAMETER Experiment Name: At_14day_Shoots-Roots_Sub_P Parameter: Tissue Value: Shoots vs. Whole Plant
  misc_feature: MA Experiment ID: 20000327 Result: Down-regulated in Transcription
  misc_feature: MA Experiment 20000327 PARAMETER Experiment Name: At_42deg_Heat_Sub_P Parameter: Age (day) Value: 14
  misc_feature: MA Experiment 20000327 PARAMETER Experiment Name: At_42deg_Heat_Sub_P Parameter: Organism Value: A. thaliana
  misc_feature: MA Experiment 20000327 PARAMETER Experiment Name: At_42deg_Heat_Sub_P Parameter: Plant Line Value: WS
  misc_feature: MA Experiment 20000327 PARAMETER Experiment Name: At_42deg_Heat_Sub_P Parameter: Temperature (deg C) Value: 42 vs. 22
  misc_feature: MA Experiment 20000327 PARAMETER Experiment Name: At_42deg_Heat_Sub_P Parameter: Timepoint (hr) Value: 1
  misc_feature: MA Experiment 20000327 PARAMETER Experiment Name: At_42deg_Heat_Sub_P Parameter: Tissue Value: Aerial
  misc_feature: MA Experiment ID: 20000328 Result: Down-regulated in Transcription
  misc_feature: MA Experiment 20000328 PARAMETER Experiment Name: At_42deg_Heat_Sub_P Parameter: Age (day) Value: 14
  misc_feature: MA Experiment 20000328 PARAMETER Experiment Name: At_42deg_Heat_Sub_P Parameter: Organism Value: A. thaliana
  misc_feature: MA Experiment 20000328 PARAMETER Experiment Name: At_42deg_Heat_Sub_P Parameter: Plant Line Value: WS
  misc_feature: MA Experiment 20000328 PARAMETER Experiment Name: At_42deg_Heat_Sub_P Parameter: Temperature (deg C) Value: 42 vs. 22
  misc_feature: MA Experiment 20000328 PARAMETER Experiment Name: At_42deg_Heat_Sub_P Parameter: Timepoint (hr) Value: 6
  misc_feature: MA Experiment 20000328 PARAMETER Experiment Name: At_42deg_Heat_Sub_P Parameter: Tissue Value: Aerial
actgatacagtttaacagaaatctccacgaacctcgatttcataagcaaataaagatattttcggagaaatatcttaatgtcatgtcctcttgccttcaccttctctctcccgtctattttcccctttccttctcaactgcttccattttcccgccataaacatccttatcttcttcgcgccacaccaacctctgcaaccgaagatgttgcctccgccgtttctggcgcaccttcaatatttatctctcaatcacgctctccggagtggtggattgacttgctccggtccaaagttcgatctaatttgctccgtgaagctgttttgacttacgttgacatgattgttttgggtataaaacccgataattatgcgttccctgctttgctaaaggctgtagcagatcttcaggacatggaactggggaaacagattcatgcccatgtgtataaatttgggtacggtgtggattccgtgactgtggctaatacccttgtgaatttgtatagaaagtgtggagatttcggagctgtctataaggtgttcgatagaatatctgagagaaaccaagtctcttggaattctttaatttcttctttgtgtagttttgagaagtgggaaatggcgttagaggcatttcggtgtatgttggatgaaaatgtggaacctagttcgtttaccttggtgagtgtggttactgcttgttcgaatttgcctatgcctgagggattaatgatgggtaagcaggttcacgcctatggtttgagaaagggtgaattgaattcgtttataatcaacacattggtggctatgtatggtaaactgggaaaattagcatcttctaaagtcttacttggttcttttggaggccgtgacttggtcacatggaacactgtgttgagctcgttatgtcagaacgagcagttgcttgaagcattggaatatttgcgtgaaatggtgcttgaaggtgttgaaccagatgagttcactatttcaagtgttcttcctgcttgttcacacttggagatgcttcgcacagggaaagaattgcatgcttatgctttgaaaaatggctctttggatgagaattcctttgttggtagtgctttggttgacatgtattgcaattgcaagcaagtgttgagtggtcgtcgagtatttgatggaatgtttgatagaaagattggtctgtggaatgctatgatcgctgggtattcccagaatgagcatgacaaggaagcgttgttgcttttcattggaatggaagaaagtgctgggcttctggctaactctaccacaatggcaggtgttgttcctgcttgtgtccgttctggtgcgttctctagaaaggaagctatccatggatttgttgtgaagagaggtttagatagagacaggtttgtgcagaatacactgatggatatgtattctaggctgggaaagatcgatatcgccatgcggatattcggtaaaatggaagatagagatttagttacgtggaacacgatgattacgggttatgtattctcagaacaccatgaggacgcacttctcctgctacacaagatgcaaaaccttgaaagaaaagtgagcaagggggctagccgagttagtcttaaacctaattccatcactctgatgacaatccttcccagttgtgctgcactatcagcattagcaaaaggaaaagaaattcatgcttatgccatcaagaacaatttggcaactgatgtggctgtcggaagcgctttagttgacatgtacgcaaaatgcgggtgcctacagatgtcgagaaaagtgtttgatcagattccacaaaaaaatgttattacttggaatgtgattataatggcttacgggatgcatggaaacggtcaagaagccatagatctgctaagaatgatgatggttcagggagtaaaaccaaacgaggttacattcatctcagtatttgcagcttgtagccactcaggcatggtggatgaaggattaaggatattctatgttatgaaacccgactacggggttgaaccaagctcagatcattatgcttgtgttgtagatttgcttggaagggctggtagaattaaagaagcatatcaactcatgaatatgatgcctcgtgatttcaacaaagctggagcatggagtagcctccttggtgccagtcggattcacaataacctagaaattggagaaattgctgctcaaaatctcattcaactggaaccaaatgtagctagtcactatgtgttacttgccaatatttattcatcagcaggcctctgggataaagcaacagaggtaagaagaaatatgaaagagcaaggcgtgagaaaagaacctggatgtagctggattgagcatggcgatgaagtacataaatttgtagccggtgactcatctcacccgcaaagcgaaaagctcagtggatatctcgagacattgtgggagagaatgagaaaagaaggatatgtacctgacacatcttgtgtactccacaatgtagaggaagatgaaaaagagattctgctttgtggacacagtgagaagctagcaattgcgtttgggatacttaacacatcacccggtacaattattagggtggctaaaaacctcagggtttgtaatgattgtcatcttgcaaccaagtttatctcaaagattgttgatagagaaatcatcttgagagatgttaggaggtttcatcgtttcaagaatggaacttgctcctgtggagactattggtgaaagataagctccataaaactctcttttttcttcattgtatatcttgtaagtgttgattcttgtataagttatacagtataacacacagttg

SEQ ID NO: 102956 - protein, 890 aa, Arabidopsis thaliana
  peptide (1)..(890): Ceres Seq. ID no. 13611595
  misc_feature (165)..(199): Pfam Name: PPR repeat Pfam Description: PPR repeat
  misc_feature (117)..(890): Homolog of NCBI NO: 15220337 NR Description: pentatricopeptide (PPR) repeat-containing protein
  misc_feature (47)..(890): Homolog of NCBI NO: 18394615 NR Description: pentatricopeptide (PPR) repeat-containing protein
  misc_feature (102)..(890): Homolog of NCBI NO: 15234006 NR Description: pentatricopeptide (PPR) repeat-containing protein
  misc_feature (47)..(890): Homolog of NCBI NO: 25402861 NR Description: protein F15H18.4 [imported] - Arabidopsis >gi|6714305|gb|AAF26001.1|AC013354_20 F15H18.4 [Arabidopsis
  misc_feature (78)..(890): Homolog of NCBI NO: 30693150 NR Description: pentatricopeptide (PPR) repeat-containing protein
  misc_feature (129)..(890): Homolog of NCBI NO: 15228590 NR Description: pentatricopeptide (PPR) repeat-containing protein thaliana] >gi|6091764|gb|AAF03474.1|AC009327_13 hypothetical [Arabidopsis thaliana] >gi|28393735|gb|AAO42278.1| unknown
  misc_feature (65)..(838): Homolog of NCBI NO: 15229419 NR Description: pentatricopeptide (PPR) repeat-containing protein
  misc_feature (266)..(890): Homolog of NCBI NO: 15231617 NR Description: expressed protein [Arabidopsis thaliana]
  misc_feature (107)..(890): Homolog of NCBI NO: 25354624 NR Description: protein F3O9.28 [imported] - Arabidopsis thaliana
  misc_feature (337)..(890): Homolog of NCBI NO: 15242684 NR Description: pentatricopeptide (PPR) repeat-containing protein
MSCPLAFTFSLPSIFPFPSQLLPFSRHKHPYLLRATPTSATEDVASAVSGAPSIFISQSRSPEWWIDLLRSKVRSNLLREAVLTYVDMIVLGIKPDNYAFPALLKAVADLQDMELGKQIHAHVYKFGYGVDSVTVANTLVNLYRKCGDFGAVYKVFDRISERNQVSWNSLISSLCSFEKWEMALEAFRCMLDENVEPSSFTLVSVVTACSNLPMPEGLMMGKQVHAYGLRKGELNSFIINTLVAMYGKLGKLASSKVLLGSFGGRDLVTWNTVLSSLCQNEQLLEALEYLREMVLEGVEPDEFTISSVLPACSHLEMLRTGKELHAYALKNGSLDENSFVGSALVDMYCNCKQVLSGRRVFDGMFDRKIGLWNAMIAGYSQNEHDKEALLLFIGMEESAGLLANSTTMAGVVPACVRSGAFSRKEAIHGFVVKRGLDRDRFVQNTLMDMYSRLGKIDIAMRIFGKMEDRDLVTWNTMITGYVFSEHHEDALLLLHKMQNLERKVSKGASRVSLKPNSITLMTILPSCAALSALAKGKEIHAYAIKNNLATDVAVGSALVDMYAKCGCLQMSRKVFDQIPQKNVITWNVIIMAYGMHGNGQEAIDLLRMMMVQGVKPNEVTFISVFAACSHSGMVDEGLRIFYVMKPDYGVEPSSDHYACVVDLLGRAGRIKEAYQLMNMMPRDFNKAGAWSSLLGASRIHNNLEIGEIAAQNLIQLEPNVASHYVLLANIYSSAGLWDKATEVRRNMKEQGVRKEPGCSWIEHGDEVHKFVAGDSSHPQSEKLSGYLETLWERMRKEGYVPDTSCVLHNVEEDEKEILLCGHSEKLAIAFGILNTSPGTIIRVAKNLRVCNDCHLATKFISKIVDREIILRDVRRFHRFKNGTCSCGDYW

SEQ ID NO: 102957 - protein, 803 aa, Arabidopsis thaliana; identical to SEQ ID NO: 72444
  peptide (1)..(803): Ceres Seq. ID no. 13611596
  misc_feature (78)..(112): Pfam Name: PPR repeat Pfam Description: PPR repeat
  misc_feature (30)..(803): Homolog of NCBI NO: 15220337 NR Description: pentatricopeptide (PPR) repeat-containing protein
  misc_feature (1)..(803): Homolog of NCBI NO: 18394615 NR Description: pentatricopeptide (PPR) repeat-containing protein
  misc_feature (15)..(803): Homolog of NCBI NO: 15234006 NR Description: pentatricopeptide (PPR) repeat-containing protein
  misc_feature (1)..(803): Homolog of NCBI NO: 25402861 NR Description: protein F15H18.4 [imported] - Arabidopsis >gi|6714305|gb|AAF26001.1|AC013354_20 F15H18.4 [Arabidopsis
  misc_feature (1)..(803): Homolog of NCBI NO: 30693150 NR Description: pentatricopeptide (PPR) repeat-containing protein
  misc_feature (42)..(803): Homolog of NCBI NO: 15228590 NR Description: pentatricopeptide (PPR) repeat-containing protein thaliana] >gi|6091764|gb|AAF03474.1|AC009327_13 hypothetical [Arabidopsis thaliana] >gi|28393735|gb|AAO42278.1| unknown
  misc_feature (1)..(751): Homolog of NCBI NO: 15229419 NR Description: pentatricopeptide (PPR) repeat-containing protein
  misc_feature (179)..(803): Homolog of NCBI NO: 15231617 NR Description: expressed protein [Arabidopsis thaliana]
  misc_feature (20)..(803): Homolog of NCBI NO: 25354624 NR Description: protein F3O9.28 [imported] - Arabidopsis thaliana
  misc_feature (250)..(803): Homolog of NCBI NO: 15242684 NR Description: pentatricopeptide (PPR) repeat-containing protein

SEQ ID NO: 102958 - protein, 778 aa, Arabidopsis thaliana; identical to SEQ ID NO: 72445
  peptide (1)..(778): Ceres Seq. ID no. 13611597
  misc_feature (53)..(87): Pfam Name: PPR repeat Pfam Description: PPR repeat
  misc_feature (5)..(778): Homolog of NCBI NO: 15220337 NR Description: pentatricopeptide (PPR) repeat-containing protein
  misc_feature (1)..(778): Homolog of NCBI NO: 18394615 NR Description: pentatricopeptide (PPR) repeat-containing protein
  misc_feature (1)..(778): Homolog of NCBI NO: 15234006 NR Description: pentatricopeptide (PPR) repeat-containing protein
  misc_feature (1)..(778): Homolog of NCBI NO: 25402861 NR Description: protein F15H18.4 [imported] - Arabidopsis >gi|6714305|gb|AAF26001.1|AC013354_20 F15H18.4 [Arabidopsis
  misc_feature (1)..(778): Homolog of NCBI NO: 30693150 NR Description: pentatricopeptide (PPR) repeat-containing protein
  misc_feature (17)..(778): Homolog of NCBI NO: 15228590 NR Description: pentatricopeptide (PPR) repeat-containing protein thaliana] >gi|6091764|gb|AAF03474.1|AC009327_13 hypothetical [Arabidopsis thaliana] >gi|28393735|gb|AAO42278.1| unknown
  misc_feature (1)..(726): Homolog of NCBI NO: 15229419 NR Description: pentatricopeptide (PPR) repeat-containing protein
  misc_feature (154)..(778): Homolog of NCBI NO: 15231617 NR Description: expressed protein [Arabidopsis thaliana]
  misc_feature (1)..(778): Homolog of NCBI NO: 25354624 NR Description: protein F3O9.28 [imported] - Arabidopsis thaliana
  misc_feature (225)..(778): Homolog of NCBI NO: 15242684 NR Description: pentatricopeptide (PPR) repeat-containing protein

SEQ ID NO: 102959 - DNA, 1973 bp, Arabidopsis thaliana
  misc_feature (1)..(1973): Ceres Seq. ID no. 13611598
  misc_feature: MA Experiment ID: 108461 Result: Up-regulated in Transcription
  misc_feature: MA Experiment 108461 PARAMETER Experiment Name: At_Germinating_Seeds_cDNA_P Parameter: Age (day) Value: 1 vs. 0
  misc_feature: MA Experiment 108461 PARAMETER Experiment Name: At_Germinating_Seeds_cDNA_P Parameter: Tissue Value: Germinating Seeds
  misc_feature: MA Experiment ID: 108462 Result: Up-regulated in Transcription
  misc_feature: MA Experiment 108462 PARAMETER Experiment Name: At_Germinating_Seeds_cDNA_P Parameter: Age (day) Value: 2 vs. 0
  misc_feature: MA Experiment 108462 PARAMETER Experiment Name: At_Germinating_Seeds_cDNA_P Parameter: Tissue Value: Germinating Seeds
  misc_feature: MA Experiment ID: 108463 Result: Up-regulated in Transcription
  misc_feature: MA Experiment 108463 PARAMETER Experiment Name: At_Germinating_Seeds_cDNA_P Parameter: Age (day) Value: 3 vs. 0
  misc_feature: MA Experiment 108463 PARAMETER Experiment Name: At_Germinating_Seeds_cDNA_P Parameter: Tissue Value: Germinating Seeds
  misc_feature: MA Experiment ID: 108464 Result: Up-regulated in Transcription
  misc_feature: MA Experiment 108464 PARAMETER Experiment Name: At_Germinating_Seeds_cDNA_P Parameter: Age (day) Value: 4 vs. 0
  misc_feature: MA Experiment 108464 PARAMETER Experiment Name: At_Germinating_Seeds_cDNA_P Parameter: Tissue Value: Germinating Seeds
  misc_feature: MA Experiment ID: 108577 Result: Down-regulated in Transcription
  misc_feature: MA Experiment 108577 PARAMETER Experiment Name: At_42deg_Heat_cDNA_P Parameter: Temperature (deg C) Value: 42 vs. 22
  misc_feature: MA Experiment 108577 PARAMETER Experiment Name: At_42deg_Heat_cDNA_P Parameter: Timepoint (hr) Value: 6
  misc_feature: MA Experiment 108577 PARAMETER Experiment Name: At_42deg_Heat_cDNA_P Parameter: Tissue Value: Aerial
  misc_feature: MA Experiment ID: 108585 Result: Down-regulated in Transcription
  misc_feature: MA Experiment 108585 PARAMETER Experiment Name: At_5mM_NaNP_cDNA_P Parameter: Timepoint (hr) Value: 6
  misc_feature: MA Experiment 108585 PARAMETER Experiment Name: At_5mM_NaNP_cDNA_P Parameter: Tissue Value: Aerial
  misc_feature: MA Experiment 108585 PARAMETER Experiment Name: At_5mM_NaNP_cDNA_P Parameter: Treatment Value: null
  misc_feature: MA Experiment ID: 108595 Result: Down-regulated in Transcription
  misc_feature: MA Experiment 108595 PARAMETER Experiment Name: At_Ler-pi_Ovule_cDNA_P Parameter: Plant Line Value: null
  misc_feature: MA Experiment ID: 108668 Result: Down-regulated in Transcription
  misc_feature: MA Experiment 108668 PARAMETER Experiment Name: At_2mM_SA_cDNA_P Parameter: Plant Line Value: WS
  misc_feature: MA Experiment 108668 PARAMETER Experiment Name: At_2mM_SA_cDNA_P Parameter: Timepoint (hr) Value: 6
  misc_feature: MA Experiment 108668 PARAMETER Experiment Name: At_2mM_SA_cDNA_P Parameter: Treatment Value: 2mM SA vs. No Treatment
  misc_feature: MA Experiment ID: 20000070 Result: Down-regulated in Transcription
  misc_feature: MA Experiment 20000070 PARAMETER Experiment Name: At_100uM_ABA_Mutants_cDNA_P Parameter: Plant Line Value: CS24
  misc_feature: MA Experiment 20000070 PARAMETER Experiment Name: At_100uM_ABA_Mutants_cDNA_P Parameter: Timepoint (hr) Value: 6
  misc_feature: MA Experiment 20000070 PARAMETER Experiment Name: At_100uM_ABA_Mutants_cDNA_P Parameter: Tissue Value: Aerial
  misc_feature: MA Experiment 20000070 PARAMETER Experiment Name: At_100uM_ABA_Mutants_cDNA_P Parameter: Treatment Value: 100uM ABA vs. No Treatment
  misc_feature: MA Experiment ID: 20000087 Result: Down-regulated in Transcription
  misc_feature: MA Experiment 20000087 PARAMETER Experiment Name: At_100uM_ABA_Mutants_cDNA_P Parameter: Plant Line Value: WS
  misc_feature: MA Experiment 20000087 PARAMETER Experiment Name: At_100uM_ABA_Mutants_cDNA_P Parameter: Timepoint (hr) Value: 6
  misc_feature: MA Experiment 20000087 PARAMETER Experiment Name: At_100uM_ABA_Mutants_cDNA_P Parameter: Tissue Value: Aerial
  misc_feature: MA Experiment 20000087 PARAMETER Experiment Name: At_100uM_ABA_Mutants_cDNA_P Parameter: Treatment Value: 100uM ABA vs. No Treatment
  misc_feature: MA Experiment ID: 20000111 Result: Down-regulated in Transcription
  misc_feature: MA Experiment 20000111 PARAMETER Experiment Name: At_42deg_Heat_cDNA_P Parameter: Temperature (deg C) Value: 42 vs. 22
  misc_feature: MA Experiment 20000111 PARAMETER Experiment Name: At_42deg_Heat_cDNA_P Parameter: Timepoint (hr) Value: 6
  misc_feature: MA Experiment 20000111 PARAMETER Experiment Name: At_42deg_Heat_cDNA_P Parameter: Tissue Value: Aerial
  misc_feature: MA Experiment ID: 20000113 Result: Down-regulated in Transcription
  misc_feature: MA Experiment 20000113 PARAMETER Experiment Name: At_42deg_Heat_cDNA_P Parameter: Temperature (deg C) Value: 42 vs. 22
  misc_feature: MA Experiment 20000113 PARAMETER Experiment Name: At_42deg_Heat_cDNA_P Parameter: Timepoint (hr) Value: 8
  misc_feature: MA Experiment 20000113 PARAMETER Experiment Name: At_42deg_Heat_cDNA_P Parameter: Tissue Value: Aerial
  misc_feature: MA Experiment ID: 20000117 Result: Down-regulated in Transcription
  misc_feature: MA Experiment 20000117 PARAMETER Experiment Name: At_100uM_ABA_Mutants_cDNA_P Parameter: Plant Line Value: Columbia
  misc_feature: MA Experiment 20000117 PARAMETER Experiment Name: At_100uM_ABA_Mutants_cDNA_P Parameter: Timepoint (hr) Value: 6
  misc_feature: MA Experiment 20000117 PARAMETER Experiment Name: At_100uM_ABA_Mutants_cDNA_P Parameter: Tissue Value: Aerial
  misc_feature: MA Experiment 20000117 PARAMETER Experiment Name: At_100uM_ABA_Mutants_cDNA_P Parameter: Treatment Value: 100uM ABA vs. No Treatment
  misc_feature: MA Experiment ID: 20000173 Result: Down-regulated in Transcription
  misc_feature: MA Experiment 20000173 PARAMETER Experiment Name: At_42deg_Heat_P Parameter: Age (day) Value: 14
  misc_feature: MA Experiment 20000173 PARAMETER Experiment Name: At_42deg_Heat_P Parameter: Organism Value: A. thaliana
  misc_feature: MA Experiment 20000173 PARAMETER Experiment Name: At_42deg_Heat_P Parameter: Plant Line Value: WS
  misc_feature: MA Experiment 20000173 PARAMETER Experiment Name: At_42deg_Heat_P Parameter: Temperature (deg C) Value: 42 vs. 22
  misc_feature: MA Experiment 20000173 PARAMETER Experiment Name: At_42deg_Heat_P Parameter: Timepoint (hr) Value: 6
  misc_feature: MA Experiment 20000173 PARAMETER Experiment Name: At_42deg_Heat_P Parameter: Tissue Value: Aerial
  misc_feature: MA Experiment ID: 20000180 Result: Up-regulated in Transcription
  misc_feature: MA Experiment 20000180 PARAMETER Experiment Name: At_Germinating_Seeds_P Parameter: Age (hr) Value: 24 vs. 0
  misc_feature: MA Experiment 20000180 PARAMETER Experiment Name: At_Germinating_Seeds_P Parameter: Tissue Value: Germinating Seeds
  misc_feature: MA Experiment ID: 20000185 Result: Down-regulated in Transcription
  misc_feature: MA Experiment 20000185 PARAMETER Experiment Name: At_Roots__P Parameter: Age (day) Value: 7 vs. 21
  misc_feature: MA Experiment 20000185 PARAMETER Experiment Name: At_Roots__P Parameter: Organism Value: A. thaliana
  misc_feature: MA Experiment 20000185 PARAMETER Experiment Name: At_Roots__P Parameter: Tissue Value: Roots vs. Whole Plant
  misc_feature: MA Experiment ID: 20000439 Result: Down-regulated in Transcription
  misc_feature: MA Experiment 20000439 PARAMETER Experiment Name: At_Roots__P Parameter: Age (day) Value: 14 vs. 21
  misc_feature: MA Experiment 20000439 PARAMETER Experiment Name: At_Roots__P Parameter: Organism Value: A. thaliana
  misc_feature: MA Experiment 20000439 PARAMETER Experiment Name: At_Roots__P Parameter: Tissue Value: Roots vs. Whole Plant
  misc_feature: MA Experiment ID: 20000496 Result: Up-regulated in Transcription
  misc_feature: MA Experiment 20000496 PARAMETER Experiment Name: At_Guard_Cells_P Parameter: Harvest Date Value: 7/19/2002
  misc_feature: MA Experiment 20000496 PARAMETER Experiment Name: At_Guard_Cells_P Parameter: Organism Value: Canola
  misc_feature: MA Experiment 20000496 PARAMETER Experiment Name: At_Guard_Cells_P Parameter: Tissue Value: Guard Cells vs. Leaves
  misc_feature: MA Experiment ID: 20001557 Result: Down-regulated in Transcription
  misc_feature: MA Experiment 20001557 PARAMETER Experiment Name: At_Drought_Soil_Dry_P Parameter: Age (day) Value: 27
  misc_feature: MA Experiment 20001557 PARAMETER Experiment Name: At_Drought_Soil_Dry_P Parameter: Organism Value: A. thaliana
  misc_feature: MA Experiment 20001557 PARAMETER Experiment Name: At_Drought_Soil_Dry_P Parameter: Plant Line Value: WS
  misc_feature: MA Experiment 20001557 PARAMETER Experiment Name: At_Drought_Soil_Dry_P Parameter: Post Timepoint (hr) Value: 3
  misc_feature: MA Experiment 20001557 PARAMETER Experiment Name: At_Drought_Soil_Dry_P Parameter: Post-Treatment Value: Re-Water vs. No Drought
  misc_feature: MA Experiment 20001557 PARAMETER Experiment Name: At_Drought_Soil_Dry_P Parameter: Timepoint (day) Value: 13
  misc_feature: MA Experiment 20001557 PARAMETER Experiment Name: At_Drought_Soil_Dry_P Parameter: Treatment Value: Drought vs. No Drought
  misc_feature: MA Experiment ID: 20001905 Result: Down-regulated in Transcription
  misc_feature: MA Experiment 20001905 PARAMETER Experiment Name: At_Drought_Reproduction_P Parameter: Age (day) Value: 40
  misc_feature: MA Experiment 20001905 PARAMETER Experiment Name: At_Drought_Reproduction_P Parameter: Organism Value: A. thaliana
  misc_feature: MA Experiment 20001905 PARAMETER Experiment Name: At_Drought_Reproduction_P Parameter: Plant Line Value: WS
  misc_feature: MA Experiment 20001905 PARAMETER Experiment Name: At_Drought_Reproduction_P Parameter: Timepoint (day) Value: 10
  misc_feature: MA Experiment 20001905 PARAMETER Experiment Name: At_Drought_Reproduction_P Parameter: Tissue Value: Rosettes
  misc_feature: MA Experiment 20001905 PARAMETER Experiment Name: At_Drought_Reproduction_P Parameter: Treatment Value: Drought vs. No Drought
aggcaaaaaacaatggcatcatcatcatcatcacatttgttttgacgctccaagaaaatttgcatggcgacacattctatgatcattccttctccttcttcttcttcctcgtctctcgctactgctgcgtctccgtttaaagagactctaccactctttagtagatctctcacattcccgagaaaatccttgttttctcaggttcgcttgagattcttcgccgagaaacattctcagcttgatacttcaaatgggtgtgccactaatttcgcttctttacaagattctggagatcaacttacagaggaacatgttacaaaaggagagtctactcttagtattacagttgttggagcgtcaggggacttagccaagaagaagatatttcctgcattgtttgctctcttttatgagggttgtcttcctcaggacttttctgtttttggttatgctcggactaaactcactcatgaagagcttcgtgacatgattagtagtactttaacttgccggattgatcagagggaaaaatgtggggataagatggagcagttcttgaaaagatgcttttaccattcgggtcagtataactcggaagaggattttgcggaactaaacaagaagctcaaagagaaagaggcaggaaagatatcaaacaggctgtactatttgtcgatacccccaaacatattcgttgatgtggttaggtgtgcaagtcttagagcctcctcagagaatggctggacaagggtcattgtggaaaagccatttggtcgtgactctgaatcatccggagagttaactagatgtctgaaacagtatcttacagaggagcaaatcttcaggattgatcactatttgggaaaggagcttgttgagaacctttcagtgctccgattctcaaatcttgttttcgagcctctgtggtcaagaaattacatacgcaacgttcagctgattttttctgaggatttcggaacagaagggcgtggaggttactttgatcaatatggaatcatacgagacatcatgcaaaaccatctcttgcaaatacttgcactttttgcaatggagacgccagtgagcttagatgctgaggacataagaagtgaaaaggtgaaagttttgagatcaatgaaaccgttgcggcttgaagatgtggttgttggtcaatacaaaggccataacaagggaggaaaaacttatccaggttatacagacgatccaacggttccaaatcacagtctcactcctacatttgctgcagcagccatgttcatcaacaatgcgagatgggacggtgttccttttcttatgaaagctggaaaagctctccataccagaggagcagagatcagagttcagttcagacatgtcccaggaaacttgtacaagaaaagttttgctactaatttagacaatgcaacaaatgaactagtgattagagttcagcctgatgaagggatatacctgaggatcaacaacaaagttcctggtcttggaatgagactagatcgcagcgaccttaaccttctatatcgatccaggtatccaagagagataccagatgcatatgaaagactgcttctcgatgcaatcgaaggagagaggaggttgtttatcagaagtgatgagctagatgcagcatgggatctattcacaccggctttgaaggaactagaggagaagaaaatcattcctgagctctatccatatggaagcagaggtcctgttggtgcacattaccttgcatctaagtacaatgtgagatggggagatcttggagaagcttaagctttcgacagaaacaatatgatttggtgttaatatgagtaaactaacttgtcgatattatcaatgcgtagataaatccttgttaccaaaacttgctttttctctgacattttttgattgtttttggttctaaatcgagcatttcggaggaatgtaccaaaactcttgcaggaatagac

SEQ ID NO: 102960 - protein, 576 aa, Arabidopsis thaliana; identical to SEQ ID NO: 35335
  peptide (1)..(576): Ceres Seq. ID no. 13611599
  misc_feature (86)..(273): Pfam Name: Glucose-6-phosphate dehydrogenase, NAD binding domain Pfam Description: Glucose-6-phosphate dehydrogenase, NAD binding
  misc_feature (1)..(576): Homolog of NCBI NO: 15238612 NR Description: glucose-6-phosphate dehydrogenase [Arabidopsis
  misc_feature (1)..(576): Homolog of NCBI NO: 3021305 NR Description: plastidic glucose-6-phosphate dehydrogenase
  misc_feature (64)..(576): Homolog of NCBI NO: 1174336 NR Description: glucose-6-phosphate 1-dehydrogenase [Arabidopsis
  misc_feature (14)..(573): Homolog of NCBI NO: 3023818 NR Description: Glucose-6-phosphate 1-dehydrogenase, chloroplast
  misc_feature (10)..(573): Homolog of NCBI NO: 7431274 NR Description: glucose-6-phosphate 1-dehydrogenase (EC 1.1.1.49)
  misc_feature (36)..(575): Homolog of NCBI NO: 3334193 NR Description: Glucose-6-phosphate 1-dehydrogenase, chloroplast
  misc_feature (53)..(573): Homolog of NCBI NO: 33304517 NR Description: putative plastidic glucose-6-phosphate
  misc_feature (13)..(573): Homolog of NCBI NO: 24745908 NR Description: glucose 6-phosphate dehydrogenase [Solanum
  misc_feature (86)..(573): Homolog of NCBI NO: 9392607 NR Description: plastidic glucose 6-phosphate dehydrogenase
  misc_feature (13)..(573): Homolog of NCBI NO: 5734502 NR Description: glucose-6-phosphate 1-dehydrogenase [Solanum

SEQ ID NO: 102961 - protein, 571 aa, Arabidopsis thaliana; identical to SEQ ID NO: 35336
  peptide (1)..(571): Ceres Seq. ID no. 13611600
  misc_feature (81)..(268): Pfam Name: Glucose-6-phosphate dehydrogenase, NAD binding domain Pfam Description: Glucose-6-phosphate dehydrogenase, NAD binding
  misc_feature (1)..(571): Homolog of NCBI NO: 15238612 NR Description: glucose-6-phosphate dehydrogenase [Arabidopsis
  misc_feature (1)..(571): Homolog of NCBI NO: 3021305 NR Description: plastidic glucose-6-phosphate dehydrogenase
  misc_feature (59)..(571): Homolog of NCBI NO: 1174336 NR Description: glucose-6-phosphate 1-dehydrogenase [Arabidopsis
  misc_feature (9)..(568): Homolog of NCBI NO: 3023818 NR Description: Glucose-6-phosphate 1-dehydrogenase, chloroplast
  misc_feature (5)..(568): Homolog of NCBI NO: 7431274 NR Description: glucose-6-phosphate 1-dehydrogenase (EC 1.1.1.49)
  misc_feature (31)..(570): Homolog of NCBI NO: 3334193 NR Description: Glucose-6-phosphate 1-dehydrogenase, chloroplast
  misc_feature (48)..(568): Homolog of NCBI NO: 33304517 NR Description: putative plastidic glucose-6-phosphate
  misc_feature (8)..(568): Homolog of NCBI NO: 24745908 NR Description: glucose 6-phosphate dehydrogenase [Solanum
  misc_feature (81)..(568): Homolog of NCBI NO: 9392607 NR Description: plastidic glucose 6-phosphate dehydrogenase
  misc_feature (8)..(568): Homolog of NCBI NO: 5734502 NR Description: glucose-6-phosphate 1-dehydrogenase [Solanum

SEQ ID NO: 102962 - protein, 435 aa, Arabidopsis thaliana; identical to SEQ ID NO: 35337
  peptide (1)..(435): Ceres Seq. ID no. 13611601
  misc_feature (1)..(132): Pfam Name: Glucose-6-phosphate dehydrogenase, NAD binding domain Pfam Description: Glucose-6-phosphate dehydrogenase, NAD binding
  misc_feature (1)..(435): Homolog of NCBI NO: 15238612 NR Description: glucose-6-phosphate dehydrogenase [Arabidopsis
  misc_feature (1)..(435): Homolog of NCBI NO: 3021305 NR Description: plastidic glucose-6-phosphate dehydrogenase
  misc_feature (1)..(435): Homolog of NCBI NO: 1174336 NR Description: glucose-6-phosphate 1-dehydrogenase [Arabidopsis
  misc_feature (1)..(432): Homolog of NCBI NO: 3023818 NR Description: Glucose-6-phosphate 1-dehydrogenase, chloroplast
  misc_feature (1)..(432): Homolog of NCBI NO: 7431274 NR Description: glucose-6-phosphate 1-dehydrogenase (EC 1.1.1.49)
  misc_feature (1)..(434): Homolog of NCBI NO: 3334193 NR Description: Glucose-6-phosphate 1-dehydrogenase, chloroplast
  misc_feature (1)..(432): Homolog of NCBI NO: 33304517 NR Description: putative plastidic glucose-6-phosphate
  misc_feature (1)..(432): Homolog of NCBI NO: 24745908 NR Description: glucose 6-phosphate dehydrogenase [Solanum
  misc_feature (1)..(432): Homolog of NCBI NO: 9392607 NR Description: plastidic glucose 6-phosphate dehydrogenase
  misc_feature (1)..(432): Homolog of NCBI NO: 5734502 NR Description: glucose-6-phosphate 1-dehydrogenase [Solanum

SEQ ID NO: 102963 - DNA, 1735 bp, Arabidopsis thaliana
  misc_feature (1)..(1735): Ceres Seq. ID no. 13611606
  misc_feature: MA Experiment ID: 20000169 Result: Up-regulated in Transcription
  misc_feature: MA Experiment 20000169 PARAMETER Experiment Name: At_100uM_ABA_P Parameter: Age (day) Value: 14
  misc_feature: MA Experiment 20000169 PARAMETER Experiment Name: At_100uM_ABA_P Parameter: Organism Value: A. thaliana
  misc_feature: MA Experiment 20000169 PARAMETER Experiment Name: At_100uM_ABA_P Parameter: Plant Line Value: WS
  misc_feature: MA Experiment 20000169 PARAMETER Experiment Name: At_100uM_ABA_P Parameter: Timepoint (hr) Value: 6
  misc_feature: MA Experiment 20000169 PARAMETER Experiment Name: At_100uM_ABA_P Parameter: Tissue Value: Aerial
  misc_feature: MA Experiment 20000169 PARAMETER Experiment Name: At_100uM_ABA_P Parameter: Treatment Value: 100uM ABA vs. No Treatment
  misc_feature: MA Experiment ID: 20000171 Result: Down-regulated in Transcription
  misc_feature: MA Experiment 20000171 PARAMETER Experiment Name: At_42deg_Heat_P Parameter: Age (day) Value: 14
  misc_feature: MA Experiment 20000171 PARAMETER Experiment Name: At_42deg_Heat_P Parameter: Organism Value: A. thaliana
  misc_feature: MA Experiment 20000171 PARAMETER Experiment Name: At_42deg_Heat_P Parameter: Plant Line Value: WS
  misc_feature: MA Experiment 20000171 PARAMETER Experiment Name: At_42deg_Heat_P Parameter: Temperature (deg C) Value: 42 vs. 22
  misc_feature: MA Experiment 20000171 PARAMETER Experiment Name: At_42deg_Heat_P Parameter: Timepoint (hr) Value: 1
  misc_feature: MA Experiment 20000171 PARAMETER Experiment Name: At_42deg_Heat_P Parameter: Tissue Value: Aerial
  misc_feature: MA Experiment ID: 20000173 Result: Down-regulated in Transcription
  misc_feature: MA Experiment 20000173 PARAMETER Experiment Name: At_42deg_Heat_P Parameter: Age (day) Value: 14
  misc_feature: MA Experiment 20000173 PARAMETER Experiment Name: At_42deg_Heat_P Parameter: Organism Value: A. thaliana
  misc_feature: MA Experiment 20000173 PARAMETER Experiment Name: At_42deg_Heat_P Parameter: Plant Line Value: WS
  misc_feature: MA Experiment 20000173 PARAMETER Experiment Name: At_42deg_Heat_P Parameter: Temperature (deg C) Value: 42 vs. 22
  misc_feature: MA Experiment 20000173 PARAMETER Experiment Name: At_42deg_Heat_P Parameter: Timepoint (hr) Value: 6
  misc_feature: MA Experiment 20000173 PARAMETER Experiment Name: At_42deg_Heat_P Parameter: Tissue Value: Aerial
  misc_feature: MA Experiment ID: 20000227 Result: Down-regulated in Transcription
  misc_feature: MA Experiment 20000227 PARAMETER Experiment Name: At_Root-Tips-vs-Tops_P Parameter: Tissue Value: Root Tips vs. Root Tops
  misc_feature: MA Experiment ID: 20000264 Result: Up-regulated in Transcription
  misc_feature: MA Experiment 20000264 PARAMETER Experiment Name: At_Open_Flower_P Parameter: Age (day) Value: 21
  misc_feature: MA Experiment 20000264 PARAMETER Experiment Name: At_Open_Flower_P Parameter: Plant Line Value: WS
  misc_feature: MA Experiment 20000264 PARAMETER Experiment Name: At_Open_Flower_P Parameter: Tissue Value: Open Flower vs. Whole Plant
  misc_feature: MA Experiment ID: 20000265 Result: Up-regulated in Transcription
  misc_feature: MA Experiment 20000265 PARAMETER Experiment Name: At_Open_Flower_P Parameter: Age (day) Value: 21
  misc_feature: MA Experiment 20000265 PARAMETER Experiment Name: At_Open_Flower_P Parameter: Plant Line Value: WS
  misc_feature: MA Experiment 20000265 PARAMETER Experiment Name: At_Open_Flower_P Parameter: Tissue Value: Closed Flower vs. Whole Plant
  misc_feature: MA Experiment ID: 20000267 Result: Up-regulated in Transcription
  misc_feature: MA Experiment 20000267 PARAMETER Experiment Name: At_Drought_P Parameter: Age (day) Value: 7
  misc_feature: MA Experiment 20000267 PARAMETER Experiment Name: At_Drought_P Parameter: Organism Value: A. thaliana
  misc_feature: MA Experiment 20000267 PARAMETER Experiment Name: At_Drought_P Parameter: Plant Line Value: WS
  misc_feature: MA Experiment 20000267 PARAMETER Experiment Name: At_Drought_P Parameter: Timepoint (hr) Value: 6
  misc_feature: MA Experiment 20000267 PARAMETER Experiment Name: At_Drought_P Parameter: Tissue Value: Whole Plant
  misc_feature: MA Experiment 20000267 PARAMETER Experiment Name: At_Drought_P Parameter: Treatment Value: Drought vs. No Drought
  misc_feature: MA Experiment ID: 20000286 Result: Up-regulated in Transcription
  misc_feature: MA Experiment 20000286 PARAMETER Experiment Name: At_Open_Flower_P Parameter: Age (day) Value: 21
  misc_feature: MA Experiment 20000286 PARAMETER Experiment Name: At_Open_Flower_P Parameter: Plant Line Value: WS
  misc_feature: MA Experiment 20000286 PARAMETER Experiment Name: At_Open_Flower_P Parameter: Tissue Value: Half Open vs. Whole Plant
  misc_feature: MA Experiment ID: 20000308 Result: Up-regulated in Transcription
  misc_feature: MA Experiment 20000308 PARAMETER Experiment Name: At_100mM_NaCl__P Parameter: Age (day) Value: 17
  misc_feature: MA Experiment 20000308 PARAMETER Experiment Name: At_100mM_NaCl__P Parameter: Organism Value: A. thaliana
  misc_feature: MA Experiment 20000308 PARAMETER Experiment Name: At_100mM_NaCl__P Parameter: Plant Line Value: WS
  misc_feature: MA Experiment 20000308 PARAMETER Experiment Name: At_100mM_NaCl__P Parameter: Timepoint (hr) Value: 72
  misc_feature: MA Experiment 20000308 PARAMETER Experiment Name: At_100mM_NaCl__P Parameter: Tissue Value: Whole Plant
  misc_feature: MA Experiment 20000308 PARAMETER Experiment Name: At_100mM_NaCl__P Parameter: Treatment Value: 100mM NaCl vs. No Treatment
  misc_feature: MA Experiment ID: 20000437 Result: Up-regulated in Transcription
  misc_feature: MA Experiment 20000437 PARAMETER Experiment Name: At_Drought_P Parameter: Age (day) Value: 8
  misc_feature: MA Experiment 20000437 PARAMETER Experiment Name: At_Drought_P Parameter: Organism Value: A. thaliana
  misc_feature: MA Experiment 20000437 PARAMETER Experiment Name: At_Drought_P Parameter: Plant Line Value: WS
  misc_feature: MA Experiment 20000437 PARAMETER Experiment Name: At_Drought_P Parameter: Timepoint (hr) Value: 24
  misc_feature: MA Experiment 20000437 PARAMETER Experiment Name: At_Drought_P Parameter: Tissue Value: Whole Plant
  misc_feature: MA Experiment 20000437 PARAMETER Experiment Name: At_Drought_P Parameter: Treatment Value: Drought vs. No Drought
  misc_feature: MA Experiment ID: 20000438 Result: Up-regulated in Transcription
  misc_feature: MA Experiment 20000438 PARAMETER Experiment Name: At_Shoots__P Parameter: Age (day) Value: 14
  misc_feature: MA Experiment 20000438 PARAMETER Experiment Name: At_Shoots__P Parameter: Tissue Value: Shoots vs. Whole Plant
  misc_feature: MA Experiment ID: 20000439 Result: Up-regulated in Transcription
  misc_feature: MA Experiment 20000439 PARAMETER Experiment Name: At_Roots__P Parameter: Age (day) Value: 14 vs. 21
  misc_feature: MA Experiment 20000439 PARAMETER Experiment Name: At_Roots__P Parameter: Organism Value: A. thaliana
  misc_feature: MA Experiment 20000439 PARAMETER Experiment Name: At_Roots__P Parameter: Tissue Value: Roots vs. Whole Plant
  misc_feature: MA Experiment ID: 20000445 Result: Up-regulated in Transcription
  misc_feature: MA Experiment 20000445 PARAMETER Experiment Name: At_100uM_NAA__P Parameter: Age (day) Value: 14
  misc_feature: MA Experiment 20000445 PARAMETER Experiment Name: At_100uM_NAA__P Parameter: Organism Value: A. thaliana
  misc_feature: MA Experiment 20000445 PARAMETER Experiment Name: At_100uM_NAA__P Parameter: Plant Line Value: WS
  misc_feature: MA Experiment 20000445 PARAMETER Experiment Name: At_100uM_NAA__P Parameter: Timepoint (hr) Value: 6
  misc_feature: MA Experiment 20000445 PARAMETER Experiment Name: At_100uM_NAA__P Parameter: Tissue Value: Aerial
  misc_feature: MA Experiment 20000445 PARAMETER Experiment Name: At_100uM_NAA__P Parameter: Treatment Value: 100uM NAA vs. No Treatment
  misc_feature: MA Experiment ID: 20000452 Result: Up-regulated in Transcription
  misc_feature: MA Experiment 20000452 PARAMETER Experiment Name: At_CS6879_Shoots-Roots_P Parameter: Age (day) Value: 14
  misc_feature: MA Experiment 20000452 PARAMETER Experiment Name: At_CS6879_Shoots-Roots_P Parameter: Organism Value: A. thaliana
  misc_feature: MA Experiment 20000452 PARAMETER Experiment Name: At_CS6879_Shoots-Roots_P Parameter: Plant Line Value: CS6879 vs. WS
  misc_feature: MA Experiment 20000452 PARAMETER Experiment Name: At_CS6879_Shoots-Roots_P Parameter: Tissue Value: Shoots
  misc_feature: MA Experiment ID: 20000453 Result: Up-regulated in Transcription
  misc_feature: MA Experiment 20000453 PARAMETER Experiment Name: At_100uM_ABA_P Parameter: Age (day) Value: 15
  misc_feature: MA Experiment 20000453 PARAMETER Experiment Name: At_100uM_ABA_P Parameter: Organism Value: A. thaliana
  misc_feature: MA Experiment 20000453 PARAMETER Experiment Name: At_100uM_ABA_P Parameter: Plant Line Value: WS
  misc_feature: MA Experiment 20000453 PARAMETER Experiment Name: At_100uM_ABA_P Parameter: Timepoint (hr) Value: 24
  misc_feature: MA Experiment 20000453 PARAMETER Experiment Name: At_100uM_ABA_P Parameter: Tissue Value: Aerial
  misc_feature: MA Experiment 20000453 PARAMETER Experiment Name: At_100uM_ABA_P Parameter: Treatment Value: 100uM ABA vs. No Treatment
  misc_feature: MA Experiment ID: 20000455 Result: Up-regulated in Transcription
  misc_feature: MA Experiment 20000455 PARAMETER Experiment Name: At_100uM_ABA_P Parameter: Age (day) Value: 16
  misc_feature: MA Experiment 20000455 PARAMETER Experiment Name: At_100uM_ABA_P Parameter: Organism Value: A. thaliana
  misc_feature: MA Experiment 20000455 PARAMETER Experiment Name: At_100uM_ABA_P Parameter: Plant Line Value: WS
  misc_feature: MA Experiment 20000455 PARAMETER Experiment Name: At_100uM_ABA_P Parameter: Timepoint (hr) Value: 48
  misc_feature: MA Experiment 20000455 PARAMETER Experiment Name: At_100uM_ABA_P Parameter: Tissue Value: Aerial
  misc_feature: MA Experiment 20000455 PARAMETER Experiment Name: At_100uM_ABA_P Parameter: Treatment Value: 100uM ABA vs. No Treatment
  misc_feature: MA Experiment ID: 20000495 Result: Down-regulated in Transcription
  misc_feature: MA Experiment 20000495 PARAMETER Experiment Name: At_Guard_Cells_P Parameter: Harvest Date Value: 8/2/2002
  misc_feature: MA Experiment 20000495 PARAMETER Experiment Name: At_Guard_Cells_P Parameter: Organism Value: A. thaliana
  misc_feature: MA Experiment 20000495 PARAMETER Experiment Name: At_Guard_Cells_P Parameter: Tissue Value: Guard Cells vs. Leaves
  misc_feature: MA Experiment ID: 20000506 Result: Up-regulated in Transcription
  misc_feature: MA Experiment 20000506 PARAMETER Experiment Name: At_Wounding_P Parameter: Organism Value: A. thaliana
  misc_feature: MA Experiment 20000506 PARAMETER Experiment Name: At_Wounding_P Parameter: Plant Line Value: WS
  misc_feature: MA Experiment 20000506 PARAMETER Experiment Name: At_Wounding_P Parameter: Timepoint (hr) Value: 6
  misc_feature: MA Experiment 20000506 PARAMETER Experiment Name: At_Wounding_P Parameter: Tissue Value: Aerial
  misc_feature: MA Experiment 20000506 PARAMETER Experiment Name: At_Wounding_P Parameter: Treatment Value: Wounding vs. No Wounding
  misc_feature: MA Experiment ID: 20000573 Result: Down-regulated in Transcription
  misc_feature: MA Experiment 20000573 PARAMETER Experiment Name: At_100uM_ABA_Mutants__P Parameter: Organism Value: A. thaliana
  misc_feature: MA Experiment 20000573 PARAMETER Experiment Name: At_100uM_ABA_Mutants__P Parameter: Plant Line Value: CS22 vs. Ler wt
  misc_feature: MA Experiment 20000573 PARAMETER Experiment Name: At_100uM_ABA_Mutants__P Parameter: Timepoint (hr) Value: N/A
  misc_feature: MA Experiment 20000573 PARAMETER Experiment Name: At_100uM_ABA_Mutants__P Parameter: Tissue Value: Whole Plant
  misc_feature: MA Experiment 20000573 PARAMETER Experiment Name: At_100uM_ABA_Mutants__P Parameter: Treatment Value: None
  misc_feature: MA Experiment ID: 20000574 Result: Down-regulated in Transcription
  misc_feature: MA Experiment 20000574 PARAMETER Experiment Name: At_100uM_ABA_Mutants__P Parameter: Organism Value: A. thaliana
  misc_feature: MA Experiment 20000574 PARAMETER Experiment Name: At_100uM_ABA_Mutants__P Parameter: Plant Line Value: CS23 vs. Ler wt
  misc_feature: MA Experiment 20000574 PARAMETER Experiment Name: At_100uM_ABA_Mutants__P Parameter: Timepoint (hr) Value: N/A
  misc_feature: MA Experiment 20000574 PARAMETER Experiment Name: At_100uM_ABA_Mutants__P Parameter: Tissue Value: Whole Plant
  misc_feature: MA Experiment 20000574 PARAMETER Experiment Name: At_100uM_ABA_Mutants__P Parameter: Treatment Value: None
  misc_feature: MA Experiment ID: 20000575 Result: Up-regulated in Transcription
  misc_feature: MA Experiment 20000575 PARAMETER Experiment Name: At_100uM_ABA_Mutants__P Parameter: Organism Value: A. thaliana
  misc_feature: MA Experiment 20000575 PARAMETER Experiment Name: At_100uM_ABA_Mutants__P Parameter: Plant Line Value: CS22
  misc_feature: MA Experiment 20000575 PARAMETER Experiment Name: At_100uM_ABA_Mutants__P Parameter: Timepoint (hr) Value: 6
  misc_feature: MA Experiment 20000575 PARAMETER Experiment Name: At_100uM_ABA_Mutants__P Parameter: Tissue Value: Whole Plant
  misc_feature: MA Experiment 20000575 PARAMETER Experiment Name: At_100uM_ABA_Mutants__P Parameter: Treatment Value: 1uM ABA vs. No Treatment
  misc_feature: MA Experiment ID: 20000794 Result: Up-regulated in Transcription
  misc_feature: MA Experiment 20000794 PARAMETER Experiment Name: At_Petals_P Parameter: Age (day) Value: 23-25 days
  misc_feature: MA Experiment 20000794 PARAMETER Experiment Name: At_Petals_P Parameter: Plant Line Value: WS
  misc_feature: MA Experiment 20000794 PARAMETER Experiment Name: At_Petals_P Parameter: Tissue Value: Petals vs. Whole plant
  misc_feature: MA Experiment ID: 20001247 Result: Up-regulated in Transcription
  misc_feature: MA Experiment 20001247 PARAMETER Experiment Name: At_Far-red-induction_P Parameter: Age (day) Value: 7
  misc_feature: MA Experiment 20001247 PARAMETER Experiment Name: At_Far-red-induction_P Parameter: Light Value: Far-red vs. White
  misc_feature: MA Experiment 20001247 PARAMETER Experiment Name: At_Far-red-induction_P Parameter: Organism Value: A. thaliana
  misc_feature: MA Experiment 20001247 PARAMETER Experiment Name: At_Far-red-induction_P Parameter: Plant Line Value: Columbia
  misc_feature: MA Experiment 20001247 PARAMETER Experiment Name: At_Far-red-induction_P Parameter: Timepoint (hr) Value: 1
  misc_feature: MA Experiment 20001247 PARAMETER Experiment Name: At_Far-red-induction_P Parameter: Tissue Value: Whole Plant
  misc_feature: MA Experiment ID: 20001248 Result: Up-regulated in Transcription
  misc_feature: MA Experiment 20001248 PARAMETER Experiment Name: At_Far-red-induction_P Parameter: Age (day) Value: 7
  misc_feature: MA Experiment 20001248 PARAMETER Experiment Name: At_Far-red-induction_P Parameter: Light Value: Far-red vs. White
  misc_feature: MA Experiment 20001248 PARAMETER Experiment Name: At_Far-red-induction_P Parameter: Organism Value: A. thaliana
  misc_feature: MA Experiment 20001248 PARAMETER Experiment Name: At_Far-red-induction_P Parameter: Plant Line Value: Columbia
  misc_feature: MA Experiment 20001248 PARAMETER Experiment Name: At_Far-red-induction_P Parameter: Timepoint (hr) Value: 4
  misc_feature: MA Experiment 20001248 PARAMETER Experiment Name: At_Far-red-induction_P Parameter: Tissue Value: Whole Plant
  misc_feature: MA Experiment ID: 20001450 Result: Up-regulated in Transcription
  misc_feature: MA Experiment 20001450 PARAMETER Experiment Name: At_Far-red-induction_P Parameter: Age (day) Value: 7
  misc_feature: MA Experiment 20001450 PARAMETER Experiment Name: At_Far-red-induction_P Parameter: Light Value: Far-red vs. White
  misc_feature: MA Experiment 20001450 PARAMETER Experiment Name: At_Far-red-induction_P Parameter: Organism Value: A. thaliana
  misc_feature: MA Experiment 20001450 PARAMETER Experiment Name: At_Far-red-induction_P Parameter: Plant Line Value: Columbia
  misc_feature: MA Experiment 20001450 PARAMETER Experiment Name: At_Far-red-induction_P Parameter: Timepoint (hr) Value: 8
  misc_feature: MA Experiment 20001450 PARAMETER Experiment Name: At_Far-red-induction_P Parameter: Tissue Value: Whole Plant
  misc_feature: MA Experiment ID: 20001451 Result: Down-regulated in Transcription
  misc_feature: MA Experiment 20001451 PARAMETER Experiment Name: At_Far-red-induction_P Parameter: Age (day) Value: 7
  misc_feature: MA Experiment 20001451 PARAMETER Experiment Name: At_Far-red-induction_P Parameter: Light Value: Far-red vs. White
  misc_feature: MA Experiment 20001451 PARAMETER Experiment Name: At_Far-red-induction_P Parameter: Organism Value: A. thaliana
  misc_feature: MA Experiment 20001451 PARAMETER Experiment Name: At_Far-red-induction_P Parameter: Plant Line Value: Columbia
  misc_feature: MA Experiment 20001451 PARAMETER Experiment Name: At_Far-red-induction_P Parameter: Timepoint (hr) Value: 24
  misc_feature: MA Experiment 20001451 PARAMETER Experiment Name: At_Far-red-induction_P Parameter: Tissue Value: Whole Plant
  misc_feature: MA Experiment ID: 20001555 Result: Up-regulated in Transcription
  misc_feature: MA Experiment 20001555 PARAMETER Experiment Name: At_Drought_Soil_Dry_P Parameter: Age (day) Value: 24
  misc_feature: MA Experiment 20001555 PARAMETER Experiment Name: At_Drought_Soil_Dry_P Parameter: Organism Value: A. thaliana
  misc_feature: MA Experiment 20001555 PARAMETER Experiment Name: At_Drought_Soil_Dry_P Parameter: Plant Line Value: WS
  misc_feature: MA Experiment 20001555 PARAMETER Experiment Name: At_Drought_Soil_Dry_P Parameter: Post Timepoint (hr) Value: None
  misc_feature: MA Experiment 20001555 PARAMETER Experiment Name: At_Drought_Soil_Dry_P Parameter: Post-Treatment Value: None
  misc_feature: MA Experiment 20001555 PARAMETER Experiment Name: At_Drought_Soil_Dry_P Parameter: Timepoint (day) Value: 10
  misc_feature: MA Experiment 20001555 PARAMETER Experiment Name: At_Drought_Soil_Dry_P Parameter: Treatment Value: Drought vs. No Drought
  misc_feature: MA Experiment ID: 20001556 Result: Up-regulated in Transcription
  misc_feature: MA Experiment 20001556 PARAMETER Experiment Name: At_Drought_Soil_Dry_P Parameter: Age (day) Value: 26
  misc_feature: MA Experiment 20001556 PARAMETER Experiment Name: At_Drought_Soil_Dry_P Parameter: Organism Value: A. thaliana
  misc_feature: MA Experiment 20001556 PARAMETER Experiment Name: At_Drought_Soil_Dry_P Parameter: Plant Line Value: WS
  misc_feature: MA Experiment 20001556 PARAMETER Experiment Name: At_Drought_Soil_Dry_P Parameter: Post Timepoint (hr) Value: None
  misc_feature: MA Experiment 20001556 PARAMETER Experiment Name: At_Drought_Soil_Dry_P Parameter: Post-Treatment Value: None
  misc_feature: MA Experiment 20001556 PARAMETER Experiment Name: At_Drought_Soil_Dry_P Parameter: Timepoint (day) Value: 12
  misc_feature: MA Experiment 20001556 PARAMETER Experiment Name: At_Drought_Soil_Dry_P Parameter: Treatment Value: Drought vs. No Drought
  misc_feature: MA Experiment ID: 20001557 Result: Up-regulated in Transcription
  misc_feature: MA Experiment 20001557 PARAMETER Experiment Name: At_Drought_Soil_Dry_P Parameter: Age (day) Value: 27
  misc_feature: MA Experiment 20001557 PARAMETER Experiment Name: At_Drought_Soil_Dry_P Parameter: Organism Value: A. thaliana
  misc_feature: MA Experiment 20001557 PARAMETER Experiment Name: At_Drought_Soil_Dry_P Parameter: Plant Line Value: WS
  misc_feature: MA Experiment 20001557 PARAMETER Experiment Name: At_Drought_Soil_Dry_P Parameter: Post Timepoint (hr) Value: 3
  misc_feature: MA Experiment 20001557 PARAMETER Experiment Name: At_Drought_Soil_Dry_P Parameter: Post-Treatment Value: Re-Water vs. No Drought
  misc_feature: MA Experiment 20001557 PARAMETER Experiment Name: At_Drought_Soil_Dry_P Parameter: Timepoint (day) Value: 13
  misc_feature: MA Experiment 20001557 PARAMETER Experiment Name: At_Drought_Soil_Dry_P Parameter: Treatment Value: Drought vs. No Drought
  misc_feature: MA Experiment ID: 20001558 Result: Up-regulated in Transcription
  misc_feature: MA Experiment 20001558 PARAMETER Experiment Name: At_Drought_Soil_Dry_P Parameter: Age (day) Value: 27
  misc_feature: MA Experiment 20001558 PARAMETER Experiment Name: At_Drought_Soil_Dry_P Parameter: Organism Value: A. thaliana
  misc_feature: MA Experiment 20001558 PARAMETER Experiment Name: At_Drought_Soil_Dry_P Parameter: Plant Line Value: WS
  misc_feature: MA Experiment 20001558 PARAMETER Experiment Name: At_Drought_Soil_Dry_P Parameter: Post Timepoint (hr) Value: 6
  misc_feature: MA Experiment 20001558 PARAMETER Experiment Name: At_Drought_Soil_Dry_P Parameter: Post-Treatment Value: Re-Water vs. No Drought
  misc_feature: MA Experiment 20001558 PARAMETER Experiment Name: At_Drought_Soil_Dry_P Parameter: Timepoint (day) Value: 13
  misc_feature: MA Experiment 20001558 PARAMETER Experiment Name: At_Drought_Soil_Dry_P Parameter: Treatment Value: Drought vs. No Drought
  misc_feature: MA Experiment ID: 20001769 Result: Up-regulated in Transcription
  misc_feature: MA Experiment 20001769 PARAMETER Experiment Name: At_Far-red-enriched-adult_P Parameter: Age (day) Value: 28
  misc_feature: MA Experiment 20001769 PARAMETER Experiment Name: At_Far-red-enriched-adult_P Parameter: Light Value: Far-red enriched vs. White
  misc_feature: MA Experiment 20001769 PARAMETER Experiment Name: At_Far-red-enriched-adult_P Parameter: Organism Value: A. thaliana
  misc_feature: MA Experiment 20001769 PARAMETER Experiment Name: At_Far-red-enriched-adult_P Parameter: Plant Line Value: Columbia
  misc_feature: MA Experiment 20001769 PARAMETER Experiment Name: At_Far-red-enriched-adult_P Parameter: Timepoint (hr) Value: 4
  misc_feature: MA Experiment 20001769 PARAMETER Experiment Name: At_Far-red-enriched-adult_P Parameter: Tissue Value: Aerial
  misc_feature: MA Experiment ID: 20001770 Result: Up-regulated in Transcription
  misc_feature: MA Experiment 20001770 PARAMETER Experiment Name: At_Far-red-enriched-adult_P Parameter: Age (day) Value: 28
  misc_feature: MA Experiment 20001770 PARAMETER Experiment Name: At_Far-red-enriched-adult_P Parameter: Light Value: Far-red enriched vs. White
  misc_feature: MA Experiment 20001770 PARAMETER Experiment Name: At_Far-red-enriched-adult_P Parameter: Organism Value: A. thaliana
  misc_feature: MA Experiment 20001770 PARAMETER Experiment Name: At_Far-red-enriched-adult_P Parameter: Plant Line Value: Columbia
  misc_feature: MA Experiment 20001770 PARAMETER Experiment Name: At_Far-red-enriched-adult_P Parameter: Timepoint (hr) Value: 8
  misc_feature: MA Experiment 20001770 PARAMETER Experiment Name: At_Far-red-enriched-adult_P Parameter: Tissue Value: Aerial
  misc_feature: MA Experiment ID: 20001904 Result: Up-regulated in Transcription
  misc_feature: MA Experiment 20001904 PARAMETER Experiment Name: At_Drought_Reproduction_P Parameter: Age (day) Value: 37
  misc_feature: MA Experiment 20001904 PARAMETER Experiment Name: At_Drought_Reproduction_P Parameter: Organism Value: A. thaliana
  misc_feature: MA Experiment 20001904 PARAMETER Experiment Name: At_Drought_Reproduction_P Parameter: Plant Line Value: WS
  misc_feature: MA Experiment 20001904 PARAMETER Experiment Name: At_Drought_Reproduction_P Parameter: Timepoint (day) Value: 7
  misc_feature: MA Experiment 20001904 PARAMETER Experiment Name: At_Drought_Reproduction_P Parameter: Tissue Value: Rosettes
  misc_feature: MA Experiment 20001904 PARAMETER Experiment Name: At_Drought_Reproduction_P Parameter: Treatment Value: Drought vs. No Drought
  misc_feature: MA Experiment ID: 20001905 Result: Up-regulated in Transcription
  misc_feature: MA Experiment 20001905 PARAMETER Experiment Name: At_Drought_Reproduction_P Parameter: Age (day) Value: 40
  misc_feature: MA Experiment 20001905 PARAMETER Experiment Name: At_Drought_Reproduction_P Parameter: Organism Value: A. thaliana
  misc_feature: MA Experiment 20001905 PARAMETER Experiment Name: At_Drought_Reproduction_P Parameter: Plant Line Value: WS
  misc_feature: MA Experiment 20001905 PARAMETER Experiment Name: At_Drought_Reproduction_P Parameter: Timepoint (day) Value: 10
  misc_feature: MA Experiment 20001905 PARAMETER Experiment Name: At_Drought_Reproduction_P Parameter: Tissue Value: Rosettes
  misc_feature: MA Experiment 20001905 PARAMETER Experiment Name: At_Drought_Reproduction_P Parameter: Treatment Value: Drought vs. No Drought
  misc_feature: MA Experiment ID: 20001906 Result: Up-regulated in Transcription
  misc_feature: MA Experiment 20001906 PARAMETER Experiment Name: At_Drought_Reproduction_P Parameter: Age (day) Value: 35
  misc_feature: MA Experiment 20001906 PARAMETER Experiment Name: At_Drought_Reproduction_P Parameter: Organism Value: A. thaliana
  misc_feature: MA Experiment 20001906 PARAMETER Experiment Name: At_Drought_Reproduction_P Parameter: Plant Line Value: WS
  misc_feature: MA Experiment 20001906 PARAMETER Experiment Name: At_Drought_Reproduction_P Parameter: Timepoint (day) Value: 5
  misc_feature: MA Experiment 20001906 PARAMETER Experiment Name: At_Drought_Reproduction_P Parameter: Tissue Value: Siliques
  misc_feature: MA Experiment 20001906 PARAMETER Experiment Name: At_Drought_Reproduction_P Parameter: Treatment Value: Drought vs. No Drought
  misc_feature: MA Experiment ID: 20001908 Result: Up-regulated in Transcription
  misc_feature: MA Experiment 20001908 PARAMETER Experiment Name: At_Drought_Reproduction_P Parameter: Age (day) Value: 40
  misc_feature: MA Experiment 20001908 PARAMETER Experiment Name: At_Drought_Reproduction_P Parameter: Organism Value: A. thaliana
  misc_feature: MA Experiment 20001908 PARAMETER Experiment Name: At_Drought_Reproduction_P Parameter: Plant Line Value: WS
  misc_feature: MA Experiment 20001908 PARAMETER Experiment Name: At_Drought_Reproduction_P Parameter: Timepoint (day) Value: 10
  misc_feature: MA Experiment 20001908 PARAMETER Experiment Name: At_Drought_Reproduction_P Parameter: Tissue Value: Siliques
  misc_feature: MA Experiment 20001908 PARAMETER Experiment Name: At_Drought_Reproduction_P Parameter: Treatment Value: Drought vs. No Drought
  misc_feature: MA Experiment ID: 20001911 Result: Down-regulated in Transcription
  misc_feature: MA Experiment 20001911 PARAMETER Experiment Name: At_Drought_Reproduction_P Parameter: Age (day) Value: 40
  misc_feature: MA Experiment 20001911 PARAMETER Experiment Name: At_Drought_Reproduction_P Parameter: Organism Value: A. thaliana
  misc_feature: MA Experiment 20001911 PARAMETER Experiment Name: At_Drought_Reproduction_P Parameter: Plant Line Value: WS
  misc_feature: MA Experiment 20001911 PARAMETER Experiment Name: At_Drought_Reproduction_P Parameter: Timepoint (day) Value: 10
  misc_feature: MA Experiment 20001911 PARAMETER Experiment Name: At_Drought_Reproduction_P Parameter: Tissue Value: Flowers
  misc_feature: MA Experiment 20001911 PARAMETER Experiment Name: At_Drought_Reproduction_P Parameter: Treatment Value: Drought vs. No Drought
acgtgactcaataaaatcaagtcttttgtttccttttatccaaaaaaaaaaaaaagtcttgtgtttctcttaggttggttgagaatcatttcatttcaatggaatccaattgtgttcaatttctcggtaacaagaccattctcatcacaggagctcctggttttcttgccaaggttttggtagagaaaatactaaggttgcaaccaaatgtgaagaagatataccttctgttgagagctcccgacgaaaaatcagccatgcaacgcctacgtagtgaggttatggagatcgacctttttaaagtgttgaggaacaatctaggagaagacaatttgaatgccttgatgcgggaaaaaattgtgccggttccaggtgatatatcgatcgataatttgggattgaaagacactgatctcatacaacgtatgtggagtgagattgatatcataatcaacatagcagccacaacaaatttcgatgaaagatatgatattggtcttggcatcaacacatttggagccctgaatgttctcaacttcgccaaaaagtgtgttaaaggacaattgcttctccatgtctcaaccgcgtatataagcggtgaacaacctggattgttactagagaaaccattcaagatgggggagactctcagcggggatcgggaactagacatcaatatagaacatgatctaatgaaacaaaaattgaaagagcttcaagattgttctgatgaagagatctcgcaaacaatgaaagattttggaatggcaagggcaaagcttcatggatggccaaatacatatgtattcaccaaagcaatgggagagatgctaatgggaaaatacagagaaaatttgccacttgttatcatacgtccaacaatgattactagtactattgccgaaccattccccggttggattgaagggttgaaaacattagacagtgtgattgttgcatatggtaaaggaaggcttaaatgttttcttgcggattcaaactcagtctttgaccttataccggcagacatggtagtaaatgcgatggttgcagccgcgacagctcattcgggagacaccgggattcaggcaatatatcatgttggttcgtcttgtaagaatccagtcacgtttggacaacttcacgatttcacggctcgttacttcgctaaacgtcctttgattggtcggaatggctcgccaatcatagtggtcaaaggaaccattctgtccactatggctcaattcagcctctacatgacccttcgttacaagcttcctctacagatacttcgattgatcaatatagtttatccatggagtcacggagataactacagtgacctaagccgcaaaatcaagctagctatgcgactagttgagctttaccagccttacttactcttcaagggcatatttgatgatttaaataccgaaagactgcgaatgaaaagaaaggagaatatcaaagagttagatggatcgttcgagttcgatcccaagtccattgattgggacaattatatcacaaacacccacattcctggcctcatcacccatgtgcttaaacaataaattatgctggtaatatgtttggaactattgtgaatctcgtgtgtaatattattaaagaatacgattatatcattctaatcttgtaatttacagtttgtgttggcgtgtaatatcaaaataaataaaaaaaacttattccacaatggataagactttgaatc

SEQ ID NO: 102964 - protein, 491 aa, Arabidopsis thaliana; identical to SEQ ID NO: 76486
  peptide (1)..(491): Ceres Seq. ID no. 13611607
  misc_feature (285)..(489): Pfam Name: Male sterility protein Pfam Description: Male sterility protein
  misc_feature (1)..(491): Homolog of NCBI NO: 15242260 NR Description: male sterility 2-related protein (emb|CAA68191.1)
  misc_feature (1)..(491): Homolog of NCBI NO: 11357157 NR Description: acyl CoA reductase-protein - Arabidopsis thaliana
  misc_feature (1)..(398): Homolog of NCBI NO: 30692171 NR Description: acyl CoA reductase - protein [Arabidopsis
  misc_feature (1)..(398): Homolog of NCBI NO: 15229991 NR Description: acyl CoA reductase -related protein [Arabidopsis
  misc_feature (1)..(333): Homolog of NCBI NO: 15229993 NR Description: acyl CoA reductase -related protein [Arabidopsis
  misc_feature (408)..(491): Homolog of NCBI NO: 15229993 NR Description: acyl CoA reductase -related protein [Arabidopsis
  misc_feature (6)..(489): Homolog of NCBI NO: 5020215 NR Description: acyl CoA reductase [Simmondsia chinensis]
  misc_feature (116)..(475): Homolog of NCBI NO: 15242233 NR Description: acyl CoA reductase-related protein [Arabidopsis
  misc_feature (1)..(56): Homolog of NCBI NO: 15242233 NR Description: acyl CoA reductase-related protein [Arabidopsis
  misc_feature (6)..(488): Homolog of NCBI NO: 16323107 NR Description: AT4g33790/T16L1_280 [Arabidopsis thaliana]

SEQ ID NO: 102965 - protein, 438 aa, Arabidopsis thaliana; identical to SEQ ID NO: 76487
  peptide (1)..(438): Ceres Seq. ID no. 13611608
  misc_feature (232)..(436): Pfam Name: Male sterility protein Pfam Description: Male sterility protein
  misc_feature (1)..(438): Homolog of NCBI NO: 15242260 NR Description: male sterility 2-related protein (emb|CAA68191.1)
  misc_feature (1)..(438): Homolog of NCBI NO: 11357157 NR Description: acyl CoA reductase-protein - Arabidopsis thaliana
  misc_feature (1)..(345): Homolog of NCBI NO: 30692171 NR Description: acyl CoA reductase - protein [Arabidopsis
  misc_feature (1)..(345): Homolog of NCBI NO: 15229991 NR Description: acyl CoA reductase -related protein [Arabidopsis
  misc_feature (1)..(280): Homolog of NCBI NO: 15229993 NR Description: acyl CoA reductase -related protein [Arabidopsis
  misc_feature (355)..(438): Homolog of NCBI NO: 15229993 NR Description: acyl CoA reductase -related protein [Arabidopsis
  misc_feature (1)..(436): Homolog of NCBI NO: 5020215 NR Description: acyl CoA reductase [Simmondsia chinensis]
  misc_feature (63)..(422): Homolog of NCBI NO: 15242233 NR Description: acyl CoA reductase-related protein [Arabidopsis
  misc_feature (1)..(435): Homolog of NCBI NO: 16323107 NR Description: AT4g33790/T16L1_280 [Arabidopsis thaliana]
  misc_feature (1)..(435): Homolog of NCBI NO: 7487952 NR Description: male sterility protein 2 homolog T16L1.280 -

SEQ ID NO: 102966 - protein, 430 aa, Arabidopsis thaliana
  peptide (1)..(430): Ceres Seq. ID no. 13611609
  misc_feature (224)..(428): Pfam Name: Male sterility protein Pfam Description: Male sterility protein
  misc_feature (1)..(430): Homolog of NCBI NO: 15242260 NR Description: male sterility 2-related protein (emb|CAA68191.1)
  misc_feature (1)..(430): Homolog of NCBI NO: 11357157 NR Description: acyl CoA reductase-protein - Arabidopsis thaliana
  misc_feature (1)..(337): Homolog of NCBI NO: 30692171 NR Description: acyl CoA reductase - protein [Arabidopsis
  misc_feature (1)..(337): Homolog of NCBI NO: 15229991 NR Description: acyl CoA reductase -related protein [Arabidopsis
  misc_feature (1)..(272): Homolog of NCBI NO: 15229993 NR Description: acyl CoA reductase -related protein [Arabidopsis
  misc_feature (347)..(430): Homolog of NCBI NO: 15229993 NR Description: acyl CoA reductase -related protein [Arabidopsis
  misc_feature (1)..(428): Homolog of NCBI NO: 5020215 NR Description: acyl CoA reductase [Simmondsia chinensis]
  misc_feature (55)..(414): Homolog of NCBI NO: 15242233 NR Description: acyl CoA reductase-related protein [Arabidopsis
  misc_feature (1)..(427): Homolog of NCBI NO: 16323107 NR Description: AT4g33790/T16L1_280 [Arabidopsis thaliana]
  misc_feature (1)..(427): Homolog of NCBI NO: 7487952 NR Description: male sterility protein 2 homolog T16L1.280 -
MEIDLFKVLRNNLGEDNLNALMREKIVPVPGDISIDNLGLKDTDLIQRMWSEIDIIINIAATTNFDERYDIGLGINTFGALNVLNFAKKCVKGQLLLHVSTAYISGEQPGLLLEKPFKMGETLSGDRELDINIEHDLMKQKLKELQDCSDEEISQTMKDFGMARAKLHGWPNTYVFTKAMGEMLMGKYRENLPLVIIRPTMITSTIAEPFPGWIEGLKTLDSVIVAYGKGRLKCFLADSNSVFDLIPADMVVNAMVAAATAHSGDTGIQAIYHVGSSCKNPVTFGQLHDFTARYFAKRPLIGRNGSPIIVVKGTILSTMAQFSLYMTLRYKLPLQILRLINIVYPWSHGDNYSDLSRKIKLAMRLVELYQPYLLFKGIFDDLNTERLRMKRKENIKELDGSFEFDPKSIDWDNYITNTHIPGLITHVLKQ

SEQ ID NO: 102967 - DNA, 1206 bp, Arabidopsis thaliana
  misc_feature (1)..(1206): Ceres Seq. ID no. 13611610
  misc_feature: MA Experiment ID: 108463 Result: Down-regulated in Transcription
  misc_feature: MA Experiment 108463 PARAMETER Experiment Name: At_Germinating_Seeds_cDNA_P Parameter: Age (day) Value: 3 vs. 0
  misc_feature: MA Experiment 108463 PARAMETER Experiment Name: At_Germinating_Seeds_cDNA_P Parameter: Tissue Value: Germinating Seeds
ccggcgaagagtttcggagaacaagtttggtctttttaggggtttgagcagtggagtcggtaaccatgttatgcggaggctctcgcgcctccgtgcatttgtgggaccatcgtcatcctcctaggctcggtgctaaggttttgcggaaatcttcgttcatgctcagaccttgttcggctatatcgcagcagcggataaagtcgtcgtttaggtctcactgtaaaactccaagaaaaatcccagctcctctcgattgtttcagccagggagatgatcatcctgagctttcagctgaagggctttccccagttgcaggaggcattgttgctctagggaagtttgatgccctgcatatcggtcatcgagagcttgcaattcaagctgcaagaattggtactccgtatctactgtcgtttgttggattggctgaagtacttggttggaagcctagagcaccaatagtagccaaatgcgacagaaaacgagtgctttcctcttgggcatcgtattgtggtaacatagcaccggtagagtttgagattgaatttgccagcgttcgacaccttaacccacaacagtttgtcgagaagttgtcaagagagcttagagtctgcggagttgtggcaggcgaaaattacaggtttggataccgggcttctggtgacgcctctgaacttgtgaggttatgcaaagactttggtatcagcgcttacatcattaactccgtgatggataagaaccaagtctctgtaaacacagaggaggaggactcaaagtcgaaagaaagaggtcaagtctcatccacacgagtccgtcatgctctagctgcaggagatgtgaggtatgtaacagagctcctcggcagaccacacagggtcatctctcggacaagaacacaagatttaacgagcaaaagagggaggatctcgcttcagacatcttcgctactaaatttaccaccagggaatggagtttacaaagcatgctcgcttatagttggtgataagcatccaatttcgtgtaaggttattgtcgatacatcgaatctctatatagaaacagaggaagaacgtttccacaactcagatgagtctcaagagtttcaactcttagggattgagttcggttaattcacacattgataatcaaaagaataacatttccatttcaagataacgattaacaaagatgttaactttgactcca

SEQ ID NO: 102968 - protein, 354 aa, Arabidopsis thaliana
  peptide (1)..(354): Ceres Seq. ID no. 13611611
  misc_feature (1)..(354): Homolog of NCBI NO: 18420664 NR Description: expressed protein [Arabidopsis thaliana]
  misc_feature (1)..(354): Homolog of NCBI NO: 21553715 NR Description: unknown [Arabidopsis thaliana]
  misc_feature (1)..(354): Homolog of NCBI NO: 22326656 NR Description: expressed protein [Arabidopsis thaliana] unknown protein [Arabidopsis thaliana]
  misc_feature (22)..(335): Homolog of NCBI NO: 10178276 NR Description: putative protein [Arabidopsis thaliana]
  misc_feature (82)..(354): Homolog of NCBI NO: 29150370 NR Description: unknow protein [Oryza sativa (japonica
  misc_feature (86)..(333): Homolog of NCBI NO: 29829088 NR Description: putative riboflavin kinase [Streptomyces MA- 4680] >gi|29606194|dbj|BAC70257.1| putative riboflavin kinase
  misc_feature (84)..(285): Homolog of NCBI NO: 15839010 NR Description: riboflavin biosynthesis protein [Xylella
  misc_feature (84)..(285): Homolog of NCBI NO: 22993644 NR Description: hypothetical protein [Xylella fastidiosa Dixon]
  misc_feature (86)..(322): Homolog of NCBI NO: 15609923 NR Description: ribF [Mycobacterium tuberculosis H37Rv] riboflavin biosynthesis protein RibF [Mycobacterium tuberculosis
  misc_feature (87)..(267): Homolog of NCBI NO: 18310664 NR Description: riboflavin biosynthesis protein [Clostridium >gi|18145345|dbj|BAB81388.1| riboflavin biosynthesis protein
MLCGGSRASVHLWDHRHPPRLGAKVLRKSSFMLRPCSAISQQRIKSSFRSHCKTPRKIPAPLDCFSQGDDHPELSAEGLSPVAGGIVALGKFDALHIGHRELAIQAARIGTPYLLSFVGLAEVLGWKPRAPIVAKCDRKRVLSSWASYCGNIAPVEFEIEFASVRHLNPQQFVEKLSRELRVCGVVAGENYRFGYRASGDASELVRLCKDFGISAYIINSVMDKNQVSVNTEEEDSKSKERGQVSSTRVRHALAAGDVRYVTELLGRPHRVISRTRTQDLTSKRGRISLQTSSLLNLPPGNGVYKACSLIVGDKHPISCKVIVDTSNLYIETEEERFHNSDESQEFQLLGIEFG

SEQ ID NO: 102969 - protein, 323 aa, Arabidopsis thaliana
  peptide (1)..(323): Ceres Seq. ID no. 13611612
  misc_feature (1)..(323): Homolog of NCBI NO: 18420664 NR Description: expressed protein [Arabidopsis thaliana]
  misc_feature (1)..(323): Homolog of NCBI NO: 21553715 NR Description: unknown [Arabidopsis thaliana]
  misc_feature (1)..(323): Homolog of NCBI NO: 22326656 NR Description: expressed protein [Arabidopsis thaliana] unknown protein [Arabidopsis thaliana]
  misc_feature (1)..(304): Homolog of NCBI NO: 10178276 NR Description: putative protein [Arabidopsis thaliana]
  misc_feature (51)..(323): Homolog of NCBI NO: 29150370 NR Description: unknow protein [Oryza sativa (japonica
  misc_feature (55)..(302): Homolog of NCBI NO: 29829088 NR Description: putative riboflavin kinase [Streptomyces MA- 4680] >gi|29606194|dbj|BAC70257.1| putative riboflavin kinase
  misc_feature (53)..(254): Homolog of NCBI NO: 15839010 NR Description: riboflavin biosynthesis protein [Xylella
  misc_feature (53)..(254): Homolog of NCBI NO: 22993644 NR Description: hypothetical protein [Xylella fastidiosa Dixon]
  misc_feature (55)..(291): Homolog of NCBI NO: 15609923 NR Description: ribF [Mycobacterium tuberculosis H37Rv] riboflavin biosynthesis protein RibF [Mycobacterium tuberculosis
  misc_feature (56)..(236): Homolog of NCBI NO: 18310664 NR Description: riboflavin biosynthesis protein [Clostridium >gi|18145345|dbj|BAB81388.1| riboflavin biosynthesis protein
MLRPCSAISQQRIKSSFRSHCKTPRKIPAPLDCFSQGDDHPELSAEGLSPVAGGIVALGKFDALHIGHRELAIQAARIGTPYLLSFVGLAEVLGWKPRAPIVAKCDRKRVLSSWASYCGNIAPVEFEIEFASVRHLNPQQFVEKLSRELRVCGVVAGENYRFGYRASGDASELVRLCKDFGISAYIINSVMDKNQVSVNTEEEDSKSKERGQVSSTRVRHALAAGDVRYVTELLGRPHRVISRTRTQDLTSKRGRISLQTSSLLNLPPGNGVYKACSLIVGDKHPISCKVIVDTSNLYIETEEERFHNSDESQEFQLLGIEFG

SEQ ID NO: 102970 - DNA, 1355 bp, Arabidopsis thaliana
  misc_feature (1)..(1355): Ceres Seq. ID no. 13611620
  misc_feature: MA Experiment ID: 20000495 Result: Down-regulated in Transcription
  misc_feature: MA Experiment 20000495 PARAMETER Experiment Name: At_Guard_Cells_P Parameter: Harvest Date Value: 8/2/2002
  misc_feature: MA Experiment 20000495 PARAMETER Experiment Name: At_Guard_Cells_P Parameter: Organism Value: A. thaliana
  misc_feature: MA Experiment 20000495 PARAMETER Experiment Name: At_Guard_Cells_P Parameter: Tissue Value: Guard Cells vs. Leaves
  misc_feature: MA Experiment ID: 20000794 Result: Down-regulated in Transcription
  misc_feature: MA Experiment 20000794 PARAMETER Experiment Name: At_Petals_P Parameter: Age (day) Value: 23-25 days
  misc_feature: MA Experiment 20000794 PARAMETER Experiment Name: At_Petals_P Parameter: Plant Line Value: WS
  misc_feature: MA Experiment 20000794 PARAMETER Experiment Name: At_Petals_P Parameter: Tissue Value: Petals vs. Whole plant
  misc_feature: MA Experiment ID: 20001558 Result: Up-regulated in Transcription
  misc_feature: MA Experiment 20001558 PARAMETER Experiment Name: At_Drought_Soil_Dry_P Parameter: Age (day) Value: 27
  misc_feature: MA Experiment 20001558 PARAMETER Experiment Name: At_Drought_Soil_Dry_P Parameter: Organism Value: A. thaliana
  misc_feature: MA Experiment 20001558 PARAMETER Experiment Name: At_Drought_Soil_Dry_P Parameter: Plant Line Value: WS
  misc_feature: MA Experiment 20001558 PARAMETER Experiment Name: At_Drought_Soil_Dry_P Parameter: Post Timepoint (hr) Value: 6
  misc_feature: MA Experiment 20001558 PARAMETER Experiment Name: At_Drought_Soil_Dry_P Parameter: Post-Treatment Value: Re-Water vs. No Drought
  misc_feature: MA Experiment 20001558 PARAMETER Experiment Name: At_Drought_Soil_Dry_P Parameter: Timepoint (day) Value: 13
  misc_feature: MA Experiment 20001558 PARAMETER Experiment Name: At_Drought_Soil_Dry_P Parameter: Treatment Value: Drought vs. No Drought
  misc_feature: MA Experiment ID: 20001560 Result: Up-regulated in Transcription
  misc_feature: MA Experiment 20001560 PARAMETER Experiment Name: At_Drought_Soil_Dry_P Parameter: Age (day) Value: 28
  misc_feature: MA Experiment 20001560 PARAMETER Experiment Name: At_Drought_Soil_Dry_P Parameter: Organism Value: A. thaliana
  misc_feature: MA Experiment 20001560 PARAMETER Experiment Name: At_Drought_Soil_Dry_P Parameter: Plant Line Value: WS
  misc_feature: MA Experiment 20001560 PARAMETER Experiment Name: At_Drought_Soil_Dry_P Parameter: Post Timepoint (hr) Value: None
  misc_feature: MA Experiment 20001560 PARAMETER Experiment Name: At_Drought_Soil_Dry_P Parameter: Post-Treatment Value: None
  misc_feature: MA Experiment 20001560 PARAMETER Experiment Name: At_Drought_Soil_Dry_P Parameter: Timepoint (day) Value: 14
  misc_feature: MA Experiment 20001560 PARAMETER Experiment Name: At_Drought_Soil_Dry_P Parameter: Treatment Value: Drought vs. No Drought
gctcagaaacatttctgtctctgtggagacagctgaagaagcagcagcactatcaatggcgtctctgagattgttctcaacgaatcatcaatctcttctccttccatcatctctctcacaaaagactctaatatcttcaccaagattcgtcaataaccctagcagacggagtccaatacgatccgttcttcaatttaatcgcaaaccggaactcgccggagaaacgccgcgtatcgtcgttatcacctccggaaaaggcggtgttggaaagacgacaaccaccgcaaatgtcggtctctctctcgctcgttacggtttctcagttgtcgccattgacgccgaccttggtctccgtaacctcgatctcctcctagggttagagaatcgagtcaattacacttgcgtcgaggttataaacggagattgtcgtctcgatcaagctctggtacgtgataagcgttggtcgaatttcgaattgctatgtatatctaaacctagatcgaaacttccgatgggatttggtggtaaagcattggaatggcttgtggatgcgttgaaaactagaccggaaggttcaccggatttcatcatcatcgattgtcctgcaggaatcgatgccggattcataaccgccattactccggcgaatgaagcagttctggtaacaactccggatataacagcgttaagggatgctgatagggttacgggtttgttagaatgcgatggaatcagagatataaagatgattgtgaacagagtgagaactgatatgattaaaggagaggatatgatgtcagtgttagatgtgcaggagatgttgggattgtcattgcttggtgtaattcctgaagattctgaggttattcgaagcacgaatcgagggtttccgcttgttctgaataagcctcctacgcttgcgggattggcgtttgagcaggcggcttggagactcgttgagcaagatagtatgaaggctgttatggtggaggaagaacctaagaaacgtggcttcttctctttctttggcggctaaatggcaaacggatcgaaccgaaccgaacggtactgaactgaactgaaacttcttcctcgggtatgtatgcattgaaatcttttgtacaggagctagagatttttgaagattttgtctcttttgctttgagaatttagatttgttcctaggacaatgtggaattctactgctagtttgttgctgagttcaagctctgattcttatgccttttgttcttgaggttcttgatttctgtttctgtaatctgtttatgttaaaattgagagtttccaatatatctcaagttcttatgtcaaatcgttatgatgagaacttcaat

SEQ ID NO: 102971 - protein, 344 aa, Arabidopsis thaliana
  peptide (1)..(344): Ceres Seq. ID no. 13611621
  misc_feature (77)..(111): Pfam Name: 4Fe-4S iron sulfur cluster binding proteins, Pfam Description: 4Fe-4S iron sulfur cluster binding proteins,
  misc_feature (19)..(344): Homolog of NCBI NO: 15237874 NR Description: septum site-determining MinD (dbj|BAA90261.1)
  misc_feature (108)..(344): Homolog of NCBI NO: 9971822 NR Description: minD [Tagetes erecta]
  misc_feature (19)..(111): Homolog of NCBI NO: 9971822 NR Description: minD [Tagetes erecta]
  misc_feature (46)..(344): Homolog of NCBI NO: 34897748 NR Description: Similar to Chlorella vulgaris C-27 chloroplast
  misc_feature (64)..(337): Homolog of NCBI NO: 11466429 NR Description: septum-site determining protein [Mesostigma
  misc_feature (77)..(322): Homolog of NCBI NO: 7524873 NR Description: septum site-determining protein [Chlorella
  misc_feature (77)..(319): Homolog of NCBI NO: 11467859 NR Description: septum-site determining protein [Nephroselmis
  misc_feature (76)..(322): Homolog of NCBI NO: 5748667 NR Description: cell division inhibitor MinD [Prototheca
  misc_feature (77)..(343): Homolog of NCBI NO: 23452400 NR Description: cell division inhibitor MinD [Chlamydomonas
  misc_feature (77)..(322): Homolog of NCBI NO: 11467635 NR Description: septum-site determining protein [Guillardia theta]
LRNISVSVETAEEAAALSMASLRLFSTNHQSLLLPSSLSQKTLISSPRFVNNPSRRSPIRSVLQFNRKPELAGETPRIVVITSGKGGVGKTTTTANVGLSLARYGFSVVAIDADLGLRNLDLLLGLENRVNYTCVEVINGDCRLDQALVRDKRWSNFELLCISKPRSKLPMGFGGKALEWLVDALKTRPEGSPDFIIIDCPAGIDAGFITAITPANEAVLVTTPDITALRDADRVTGLLECDGIRDIKMIVNRVRTDMIKGEDMMSVLDVQEMLGLSLLGVIPEDSEVIRSTNRGFPLVLNKPPTLAGLAFEQAAWRLVEQDSMKAVMVEEEPKKRGFFSFFGG

SEQ ID NO: 102972 - protein, 326 aa, Arabidopsis thaliana; identical to SEQ ID NO: 78172
  peptide (1)..(326): Ceres Seq. ID no. 13611622
  misc_feature (59)..(93): Pfam Name: 4Fe-4S iron sulfur cluster binding proteins, Pfam Description: 4Fe-4S iron sulfur cluster binding proteins,
  misc_feature (1)..(326): Homolog of NCBI NO: 15237874 NR Description: septum site-determining MinD (dbj|BAA90261.1)
  misc_feature (90)..(326): Homolog of NCBI NO: 9971822 NR Description: minD [Tagetes erecta]
  misc_feature (1)..(93): Homolog of NCBI NO: 9971822 NR Description: minD [Tagetes erecta]
  misc_feature (28)..(326): Homolog of NCBI NO: 34897748 NR Description: Similar to Chlorella vulgaris C-27 chloroplast
  misc_feature (46)..(319): Homolog of NCBI NO: 11466429 NR Description: septum-site determining protein [Mesostigma
  misc_feature (59)..(304): Homolog of NCBI NO: 7524873 NR Description: septum site-determining protein [Chlorella
  misc_feature (59)..(301): Homolog of NCBI NO: 11467859 NR Description: septum-site determining protein [Nephroselmis
  misc_feature (58)..(304): Homolog of NCBI NO: 5748667 NR Description: cell division inhibitor MinD [Prototheca
  misc_feature (59)..(325): Homolog of NCBI NO: 23452400 NR Description: cell division inhibitor MinD [Chlamydomonas
  misc_feature (59)..(304): Homolog of NCBI NO: 11467635 NR Description: septum-site determining protein [Guillardia theta]

SEQ ID NO: 102973 - protein, 174 aa, Arabidopsis thaliana; identical to SEQ ID NO: 25910
  peptide (1)..(174): Ceres Seq. ID no. 13611623
  misc_feature (1)..(174): Homolog of NCBI NO: 15237874 NR Description: septum site-determining MinD (dbj|BAA90261.1)
  misc_feature (1)..(174): Homolog of NCBI NO: 9971822 NR Description: minD [Tagetes erecta]
  misc_feature (1)..(174): Homolog of NCBI NO: 34897748 NR Description: Similar to Chlorella vulgaris C-27 chloroplast
  misc_feature (1)..(167): Homolog of NCBI NO: 11466429 NR Description: septum-site determining protein [Mesostigma
  misc_feature (1)..(152): Homolog of NCBI NO: 7524873 NR Description: septum site-determining protein [Chlorella
  misc_feature (1)..(149): Homolog of NCBI NO: 11467859 NR Description: septum-site determining protein [Nephroselmis
  misc_feature (1)..(152): Homolog of NCBI NO: 5748667 NR Description: cell division inhibitor MinD [Prototheca
  misc_feature (1)..(173): Homolog of NCBI NO: 23452400 NR Description: cell division inhibitor MinD [Chlamydomonas
  misc_feature (1)..(152): Homolog of NCBI NO: 11467635 NR Description: septum-site determining protein [Guillardia theta]
  misc_feature (1)..(170): Homolog of NCBI NO: 22299560 NR Description: septum site-determining protein

SEQ ID NO: 102974 - DNA, 1549 bp, Arabidopsis thaliana
  misc_feature (1)..(1549): Ceres Seq. ID no. 13611632
  misc_feature: MA Experiment ID: 20000180 Result: Down-regulated in Transcription
  misc_feature: MA Experiment 20000180 PARAMETER Experiment Name: At_Germinating_Seeds_P Parameter: Age (hr) Value: 24 vs. 0
  misc_feature: MA Experiment 20000180 PARAMETER Experiment Name: At_Germinating_Seeds_P Parameter: Tissue Value: Germinating Seeds
  misc_feature: MA Experiment ID: 20000184 Result: Down-regulated in Transcription
  misc_feature: MA Experiment 20000184 PARAMETER Experiment Name: At_Shoots__P Parameter: Age (day) Value: 7
  misc_feature: MA Experiment 20000184 PARAMETER Experiment Name: At_Shoots__P Parameter: Tissue Value: Shoots vs. Whole Plant
  misc_feature: MA Experiment ID: 20000264 Result: Down-regulated in Transcription
  misc_feature: MA Experiment 20000264 PARAMETER Experiment Name: At_Open_Flower_P Parameter: Age (day) Value: 21
  misc_feature: MA Experiment 20000264 PARAMETER Experiment Name: At_Open_Flower_P Parameter: Plant Line Value: WS
  misc_feature: MA Experiment 20000264 PARAMETER Experiment Name: At_Open_Flower_P Parameter: Tissue Value: Open Flower vs. Whole Plant
  misc_feature: MA Experiment ID: 20000265 Result: Down-regulated in Transcription
  misc_feature: MA Experiment 20000265 PARAMETER Experiment Name: At_Open_Flower_P Parameter: Age (day) Value: 21
  misc_feature: MA Experiment 20000265 PARAMETER Experiment Name: At_Open_Flower_P Parameter: Plant Line Value: WS
  misc_feature: MA Experiment 20000265 PARAMETER Experiment Name: At_Open_Flower_P Parameter: Tissue Value: Closed Flower vs. Whole Plant
  misc_feature: MA Experiment ID: 20000437 Result: Up-regulated in Transcription
  misc_feature: MA Experiment 20000437 PARAMETER Experiment Name: At_Drought_P Parameter: Age (day) Value: 8
  misc_feature: MA Experiment 20000437 PARAMETER Experiment Name: At_Drought_P Parameter: Organism Value: A. thaliana
  misc_feature: MA Experiment 20000437 PARAMETER Experiment Name: At_Drought_P Parameter: Plant Line Value: WS
  misc_feature: MA Experiment 20000437 PARAMETER Experiment Name: At_Drought_P Parameter: Timepoint (hr) Value: 24
  misc_feature: MA Experiment 20000437 PARAMETER Experiment Name: At_Drought_P Parameter: Tissue Value: Whole Plant
  misc_feature: MA Experiment 20000437 PARAMETER Experiment Name: At_Drought_P Parameter: Treatment Value: Drought vs. No Drought
  misc_feature: MA Experiment ID: 20000438 Result: Down-regulated in Transcription
  misc_feature: MA Experiment 20000438 PARAMETER Experiment Name: At_Shoots__P Parameter: Age (day) Value: 14
  misc_feature: MA Experiment 20000438 PARAMETER Experiment Name: At_Shoots__P Parameter: Tissue Value: Shoots vs. Whole Plant
  misc_feature: MA Experiment ID: 20001451 Result: Down-regulated in Transcription
  misc_feature: MA Experiment 20001451 PARAMETER Experiment Name: At_Far-red-induction_P Parameter: Age (day) Value: 7
  misc_feature: MA Experiment 20001451 PARAMETER Experiment Name: At_Far-red-induction_P Parameter: Light Value: Far-red vs. White
  misc_feature: MA Experiment 20001451 PARAMETER Experiment Name: At_Far-red-induction_P Parameter: Organism Value: A. thaliana
  misc_feature: MA Experiment 20001451 PARAMETER Experiment Name: At_Far-red-induction_P Parameter: Plant Line Value: Columbia
  misc_feature: MA Experiment 20001451 PARAMETER Experiment Name: At_Far-red-induction_P Parameter: Timepoint (hr) Value: 24
  misc_feature: MA Experiment 20001451 PARAMETER Experiment Name: At_Far-red-induction_P Parameter: Tissue Value: Whole Plant
  misc_feature: MA Experiment ID: 20001555 Result: Up-regulated in Transcription
  misc_feature: MA Experiment 20001555 PARAMETER Experiment Name: At_Drought_Soil_Dry_P Parameter: Age (day) Value: 24
  misc_feature: MA Experiment 20001555 PARAMETER Experiment Name: At_Drought_Soil_Dry_P Parameter: Organism Value: A. thaliana
  misc_feature: MA Experiment 20001555 PARAMETER Experiment Name: At_Drought_Soil_Dry_P Parameter: Plant Line Value: WS
  misc_feature: MA Experiment 20001555 PARAMETER Experiment Name: At_Drought_Soil_Dry_P Parameter: Post Timepoint (hr) Value: None
  misc_feature: MA Experiment 20001555 PARAMETER Experiment Name: At_Drought_Soil_Dry_P Parameter: Post-Treatment Value: None
  misc_feature: MA Experiment 20001555 PARAMETER Experiment Name: At_Drought_Soil_Dry_P Parameter: Timepoint (day) Value: 10
  misc_feature: MA Experiment 20001555 PARAMETER Experiment Name: At_Drought_Soil_Dry_P Parameter: Treatment Value: Drought vs. No Drought
  misc_feature: MA Experiment ID: 20001911 Result: Up-regulated in Transcription
  misc_feature: MA Experiment 20001911 PARAMETER Experiment Name: At_Drought_Reproduction_P Parameter: Age (day) Value: 40
  misc_feature: MA Experiment 20001911 PARAMETER Experiment Name: At_Drought_Reproduction_P Parameter: Organism Value: A. thaliana
  misc_feature: MA Experiment 20001911 PARAMETER Experiment Name: At_Drought_Reproduction_P Parameter: Plant Line Value: WS
  misc_feature: MA Experiment 20001911 PARAMETER Experiment Name: At_Drought_Reproduction_P Parameter: Timepoint (day) Value: 10
  misc_feature: MA Experiment 20001911 PARAMETER Experiment Name: At_Drought_Reproduction_P Parameter: Tissue Value: Flowers
  misc_feature: MA Experiment 20001911 PARAMETER Experiment Name: At_Drought_Reproduction_P Parameter: Treatment Value: Drought vs. No Drought
aatcagaatctgaaatacgaaatggcaaacaagtacgtttcctctgttctgaagtcgctgcttgtgcttcttcaccttgtattcttgagtaagcaacatgttgactctgcctcaatcgtcaagtctcttcctggttttgaaggtcaacttccctttgagcttgaaaccgggtatattggtgttggtgaggaagaggaagtgcaactattctactacttcatcaagtctgagaggaacccaaaagaagaccctcttattctctggctaactggaggacctggctgctctgccatctctggccttctttttgaaaatgggcctctaactatgaagcttgacgtttacaatggaactctcccttctttggtctctactacatattcttggacaaagacttcaagcataatattcttggatcagcctgttggaactggcttttcctattcaagaactcaacaatttaataaacctagtgattcaggagaagccaaacggatccatgagtttcttcaaaaatggctaggaaagcatcaagtgttttcctccaaccctttctatgttgccggagattcttattccggtttggttgttcccgctaccgttcaagaaatctcaaaaggaaattatgaatgctgcaatcctccaataaatcttcagggctatgtgctcggtaacccgttaacagactatacaactggtagtaacagccgcattccatttgcccatggaatggcactgatatctgatgaactctacgagtcgttgaagaaaacctgtaaaggagaatatacaaatgttcatccacgtaacacacaatgcttgaaattcgttgaagaatttaataagtgcacaaacagaatattccaacaacttatactagatccgttgtgcgaaactgaaactccagattgctatatttatcggtatttgctaactacctactgggccaatgacgcgactgtgcgcgaagctcttcaaatcaataaggagagtataggggaatgggtacgatgttattacagtattccttacaataatgacattaaaagtagcatgccttaccatgtgaataacagcatcagtggttatcgttctctcatctacagtggtgatcatgatttcgaagtaccttaccttggaactcaagcttggataagatctctcaactattcaattattgatgactggaggccatggatggtcaaaaatcaaatcgctggatacacaaggacttatgccaacaaaatgacatttgctactataaaaggaggtgggcacacagcagagagtaaaccagaggaagcctctatcatgtttcaaaggtggatcaatggccaacctctctaaaagaggggaggacctgcctttacgtataacggacaagaaaatatgattctagtaacacatccaaatatatatgagaacccttggccctataaatgaatagaatttaaactcataatttgtaagcaacatgtgtgttgcttttcaacaagcttggtgtacagttgcatttcaccttctttttttttcaacaagcttgttttct

SEQ ID NO: 102975 - protein, 448 aa, Arabidopsis thaliana
  peptide (1)..(448): Ceres Seq. ID no. 13611633
  misc_feature (44)..(441): Pfam Name: Serine carboxypeptidase Pfam Description: Serine carboxypeptidase
  misc_feature (8)..(448): Homolog of NCBI NO: 22327401 NR Description: serine carboxypeptidase -related [Arabidopsis >gi|20260290|gb|AAM13043.1| serine carboxypeptidase [Arabidopsis >gi|22136494|gb|AAM91325.1| serine carboxypeptidase [Arabidopsis
  misc_feature (8)..(448): Homolog of NCBI NO: 8777303 NR Description: serine carboxypeptidase [Arabidopsis thaliana]
  misc_feature (8)..(448): Homolog of NCBI NO: 15219433 NR Description: serine carboxypeptidase -related [Arabidopsis
  misc_feature (8)..(448): Homolog of NCBI NO: 15219429 NR Description: serine carboxypeptidase -related [Arabidopsis
  misc_feature (8)..(448): Homolog of NCBI NO: 15219435 NR Description: serine carboxypeptidase -related [Arabidopsis
  misc_feature (8)..(448): Homolog of NCBI NO: 15219431 NR Description: serine carboxypeptidase -related [Arabidopsis
  misc_feature (8)..(448): Homolog of NCBI NO: 15219427 NR Description: serine carboxypeptidase -related [Arabidopsis
  misc_feature (8)..(282): Homolog of NCBI NO: 25289774 NR Description: probable serine carboxypeptidase T9L24.47 - Arabidopsis thaliana >gi|11120810|gb|AAG30990.1|AC012396_26
  misc_feature (307)..(448): Homolog of NCBI NO: 25289774 NR Description: probable serine carboxypeptidase T9L24.47 - Arabidopsis thaliana >gi|11120810|gb|AAG30990.1|AC012396_26
  misc_feature (8)..(448): Homolog of NCBI NO: 15228300 NR Description: serine carboxypeptidase -related [Arabidopsis >gi|8567775|gb|AAF76347.1| glucose acyltransferase, putative
NQNLKYEMANKYVSSVLKSLLVLLHLVFLSKQHVDSASIVKSLPGFEGQLPFELETGYIGVGEEEEVQLFYYFIKSERNPKEDPLILWLTGGPGCSAISGLLFENGPLTMKLDVYNGTLPSLVSTTYSWTKTSSIIFLDQPVGTGFSYSRTQQFNKPSDSGEAKRIHEFLQKWLGKHQVFSSNPFYVAGDSYSGLVVPATVQEISKGNYECCNPPINLQGYVLGNPLTDYTTGSNSRIPFAHGMALISDELYESLKKTCKGEYTNVHPRNTQCLKFVEEFNKCTNRIFQQLILDPLCETETPDCYIYRYLLTTYWANDATVREALQINKESIGEWVRCYYSIPYNNDIKSSMPYHVNNSISGYRSLIYSGDHDFEVPYLGTQAWIRSLNYSIIDDWRPWMVKNQIAGYTRTYANKMTFATIKGGGHTAESKPEEASIMFQRWINGQPL

SEQ ID NO: 102976 - protein, 441 aa, Arabidopsis thaliana
  peptide (1)..(441): Ceres Seq. ID no. 13611634
  misc_feature (37)..(434): Pfam Name: Serine carboxypeptidase Pfam Description: Serine carboxypeptidase
  misc_feature (1)..(441): Homolog of NCBI NO: 22327401 NR Description: serine carboxypeptidase -related [Arabidopsis >gi|20260290|gb|AAM13043.1| serine carboxypeptidase [Arabidopsis >gi|22136494|gb|AAM91325.1| serine carboxypeptidase [Arabidopsis
  misc_feature (1)..(441): Homolog of NCBI NO: 8777303 NR Description: serine carboxypeptidase [Arabidopsis thaliana]
  misc_feature (1)..(441): Homolog of NCBI NO: 15219433 NR Description: serine carboxypeptidase -related [Arabidopsis
  misc_feature (1)..(441): Homolog of NCBI NO: 15219429 NR Description: serine carboxypeptidase -related [Arabidopsis
  misc_feature (1)..(441): Homolog of NCBI NO: 15219435 NR Description: serine carboxypeptidase -related [Arabidopsis
  misc_feature (1)..(441): Homolog of NCBI NO: 15219431 NR Description: serine carboxypeptidase -related [Arabidopsis
  misc_feature (1)..(441): Homolog of NCBI NO: 15219427 NR Description: serine carboxypeptidase -related [Arabidopsis
  misc_feature (1)..(275): Homolog of NCBI NO: 25289774 NR Description: probable serine carboxypeptidase T9L24.47 - Arabidopsis thaliana >gi|11120810|gb|AAG30990.1|AC012396_26
  misc_feature (300)..(441): Homolog of NCBI NO: 25289774 NR Description: probable serine carboxypeptidase T9L24.47 - Arabidopsis thaliana >gi|11120810|gb|AAG30990.1|AC012396_26
  misc_feature (1)..(441): Homolog of NCBI NO: 15228300 NR Description: serine carboxypeptidase -related [Arabidopsis >gi|8567775|gb|AAF76347.1| glucose acyltransferase, putative
MANKYVSSVLKSLLVLLHLVFLSKQHVDSASIVKSLPGFEGQLPFELETGYIGVGEEEEVQLFYYFIKSERNPKEDPLILWLTGGPGCSAISGLLFENGPLTMKLDVYNGTLPSLVSTTYSWTKTSSIIFLDQPVGTGFSYSRTQQFNKPSDSGEAKRIHEFLQKWLGKHQVFSSNPFYVAGDSYSGLVVPATVQEISKGNYECCNPPINLQGYVLGNPLTDYTTGSNSRIPFAHGMALISDELYESLKKTCKGEYTNVHPRNTQCLKFVEEFNKCTNRIFQQLILDPLCETETPDCYIYRYLLTTYWANDATVREALQINKESIGEWVRCYYSIPYNNDIKSSMPYHVNNSISGYRSLIYSGDHDFEVPYLGTQAWIRSLNYSIIDDWRPWMVKNQIAGYTRTYANKMTFATIKGGGHTAESKPEEASIMFQRWINGQPL

SEQ ID NO: 102977 - protein, 339 aa, Arabidopsis thaliana
  peptide (1)..(339): Ceres Seq. ID no. 13611635
  misc_feature (1)..(332): Pfam Name: Serine carboxypeptidase Pfam Description: Serine carboxypeptidase
  misc_feature (1)..(339): Homolog of NCBI NO: 22327401 NR Description: serine carboxypeptidase -related [Arabidopsis >gi|20260290|gb|AAM13043.1| serine carboxypeptidase [Arabidopsis >gi|22136494|gb|AAM91325.1| serine carboxypeptidase [Arabidopsis
  misc_feature (1)..(339): Homolog of NCBI NO: 8777303 NR Description: serine carboxypeptidase [Arabidopsis thaliana]
  misc_feature (1)..(339): Homolog of NCBI NO: 15219433 NR Description: serine carboxypeptidase -related [Arabidopsis
  misc_feature (1)..(339): Homolog of NCBI NO: 15219429 NR Description: serine carboxypeptidase -related [Arabidopsis
  misc_feature (1)..(339): Homolog of NCBI NO: 15219435 NR Description: serine carboxypeptidase -related [Arabidopsis
  misc_feature (1)..(339): Homolog of NCBI NO: 15219431 NR Description: serine carboxypeptidase -related [Arabidopsis
  misc_feature (1)..(339): Homolog of NCBI NO: 15219427 NR Description: serine carboxypeptidase -related [Arabidopsis
  misc_feature (1)..(173): Homolog of NCBI NO: 25289774 NR Description: probable serine carboxypeptidase T9L24.47 - Arabidopsis thaliana >gi|11120810|gb|AAG30990.1|AC012396_26
  misc_feature (198)..(339): Homolog of NCBI NO: 25289774 NR Description: probable serine carboxypeptidase T9L24.47 - Arabidopsis thaliana >gi|11120810|gb|AAG30990.1|AC012396_26
  misc_feature (1)..(339): Homolog of NCBI NO: 15228300 NR Description: serine carboxypeptidase -related [Arabidopsis >gi|8567775|gb|AAF76347.1| glucose acyltransferase, putative
MKLDVYNGTLPSLVSTTYSWTKTSSIIFLDQPVGTGFSYSRTQQFNKPSDSGEAKRIHEFLQKWLGKHQVFSSNPFYVAGDSYSGLVVPATVQEISKGNYECCNPPINLQGYVLGNPLTDYTTGSNSRIPFAHGMALISDELYESLKKTCKGEYTNVHPRNTQCLKFVEEFNKCTNRIFQQLILDPLCETETPDCYIYRYLLTTYWANDATVREALQINKESIGEWVRCYYSIPYNNDIKSSMPYHVNNSISGYRSLIYSGDHDFEVPYLGTQAWIRSLNYSIIDDWRPWMVKNQIAGYTRTYANKMTFATIKGGGHTAESKPEEASIMFQRWINGQPL

SEQ ID NO: 102978 - DNA, 1403 bp, Arabidopsis thaliana
  misc_feature (1)..(1403): Ceres Seq. ID no. 13611636
  misc_feature: MA Experiment ID: 20000179 Result: Down-regulated in Transcription
  misc_feature: MA Experiment 20000179 PARAMETER Experiment Name: At_Germinating_Seeds_P Parameter: Age (hr) Value: 6 vs. 0
  misc_feature: MA Experiment 20000179 PARAMETER Experiment Name: At_Germinating_Seeds_P Parameter: Tissue Value: Germinating Seeds
  misc_feature: MA Experiment ID: 20000180 Result: Down-regulated in Transcription
  misc_feature: MA Experiment 20000180 PARAMETER Experiment Name: At_Germinating_Seeds_P Parameter: Age (hr) Value: 24 vs. 0
  misc_feature: MA Experiment 20000180 PARAMETER Experiment Name: At_Germinating_Seeds_P Parameter: Tissue Value: Germinating Seeds
  misc_feature: MA Experiment ID: 20000264 Result: Up-regulated in Transcription
  misc_feature: MA Experiment 20000264 PARAMETER Experiment Name: At_Open_Flower_P Parameter: Age (day) Value: 21
  misc_feature: MA Experiment 20000264 PARAMETER Experiment Name: At_Open_Flower_P Parameter: Plant Line Value: WS
  misc_feature: MA Experiment 20000264 PARAMETER Experiment Name: At_Open_Flower_P Parameter: Tissue Value: Open Flower vs. Whole Plant
  misc_feature: MA Experiment ID: 20000495 Result: Down-regulated in Transcription
  misc_feature: MA Experiment 20000495 PARAMETER Experiment Name: At_Guard_Cells_P Parameter: Harvest Date Value: 8/2/2002
  misc_feature: MA Experiment 20000495 PARAMETER Experiment Name: At_Guard_Cells_P Parameter: Organism Value: A. thaliana
  misc_feature: MA Experiment 20000495 PARAMETER Experiment Name: At_Guard_Cells_P Parameter: Tissue Value: Guard Cells vs. Leaves
  misc_feature: MA Experiment ID: 20000794 Result: Up-regulated in Transcription
  misc_feature: MA Experiment 20000794 PARAMETER Experiment Name: At_Petals_P Parameter: Age (day) Value: 23-25 days
  misc_feature: MA Experiment 20000794 PARAMETER Experiment Name: At_Petals_P Parameter: Plant Line Value: WS
  misc_feature: MA Experiment 20000794 PARAMETER Experiment Name: At_Petals_P Parameter: Tissue Value: Petals vs. Whole plant
  misc_feature: MA Experiment ID: 20001451 Result: Down-regulated in Transcription
  misc_feature: MA Experiment 20001451 PARAMETER Experiment Name: At_Far-red-induction_P Parameter: Age (day) Value: 7
  misc_feature: MA Experiment 20001451 PARAMETER Experiment Name: At_Far-red-induction_P Parameter: Light Value: Far-red vs. White
  misc_feature: MA Experiment 20001451 PARAMETER Experiment Name: At_Far-red-induction_P Parameter: Organism Value: A. thaliana
  misc_feature: MA Experiment 20001451 PARAMETER Experiment Name: At_Far-red-induction_P Parameter: Plant Line Value: Columbia
  misc_feature: MA Experiment 20001451 PARAMETER Experiment Name: At_Far-red-induction_P Parameter: Timepoint (hr) Value: 24
  misc_feature: MA Experiment 20001451 PARAMETER Experiment Name: At_Far-red-induction_P Parameter: Tissue Value: Whole Plant
atgggagaaaacggagccaagcgatggaacttcggagctaacgaggtcgtcgaacgatctaactcacttaccattcgtgattaccttaacaccttaatcaattgtctcgacggtggtgatgtaagacccgtcatcccactaggtcacggcgatccttctccgttcccgagctttcgtaccgatcaagccgctgttgaagccatctgtgatgctgtccgttcgaccaagtttaacaactactcttcttcttccggtgttcctgtcgctaggaaggctgttgcagagtacctctctagtgatctctcttaccagatatcaccaaatgatgttcatatcacagctggttgtgtgcaagccattgagattttgatatccgctctcgcaattcctggagctaacattctgctacctaggcctacttacccgatgtacgattcccgagcggctttttgccaactcgaggttcgttatttcgacctcctaccggaaaatggttgggatgttgatctagatggagttgaagctcttgcggatgacaaaaccgttgctatacttgttatcaacccttgcaatccatgtgggaatgttttctctcgccaacatcttcaaaagattgcagagacggcttgcaagcttggtatacttgtgatcgcagacgaagtctatgaccattttgcctttggggataaaccatttgtgtccatggcagagtttgcagagctagtgcctgttattgtcttaggtgctatatctaaaagatggtttgttcctggatggagacttggttggatggtgactcttgaccctcatggcatcatgaaagattctgggtttgttcagactcttatcaatgttgtcaacatgtcgacggatcctgcaacgtttattcagggagcaatgcctgatatcattgggaatacaaaggaagagttcttctcatcaaaacttgaaatggtgaaaaaatgtgcagagatttgttatgaggagcttatgaagattccttgcatcacttgcccctgcaaacccgagggctcaatgttcacgatggtgaagttaaacttttcactactcgaagatatcagtgatgatttggacttctgctccaagctggctaaagaggaatctatgatcatcctaccaggtcaagctgttgggcttaagaactggctacgtatcacctttgcagttgagcttgagcttctcatagaagggttttccaggctaaagaactttactgagagacactccaagaatcagccatgagacgtattaagactctctctctctttctccacagccaaagcaaattagattttgctgtgaggctattttacatactattgttggctttataaaatatttgcacaaacaatgaatcactaatgccaagaagcagccatgac

SEQ ID NO: 102979 - protein, 420 aa, Arabidopsis thaliana
  peptide (1)..(420): Ceres Seq. ID no. 13611637
  misc_feature (95)..(412): Pfam Name: Aminotransferase class I and II Pfam Description: Aminotransferase class I and II
  misc_feature (1)..(420): Homolog of NCBI NO: 8777301 NR Description: tyrosine aminotransferase-like protein
  misc_feature (20)..(419): Homolog of NCBI NO: 15239521 NR Description: aminotransferase, putative [Arabidopsis thaliana] tyrosine aminotransferase [Arabidopsis thaliana]
  misc_feature (20)..(419): Homolog of NCBI NO: 23397279 NR Description: putatative tyrosine aminotransferase [Arabidopsis
  misc_feature (3)..(417): Homolog of NCBI NO: 11527941 NR Description: ROOTY/SUPERROOT1 [Arabidopsis thaliana]
  misc_feature (4)..(417): Homolog of NCBI NO: 11527943 NR Description: ROOTY/SUPERROOT1 [Arabidopsis thaliana]
  misc_feature (4)..(417): Homolog of NCBI NO: 15225387 NR Description: aminotransferase, putative [Arabidopsis thaliana]
  misc_feature (3)..(420): Homolog of NCBI NO: 6469087 NR Description: nicotianamine aminotransferase B [Hordeum vulgare
  misc_feature (4)..(417): Homolog of NCBI NO: 15809874 NR Description: At2g20610/F23N11.7 [Arabidopsis thaliana]
  misc_feature (17)..(416): Homolog of NCBI NO: 27525396 NR Description: tyrosine aminotransferase [Solenostemon
  misc_feature (3)..(420): Homolog of NCBI NO: 6469089 NR Description: nicotianamine aminotransferase [Hordeum vulgare
MGENGAKRWNFGANEVVERSNSLTIRDYLNTLINCLDGGDVRPVIPLGHGDPSPFPSFRTDQAAVEAICDAVRSTKFNNYSSSSGVPVARKAVAEYLSSDLSYQISPNDVHITAGCVQAIEILISALAIPGANILLPRPTYPMYDSRAAFCQLEVRYFDLLPENGWDVDLDGVEALADDKTVAILVINPCNPCGNVFSRQHLQKIAETACKLGILVIADEVYDHFAFGDKPFVSMAEFAELVPVIVLGAISKRWFVPGWRLGWMVTLDPHGIMKDSGFVQTLINVVNMSTDPATFIQGAMPDIIGNTKEEFFSSKLEMVKKCAEICYEELMKIPCITCPCKPEGSMFTMVKLNFSLLEDISDDLDFCSKLAKEESMIILPGQAVGLKNWLRITFAVELELLIEGFSRLKNFTERHSKNQP

SEQ ID NO: 102980 - protein, 278 aa, Arabidopsis thaliana
  peptide (1)..(278): Ceres Seq. ID no. 13611638
  misc_feature (1)..(270): Pfam Name: Aminotransferase class I and II Pfam Description: Aminotransferase class I and II
  misc_feature (1)..(278): Homolog of NCBI NO: 8777301 NR Description: tyrosine aminotransferase-like protein
  misc_feature (1)..(277): Homolog of NCBI NO: 15239521 NR Description: aminotransferase, putative [Arabidopsis thaliana] tyrosine aminotransferase [Arabidopsis thaliana]
  misc_feature (1)..(277): Homolog of NCBI NO: 23397279 NR Description: putatative tyrosine aminotransferase [Arabidopsis
  misc_feature (1)..(275): Homolog of NCBI NO: 11527941 NR Description: ROOTY/SUPERROOT1 [Arabidopsis thaliana]
  misc_feature (1)..(275): Homolog of NCBI NO: 11527943 NR Description: ROOTY/SUPERROOT1 [Arabidopsis thaliana]
  misc_feature (1)..(275): Homolog of NCBI NO: 15225387 NR Description: aminotransferase, putative [Arabidopsis thaliana]
  misc_feature (1)..(278): Homolog of NCBI NO: 6469087 NR Description: nicotianamine aminotransferase B [Hordeum vulgare
  misc_feature (1)..(275): Homolog of NCBI NO: 15809874 NR Description: At2g20610/F23N11.7 [Arabidopsis thaliana]
  misc_feature (1)..(274): Homolog of NCBI NO: 27525396 NR Description: tyrosine aminotransferase [Solenostemon
  misc_feature (1)..(278): Homolog of NCBI NO: 6469089 NR Description: nicotianamine aminotransferase [Hordeum vulgare
MYDSRAAFCQLEVRYFDLLPENGWDVDLDGVEALADDKTVAILVINPCNPCGNVFSRQHLQKIAETACKLGILVIADEVYDHFAFGDKPFVSMAEFAELVPVIVLGAISKRWFVPGWRLGWMVTLDPHGIMKDSGFVQTLINVVNMSTDPATFIQGAMPDIIGNTKEEFFSSKLEMVKKCAEICYEELMKIPCITCPCKPEGSMFTMVKLNFSLLEDISDDLDFCSKLAKEESMIILPGQAVGLKNWLRITFAVELELLIEGFSRLKNFTERHSKNQP

SEQ ID NO: 102981 - DNA, 1220 bp, Arabidopsis thaliana
  misc_feature (1)..(1220): Ceres Seq. ID no. 13611639
  misc_feature: MA Experiment ID: 108461 Result: Up-regulated in Transcription
  misc_feature: MA Experiment 108461 PARAMETER Experiment Name: At_Germinating_Seeds_cDNA_P Parameter: Age (day) Value: 1 vs. 0
  misc_feature: MA Experiment 108461 PARAMETER Experiment Name: At_Germinating_Seeds_cDNA_P Parameter: Tissue Value: Germinating Seeds
  misc_feature: MA Experiment ID: 20000093 Result: Up-regulated in Transcription
  misc_feature: MA Experiment 20000093 PARAMETER Experiment Name: At_42deg_Heat_cDNA_P Parameter: Temperature (deg C) Value: 42 vs. 22
  misc_feature: MA Experiment 20000093 PARAMETER Experiment Name: At_42deg_Heat_cDNA_P Parameter: Timepoint (hr) Value: 0.5
  misc_feature: MA Experiment 20000093 PARAMETER Experiment Name: At_42deg_Heat_cDNA_P Parameter: Tissue Value: Aerial
  misc_feature: MA Experiment ID: 20000144 Result: Up-regulated in Transcription
  misc_feature: MA Experiment 20000144 PARAMETER Experiment Name: At_42deg_Heat_cDNA_P Parameter: Temperature (deg C) Value: 42 vs. 22
  misc_feature: MA Experiment 20000144 PARAMETER Experiment Name: At_42deg_Heat_cDNA_P Parameter: Timepoint (hr) Value: 1
  misc_feature: MA Experiment 20000144 PARAMETER Experiment Name: At_42deg_Heat_cDNA_P Parameter: Tissue Value: Aerial
  misc_feature: MA Experiment ID: 20000179 Result: Up-regulated in Transcription
  misc_feature: MA Experiment 20000179 PARAMETER Experiment Name: At_Germinating_Seeds_P Parameter: Age (hr) Value: 6 vs. 0
  misc_feature: MA Experiment 20000179 PARAMETER Experiment Name: At_Germinating_Seeds_P Parameter: Tissue Value: Germinating Seeds
  misc_feature: MA Experiment ID: 20000180 Result: Up-regulated in Transcription
  misc_feature: MA Experiment 20000180 PARAMETER Experiment Name: At_Germinating_Seeds_P Parameter: Age (hr) Value: 24 vs. 0
  misc_feature: MA Experiment 20000180 PARAMETER Experiment Name: At_Germinating_Seeds_P Parameter: Tissue Value: Germinating Seeds
  misc_feature: MA Experiment ID: 20000224 Result: Down-regulated in Transcription
gtgttaatttgattaattccattacatcttcaaaaccgtacagatctctgtttcggagcagcttcttcacacgctcaagctcaccgatcgattcttccaatgctcttctaattcatctgcaaaactctcagatcactcatgggtttgatttcaaaccctacccgtttgattctcgtcgccaccatcttcttcctcgtttcttcaatctccggtcaggattctgtcgttgagaacaatgagagacaagaatctgaaggatctggtaaagagcttggtcgtcgtggaatggttggtactgaacgaattggagttgatactgttgtagacaatattggtgctcttggtttgaatctagaccttgatgctactgctcctagtgtatttgatgctttgttttcgagtttctcgatgatacttgtcaccgagattggggatgaaacttttataatagcggcattgatggctatgcgacatcctaaagctactgttttatctggtgcactctcagctttgtttgttatgactatactttctactggacttggtaggatagtgccaaacttgatatcgaggaagcacaccaatagtgctgctacagtgctctatgcattttttggtttgcgactactctacattgcttggaggtctactgattcaaagtcaaatcagaagaaagaaatggaggaagttgaagagaagctcgagtcaggtcaagggaagacacccttccgtcgtttattctcaagattttgtaccccaatatttctggagtccttcatcttaacctttctagctgaatggggtgaccgtagccagatcgctacaatagctttggcgactcacaagaacgccataggagtggccattggggcaagtattggacacactgtgtgtacttcactagcagttgttggaggaagcatgctggcttcaaggatctcgcaacgtacggtcgcaactgttggaggcttactcttcctcggcttttcagtctcctcctatttctatcctccattgtagtaaatgtgcttctttcgaaaatgggtgttagagacaatttctaagtaaagtttcaattttttttttgattttaatttaagtttgatattttgtttaatatcaatggccaaaatggccaaaccaaagaatccaacgcctatgcttttacaatttactttcttgaagtgtaacaaatctaattaaataaaattttgcagtat

SEQ ID NO: 102982 - protein, 293 aa, Arabidopsis thaliana; identical to SEQ ID NO: 25308
  peptide (1)..(293): Ceres Seq. ID no. 13611640
  misc_feature (209)..(284): Pfam Name: Uncharacterized protein family UPF0016 Pfam Description: Uncharacterized protein family UPF0016
  misc_feature (1)..(293): Homolog of NCBI NO: 18421551 NR Description: transmembrane protein FT27/PFT27-related
  misc_feature (1)..(273): Homolog of NCBI NO: 9759042 NR Description: transmembrane protein FT27/PFT27-like
  misc_feature (73)..(292): Homolog of NCBI NO: 21357589 NR Description: CG4196-PC [Drosophila melanogaster]
  misc_feature (10)..(189): Homolog of NCBI NO: 20385488 NR Description: transmembrane protein HTP-1 [Danio rerio]
  misc_feature (177)..(292): Homolog of NCBI NO: 20385488 NR Description: transmembrane protein HTP-1 [Danio rerio]
  misc_feature (80)..(288): Homolog of NCBI NO: 15222613 NR Description: transmembrane protein -related [Arabidopsis
  misc_feature (80)..(288): Homolog of NCBI NO: 21593636 NR Description: transmembrane protein, putative [Arabidopsis
  misc_feature (80)..(289): Homolog of NCBI NO: 15420543 NR Description: putative membrane protein [Crithidia fasciculata]
  misc_feature (80)..(289): Homolog of NCBI NO: 17556152 NR Description: Uncharacterized protein family UPF0016 (32.1 kD) elegans] >gi|13491294|gb|AAK27882.1| Hypothetical protein
  misc_feature (84)..(207): Homolog of NCBI NO: 19114643 NR Description: hypothetical UPF0016-family protein pombe] >gi|1723480|sp|Q10320|YD68_SCHPO Hypothetical protein

SEQ ID NO: 102983 - protein, 244 aa, Arabidopsis thaliana; identical to SEQ ID NO: 25309
  peptide (1)..(244): Ceres Seq. ID no. 13611641
  misc_feature (160)..(235): Pfam Name: Uncharacterized protein family UPF0016 Pfam Description: Uncharacterized protein family UPF0016
  misc_feature (1)..(244): Homolog of NCBI NO: 18421551 NR Description: transmembrane protein FT27/PFT27-related
  misc_feature (1)..(224): Homolog of NCBI NO: 9759042 NR Description: transmembrane protein FT27/PFT27-like
  misc_feature (24)..(243): Homolog of NCBI NO: 21357589 NR Description: CG4196-PC [Drosophila melanogaster]
  misc_feature (1)..(140): Homolog of NCBI NO: 20385488 NR Description: transmembrane protein HTP-1 [Danio rerio]
  misc_feature (128)..(243): Homolog of NCBI NO: 20385488 NR Description: transmembrane protein HTP-1 [Danio rerio]
  misc_feature (31)..(239): Homolog of NCBI NO: 15222613 NR Description: transmembrane protein -related [Arabidopsis
  misc_feature (31)..(239): Homolog of NCBI NO: 21593636 NR Description: transmembrane protein, putative [Arabidopsis
  misc_feature (31)..(240): Homolog of NCBI NO: 15420543 NR Description: putative membrane protein [Crithidia fasciculata]
  misc_feature (31)..(240): Homolog of NCBI NO: 17556152 NR Description: Uncharacterized protein family UPF0016 (32.1 kD) elegans] >gi|13491294|gb|AAK27882.1| Hypothetical protein
  misc_feature (35)..(158): Homolog of NCBI NO: 19114643 NR Description: hypothetical UPF0016-family protein pombe] >gi|1723480|sp|Q10320|YD68_SCHPO Hypothetical protein

SEQ ID NO: 102984 - protein, 203 aa, Arabidopsis thaliana; identical to SEQ ID NO: 25310
  peptide (1)..(203): Ceres Seq. ID no. 13611642
  misc_feature (119)..(194): Pfam Name: Uncharacterized protein family UPF0016 Pfam Description: Uncharacterized protein family UPF0016
  misc_feature (1)..(203): Homolog of NCBI NO: 18421551 NR Description: transmembrane protein FT27/PFT27-related
  misc_feature (1)..(183): Homolog of NCBI NO: 9759042 NR Description: transmembrane protein FT27/PFT27-like
  misc_feature (1)..(202): Homolog of NCBI NO: 21357589 NR Description: CG4196-PC [Drosophila melanogaster]
  misc_feature (1)..(99): Homolog of NCBI NO: 20385488 NR Description: transmembrane protein HTP-1 [Danio rerio]
  misc_feature (87)..(202): Homolog of NCBI NO: 20385488 NR Description: transmembrane protein HTP-1 [Danio rerio]
  misc_feature (1)..(198): Homolog of NCBI NO: 15222613 NR Description: transmembrane protein -related [Arabidopsis
  misc_feature (1)..(198): Homolog of NCBI NO: 21593636 NR Description: transmembrane protein, putative [Arabidopsis
  misc_feature (1)..(199): Homolog of NCBI NO: 15420543 NR Description: putative membrane protein [Crithidia fasciculata]
  misc_feature (1)..(199): Homolog of NCBI NO: 17556152 NR Description: Uncharacterized protein family UPF0016 (32.1 kD) elegans] >gi|13491294|gb|AAK27882.1| Hypothetical protein
  misc_feature (1)..(117): Homolog of NCBI NO: 19114643 NR Description: hypothetical UPF0016-family protein pombe] >gi|1723480|sp|Q10320|YD68_SCHPO Hypothetical protein

SEQ ID NO: 102985 - DNA, 718 bp, Arabidopsis thaliana
  misc_feature (1)..(718): Ceres Seq. ID no. 13611671
  misc_feature: MA Experiment ID: 108435 Result: Down-regulated in Transcription
  misc_feature: MA Experiment 108435 PARAMETER Experiment Name: At_stm_Mutants_cDNA_P Parameter: Plant Line Value: wt Landsburg vs stm
  misc_feature: MA Experiment 108435 PARAMETER Experiment Name: At_stm_Mutants_cDNA_P Parameter: Tissue Value: Shoot Apical Meristem Region
  misc_feature: MA Experiment ID: 108462 Result: Up-regulated in Transcription
  misc_feature: MA Experiment 108462 PARAMETER Experiment Name: At_Germinating_Seeds_cDNA_P Parameter: Age (day) Value: 2 vs. 0
  misc_feature: MA Experiment 108462 PARAMETER Experiment Name: At_Germinating_Seeds_cDNA_P Parameter: Tissue Value: Germinating Seeds
  misc_feature: MA Experiment ID: 108463 Result: Up-regulated in Transcription
  misc_feature: MA Experiment 108463 PARAMETER Experiment Name: At_Germinating_Seeds_cDNA_P Parameter: Age (day) Value: 3 vs. 0
  misc_feature: MA Experiment 108463 PARAMETER Experiment Name: At_Germinating_Seeds_cDNA_P Parameter: Tissue Value: Germinating Seeds
  misc_feature: MA Experiment ID: 108464 Result: Up-regulated in Transcription
  misc_feature: MA Experiment 108464 PARAMETER Experiment Name: At_Germinating_Seeds_cDNA_P Parameter: Age (day) Value: 4 vs. 0
  misc_feature: MA Experiment 108464 PARAMETER Experiment Name: At_Germinating_Seeds_cDNA_P Parameter: Tissue Value: Germinating Seeds
  misc_feature: MA Experiment ID: 108501 Result: Up-regulated in Transcription
  misc_feature: MA Experiment 108501 PARAMETER Experiment Name: At_ap2_floral_buds_cDNA_P Parameter: Plant Line Value: ap2 (Ler.)
  misc_feature: MA Experiment 108501 PARAMETER Experiment Name: At_ap2_floral_buds_cDNA_P Parameter: Tissue Value: Closed Flower
  misc_feature: MA Experiment ID: 108561 Result: Down-regulated in Transcription
  misc_feature: MA Experiment 108561 PARAMETER Experiment Name: At_100uM_ABA_cDNA_P Parameter: Timepoint (hr) Value: 6
  misc_feature: MA Experiment 108561 PARAMETER Experiment Name: At_100uM_ABA_cDNA_P Parameter: Tissue Value: Aerial
  misc_feature: MA Experiment 108561 PARAMETER Experiment Name: At_100uM_ABA_cDNA_P Parameter: Treatment Value: 100uM ABA vs. No Treatment
  misc_feature: MA Experiment ID: 108572 Result: Up-regulated in Transcription
  misc_feature: MA Experiment 108572 PARAMETER Experiment Name: At_Drought_cDNA_P Parameter: Timepoint (hr) Value: 1
  misc_feature: MA Experiment 108572 PARAMETER Experiment Name: At_Drought_cDNA_P Parameter: Tissue Value: Aerial
  misc_feature: MA Experiment 108572 PARAMETER Experiment Name: At_Drought_cDNA_P Parameter: Treatment Value: Drought vs. No Drought
  misc_feature: MA Experiment ID: 108595 Result: Down-regulated in Transcription
  misc_feature: MA Experiment 108595 PARAMETER Experiment Name: At_Ler-pi_Ovule_cDNA_P Parameter: Plant Line Value: null
  misc_feature: MA Experiment ID: 108609 Result: Down-regulated in Transcription
  misc_feature: MA Experiment 108609 PARAMETER Experiment Name: At_100uM_ABA_cDNA_P Parameter: Timepoint (hr) Value: 24
  misc_feature: MA Experiment 108609 PARAMETER Experiment Name: At_100uM_ABA_cDNA_P Parameter: Tissue Value: Aerial
  misc_feature: MA Experiment 108609 PARAMETER Experiment Name: At_100uM_ABA_cDNA_P Parameter: Treatment Value: 100uM ABA vs. No Treatment
  misc_feature: MA Experiment ID: 108668 Result: Up-regulated in Transcription
  misc_feature: MA Experiment 108668 PARAMETER Experiment Name: At_2mM_SA_cDNA_P Parameter: Plant Line Value: WS
  misc_feature: MA Experiment 108668 PARAMETER Experiment Name: At_2mM_SA_cDNA_P Parameter: Timepoint (hr) Value: 6
  misc_feature: MA Experiment 108668 PARAMETER Experiment Name: At_2mM_SA_cDNA_P Parameter: Treatment Value: 2mM SA vs. No Treatment
  misc_feature: MA Experiment ID: 20000068 Result: Up-regulated in Transcription
  misc_feature: MA Experiment ID: 20000069 Result: Down-regulated in Transcription
  misc_feature: MA Experiment 20000069 PARAMETER Experiment Name: At_100uM_ABA_Mutants_cDNA_P Parameter: Plant Line Value: CS23
  misc_feature: MA Experiment 20000069 PARAMETER Experiment Name: At_100uM_ABA_Mutants_cDNA_P Parameter: Timepoint (hr) Value: 6
  misc_feature: MA Experiment 20000069 PARAMETER Experiment Name: At_100uM_ABA_Mutants_cDNA_P Parameter: Tissue Value: Aerial
  misc_feature: MA Experiment 20000069 PARAMETER Experiment Name: At_100uM_ABA_Mutants_cDNA_P Parameter: Treatment Value: 100uM ABA vs. No Treatment
  misc_feature: MA Experiment ID: 20000070 Result: Down-regulated in Transcription
  misc_feature: MA Experiment 20000070 PARAMETER Experiment Name: At_100uM_ABA_Mutants_cDNA_P Parameter: Plant Line Value: CS24
  misc_feature: MA Experiment 20000070 PARAMETER Experiment Name: At_100uM_ABA_Mutants_cDNA_P Parameter: Timepoint (hr) Value: 6
  misc_feature: MA Experiment 20000070 PARAMETER Experiment Name: At_100uM_ABA_Mutants_cDNA_P Parameter: Tissue Value: Aerial
  misc_feature: MA Experiment 20000070 PARAMETER Experiment Name: At_100uM_ABA_Mutants_cDNA_P Parameter: Treatment Value: 100uM ABA vs. No Treatment
  misc_feature: MA Experiment ID: 20000071 Result: Down-regulated in Transcription
  misc_feature: MA Experiment 20000071 PARAMETER Experiment Name: At_100uM_ABA_Mutants_cDNA_P Parameter: Plant Line Value: CS8104
  misc_feature: MA Experiment 20000071 PARAMETER Experiment Name: At_100uM_ABA_Mutants_cDNA_P Parameter: Timepoint (hr) Value: 6
  misc_feature: MA Experiment 20000071 PARAMETER Experiment Name: At_100uM_ABA_Mutants_cDNA_P Parameter: Tissue Value: Aerial
  misc_feature: MA Experiment 20000071 PARAMETER Experiment Name: At_100uM_ABA_Mutants_cDNA_P Parameter: Treatment Value: 100uM ABA vs. No Treatment
  misc_feature: MA Experiment ID: 20000072 Result: Down-regulated in Transcription
  misc_feature: MA Experiment 20000072 PARAMETER Experiment Name: At_100uM_ABA_Mutants_cDNA_P Parameter: Plant Line Value: CS8105
  misc_feature: MA Experiment 20000072 PARAMETER Experiment Name: At_100uM_ABA_Mutants_cDNA_P Parameter: Timepoint (hr) Value: 6
  misc_feature: MA Experiment 20000072 PARAMETER Experiment Name: At_100uM_ABA_Mutants_cDNA_P Parameter: Tissue Value: Aerial
  misc_feature: MA Experiment 20000072 PARAMETER Experiment Name: At_100uM_ABA_Mutants_cDNA_P Parameter: Treatment Value: 100uM ABA vs. No Treatment
  misc_feature: MA Experiment ID: 20000086 Result: Down-regulated in Transcription
  misc_feature: MA Experiment 20000086 PARAMETER Experiment Name: At_100uM_ABA_Mutants_cDNA_P Parameter: Plant Line Value: CS22
  misc_feature: MA Experiment 20000086 PARAMETER Experiment Name: At_100uM_ABA_Mutants_cDNA_P Parameter: Timepoint (hr) Value: 6
  misc_feature: MA Experiment 20000086 PARAMETER Experiment Name: At_100uM_ABA_Mutants_cDNA_P Parameter: Tissue Value: Aerial
  misc_feature: MA Experiment 20000086 PARAMETER Experiment Name: At_100uM_ABA_Mutants_cDNA_P Parameter: Treatment Value: 100uM ABA vs. No Treatment
  misc_feature: MA Experiment ID: 20000087 Result: Down-regulated in Transcription
  misc_feature: MA Experiment 20000087 PARAMETER Experiment Name: At_100uM_ABA_Mutants_cDNA_P Parameter: Plant Line Value: WS
  misc_feature: MA Experiment 20000087 PARAMETER Experiment Name: At_100uM_ABA_Mutants_cDNA_P Parameter: Timepoint (hr) Value: 6
  misc_feature: MA Experiment 20000087 PARAMETER Experiment Name: At_100uM_ABA_Mutants_cDNA_P Parameter: Tissue Value: Aerial
  misc_feature: MA Experiment 20000087 PARAMETER Experiment Name: At_100uM_ABA_Mutants_cDNA_P Parameter: Treatment Value: 100uM ABA vs. No Treatment
  misc_feature: MA Experiment ID: 20000088 Result: Down-regulated in Transcription
  misc_feature: MA Experiment 20000088 PARAMETER Experiment Name: At_100uM_ABA_Mutants_cDNA_P Parameter: Plant Line Value: Landsberg
  misc_feature: MA Experiment 20000088 PARAMETER Experiment Name: At_100uM_ABA_Mutants_cDNA_P Parameter: Timepoint (hr) Value: 6
  misc_feature: MA Experiment 20000088 PARAMETER Experiment Name: At_100uM_ABA_Mutants_cDNA_P Parameter: Tissue Value: Aerial
  misc_feature: MA Experiment 20000088 PARAMETER Experiment Name: At_100uM_ABA_Mutants_cDNA_P Parameter: Treatment Value: 100uM ABA vs. No Treatment
  misc_feature: MA Experiment ID: 20000089 Result: Down-regulated in Transcription
  misc_feature: MA Experiment ID: 20000090 Result: Down-regulated in Transcription
  misc_feature: MA Experiment ID: 20000111 Result: Up-regulated in Transcription
  misc_feature: MA Experiment 20000111 PARAMETER Experiment Name: At_42deg_Heat_cDNA_P Parameter: Temperature (deg C) Value: 42 vs. 22
  misc_feature: MA Experiment 20000111 PARAMETER Experiment Name: At_42deg_Heat_cDNA_P Parameter: Timepoint (hr) Value: 6
  misc_feature: MA Experiment 20000111 PARAMETER Experiment Name: At_42deg_Heat_cDNA_P Parameter: Tissue Value: Aerial
  misc_feature: MA Experiment ID: 20000113 Result: Up-regulated in Transcription
  misc_feature: MA Experiment 20000113 PARAMETER Experiment Name: At_42deg_Heat_cDNA_P Parameter: Temperature (deg C) Value: 42 vs. 22
  misc_feature: MA Experiment 20000113 PARAMETER Experiment Name: At_42deg_Heat_cDNA_P Parameter: Timepoint (hr) Value: 8
  misc_feature: MA Experiment 20000113 PARAMETER Experiment Name: At_42deg_Heat_cDNA_P Parameter: Tissue Value: Aerial
  misc_feature: MA Experiment ID: 20000117 Result: Down-regulated in Transcription
  misc_feature: MA Experiment 20000117 PARAMETER Experiment Name: At_100uM_ABA_Mutants_cDNA_P Parameter: Plant Line Value: Columbia
  misc_feature: MA Experiment 20000117 PARAMETER Experiment Name: At_100uM_ABA_Mutants_cDNA_P Parameter: Timepoint (hr) Value: 6
  misc_feature: MA Experiment 20000117 PARAMETER Experiment Name: At_100uM_ABA_Mutants_cDNA_P Parameter: Tissue Value: Aerial
  misc_feature: MA Experiment 20000117 PARAMETER Experiment Name: At_100uM_ABA_Mutants_cDNA_P Parameter: Treatment Value: 100uM ABA vs. No Treatment
  misc_feature: MA Experiment ID: 20000173 Result: Up-regulated in Transcription
  misc_feature: MA Experiment 20000173 PARAMETER Experiment Name: At_42deg_Heat_P Parameter: Age (day) Value: 14
  misc_feature: MA Experiment 20000173 PARAMETER Experiment Name: At_42deg_Heat_P Parameter: Organism Value: A. thaliana
  misc_feature: MA Experiment 20000173 PARAMETER Experiment Name: At_42deg_Heat_P Parameter: Plant Line Value: WS
  misc_feature: MA Experiment 20000173 PARAMETER Experiment Name: At_42deg_Heat_P Parameter: Temperature (deg C) Value: 42 vs. 22
  misc_feature: MA Experiment 20000173 PARAMETER Experiment Name: At_42deg_Heat_P Parameter: Timepoint (hr) Value: 6
  misc_feature: MA Experiment 20000173 PARAMETER Experiment Name: At_42deg_Heat_P Parameter: Tissue Value: Aerial
  misc_feature: MA Experiment ID: 20000182 Result: Up-regulated in Transcription
  misc_feature: MA Experiment 20000182 PARAMETER Experiment Name: At_2mM_SA_P Parameter: Age (day) Value: 14
  misc_feature: MA Experiment 20000182 PARAMETER Experiment Name: At_2mM_SA_P Parameter: Organism Value: A. thaliana
  misc_feature: MA Experiment 20000182 PARAMETER Experiment Name: At_2mM_SA_P Parameter: Plant Line Value: WS
  misc_feature: MA Experiment 20000182 PARAMETER Experiment Name: At_2mM_SA_P Parameter: Timepoint (hr) Value: 6
  misc_feature: MA Experiment 20000182 PARAMETER Experiment Name: At_2mM_SA_P Parameter: Tissue Value: Aerial
  misc_feature: MA Experiment 20000182 PARAMETER Experiment Name: At_2mM_SA_P Parameter: Treatment Value: 2mM SA vs. No Treatment
  misc_feature: MA Experiment ID: 20000184 Result: Up-regulated in Transcription
  misc_feature: MA Experiment 20000184 PARAMETER Experiment Name: At_Shoots__P Parameter: Age (day) Value: 7
  misc_feature: MA Experiment 20000184 PARAMETER Experiment Name: At_Shoots__P Parameter: Tissue Value: Shoots vs. Whole Plant
  misc_feature: MA Experiment ID: 20000308 Result: Down-regulated in Transcription
  misc_feature: MA Experiment 20000308 PARAMETER Experiment Name: At_100mM_NaCl__P Parameter: Age (day) Value: 17
  misc_feature: MA Experiment 20000308 PARAMETER Experiment Name: At_100mM_NaCl__P Parameter: Organism Value: A. thaliana
  misc_feature: MA Experiment 20000308 PARAMETER Experiment Name: At_100mM_NaCl__P Parameter: Plant Line Value: WS
  misc_feature: MA Experiment 20000308 PARAMETER Experiment Name: At_100mM_NaCl__P Parameter: Timepoint (hr) Value: 72
  misc_feature: MA Experiment 20000308 PARAMETER Experiment Name: At_100mM_NaCl__P Parameter: Tissue Value: Whole Plant
  misc_feature: MA Experiment 20000308 PARAMETER Experiment Name: At_100mM_NaCl__P Parameter: Treatment Value: 100mM NaCl vs. No Treatment
  misc_feature: MA Experiment ID: 20000437 Result: Down-regulated in Transcription
  misc_feature: MA Experiment 20000437 PARAMETER Experiment Name: At_Drought_P Parameter: Age (day) Value: 8
  misc_feature: MA Experiment 20000437 PARAMETER Experiment Name: At_Drought_P Parameter: Organism Value: A. thaliana
  misc_feature: MA Experiment 20000437 PARAMETER Experiment Name: At_Drought_P Parameter: Plant Line Value: WS
  misc_feature: MA Experiment 20000437 PARAMETER Experiment Name: At_Drought_P Parameter: Timepoint (hr) Value: 24
  misc_feature: MA Experiment 20000437 PARAMETER Experiment Name: At_Drought_P Parameter: Tissue Value: Whole Plant
  misc_feature: MA Experiment 20000437 PARAMETER Experiment Name: At_Drought_P Parameter: Treatment Value: Drought vs. No Drought
  misc_feature: MA Experiment ID: 20000438 Result: Up-regulated in Transcription
  misc_feature: MA Experiment 20000438 PARAMETER Experiment Name: At_Shoots__P Parameter: Age (day) Value: 14
  misc_feature: MA Experiment 20000438 PARAMETER Experiment Name: At_Shoots__P Parameter: Tissue Value: Shoots vs. Whole Plant
  misc_feature: MA Experiment ID: 20000441 Result: Up-regulated in Transcription
  misc_feature: MA Experiment 20000441 PARAMETER Experiment Name: At_1uM_BR-BRZ__P Parameter: Tissue Value: Shoot Apices
  misc_feature: MA Experiment 20000441 PARAMETER Experiment Name: At_1uM_BR-BRZ__P Parameter: Treatment Value: 1uM BR vs. No Treatment
  misc_feature: MA Experiment ID: 20000445 Result: Down-regulated in Transcription
  misc_feature: MA Experiment 20000445 PARAMETER Experiment Name: At_100uM_NAA__P Parameter: Age (day) Value: 14
  misc_feature: MA Experiment 20000445 PARAMETER Experiment Name: At_100uM_NAA__P Parameter: Organism Value: A. thaliana
  misc_feature: MA Experiment 20000445 PARAMETER Experiment Name: At_100uM_NAA__P Parameter: Plant Line Value: WS
  misc_feature: MA Experiment 20000445 PARAMETER Experiment Name: At_100uM_NAA__P Parameter: Timepoint (hr) Value: 6
  misc_feature: MA Experiment 20000445 PARAMETER Experiment Name: At_100uM_NAA__P Parameter: Tissue Value: Aerial
  misc_feature: MA Experiment 20000445 PARAMETER Experiment Name: At_100uM_NAA__P Parameter: Treatment Value: 100uM NAA vs. No Treatment
  misc_feature: MA Experiment ID: 20000452 Result: Up-regulated in Transcription
  misc_feature: MA Experiment 20000452 PARAMETER Experiment Name: At_CS6879_Shoots-Roots_P Parameter: Age (day) Value: 14
  misc_feature: MA Experiment 20000452 PARAMETER Experiment Name: At_CS6879_Shoots-Roots_P Parameter: Organism Value: A. thaliana
  misc_feature: MA Experiment 20000452 PARAMETER Experiment Name: At_CS6879_Shoots-Roots_P Parameter: Plant Line Value: CS6879 vs. WS
  misc_feature: MA Experiment 20000452 PARAMETER Experiment Name: At_CS6879_Shoots-Roots_P Parameter: Tissue Value: Shoots
  misc_feature: MA Experiment ID: 20000453 Result: Down-regulated in Transcription
  misc_feature: MA Experiment 20000453 PARAMETER Experiment Name: At_100uM_ABA_P Parameter: Age (day) Value: 15
  misc_feature: MA Experiment 20000453 PARAMETER Experiment Name: At_100uM_ABA_P Parameter: Organism Value: A. thaliana
  misc_feature: MA Experiment 20000453 PARAMETER Experiment Name: At_100uM_ABA_P Parameter: Plant Line Value: WS
  misc_feature: MA Experiment 20000453 PARAMETER Experiment Name: At_100uM_ABA_P Parameter: Timepoint (hr) Value: 24
  misc_feature: MA Experiment 20000453 PARAMETER Experiment Name: At_100uM_ABA_P Parameter: Tissue Value: Aerial
  misc_feature: MA Experiment 20000453 PARAMETER Experiment Name: At_100uM_ABA_P Parameter: Treatment Value: 100uM ABA vs. No Treatment
  misc_feature: MA Experiment ID: 20000455 Result: Down-regulated in Transcription
  misc_feature: MA Experiment 20000455 PARAMETER Experiment Name: At_100uM_ABA_P Parameter: Age (day) Value: 16
  misc_feature: MA Experiment 20000455 PARAMETER Experiment Name: At_100uM_ABA_P Parameter: Organism Value: A. thaliana
  misc_feature: MA Experiment 20000455 PARAMETER Experiment Name: At_100uM_ABA_P Parameter: Plant Line Value: WS
  misc_feature: MA Experiment 20000455 PARAMETER Experiment Name: At_100uM_ABA_P Parameter: Timepoint (hr) Value: 48
  misc_feature: MA Experiment 20000455 PARAMETER Experiment Name: At_100uM_ABA_P Parameter: Tissue Value: Aerial
  misc_feature: MA Experiment 20000455 PARAMETER Experiment Name: At_100uM_ABA_P Parameter: Treatment Value: 100uM ABA vs. No Treatment
  misc_feature: MA Experiment ID: 20000527 Result: Up-regulated in Transcription
  misc_feature: MA Experiment 20000527 PARAMETER Experiment Name: At_10percent_PEG_P Parameter: Age (day) Value: 20
  misc_feature: MA Experiment 20000527 PARAMETER Experiment Name: At_10percent_PEG_P Parameter: Organism Value: A. thaliana
  misc_feature: MA Experiment 20000527 PARAMETER Experiment Name: At_10percent_PEG_P Parameter: Plant Line Value: WS
  misc_feature: MA Experiment 20000527 PARAMETER Experiment Name: At_10percent_PEG_P Parameter: Timepoint (day) Value: 20
  misc_feature: MA Experiment 20000527 PARAMETER Experiment Name: At_10percent_PEG_P Parameter: Tissue Value: Whole Plant
  misc_feature: MA Experiment 20000527 PARAMETER Experiment Name: At_10percent_PEG_P Parameter: Treatment Value: 10percent PEG vs. No Treatment
  misc_feature: MA Experiment ID: 20000573 Result: Down-regulated in Transcription
  misc_feature: MA Experiment 20000573 PARAMETER Experiment Name: At_100uM_ABA_Mutants__P Parameter: Organism Value: A. thaliana
  misc_feature: MA Experiment 20000573 PARAMETER Experiment Name: At_100uM_ABA_Mutants__P Parameter: Plant Line Value: CS22 vs. Ler wt
  misc_feature: MA Experiment 20000573 PARAMETER Experiment Name: At_100uM_ABA_Mutants__P Parameter: Timepoint (hr) Value: N/A
  misc_feature: MA Experiment 20000573 PARAMETER Experiment Name: At_100uM_ABA_Mutants__P Parameter: Tissue Value: Whole Plant
  misc_feature: MA Experiment 20000573 PARAMETER Experiment Name: At_100uM_ABA_Mutants__P Parameter: Treatment Value: None
  misc_feature: MA Experiment ID: 20000574 Result: Down-regulated in Transcription
  misc_feature: MA Experiment 20000574 PARAMETER Experiment Name: At_100uM_ABA_Mutants__P Parameter: Organism Value: A. thaliana
  misc_feature: MA Experiment 20000574 PARAMETER Experiment Name: At_100uM_ABA_Mutants__P Parameter: Plant Line Value: CS23 vs. Ler wt
  misc_feature: MA Experiment 20000574 PARAMETER Experiment Name: At_100uM_ABA_Mutants__P Parameter: Timepoint (hr) Value: N/A
  misc_feature: MA Experiment 20000574 PARAMETER Experiment Name: At_100uM_ABA_Mutants__P Parameter: Tissue Value: Whole Plant
  misc_feature: MA Experiment 20000574 PARAMETER Experiment Name: At_100uM_ABA_Mutants__P Parameter: Treatment Value: None
  misc_feature: MA Experiment ID: 20001247 Result: Up-regulated in Transcription
  misc_feature: MA Experiment 20001247 PARAMETER Experiment Name: At_Far-red-induction_P Parameter: Age (day) Value: 7
  misc_feature: MA Experiment 20001247 PARAMETER Experiment Name: At_Far-red-induction_P Parameter: Light Value: Far-red vs. White
  misc_feature: MA Experiment 20001247 PARAMETER Experiment Name: At_Far-red-induction_P Parameter: Organism Value: A. thaliana
  misc_feature: MA Experiment 20001247 PARAMETER Experiment Name: At_Far-red-induction_P Parameter: Plant Line Value: Columbia
  misc_feature: MA Experiment 20001247 PARAMETER Experiment Name: At_Far-red-induction_P Parameter: Timepoint (hr) Value: 1
  misc_feature: MA Experiment 20001247 PARAMETER Experiment Name: At_Far-red-induction_P Parameter: Tissue Value: Whole Plant
  misc_feature: MA Experiment ID: 20001248 Result: Down-regulated in Transcription
  misc_feature: MA Experiment 20001248 PARAMETER Experiment Name: At_Far-red-induction_P Parameter: Age (day) Value: 7
  misc_feature: MA Experiment 20001248 PARAMETER Experiment Name: At_Far-red-induction_P Parameter: Light Value: Far-red vs. White
  misc_feature: MA Experiment 20001248 PARAMETER Experiment Name: At_Far-red-induction_P Parameter: Organism Value: A. thaliana
  misc_feature: MA Experiment 20001248 PARAMETER Experiment Name: At_Far-red-induction_P Parameter: Plant Line Value: Columbia
  misc_feature: MA Experiment 20001248 PARAMETER Experiment Name: At_Far-red-induction_P Parameter: Timepoint (hr) Value: 4
  misc_feature: MA Experiment 20001248 PARAMETER Experiment Name: At_Far-red-induction_P Parameter: Tissue Value: Whole Plant
  misc_feature: MA Experiment ID: 20001451 Result: Up-regulated in Transcription
  misc_feature: MA Experiment 20001451 PARAMETER Experiment Name: At_Far-red-induction_P Parameter: Age (day) Value: 7
  misc_feature: MA Experiment 20001451 PARAMETER Experiment Name: At_Far-red-induction_P Parameter: Light Value: Far-red vs. White
  misc_feature: MA Experiment 20001451 PARAMETER Experiment Name: At_Far-red-induction_P Parameter: Organism Value: A. thaliana
  misc_feature: MA Experiment 20001451 PARAMETER Experiment Name: At_Far-red-induction_P Parameter: Plant Line Value: Columbia
  misc_feature: MA Experiment 20001451 PARAMETER Experiment Name: At_Far-red-induction_P Parameter: Timepoint (hr) Value: 24
  misc_feature: MA Experiment 20001451 PARAMETER Experiment Name: At_Far-red-induction_P Parameter: Tissue Value: Whole Plant
  misc_feature: MA Experiment ID: 20001503 Result: Up-regulated in Transcription
  misc_feature: MA Experiment 20001503 PARAMETER Experiment Name: At_Far-red-enriched_P Parameter: Age (day) Value: 7
  misc_feature: MA Experiment 20001503 PARAMETER Experiment Name: At_Far-red-enriched_P Parameter: Light Value: Far-red enriched vs. White
  misc_feature: MA Experiment 20001503 PARAMETER Experiment Name: At_Far-red-enriched_P Parameter: Organism Value: A. thaliana
  misc_feature: MA Experiment 20001503 PARAMETER Experiment Name: At_Far-red-enriched_P Parameter: Plant Line Value: Columbia
  misc_feature: MA Experiment 20001503 PARAMETER Experiment Name: At_Far-red-enriched_P Parameter: Timepoint (day) Value: 3
  misc_feature: MA Experiment 20001503 PARAMETER Experiment Name: At_Far-red-enriched_P Parameter: Tissue Value: Whole Plant
  misc_feature: MA Experiment ID: 20001554 Result: Down-regulated in Transcription
  misc_feature: MA Experiment 20001554 PARAMETER Experiment Name: At_Drought_Soil_Dry_P Parameter: Age (day) Value: 21
  misc_feature: MA Experiment 20001554 PARAMETER Experiment Name: At_Drought_Soil_Dry_P Parameter: Organism Value: A. thaliana
  misc_feature: MA Experiment 20001554 PARAMETER Experiment Name: At_Drought_Soil_Dry_P Parameter: Plant Line Value: WS
  misc_feature: MA Experiment 20001554 PARAMETER Experiment Name: At_Drought_Soil_Dry_P Parameter: Post Timepoint (hr) Value: None
  misc_feature: MA Experiment 20001554 PARAMETER Experiment Name: At_Drought_Soil_Dry_P Parameter: Post-Treatment Value: None
  misc_feature: MA Experiment 20001554 PARAMETER Experiment Name: At_Drought_Soil_Dry_P Parameter: Timepoint (day) Value: 7
  misc_feature: MA Experiment 20001554 PARAMETER Experiment Name: At_Drought_Soil_Dry_P Parameter: Treatment Value: Drought vs. No Drought
  misc_feature: MA Experiment ID: 20001555 Result: Down-regulated in Transcription
  misc_feature: MA Experiment 20001555 PARAMETER Experiment Name: At_Drought_Soil_Dry_P Parameter: Age (day) Value: 24
  misc_feature: MA Experiment 20001555 PARAMETER Experiment Name: At_Drought_Soil_Dry_P Parameter: Organism Value: A. thaliana
  misc_feature: MA Experiment 20001555 PARAMETER Experiment Name: At_Drought_Soil_Dry_P Parameter: Plant Line Value: WS
  misc_feature: MA Experiment 20001555 PARAMETER Experiment Name: At_Drought_Soil_Dry_P Parameter: Post Timepoint (hr) Value: None
  misc_feature: MA Experiment 20001555 PARAMETER Experiment Name: At_Drought_Soil_Dry_P Parameter: Post-Treatment Value: None
  misc_feature: MA Experiment 20001555 PARAMETER Experiment Name: At_Drought_Soil_Dry_P Parameter: Timepoint (day) Value: 10
  misc_feature: MA Experiment 20001555 PARAMETER Experiment Name: At_Drought_Soil_Dry_P Parameter: Treatment Value: Drought vs. No Drought
  misc_feature: MA Experiment ID: 20001556 Result: Down-regulated in Transcription
  misc_feature: MA Experiment 20001556 PARAMETER Experiment Name: At_Drought_Soil_Dry_P Parameter: Age (day) Value: 26
  misc_feature: MA Experiment 20001556 PARAMETER Experiment Name: At_Drought_Soil_Dry_P Parameter: Organism Value: A. thaliana
  misc_feature: MA Experiment 20001556 PARAMETER Experiment Name: At_Drought_Soil_Dry_P Parameter: Plant Line Value: WS
  misc_feature: MA Experiment 20001556 PARAMETER Experiment Name: At_Drought_Soil_Dry_P Parameter: Post Timepoint (hr) Value: None
  misc_feature: MA Experiment 20001556 PARAMETER Experiment Name: At_Drought_Soil_Dry_P Parameter: Post-Treatment Value: None
  misc_feature: MA Experiment 20001556 PARAMETER Experiment Name: At_Drought_Soil_Dry_P Parameter: Timepoint (day) Value: 12
  misc_feature: MA Experiment 20001556 PARAMETER Experiment Name: At_Drought_Soil_Dry_P Parameter: Treatment Value: Drought vs. No Drought
  misc_feature: MA Experiment ID: 20001557 Result: Down-regulated in Transcription
  misc_feature: MA Experiment 20001557 PARAMETER Experiment Name: At_Drought_Soil_Dry_P Parameter: Age (day) Value: 27
  misc_feature: MA Experiment 20001557 PARAMETER Experiment Name: At_Drought_Soil_Dry_P Parameter: Organism Value: A. thaliana
  misc_feature: MA Experiment 20001557 PARAMETER Experiment Name: At_Drought_Soil_Dry_P Parameter: Plant Line Value: WS
  misc_feature: MA Experiment 20001557 PARAMETER Experiment Name: At_Drought_Soil_Dry_P Parameter: Post Timepoint (hr) Value: 3
  misc_feature: MA Experiment 20001557 PARAMETER Experiment Name: At_Drought_Soil_Dry_P Parameter: Post-Treatment Value: Re-Water vs. No Drought
  misc_feature: MA Experiment 20001557 PARAMETER Experiment Name: At_Drought_Soil_Dry_P Parameter: Timepoint (day) Value: 13
  misc_feature: MA Experiment 20001557 PARAMETER Experiment Name: At_Drought_Soil_Dry_P Parameter: Treatment Value: Drought vs. No Drought
  misc_feature: MA Experiment ID: 20001559 Result: Down-regulated in Transcription
  misc_feature: MA Experiment 20001559 PARAMETER Experiment Name: At_Drought_Soil_Dry_P Parameter: Age (day) Value: 28
  misc_feature: MA Experiment 20001559 PARAMETER Experiment Name: At_Drought_Soil_Dry_P Parameter: Organism Value: A. thaliana
  misc_feature: MA Experiment 20001559 PARAMETER Experiment Name: At_Drought_Soil_Dry_P Parameter: Plant Line Value: WS
  misc_feature: MA Experiment 20001559 PARAMETER Experiment Name: At_Drought_Soil_Dry_P Parameter: Post Timepoint (hr) Value: 29
  misc_feature: MA Experiment 20001559 PARAMETER Experiment Name: At_Drought_Soil_Dry_P Parameter: Post-Treatment Value: Re-Water vs. No Drought
  misc_feature: MA Experiment 20001559 PARAMETER Experiment Name: At_Drought_Soil_Dry_P Parameter: Timepoint (day) Value: 14
  misc_feature: MA Experiment 20001559 PARAMETER Experiment Name: At_Drought_Soil_Dry_P Parameter: Treatment Value: Drought vs. No Drought
  misc_feature: MA Experiment ID: 20001560 Result: Down-regulated in Transcription
  misc_feature: MA Experiment 20001560 PARAMETER Experiment Name: At_Drought_Soil_Dry_P Parameter: Age (day) Value: 28
  misc_feature: MA Experiment 20001560 PARAMETER Experiment Name: At_Drought_Soil_Dry_P Parameter: Organism Value: A. thaliana
  misc_feature: MA Experiment 20001560 PARAMETER Experiment Name: At_Drought_Soil_Dry_P Parameter: Plant Line Value: WS
  misc_feature: MA Experiment 20001560 PARAMETER Experiment Name: At_Drought_Soil_Dry_P Parameter: Post Timepoint (hr) Value: None
  misc_feature: MA Experiment 20001560 PARAMETER Experiment Name: At_Drought_Soil_Dry_P Parameter: Post-Treatment Value: None
  misc_feature: MA Experiment 20001560 PARAMETER Experiment Name: At_Drought_Soil_Dry_P Parameter: Timepoint (day) Value: 14
  misc_feature: MA Experiment 20001560 PARAMETER Experiment Name: At_Drought_Soil_Dry_P Parameter: Treatment Value: Drought vs. No Drought
  misc_feature: MA Experiment ID: 20001904 Result: Down-regulated in Transcription
  misc_feature: MA Experiment 20001904 PARAMETER Experiment Name: At_Drought_Reproduction_P Parameter: Age (day) Value: 37
  misc_feature: MA Experiment 20001904 PARAMETER Experiment Name: At_Drought_Reproduction_P Parameter: Organism Value: A. thaliana
  misc_feature: MA Experiment 20001904 PARAMETER Experiment Name: At_Drought_Reproduction_P Parameter: Plant Line Value: WS
  misc_feature: MA Experiment 20001904 PARAMETER Experiment Name: At_Drought_Reproduction_P Parameter: Timepoint (day) Value: 7
  misc_feature: MA Experiment 20001904 PARAMETER Experiment Name: At_Drought_Reproduction_P Parameter: Tissue Value: Rosettes
  misc_feature: MA Experiment 20001904 PARAMETER Experiment Name: At_Drought_Reproduction_P Parameter: Treatment Value: Drought vs. No Drought
atcaagataagcttatagttatcactaagagttttgtctacgtacattttgtgatcaaacaagtaatcaatcaaaagatggaaggcaaaactgtgatctcaagtctgctcataatgagtcttgtcttagcacagattcaagtagaagcaaaaatctgctgtcctaccaaggatgatagatctgtgtattttgtatgcatgctttccgtgtcatcccaattttattgtctattaaagagtaaatgcaaaaatacatctcagacgatatgtcctccgggatatactaatgacattctcgaaaattctggtgatgctgtcaatgaatattgcaagctagggtgtgcatcctctgtgtgtggtgccttgaccactctccaaaactttgacacaagtaaagtattgagtgaagcggttgaacaatgcaccaaggcatgttcttctgtctgcaccggaggatctaccgccgcagttaaaagtgcctaaacaagtacatttaaaactgaaggatggtcgcaattcagagtggcgtgactgttttcatggaataattgtcgtctatcgatgtatgttataaaaaaaatgctagactatggtgctagtactgtttaataagttgtttccggtttgccaacgtgtcatgagggtttttgatcctagattgtattatatcccttctacttgtctttctctaaataaataataatgtgtccttctcgact

SEQ ID NO: 102986 - protein, 159 aa, Arabidopsis thaliana
  peptide (1)..(159): Ceres Seq. ID no. 13611672
  misc_feature (50)..(95): Pfam Name: Plant thionin Pfam Description: Plant thionin
  misc_feature (26)..(159): Homolog of NCBI NO: 15239447 NR Description: thionin (THI2.2) [Arabidopsis thaliana]
  misc_feature (26)..(159): Homolog of NCBI NO: 1181533 NR Description: thionin >gi|1586834|prf||2204399B thionin
  misc_feature (26)..(159): Homolog of NCBI NO: 21553588 NR Description: thionin Thi2.2 [Arabidopsis thaliana]
  misc_feature (26)..(159): Homolog of NCBI NO: 15218931 NR Description: thionin, putative [Arabidopsis thaliana]
  misc_feature (26)..(159): Homolog of NCBI NO: 6650328 NR Description: thionin [Brassica rapa subsp. pekinensis]
  misc_feature (26)..(159): Homolog of NCBI NO: 1076466 NR Description: thionin variant Thi2Ca2 - Abyssinian crambe crambin precursor=thionin variant Thi2Ca2 [Crambe abyssinica,
  misc_feature (26)..(159): Homolog of NCBI NO: 1076465 NR Description: thionin variant Thi2Ca12 - Abyssinian crambe crambin precursor=thionin variant Thi2Ca12 [Crambe abyssinica,
  misc_feature (26)..(159): Homolog of NCBI NO: 1076472 NR Description: thionin variant Thi2Ca9 - Abyssinian crambe crambin precursor=thionin variant Thi2Ca9 [Crambe abyssinica,
  misc_feature (26)..(159): Homolog of NCBI NO: 1076463 NR Description: thionin variant Thi2Ca10 - Abyssinian crambe crambin precursor=thionin variant Thi2Ca10 [Crambe abyssinica,
  misc_feature (26)..(159): Homolog of NCBI NO: 1076464 NR Description: thionin variant Thi2Ca11 - Abyssinian crambe
QDKLIVITKSFVYVHFVIKQVINQKMEGKTVISSLLIMSLVLAQIQVEAKICCPTKDDRSVYFVCMLSVSSQFYCLLKSKCKNTSQTICPPGYTNDILENSGDAVNEYCKLGCASSVCGALTTLQNFDTSKVLSEAVEQCTKACSSVCTGGSTAAVKSA

SEQ ID NO: 102987 - protein, 134 aa, Arabidopsis thaliana
  peptide (1)..(134): Ceres Seq. ID no. 13611673
  misc_feature (25)..(70): Pfam Name: Plant thionin Pfam Description: Plant thionin
  misc_feature (1)..(134): Homolog of NCBI NO: 15239447 NR Description: thionin (THI2.2) [Arabidopsis thaliana]
  misc_feature (1)..(134): Homolog of NCBI NO: 1181533 NR Description: thionin >gi|1586834|prf||2204399B thionin
  misc_feature (1)..(134): Homolog of NCBI NO: 21553588 NR Description: thionin Thi2.2 [Arabidopsis thaliana]
  misc_feature (1)..(134): Homolog of NCBI NO: 15218931 NR Description: thionin, putative [Arabidopsis thaliana]
  misc_feature (1)..(134): Homolog of NCBI NO: 6650328 NR Description: thionin [Brassica rapa subsp. pekinensis]
  misc_feature (1)..(134): Homolog of NCBI NO: 1076466 NR Description: thionin variant Thi2Ca2 - Abyssinian crambe crambin precursor=thionin variant Thi2Ca2 [Crambe abyssinica,
  misc_feature (1)..(134): Homolog of NCBI NO: 1076465 NR Description: thionin variant Thi2Ca12 - Abyssinian crambe crambin precursor=thionin variant Thi2Ca12 [Crambe abyssinica,
  misc_feature (1)..(134): Homolog of NCBI NO: 1076472 NR Description: thionin variant Thi2Ca9 - Abyssinian crambe crambin precursor=thionin variant Thi2Ca9 [Crambe abyssinica,
  misc_feature (1)..(134): Homolog of NCBI NO: 1076463 NR Description: thionin variant Thi2Ca10 - Abyssinian crambe crambin precursor=thionin variant Thi2Ca10 [Crambe abyssinica,
  misc_feature (1)..(134): Homolog of NCBI NO: 1076464 NR Description: thionin variant Thi2Ca11 - Abyssinian crambe
MEGKTVISSLLIMSLVLAQIQVEAKICCPTKDDRSVYFVCMLSVSSQFYCLLKSKCKNTSQTICPPGYTNDILENSGDAVNEYCKLGCASSVCGALTTLQNFDTSKVLSEAVEQCTKACSSVCTGGSTAAVKSA

SEQ ID NO: 102988 - protein, 122 aa, Arabidopsis thaliana
  peptide (1)..(122): Ceres Seq. ID no. 13611674
  misc_feature (13)..(58): Pfam Name: Plant thionin Pfam Description: Plant thionin
  misc_feature (1)..(122): Homolog of NCBI NO: 15239447 NR Description: thionin (THI2.2) [Arabidopsis thaliana]
  misc_feature (1)..(122): Homolog of NCBI NO: 1181533 NR Description: thionin >gi|1586834|prf||2204399B thionin
  misc_feature (1)..(122): Homolog of NCBI NO: 21553588 NR Description: thionin Thi2.2 [Arabidopsis thaliana]
  misc_feature (1)..(122): Homolog of NCBI NO: 15218931 NR Description: thionin, putative [Arabidopsis thaliana]
  misc_feature (1)..(122): Homolog of NCBI NO: 6650328 NR Description: thionin [Brassica rapa subsp. pekinensis]
  misc_feature (1)..(122): Homolog of NCBI NO: 1076466 NR Description: thionin variant Thi2Ca2 - Abyssinian crambe crambin precursor=thionin variant Thi2Ca2 [Crambe abyssinica,
  misc_feature (1)..(122): Homolog of NCBI NO: 1076465 NR Description: thionin variant Thi2Ca12 - Abyssinian crambe crambin precursor=thionin variant Thi2Ca12 [Crambe abyssinica,
  misc_feature (1)..(122): Homolog of NCBI NO: 1076472 NR Description: thionin variant Thi2Ca9 - Abyssinian crambe crambin precursor=thionin variant Thi2Ca9 [Crambe abyssinica,
  misc_feature (1)..(122): Homolog of NCBI NO: 1076463 NR Description: thionin variant Thi2Ca10 - Abyssinian crambe crambin precursor=thionin variant Thi2Ca10 [Crambe abyssinica,
  misc_feature (1)..(122): Homolog of NCBI NO: 1076464 NR Description: thionin variant Thi2Ca11 - Abyssinian crambe
MSLVLAQIQVEAKICCPTKDDRSVYFVCMLSVSSQFYCLLKSKCKNTSQTICPPGYTNDILENSGDAVNEYCKLGCASSVCGALTTLQNFDTSKVLSEAVEQCTKACSSVCTGGSTAAVKSA

SEQ ID NO: 102989 - DNA, 861 bp, Arabidopsis thaliana
  misc_feature (1)..(861): Ceres Seq. ID no. 13611694
  misc_feature: MA Experiment ID: 108434 Result: Up-regulated in Transcription
  misc_feature: MA Experiment 108434 PARAMETER Experiment Name: At_Root_Tips_cDNA_P Parameter: Tissue Value: Root Tips
  misc_feature: MA Experiment ID: 108461 Result: Up-regulated in Transcription
  misc_feature: MA Experiment 108461 PARAMETER Experiment Name: At_Germinating_Seeds_cDNA_P Parameter: Age (day) Value: 1 vs. 0
  misc_feature: MA Experiment 108461 PARAMETER Experiment Name: At_Germinating_Seeds_cDNA_P Parameter: Tissue Value: Germinating Seeds
  misc_feature: MA Experiment ID: 108501 Result: Up-regulated in Transcription
  misc_feature: MA Experiment 108501 PARAMETER Experiment Name: At_ap2_floral_buds_cDNA_P Parameter: Plant Line Value: ap2 (Ler.)
  misc_feature: MA Experiment 108501 PARAMETER Experiment Name: At_ap2_floral_buds_cDNA_P Parameter: Tissue Value: Closed Flower
  misc_feature: MA Experiment ID: 108595 Result: Up-regulated in Transcription
  misc_feature: MA Experiment 108595 PARAMETER Experiment Name: At_Ler-pi_Ovule_cDNA_P Parameter: Plant Line Value: null
  misc_feature: MA Experiment ID: 20000173 Result: Up-regulated in Transcription
  misc_feature: MA Experiment 20000173 PARAMETER Experiment Name: At_42deg_Heat_P Parameter: Age (day) Value: 14
  misc_feature: MA Experiment 20000173 PARAMETER Experiment Name: At_42deg_Heat_P Parameter: Organism Value: A. thaliana
  misc_feature: MA Experiment 20000173 PARAMETER Experiment Name: At_42deg_Heat_P Parameter: Plant Line Value: WS
  misc_feature: MA Experiment 20000173 PARAMETER Experiment Name: At_42deg_Heat_P Parameter: Temperature (deg C) Value: 42 vs. 22
  misc_feature: MA Experiment 20000173 PARAMETER Experiment Name: At_42deg_Heat_P Parameter: Timepoint (hr) Value: 6
  misc_feature: MA Experiment 20000173 PARAMETER Experiment Name: At_42deg_Heat_P Parameter: Tissue Value: Aerial
  misc_feature: MA Experiment ID: 20000179 Result: Up-regulated in Transcription
  misc_feature: MA Experiment 20000179 PARAMETER Experiment Name: At_Germinating_Seeds_P Parameter: Age (hr) Value: 6 vs. 0
  misc_feature: MA Experiment 20000179 PARAMETER Experiment Name: At_Germinating_Seeds_P Parameter: Tissue Value: Germinating Seeds
  misc_feature: MA Experiment ID: 20000180 Result: Up-regulated in Transcription
  misc_feature: MA Experiment 20000180 PARAMETER Experiment Name: At_Germinating_Seeds_P Parameter: Age (hr) Value: 24 vs. 0
  misc_feature: MA Experiment 20000180 PARAMETER Experiment Name: At_Germinating_Seeds_P Parameter: Tissue Value: Germinating Seeds
  misc_feature: MA Experiment ID: 20000184 Result: Down-regulated in Transcription
  misc_feature: MA Experiment 20000184 PARAMETER Experiment Name: At_Shoots__P Parameter: Age (day) Value: 7
  misc_feature: MA Experiment 20000184 PARAMETER Experiment Name: At_Shoots__P Parameter: Tissue Value: Shoots vs. Whole Plant
  misc_feature: MA Experiment ID: 20000185 Result: Down-regulated in Transcription
  misc_feature: MA Experiment 20000185 PARAMETER Experiment Name: At_Roots__P Parameter: Age (day) Value: 7 vs. 21
  misc_feature: MA Experiment 20000185 PARAMETER Experiment Name: At_Roots__P Parameter: Organism Value: A. thaliana
  misc_feature: MA Experiment 20000185 PARAMETER Experiment Name: At_Roots__P Parameter: Tissue Value: Roots vs. Whole Plant
  misc_feature: MA Experiment ID: 20000234 Result: Up-regulated in Transcription
  misc_feature: MA Experiment 20000234 PARAMETER Experiment Name: At_Siliques_P Parameter: Age (day) Value: 21
  misc_feature: MA Experiment 20000234 PARAMETER Experiment Name: At_Siliques_P Parameter: Organism Value: A. thaliana
  misc_feature: MA Experiment 20000234 PARAMETER Experiment Name: At_Siliques_P Parameter: Plant Line Value: WS
  misc_feature: MA Experiment 20000234 PARAMETER Experiment Name: At_Siliques_P Parameter: Tissue Value: Less Than 5mm Siliques vs. Whole Plant
  misc_feature: MA Experiment ID: 20000235 Result: Up-regulated in Transcription
  misc_feature: MA Experiment 20000235 PARAMETER Experiment Name: At_Siliques_P Parameter: Age (day) Value: 21
  misc_feature: MA Experiment 20000235 PARAMETER Experiment Name: At_Siliques_P Parameter: Organism Value: A. thaliana
  misc_feature: MA Experiment 20000235 PARAMETER Experiment Name: At_Siliques_P Parameter: Plant Line Value: WS
  misc_feature: MA Experiment 20000235 PARAMETER Experiment Name: At_Siliques_P Parameter: Tissue Value: 5-10mm Siliques vs. Whole Plant
  misc_feature: MA Experiment ID: 20000264 Result: Up-regulated in Transcription
  misc_feature: MA Experiment 20000264 PARAMETER Experiment Name: At_Open_Flower_P Parameter: Age (day) Value: 21
  misc_feature: MA Experiment 20000264 PARAMETER Experiment Name: At_Open_Flower_P Parameter: Plant Line Value: WS
  misc_feature: MA Experiment 20000264 PARAMETER Experiment Name: At_Open_Flower_P Parameter: Tissue Value: Open Flower vs. Whole Plant
  misc_feature: MA Experiment ID: 20000265 Result: Up-regulated in Transcription
  misc_feature: MA Experiment 20000265 PARAMETER Experiment Name: At_Open_Flower_P Parameter: Age (day) Value: 21
  misc_feature: MA Experiment 20000265 PARAMETER Experiment Name: At_Open_Flower_P Parameter: Plant Line Value: WS
  misc_feature: MA Experiment 20000265 PARAMETER Experiment Name: At_Open_Flower_P Parameter: Tissue Value: Closed Flower vs. Whole Plant
  misc_feature: MA Experiment ID: 20000286 Result: Up-regulated in Transcription
  misc_feature: MA Experiment 20000286 PARAMETER Experiment Name: At_Open_Flower_P Parameter: Age (day) Value: 21
  misc_feature: MA Experiment 20000286 PARAMETER Experiment Name: At_Open_Flower_P Parameter: Plant Line Value: WS
  misc_feature: MA Experiment 20000286 PARAMETER Experiment Name: At_Open_Flower_P Parameter: Tissue Value: Half Open vs. Whole Plant
  misc_feature: MA Experiment ID: 20000438 Result: Down-regulated in Transcription
  misc_feature: MA Experiment 20000438 PARAMETER Experiment Name: At_Shoots__P Parameter: Age (day) Value: 14
  misc_feature: MA Experiment 20000438 PARAMETER Experiment Name: At_Shoots__P Parameter: Tissue Value: Shoots vs. Whole Plant
  misc_feature: MA Experiment ID: 20000439 Result: Down-regulated in Transcription
  misc_feature: MA Experiment 20000439 PARAMETER Experiment Name: At_Roots__P Parameter: Age (day) Value: 14 vs. 21
  misc_feature: MA Experiment 20000439 PARAMETER Experiment Name: At_Roots__P Parameter: Organism Value: A. thaliana
  misc_feature: MA Experiment 20000439 PARAMETER Experiment Name: At_Roots__P Parameter: Tissue Value: Roots vs. Whole Plant
  misc_feature: MA Experiment ID: 20000495 Result: Up-regulated in Transcription
  misc_feature: MA Experiment 20000495 PARAMETER Experiment Name: At_Guard_Cells_P Parameter: Harvest Date Value: 8/2/2002
  misc_feature: MA Experiment 20000495 PARAMETER Experiment Name: At_Guard_Cells_P Parameter: Organism Value: A. thaliana
  misc_feature: MA Experiment 20000495 PARAMETER Experiment Name: At_Guard_Cells_P Parameter: Tissue Value: Guard Cells vs. Leaves
  misc_feature: MA Experiment ID: 20000794 Result: Down-regulated in Transcription
  misc_feature: MA Experiment 20000794 PARAMETER Experiment Name: At_Petals_P Parameter: Age (day) Value: 23-25 days
  misc_feature: MA Experiment 20000794 PARAMETER Experiment Name: At_Petals_P Parameter: Plant Line Value: WS
  misc_feature: MA Experiment 20000794 PARAMETER Experiment Name: At_Petals_P Parameter: Tissue Value: Petals vs. Whole plant
  misc_feature: MA Experiment ID: 20001248 Result: Down-regulated in Transcription
  misc_feature: MA Experiment 20001248 PARAMETER Experiment Name: At_Far-red-induction_P Parameter: Age (day) Value: 7
  misc_feature: MA Experiment 20001248 PARAMETER Experiment Name: At_Far-red-induction_P Parameter: Light Value: Far-red vs. White
  misc_feature: MA Experiment 20001248 PARAMETER Experiment Name: At_Far-red-induction_P Parameter: Organism Value: A. thaliana
  misc_feature: MA Experiment 20001248 PARAMETER Experiment Name: At_Far-red-induction_P Parameter: Plant Line Value: Columbia
  misc_feature: MA Experiment 20001248 PARAMETER Experiment Name: At_Far-red-induction_P Parameter: Timepoint (hr) Value: 4
  misc_feature: MA Experiment 20001248 PARAMETER Experiment Name: At_Far-red-induction_P Parameter: Tissue Value: Whole Plant
  misc_feature: MA Experiment ID: 20001450 Result: Down-regulated in Transcription
  misc_feature: MA Experiment 20001450 PARAMETER Experiment Name: At_Far-red-induction_P Parameter: Age (day) Value: 7
  misc_feature: MA Experiment 20001450 PARAMETER Experiment Name: At_Far-red-induction_P Parameter: Light Value: Far-red vs. White
  misc_feature: MA Experiment 20001450 PARAMETER Experiment Name: At_Far-red-induction_P Parameter: Organism Value: A. thaliana
  misc_feature: MA Experiment 20001450 PARAMETER Experiment Name: At_Far-red-induction_P Parameter: Plant Line Value: Columbia
  misc_feature: MA Experiment 20001450 PARAMETER Experiment Name: At_Far-red-induction_P Parameter: Timepoint (hr) Value: 8
  misc_feature: MA Experiment 20001450 PARAMETER Experiment Name: At_Far-red-induction_P Parameter: Tissue Value: Whole Plant
  misc_feature: MA Experiment ID: 20001451 Result: Down-regulated in Transcription
  misc_feature: MA Experiment 20001451 PARAMETER Experiment Name: At_Far-red-induction_P Parameter: Age (day) Value: 7
  misc_feature: MA Experiment 20001451 PARAMETER Experiment Name: At_Far-red-induction_P Parameter: Light Value: Far-red vs. White
  misc_feature: MA Experiment 20001451 PARAMETER Experiment Name: At_Far-red-induction_P Parameter: Organism Value: A. thaliana
  misc_feature: MA Experiment 20001451 PARAMETER Experiment Name: At_Far-red-induction_P Parameter: Plant Line Value: Columbia
  misc_feature: MA Experiment 20001451 PARAMETER Experiment Name: At_Far-red-induction_P Parameter: Timepoint (hr) Value: 24
  misc_feature: MA Experiment 20001451 PARAMETER Experiment Name: At_Far-red-induction_P Parameter: Tissue Value: Whole Plant
  misc_feature: MA Experiment ID: 20001554 Result: Up-regulated in Transcription
  misc_feature: MA Experiment 20001554 PARAMETER Experiment Name: At_Drought_Soil_Dry_P Parameter: Age (day) Value: 21
  misc_feature: MA Experiment 20001554 PARAMETER Experiment Name: At_Drought_Soil_Dry_P Parameter: Organism Value: A. thaliana
  misc_feature: MA Experiment 20001554 PARAMETER Experiment Name: At_Drought_Soil_Dry_P Parameter: Plant Line Value: WS
  misc_feature: MA Experiment 20001554 PARAMETER Experiment Name: At_Drought_Soil_Dry_P Parameter: Post Timepoint (hr) Value: None
  misc_feature: MA Experiment 20001554 PARAMETER Experiment Name: At_Drought_Soil_Dry_P Parameter: Post-Treatment Value: None
  misc_feature: MA Experiment 20001554 PARAMETER Experiment Name: At_Drought_Soil_Dry_P Parameter: Timepoint (day) Value: 7
  misc_feature: MA Experiment 20001554 PARAMETER Experiment Name: At_Drought_Soil_Dry_P Parameter: Treatment Value: Drought vs. No Drought
  misc_feature: MA Experiment ID: 20001555 Result: Up-regulated in Transcription
  misc_feature: MA Experiment 20001555 PARAMETER Experiment Name: At_Drought_Soil_Dry_P Parameter: Age (day) Value: 24
  misc_feature: MA Experiment 20001555 PARAMETER Experiment Name: At_Drought_Soil_Dry_P Parameter: Organism Value: A. thaliana
  misc_feature: MA Experiment 20001555 PARAMETER Experiment Name: At_Drought_Soil_Dry_P Parameter: Plant Line Value: WS
  misc_feature: MA Experiment 20001555 PARAMETER Experiment Name: At_Drought_Soil_Dry_P Parameter: Post Timepoint (hr) Value: None
  misc_feature: MA Experiment 20001555 PARAMETER Experiment Name: At_Drought_Soil_Dry_P Parameter: Post-Treatment Value: None
  misc_feature: MA Experiment 20001555 PARAMETER Experiment Name: At_Drought_Soil_Dry_P Parameter: Timepoint (day) Value: 10
  misc_feature: MA Experiment 20001555 PARAMETER Experiment Name: At_Drought_Soil_Dry_P Parameter: Treatment Value: Drought vs. No Drought
  misc_feature: MA Experiment ID: 20001556 Result: Up-regulated in Transcription
  misc_feature: MA Experiment 20001556 PARAMETER Experiment Name: At_Drought_Soil_Dry_P Parameter: Age (day) Value: 26
  misc_feature: MA Experiment 20001556 PARAMETER Experiment Name: At_Drought_Soil_Dry_P Parameter: Organism Value: A. thaliana
  misc_feature: MA Experiment 20001556 PARAMETER Experiment Name: At_Drought_Soil_Dry_P Parameter: Plant Line Value: WS
  misc_feature: MA Experiment 20001556 PARAMETER Experiment Name: At_Drought_Soil_Dry_P Parameter: Post Timepoint (hr) Value: None
  misc_feature: MA Experiment 20001556 PARAMETER Experiment Name: At_Drought_Soil_Dry_P Parameter: Post-Treatment Value: None
  misc_feature: MA Experiment 20001556 PARAMETER Experiment Name: At_Drought_Soil_Dry_P Parameter: Timepoint (day) Value: 12
  misc_feature: MA Experiment 20001556 PARAMETER Experiment Name: At_Drought_Soil_Dry_P Parameter: Treatment Value: Drought vs. No Drought
  misc_feature: MA Experiment ID: 20001911 Result: Up-regulated in Transcription
  misc_feature: MA Experiment 20001911 PARAMETER Experiment Name: At_Drought_Reproduction_P Parameter: Age (day) Value: 40
  misc_feature: MA Experiment 20001911 PARAMETER Experiment Name: At_Drought_Reproduction_P Parameter: Organism Value: A. thaliana
  misc_feature: MA Experiment 20001911 PARAMETER Experiment Name: At_Drought_Reproduction_P Parameter: Plant Line Value: WS
  misc_feature: MA Experiment 20001911 PARAMETER Experiment Name: At_Drought_Reproduction_P Parameter: Timepoint (day) Value: 10
  misc_feature: MA Experiment 20001911 PARAMETER Experiment Name: At_Drought_Reproduction_P Parameter: Tissue Value: Flowers
  misc_feature: MA Experiment 20001911 PARAMETER Experiment Name: At_Drought_Reproduction_P Parameter: Treatment Value: Drought vs. No Drought
aatttttacacacagagtagagcagagagagagagagagagagagatgggtgattctgacgtcggtgatcgtcttccccctccatcttcttccgacgaactctcgagctttctccgacagattctttcccgtactcctacagctcaaccttcttcaccaccgaagagtactaatgtttcctccgctgagaccttcttcccttccgtttccggcggagctgtttcttccgtcggttatggagtctctgaaactggccaagacaaatatgctttcgaacacaagagaagtggagctaaacagagaaattcgttgaagagaaacattgatgctcaattccacaacttgtctgaaaagaagaggaggagcaagatcaacgagaaaatgaaagctttgcagaaactcattcccaattccaacaagactgataaagcctcaatgcttgatgaagctatagaatatctgaagcagcttcaacttcaagtccagactttagccgttatgaatggtttaggcttaaaccctatgcgattaccacaggttccacctccaactcatacaaggatcaatgagaccttagagcaagacctgaacctagagactcttctcgctgctcctcactcgctggaaccagctaaaacaagtcaaggaatgtgcttttccacagccactctgctttgaagataacattcagacaatgatgatgatcggaattcctctagtacctgccagacaggagtgaacaatgttttgagttttagcattggccagatttctatgttcagttatagttatgctaataagctttaggagtgaacaaaatctgagtagtttgattataatgatgtctgaagcagattatat

SEQ ID NO: 102990 - protein, 225 aa, Arabidopsis thaliana
  peptide (1)..(225): Ceres Seq. ID no. 13611695
  misc_feature (109)..(158): Pfam Name: Helix-loop-helix DNA-binding domain Pfam Description: Helix-loop-helix DNA-binding domain
  misc_feature (16)..(225): Homolog of NCBI NO: 15240202 NR Description: bHLH protein family [Arabidopsis thaliana] emb|CAB16798.1~gene_id:K21H1.7~similar to unknown protein
  misc_feature (16)..(225): Homolog of NCBI NO: 21536863 NR Description: unknown [Arabidopsis thaliana]
  misc_feature (70)..(178): Homolog of NCBI NO: 18419937 NR Description: bHLH protein SPATULA (SPT) [Arabidopsis thaliana]
  misc_feature (70)..(178): Homolog of NCBI NO: 25407777 NR Description: hypothetical protein AT4g36930 [imported] - thaliana >gi|4006880|emb|CAB16798.1| putative protein thaliana] >gi|7270642|emb|CAB80359.1| putative protein
  misc_feature (105)..(216): Homolog of NCBI NO: 15451582 NR Description: Putative SPATULA [Oryza sativa]
  misc_feature (92)..(179): Homolog of NCBI NO: 20127012 NR Description: putative bHLH transcription factor [Arabidopsis
  misc_feature (92)..(179): Homolog of NCBI NO: 30678541 NR Description: bHLH protein family [Arabidopsis thaliana]
  misc_feature (84)..(208): Homolog of NCBI NO: 30680903 NR Description: (bHLH015) putative bHLH transcription factor
  misc_feature (84)..(208): Homolog of NCBI NO: 30680909 NR Description: (bHLH015) putative bHLH transcription factor thaliana] >gi|26051284|gb|AAN78308.1| putative bHLH transcription
  misc_feature (84)..(208): Homolog of NCBI NO: 25411969 NR Description: hypothetical protein At2g20180 [imported] - thaliana >gi|4580456|gb|AAD24380.1| unknown protein [Arabidopsis
NFYTQSRAEREREREMGDSDVGDRLPPPSSSDELSSFLRQILSRTPTAQPSSPPKSTNVSSAETFFPSVSGGAVSSVGYGVSETGQDKYAFEHKRSGAKQRNSLKRNIDAQFHNLSEKKRRSKINEKMKALQKLIPNSNKTDKASMLDEAIEYLKQLQLQVQTLAVMNGLGLNPMRLPQVPPPTHTRINETLEQDLNLETLLAAPHSLEPAKTSQGMCFSTATLL

SEQ ID NO: 102991 - protein, 210 aa, Arabidopsis thaliana
  peptide (1)..(210): Ceres Seq. ID no. 13611696
  misc_feature (94)..(143): Pfam Name: Helix-loop-helix DNA-binding domain Pfam Description: Helix-loop-helix DNA-binding domain
  misc_feature (1)..(210): Homolog of NCBI NO: 15240202 NR Description: bHLH protein family [Arabidopsis thaliana] emb|CAB16798.1~gene_id:K21H1.7~similar to unknown protein
  misc_feature (1)..(210): Homolog of NCBI NO: 21536863 NR Description: unknown [Arabidopsis thaliana]
  misc_feature (55)..(163): Homolog of NCBI NO: 18419937 NR Description: bHLH protein SPATULA (SPT) [Arabidopsis thaliana]
  misc_feature (55)..(163): Homolog of NCBI NO: 25407777 NR Description: hypothetical protein AT4g36930 [imported] - thaliana >gi|4006880|emb|CAB16798.1| putative protein thaliana] >gi|7270642|emb|CAB80359.1| putative protein
  misc_feature (90)..(201): Homolog of NCBI NO: 15451582 NR Description: Putative SPATULA [Oryza sativa]
  misc_feature (77)..(164): Homolog of NCBI NO: 20127012 NR Description: putative bHLH transcription factor [Arabidopsis
  misc_feature (77)..(164): Homolog of NCBI NO: 30678541 NR Description: bHLH protein family [Arabidopsis thaliana]
  misc_feature (69)..(193): Homolog of NCBI NO: 30680903 NR Description: (bHLH015) putative bHLH transcription factor
  misc_feature (69)..(193): Homolog of NCBI NO: 30680909 NR Description: (bHLH015) putative bHLH transcription factor thaliana] >gi|26051284|gb|AAN78308.1| putative bHLH transcription
  misc_feature (69)..(193): Homolog of NCBI NO: 25411969 NR Description: hypothetical protein At2g20180 [imported] - thaliana >gi|4580456|gb|AAD24380.1| unknown protein [Arabidopsis
MGDSDVGDRLPPPSSSDELSSFLRQILSRTPTAQPSSPPKSTNVSSAETFFPSVSGGAVSSVGYGVSETGQDKYAFEHKRSGAKQRNSLKRNIDAQFHNLSEKKRRSKINEKMKALQKLIPNSNKTDKASMLDEAIEYLKQLQLQVQTLAVMNGLGLNPMRLPQVPPPTHTRINETLEQDLNLETLLAAPHSLEPAKTSQGMCFSTATLL

SEQ ID NO: 102992 - DNA, 1400 bp, Arabidopsis thaliana
  misc_feature (1)..(1400): Ceres Seq. ID no. 13611732
  misc_feature: MA Experiment ID: 108434 Result: Up-regulated in Transcription
  misc_feature: MA Experiment 108434 PARAMETER Experiment Name: At_Root_Tips_cDNA_P Parameter: Tissue Value: Root Tips
  misc_feature: MA Experiment ID: 108569 Result: Up-regulated in Transcription
  misc_feature: MA Experiment 108569 PARAMETER Experiment Name: At_0.001%_MeJA__cDNA_P Parameter: Timepoint (hr) Value: 6
  misc_feature: MA Experiment 108569 PARAMETER Experiment Name: At_0.001%_MeJA__cDNA_P Parameter: Tissue Value: Aerial
  misc_feature: MA Experiment 108569 PARAMETER Experiment Name: At_0.001%_MeJA__cDNA_P Parameter: Treatment Value: 0.001% MeJA vs. No Treatment
  misc_feature: MA Experiment ID: 108573 Result: Up-regulated in Transcription
  misc_feature: MA Experiment 108573 PARAMETER Experiment Name: At_Drought_cDNA_P Parameter: Timepoint (hr) Value: 6
  misc_feature: MA Experiment 108573 PARAMETER Experiment Name: At_Drought_cDNA_P Parameter: Tissue Value: Aerial
  misc_feature: MA Experiment 108573 PARAMETER Experiment Name: At_Drought_cDNA_P Parameter: Treatment Value: Drought vs. No Drought
  misc_feature: MA Experiment ID: 108595 Result: Down-regulated in Transcription
  misc_feature: MA Experiment 108595 PARAMETER Experiment Name: At_Ler-pi_Ovule_cDNA_P Parameter: Plant Line Value: null
tttgttttgatttcctctctcactctgcacacgaaggcgagagagagagagaaagaaaaaagcgaagaatacgcagaatccatccaatttagggttagggctgcccctaatctggaaacctttgcctcgtttctgatctgttttccggatccgacttgaaggaaagaagacgacgacgcactaccaaaaacatgggcgcgaattcgcttccaacggatgcaaccctcgatctagatgagcagatctcgcagctcatgcagtgcaagcctctctccgagcaacaggtcagagcattatgtgagaaagctaaggagatcttaatggatgaaagcaacgttcagcctgttaaaagccctgtgacaatctgcggtgatattcatggacagttccatgatcttgcagagcttttccgtattgggggaaagtgtcctgataccaactatctgtttatgggagactatgtcgaccgtggatattattctgtggaaactgttacgctgttggttggcttgaaagtacggtatccacagcgaatcactattcttagaggaaaccatgaaagtcgtcagattactcaggtttatggattttatgatgaatgtctgcgaaagtatggcaatgcaaatgtttggaagatatttacagacctctttgactatttcccactgacagccttggtggagtcggaaatattctgccttcacggtggattatcaccatccatcgagacccttgacaacattaggaactttgatcgggttcaagaagttccacatgaagggcctatgtgtgacttattatggtctgatcctgatgacagatgtggctggggaatctctcctcgtggtgctggatatacatttggtcaggatatttcggaacaattcaatcacactaacaacttaaagctgatcgcccgagcgcatcagctcgttatggatggattcaattgggcacacgagcaaaaagtggttactatattcagtgcaccaaactattgctatcgctgtggaaacatggcctcaattcttgaggtcgatgactgcaggaaccacacgttcattcagtttgaaccagcaccgaggagaggagagccagatgtaacccgaaggacacctgactatttcctttgaagatactcagctcctcctgcagcttccggttgttggtttttgaagatctctgcttattccatttggttcaacgcatttgtgttccaggttgcttctctttaaaatcaatttagccctctcccttggaatagtgtaatataggcaaagaggtcaatgaactttaaaacctctcatgaacatgtgtttggctgaacttattagctcccttctgcatcagaatctgtttattgtgagatattttttcgatttatttcacgtaatttttcc

SEQ ID NO: 102993 - protein, 313 aa, Arabidopsis thaliana; identical to SEQ ID NO: 23777
  peptide (1)..(313): Ceres Seq. ID no. 13611733
  misc_feature (54)..(249): Pfam Name: Calcineurin-like phosphoesterase Pfam Description: Calcineurin-like phosphoesterase
  misc_feature (1)..(313): Homolog of NCBI NO: 18410971 NR Description: protein phosphatase PP2A catalytic subunit thaliana] >gi|1352664|sp|P48578|P2A4_ARATH Serine/threonine
  misc_feature (1)..(313): Homolog of NCBI NO: 18405985 NR Description: protein phosphatase 2A (PP2A) [Arabidopsis
  misc_feature (6)..(313): Homolog of NCBI NO: 418777 NR Description: phosphoprotein phosphatase (EC 3.1.3.16) 2A-alpha
  misc_feature (1)..(313): Homolog of NCBI NO: 548441 NR Description: SERINE/THREONINE PROTEIN PHOSPHATASE PP2A
  misc_feature (1)..(313): Homolog of NCBI NO: 7248363 NR Description: type 2A protein phosphatase-3 [Vicia faba]
  misc_feature (5)..(313): Homolog of NCBI NO: 1352668 NR Description: SERINE/THREONINE PROTEIN PHOSPHATASE PP2A
  misc_feature (5)..(313): Homolog of NCBI NO: 81694 NR Description: phosphoprotein phosphatase (EC 3.1.3.16) 2A
  misc_feature (27)..(313): Homolog of NCBI NO: 21593204 NR Description: phosphoprotein phosphatase 2A isoform 4
  misc_feature (1)..(292): Homolog of NCBI NO: 11262975 NR Description: phosphoprotein phosphatase (EC 3.1.3.16) 2A-4
  misc_feature (14)..(313): Homolog of NCBI NO: 11134218 NR Description: Serine/threonine protein phosphatase PP2A-2

SEQ ID NO: 102994 - protein, 292 aa, Arabidopsis thaliana; identical to SEQ ID NO: 23778
  peptide (1)..(292): Ceres Seq. ID no. 13611734
  misc_feature (33)..(228): Pfam Name: Calcineurin-like phosphoesterase Pfam Description: Calcineurin-like phosphoesterase
  misc_feature (1)..(292): Homolog of NCBI NO: 18410971 NR Description: protein phosphatase PP2A catalytic subunit thaliana] >gi|1352664|sp|P48578|P2A4_ARATH Serine/threonine
  misc_feature (1)..(292): Homolog of NCBI NO: 18405985 NR Description: protein phosphatase 2A (PP2A) [Arabidopsis
  misc_feature (1)..(292): Homolog of NCBI NO: 418777 NR Description: phosphoprotein phosphatase (EC 3.1.3.16) 2A-alpha
  misc_feature (1)..(292): Homolog of NCBI NO: 548441 NR Description: SERINE/THREONINE PROTEIN PHOSPHATASE PP2A
  misc_feature (1)..(292): Homolog of NCBI NO: 7248363 NR Description: type 2A protein phosphatase-3 [Vicia faba]
  misc_feature (1)..(292): Homolog of NCBI NO: 1352668 NR Description: SERINE/THREONINE PROTEIN PHOSPHATASE PP2A
  misc_feature (1)..(292): Homolog of NCBI NO: 81694 NR Description: phosphoprotein phosphatase (EC 3.1.3.16) 2A
  misc_feature (6)..(292): Homolog of NCBI NO: 21593204 NR Description: phosphoprotein phosphatase 2A isoform 4
  misc_feature (1)..(271): Homolog of NCBI NO: 11262975 NR Description: phosphoprotein phosphatase (EC 3.1.3.16) 2A-4
  misc_feature (1)..(292): Homolog of NCBI NO: 11134218 NR Description: Serine/threonine protein phosphatase PP2A-2

SEQ ID NO: 102995 - protein, 270 aa, Arabidopsis thaliana; identical to SEQ ID NO: 23779
  peptide (1)..(270): Ceres Seq. ID no. 13611735
  misc_feature (11)..(206): Pfam Name: Calcineurin-like phosphoesterase Pfam Description: Calcineurin-like phosphoesterase
  misc_feature (1)..(270): Homolog of NCBI NO: 18410971 NR Description: protein phosphatase PP2A catalytic subunit thaliana] >gi|1352664|sp|P48578|P2A4_ARATH Serine/threonine
  misc_feature (1)..(270): Homolog of NCBI NO: 18405985 NR Description: protein phosphatase 2A (PP2A) [Arabidopsis
  misc_feature (1)..(270): Homolog of NCBI NO: 418777 NR Description: phosphoprotein phosphatase (EC 3.1.3.16) 2A-alpha
  misc_feature (1)..(270): Homolog of NCBI NO: 548441 NR Description: SERINE/THREONINE PROTEIN PHOSPHATASE PP2A
  misc_feature (1)..(270): Homolog of NCBI NO: 7248363 NR Description: type 2A protein phosphatase-3 [Vicia faba]
  misc_feature (1)..(270): Homolog of NCBI NO: 1352668 NR Description: SERINE/THREONINE PROTEIN PHOSPHATASE PP2A
  misc_feature (1)..(270): Homolog of NCBI NO: 81694 NR Description: phosphoprotein phosphatase (EC 3.1.3.16) 2A
  misc_feature (1)..(270): Homolog of NCBI NO: 21593204 NR Description: phosphoprotein phosphatase 2A isoform 4
  misc_feature (1)..(249): Homolog of NCBI NO: 11262975 NR Description: phosphoprotein phosphatase (EC 3.1.3.16) 2A-4
  misc_feature (1)..(270): Homolog of NCBI NO: 11134218 NR Description: Serine/threonine protein phosphatase PP2A-2

SEQ ID NO: 102996 - DNA, 649 bp, Arabidopsis thaliana
  misc_feature (1)..(649): Ceres Seq. ID no. 13611740
  misc_feature: MA Experiment ID: 108434 Result: Down-regulated in Transcription
  misc_feature: MA Experiment 108434 PARAMETER Experiment Name: At_Root_Tips_cDNA_P Parameter: Tissue Value: Root Tips
  misc_feature: MA Experiment ID: 108463 Result: Up-regulated in Transcription
  misc_feature: MA Experiment 108463 PARAMETER Experiment Name: At_Germinating_Seeds_cDNA_P Parameter: Age (day) Value: 3 vs. 0
  misc_feature: MA Experiment 108463 PARAMETER Experiment Name: At_Germinating_Seeds_cDNA_P Parameter: Tissue Value: Germinating Seeds
  misc_feature: MA Experiment ID: 108576 Result: Up-regulated in Transcription
  misc_feature: MA Experiment 108576 PARAMETER Experiment Name: At_42deg_Heat_cDNA_P Parameter: Temperature (deg C) Value: 42 vs. 22
  misc_feature: MA Experiment 108576 PARAMETER Experiment Name: At_42deg_Heat_cDNA_P Parameter: Timepoint (hr) Value: 1
  misc_feature: MA Experiment 108576 PARAMETER Experiment Name: At_42deg_Heat_cDNA_P Parameter: Tissue Value: Aerial
  misc_feature: MA Experiment ID: 20000184 Result: Up-regulated in Transcription
  misc_feature: MA Experiment 20000184 PARAMETER Experiment Name: At_Shoots__P Parameter: Age (day) Value: 7
  misc_feature: MA Experiment 20000184 PARAMETER Experiment Name: At_Shoots__P Parameter: Tissue Value: Shoots vs. Whole Plant
  misc_feature: MA Experiment ID: 20000185 Result: Up-regulated in Transcription
  misc_feature: MA Experiment 20000185 PARAMETER Experiment Name: At_Roots__P Parameter: Age (day) Value: 7 vs. 21
  misc_feature: MA Experiment 20000185 PARAMETER Experiment Name: At_Roots__P Parameter: Organism Value: A. thaliana
  misc_feature: MA Experiment 20000185 PARAMETER Experiment Name: At_Roots__P Parameter: Tissue Value: Roots vs. Whole Plant
  misc_feature: MA Experiment ID: 20000227 Result: Down-regulated in Transcription
  misc_feature: MA Experiment 20000227 PARAMETER Experiment Name: At_Root-Tips-vs-Tops_P Parameter: Tissue Value: Root Tips vs. Root Tops
  misc_feature: MA Experiment ID: 20000438 Result: Up-regulated in Transcription
  misc_feature: MA Experiment 20000438 PARAMETER Experiment Name: At_Shoots__P Parameter: Age (day) Value: 14
  misc_feature: MA Experiment 20000438 PARAMETER Experiment Name: At_Shoots__P Parameter: Tissue Value: Shoots vs. Whole Plant
  misc_feature: MA Experiment ID: 20000439 Result: Up-regulated in Transcription
  misc_feature: MA Experiment 20000439 PARAMETER Experiment Name: At_Roots__P Parameter: Age (day) Value: 14 vs. 21
  misc_feature: MA Experiment 20000439 PARAMETER Experiment Name: At_Roots__P Parameter: Organism Value: A. thaliana
  misc_feature: MA Experiment 20000439 PARAMETER Experiment Name: At_Roots__P Parameter: Tissue Value: Roots vs. Whole Plant
  misc_feature: MA Experiment ID: 20000460 Result: Down-regulated in Transcription
  misc_feature: MA Experiment 20000460 PARAMETER Experiment Name: At_10percent_PEG_P Parameter: Age (day) Value: 12
  misc_feature: MA Experiment 20000460 PARAMETER Experiment Name: At_10percent_PEG_P Parameter: Organism Value: A. thaliana
  misc_feature: MA Experiment 20000460 PARAMETER Experiment Name: At_10percent_PEG_P Parameter: Plant Line Value: WS
  misc_feature: MA Experiment 20000460 PARAMETER Experiment Name: At_10percent_PEG_P Parameter: Timepoint (day) Value: 12
  misc_feature: MA Experiment 20000460 PARAMETER Experiment Name: At_10percent_PEG_P Parameter: Tissue Value: Whole Plant
  misc_feature: MA Experiment 20000460 PARAMETER Experiment Name: At_10percent_PEG_P Parameter: Treatment Value: 10percent PEG vs. No Treatment
  misc_feature: MA Experiment ID: 20000527 Result: Down-regulated in Transcription
  misc_feature: MA Experiment 20000527 PARAMETER Experiment Name: At_10percent_PEG_P Parameter: Age (day) Value: 20
  misc_feature: MA Experiment 20000527 PARAMETER Experiment Name: At_10percent_PEG_P Parameter: Organism Value: A. thaliana
  misc_feature: MA Experiment 20000527 PARAMETER Experiment Name: At_10percent_PEG_P Parameter: Plant Line Value: WS
  misc_feature: MA Experiment 20000527 PARAMETER Experiment Name: At_10percent_PEG_P Parameter: Timepoint (day) Value: 20
  misc_feature: MA Experiment 20000527 PARAMETER Experiment Name: At_10percent_PEG_P Parameter: Tissue Value: Whole Plant
  misc_feature: MA Experiment 20000527 PARAMETER Experiment Name: At_10percent_PEG_P Parameter: Treatment Value: 10percent PEG vs. No Treatment
  misc_feature: MA Experiment ID: 20000573 Result: Down-regulated in Transcription
  misc_feature: MA Experiment 20000573 PARAMETER Experiment Name: At_100uM_ABA_Mutants__P Parameter: Organism Value: A. thaliana
  misc_feature: MA Experiment 20000573 PARAMETER Experiment Name: At_100uM_ABA_Mutants__P Parameter: Plant Line Value: CS22 vs. Ler wt
  misc_feature: MA Experiment 20000573 PARAMETER Experiment Name: At_100uM_ABA_Mutants__P Parameter: Timepoint (hr) Value: N/A
  misc_feature: MA Experiment 20000573 PARAMETER Experiment Name: At_100uM_ABA_Mutants__P Parameter: Tissue Value: Whole Plant
  misc_feature: MA Experiment 20000573 PARAMETER Experiment Name: At_100uM_ABA_Mutants__P Parameter: Treatment Value: None
  misc_feature: MA Experiment ID: 20000576 Result: Up-regulated in Transcription
  misc_feature: MA Experiment 20000576 PARAMETER Experiment Name: At_100uM_ABA_Mutants__P Parameter: Organism Value: A. thaliana
  misc_feature: MA Experiment 20000576 PARAMETER Experiment Name: At_100uM_ABA_Mutants__P Parameter: Plant Line Value: CS23
  misc_feature: MA Experiment 20000576 PARAMETER Experiment Name: At_100uM_ABA_Mutants__P Parameter: Timepoint (hr) Value: 6
  misc_feature: MA Experiment 20000576 PARAMETER Experiment Name: At_100uM_ABA_Mutants__P Parameter: Tissue Value: Whole Plant
  misc_feature: MA Experiment 20000576 PARAMETER Experiment Name: At_100uM_ABA_Mutants__P Parameter: Treatment Value: 1uM ABA vs. No Treatment
  misc_feature: MA Experiment ID: 20001457 Result: Down-regulated in Transcription
  misc_feature: MA Experiment 20001457 PARAMETER Experiment Name: At_50mM_NH4NO3_L-to-H_P Parameter: Age (day) Value: Undefined
  misc_feature: MA Experiment 20001457 PARAMETER Experiment Name: At_50mM_NH4NO3_L-to-H_P Parameter: Organism Value: Undefined
  misc_feature: MA Experiment 20001457 PARAMETER Experiment Name: At_50mM_NH4NO3_L-to-H_P Parameter: Plant Line Value: Undefined
  misc_feature: MA Experiment 20001457 PARAMETER Experiment Name: At_50mM_NH4NO3_L-to-H_P Parameter: Timepoint (hr) Value: 0.5
  misc_feature: MA Experiment 20001457 PARAMETER Experiment Name: At_50mM_NH4NO3_L-to-H_P Parameter: Tissue Value: Siliques
  misc_feature: MA Experiment 20001457 PARAMETER Experiment Name: At_50mM_NH4NO3_L-to-H_P Parameter: Treatment Value: 50mM NH4NO3 vs. 100mM Manitol
  misc_feature: MA Experiment ID: 20001904 Result: Up-regulated in Transcription
  misc_feature: MA Experiment 20001904 PARAMETER Experiment Name: At_Drought_Reproduction_P Parameter: Age (day) Value: 37
  misc_feature: MA Experiment 20001904 PARAMETER Experiment Name: At_Drought_Reproduction_P Parameter: Organism Value: A. thaliana
  misc_feature: MA Experiment 20001904 PARAMETER Experiment Name: At_Drought_Reproduction_P Parameter: Plant Line Value: WS
  misc_feature: MA Experiment 20001904 PARAMETER Experiment Name: At_Drought_Reproduction_P Parameter: Timepoint (day) Value: 7
  misc_feature: MA Experiment 20001904 PARAMETER Experiment Name: At_Drought_Reproduction_P Parameter: Tissue Value: Rosettes
  misc_feature: MA Experiment 20001904 PARAMETER Experiment Name: At_Drought_Reproduction_P Parameter: Treatment Value: Drought vs. No Drought
attaactgatggctagattcatggcttacaatcaaaatccacaaatgttggctctatgcataacagtagcagtaatgttccttggtgtgagatcagaattgagtcaggatataaagggatgtcaggatgcgatgtctgatctctactcttgtcttccttttgtcactaacaaagctaaagcaccagactcaacatgttgcagcacactcaaggtaaaaatagacaaagggcagaccaggaaatgtctatgtactctagtcaaagacagggatgatcctggtttggggttcaaagttgatgccaaccgtgcaatgagcctcccttccgcttgtcatgtccctgcaaacatctctcaatgcccagatcttctacatctgcttccagattcaccagcctctcaaatatttaagcaattcactgaatcttcttctcagactgttggacataaagcggtctccacaagctcaagcatcaaaggaagagacaacaagcaatttggtttaatgatggctggtgctctctcaatatggtatataatgtaaaatcctctgtgatctaaagttgatgaacacaataaccaaaatcattatacgagtcatatctactagctgaagcagatgtatcatggcttattaataagaacttattg

SEQ ID NO: 102997 - protein, 177 aa, Arabidopsis thaliana; identical to SEQ ID NO: 20793
  peptide (1)..(177): Ceres Seq. ID no. 13611741
  misc_feature (38)..(117): Pfam Name: Protease inhibitor/seed storage/LTP family Pfam Description: Protease inhibitor/seed storage/LTP family
  misc_feature (1)..(177): Homolog of NCBI NO: 15231070 NR Description: protease inhibitor/seed storage/lipid transfer (LTP) family [Arabidopsis thaliana] >gi|11357439|pir||T45675
  misc_feature (13)..(177): Homolog of NCBI NO: 21555220 NR Description: unknown [Arabidopsis thaliana]
  misc_feature (5)..(174): Homolog of NCBI NO: 34394084 NR Description: lipid transfer protein-like [Oryza sativa
  misc_feature (10)..(154): Homolog of NCBI NO: 15224863 NR Description: lipid transfer protein - related [Arabidopsis
  misc_feature (14)..(154): Homolog of NCBI NO: 15224862 NR Description: lipid transfer protein family [Arabidopsis
  misc_feature (9)..(134): Homolog of NCBI NO: 18405294 NR Description: protease inhibitor/seed storage/lipid transfer
  misc_feature (23)..(134): Homolog of NCBI NO: 21537387 NR Description: unknown [Arabidopsis thaliana]
  misc_feature (11)..(171): Homolog of NCBI NO: 25553596 NR Description: OJ1656_E11.27 [Oryza sativa (japonica
  misc_feature (15)..(117): Homolog of NCBI NO: 25553602 NR Description: OJ1656_E11.34 [Oryza sativa (japonica
  misc_feature (17)..(117): Homolog of NCBI NO: 28269454 NR Description: putative protease inhibitor [Oryza sativa

SEQ ID NO: 102998 - protein, 173 aa, Arabidopsis thaliana; identical to SEQ ID NO: 20794
  peptide (1)..(173): Ceres Seq. ID no. 13611742
  misc_feature (34)..(113): Pfam Name: Protease inhibitor/seed storage/LTP family Pfam Description: Protease inhibitor/seed storage/LTP family
  misc_feature (1)..(173): Homolog of NCBI NO: 15231070 NR Description: protease inhibitor/seed storage/lipid transfer (LTP) family [Arabidopsis thaliana] >gi|11357439|pir||T45675
  misc_feature (9)..(173): Homolog of NCBI NO: 21555220 NR Description: unknown [Arabidopsis thaliana]
  misc_feature (1)..(170): Homolog of NCBI NO: 34394084 NR Description: lipid transfer protein-like [Oryza sativa
  misc_feature (6)..(150): Homolog of NCBI NO: 15224863 NR Description: lipid transfer protein - related [Arabidopsis
  misc_feature (10)..(150): Homolog of NCBI NO: 15224862 NR Description: lipid transfer protein family [Arabidopsis
  misc_feature (5)..(130): Homolog of NCBI NO: 18405294 NR Description: protease inhibitor/seed storage/lipid transfer
  misc_feature (19)..(130): Homolog of NCBI NO: 21537387 NR Description: unknown [Arabidopsis thaliana]
  misc_feature (7)..(167): Homolog of NCBI NO: 25553596 NR Description: OJ1656_E11.27 [Oryza sativa (japonica
  misc_feature (11)..(113): Homolog of NCBI NO: 25553602 NR Description: OJ1656_E11.34 [Oryza sativa (japonica
  misc_feature (13)..(113): Homolog of NCBI NO: 28269454 NR Description: putative protease inhibitor [Oryza sativa

SEQ ID NO: 102999 - protein, 165 aa, Arabidopsis thaliana; identical to SEQ ID NO: 20795
  peptide (1)..(165): Ceres Seq. ID no. 13611743
  misc_feature (26)..(105): Pfam Name: Protease inhibitor/seed storage/LTP family Pfam Description: Protease inhibitor/seed storage/LTP family
  misc_feature (1)..(165): Homolog of NCBI NO: 15231070 NR Description: protease inhibitor/seed storage/lipid transfer (LTP) family [Arabidopsis thaliana] >gi|11357439|pir||T45675
  misc_feature (1)..(165): Homolog of NCBI NO: 21555220 NR Description: unknown [Arabidopsis thaliana]
  misc_feature (1)..(162): Homolog of NCBI NO: 34394084 NR Description: lipid transfer protein-like [Oryza sativa
  misc_feature (1)..(142): Homolog of NCBI NO: 15224863 NR Description: lipid transfer protein - related [Arabidopsis
  misc_feature (2)..(142): Homolog of NCBI NO: 15224862 NR Description: lipid transfer protein family [Arabidopsis
  misc_feature (1)..(122): Homolog of NCBI NO: 18405294 NR Description: protease inhibitor/seed storage/lipid transfer
  misc_feature (11)..(122): Homolog of NCBI NO: 21537387 NR Description: unknown [Arabidopsis thaliana]
  misc_feature (1)..(159): Homolog of NCBI NO: 25553596 NR Description: OJ1656_E11.27 [Oryza sativa (japonica
  misc_feature (3)..(105): Homolog of NCBI NO: 25553602 NR Description: OJ1656_E11.34 [Oryza sativa (japonica
  misc_feature (5)..(105): Homolog of NCBI NO: 28269454 NR Description: putative protease inhibitor [Oryza sativa

SEQ ID NO: 103000 - DNA, 728 bp, Arabidopsis thaliana
  misc_feature (1)..(728): Ceres Seq. ID no. 13611748
  misc_feature: MA Experiment ID: 20000069 Result: Up-regulated in Transcription
  misc_feature: MA Experiment 20000069 PARAMETER Experiment Name: At_100uM_ABA_Mutants_cDNA_P Parameter: Plant Line Value: CS23
  misc_feature: MA Experiment 20000069 PARAMETER Experiment Name: At_100uM_ABA_Mutants_cDNA_P Parameter: Timepoint (hr) Value: 6
  misc_feature: MA Experiment 20000069 PARAMETER Experiment Name: At_100uM_ABA_Mutants_cDNA_P Parameter: Tissue Value: Aerial
  misc_feature: MA Experiment 20000069 PARAMETER Experiment Name: At_100uM_ABA_Mutants_cDNA_P Parameter: Treatment Value: 100uM ABA vs. No Treatment
  misc_feature: MA Experiment ID: 20000070 Result: Up-regulated in Transcription
  misc_feature: MA Experiment 20000070 PARAMETER Experiment Name: At_100uM_ABA_Mutants_cDNA_P Parameter: Plant Line Value: CS24
  misc_feature: MA Experiment 20000070 PARAMETER Experiment Name: At_100uM_ABA_Mutants_cDNA_P Parameter: Timepoint (hr) Value: 6
  misc_feature: MA Experiment 20000070 PARAMETER Experiment Name: At_100uM_ABA_Mutants_cDNA_P Parameter: Tissue Value: Aerial
  misc_feature: MA Experiment 20000070 PARAMETER Experiment Name: At_100uM_ABA_Mutants_cDNA_P Parameter: Treatment Value: 100uM ABA vs. No Treatment
  misc_feature: MA Experiment ID: 20000071 Result: Up-regulated in Transcription
  misc_feature: MA Experiment 20000071 PARAMETER Experiment Name: At_100uM_ABA_Mutants_cDNA_P Parameter: Plant Line Value: CS8104
  misc_feature: MA Experiment 20000071 PARAMETER Experiment Name: At_100uM_ABA_Mutants_cDNA_P Parameter: Timepoint (hr) Value: 6
  misc_feature: MA Experiment 20000071 PARAMETER Experiment Name: At_100uM_ABA_Mutants_cDNA_P Parameter: Tissue Value: Aerial
  misc_feature: MA Experiment 20000071 PARAMETER Experiment Name: At_100uM_ABA_Mutants_cDNA_P Parameter: Treatment Value: 100uM ABA vs. No Treatment
  misc_feature: MA Experiment ID: 20000072 Result: Up-regulated in Transcription
  misc_feature: MA Experiment 20000072 PARAMETER Experiment Name: At_100uM_ABA_Mutants_cDNA_P Parameter: Plant Line Value: CS8105
  misc_feature: MA Experiment 20000072 PARAMETER Experiment Name: At_100uM_ABA_Mutants_cDNA_P Parameter: Timepoint (hr) Value: 6
  misc_feature: MA Experiment 20000072 PARAMETER Experiment Name: At_100uM_ABA_Mutants_cDNA_P Parameter: Tissue Value: Aerial
  misc_feature: MA Experiment 20000072 PARAMETER Experiment Name: At_100uM_ABA_Mutants_cDNA_P Parameter: Treatment Value: 100uM ABA vs. No Treatment
  misc_feature: MA Experiment ID: 20000086 Result: Up-regulated in Transcription
  misc_feature: MA Experiment 20000086 PARAMETER Experiment Name: At_100uM_ABA_Mutants_cDNA_P Parameter: Plant Line Value: CS22
  misc_feature: MA Experiment 20000086 PARAMETER Experiment Name: At_100uM_ABA_Mutants_cDNA_P Parameter: Timepoint (hr) Value: 6
  misc_feature: MA Experiment 20000086 PARAMETER Experiment Name: At_100uM_ABA_Mutants_cDNA_P Parameter: Tissue Value: Aerial
  misc_feature: MA Experiment 20000086 PARAMETER Experiment Name: At_100uM_ABA_Mutants_cDNA_P Parameter: Treatment Value: 100uM ABA vs. No Treatment
  misc_feature: MA Experiment ID: 20000087 Result: Up-regulated in Transcription
  misc_feature: MA Experiment 20000087 PARAMETER Experiment Name: At_100uM_ABA_Mutants_cDNA_P Parameter: Plant Line Value: WS
  misc_feature: MA Experiment 20000087 PARAMETER Experiment Name: At_100uM_ABA_Mutants_cDNA_P Parameter: Timepoint (hr) Value: 6
  misc_feature: MA Experiment 20000087 PARAMETER Experiment Name: At_100uM_ABA_Mutants_cDNA_P Parameter: Tissue Value: Aerial
  misc_feature: MA Experiment 20000087 PARAMETER Experiment Name: At_100uM_ABA_Mutants_cDNA_P Parameter: Treatment Value: 100uM ABA vs. No Treatment
  misc_feature: MA Experiment ID: 20000088 Result: Up-regulated in Transcription
  misc_feature: MA Experiment 20000088 PARAMETER Experiment Name: At_100uM_ABA_Mutants_cDNA_P Parameter: Plant Line Value: Landsberg
  misc_feature: MA Experiment 20000088 PARAMETER Experiment Name: At_100uM_ABA_Mutants_cDNA_P Parameter: Timepoint (hr) Value: 6
  misc_feature: MA Experiment 20000088 PARAMETER Experiment Name: At_100uM_ABA_Mutants_cDNA_P Parameter: Tissue Value: Aerial
  misc_feature: MA Experiment 20000088 PARAMETER Experiment Name: At_100uM_ABA_Mutants_cDNA_P Parameter: Treatment Value: 100uM ABA vs. No Treatment
  misc_feature: MA Experiment ID: 20000089 Result: Up-regulated in Transcription
  misc_feature: MA Experiment ID: 20000090 Result: Up-regulated in Transcription
  misc_feature: MA Experiment ID: 20000117 Result: Up-regulated in Transcription
  misc_feature: MA Experiment 20000117 PARAMETER Experiment Name: At_100uM_ABA_Mutants_cDNA_P Parameter: Plant Line Value: Columbia
  misc_feature: MA Experiment 20000117 PARAMETER Experiment Name: At_100uM_ABA_Mutants_cDNA_P Parameter: Timepoint (hr) Value: 6
  misc_feature: MA Experiment 20000117 PARAMETER Experiment Name: At_100uM_ABA_Mutants_cDNA_P Parameter: Tissue Value: Aerial
  misc_feature: MA Experiment 20000117 PARAMETER Experiment Name: At_100uM_ABA_Mutants_cDNA_P Parameter: Treatment Value: 100uM ABA vs. No Treatment
  misc_feature: MA Experiment ID: 20001248 Result: Up-regulated in Transcription
  misc_feature: MA Experiment 20001248 PARAMETER Experiment Name: At_Far-red-induction_P Parameter: Age (day) Value: 7
  misc_feature: MA Experiment 20001248 PARAMETER Experiment Name: At_Far-red-induction_P Parameter: Light Value: Far-red vs. White
  misc_feature: MA Experiment 20001248 PARAMETER Experiment Name: At_Far-red-induction_P Parameter: Organism Value: A. thaliana
  misc_feature: MA Experiment 20001248 PARAMETER Experiment Name: At_Far-red-induction_P Parameter: Plant Line Value: Columbia
  misc_feature: MA Experiment 20001248 PARAMETER Experiment Name: At_Far-red-induction_P Parameter: Timepoint (hr) Value: 4
  misc_feature: MA Experiment 20001248 PARAMETER Experiment Name: At_Far-red-induction_P Parameter: Tissue Value: Whole Plant
atcttcttgtctctctctcatttcttgttattatccacgaacgaagaaaaacctagaaaacagttgaagaaagaaaatcacaagagaagccatggccggaattggaccgattactcaggattgggaaccagttgtgatccgcaagagagctcctaacgctgcagctaagcgcgacgagaagactgtcaacgccgctcgtcgaagcggcgccgatattgagaccgttcgaaaattcaatgctggatcgaacaaggctgcatcaagcggcacctccttgaacacaaagaagctagatgatgatactgagaacttatctcatgatcgtgtgcccactgaattgaagaaagccatcatgcaagctagaggggagaagaagctgactcagtcccaacttgcccatctgatcaatgagaagccacaagtgatccaagaatacgagtctgggaaagcaattccgaatcaacagatcctttcaaagctggagagggcacttggtgctaaactccgtggaaagaagtagaagtgtagaacaaagctcttaaaggtaacaacaaaagctgatcgcagtttctctccagtccacatgctttaccatatcctaaaaactatatctatgtatggtttggtttaatggcgtagtagtttgttgcgaggaatctttcatgatgtaagaaaaacaaagctgtttggaaccttttgtcattataaataatctcttctctttcttt

SEQ ID NO: 103001 - protein, 142 aa, Arabidopsis thaliana; identical to SEQ ID NO: 40131
  peptide (1)..(142): Ceres Seq. ID no. 13611749
  misc_feature (87)..(141): Pfam Name: Helix-turn-helix Pfam Description: Helix-turn-helix
  misc_feature (1)..(142): Homolog of NCBI NO: 15231105 NR Description: transcriptional coactivator - like protein
  misc_feature (1)..(142): Homolog of NCBI NO: 18406032 NR Description: expressed protein [Arabidopsis thaliana]
  misc_feature (1)..(142): Homolog of NCBI NO: 7488897 NR Description: hypothetical protein - castor bean
  misc_feature (1)..(142): Homolog of NCBI NO: 38637102 NR Description: putative ethylene-responsive transcriptional
  misc_feature (7)..(142): Homolog of NCBI NO: 8895787 NR Description: multiprotein bridging factor 1 [Solanum tuberosum]
  misc_feature (5)..(142): Homolog of NCBI NO: 20086364 NR Description: putative multiprotein bridging factor 1
  misc_feature (5)..(141): Homolog of NCBI NO: 15230125 NR Description: ethylene-responsive transcriptional coactivator
  misc_feature (7)..(141): Homolog of NCBI NO: 21553721 NR Description: ethylene-responsive transcriptional coactivator,
  misc_feature (5)..(141): Homolog of NCBI NO: 19225065 NR Description: ethylene-responsive transciptional
  misc_feature (10)..(141): Homolog of NCBI NO: 4503453 NR Description: endothelial differentiation-related factor 1 alpha; multiprotein bridging factor 1 [Homo sapiens] homologous to Bombyx mori multiprotein bridging factor (EMBL:

SEQ ID NO: 103002 - DNA, 1224 bp, Arabidopsis thaliana
  misc_feature (1)..(1224): Ceres Seq. ID no. 13611750
  misc_feature: MA Experiment ID: 108433 Result: Down-regulated in Transcription
  misc_feature: MA Experiment 108433 PARAMETER Experiment Name: At_rhl_Mutant2_cDNA_P Parameter: Age (day) Value: 7
  misc_feature: MA Experiment 108433 PARAMETER Experiment Name: At_rhl_Mutant2_cDNA_P Parameter: Organism Value: A. thaliana
  misc_feature: MA Experiment 108433 PARAMETER Experiment Name: At_rhl_Mutant2_cDNA_P Parameter: Plant Line Value: rhl Mutant vs. wt landsburg
  misc_feature: MA Experiment 108433 PARAMETER Experiment Name: At_rhl_Mutant2_cDNA_P Parameter: Tissue Value: Roots
  misc_feature: MA Experiment ID: 108434 Result: Up-regulated in Transcription
  misc_feature: MA Experiment 108434 PARAMETER Experiment Name: At_Root_Tips_cDNA_P Parameter: Tissue Value: Root Tips
  misc_feature: MA Experiment ID: 108461 Result: Up-regulated in Transcription
  misc_feature: MA Experiment 108461 PARAMETER Experiment Name: At_Germinating_Seeds_cDNA_P Parameter: Age (day) Value: 1 vs. 0
  misc_feature: MA Experiment 108461 PARAMETER Experiment Name: At_Germinating_Seeds_cDNA_P Parameter: Tissue Value: Germinating Seeds
  misc_feature: MA Experiment ID: 108462 Result: Up-regulated in Transcription
  misc_feature: MA Experiment 108462 PARAMETER Experiment Name: At_Germinating_Seeds_cDNA_P Parameter: Age (day) Value: 2 vs. 0
  misc_feature: MA Experiment 108462 PARAMETER Experiment Name: At_Germinating_Seeds_cDNA_P Parameter: Tissue Value: Germinating Seeds
  misc_feature: MA Experiment ID: 108501 Result: Up-regulated in Transcription
  misc_feature: MA Experiment 108501 PARAMETER Experiment Name: At_ap2_floral_buds_cDNA_P Parameter: Plant Line Value: ap2 (Ler.)
  misc_feature: MA Experiment 108501 PARAMETER Experiment Name: At_ap2_floral_buds_cDNA_P Parameter: Tissue Value: Closed Flower
  misc_feature: MA Experiment ID: 108561 Result: Down-regulated in Transcription
  misc_feature: MA Experiment 108561 PARAMETER Experiment Name: At_100uM_ABA_cDNA_P Parameter: Timepoint (hr) Value: 6
  misc_feature: MA Experiment 108561 PARAMETER Experiment Name: At_100uM_ABA_cDNA_P Parameter: Tissue Value: Aerial
  misc_feature: MA Experiment 108561 PARAMETER Experiment Name: At_100uM_ABA_cDNA_P Parameter: Treatment Value: 100uM ABA vs. No Treatment
  misc_feature: MA Experiment ID: 108573 Result: Down-regulated in Transcription
  misc_feature: MA Experiment 108573 PARAMETER Experiment Name: At_Drought_cDNA_P Parameter: Timepoint (hr) Value: 6
  misc_feature: MA Experiment 108573 PARAMETER Experiment Name: At_Drought_cDNA_P Parameter: Tissue Value: Aerial
  misc_feature: MA Experiment 108573 PARAMETER Experiment Name: At_Drought_cDNA_P Parameter: Treatment Value: Drought vs. No Drought
  misc_feature: MA Experiment ID: 20000030 Result: Up-regulated in Transcription
  misc_feature: MA Experiment 20000030 PARAMETER Experiment Name: At_CS6630_Roots_cDNA_P Parameter: Plant Line Value: CS6630 vs. WS
  misc_feature: MA Experiment 20000030 PARAMETER Experiment Name: At_CS6630_Roots_cDNA_P Parameter: Tissue Value: Roots
  misc_feature: MA Experiment ID: 20000111 Result: Down-regulated in Transcription
  misc_feature: MA Experiment 20000111 PARAMETER Experiment Name: At_42deg_Heat_cDNA_P Parameter: Temperature (deg C) Value: 42 vs. 22
  misc_feature: MA Experiment 20000111 PARAMETER Experiment Name: At_42deg_Heat_cDNA_P Parameter: Timepoint (hr) Value: 6
  misc_feature: MA Experiment 20000111 PARAMETER Experiment Name: At_42deg_Heat_cDNA_P Parameter: Tissue Value: Aerial
  misc_feature: MA Experiment ID: 20000179 Result: Up-regulated in Transcription
  misc_feature: MA Experiment 20000179 PARAMETER Experiment Name: At_Germinating_Seeds_P Parameter: Age (hr) Value: 6 vs. 0
  misc_feature: MA Experiment 20000179 PARAMETER Experiment Name: At_Germinating_Seeds_P Parameter: Tissue Value: Germinating Seeds
  misc_feature: MA Experiment ID: 20000180 Result: Up-regulated in Transcription
  misc_feature: MA Experiment 20000180 PARAMETER Experiment Name: At_Germinating_Seeds_P Parameter: Age (hr) Value: 24 vs. 0
  misc_feature: MA Experiment 20000180 PARAMETER Experiment Name: At_Germinating_Seeds_P Parameter: Tissue Value: Germinating Seeds
  misc_feature: MA Experiment ID: 20000227 Result: Up-regulated in Transcription
  misc_feature: MA Experiment 20000227 PARAMETER Experiment Name: At_Root-Tips-vs-Tops_P Parameter: Tissue Value: Root Tips vs. Root Tops
  misc_feature: MA Experiment ID: 20000234 Result: Up-regulated in Transcription
  misc_feature: MA Experiment 20000234 PARAMETER Experiment Name: At_Siliques_P Parameter: Age (day) Value: 21
  misc_feature: MA Experiment 20000234 PARAMETER Experiment Name: At_Siliques_P Parameter: Organism Value: A. thaliana
  misc_feature: MA Experiment 20000234 PARAMETER Experiment Name: At_Siliques_P Parameter: Plant Line Value: WS
  misc_feature: MA Experiment 20000234 PARAMETER Experiment Name: At_Siliques_P Parameter: Tissue Value: Less Than 5mm Siliques vs. Whole Plant
  misc_feature: MA Experiment ID: 20000235 Result: Up-regulated in Transcription
  misc_feature: MA Experiment 20000235 PARAMETER Experiment Name: At_Siliques_P Parameter: Age (day) Value: 21
  misc_feature: MA Experiment 20000235 PARAMETER Experiment Name: At_Siliques_P Parameter: Organism Value: A. thaliana
  misc_feature: MA Experiment 20000235 PARAMETER Experiment Name: At_Siliques_P Parameter: Plant Line Value: WS
  misc_feature: MA Experiment 20000235 PARAMETER Experiment Name: At_Siliques_P Parameter: Tissue Value: 5-10mm Siliques vs. Whole Plant
  misc_feature: MA Experiment ID: 20000264 Result: Up-regulated in Transcription
  misc_feature: MA Experiment 20000264 PARAMETER Experiment Name: At_Open_Flower_P Parameter: Age (day) Value: 21
  misc_feature: MA Experiment 20000264 PARAMETER Experiment Name: At_Open_Flower_P Parameter: Plant Line Value: WS
  misc_feature: MA Experiment 20000264 PARAMETER Experiment Name: At_Open_Flower_P Parameter: Tissue Value: Open Flower vs. Whole Plant
  misc_feature: MA Experiment ID: 20000265 Result: Up-regulated in Transcription
  misc_feature: MA Experiment 20000265 PARAMETER Experiment Name: At_Open_Flower_P Parameter: Age (day) Value: 21
  misc_feature: MA Experiment 20000265 PARAMETER Experiment Name: At_Open_Flower_P Parameter: Plant Line Value: WS
  misc_feature: MA Experiment 20000265 PARAMETER Experiment Name: At_Open_Flower_P Parameter: Tissue Value: Closed Flower vs. Whole Plant
  misc_feature: MA Experiment ID: 20000286 Result: Up-regulated in Transcription
  misc_feature: MA Experiment 20000286 PARAMETER Experiment Name: At_Open_Flower_P Parameter: Age (day) Value: 21
  misc_feature: MA Experiment 20000286 PARAMETER Experiment Name: At_Open_Flower_P Parameter: Plant Line Value: WS
  misc_feature: MA Experiment 20000286 PARAMETER Experiment Name: At_Open_Flower_P Parameter: Tissue Value: Half Open vs. Whole Plant
  misc_feature: MA Experiment ID: 20000437 Result: Down-regulated in Transcription
  misc_feature: MA Experiment 20000437 PARAMETER Experiment Name: At_Drought_P Parameter: Age (day) Value: 8
  misc_feature: MA Experiment 20000437 PARAMETER Experiment Name: At_Drought_P Parameter: Organism Value: A. thaliana
  misc_feature: MA Experiment 20000437 PARAMETER Experiment Name: At_Drought_P Parameter: Plant Line Value: WS
  misc_feature: MA Experiment 20000437 PARAMETER Experiment Name: At_Drought_P Parameter: Timepoint (hr) Value: 24
  misc_feature: MA Experiment 20000437 PARAMETER Experiment Name: At_Drought_P Parameter: Tissue Value: Whole Plant
  misc_feature: MA Experiment 20000437 PARAMETER Experiment Name: At_Drought_P Parameter: Treatment Value: Drought vs. No Drought
  misc_feature: MA Experiment ID: 20000451 Result: Down-regulated in Transcription
  misc_feature: MA Experiment 20000451 PARAMETER Experiment Name: At_CS6879_Shoots-Roots_P Parameter: Age (day) Value: 14
  misc_feature: MA Experiment 20000451 PARAMETER Experiment Name: At_CS6879_Shoots-Roots_P Parameter: Organism Value: A. thaliana
  misc_feature: MA Experiment 20000451 PARAMETER Experiment Name: At_CS6879_Shoots-Roots_P Parameter: Plant Line Value: CS6879 vs. WS
  misc_feature: MA Experiment 20000451 PARAMETER Experiment Name: At_CS6879_Shoots-Roots_P Parameter: Tissue Value: Roots
  misc_feature: MA Experiment ID: 20001555 Result: Down-regulated in Transcription
  misc_feature: MA Experiment 20001555 PARAMETER Experiment Name: At_Drought_Soil_Dry_P Parameter: Age (day) Value: 24
  misc_feature: MA Experiment 20001555 PARAMETER Experiment Name: At_Drought_Soil_Dry_P Parameter: Organism Value: A. thaliana
  misc_feature: MA Experiment 20001555 PARAMETER Experiment Name: At_Drought_Soil_Dry_P Parameter: Plant Line Value: WS
  misc_feature: MA Experiment 20001555 PARAMETER Experiment Name: At_Drought_Soil_Dry_P Parameter: Post Timepoint (hr) Value: None
  misc_feature: MA Experiment 20001555 PARAMETER Experiment Name: At_Drought_Soil_Dry_P Parameter: Post-Treatment Value: None
  misc_feature: MA Experiment 20001555 PARAMETER Experiment Name: At_Drought_Soil_Dry_P Parameter: Timepoint (day) Value: 10
  misc_feature: MA Experiment 20001555 PARAMETER Experiment Name: At_Drought_Soil_Dry_P Parameter: Treatment Value: Drought vs. No Drought
  misc_feature: MA Experiment ID: 20001556 Result: Down-regulated in Transcription
  misc_feature: MA Experiment 20001556 PARAMETER Experiment Name: At_Drought_Soil_Dry_P Parameter: Age (day) Value: 26
  misc_feature: MA Experiment 20001556 PARAMETER Experiment Name: At_Drought_Soil_Dry_P Parameter: Organism Value: A. thaliana
  misc_feature: MA Experiment 20001556 PARAMETER Experiment Name: At_Drought_Soil_Dry_P Parameter: Plant Line Value: WS
  misc_feature: MA Experiment 20001556 PARAMETER Experiment Name: At_Drought_Soil_Dry_P Parameter: Post Timepoint (hr) Value: None
  misc_feature: MA Experiment 20001556 PARAMETER Experiment Name: At_Drought_Soil_Dry_P Parameter: Post-Treatment Value: None
  misc_feature: MA Experiment 20001556 PARAMETER Experiment Name: At_Drought_Soil_Dry_P Parameter: Timepoint (day) Value: 12
  misc_feature: MA Experiment 20001556 PARAMETER Experiment Name: At_Drought_Soil_Dry_P Parameter: Treatment Value: Drought vs. No Drought
  misc_feature: MA Experiment ID: 20001558 Result: Up-regulated in Transcription
  misc_feature: MA Experiment 20001558 PARAMETER Experiment Name: At_Drought_Soil_Dry_P Parameter: Age (day) Value: 27
  misc_feature: MA Experiment 20001558 PARAMETER Experiment Name: At_Drought_Soil_Dry_P Parameter: Organism Value: A. thaliana
  misc_feature: MA Experiment 20001558 PARAMETER Experiment Name: At_Drought_Soil_Dry_P Parameter: Plant Line Value: WS
  misc_feature: MA Experiment 20001558 PARAMETER Experiment Name: At_Drought_Soil_Dry_P Parameter: Post Timepoint (hr) Value: 6
  misc_feature: MA Experiment 20001558 PARAMETER Experiment Name: At_Drought_Soil_Dry_P Parameter: Post-Treatment Value: Re-Water vs. No Drought
  misc_feature: MA Experiment 20001558 PARAMETER Experiment Name: At_Drought_Soil_Dry_P Parameter: Timepoint (day) Value: 13
  misc_feature: MA Experiment 20001558 PARAMETER Experiment Name: At_Drought_Soil_Dry_P Parameter: Treatment Value: Drought vs. No Drought
atcaagttaaaaaaaaaacagaaggagaaatggcaataagttttagaactctagctcttttgaccctctcggtgttactaatttccatatctctcggcgtcgtcacagcaacagagtcgcagaggaatgaaggggaggtgcttacaatgtacgagcaatggcttgtagagaatgggaagaactataacggtcttggagagaaggagagacggttcaagatcttcaaagacaacttgaagcgcatcgaagaacacaattcagatccaaaccggagttatgaacgcgggttgaacaagttttcggatctaacggctgatgagtttcaagctagttacttaggtgggaagatggaaaagaaaagcctatcagatgtagcggagaggtatcagtacaaagaaggagatgttttacctgatgaagttgattggagggagagaggagcagttgttccaagagtcaaaagacaaggagagtgtggaagttgttgggcgtttgccgcgactggagcggtggaaggtataaaccagatcacaaccggagaattagtatctttatcggaacaagaactcattgactgcgatagagggaacgacaactttggatgtgctggtggtggagcagtatgggcctttgagttcattaaggagaacggtggtattgtatccgatgaagtttatggttataccggtgaagatactgccgcatgcaaggccattgagatgaaaaccactcgggttgttaccattaatggtcatgaggttgttcctgtaaacgatgagatgtctttgaagaaagctgttgcttatcaacctattagtgttatgatatcagctgcaaacatgagcgactacaaatctggtgtgtataaaggagcatgtagtaatttgtggggagatcacaatgtgctaattgtggggtatggaacatcatcagatgaaggagactactggcttattcgtaattcttggggaccagagtggggagaaggcgggtaccttaggcttcaacgtaacttccatgaaccaaccgggaaatgtgcagtcgctgtagctcctgtatacccaatcaagtcgaactcttcatctcatttgttgtctccaagtgtgtttaaattggttgttttatttgtttttcagttgattagtttggccttgctttgaaatatacttttatcggtgttcaagttcgttggtttttggtttaataaaggaaacaagattcgtc

SEQ ID NO: 103003 - protein, 385 aa, Arabidopsis thaliana; identical to SEQ ID NO: 25022
  peptide (1)..(385): Ceres Seq. ID no. 13611751
  misc_feature (136)..(355): Pfam Name: Papain family cysteine protease Pfam Description: Papain family cysteine protease
  misc_feature (10)..(385): Homolog of NCBI NO: 18407678 NR Description: cysteine proteinase [Arabidopsis thaliana]
  misc_feature (10)..(385): Homolog of NCBI NO: 21593501 NR Description: cysteine proteinase [Arabidopsis thaliana]
  misc_feature (18)..(365): Homolog of NCBI NO: 26452046 NR Description: putative cysteine proteinase RD21A precursor
  misc_feature (18)..(365): Homolog of NCBI NO: 30685308 NR Description: cysteine proteinase [Arabidopsis thaliana] Putative cysteine proteinase At3g19400 precursor
  misc_feature (10)..(361): Homolog of NCBI NO: 18402225 NR Description: cysteine proteinase [Arabidopsis thaliana] cysteine proteinase [Arabidopsis thaliana] cysteine proteinase [Arabidopsis thaliana]
  misc_feature (14)..(361): Homolog of NCBI NO: 18141281 NR Description: senescence-associated cysteine protease [Brassica
  misc_feature (41)..(360): Homolog of NCBI NO: 30141019 NR Description: cysteine protease-1 [Helianthus annuus]
  misc_feature (10)..(367): Homolog of NCBI NO: 14517542 NR Description: F2G19.31/F2G19.31 [Arabidopsis thaliana]
  misc_feature (16)..(367): Homolog of NCBI NO: 18401614 NR Description: cysteine proteinase RD21A [Arabidopsis thaliana]
  misc_feature (12)..(367): Homolog of NCBI NO: 7435801 NR Description: cysteine proteinase (EC 3.4.22.-) precursor -

SEQ ID NO: 103004 - protein, 376 aa, Arabidopsis thaliana; identical to SEQ ID NO: 25023
  peptide (1)..(376): Ceres Seq. ID no. 13611752
  misc_feature (127)..(346): Pfam Name: Papain family cysteine protease Pfam Description: Papain family cysteine protease
  misc_feature (1)..(376): Homolog of NCBI NO: 18407678 NR Description: cysteine proteinase [Arabidopsis thaliana]
  misc_feature (1)..(376): Homolog of NCBI NO: 21593501 NR Description: cysteine proteinase [Arabidopsis thaliana]
  misc_feature (9)..(356): Homolog of NCBI NO: 26452046 NR Description: putative cysteine proteinase RD21A precursor
  misc_feature (9)..(356): Homolog of NCBI NO: 30685308 NR Description: cysteine proteinase [Arabidopsis thaliana] Putative cysteine proteinase At3g19400 precursor
  misc_feature (1)..(352): Homolog of NCBI NO: 18402225 NR Description: cysteine proteinase [Arabidopsis thaliana] cysteine proteinase [Arabidopsis thaliana] cysteine proteinase [Arabidopsis thaliana]
  misc_feature (5)..(352): Homolog of NCBI NO: 18141281 NR Description: senescence-associated cysteine protease [Brassica
  misc_feature (32)..(351): Homolog of NCBI NO: 30141019 NR Description: cysteine protease-1 [Helianthus annuus]
  misc_feature (1)..(358): Homolog of NCBI NO: 14517542 NR Description: F2G19.31/F2G19.31 [Arabidopsis thaliana]
  misc_feature (7)..(358): Homolog of NCBI NO: 18401614 NR Description: cysteine proteinase RD21A [Arabidopsis thaliana]
  misc_feature (3)..(358): Homolog of NCBI NO: 7435801 NR Description: cysteine proteinase (EC 3.4.22.-) precursor -

SEQ ID NO: 103005 - protein, 337 aa, Arabidopsis thaliana; identical to SEQ ID NO: 25024
  peptide (1)..(337): Ceres Seq. ID no. 13611753
  misc_feature (88)..(307): Pfam Name: Papain family cysteine protease Pfam Description: Papain family cysteine protease
  misc_feature (1)..(337): Homolog of NCBI NO: 18407678 NR Description: cysteine proteinase [Arabidopsis thaliana]
  misc_feature (1)..(337): Homolog of NCBI NO: 21593501 NR Description: cysteine proteinase [Arabidopsis thaliana]
  misc_feature (1)..(317): Homolog of NCBI NO: 26452046 NR Description: putative cysteine proteinase RD21A precursor
  misc_feature (1)..(317): Homolog of NCBI NO: 30685308 NR Description: cysteine proteinase [Arabidopsis thaliana] Putative cysteine proteinase At3g19400 precursor
  misc_feature (1)..(313): Homolog of NCBI NO: 18402225 NR Description: cysteine proteinase [Arabidopsis thaliana] cysteine proteinase [Arabidopsis thaliana] cysteine proteinase [Arabidopsis thaliana]
  misc_feature (1)..(313): Homolog of NCBI NO: 18141281 NR Description: senescence-associated cysteine protease [Brassica
  misc_feature (1)..(312): Homolog of NCBI NO: 30141019 NR Description: cysteine protease-1 [Helianthus annuus]
  misc_feature (1)..(319): Homolog of NCBI NO: 14517542 NR Description: F2G19.31/F2G19.31 [Arabidopsis thaliana]
  misc_feature (1)..(319): Homolog of NCBI NO: 18401614 NR Description: cysteine proteinase RD21A [Arabidopsis thaliana]
  misc_feature (1)..(319): Homolog of NCBI NO: 7435801 NR Description: cysteine proteinase (EC 3.4.22.-) precursor -

SEQ ID NO: 103006 - DNA, 1505 bp, Arabidopsis thaliana
  misc_feature (1)..(1505): Ceres Seq. ID no. 13611762
  misc_feature: MA Experiment ID: 108461 Result: Up-regulated in Transcription
  misc_feature: MA Experiment 108461 PARAMETER Experiment Name: At_Germinating_Seeds_cDNA_P Parameter: Age (day) Value: 1 vs. 0
  misc_feature: MA Experiment 108461 PARAMETER Experiment Name: At_Germinating_Seeds_cDNA_P Parameter: Tissue Value: Germinating Seeds
  misc_feature: MA Experiment ID: 108462 Result: Up-regulated in Transcription
  misc_feature: MA Experiment 108462 PARAMETER Experiment Name: At_Germinating_Seeds_cDNA_P Parameter: Age (day) Value: 2 vs. 0
  misc_feature: MA Experiment 108462 PARAMETER Experiment Name: At_Germinating_Seeds_cDNA_P Parameter: Tissue Value: Germinating Seeds
  misc_feature: MA Experiment ID: 108463 Result: Up-regulated in Transcription
  misc_feature: MA Experiment 108463 PARAMETER Experiment Name: At_Germinating_Seeds_cDNA_P Parameter: Age (day) Value: 3 vs. 0
  misc_feature: MA Experiment 108463 PARAMETER Experiment Name: At_Germinating_Seeds_cDNA_P Parameter: Tissue Value: Germinating Seeds
  misc_feature: MA Experiment ID: 108469 Result: Up-regulated in Transcription
  misc_feature: MA Experiment ID: 108574 Result: Up-regulated in Transcription
  misc_feature: MA Experiment 108574 PARAMETER Experiment Name: At_Wounding__cDNA_P Parameter: Timepoint (hr) Value: 1
  misc_feature: MA Experiment 108574 PARAMETER Experiment Name: At_Wounding__cDNA_P Parameter: Tissue Value: Aerial
  misc_feature: MA Experiment 108574 PARAMETER Experiment Name: At_Wounding__cDNA_P Parameter: Treatment Value: Wounding vs. No Wounding
  misc_feature: MA Experiment ID: 108576 Result: Up-regulated in Transcription
  misc_feature: MA Experiment 108576 PARAMETER Experiment Name: At_42deg_Heat_cDNA_P Parameter: Temperature (deg C) Value: 42 vs. 22
  misc_feature: MA Experiment 108576 PARAMETER Experiment Name: At_42deg_Heat_cDNA_P Parameter: Timepoint (hr) Value: 1
  misc_feature: MA Experiment 108576 PARAMETER Experiment Name: At_42deg_Heat_cDNA_P Parameter: Tissue Value: Aerial
  misc_feature: MA Experiment ID: 108585 Result: Up-regulated in Transcription
  misc_feature: MA Experiment 108585 PARAMETER Experiment Name: At_5mM_NaNP_cDNA_P Parameter: Timepoint (hr) Value: 6
  misc_feature: MA Experiment 108585 PARAMETER Experiment Name: At_5mM_NaNP_cDNA_P Parameter: Tissue Value: Aerial
  misc_feature: MA Experiment 108585 PARAMETER Experiment Name: At_5mM_NaNP_cDNA_P Parameter: Treatment Value: null
  misc_feature: MA Experiment ID: 108595 Result: Up-regulated in Transcription
  misc_feature: MA Experiment 108595 PARAMETER Experiment Name: At_Ler-pi_Ovule_cDNA_P Parameter: Plant Line Value: null
  misc_feature: MA Experiment ID: 108667 Result: Up-regulated in Transcription
  misc_feature: MA Experiment 108667 PARAMETER Experiment Name: At_2mM_SA_cDNA_P Parameter: Plant Line Value: WS
  misc_feature: MA Experiment 108667 PARAMETER Experiment Name: At_2mM_SA_cDNA_P Parameter: Timepoint (hr) Value: 1
  misc_feature: MA Experiment 108667 PARAMETER Experiment Name: At_2mM_SA_cDNA_P Parameter: Treatment Value: 2mM SA vs. No Treatment
  misc_feature: MA Experiment ID: 108668 Result: Up-regulated in Transcription
  misc_feature: MA Experiment 108668 PARAMETER Experiment Name: At_2mM_SA_cDNA_P Parameter: Plant Line Value: WS
  misc_feature: MA Experiment 108668 PARAMETER Experiment Name: At_2mM_SA_cDNA_P Parameter: Timepoint (hr) Value: 6
  misc_feature: MA Experiment 108668 PARAMETER Experiment Name: At_2mM_SA_cDNA_P Parameter: Treatment Value: 2mM SA vs. No Treatment
  misc_feature: MA Experiment ID: 20000112 Result: Up-regulated in Transcription
  misc_feature: MA Experiment 20000112 PARAMETER Experiment Name: At_42deg_Heat_cDNA_P Parameter: Temperature (deg C) Value: 42 vs. 22
  misc_feature: MA Experiment 20000112 PARAMETER Experiment Name: At_42deg_Heat_cDNA_P Parameter: Timepoint (hr) Value: 2
  misc_feature: MA Experiment 20000112 PARAMETER Experiment Name: At_42deg_Heat_cDNA_P Parameter: Tissue Value: Aerial
  misc_feature: MA Experiment ID: 20000144 Result: Up-regulated in Transcription
  misc_feature: MA Experiment 20000144 PARAMETER Experiment Name: At_42deg_Heat_cDNA_P Parameter: Temperature (deg C) Value: 42 vs. 22
  misc_feature: MA Experiment 20000144 PARAMETER Experiment Name: At_42deg_Heat_cDNA_P Parameter: Timepoint (hr) Value: 1
  misc_feature: MA Experiment 20000144 PARAMETER Experiment Name: At_42deg_Heat_cDNA_P Parameter: Tissue Value: Aerial
  misc_feature: MA Experiment ID: 20000180 Result: Up-regulated in Transcription
  misc_feature: MA Experiment 20000180 PARAMETER Experiment Name: At_Germinating_Seeds_P Parameter: Age (hr) Value: 24 vs. 0
  misc_feature: MA Experiment 20000180 PARAMETER Experiment Name: At_Germinating_Seeds_P Parameter: Tissue Value: Germinating Seeds
  misc_feature: MA Experiment ID: 20000182 Result: Up-regulated in Transcription
  misc_feature: MA Experiment 20000182 PARAMETER Experiment Name: At_2mM_SA_P Parameter: Age (day) Value: 14
  misc_feature: MA Experiment 20000182 PARAMETER Experiment Name: At_2mM_SA_P Parameter: Organism Value: A. thaliana
  misc_feature: MA Experiment 20000182 PARAMETER Experiment Name: At_2mM_SA_P Parameter: Plant Line Value: WS
  misc_feature: MA Experiment 20000182 PARAMETER Experiment Name: At_2mM_SA_P Parameter: Timepoint (hr) Value: 6
  misc_feature: MA Experiment 20000182 PARAMETER Experiment Name: At_2mM_SA_P Parameter: Tissue Value: Aerial
  misc_feature: MA Experiment 20000182 PARAMETER Experiment Name: At_2mM_SA_P Parameter: Treatment Value: 2mM SA vs. No Treatment
  misc_feature: MA Experiment ID: 20000185 Result: Up-regulated in Transcription
  misc_feature: MA Experiment 20000185 PARAMETER Experiment Name: At_Roots__P Parameter: Age (day) Value: 7 vs. 21
  misc_feature: MA Experiment 20000185 PARAMETER Experiment Name: At_Roots__P Parameter: Organism Value: A. thaliana
  misc_feature: MA Experiment 20000185 PARAMETER Experiment Name: At_Roots__P Parameter: Tissue Value: Roots vs. Whole Plant
  misc_feature: MA Experiment ID: 20000451 Result: Down-regulated in Transcription
  misc_feature: MA Experiment 20000451 PARAMETER Experiment Name: At_CS6879_Shoots-Roots_P Parameter: Age (day) Value: 14
  misc_feature: MA Experiment 20000451 PARAMETER Experiment Name: At_CS6879_Shoots-Roots_P Parameter: Organism Value: A. thaliana
  misc_feature: MA Experiment 20000451 PARAMETER Experiment Name: At_CS6879_Shoots-Roots_P Parameter: Plant Line Value: CS6879 vs. WS
  misc_feature: MA Experiment 20000451 PARAMETER Experiment Name: At_CS6879_Shoots-Roots_P Parameter: Tissue Value: Roots
  misc_feature: MA Experiment ID: 20000709 Result: Up-regulated in Transcription
  misc_feature: MA Experiment 20000709 PARAMETER Experiment Name: At_15mM_NH4NO3_L-to-H_P Parameter: Age (hr) Value: 14
  misc_feature: MA Experiment 20000709 PARAMETER Experiment Name: At_15mM_NH4NO3_L-to-H_P Parameter: Organism Value: A. thaliana
  misc_feature: MA Experiment 20000709 PARAMETER Experiment Name: At_15mM_NH4NO3_L-to-H_P Parameter: Plant Line Value: WS
  misc_feature: MA Experiment 20000709 PARAMETER Experiment Name: At_15mM_NH4NO3_L-to-H_P Parameter: Timepoint (hr) Value: 4
  misc_feature: MA Experiment 20000709 PARAMETER Experiment Name: At_15mM_NH4NO3_L-to-H_P Parameter: Tissue Value: Aerial
  misc_feature: MA Experiment 20000709 PARAMETER Experiment Name: At_15mM_NH4NO3_L-to-H_P Parameter: Treatment Value: 15mM NH4NO3 vs. 30mM Mannitol
aagatcacggaaccacgccaggatccttccgccgtcggcgacgtcgctcctgacgtcacctcaacacgtaaaccacacaattaagtttattcctctctctctccgtcaacttaaaccggtgtttgtatataaatctgattgatatagaaatcgaaactcaaattggagaacattcgagaagctttggatttttgaatcacgaagacatggaaaaaacagaatctgtatcaggaaaggggaagagagtgattgttatcggcggcggaatcgccggctctctcgcttcgaaatttcttcaattcgattccgatctcaccctcattgatccgaaggagtattttgagattatttgggcaagtttaaggtcaatggtagagccagcttttgctgaaagatcggtgataaaccacaagaagtatttacaaaatggtcgtgttgtgacttctccagcggttaatatcacagacaccgatgttttgaccgcggatggtcttgtctttgggtatgattatcttgttattgctactggtcacaatgatgtgcttcctaaaactaggcaagagaagttatctcaataccaaacagaacatgagaagatcaagtcatctgagtcgattctgattgttggtggaggtccgtcgggtgtggagctcgctgcggagatagctgtcgatttccctgagaaaaaggttactatagtacacaatggaccgagattgctggaatttgttggtcagaaagctgcagacaaggcattagactggatgaagtccaagagagttgaagtgatattgaaccaaagggttgatttgagttcagcttcagatgggagtaaaacgtaccgaacatcgggtggagagacgatacacgcggattgtcacttcctctgtactggaaaacctttgtcttcagaatggctaaaaggaactgttctgaaagataacttggatggcaaaggaaggcttatggtcgatgagtacttgagagttaagggtcgcaagaatgtattcgctattggtgatattactgatgtcccggagatgaaacaaggctacattgctgagaaacacgcctctgtagctacaaagaacataaagttgttgatgtctggtgggaacgagaagaagatgtcgacttacaagcctggtccggacattgccataatatctttaggaagaaaggactcggttgctcagttcccattcatgacagtctcgggttgcatacctggtttgatcaaatctaaggatctgtttgtcgggaagacgaggaaggcaagaggtctggatcctaaccttgtggagccttgagtgattgtgcttatcttcatgatgagattcttcttgtgcaggcgcatttcgtcgtttatttcatcacacgtttgttgtatgttgatttggtccactctcctgtttgtggattctcagagtggagtgttgtttgcttttgttgtaacatgatttgtaaagaatctgttcgatttctctaaaaggaaccaaagttgt

SEQ ID NO: 103007 - protein, 367 aa, Arabidopsis thaliana; identical to SEQ ID NO: 40394
  peptide (1)..(367): Ceres Seq. ID no. 13611763
  misc_feature (13)..(284): Pfam Name: Pyridine nucleotide-disulphide oxidoreductase Pfam Description: Pyridine nucleotide-disulphide oxidoreductase
  misc_feature (1)..(367): Homolog of NCBI NO: 15229901 NR Description: pyridine nucleotide-disulphide oxidoreductase
  misc_feature (1)..(365): Homolog of NCBI NO: 26450665 NR Description: unknown protein [Arabidopsis thaliana]
  misc_feature (1)..(365): Homolog of NCBI NO: 22326972 NR Description: pyridine nucleotide-disulphide oxidoreductase [Arabidopsis thaliana] >gi|13374873|emb|CAC34507.1| putative
  misc_feature (42)..(362): Homolog of NCBI NO: 34581771 NR Description: pyridine nucleotide-disulphide oxidoreductase
  misc_feature (157)..(360): Homolog of NCBI NO: 40641605 NR Description: putative pyridine nucleotide-disulphide
  misc_feature (6)..(362): Homolog of NCBI NO: 14318424 NR Description: apoptosis-inducing factor (AIF)-homologous
  misc_feature (6)..(362): Homolog of NCBI NO: 30017355 NR Description: RIKEN cDNA 5430437E11 [Mus musculus]
  misc_feature (6)..(316): Homolog of NCBI NO: 24418885 NR Description: RIKEN cDNA 5430437E11 [Mus musculus]
  misc_feature (12)..(348): Homolog of NCBI NO: 27764291 NR Description: unnamed protein product [Podospora anserina]
  misc_feature (227)..(362): Homolog of NCBI NO: 34852510 NR Description: similar to apoptosis-inducing factor

SEQ ID NO: 103008 - protein, 313 aa, Arabidopsis thaliana; identical to SEQ ID NO: 40395
  peptide (1)..(313): Ceres Seq. ID no. 13611764
  misc_feature (1)..(230): Pfam Name: Pyridine nucleotide-disulphide oxidoreductase Pfam Description: Pyridine nucleotide-disulphide oxidoreductase
  misc_feature (1)..(313): Homolog of NCBI NO: 15229901 NR Description: pyridine nucleotide-disulphide oxidoreductase
  misc_feature (1)..(311): Homolog of NCBI NO: 26450665 NR Description: unknown protein [Arabidopsis thaliana]
  misc_feature (1)..(311): Homolog of NCBI NO: 22326972 NR Description: pyridine nucleotide-disulphide oxidoreductase [Arabidopsis thaliana] >gi|13374873|emb|CAC34507.1| putative
  misc_feature (1)..(308): Homolog of NCBI NO: 34581771 NR Description: pyridine nucleotide-disulphide oxidoreductase
  misc_feature (103)..(306): Homolog of NCBI NO: 40641605 NR Description: putative pyridine nucleotide-disulphide
  misc_feature (1)..(308): Homolog of NCBI NO: 14318424 NR Description: apoptosis-inducing factor (AIF)-homologous
  misc_feature (1)..(308): Homolog of NCBI NO: 30017355 NR Description: RIKEN cDNA 5430437E11 [Mus musculus]
  misc_feature (1)..(262): Homolog of NCBI NO: 24418885 NR Description: RIKEN cDNA 5430437E11 [Mus musculus]
  misc_feature (1)..(294): Homolog of NCBI NO: 27764291 NR Description: unnamed protein product [Podospora anserina]
  misc_feature (173)..(308): Homolog of NCBI NO: 34852510 NR Description: similar to apoptosis-inducing factor

SEQ ID NO: 103009 - DNA, 1864 bp, Arabidopsis thaliana
  misc_feature (1)..(1864): Ceres Seq. ID no. 13611775
  misc_feature: MA Experiment ID: 108488 Result: Down-regulated in Transcription
  misc_feature: MA Experiment ID: 108489 Result: Up-regulated in Transcription
  misc_feature: MA Experiment ID: 108572 Result: Up-regulated in Transcription
  misc_feature: MA Experiment 108572 PARAMETER Experiment Name: At_Drought_cDNA_P Parameter: Timepoint (hr) Value: 1
  misc_feature: MA Experiment 108572 PARAMETER Experiment Name: At_Drought_cDNA_P Parameter: Tissue Value: Aerial
  misc_feature: MA Experiment 108572 PARAMETER Experiment Name: At_Drought_cDNA_P Parameter: Treatment Value: Drought vs. No Drought
  misc_feature: MA Experiment ID: 108573 Result: Up-regulated in Transcription
  misc_feature: MA Experiment 108573 PARAMETER Experiment Name: At_Drought_cDNA_P Parameter: Timepoint (hr) Value: 6
  misc_feature: MA Experiment 108573 PARAMETER Experiment Name: At_Drought_cDNA_P Parameter: Tissue Value: Aerial
  misc_feature: MA Experiment 108573 PARAMETER Experiment Name: At_Drought_cDNA_P Parameter: Treatment Value: Drought vs. No Drought
  misc_feature: MA Experiment ID: 108594 Result: Down-regulated in Transcription
  misc_feature: MA Experiment 108594 PARAMETER Experiment Name: At_Ler-rhl_Root_cDNA_P Parameter: Plant Line Value: null
  misc_feature: MA Experiment ID: 20000069 Result: Down-regulated in Transcription
  misc_feature: MA Experiment 20000069 PARAMETER Experiment Name: At_100uM_ABA_Mutants_cDNA_P Parameter: Plant Line Value: CS23
  misc_feature: MA Experiment 20000069 PARAMETER Experiment Name: At_100uM_ABA_Mutants_cDNA_P Parameter: Timepoint (hr) Value: 6
  misc_feature: MA Experiment 20000069 PARAMETER Experiment Name: At_100uM_ABA_Mutants_cDNA_P Parameter: Tissue Value: Aerial
  misc_feature: MA Experiment 20000069 PARAMETER Experiment Name: At_100uM_ABA_Mutants_cDNA_P Parameter: Treatment Value: 100uM ABA vs. No Treatment
  misc_feature: MA Experiment ID: 20000089 Result: Down-regulated in Transcription
  misc_feature: MA Experiment ID: 20000111 Result: Up-regulated in Transcription
  misc_feature: MA Experiment 20000111 PARAMETER Experiment Name: At_42deg_Heat_cDNA_P Parameter: Temperature (deg C) Value: 42 vs. 22
  misc_feature: MA Experiment 20000111 PARAMETER Experiment Name: At_42deg_Heat_cDNA_P Parameter: Timepoint (hr) Value: 6
  misc_feature: MA Experiment 20000111 PARAMETER Experiment Name: At_42deg_Heat_cDNA_P Parameter: Tissue Value: Aerial
  misc_feature: MA Experiment ID: 20000113 Result: Up-regulated in Transcription
  misc_feature: MA Experiment 20000113 PARAMETER Experiment Name: At_42deg_Heat_cDNA_P Parameter: Temperature (deg C) Value: 42 vs. 22
  misc_feature: MA Experiment 20000113 PARAMETER Experiment Name: At_42deg_Heat_cDNA_P Parameter: Timepoint (hr) Value: 8
  misc_feature: MA Experiment 20000113 PARAMETER Experiment Name: At_42deg_Heat_cDNA_P Parameter: Tissue Value: Aerial
  misc_feature: MA Experiment ID: 20000213 Result: Down-regulated in Transcription
  misc_feature: MA Experiment 20000213 PARAMETER Experiment Name: At_4deg_Cold_P Parameter: Timepoint (hr) Value: 2
  misc_feature: MA Experiment ID: 20001560 Result: Down-regulated in Transcription
  misc_feature: MA Experiment 20001560 PARAMETER Experiment Name: At_Drought_Soil_Dry_P Parameter: Age (day) Value: 28
  misc_feature: MA Experiment 20001560 PARAMETER Experiment Name: At_Drought_Soil_Dry_P Parameter: Organism Value: A. thaliana
  misc_feature: MA Experiment 20001560 PARAMETER Experiment Name: At_Drought_Soil_Dry_P Parameter: Plant Line Value: WS
  misc_feature: MA Experiment 20001560 PARAMETER Experiment Name: At_Drought_Soil_Dry_P Parameter: Post Timepoint (hr) Value: None
  misc_feature: MA Experiment 20001560 PARAMETER Experiment Name: At_Drought_Soil_Dry_P Parameter: Post-Treatment Value: None
  misc_feature: MA Experiment 20001560 PARAMETER Experiment Name: At_Drought_Soil_Dry_P Parameter: Timepoint (day) Value: 14
  misc_feature: MA Experiment 20001560 PARAMETER Experiment Name: At_Drought_Soil_Dry_P Parameter: Treatment Value: Drought vs. No Drought
  misc_feature: MA Experiment ID: 20001905 Result: Up-regulated in Transcription
  misc_feature: MA Experiment 20001905 PARAMETER Experiment Name: At_Drought_Reproduction_P Parameter: Age (day) Value: 40
  misc_feature: MA Experiment 20001905 PARAMETER Experiment Name: At_Drought_Reproduction_P Parameter: Organism Value: A. thaliana
  misc_feature: MA Experiment 20001905 PARAMETER Experiment Name: At_Drought_Reproduction_P Parameter: Plant Line Value: WS
  misc_feature: MA Experiment 20001905 PARAMETER Experiment Name: At_Drought_Reproduction_P Parameter: Timepoint (day) Value: 10
  misc_feature: MA Experiment 20001905 PARAMETER Experiment Name: At_Drought_Reproduction_P Parameter: Tissue Value: Rosettes
  misc_feature: MA Experiment 20001905 PARAMETER Experiment Name: At_Drought_Reproduction_P Parameter: Treatment Value: Drought vs. No Drought
atggagaagcttgaatcacggagaagactagtcgtattaatggaaactccgtgtaaatcgaatgagcttcttcttttggatgggtgtgttttatgtatggatggatttaagggtaaaagaacatctagaccgattatgccacggaaagcaagtggtcttgtgttacatgagaatatgaagaagaaagatgataagagtgttgtccctatctgcagtagaattggttgcagttccagggttagttccactaagggagatttgattgatcataaagcaaaagctactgtgtcttcgtttcgatctcctttgagtggaaaggaaaccgttggtagttcatctcgaagtatgagtggatttggtggtacaaaaaaggcttccaaggttattggtaggagacaactctcttctcttttggacatggattcttcagagagcagcagtgttaatgaagactcacccacaagtgagcgttcccttcctcgtggaaagacaaaagaaagcactattagtgttcattctgaaagtagtgtctctggagaagttgtgacagaggcaggaagctcgagtagaggaactggtagaagcattcatcagagacctgatttggtctcccgagatgctcgtgtgagtaatagtgagcaaaatgcaagagctagtgtgaacaagaatggattaagagacttgaggaacaaatctggttctgatgttcttccatctaattcaactccgacaagaaaaagtaacatctttagaaagaaaacctctgatggtgagagcagctcttcgagtagagggaataagacggaaggatcagtggttgggggaaagaatattagttcccctcaggggaatggcatcaccatgtctgaacctaggaggaacagaaacttaccaagtgttagggacaacagtgttgtttcaagtagtactaggagatcaactggttattatggtagaacaggacgtgctggagcggttgcaacactacaagcacctcggcctccaacaagagctgatctcaatccttctagatcggcagaagcttcgcgtagtcctttaaatagttacagtaggccaatcagtagtaatggcaggttacgtagcctgatgatgcctggtagcccctcagaagccggcctttctcgctctttgatgaaccgtgatactttcagacggtataacatgaatggagttgcagaggtattgttggccctggaaaggattgagcaagacgaagagcttacatacgagcaattggctgttttagagaccaatctgttcttaaatggtatgagcagcttccacgatcagcatagagatatgaggcttgacattgacaacatgtcgtatgaggaactgttagcattagaggagaaaatgggtacagtgagcactgctctaagcgaagaagcgcttctgaaaagcctcaagtcaagtatttaccgtccaaacgatgaatccgacgacatttgcctgaacaaagatgatgatgtcaagtgcagcatttgccaggaagagtatgttgatggagatgaagtagggactttgccttgccaacataaataccacgtgagctgcgcgcaacaatggctacggatgaagaattggtgtcctatatgtaaaacctctgcagaatctcagccacatccattttcatgatgatgggattgcagagacatttaccaaagtgtttgtgtctacttccactaccttgctctctattatttgtacataaaaggttttcttttttacttacacacaattgggaacaaatagaaaataagatcaggtggacaaattattgttttcaccttgtattggttcgtaatttcaacaatatttggtttaattccatatatagttt

SEQ ID NO: 103010 - protein, 552 aa, Arabidopsis thaliana
  peptide (1)..(552): Ceres Seq. ID no. 13611776
  misc_feature (500)..(540): Pfam Name: Zinc finger, C3HC4 type (RING finger) Pfam Description: Zinc finger, C3HC4 type (RING finger)
  misc_feature (33)..(552): Homolog of NCBI NO: 30689641 NR Description: RING finger-related protein [Arabidopsis thaliana]
  misc_feature (33)..(547): Homolog of NCBI NO: 22326712 NR Description: Pspzf zinc finger protein - like [Arabidopsis
  misc_feature (33)..(547): Homolog of NCBI NO: 20466428 NR Description: Pspzf zinc finger protein-like [Arabidopsis
  misc_feature (59)..(547): Homolog of NCBI NO: 10129643 NR Description: Pspzf zinc finger protein-like [Arabidopsis
  misc_feature (130)..(546): Homolog of NCBI NO: 7486381 NR Description: hypothetical protein F3L17.20 - Arabidopsis >gi|5262756|emb|CAB45904.1| putative protein [Arabidopsis >gi|7270048|emb|CAB79863.1| putative protein [Arabidopsis
  misc_feature (130)..(546): Homolog of NCBI NO: 18417809 NR Description: expressed protein [Arabidopsis thaliana] AT4g31450/F3L17_20 [Arabidopsis thaliana]
  misc_feature (177)..(546): Homolog of NCBI NO: 15235211 NR Description: expressed protein [Arabidopsis thaliana]
  misc_feature (342)..(548): Homolog of NCBI NO: 15226553 NR Description: RING zinc finger protein -related [Arabidopsis
  misc_feature (239)..(544): Homolog of NCBI NO: 38344153 NR Description: OSJNBa0041A02.20 [Oryza sativa (japonica
  misc_feature (215)..(543): Homolog of NCBI NO: 15239131 NR Description: expressed protein [Arabidopsis thaliana] contains similarity to RING zinc finger protein~gene_id:MBD2.14
MEKLESRRRLVVLMETPCKSNELLLLDGCVLCMDGFKGKRTSRPIMPRKASGLVLHENMKKKDDKSVVPICSRIGCSSRVSSTKGDLIDHKAKATVSSFRSPLSGKETVGSSSRSMSGFGGTKKASKVIGRRQLSSLLDMDSSESSSVNEDSPTSERSLPRGKTKESTISVHSESSVSGEVVTEAGSSSRGTGRSIHQRPDLVSRDARVSNSEQNARASVNKNGLRDLRNKSGSDVLPSNSTPTRKSNIFRKKTSDGESSSSSRGNKTEGSVVGGKNISSPQGNGITMSEPRRNRNLPSVRDNSVVSSSTRRSTGYYGRTGRAGAVATLQAPRPPTRADLNPSRSAEASRSPLNSYSRPISSNGRLRSLMMPGSPSEAGLSRSLMNRDTFRRYNMNGVAEVLLALERIEQDEELTYEQLAVLETNLFLNGMSSFHDQHRDMRLDIDNMSYEELLALEEKMGTVSTALSEEALLKSLKSSIYRPNDESDDICLNKDDDVKCSICQEEYVDGDEVGTLPCQHKYHVSCAQQWLRMKNWCPICKTSAESQPHPFS

SEQ ID NO: 103011 - protein, 539 aa, Arabidopsis thaliana
  peptide (1)..(539): Ceres Seq. ID no. 13611777
  misc_feature (487)..(527): Pfam Name: Zinc finger, C3HC4 type (RING finger) Pfam Description: Zinc finger, C3HC4 type (RING finger)
  misc_feature (20)..(539): Homolog of NCBI NO: 30689641 NR Description: RING finger-related protein [Arabidopsis thaliana]
  misc_feature (20)..(534): Homolog of NCBI NO: 22326712 NR Description: Pspzf zinc finger protein - like [Arabidopsis
  misc_feature (20)..(534): Homolog of NCBI NO: 20466428 NR Description: Pspzf zinc finger protein-like [Arabidopsis
  misc_feature (46)..(534): Homolog of NCBI NO: 10129643 NR Description: Pspzf zinc finger protein-like [Arabidopsis
  misc_feature (117)..(533): Homolog of NCBI NO: 7486381 NR Description: hypothetical protein F3L17.20 - Arabidopsis >gi|5262756|emb|CAB45904.1| putative protein [Arabidopsis >gi|7270048|emb|CAB79863.1| putative protein [Arabidopsis
  misc_feature (117)..(533): Homolog of NCBI NO: 18417809 NR Description: expressed protein [Arabidopsis thaliana] AT4g31450/F3L17_20 [Arabidopsis thaliana]
  misc_feature (164)..(533): Homolog of NCBI NO: 15235211 NR Description: expressed protein [Arabidopsis thaliana]
  misc_feature (329)..(535): Homolog of NCBI NO: 15226553 NR Description: RING zinc finger protein -related [Arabidopsis
  misc_feature (226)..(531): Homolog of NCBI NO: 38344153 NR Description: OSJNBa0041A02.20 [Oryza sativa (japonica
  misc_feature (202)..(530): Homolog of NCBI NO: 15239131 NR Description: expressed protein [Arabidopsis thaliana] contains similarity to RING zinc finger protein~gene_id:MBD2.14
METPCKSNELLLLDGCVLCMDGFKGKRTSRPIMPRKASGLVLHENMKKKDDKSVVPICSRIGCSSRVSSTKGDLIDHKAKATVSSFRSPLSGKETVGSSSRSMSGFGGTKKASKVIGRRQLSSLLDMDSSESSSVNEDSPTSERSLPRGKTKESTISVHSESSVSGEVVTEAGSSSRGTGRSIHQRPDLVSRDARVSNSEQNARASVNKNGLRDLRNKSGSDVLPSNSTPTRKSNIFRKKTSDGESSSSSRGNKTEGSVVGGKNISSPQGNGITMSEPRRNRNLPSVRDNSVVSSSTRRSTGYYGRTGRAGAVATLQAPRPPTRADLNPSRSAEASRSPLNSYSRPISSNGRLRSLMMPGSPSEAGLSRSLMNRDTFRRYNMNGVAEVLLALERIEQDEELTYEQLAVLETNLFLNGMSSFHDQHRDMRLDIDNMSYEELLALEEKMGTVSTALSEEALLKSLKSSIYRPNDESDDICLNKDDDVKCSICQEEYVDGDEVGTLPCQHKYHVSCAQQWLRMKNWCPICKTSAESQPHPFS

SEQ ID NO: 103012 - protein, 520 aa, Arabidopsis thaliana; identical to SEQ ID NO: 77854
  peptide (1)..(520): Ceres Seq. ID no. 13611778
  misc_feature (468)..(508): Pfam Name: Zinc finger, C3HC4 type (RING finger) Pfam Description: Zinc finger, C3HC4 type (RING finger)
  misc_feature (1)..(520): Homolog of NCBI NO: 30689641 NR Description: RING finger-related protein [Arabidopsis thaliana]
  misc_feature (1)..(515): Homolog of NCBI NO: 22326712 NR Description: Pspzf zinc finger protein - like [Arabidopsis
  misc_feature (1)..(515): Homolog of NCBI NO: 20466428 NR Description: Pspzf zinc finger protein-like [Arabidopsis
  misc_feature (27)..(515): Homolog of NCBI NO: 10129643 NR Description: Pspzf zinc finger protein-like [Arabidopsis
  misc_feature (98)..(514): Homolog of NCBI NO: 7486381 NR Description: hypothetical protein F3L17.20 - Arabidopsis >gi|5262756|emb|CAB45904.1| putative protein [Arabidopsis >gi|7270048|emb|CAB79863.1| putative protein [Arabidopsis
  misc_feature (98)..(514): Homolog of NCBI NO: 18417809 NR Description: expressed protein [Arabidopsis thaliana] AT4g31450/F3L17_20 [Arabidopsis thaliana]
  misc_feature (145)..(514): Homolog of NCBI NO: 15235211 NR Description: expressed protein [Arabidopsis thaliana]
  misc_feature (310)..(516): Homolog of NCBI NO: 15226553 NR Description: RING zinc finger protein -related [Arabidopsis
  misc_feature (207)..(512): Homolog of NCBI NO: 38344153 NR Description: OSJNBa0041A02.20 [Oryza sativa (japonica
  misc_feature (183)..(511): Homolog of NCBI NO: 15239131 NR Description: expressed protein [Arabidopsis thaliana] contains similarity to RING zinc finger protein~gene_id:MBD2.14

SEQ ID NO: 103013 - DNA, 1293 bp, Arabidopsis thaliana
  misc_feature (1)..(1293): Ceres Seq. ID no. 13611783
  misc_feature: MA Experiment ID: 108435 Result: Down-regulated in Transcription
  misc_feature: MA Experiment 108435 PARAMETER Experiment Name: At_stm_Mutants_cDNA_P Parameter: Plant Line Value: wt Landsburg vs stm
  misc_feature: MA Experiment 108435 PARAMETER Experiment Name: At_stm_Mutants_cDNA_P Parameter: Tissue Value: Shoot Apical Meristem Region
  misc_feature: MA Experiment ID: 108462 Result: Up-regulated in Transcription
  misc_feature: MA Experiment 108462 PARAMETER Experiment Name: At_Germinating_Seeds_cDNA_P Parameter: Age (day) Value: 2 vs. 0
  misc_feature: MA Experiment 108462 PARAMETER Experiment Name: At_Germinating_Seeds_cDNA_P Parameter: Tissue Value: Germinating Seeds
  misc_feature: MA Experiment ID: 108595 Result: Down-regulated in Transcription
  misc_feature: MA Experiment 108595 PARAMETER Experiment Name: At_Ler-pi_Ovule_cDNA_P Parameter: Plant Line Value: null
  misc_feature: MA Experiment ID: 20000087 Result: Down-regulated in Transcription
  misc_feature: MA Experiment 20000087 PARAMETER Experiment Name: At_100uM_ABA_Mutants_cDNA_P Parameter: Plant Line Value: WS
  misc_feature: MA Experiment 20000087 PARAMETER Experiment Name: At_100uM_ABA_Mutants_cDNA_P Parameter: Timepoint (hr) Value: 6
  misc_feature: MA Experiment 20000087 PARAMETER Experiment Name: At_100uM_ABA_Mutants_cDNA_P Parameter: Tissue Value: Aerial
  misc_feature: MA Experiment 20000087 PARAMETER Experiment Name: At_100uM_ABA_Mutants_cDNA_P Parameter: Treatment Value: 100uM ABA vs. No Treatment
  misc_feature: MA Experiment ID: 20000185 Result: Down-regulated in Transcription
  misc_feature: MA Experiment 20000185 PARAMETER Experiment Name: At_Roots__P Parameter: Age (day) Value: 7 vs. 21
  misc_feature: MA Experiment 20000185 PARAMETER Experiment Name: At_Roots__P Parameter: Organism Value: A. thaliana
  misc_feature: MA Experiment 20000185 PARAMETER Experiment Name: At_Roots__P Parameter: Tissue Value: Roots vs. Whole Plant
  misc_feature: MA Experiment ID: 20000439 Result: Down-regulated in Transcription
  misc_feature: MA Experiment 20000439 PARAMETER Experiment Name: At_Roots__P Parameter: Age (day) Value: 14 vs. 21
  misc_feature: MA Experiment 20000439 PARAMETER Experiment Name: At_Roots__P Parameter: Organism Value: A. thaliana
  misc_feature: MA Experiment 20000439 PARAMETER Experiment Name: At_Roots__P Parameter: Tissue Value: Roots vs. Whole Plant
  misc_feature: MA Experiment ID: 20001557 Result: Down-regulated in Transcription
  misc_feature: MA Experiment 20001557 PARAMETER Experiment Name: At_Drought_Soil_Dry_P Parameter: Age (day) Value: 27
  misc_feature: MA Experiment 20001557 PARAMETER Experiment Name: At_Drought_Soil_Dry_P Parameter: Organism Value: A. thaliana
  misc_feature: MA Experiment 20001557 PARAMETER Experiment Name: At_Drought_Soil_Dry_P Parameter: Plant Line Value: WS
  misc_feature: MA Experiment 20001557 PARAMETER Experiment Name: At_Drought_Soil_Dry_P Parameter: Post Timepoint (hr) Value: 3
  misc_feature: MA Experiment 20001557 PARAMETER Experiment Name: At_Drought_Soil_Dry_P Parameter: Post-Treatment Value: Re-Water vs. No Drought
  misc_feature: MA Experiment 20001557 PARAMETER Experiment Name: At_Drought_Soil_Dry_P Parameter: Timepoint (day) Value: 13
  misc_feature: MA Experiment 20001557 PARAMETER Experiment Name: At_Drought_Soil_Dry_P Parameter: Treatment Value: Drought vs. No Drought
agaccacaaacatcctccaataagccaaaagaagacgagagaaggagaagagtcgaaatcgccattgaaatggctctcaaagcttcacctgttaccggattattccctcctctccgtcctactgcttcttcttccccttcgacttcttctaatcgcccttgttccctcaggattctccctctcagaacatctttcttcggtaactcaagtggagcgctgagagtgaatgtgttgagattagcttgtgataatagactcaggtgcaatggtcatggtgctactatgaatctttttgaacgattttctagagtggtcaagtcatatgcaaatgcgctcataagctcttttgaagacccggagaaaatcctggagcaaactgtcattgaaatgaatagtgatttgacaaagatgcgtcaagccactgcacaggttttagcatcacaaaagcagttacagaacaaatataaagctgcacagcagtcttctgatgattggtacaaaagagcacaacttgctcttgcaaaaggagatgaggatcttgcacgtgaggcccttaaacgacgaaagtcttttgctgacaacgctactgctttgaaaactcaactagatcagcaaaaaggtgttgtcgacaatcttgtttcaaatacaaggctcttggagagtaagatacaagaggcaaaagcaaagaaagatacgctccttgcacgtgctcgcactgctaagactgcaaccaaagtgcaagagatgatagggacagtaaatacaagcggtgctctttcagcttttgagaaaatggaggagaaagttatggctatggagtctgaagcagatgcactaactcagattggaaccgatgaactcgaggggaagtttcaaatgcttgaaacttcatctgtggatgatgatcttgcagacttgaagaaagaattgtctggaagctcaaagaaaggagagcttcctccagggagaagcactgttgcagcaagcacgagataccctttcaaagactcagagatcgagaatgagttaaacgaactgcgaaggaaagctaacgacttttagatatcggctgtttccgaattgtgactgggttacattacgttcctgctgtaaactatcttgtgtcttgtagaaagacacaaaaagcatgtgtactcttaaagtaaatatccagctatctaatccccatttatagttgggttatgtacattcagacacttttgaaagtgtggtttccattttgactcactttgtgtcaagtggacacgtttttttataagctgttttactcgc

SEQ ID NO: 103014 - protein, 353 aa, Arabidopsis thaliana
  peptide (1)..(353): Ceres Seq. ID no. 13611784
  misc_feature (96)..(312): Pfam Name: PspA/IM30 family Pfam Description: PspA/IM30 family
  misc_feature (24)..(353): Homolog of NCBI NO: 18408237 NR Description: expressed protein [Arabidopsis thaliana]
  misc_feature (36)..(353): Homolog of NCBI NO: 34907594 NR Description: putative chloroplast membrane-associated 30 kD
  misc_feature (43)..(352): Homolog of NCBI NO: 729842 NR Description: Membrane-associated 30 kDa protein, chloroplast
  misc_feature (95)..(348): Homolog of NCBI NO: 33866411 NR Description: similar to chloroplast membrane-associated 30 kD [Synechococcus sp. WH 8102] >gi|33633189|emb|CAE08394.1| similar
  misc_feature (95)..(333): Homolog of NCBI NO: 37520467 NR Description: unknown protein [Gloeobacter violaceus]
  misc_feature (95)..(349): Homolog of NCBI NO: 17229834 NR Description: similar to chloroplast membrane-associated 30 kD [Nostoc sp. PCC 7120] >gi|25315831|pir||AG2098 hypothetical
  misc_feature (95)..(349): Homolog of NCBI NO: 23040390 NR Description: hypothetical protein [Trichodesmium erythraeum
  misc_feature (95)..(349): Homolog of NCBI NO: 23126177 NR Description: hypothetical protein [Nostoc punctiforme]
  misc_feature (95)..(310): Homolog of NCBI NO: 23126176 NR Description: hypothetical protein [Nostoc punctiforme]
  misc_feature (95)..(310): Homolog of NCBI NO: 23040389 NR Description: hypothetical protein [Trichodesmium erythraeum
RPQTSSNKPKEDERRRRVEIAIEMALKASPVTGLFPPLRPTASSSPSTSSNRPCSLRILPLRTSFFGNSSGALRVNVLRLACDNRLRCNGHGATMNLFERFSRVVKSYANALISSFEDPEKILEQTVIEMNSDLTKMRQATAQVLASQKQLQNKYKAAQQSSDDWYKRAQLALAKGDEDLAREALKRRKSFADNATALKTQLDQQKGVVDNLVSNTRLLESKIQEAKAKKDTLLARARTAKTATKVQEMIGTVNTSGALSAFEKMEEKVMAMESEADALTQIGTDELEGKFQMLETSSVDDDLADLKKELSGSSKKGELPPGRSTVAASTRYPFKDSEIENELNELRRKANDF

SEQ ID NO: 103015 - protein, 330 aa, Arabidopsis thaliana; identical to SEQ ID NO: 21976
  peptide (1)..(330): Ceres Seq. ID no. 13611785
  misc_feature (73)..(289): Pfam Name: PspA/IM30 family Pfam Description: PspA/IM30 family
  misc_feature (1)..(330): Homolog of NCBI NO: 18408237 NR Description: expressed protein [Arabidopsis thaliana]
  misc_feature (13)..(330): Homolog of NCBI NO: 34907594 NR Description: putative chloroplast membrane-associated 30 kD
  misc_feature (20)..(329): Homolog of NCBI NO: 729842 NR Description: Membrane-associated 30 kDa protein, chloroplast
  misc_feature (72)..(325): Homolog of NCBI NO: 33866411 NR Description: similar to chloroplast membrane-associated 30 kD [Synechococcus sp. WH 8102] >gi|33633189|emb|CAE08394.1| similar
  misc_feature (72)..(310): Homolog of NCBI NO: 37520467 NR Description: unknown protein [Gloeobacter violaceus]
  misc_feature (72)..(326): Homolog of NCBI NO: 17229834 NR Description: similar to chloroplast membrane-associated 30 kD [Nostoc sp. PCC 7120] >gi|25315831|pir||AG2098 hypothetical
  misc_feature (72)..(326): Homolog of NCBI NO: 23040390 NR Description: hypothetical protein [Trichodesmium erythraeum
  misc_feature (72)..(326): Homolog of NCBI NO: 23126177 NR Description: hypothetical protein [Nostoc punctiforme]
  misc_feature (72)..(287): Homolog of NCBI NO: 23126176 NR Description: hypothetical protein [Nostoc punctiforme]
  misc_feature (72)..(287): Homolog of NCBI NO: 23040389 NR Description: hypothetical protein [Trichodesmium erythraeum

SEQ ID NO: 103016 - protein, 259 aa, Arabidopsis thaliana; identical to SEQ ID NO: 21977
  peptide (1)..(259): Ceres Seq. ID no. 13611786
  misc_feature (2)..(218): Pfam Name: PspA/IM30 family Pfam Description: PspA/IM30 family
  misc_feature (1)..(259): Homolog of NCBI NO: 18408237 NR Description: expressed protein [Arabidopsis thaliana]
  misc_feature (1)..(259): Homolog of NCBI NO: 34907594 NR Description: putative chloroplast membrane-associated 30 kD
  misc_feature (1)..(258): Homolog of NCBI NO: 729842 NR Description: Membrane-associated 30 kDa protein, chloroplast
  misc_feature (1)..(254): Homolog of NCBI NO: 33866411 NR Description: similar to chloroplast membrane-associated 30 kD [Synechococcus sp. WH 8102] >gi|33633189|emb|CAE08394.1| similar
  misc_feature (1)..(239): Homolog of NCBI NO: 37520467 NR Description: unknown protein [Gloeobacter violaceus]
  misc_feature (1)..(255): Homolog of NCBI NO: 17229834 NR Description: similar to chloroplast membrane-associated 30 kD [Nostoc sp. PCC 7120] >gi|25315831|pir||AG2098 hypothetical
  misc_feature (1)..(255): Homolog of NCBI NO: 23040390 NR Description: hypothetical protein [Trichodesmium erythraeum
  misc_feature (1)..(255): Homolog of NCBI NO: 23126177 NR Description: hypothetical protein [Nostoc punctiforme]
  misc_feature (1)..(216): Homolog of NCBI NO: 23126176 NR Description: hypothetical protein [Nostoc punctiforme]
  misc_feature (1)..(216): Homolog of NCBI NO: 23040389 NR Description: hypothetical protein [Trichodesmium erythraeum

SEQ ID NO: 103017 - DNA, 989 bp, Arabidopsis thaliana
  misc_feature (1)..(989): Ceres Seq. ID no. 13611791
  misc_feature: MA Experiment ID: 108473 Result: Down-regulated in Transcription
  misc_feature: MA Experiment 108473 PARAMETER Experiment Name: At_Drought_Flowers_cDNA_P Parameter: Timepoint (hr) Value: 7 d
  misc_feature: MA Experiment 108473 PARAMETER Experiment Name: At_Drought_Flowers_cDNA_P Parameter: Tissue Value: Flower
  misc_feature: MA Experiment 108473 PARAMETER Experiment Name: At_Drought_Flowers_cDNA_P Parameter: Treatment Value: Drought vs. No Drought
  misc_feature: MA Experiment ID: 108573 Result: Down-regulated in Transcription
  misc_feature: MA Experiment 108573 PARAMETER Experiment Name: At_Drought_cDNA_P Parameter: Timepoint (hr) Value: 6
  misc_feature: MA Experiment 108573 PARAMETER Experiment Name: At_Drought_cDNA_P Parameter: Tissue Value: Aerial
  misc_feature: MA Experiment 108573 PARAMETER Experiment Name: At_Drought_cDNA_P Parameter: Treatment Value: Drought vs. No Drought
  misc_feature: MA Experiment ID: 108577 Result: Down-regulated in Transcription
  misc_feature: MA Experiment 108577 PARAMETER Experiment Name: At_42deg_Heat_cDNA_P Parameter: Temperature (deg C) Value: 42 vs. 22
  misc_feature: MA Experiment 108577 PARAMETER Experiment Name: At_42deg_Heat_cDNA_P Parameter: Timepoint (hr) Value: 6
  misc_feature: MA Experiment 108577 PARAMETER Experiment Name: At_42deg_Heat_cDNA_P Parameter: Tissue Value: Aerial
  misc_feature: MA Experiment ID: 20000111 Result: Down-regulated in Transcription
  misc_feature: MA Experiment 20000111 PARAMETER Experiment Name: At_42deg_Heat_cDNA_P Parameter: Temperature (deg C) Value: 42 vs. 22
  misc_feature: MA Experiment 20000111 PARAMETER Experiment Name: At_42deg_Heat_cDNA_P Parameter: Timepoint (hr) Value: 6
  misc_feature: MA Experiment 20000111 PARAMETER Experiment Name: At_42deg_Heat_cDNA_P Parameter: Tissue Value: Aerial
  misc_feature: MA Experiment ID: 20000112 Result: Down-regulated in Transcription
  misc_feature: MA Experiment 20000112 PARAMETER Experiment Name: At_42deg_Heat_cDNA_P Parameter: Temperature (deg C) Value: 42 vs. 22
  misc_feature: MA Experiment 20000112 PARAMETER Experiment Name: At_42deg_Heat_cDNA_P Parameter: Timepoint (hr) Value: 2
  misc_feature: MA Experiment 20000112 PARAMETER Experiment Name: At_42deg_Heat_cDNA_P Parameter: Tissue Value: Aerial
  misc_feature: MA Experiment ID: 20000113 Result: Down-regulated in Transcription
  misc_feature: MA Experiment 20000113 PARAMETER Experiment Name: At_42deg_Heat_cDNA_P Parameter: Temperature (deg C) Value: 42 vs. 22
  misc_feature: MA Experiment 20000113 PARAMETER Experiment Name: At_42deg_Heat_cDNA_P Parameter: Timepoint (hr) Value: 8
  misc_feature: MA Experiment 20000113 PARAMETER Experiment Name: At_42deg_Heat_cDNA_P Parameter: Tissue Value: Aerial
  misc_feature: MA Experiment ID: 20000171 Result: Down-regulated in Transcription
  misc_feature: MA Experiment 20000171 PARAMETER Experiment Name: At_42deg_Heat_P Parameter: Age (day) Value: 14
  misc_feature: MA Experiment 20000171 PARAMETER Experiment Name: At_42deg_Heat_P Parameter: Organism Value: A. thaliana
  misc_feature: MA Experiment 20000171 PARAMETER Experiment Name: At_42deg_Heat_P Parameter: Plant Line Value: WS
  misc_feature: MA Experiment 20000171 PARAMETER Experiment Name: At_42deg_Heat_P Parameter: Temperature (deg C) Value: 42 vs. 22
  misc_feature: MA Experiment 20000171 PARAMETER Experiment Name: At_42deg_Heat_P Parameter: Timepoint (hr) Value: 1
  misc_feature: MA Experiment 20000171 PARAMETER Experiment Name: At_42deg_Heat_P Parameter: Tissue Value: Aerial
  misc_feature: MA Experiment ID: 20000173 Result: Down-regulated in Transcription
  misc_feature: MA Experiment 20000173 PARAMETER Experiment Name: At_42deg_Heat_P Parameter: Age (day) Value: 14
  misc_feature: MA Experiment 20000173 PARAMETER Experiment Name: At_42deg_Heat_P Parameter: Organism Value: A. thaliana
  misc_feature: MA Experiment 20000173 PARAMETER Experiment Name: At_42deg_Heat_P Parameter: Plant Line Value: WS
  misc_feature: MA Experiment 20000173 PARAMETER Experiment Name: At_42deg_Heat_P Parameter: Temperature (deg C) Value: 42 vs. 22
  misc_feature: MA Experiment 20000173 PARAMETER Experiment Name: At_42deg_Heat_P Parameter: Timepoint (hr) Value: 6
  misc_feature: MA Experiment 20000173 PARAMETER Experiment Name: At_42deg_Heat_P Parameter: Tissue Value: Aerial
  misc_feature: MA Experiment ID: 20000185 Result: Down-regulated in Transcription
  misc_feature: MA Experiment 20000185 PARAMETER Experiment Name: At_Roots__P Parameter: Age (day) Value: 7 vs. 21
  misc_feature: MA Experiment 20000185 PARAMETER Experiment Name: At_Roots__P Parameter: Organism Value: A. thaliana
  misc_feature: MA Experiment 20000185 PARAMETER Experiment Name: At_Roots__P Parameter: Tissue Value: Roots vs. Whole Plant
  misc_feature: MA Experiment ID: 20000437 Result: Down-regulated in Transcription
  misc_feature: MA Experiment 20000437 PARAMETER Experiment Name: At_Drought_P Parameter: Age (day) Value: 8
  misc_feature: MA Experiment 20000437 PARAMETER Experiment Name: At_Drought_P Parameter: Organism Value: A. thaliana
  misc_feature: MA Experiment 20000437 PARAMETER Experiment Name: At_Drought_P Parameter: Plant Line Value: WS
  misc_feature: MA Experiment 20000437 PARAMETER Experiment Name: At_Drought_P Parameter: Timepoint (hr) Value: 24
  misc_feature: MA Experiment 20000437 PARAMETER Experiment Name: At_Drought_P Parameter: Tissue Value: Whole Plant
  misc_feature: MA Experiment 20000437 PARAMETER Experiment Name: At_Drought_P Parameter: Treatment Value: Drought vs. No Drought
  misc_feature: MA Experiment ID: 20000439 Result: Down-regulated in Transcription
  misc_feature: MA Experiment 20000439 PARAMETER Experiment Name: At_Roots__P Parameter: Age (day) Value: 14 vs. 21
  misc_feature: MA Experiment 20000439 PARAMETER Experiment Name: At_Roots__P Parameter: Organism Value: A. thaliana
  misc_feature: MA Experiment 20000439 PARAMETER Experiment Name: At_Roots__P Parameter: Tissue Value: Roots vs. Whole Plant
  misc_feature: MA Experiment ID: 20000451 Result: Down-regulated in Transcription
  misc_feature: MA Experiment 20000451 PARAMETER Experiment Name: At_CS6879_Shoots-Roots_P Parameter: Age (day) Value: 14
  misc_feature: MA Experiment 20000451 PARAMETER Experiment Name: At_CS6879_Shoots-Roots_P Parameter: Organism Value: A. thaliana
  misc_feature: MA Experiment 20000451 PARAMETER Experiment Name: At_CS6879_Shoots-Roots_P Parameter: Plant Line Value: CS6879 vs. WS
  misc_feature: MA Experiment 20000451 PARAMETER Experiment Name: At_CS6879_Shoots-Roots_P Parameter: Tissue Value: Roots
  misc_feature: MA Experiment ID: 20000452 Result: Down-regulated in Transcription
  misc_feature: MA Experiment 20000452 PARAMETER Experiment Name: At_CS6879_Shoots-Roots_P Parameter: Age (day) Value: 14
  misc_feature: MA Experiment 20000452 PARAMETER Experiment Name: At_CS6879_Shoots-Roots_P Parameter: Organism Value: A. thaliana
  misc_feature: MA Experiment 20000452 PARAMETER Experiment Name: At_CS6879_Shoots-Roots_P Parameter: Plant Line Value: CS6879 vs. WS
  misc_feature: MA Experiment 20000452 PARAMETER Experiment Name: At_CS6879_Shoots-Roots_P Parameter: Tissue Value: Shoots
  misc_feature: MA Experiment ID: 20000495 Result: Down-regulated in Transcription
  misc_feature: MA Experiment 20000495 PARAMETER Experiment Name: At_Guard_Cells_P Parameter: Harvest Date Value: 8/2/2002
  misc_feature: MA Experiment 20000495 PARAMETER Experiment Name: At_Guard_Cells_P Parameter: Organism Value: A. thaliana
  misc_feature: MA Experiment 20000495 PARAMETER Experiment Name: At_Guard_Cells_P Parameter: Tissue Value: Guard Cells vs. Leaves
  misc_feature: MA Experiment ID: 20000573 Result: Down-regulated in Transcription
  misc_feature: MA Experiment 20000573 PARAMETER Experiment Name: At_100uM_ABA_Mutants__P Parameter: Organism Value: A. thaliana
  misc_feature: MA Experiment 20000573 PARAMETER Experiment Name: At_100uM_ABA_Mutants__P Parameter: Plant Line Value: CS22 vs. Ler wt
  misc_feature: MA Experiment 20000573 PARAMETER Experiment Name: At_100uM_ABA_Mutants__P Parameter: Timepoint (hr) Value: N/A
  misc_feature: MA Experiment 20000573 PARAMETER Experiment Name: At_100uM_ABA_Mutants__P Parameter: Tissue Value: Whole Plant
  misc_feature: MA Experiment 20000573 PARAMETER Experiment Name: At_100uM_ABA_Mutants__P Parameter: Treatment Value: None
  misc_feature: MA Experiment ID: 20000574 Result: Down-regulated in Transcription
  misc_feature: MA Experiment 20000574 PARAMETER Experiment Name: At_100uM_ABA_Mutants__P Parameter: Organism Value: A. thaliana
  misc_feature: MA Experiment 20000574 PARAMETER Experiment Name: At_100uM_ABA_Mutants__P Parameter: Plant Line Value: CS23 vs. Ler wt
  misc_feature: MA Experiment 20000574 PARAMETER Experiment Name: At_100uM_ABA_Mutants__P Parameter: Timepoint (hr) Value: N/A
  misc_feature: MA Experiment 20000574 PARAMETER Experiment Name: At_100uM_ABA_Mutants__P Parameter: Tissue Value: Whole Plant
  misc_feature: MA Experiment 20000574 PARAMETER Experiment Name: At_100uM_ABA_Mutants__P Parameter: Treatment Value: None
  misc_feature: MA Experiment ID: 20001248 Result: Down-regulated in Transcription
  misc_feature: MA Experiment 20001248 PARAMETER Experiment Name: At_Far-red-induction_P Parameter: Age (day) Value: 7
  misc_feature: MA Experiment 20001248 PARAMETER Experiment Name: At_Far-red-induction_P Parameter: Light Value: Far-red vs. White
  misc_feature: MA Experiment 20001248 PARAMETER Experiment Name: At_Far-red-induction_P Parameter: Organism Value: A. thaliana
  misc_feature: MA Experiment 20001248 PARAMETER Experiment Name: At_Far-red-induction_P Parameter: Plant Line Value: Columbia
  misc_feature: MA Experiment 20001248 PARAMETER Experiment Name: At_Far-red-induction_P Parameter: Timepoint (hr) Value: 4
  misc_feature: MA Experiment 20001248 PARAMETER Experiment Name: At_Far-red-induction_P Parameter: Tissue Value: Whole Plant
  misc_feature: MA Experiment ID: 20001556 Result: Down-regulated in Transcription
  misc_feature: MA Experiment 20001556 PARAMETER Experiment Name: At_Drought_Soil_Dry_P Parameter: Age (day) Value: 26
  misc_feature: MA Experiment 20001556 PARAMETER Experiment Name: At_Drought_Soil_Dry_P Parameter: Organism Value: A. thaliana
  misc_feature: MA Experiment 20001556 PARAMETER Experiment Name: At_Drought_Soil_Dry_P Parameter: Plant Line Value: WS
  misc_feature: MA Experiment 20001556 PARAMETER Experiment Name: At_Drought_Soil_Dry_P Parameter: Post Timepoint (hr) Value: None
  misc_feature: MA Experiment 20001556 PARAMETER Experiment Name: At_Drought_Soil_Dry_P Parameter: Post-Treatment Value: None
  misc_feature: MA Experiment 20001556 PARAMETER Experiment Name: At_Drought_Soil_Dry_P Parameter: Timepoint (day) Value: 12
  misc_feature: MA Experiment 20001556 PARAMETER Experiment Name: At_Drought_Soil_Dry_P Parameter: Treatment Value: Drought vs. No Drought
  misc_feature: MA Experiment ID: 20001559 Result: Down-regulated in Transcription
  misc_feature: MA Experiment 20001559 PARAMETER Experiment Name: At_Drought_Soil_Dry_P Parameter: Age (day) Value: 28
  misc_feature: MA Experiment 20001559 PARAMETER Experiment Name: At_Drought_Soil_Dry_P Parameter: Organism Value: A. thaliana
  misc_feature: MA Experiment 20001559 PARAMETER Experiment Name: At_Drought_Soil_Dry_P Parameter: Plant Line Value: WS
  misc_feature: MA Experiment 20001559 PARAMETER Experiment Name: At_Drought_Soil_Dry_P Parameter: Post Timepoint (hr) Value: 29
  misc_feature: MA Experiment 20001559 PARAMETER Experiment Name: At_Drought_Soil_Dry_P Parameter: Post-Treatment Value: Re-Water vs. No Drought
  misc_feature: MA Experiment 20001559 PARAMETER Experiment Name: At_Drought_Soil_Dry_P Parameter: Timepoint (day) Value: 14
  misc_feature: MA Experiment 20001559 PARAMETER Experiment Name: At_Drought_Soil_Dry_P Parameter: Treatment Value: Drought vs. No Drought
acataataaaccaaacccaacaaagaaaataaaatttcaaaccaaaaaaaaaaaaaatgagaactttagaagaatcgaagatctctattgtcttcttgttgcttcttctcttctcaatcttcatcagttccagtcaccaggcaaatgaggtattaccagctgaaggagataatgagatgatgatggtgccattgggggaggagaagtttatggtaatgaatgaaacaagaaggaaacttggaagttttcagatatgttcagtttgtacttgttgtggtggtgctaaaggtctttgcttgccttctccttgttgctatgctattaactgcaatatccctaatagaccctttggttactgttctttcactcccaaaacttgcaattgctttggttgccatatctgagatcttctacttcattgtaatttgggagagaaacaagtgaatctaaatcttgattcatcttcaagtgtgaaagggaggaaaaaaagaagaatatctgttcttggtttgagtcttctacttattttttgtctataatttatttttcagtcttcattaaatttcattacctactatctcagcaacatcatcatcctcattaattaattgtctttttgcatttgccattttttcataattttctagggttttttttgttttgagaatcttgttcacacttcaagcaagatttgtttcttcttctctgttcaatcaattctctctatctgtctttctctctctctttttttttttttttcattctcttgtttacttcatcattttgtttcttatgtgttttaagaaagttaaaagttagaatttagcatattttggaaaagagtcattgtttggttaagctggcaattggaagagtatttaatatgatgatgatgatggtattgatggtgatggtggtgatagtgaagctgttaaagttaagtctttgtaatgagtgacatgttaagaaaatggatcaagtttagtgcc

SEQ ID NO: 103018 - protein, 115 aa, Arabidopsis thaliana; identical to SEQ ID NO: 27158
  peptide (1)..(115): Ceres Seq. ID no. 13611792
  misc_feature (1)..(115): Homolog of NCBI NO: 18408246 NR Description: expressed protein [Arabidopsis thaliana]
  misc_feature (1)..(115): Homolog of NCBI NO: 21593890 NR Description: unknown [Arabidopsis thaliana]
  misc_feature (1)..(53): Homolog of NCBI NO: 7487806 NR Description: hypothetical protein T8F5.7 - Arabidopsis
  misc_feature (11)..(115): Homolog of NCBI NO: 21954063 NR Description: unknown protein [Arabidopsis thaliana]
  misc_feature (13)..(115): Homolog of NCBI NO: 34906984 NR Description: P0413C03.15 [Oryza sativa (japonica
  misc_feature (4)..(115): Homolog of NCBI NO: 18412619 NR Description: expressed protein [Arabidopsis thaliana]

SEQ ID NO: 103019 - protein, 75 aa, Arabidopsis thaliana; identical to SEQ ID NO: 27159
  peptide (1)..(75): Ceres Seq. ID no. 13611793
  misc_feature (1)..(75): Homolog of NCBI NO: 18408246 NR Description: expressed protein [Arabidopsis thaliana]
  misc_feature (1)..(75): Homolog of NCBI NO: 21593890 NR Description: unknown [Arabidopsis thaliana]
  misc_feature (1)..(13): Homolog of NCBI NO: 7487806 NR Description: hypothetical protein T8F5.7 - Arabidopsis
  misc_feature (1)..(75): Homolog of NCBI NO: 21954063 NR Description: unknown protein [Arabidopsis thaliana]
  misc_feature (1)..(75): Homolog of NCBI NO: 34906984 NR Description: P0413C03.15 [Oryza sativa (japonica
  misc_feature (1)..(75): Homolog of NCBI NO: 18412619 NR Description: expressed protein [Arabidopsis thaliana]

SEQ ID NO: 103020 - protein, 74 aa, Arabidopsis thaliana
  peptide (1)..(74): Ceres Seq. ID no. 13611794
  misc_feature (24)..(70): Homolog of NCBI NO: 7487806 NR Description: hypothetical protein T8F5.7 - Arabidopsis
MKQEGNLEVFRYVQFVLVVVVLKVFACLLLVAMLLTAISLIDPLVTVLSLPKLAIALVAISEIFYFIVIWERNK

SEQ ID NO: 103021 - DNA, 841 bp, Arabidopsis thaliana
  misc_feature (1)..(841): Ceres Seq. ID no. 13611795
  misc_feature: MA Experiment ID: 108595 Result: Down-regulated in Transcription
  misc_feature: MA Experiment 108595 PARAMETER Experiment Name: At_Ler-pi_Ovule_cDNA_P Parameter: Plant Line Value: null
  misc_feature: MA Experiment ID: 20000071 Result: Up-regulated in Transcription
  misc_feature: MA Experiment 20000071 PARAMETER Experiment Name: At_100uM_ABA_Mutants_cDNA_P Parameter: Plant Line Value: CS8104
  misc_feature: MA Experiment 20000071 PARAMETER Experiment Name: At_100uM_ABA_Mutants_cDNA_P Parameter: Timepoint (hr) Value: 6
  misc_feature: MA Experiment 20000071 PARAMETER Experiment Name: At_100uM_ABA_Mutants_cDNA_P Parameter: Tissue Value: Aerial
  misc_feature: MA Experiment 20000071 PARAMETER Experiment Name: At_100uM_ABA_Mutants_cDNA_P Parameter: Treatment Value: 100uM ABA vs. No Treatment
  misc_feature: MA Experiment ID: 20000112 Result: Down-regulated in Transcription
  misc_feature: MA Experiment 20000112 PARAMETER Experiment Name: At_42deg_Heat_cDNA_P Parameter: Temperature (deg C) Value: 42 vs. 22
  misc_feature: MA Experiment 20000112 PARAMETER Experiment Name: At_42deg_Heat_cDNA_P Parameter: Timepoint (hr) Value: 2
  misc_feature: MA Experiment 20000112 PARAMETER Experiment Name: At_42deg_Heat_cDNA_P Parameter: Tissue Value: Aerial
  misc_feature: MA Experiment ID: 20000224 Result: Down-regulated in Transcription
aatcatcactcatcttcaccaatctccattgattccttcaagccaagcttcttgcattctcctcttagatcaatctggttctttcatattccttgtggatatgatccgttaagattcgttcgttttgtgtctagtagatcgctgtgacgtaatataaagaaaaccctaaatctcagaaaactcgagactggttctaatggcttgtcaaattcaagcttcacgcgttttcccagttctagaaattgaaaaaggtctctcctttatgataaatgtcttccataggagaataaaagcttcgtccattactctcacttcatttccttatcccatgaaaagttttcagataagaagaccaaaccggaaaatagcgtttgcgttagacactggttcttctattcctggagatagtggtgaagggcaagagatgaatggagacagaaccggtctcggtagcactcggttaggtagaattgcgattgcaggaggcaaacagttacttgggaagataaactctgcaagaaaaaacttcccaatgaagatatttctgctgcttcttggtttctacactgccaatgcactagctactattcttggacagactggtgattgggatgtgcttgttgccggaatcgtcgttgctgcgatcgaaggaatcggtatgcttatgtataagaaaccgtcttcttcaatgttttcagggaagttgcagtcttttgttgtgtttatgaatttttggaaagctggtgtttgcttaggtctctttgttgatgctttcaagttgggtagttaaaaagacaaatctttcttttcttctactctatgtatatatgcaattgttact

SEQ ID NO: 103022 - protein, 197 aa, Arabidopsis thaliana
  peptide (1)..(197): Ceres Seq. ID no. 13611796
  misc_feature (134)..(197): Pfam Name: Protein of unknown function (DUF565) Pfam Description: Protein of unknown function (DUF565)
  misc_feature (1)..(197): Homolog of NCBI NO: 18408276 NR Description: antigen receptor -related [Arabidopsis thaliana]
  misc_feature (1)..(197): Homolog of NCBI NO: 21593789 NR Description: antigen receptor, putative [Arabidopsis thaliana]
  misc_feature (77)..(197): Homolog of NCBI NO: 6136502 NR Description: Ycf20-like protein >gi|7430888|pir||T02365
  misc_feature (93)..(184): Homolog of NCBI NO: 28436400 NR Description: putative antigen receptor [Arabidopsis thaliana] putative antigen receptor [Arabidopsis thaliana] putative antigen receptor receptor [Arabidopsis thaliana]
  misc_feature (93)..(184): Homolog of NCBI NO: 28394796 NR Description: putative antigen receptor [Arabidopsis lyrata]
  misc_feature (37)..(194): Homolog of NCBI NO: 15230144 NR Description: expressed protein [Arabidopsis thaliana]
  misc_feature (99)..(197): Homolog of NCBI NO: 11466439 NR Description: hypothetical chloroplast RF20 [Mesostigma viride] Hypothetical 13.0 kDa protein ycf20 (RF20)
  misc_feature (118)..(197): Homolog of NCBI NO: 11465680 NR Description: ORF20 [Porphyra purpurea] HYPOTHETICAL 11.9 KD PROTEIN YCF20 (ORF108)
  misc_feature (116)..(197): Homolog of NCBI NO: 7484292 NR Description: hypothetical protein ORF96 - red alga (Cyanidium
  misc_feature (116)..(197): Homolog of NCBI NO: 11465590 NR Description: unknown [Cyanidium caldarium] Hypothetical 11.5 kDa protein ycf20 >gi|6715544|gb|AAF26453.1|
MACQIQASRVFPVLEIEKGLSFMINVFHRRIKASSITLTSFPYPMKSFQIRRPNRKIAFALDTGSSIPGDSGEGQEMNGDRTGLGSTRLGRIAIAGGKQLLGKINSARKNFPMKIFLLLLGFYTANALATILGQTGDWDVLVAGIVVAAIEGIGMLMYKKPSSSMFSGKLQSFVVFMNFWKAGVCLGLFVDAFKLGS

SEQ ID NO: 103023 - protein, 175 aa, Arabidopsis thaliana
  peptide (1)..(175): Ceres Seq. ID no. 13611797
  misc_feature (112)..(175): Pfam Name: Protein of unknown function (DUF565) Pfam Description: Protein of unknown function (DUF565)
  misc_feature (1)..(175): Homolog of NCBI NO: 18408276 NR Description: antigen receptor -related [Arabidopsis thaliana]
  misc_feature (1)..(175): Homolog of NCBI NO: 21593789 NR Description: antigen receptor, putative [Arabidopsis thaliana]
  misc_feature (55)..(175): Homolog of NCBI NO: 6136502 NR Description: Ycf20-like protein >gi|7430888|pir||T02365
  misc_feature (71)..(162): Homolog of NCBI NO: 28436400 NR Description: putative antigen receptor [Arabidopsis thaliana] putative antigen receptor [Arabidopsis thaliana] putative antigen receptor receptor [Arabidopsis thaliana]
  misc_feature (71)..(162): Homolog of NCBI NO: 28394796 NR Description: putative antigen receptor [Arabidopsis lyrata]
  misc_feature (15)..(172): Homolog of NCBI NO: 15230144 NR Description: expressed protein [Arabidopsis thaliana]
  misc_feature (77)..(175): Homolog of NCBI NO: 11466439 NR Description: hypothetical chloroplast RF20 [Mesostigma viride] Hypothetical 13.0 kDa protein ycf20 (RF20)
  misc_feature (96)..(175): Homolog of NCBI NO: 11465680 NR Description: ORF20 [Porphyra purpurea] HYPOTHETICAL 11.9 KD PROTEIN YCF20 (ORF108)
  misc_feature (94)..(175): Homolog of NCBI NO: 7484292 NR Description: hypothetical protein ORF96 - red alga (Cyanidium
  misc_feature (94)..(175): Homolog of NCBI NO: 11465590 NR Description: unknown [Cyanidium caldarium] Hypothetical 11.5 kDa protein ycf20 >gi|6715544|gb|AAF26453.1|
MINVFHRRIKASSITLTSFPYPMKSFQIRRPNRKIAFALDTGSSIPGDSGEGQEMNGDRTGLGSTRLGRIAIAGGKQLLGKINSARKNFPMKIFLLLLGFYTANALATILGQTGDWDVLVAGIVVAAIEGIGMLMYKKPSSSMFSGKLQSFVVFMNFWKAGVCLGLFVDAFKLGS

SEQ ID NO: 103024 - protein, 153 aa, Arabidopsis thaliana
  peptide (1)..(153): Ceres Seq. ID no. 13611798
  misc_feature (90)..(153): Pfam Name: Protein of unknown function (DUF565) Pfam Description: Protein of unknown function (DUF565)
  misc_feature (1)..(153): Homolog of NCBI NO: 18408276 NR Description: antigen receptor -related [Arabidopsis thaliana]
  misc_feature (1)..(153): Homolog of NCBI NO: 21593789 NR Description: antigen receptor, putative [Arabidopsis thaliana]
  misc_feature (33)..(153): Homolog of NCBI NO: 6136502 NR Description: Ycf20-like protein >gi|7430888|pir||T02365
  misc_feature (49)..(140): Homolog of NCBI NO: 28436400 NR Description: putative antigen receptor [Arabidopsis thaliana] putative antigen receptor [Arabidopsis thaliana] putative antigen receptor receptor [Arabidopsis thaliana]
  misc_feature (49)..(140): Homolog of NCBI NO: 28394796 NR Description: putative antigen receptor [Arabidopsis lyrata]
  misc_feature (1)..(150): Homolog of NCBI NO: 15230144 NR Description: expressed protein [Arabidopsis thaliana]
  misc_feature (55)..(153): Homolog of NCBI NO: 11466439 NR Description: hypothetical chloroplast RF20 [Mesostigma viride] Hypothetical 13.0 kDa protein ycf20 (RF20)
  misc_feature (74)..(153): Homolog of NCBI NO: 11465680 NR Description: ORF20 [Porphyra purpurea] HYPOTHETICAL 11.9 KD PROTEIN YCF20 (ORF108)
  misc_feature (72)..(153): Homolog of NCBI NO: 7484292 NR Description: hypothetical protein ORF96 - red alga (Cyanidium
  misc_feature (72)..(153): Homolog of NCBI NO: 11465590 NR Description: unknown [Cyanidium caldarium] Hypothetical 11.5 kDa protein ycf20 >gi|6715544|gb|AAF26453.1|
MKSFQIRRPNRKIAFALDTGSSIPGDSGEGQEMNGDRTGLGSTRLGRIAIAGGKQLLGKINSARKNFPMKIFLLLLGFYTANALATILGQTGDWDVLVAGIVVAAIEGIGMLMYKKPSSSMFSGKLQSFVVFMNFWKAGVCLGLFVDAFKLGS

SEQ ID NO: 103025 - DNA, 1023 bp, Arabidopsis thaliana
  misc_feature (1)..(1023): Ceres Seq. ID no. 13611814
  misc_feature: MA Experiment ID: 108434 Result: Down-regulated in Transcription
  misc_feature: MA Experiment 108434 PARAMETER Experiment Name: At_Root_Tips_cDNA_P Parameter: Tissue Value: Root Tips
  misc_feature: MA Experiment ID: 108461 Result: Down-regulated in Transcription
  misc_feature: MA Experiment 108461 PARAMETER Experiment Name: At_Germinating_Seeds_cDNA_P Parameter: Age (day) Value: 1 vs. 0
  misc_feature: MA Experiment 108461 PARAMETER Experiment Name: At_Germinating_Seeds_cDNA_P Parameter: Tissue Value: Germinating Seeds
  misc_feature: MA Experiment ID: 108462 Result: Up-regulated in Transcription
  misc_feature: MA Experiment 108462 PARAMETER Experiment Name: At_Germinating_Seeds_cDNA_P Parameter: Age (day) Value: 2 vs. 0
  misc_feature: MA Experiment 108462 PARAMETER Experiment Name: At_Germinating_Seeds_cDNA_P Parameter: Tissue Value: Germinating Seeds
  misc_feature: MA Experiment ID: 108463 Result: Up-regulated in Transcription
  misc_feature: MA Experiment 108463 PARAMETER Experiment Name: At_Germinating_Seeds_cDNA_P Parameter: Age (day) Value: 3 vs. 0
  misc_feature: MA Experiment 108463 PARAMETER Experiment Name: At_Germinating_Seeds_cDNA_P Parameter: Tissue Value: Germinating Seeds
  misc_feature: MA Experiment ID: 108464 Result: Up-regulated in Transcription
  misc_feature: MA Experiment 108464 PARAMETER Experiment Name: At_Germinating_Seeds_cDNA_P Parameter: Age (day) Value: 4 vs. 0
  misc_feature: MA Experiment 108464 PARAMETER Experiment Name: At_Germinating_Seeds_cDNA_P Parameter: Tissue Value: Germinating Seeds
  misc_feature: MA Experiment ID: 108488 Result: Down-regulated in Transcription
  misc_feature: MA Experiment ID: 108561 Result: Up-regulated in Transcription
  misc_feature: MA Experiment 108561 PARAMETER Experiment Name: At_100uM_ABA_cDNA_P Parameter: Timepoint (hr) Value: 6
  misc_feature: MA Experiment 108561 PARAMETER Experiment Name: At_100uM_ABA_cDNA_P Parameter: Tissue Value: Aerial
  misc_feature: MA Experiment 108561 PARAMETER Experiment Name: At_100uM_ABA_cDNA_P Parameter: Treatment Value: 100uM ABA vs. No Treatment
  misc_feature: MA Experiment ID: 108573 Result: Up-regulated in Transcription
  misc_feature: MA Experiment 108573 PARAMETER Experiment Name: At_Drought_cDNA_P Parameter: Timepoint (hr) Value: 6
  misc_feature: MA Experiment 108573 PARAMETER Experiment Name: At_Drought_cDNA_P Parameter: Tissue Value: Aerial
  misc_feature: MA Experiment 108573 PARAMETER Experiment Name: At_Drought_cDNA_P Parameter: Treatment Value: Drought vs. No Drought
  misc_feature: MA Experiment ID: 108585 Result: Up-regulated in Transcription
  misc_feature: MA Experiment 108585 PARAMETER Experiment Name: At_5mM_NaNP_cDNA_P Parameter: Timepoint (hr) Value: 6
  misc_feature: MA Experiment 108585 PARAMETER Experiment Name: At_5mM_NaNP_cDNA_P Parameter: Tissue Value: Aerial
  misc_feature: MA Experiment 108585 PARAMETER Experiment Name: At_5mM_NaNP_cDNA_P Parameter: Treatment Value: null
  misc_feature: MA Experiment ID: 108594 Result: Down-regulated in Transcription
  misc_feature: MA Experiment 108594 PARAMETER Experiment Name: At_Ler-rhl_Root_cDNA_P Parameter: Plant Line Value: null
  misc_feature: MA Experiment ID: 108595 Result: Up-regulated in Transcription
  misc_feature: MA Experiment 108595 PARAMETER Experiment Name: At_Ler-pi_Ovule_cDNA_P Parameter: Plant Line Value: null
  misc_feature: MA Experiment ID: 108605 Result: Up-regulated in Transcription
  misc_feature: MA Experiment 108605 PARAMETER Experiment Name: At_100uM_ABA_cDNA_P Parameter: Timepoint (hr) Value: 6
  misc_feature: MA Experiment 108605 PARAMETER Experiment Name: At_100uM_ABA_cDNA_P Parameter: Tissue Value: Aerial
  misc_feature: MA Experiment 108605 PARAMETER Experiment Name: At_100uM_ABA_cDNA_P Parameter: Treatment Value: 100uM ABA vs. No Treatment
  misc_feature: MA Experiment ID: 108607 Result: Up-regulated in Transcription
  misc_feature: MA Experiment 108607 PARAMETER Experiment Name: At_100uM_ABA_cDNA_P Parameter: Timepoint (hr) Value: 4
  misc_feature: MA Experiment 108607 PARAMETER Experiment Name: At_100uM_ABA_cDNA_P Parameter: Tissue Value: Aerial
  misc_feature: MA Experiment 108607 PARAMETER Experiment Name: At_100uM_ABA_cDNA_P Parameter: Treatment Value: 100uM ABA vs. No Treatment
  misc_feature: MA Experiment ID: 108608 Result: Up-regulated in Transcription
  misc_feature: MA Experiment 108608 PARAMETER Experiment Name: At_100uM_ABA_cDNA_P Parameter: Timepoint (hr) Value: 1
  misc_feature: MA Experiment 108608 PARAMETER Experiment Name: At_100uM_ABA_cDNA_P Parameter: Tissue Value: Aerial
  misc_feature: MA Experiment 108608 PARAMETER Experiment Name: At_100uM_ABA_cDNA_P Parameter: Treatment Value: 100uM ABA vs. No Treatment
  misc_feature: MA Experiment ID: 108609 Result: Up-regulated in Transcription
  misc_feature: MA Experiment 108609 PARAMETER Experiment Name: At_100uM_ABA_cDNA_P Parameter: Timepoint (hr) Value: 24
  misc_feature: MA Experiment 108609 PARAMETER Experiment Name: At_100uM_ABA_cDNA_P Parameter: Tissue Value: Aerial
  misc_feature: MA Experiment 108609 PARAMETER Experiment Name: At_100uM_ABA_cDNA_P Parameter: Treatment Value: 100uM ABA vs. No Treatment
  misc_feature: MA Experiment ID: 108668 Result: Up-regulated in Transcription
  misc_feature: MA Experiment 108668 PARAMETER Experiment Name: At_2mM_SA_cDNA_P Parameter: Plant Line Value: WS
  misc_feature: MA Experiment 108668 PARAMETER Experiment Name: At_2mM_SA_cDNA_P Parameter: Timepoint (hr) Value: 6
  misc_feature: MA Experiment 108668 PARAMETER Experiment Name: At_2mM_SA_cDNA_P Parameter: Treatment Value: 2mM SA vs. No Treatment
  misc_feature: MA Experiment ID: 20000072 Result: Up-regulated in Transcription
  misc_feature: MA Experiment 20000072 PARAMETER Experiment Name: At_100uM_ABA_Mutants_cDNA_P Parameter: Plant Line Value: CS8105
  misc_feature: MA Experiment 20000072 PARAMETER Experiment Name: At_100uM_ABA_Mutants_cDNA_P Parameter: Timepoint (hr) Value: 6
  misc_feature: MA Experiment 20000072 PARAMETER Experiment Name: At_100uM_ABA_Mutants_cDNA_P Parameter: Tissue Value: Aerial
  misc_feature: MA Experiment 20000072 PARAMETER Experiment Name: At_100uM_ABA_Mutants_cDNA_P Parameter: Treatment Value: 100uM ABA vs. No Treatment
  misc_feature: MA Experiment ID: 20000086 Result: Up-regulated in Transcription
  misc_feature: MA Experiment 20000086 PARAMETER Experiment Name: At_100uM_ABA_Mutants_cDNA_P Parameter: Plant Line Value: CS22
  misc_feature: MA Experiment 20000086 PARAMETER Experiment Name: At_100uM_ABA_Mutants_cDNA_P Parameter: Timepoint (hr) Value: 6
  misc_feature: MA Experiment 20000086 PARAMETER Experiment Name: At_100uM_ABA_Mutants_cDNA_P Parameter: Tissue Value: Aerial
  misc_feature: MA Experiment 20000086 PARAMETER Experiment Name: At_100uM_ABA_Mutants_cDNA_P Parameter: Treatment Value: 100uM ABA vs. No Treatment
  misc_feature: MA Experiment ID: 20000087 Result: Up-regulated in Transcription
  misc_feature: MA Experiment 20000087 PARAMETER Experiment Name: At_100uM_ABA_Mutants_cDNA_P Parameter: Plant Line Value: WS
  misc_feature: MA Experiment 20000087 PARAMETER Experiment Name: At_100uM_ABA_Mutants_cDNA_P Parameter: Timepoint (hr) Value: 6
  misc_feature: MA Experiment 20000087 PARAMETER Experiment Name: At_100uM_ABA_Mutants_cDNA_P Parameter: Tissue Value: Aerial
  misc_feature: MA Experiment 20000087 PARAMETER Experiment Name: At_100uM_ABA_Mutants_cDNA_P Parameter: Treatment Value: 100uM ABA vs. No Treatment
  misc_feature: MA Experiment ID: 20000088 Result: Up-regulated in Transcription
  misc_feature: MA Experiment 20000088 PARAMETER Experiment Name: At_100uM_ABA_Mutants_cDNA_P Parameter: Plant Line Value: Landsberg
  misc_feature: MA Experiment 20000088 PARAMETER Experiment Name: At_100uM_ABA_Mutants_cDNA_P Parameter: Timepoint (hr) Value: 6
  misc_feature: MA Experiment 20000088 PARAMETER Experiment Name: At_100uM_ABA_Mutants_cDNA_P Parameter: Tissue Value: Aerial
  misc_feature: MA Experiment 20000088 PARAMETER Experiment Name: At_100uM_ABA_Mutants_cDNA_P Parameter: Treatment Value: 100uM ABA vs. No Treatment
  misc_feature: MA Experiment ID: 20000090 Result: Up-regulated in Transcription
  misc_feature: MA Experiment ID: 20000111 Result: Down-regulated in Transcription
  misc_feature: MA Experiment 20000111 PARAMETER Experiment Name: At_42deg_Heat_cDNA_P Parameter: Temperature (deg C) Value: 42 vs. 22
  misc_feature: MA Experiment 20000111 PARAMETER Experiment Name: At_42deg_Heat_cDNA_P Parameter: Timepoint (hr) Value: 6
  misc_feature: MA Experiment 20000111 PARAMETER Experiment Name: At_42deg_Heat_cDNA_P Parameter: Tissue Value: Aerial
  misc_feature: MA Experiment ID: 20000113 Result: Down-regulated in Transcription
  misc_feature: MA Experiment 20000113 PARAMETER Experiment Name: At_42deg_Heat_cDNA_P Parameter: Temperature (deg C) Value: 42 vs. 22
  misc_feature: MA Experiment 20000113 PARAMETER Experiment Name: At_42deg_Heat_cDNA_P Parameter: Timepoint (hr) Value: 8
  misc_feature: MA Experiment 20000113 PARAMETER Experiment Name: At_42deg_Heat_cDNA_P Parameter: Tissue Value: Aerial
  misc_feature: MA Experiment ID: 20000166 Result: Up-regulated in Transcription
  misc_feature: MA Experiment 20000166 PARAMETER Experiment Name: At_100uM_ABA_P Parameter: Age (day) Value: 14
  misc_feature: MA Experiment 20000166 PARAMETER Experiment Name: At_100uM_ABA_P Parameter: Organism Value: A. thaliana
  misc_feature: MA Experiment 20000166 PARAMETER Experiment Name: At_100uM_ABA_P Parameter: Plant Line Value: WS
  misc_feature: MA Experiment 20000166 PARAMETER Experiment Name: At_100uM_ABA_P Parameter: Timepoint (hr) Value: 1
  misc_feature: MA Experiment 20000166 PARAMETER Experiment Name: At_100uM_ABA_P Parameter: Tissue Value: Aerial
  misc_feature: MA Experiment 20000166 PARAMETER Experiment Name: At_100uM_ABA_P Parameter: Treatment Value: 100uM ABA vs. No Treatment
  misc_feature: MA Experiment ID: 20000169 Result: Up-regulated in Transcription
  misc_feature: MA Experiment 20000169 PARAMETER Experiment Name: At_100uM_ABA_P Parameter: Age (day) Value: 14
  misc_feature: MA Experiment 20000169 PARAMETER Experiment Name: At_100uM_ABA_P Parameter: Organism Value: A. thaliana
  misc_feature: MA Experiment 20000169 PARAMETER Experiment Name: At_100uM_ABA_P Parameter: Plant Line Value: WS
  misc_feature: MA Experiment 20000169 PARAMETER Experiment Name: At_100uM_ABA_P Parameter: Timepoint (hr) Value: 6
  misc_feature: MA Experiment 20000169 PARAMETER Experiment Name: At_100uM_ABA_P Parameter: Tissue Value: Aerial
  misc_feature: MA Experiment 20000169 PARAMETER Experiment Name: At_100uM_ABA_P Parameter: Treatment Value: 100uM ABA vs. No Treatment
  misc_feature: MA Experiment ID: 20000171 Result: Down-regulated in Transcription
  misc_feature: MA Experiment 20000171 PARAMETER Experiment Name: At_42deg_Heat_P Parameter: Age (day) Value: 14
  misc_feature: MA Experiment 20000171 PARAMETER Experiment Name: At_42deg_Heat_P Parameter: Organism Value: A. thaliana
  misc_feature: MA Experiment 20000171 PARAMETER Experiment Name: At_42deg_Heat_P Parameter: Plant Line Value: WS
  misc_feature: MA Experiment 20000171 PARAMETER Experiment Name: At_42deg_Heat_P Parameter: Temperature (deg C) Value: 42 vs. 22
  misc_feature: MA Experiment 20000171 PARAMETER Experiment Name: At_42deg_Heat_P Parameter: Timepoint (hr) Value: 1
  misc_feature: MA Experiment 20000171 PARAMETER Experiment Name: At_42deg_Heat_P Parameter: Tissue Value: Aerial
  misc_feature: MA Experiment ID: 20000173 Result: Down-regulated in Transcription
  misc_feature: MA Experiment 20000173 PARAMETER Experiment Name: At_42deg_Heat_P Parameter: Age (day) Value: 14
  misc_feature: MA Experiment 20000173 PARAMETER Experiment Name: At_42deg_Heat_P Parameter: Organism Value: A. thaliana
  misc_feature: MA Experiment 20000173 PARAMETER Experiment Name: At_42deg_Heat_P Parameter: Plant Line Value: WS
  misc_feature: MA Experiment 20000173 PARAMETER Experiment Name: At_42deg_Heat_P Parameter: Temperature (deg C) Value: 42 vs. 22
  misc_feature: MA Experiment 20000173 PARAMETER Experiment Name: At_42deg_Heat_P Parameter: Timepoint (hr) Value: 6
  misc_feature: MA Experiment 20000173 PARAMETER Experiment Name: At_42deg_Heat_P Parameter: Tissue Value: Aerial
  misc_feature: MA Experiment ID: 20000179 Result: Down-regulated in Transcription
  misc_feature: MA Experiment 20000179 PARAMETER Experiment Name: At_Germinating_Seeds_P Parameter: Age (hr) Value: 6 vs. 0
  misc_feature: MA Experiment 20000179 PARAMETER Experiment Name: At_Germinating_Seeds_P Parameter: Tissue Value: Germinating Seeds
  misc_feature: MA Experiment ID: 20000180 Result: Down-regulated in Transcription
  misc_feature: MA Experiment 20000180 PARAMETER Experiment Name: At_Germinating_Seeds_P Parameter: Age (hr) Value: 24 vs. 0
  misc_feature: MA Experiment 20000180 PARAMETER Experiment Name: At_Germinating_Seeds_P Parameter: Tissue Value: Germinating Seeds
  misc_feature: MA Experiment ID: 20000182 Result: Up-regulated in Transcription
  misc_feature: MA Experiment 20000182 PARAMETER Experiment Name: At_2mM_SA_P Parameter: Age (day) Value: 14
  misc_feature: MA Experiment 20000182 PARAMETER Experiment Name: At_2mM_SA_P Parameter: Organism Value: A. thaliana
  misc_feature: MA Experiment 20000182 PARAMETER Experiment Name: At_2mM_SA_P Parameter: Plant Line Value: WS
  misc_feature: MA Experiment 20000182 PARAMETER Experiment Name: At_2mM_SA_P Parameter: Timepoint (hr) Value: 6
  misc_feature: MA Experiment 20000182 PARAMETER Experiment Name: At_2mM_SA_P Parameter: Tissue Value: Aerial
  misc_feature: MA Experiment 20000182 PARAMETER Experiment Name: At_2mM_SA_P Parameter: Treatment Value: 2mM SA vs. No Treatment
  misc_feature: MA Experiment ID: 20000184 Result: Down-regulated in Transcription
  misc_feature: MA Experiment 20000184 PARAMETER Experiment Name: At_Shoots__P Parameter: Age (day) Value: 7
  misc_feature: MA Experiment 20000184 PARAMETER Experiment Name: At_Shoots__P Parameter: Tissue Value: Shoots vs. Whole Plant
  misc_feature: MA Experiment ID: 20000227 Result: Down-regulated in Transcription
  misc_feature: MA Experiment 20000227 PARAMETER Experiment Name: At_Root-Tips-vs-Tops_P Parameter: Tissue Value: Root Tips vs. Root Tops
  misc_feature: MA Experiment ID: 20000234 Result: Down-regulated in Transcription
  misc_feature: MA Experiment 20000234 PARAMETER Experiment Name: At_Siliques_P Parameter: Age (day) Value: 21
  misc_feature: MA Experiment 20000234 PARAMETER Experiment Name: At_Siliques_P Parameter: Organism Value: A. thaliana
  misc_feature: MA Experiment 20000234 PARAMETER Experiment Name: At_Siliques_P Parameter: Plant Line Value: WS
  misc_feature: MA Experiment 20000234 PARAMETER Experiment Name: At_Siliques_P Parameter: Tissue Value: Less Than 5mm Siliques vs. Whole Plant
  misc_feature: MA Experiment ID: 20000235 Result: Down-regulated in Transcription
  misc_feature: MA Experiment 20000235 PARAMETER Experiment Name: At_Siliques_P Parameter: Age (day) Value: 21
  misc_feature: MA Experiment 20000235 PARAMETER Experiment Name: At_Siliques_P Parameter: Organism Value: A. thaliana
  misc_feature: MA Experiment 20000235 PARAMETER Experiment Name: At_Siliques_P Parameter: Plant Line Value: WS
  misc_feature: MA Experiment 20000235 PARAMETER Experiment Name: At_Siliques_P Parameter: Tissue Value: 5-10mm Siliques vs. Whole Plant
  misc_feature: MA Experiment ID: 20000264 Result: Down-regulated in Transcription
  misc_feature: MA Experiment 20000264 PARAMETER Experiment Name: At_Open_Flower_P Parameter: Age (day) Value: 21
  misc_feature: MA Experiment 20000264 PARAMETER Experiment Name: At_Open_Flower_P Parameter: Plant Line Value: WS
  misc_feature: MA Experiment 20000264 PARAMETER Experiment Name: At_Open_Flower_P Parameter: Tissue Value: Open Flower vs. Whole Plant
  misc_feature: MA Experiment ID: 20000265 Result: Down-regulated in Transcription
  misc_feature: MA Experiment 20000265 PARAMETER Experiment Name: At_Open_Flower_P Parameter: Age (day) Value: 21
  misc_feature: MA Experiment 20000265 PARAMETER Experiment Name: At_Open_Flower_P Parameter: Plant Line Value: WS
  misc_feature: MA Experiment 20000265 PARAMETER Experiment Name: At_Open_Flower_P Parameter: Tissue Value: Closed Flower vs. Whole Plant
  misc_feature: MA Experiment ID: 20000267 Result: Up-regulated in Transcription
  misc_feature: MA Experiment 20000267 PARAMETER Experiment Name: At_Drought_P Parameter: Age (day) Value: 7
  misc_feature: MA Experiment 20000267 PARAMETER Experiment Name: At_Drought_P Parameter: Organism Value: A. thaliana
  misc_feature: MA Experiment 20000267 PARAMETER Experiment Name: At_Drought_P Parameter: Plant Line Value: WS
  misc_feature: MA Experiment 20000267 PARAMETER Experiment Name: At_Drought_P Parameter: Timepoint (hr) Value: 6
  misc_feature: MA Experiment 20000267 PARAMETER Experiment Name: At_Drought_P Parameter: Tissue Value: Whole Plant
  misc_feature: MA Experiment 20000267 PARAMETER Experiment Name: At_Drought_P Parameter: Treatment Value: Drought vs. No Drought
  misc_feature: MA Experiment ID: 20000269 Result: Up-regulated in Transcription
  misc_feature: MA Experiment 20000269 PARAMETER Experiment Name: At_1mM_KNO3_L-vs-H_Roots_P Parameter: Age (day) Value: 7,10,12
  misc_feature: MA Experiment 20000269 PARAMETER Experiment Name: At_1mM_KNO3_L-vs-H_Roots_P Parameter: Organism Value: A. thaliana
  misc_feature: MA Experiment 20000269 PARAMETER Experiment Name: At_1mM_KNO3_L-vs-H_Roots_P Parameter: Plant Line Value: WS
  misc_feature: MA Experiment 20000269 PARAMETER Experiment Name: At_1mM_KNO3_L-vs-H_Roots_P Parameter: Timepoint (day) Value: 7,10,12
  misc_feature: MA Experiment 20000269 PARAMETER Experiment Name: At_1mM_KNO3_L-vs-H_Roots_P Parameter: Tissue Value: Roots
  misc_feature: MA Experiment 20000269 PARAMETER Experiment Name: At_1mM_KNO3_L-vs-H_Roots_P Parameter: Treatment Value: 1mM KNO3 vs. 50mM KNO3
  misc_feature: MA Experiment ID: 20000286 Result: Down-regulated in Transcription
  misc_feature: MA Experiment 20000286 PARAMETER Experiment Name: At_Open_Flower_P Parameter: Age (day) Value: 21
  misc_feature: MA Experiment 20000286 PARAMETER Experiment Name: At_Open_Flower_P Parameter: Plant Line Value: WS
  misc_feature: MA Experiment 20000286 PARAMETER Experiment Name: At_Open_Flower_P Parameter: Tissue Value: Half Open vs. Whole Plant
  misc_feature: MA Experiment ID: 20000438 Result: Down-regulated in Transcription
  misc_feature: MA Experiment 20000438 PARAMETER Experiment Name: At_Shoots__P Parameter: Age (day) Value: 14
  misc_feature: MA Experiment 20000438 PARAMETER Experiment Name: At_Shoots__P Parameter: Tissue Value: Shoots vs. Whole Plant
  misc_feature: MA Experiment ID: 20000439 Result: Up-regulated in Transcription
  misc_feature: MA Experiment 20000439 PARAMETER Experiment Name: At_Roots__P Parameter: Age (day) Value: 14 vs. 21
  misc_feature: MA Experiment 20000439 PARAMETER Experiment Name: At_Roots__P Parameter: Organism Value: A. thaliana
  misc_feature: MA Experiment 20000439 PARAMETER Experiment Name: At_Roots__P Parameter: Tissue Value: Roots vs. Whole Plant
  misc_feature: MA Experiment ID: 20000453 Result: Up-regulated in Transcription
  misc_feature: MA Experiment 20000453 PARAMETER Experiment Name: At_100uM_ABA_P Parameter: Age (day) Value: 15
  misc_feature: MA Experiment 20000453 PARAMETER Experiment Name: At_100uM_ABA_P Parameter: Organism Value: A. thaliana
  misc_feature: MA Experiment 20000453 PARAMETER Experiment Name: At_100uM_ABA_P Parameter: Plant Line Value: WS
  misc_feature: MA Experiment 20000453 PARAMETER Experiment Name: At_100uM_ABA_P Parameter: Timepoint (hr) Value: 24
  misc_feature: MA Experiment 20000453 PARAMETER Experiment Name: At_100uM_ABA_P Parameter: Tissue Value: Aerial
  misc_feature: MA Experiment 20000453 PARAMETER Experiment Name: At_100uM_ABA_P Parameter: Treatment Value: 100uM ABA vs. No Treatment
  misc_feature: MA Experiment ID: 20000527 Result: Down-regulated in Transcription
  misc_feature: MA Experiment 20000527 PARAMETER Experiment Name: At_10percent_PEG_P Parameter: Age (day) Value: 20
  misc_feature: MA Experiment 20000527 PARAMETER Experiment Name: At_10percent_PEG_P Parameter: Organism Value: A. thaliana
  misc_feature: MA Experiment 20000527 PARAMETER Experiment Name: At_10percent_PEG_P Parameter: Plant Line Value: WS
  misc_feature: MA Experiment 20000527 PARAMETER Experiment Name: At_10percent_PEG_P Parameter: Timepoint (day) Value: 20
  misc_feature: MA Experiment 20000527 PARAMETER Experiment Name: At_10percent_PEG_P Parameter: Tissue Value: Whole Plant
  misc_feature: MA Experiment 20000527 PARAMETER Experiment Name: At_10percent_PEG_P Parameter: Treatment Value: 10percent PEG vs. No Treatment
  misc_feature: MA Experiment ID: 20000574 Result: Up-regulated in Transcription
  misc_feature: MA Experiment 20000574 PARAMETER Experiment Name: At_100uM_ABA_Mutants__P Parameter: Organism Value: A. thaliana
  misc_feature: MA Experiment 20000574 PARAMETER Experiment Name: At_100uM_ABA_Mutants__P Parameter: Plant Line Value: CS23 vs. Ler wt
  misc_feature: MA Experiment 20000574 PARAMETER Experiment Name: At_100uM_ABA_Mutants__P Parameter: Timepoint (hr) Value: N/A
  misc_feature: MA Experiment 20000574 PARAMETER Experiment Name: At_100uM_ABA_Mutants__P Parameter: Tissue Value: Whole Plant
  misc_feature: MA Experiment 20000574 PARAMETER Experiment Name: At_100uM_ABA_Mutants__P Parameter: Treatment Value: None
  misc_feature: MA Experiment ID: 20000794 Result: Down-regulated in Transcription
  misc_feature: MA Experiment 20000794 PARAMETER Experiment Name: At_Petals_P Parameter: Age (day) Value: 23-25 days
  misc_feature: MA Experiment 20000794 PARAMETER Experiment Name: At_Petals_P Parameter: Plant Line Value: WS
  misc_feature: MA Experiment 20000794 PARAMETER Experiment Name: At_Petals_P Parameter: Tissue Value: Petals vs. Whole plant
  misc_feature: MA Experiment ID: 20001558 Result: Down-regulated in Transcription
  misc_feature: MA Experiment 20001558 PARAMETER Experiment Name: At_Drought_Soil_Dry_P Parameter: Age (day) Value: 27
  misc_feature: MA Experiment 20001558 PARAMETER Experiment Name: At_Drought_Soil_Dry_P Parameter: Organism Value: A. thaliana
  misc_feature: MA Experiment 20001558 PARAMETER Experiment Name: At_Drought_Soil_Dry_P Parameter: Plant Line Value: WS
  misc_feature: MA Experiment 20001558 PARAMETER Experiment Name: At_Drought_Soil_Dry_P Parameter: Post Timepoint (hr) Value: 6
  misc_feature: MA Experiment 20001558 PARAMETER Experiment Name: At_Drought_Soil_Dry_P Parameter: Post-Treatment Value: Re-Water vs. No Drought
  misc_feature: MA Experiment 20001558 PARAMETER Experiment Name: At_Drought_Soil_Dry_P Parameter: Timepoint (day) Value: 13
  misc_feature: MA Experiment 20001558 PARAMETER Experiment Name: At_Drought_Soil_Dry_P Parameter: Treatment Value: Drought vs. No Drought
  misc_feature: MA Experiment ID: 20001560 Result: Down-regulated in Transcription
  misc_feature: MA Experiment 20001560 PARAMETER Experiment Name: At_Drought_Soil_Dry_P Parameter: Age (day) Value: 28
  misc_feature: MA Experiment 20001560 PARAMETER Experiment Name: At_Drought_Soil_Dry_P Parameter: Organism Value: A. thaliana
  misc_feature: MA Experiment 20001560 PARAMETER Experiment Name: At_Drought_Soil_Dry_P Parameter: Plant Line Value: WS
  misc_feature: MA Experiment 20001560 PARAMETER Experiment Name: At_Drought_Soil_Dry_P Parameter: Post Timepoint (hr) Value: None
  misc_feature: MA Experiment 20001560 PARAMETER Experiment Name: At_Drought_Soil_Dry_P Parameter: Post-Treatment Value: None
  misc_feature: MA Experiment 20001560 PARAMETER Experiment Name: At_Drought_Soil_Dry_P Parameter: Timepoint (day) Value: 14
  misc_feature: MA Experiment 20001560 PARAMETER Experiment Name: At_Drought_Soil_Dry_P Parameter: Treatment Value: Drought vs. No Drought
  misc_feature: MA Experiment ID: 20001761 Result: Down-regulated in Transcription
  misc_feature: MA Experiment 20001761 PARAMETER Experiment Name: At_50mM_NH4NO3_L-to-H_P Parameter: Timepoint (hr) Value: 4
  misc_feature: MA Experiment 20001761 PARAMETER Experiment Name: At_50mM_NH4NO3_L-to-H_P Parameter: Tissue Value: Siliques
  misc_feature: MA Experiment 20001761 PARAMETER Experiment Name: At_50mM_NH4NO3_L-to-H_P Parameter: Treatment Value: 50mM NH4NO3 vs 100mM Mannitol
  misc_feature: MA Experiment ID: 20001773 Result: Down-regulated in Transcription
  misc_feature: MA Experiment 20001773 PARAMETER Experiment Name: At_Far-red-enriched-adult_P Parameter: Age (day) Value: 30
  misc_feature: MA Experiment 20001773 PARAMETER Experiment Name: At_Far-red-enriched-adult_P Parameter: Light Value: Far-red enriched vs. White
  misc_feature: MA Experiment 20001773 PARAMETER Experiment Name: At_Far-red-enriched-adult_P Parameter: Organism Value: A. thaliana
  misc_feature: MA Experiment 20001773 PARAMETER Experiment Name: At_Far-red-enriched-adult_P Parameter: Plant Line Value: Columbia
  misc_feature: MA Experiment 20001773 PARAMETER Experiment Name: At_Far-red-enriched-adult_P Parameter: Timepoint (hr) Value: 48
  misc_feature: MA Experiment 20001773 PARAMETER Experiment Name: At_Far-red-enriched-adult_P Parameter: Tissue Value: Aerial
  misc_feature: MA Experiment ID: 20001905 Result: Up-regulated in Transcription
  misc_feature: MA Experiment 20001905 PARAMETER Experiment Name: At_Drought_Reproduction_P Parameter: Age (day) Value: 40
  misc_feature: MA Experiment 20001905 PARAMETER Experiment Name: At_Drought_Reproduction_P Parameter: Organism Value: A. thaliana
  misc_feature: MA Experiment 20001905 PARAMETER Experiment Name: At_Drought_Reproduction_P Parameter: Plant Line Value: WS
  misc_feature: MA Experiment 20001905 PARAMETER Experiment Name: At_Drought_Reproduction_P Parameter: Timepoint (day) Value: 10
  misc_feature: MA Experiment 20001905 PARAMETER Experiment Name: At_Drought_Reproduction_P Parameter: Tissue Value: Rosettes
  misc_feature: MA Experiment 20001905 PARAMETER Experiment Name: At_Drought_Reproduction_P Parameter: Treatment Value: Drought vs. No Drought
  misc_feature: MA Experiment ID: 20001906 Result: Up-regulated in Transcription
  misc_feature: MA Experiment 20001906 PARAMETER Experiment Name: At_Drought_Reproduction_P Parameter: Age (day) Value: 35
  misc_feature: MA Experiment 20001906 PARAMETER Experiment Name: At_Drought_Reproduction_P Parameter: Organism Value: A. thaliana
  misc_feature: MA Experiment 20001906 PARAMETER Experiment Name: At_Drought_Reproduction_P Parameter: Plant Line Value: WS
  misc_feature: MA Experiment 20001906 PARAMETER Experiment Name: At_Drought_Reproduction_P Parameter: Timepoint (day) Value: 5
  misc_feature: MA Experiment 20001906 PARAMETER Experiment Name: At_Drought_Reproduction_P Parameter: Tissue Value: Siliques
  misc_feature: MA Experiment 20001906 PARAMETER Experiment Name: At_Drought_Reproduction_P Parameter: Treatment Value: Drought vs. No Drought
aagatctacaaacaaagcttcttcttcttcttggtgtcatcaagattttccaaaaatgtctcaacaccaaaaaatctatccggtccaagatccagaagccgcaacagcgcgtccaacagctcctttggttcctcgtggttcctctagatcagaacatggagacccatccaaagtccctttgaaccaaaggccacaacggttcgtgccgttggctcctccaaagaagagaagaagttgttgttgcagatgcttttgctacacgttctgctttcttttgcttcttgtcgttgcagtaggcgcatccattggtatactataccttgtctttaaaccgaagctaccggattactctattgaccggttacagctcacccggtttgcactgaaccaagactcgagtttgactacggcttttaacgtgactataaccgctaagaatccgaacgagaagattggaatttattatgaagatgggagcaagattaccgtgtggtacatggaacatcaactaagcaatgggtcgttgccaaaattttaccaaggacatgaaaatacgacagtgatatacgtagaaatgactggtcaaacacaaaatgcatcgggtttaaggacgacattagaagagcaacaacaaagaaccgggaatataccattgagaattagagtaaaccaaccggttcgggtcaaatttgggaagttgaagctcttcgaagtaagattcttggtcagatgtggtgtatttgttgatagcttggctaccaataatgttattaagattcaaagtagtagttgcaaatttcgtcttaggttatagatccgtttttttttatataattaatatcgagatatacagagggaattttgtcagatatagtcacatactcatatatagttctcctctaaagtacattattgtgtctcagacctttgttgtataataaactgttggtttaaattaatatattaaagtatacaatactatgtacataggtggaattcaaagtatagtagttgtaagttttt

SEQ ID NO: 103026 - protein, 270 aa, Arabidopsis thaliana; identical to SEQ ID NO: 35068
  peptide (1)..(270): Ceres Seq. ID no. 13611815
  misc_feature (19)..(270): Homolog of NCBI NO: 18408342 NR Description: expressed protein [Arabidopsis thaliana]
  misc_feature (19)..(270): Homolog of NCBI NO: 6686408 NR Description: F1E22.7 [Arabidopsis thaliana]
  misc_feature (19)..(270): Homolog of NCBI NO: 15239459 NR Description: hypothetical protein [Arabidopsis thaliana]
  misc_feature (19)..(270): Homolog of NCBI NO: 10178216 NR Description: gb|AAF23842.1~gene_id:MLF18.15~similar to unknown
  misc_feature (19)..(270): Homolog of NCBI NO: 15221846 NR Description: hypothetical protein [Arabidopsis thaliana]
  misc_feature (19)..(270): Homolog of NCBI NO: 38344198 NR Description: OSJNBa0064G10.14 [Oryza sativa (japonica
  misc_feature (57)..(264): Homolog of NCBI NO: 18401317 NR Description: expressed protein [Arabidopsis thaliana]
  misc_feature (83)..(262): Homolog of NCBI NO: 38636986 NR Description: unknown protein [Oryza sativa (japonica
  misc_feature (57)..(270): Homolog of NCBI NO: 15242167 NR Description: hypothetical protein [Arabidopsis thaliana]
  misc_feature (57)..(269): Homolog of NCBI NO: 34909192 NR Description: P0425G02.19 [Oryza sativa (japonica

SEQ ID NO: 103027 - protein, 252 aa, Arabidopsis thaliana; identical to SEQ ID NO: 35069
  peptide (1)..(252): Ceres Seq. ID no. 13611816
  misc_feature (1)..(252): Homolog of NCBI NO: 18408342 NR Description: expressed protein [Arabidopsis thaliana]
  misc_feature (1)..(252): Homolog of NCBI NO: 6686408 NR Description: F1E22.7 [Arabidopsis thaliana]
  misc_feature (1)..(252): Homolog of NCBI NO: 15239459 NR Description: hypothetical protein [Arabidopsis thaliana]
  misc_feature (1)..(252): Homolog of NCBI NO: 10178216 NR Description: gb|AAF23842.1~gene_id:MLF18.15~similar to unknown
  misc_feature (1)..(252): Homolog of NCBI NO: 15221846 NR Description: hypothetical protein [Arabidopsis thaliana]
  misc_feature (1)..(252): Homolog of NCBI NO: 38344198 NR Description: OSJNBa0064G10.14 [Oryza sativa (japonica
  misc_feature (39)..(246): Homolog of NCBI NO: 18401317 NR Description: expressed protein [Arabidopsis thaliana]
  misc_feature (65)..(244): Homolog of NCBI NO: 38636986 NR Description: unknown protein [Oryza sativa (japonica
  misc_feature (39)..(252): Homolog of NCBI NO: 15242167 NR Description: hypothetical protein [Arabidopsis thaliana]
  misc_feature (39)..(251): Homolog of NCBI NO: 34909192 NR Description: P0425G02.19 [Oryza sativa (japonica

SEQ ID NO: 103028 - DNA, 1806 bp, Arabidopsis thaliana
  misc_feature (1)..(1806): Ceres Seq. ID no. 13611825
  misc_feature: MA Experiment ID: 108434 Result: Down-regulated in Transcription
  misc_feature: MA Experiment 108434 PARAMETER Experiment Name: At_Root_Tips_cDNA_P Parameter: Tissue Value: Root Tips
  misc_feature: MA Experiment ID: 108488 Result: Up-regulated in Transcription
  misc_feature: MA Experiment ID: 108573 Result: Up-regulated in Transcription
  misc_feature: MA Experiment 108573 PARAMETER Experiment Name: At_Drought_cDNA_P Parameter: Timepoint (hr) Value: 6
  misc_feature: MA Experiment 108573 PARAMETER Experiment Name: At_Drought_cDNA_P Parameter: Tissue Value: Aerial
  misc_feature: MA Experiment 108573 PARAMETER Experiment Name: At_Drought_cDNA_P Parameter: Treatment Value: Drought vs. No Drought
  misc_feature: MA Experiment ID: 20000113 Result: Down-regulated in Transcription
  misc_feature: MA Experiment 20000113 PARAMETER Experiment Name: At_42deg_Heat_cDNA_P Parameter: Temperature (deg C) Value: 42 vs. 22
  misc_feature: MA Experiment 20000113 PARAMETER Experiment Name: At_42deg_Heat_cDNA_P Parameter: Timepoint (hr) Value: 8
  misc_feature: MA Experiment 20000113 PARAMETER Experiment Name: At_42deg_Heat_cDNA_P Parameter: Tissue Value: Aerial
  misc_feature: MA Experiment ID: 20000184 Result: Up-regulated in Transcription
  misc_feature: MA Experiment 20000184 PARAMETER Experiment Name: At_Shoots__P Parameter: Age (day) Value: 7
  misc_feature: MA Experiment 20000184 PARAMETER Experiment Name: At_Shoots__P Parameter: Tissue Value: Shoots vs. Whole Plant
  misc_feature: MA Experiment ID: 20000185 Result: Up-regulated in Transcription
  misc_feature: MA Experiment 20000185 PARAMETER Experiment Name: At_Roots__P Parameter: Age (day) Value: 7 vs. 21
  misc_feature: MA Experiment 20000185 PARAMETER Experiment Name: At_Roots__P Parameter: Organism Value: A. thaliana
  misc_feature: MA Experiment 20000185 PARAMETER Experiment Name: At_Roots__P Parameter: Tissue Value: Roots vs. Whole Plant
  misc_feature: MA Experiment ID: 20000234 Result: Up-regulated in Transcription
  misc_feature: MA Experiment 20000234 PARAMETER Experiment Name: At_Siliques_P Parameter: Age (day) Value: 21
  misc_feature: MA Experiment 20000234 PARAMETER Experiment Name: At_Siliques_P Parameter: Organism Value: A. thaliana
  misc_feature: MA Experiment 20000234 PARAMETER Experiment Name: At_Siliques_P Parameter: Plant Line Value: WS
  misc_feature: MA Experiment 20000234 PARAMETER Experiment Name: At_Siliques_P Parameter: Tissue Value: Less Than 5mm Siliques vs. Whole Plant
  misc_feature: MA Experiment ID: 20000235 Result: Up-regulated in Transcription
  misc_feature: MA Experiment 20000235 PARAMETER Experiment Name: At_Siliques_P Parameter: Age (day) Value: 21
  misc_feature: MA Experiment 20000235 PARAMETER Experiment Name: At_Siliques_P Parameter: Organism Value: A. thaliana
  misc_feature: MA Experiment 20000235 PARAMETER Experiment Name: At_Siliques_P Parameter: Plant Line Value: WS
  misc_feature: MA Experiment 20000235 PARAMETER Experiment Name: At_Siliques_P Parameter: Tissue Value: 5-10mm Siliques vs. Whole Plant
  misc_feature: MA Experiment ID: 20000307 Result: Up-regulated in Transcription
  misc_feature: MA Experiment 20000307 PARAMETER Experiment Name: At_Germinating_Seeds_Sub_P Parameter: Age (hr) Value: 24 vs. 0
  misc_feature: MA Experiment 20000307 PARAMETER Experiment Name: At_Germinating_Seeds_Sub_P Parameter: Organism Value: A. thaliana
  misc_feature: MA Experiment 20000307 PARAMETER Experiment Name: At_Germinating_Seeds_Sub_P Parameter: Plant Line Value: WS
  misc_feature: MA Experiment 20000307 PARAMETER Experiment Name: At_Germinating_Seeds_Sub_P Parameter: Tissue Value: Germinating Seeds
  misc_feature: MA Experiment ID: 20000314 Result: Up-regulated in Transcription
  misc_feature: MA Experiment 20000314 PARAMETER Experiment Name: At_14day_Shoots-Roots_Sub_P Parameter: Age (day) Value: 14
  misc_feature: MA Experiment 20000314 PARAMETER Experiment Name: At_14day_Shoots-Roots_Sub_P Parameter: Organism Value: A. thaliana
  misc_feature: MA Experiment 20000314 PARAMETER Experiment Name: At_14day_Shoots-Roots_Sub_P Parameter: Plant Line Value: WS
  misc_feature: MA Experiment 20000314 PARAMETER Experiment Name: At_14day_Shoots-Roots_Sub_P Parameter: Tissue Value: Roots vs. Whole Plant
  misc_feature: MA Experiment ID: 20000315 Result: Up-regulated in Transcription
  misc_feature: MA Experiment 20000315 PARAMETER Experiment Name: At_14day_Shoots-Roots_Sub_P Parameter: Age (day) Value: 14
  misc_feature: MA Experiment 20000315 PARAMETER Experiment Name: At_14day_Shoots-Roots_Sub_P Parameter: Organism Value: A. thaliana
  misc_feature: MA Experiment 20000315 PARAMETER Experiment Name: At_14day_Shoots-Roots_Sub_P Parameter: Plant Line Value: WS
  misc_feature: MA Experiment 20000315 PARAMETER Experiment Name: At_14day_Shoots-Roots_Sub_P Parameter: Tissue Value: Shoots vs. Whole Plant
  misc_feature: MA Experiment ID: 20000355 Result: Up-regulated in Transcription
  misc_feature: MA Experiment 20000355 PARAMETER Experiment Name: At_Siliques_Sub_P Parameter: Age (day) Value: 21
  misc_feature: MA Experiment 20000355 PARAMETER Experiment Name: At_Siliques_Sub_P Parameter: Organism Value: A. thaliana
  misc_feature: MA Experiment 20000355 PARAMETER Experiment Name: At_Siliques_Sub_P Parameter: Plant Line Value: WS
  misc_feature: MA Experiment 20000355 PARAMETER Experiment Name: At_Siliques_Sub_P Parameter: Tissue Value: Less Than 5mm Siliques vs. Whole Plant
  misc_feature: MA Experiment ID: 20000440 Result: Up-regulated in Transcription
  misc_feature: MA Experiment 20000440 PARAMETER Experiment Name: At_Closed-Flower__Sub_P Parameter: Tissue Value: Closed Flower vs. Whole Plant
  misc_feature: MA Experiment ID: 20001248 Result: Down-regulated in Transcription
  misc_feature: MA Experiment 20001248 PARAMETER Experiment Name: At_Far-red-induction_P Parameter: Age (day) Value: 7
  misc_feature: MA Experiment 20001248 PARAMETER Experiment Name: At_Far-red-induction_P Parameter: Light Value: Far-red vs. White
  misc_feature: MA Experiment 20001248 PARAMETER Experiment Name: At_Far-red-induction_P Parameter: Organism Value: A. thaliana
  misc_feature: MA Experiment 20001248 PARAMETER Experiment Name: At_Far-red-induction_P Parameter: Plant Line Value: Columbia
  misc_feature: MA Experiment 20001248 PARAMETER Experiment Name: At_Far-red-induction_P Parameter: Timepoint (hr) Value: 4
  misc_feature: MA Experiment 20001248 PARAMETER Experiment Name: At_Far-red-induction_P Parameter: Tissue Value: Whole Plant
  misc_feature: MA Experiment ID: 20001451 Result: Up-regulated in Transcription
  misc_feature: MA Experiment 20001451 PARAMETER Experiment Name: At_Far-red-induction_P Parameter: Age (day) Value: 7
  misc_feature: MA Experiment 20001451 PARAMETER Experiment Name: At_Far-red-induction_P Parameter: Light Value: Far-red vs. White
  misc_feature: MA Experiment 20001451 PARAMETER Experiment Name: At_Far-red-induction_P Parameter: Organism Value: A. thaliana
  misc_feature: MA Experiment 20001451 PARAMETER Experiment Name: At_Far-red-induction_P Parameter: Plant Line Value: Columbia
  misc_feature: MA Experiment 20001451 PARAMETER Experiment Name: At_Far-red-induction_P Parameter: Timepoint (hr) Value: 24
  misc_feature: MA Experiment 20001451 PARAMETER Experiment Name: At_Far-red-induction_P Parameter: Tissue Value: Whole Plant
  misc_feature: MA Experiment ID: 20001557 Result: Up-regulated in Transcription
  misc_feature: MA Experiment 20001557 PARAMETER Experiment Name: At_Drought_Soil_Dry_P Parameter: Age (day) Value: 27
  misc_feature: MA Experiment 20001557 PARAMETER Experiment Name: At_Drought_Soil_Dry_P Parameter: Organism Value: A. thaliana
  misc_feature: MA Experiment 20001557 PARAMETER Experiment Name: At_Drought_Soil_Dry_P Parameter: Plant Line Value: WS
  misc_feature: MA Experiment 20001557 PARAMETER Experiment Name: At_Drought_Soil_Dry_P Parameter: Post Timepoint (hr) Value: 3
  misc_feature: MA Experiment 20001557 PARAMETER Experiment Name: At_Drought_Soil_Dry_P Parameter: Post-Treatment Value: Re-Water vs. No Drought
  misc_feature: MA Experiment 20001557 PARAMETER Experiment Name: At_Drought_Soil_Dry_P Parameter: Timepoint (day) Value: 13
  misc_feature: MA Experiment 20001557 PARAMETER Experiment Name: At_Drought_Soil_Dry_P Parameter: Treatment Value: Drought vs. No Drought
aatctctctttatctctctttctctgtttactaaatcgccagtattcgccgcaagaaagatgtctccggcgaagaagagccgaagttttcctccgataagcgagtgtaaaagcagagagtatgattcgatcgctgcggatctcgacgggactctgcttctgtcaagaagctctttcccttacttcatgctggtggccattgaagcaggtagtctcttccgtggattgatccttcttctttctcttcccatcgtcatcatcgcttatctcttcgtctccgaatctctcggaatccaaatccttatcttcatctccttcgccggtatcaagatcaagaacatcgaactcgtctctcgcgccgttcttacacggttttacgcggcggatgtgaggaaagatagttttgaggtgtttgataaatgtaagaagaggaaagtagtggtgactgcgaatccgatagtgatggttgagccattcgtcaaagactatttgggaggagataaagttttgggaacagagattgaagttaaccccaaaacgatgaaagctactggttttgtgaaaaagcctggtgttcttgttggtgatctcaagagattagccatcttgaaagagttcggcgatgactcaccggatcttggcctcggtgaccgcacctccgatcacgatttcatgtccatttgcaaggaaggttacatggtgcatgagaccaaatcagccacaacagtccctatagagagtctcaagaaccgcataatcttccatgatggccgtcttgtccaacgtccgaccccattaaacgccttaatcatttacctttggcttcctttcggcttcatgctctctgtcttccgcgtctacttcaacctccctttacccgaacgcttcgtccgctacacttacgagatcctcggcattcacctcacaatccgtggccaccgtcctccacctccttcccccggaaaacctggaaacctctacgttctcaaccaccgcaccgcccttgaccccattatcatcgccattgctctcggccgtaagatcacatgtgtcacttatagtgtctctcgcctctccctgatgctctcacccattcctgctgttgctctgacccgagaccgtgtcgctgacgcagcccgcatgaggcaactcctcgagaaaggtgatttggtgatctgtcctgaaggcacaacgtgtagagaaccatatctactaaggttcagtgctctatttgcagagctgagcgaccggatcgtgcctgtggccatgaactgcaagcaagggatgttcaacgggacgacagttagaggtgtgaaattctgggatccgtacttcttcttcatgaacccccgacctagctacgaggccactttcttggaccgtttgcccgaagaaatgacggtaaacggtggtggcaagactccttttgaggtggctaattacgttcagaaggtgatcggtggagttttggggttcgaatgtactgaacttacaaggaaggataagtatctgttgcttggaggcaacgacggaaaggttgagtctatcaataagaccaagtccatggagtaataatccagctagtctggttgctgctattttgcttgggagtgaagttaggtctttcgggttttcccaattacttttttttttgttttttttcatgtattgttcgaggaaaatgttttgttgaatatgcactggataatgaaactacatttgaatcaaagtacgtacatgtagtgtaccatttccccttgccttaactatgaatgatttgtaaactcaccttgtattataagatatc

SEQ ID NO: 103029 - protein, 522 aa, Arabidopsis thaliana
  peptide (1)..(522): Ceres Seq. ID no. 13611826
  misc_feature (306)..(423): Pfam Name: Acyltransferase Pfam Description: Acyltransferase
  misc_feature (20)..(522): Homolog of NCBI NO: 15223437 NR Description: expressed protein [Arabidopsis thaliana]
  misc_feature (20)..(522): Homolog of NCBI NO: 17064780 NR Description: Unknown protein [Arabidopsis thaliana]
  misc_feature (20)..(520): Homolog of NCBI NO: 15224445 NR Description: phospholipid/glycerol acyltransferase family
  misc_feature (232)..(519): Homolog of NCBI NO: 15236797 NR Description: expressed protein [Arabidopsis thaliana]
  misc_feature (29)..(521): Homolog of NCBI NO: 38000002 NR Description: unknown protein [Oryza sativa (japonica
  misc_feature (29)..(514): Homolog of NCBI NO: 37534314 NR Description: hypothetical protein [Oryza sativa (japonica group)] >gi|31432061|gb|AAP53746.1| hypothetical protein [Oryza
  misc_feature (64)..(521): Homolog of NCBI NO: 29788867 NR Description: hypothetical protein [Oryza sativa (japonica
  misc_feature (42)..(516): Homolog of NCBI NO: 15229747 NR Description: expressed protein [Arabidopsis thaliana]
  misc_feature (42)..(516): Homolog of NCBI NO: 15239924 NR Description: phospholipid/glycerol acyltransferase family thaliana] >gi|8978345|dbj|BAA98198.1|
  misc_feature (41)..(512): Homolog of NCBI NO: 18390661 NR Description: phospholipid/glycerol acyltransferase family
SLFISLSLFTKSPVFAARKMSPAKKSRSFPPISECKSREYDSIAADLDGTLLLSRSSFPYFMLVAIEAGSLFRGLILLLSLPIVIIAYLFVSESLGIQILIFISFAGIKIKNIELVSRAVLTRFYAADVRKDSFEVFDKCKKRKVVVTANPIVMVEPFVKDYLGGDKVLGTEIEVNPKTMKATGFVKKPGVLVGDLKRLAILKEFGDDSPDLGLGDRTSDHDFMSICKEGYMVHETKSATTVPIESLKNRIIFHDGRLVQRPTPLNALIIYLWLPFGFMLSVFRVYFNLPLPERFVRYTYEILGIHLTIRGHRPPPPSPGKPGNLYVLNHRTALDPIIIAIALGRKITCVTYSVSRLSLMLSPIPAVALTRDRVADAARMRQLLEKGDLVICPEGTTCREPYLLRFSALFAELSDRIVPVAMNCKQGMFNGTTVRGVKFWDPYFFFMNPRPSYEATFLDRLPEEMTVNGGGKTPFEVANYVQKVIGGVLGFECTELTRKDKYLLLGGNDGKVESINKTKSME

SEQ ID NO: 103030 - protein, 503 aa, Arabidopsis thaliana
  peptide (1)..(503): Ceres Seq. ID no. 13611827
  misc_feature (287)..(404): Pfam Name: Acyltransferase Pfam Description: Acyltransferase
  misc_feature (1)..(503): Homolog of NCBI NO: 15223437 NR Description: expressed protein [Arabidopsis thaliana]
  misc_feature (1)..(503): Homolog of NCBI NO: 17064780 NR Description: Unknown protein [Arabidopsis thaliana]
  misc_feature (1)..(501): Homolog of NCBI NO: 15224445 NR Description: phospholipid/glycerol acyltransferase family
  misc_feature (213)..(500): Homolog of NCBI NO: 15236797 NR Description: expressed protein [Arabidopsis thaliana]
  misc_feature (10)..(502): Homolog of NCBI NO: 38000002 NR Description: unknown protein [Oryza sativa (japonica
  misc_feature (10)..(495): Homolog of NCBI NO: 37534314 NR Description: hypothetical protein [Oryza sativa (japonica group)] >gi|31432061|gb|AAP53746.1| hypothetical protein [Oryza
  misc_feature (45)..(502): Homolog of NCBI NO: 29788867 NR Description: hypothetical protein [Oryza sativa (japonica
  misc_feature (23)..(497): Homolog of NCBI NO: 15229747 NR Description: expressed protein [Arabidopsis thaliana]
  misc_feature (23)..(497): Homolog of NCBI NO: 15239924 NR Description: phospholipid/glycerol acyltransferase family thaliana] >gi|8978345|dbj|BAA98198.1|
  misc_feature (22)..(493): Homolog of NCBI NO: 18390661 NR Description: phospholipid/glycerol acyltransferase family
MSPAKKSRSFPPISECKSREYDSIAADLDGTLLLSRSSFPYFMLVAIEAGSLFRGLILLLSLPIVIIAYLFVSESLGIQILIFISFAGIKIKNIELVSRAVLTRFYAADVRKDSFEVFDKCKKRKVVVTANPIVMVEPFVKDYLGGDKVLGTEIEVNPKTMKATGFVKKPGVLVGDLKRLAILKEFGDDSPDLGLGDRTSDHDFMSICKEGYMVHETKSATTVPIESLKNRIIFHDGRLVQRPTPLNALIIYLWLPFGFMLSVFRVYFNLPLPERFVRYTYEILGIHLTIRGHRPPPPSPGKPGNLYVLNHRTALDPIIIAIALGRKITCVTYSVSRLSLMLSPIPAVALTRDRVADAARMRQLLEKGDLVICPEGTTCREPYLLRFSALFAELSDRIVPVAMNCKQGMFNGTTVRGVKFWDPYFFFMNPRPSYEATFLDRLPEEMTVNGGGKTPFEVANYVQKVIGGVLGFECTELTRKDKYLLLGGNDGKVESINKTKSME

SEQ ID NO: 103031 - protein, 461 aa, Arabidopsis thaliana
  peptide (1)..(461): Ceres Seq. ID no. 13611828
  misc_feature (245)..(362): Pfam Name: Acyltransferase Pfam Description: Acyltransferase
  misc_feature (1)..(461): Homolog of NCBI NO: 15223437 NR Description: expressed protein [Arabidopsis thaliana]
  misc_feature (1)..(461): Homolog of NCBI NO: 17064780 NR Description: Unknown protein [Arabidopsis thaliana]
  misc_feature (1)..(459): Homolog of NCBI NO: 15224445 NR Description: phospholipid/glycerol acyltransferase family
  misc_feature (171)..(458): Homolog of NCBI NO: 15236797 NR Description: expressed protein [Arabidopsis thaliana]
  misc_feature (1)..(460): Homolog of NCBI NO: 38000002 NR Description: unknown protein [Oryza sativa (japonica
  misc_feature (1)..(453): Homolog of NCBI NO: 37534314 NR Description: hypothetical protein [Oryza sativa (japonica group)] >gi|31432061|gb|AAP53746.1| hypothetical protein [Oryza
  misc_feature (3)..(460): Homolog of NCBI NO: 29788867 NR Description: hypothetical protein [Oryza sativa (japonica
  misc_feature (1)..(455): Homolog of NCBI NO: 15229747 NR Description: expressed protein [Arabidopsis thaliana]
  misc_feature (1)..(455): Homolog of NCBI NO: 15239924 NR Description: phospholipid/glycerol acyltransferase family thaliana] >gi|8978345|dbj|BAA98198.1|
  misc_feature (1)..(451): Homolog of NCBI NO: 18390661 NR Description: phospholipid/glycerol acyltransferase family
MLVAIEAGSLFRGLILLLSLPIVIIAYLFVSESLGIQILIFISFAGIKIKNIELVSRAVLTRFYAADVRKDSFEVFDKCKKRKVVVTANPIVMVEPFVKDYLGGDKVLGTEIEVNPKTMKATGFVKKPGVLVGDLKRLAILKEFGDDSPDLGLGDRTSDHDFMSICKEGYMVHETKSATTVPIESLKNRIIFHDGRLVQRPTPLNALIIYLWLPFGFMLSVFRVYFNLPLPERFVRYTYEILGIHLTIRGHRPPPPSPGKPGNLYVLNHRTALDPIIIAIALGRKITCVTYSVSRLSLMLSPIPAVALTRDRVADAARMRQLLEKGDLVICPEGTTCREPYLLRFSALFAELSDRIVPVAMNCKQGMFNGTTVRGVKFWDPYFFFMNPRPSYEATFLDRLPEEMTVNGGGKTPFEVANYVQKVIGGVLGFECTELTRKDKYLLLGGNDGKVESINKTKSME

SEQ ID NO: 103032 - DNA, 1291 bp, Arabidopsis thaliana
  misc_feature (1)..(1291): Ceres Seq. ID no. 13611829
  misc_feature: MA Experiment ID: 108461 Result: Down-regulated in Transcription
  misc_feature: MA Experiment 108461 PARAMETER Experiment Name: At_Germinating_Seeds_cDNA_P Parameter: Age (day) Value: 1 vs. 0
  misc_feature: MA Experiment 108461 PARAMETER Experiment Name: At_Germinating_Seeds_cDNA_P Parameter: Tissue Value: Germinating Seeds
  misc_feature: MA Experiment ID: 108473 Result: Up-regulated in Transcription
  misc_feature: MA Experiment 108473 PARAMETER Experiment Name: At_Drought_Flowers_cDNA_P Parameter: Timepoint (hr) Value: 7 d
  misc_feature: MA Experiment 108473 PARAMETER Experiment Name: At_Drought_Flowers_cDNA_P Parameter: Tissue Value: Flower
  misc_feature: MA Experiment 108473 PARAMETER Experiment Name: At_Drought_Flowers_cDNA_P Parameter: Treatment Value: Drought vs. No Drought
  misc_feature: MA Experiment ID: 108561 Result: Up-regulated in Transcription
  misc_feature: MA Experiment 108561 PARAMETER Experiment Name: At_100uM_ABA_cDNA_P Parameter: Timepoint (hr) Value: 6
  misc_feature: MA Experiment 108561 PARAMETER Experiment Name: At_100uM_ABA_cDNA_P Parameter: Tissue Value: Aerial
  misc_feature: MA Experiment 108561 PARAMETER Experiment Name: At_100uM_ABA_cDNA_P Parameter: Treatment Value: 100uM ABA vs. No Treatment
  misc_feature: MA Experiment ID: 108572 Result: Up-regulated in Transcription
  misc_feature: MA Experiment 108572 PARAMETER Experiment Name: At_Drought_cDNA_P Parameter: Timepoint (hr) Value: 1
  misc_feature: MA Experiment 108572 PARAMETER Experiment Name: At_Drought_cDNA_P Parameter: Tissue Value: Aerial
  misc_feature: MA Experiment 108572 PARAMETER Experiment Name: At_Drought_cDNA_P Parameter: Treatment Value: Drought vs. No Drought
  misc_feature: MA Experiment ID: 108573 Result: Up-regulated in Transcription
  misc_feature: MA Experiment 108573 PARAMETER Experiment Name: At_Drought_cDNA_P Parameter: Timepoint (hr) Value: 6
  misc_feature: MA Experiment 108573 PARAMETER Experiment Name: At_Drought_cDNA_P Parameter: Tissue Value: Aerial
  misc_feature: MA Experiment 108573 PARAMETER Experiment Name: At_Drought_cDNA_P Parameter: Treatment Value: Drought vs. No Drought
  misc_feature: MA Experiment ID: 108574 Result: Up-regulated in Transcription
  misc_feature: MA Experiment 108574 PARAMETER Experiment Name: At_Wounding__cDNA_P Parameter: Timepoint (hr) Value: 1
  misc_feature: MA Experiment 108574 PARAMETER Experiment Name: At_Wounding__cDNA_P Parameter: Tissue Value: Aerial
  misc_feature: MA Experiment 108574 PARAMETER Experiment Name: At_Wounding__cDNA_P Parameter: Treatment Value: Wounding vs. No Wounding
  misc_feature: MA Experiment ID: 108576 Result: Up-regulated in Transcription
  misc_feature: MA Experiment 108576 PARAMETER Experiment Name: At_42deg_Heat_cDNA_P Parameter: Temperature (deg C) Value: 42 vs. 22
  misc_feature: MA Experiment 108576 PARAMETER Experiment Name: At_42deg_Heat_cDNA_P Parameter: Timepoint (hr) Value: 1
  misc_feature: MA Experiment 108576 PARAMETER Experiment Name: At_42deg_Heat_cDNA_P Parameter: Tissue Value: Aerial
  misc_feature: MA Experiment ID: 108577 Result: Up-regulated in Transcription
  misc_feature: MA Experiment 108577 PARAMETER Experiment Name: At_42deg_Heat_cDNA_P Parameter: Temperature (deg C) Value: 42 vs. 22
  misc_feature: MA Experiment 108577 PARAMETER Experiment Name: At_42deg_Heat_cDNA_P Parameter: Timepoint (hr) Value: 6
  misc_feature: MA Experiment 108577 PARAMETER Experiment Name: At_42deg_Heat_cDNA_P Parameter: Tissue Value: Aerial
  misc_feature: MA Experiment ID: 108585 Result: Up-regulated in Transcription
  misc_feature: MA Experiment 108585 PARAMETER Experiment Name: At_5mM_NaNP_cDNA_P Parameter: Timepoint (hr) Value: 6
  misc_feature: MA Experiment 108585 PARAMETER Experiment Name: At_5mM_NaNP_cDNA_P Parameter: Tissue Value: Aerial
  misc_feature: MA Experiment 108585 PARAMETER Experiment Name: At_5mM_NaNP_cDNA_P Parameter: Treatment Value: null
  misc_feature: MA Experiment ID: 108594 Result: Down-regulated in Transcription
  misc_feature: MA Experiment 108594 PARAMETER Experiment Name: At_Ler-rhl_Root_cDNA_P Parameter: Plant Line Value: null
  misc_feature: MA Experiment ID: 108595 Result: Up-regulated in Transcription
  misc_feature: MA Experiment 108595 PARAMETER Experiment Name: At_Ler-pi_Ovule_cDNA_P Parameter: Plant Line Value: null
  misc_feature: MA Experiment ID: 108607 Result: Up-regulated in Transcription
  misc_feature: MA Experiment 108607 PARAMETER Experiment Name: At_100uM_ABA_cDNA_P Parameter: Timepoint (hr) Value: 4
  misc_feature: MA Experiment 108607 PARAMETER Experiment Name: At_100uM_ABA_cDNA_P Parameter: Tissue Value: Aerial
  misc_feature: MA Experiment 108607 PARAMETER Experiment Name: At_100uM_ABA_cDNA_P Parameter: Treatment Value: 100uM ABA vs. No Treatment
  misc_feature: MA Experiment ID: 108608 Result: Up-regulated in Transcription
  misc_feature: MA Experiment 108608 PARAMETER Experiment Name: At_100uM_ABA_cDNA_P Parameter: Timepoint (hr) Value: 1
  misc_feature: MA Experiment 108608 PARAMETER Experiment Name: At_100uM_ABA_cDNA_P Parameter: Tissue Value: Aerial
  misc_feature: MA Experiment 108608 PARAMETER Experiment Name: At_100uM_ABA_cDNA_P Parameter: Treatment Value: 100uM ABA vs. No Treatment
  misc_feature: MA Experiment ID: 20000093 Result: Up-regulated in Transcription
  misc_feature: MA Experiment 20000093 PARAMETER Experiment Name: At_42deg_Heat_cDNA_P Parameter: Temperature (deg C) Value: 42 vs. 22
  misc_feature: MA Experiment 20000093 PARAMETER Experiment Name: At_42deg_Heat_cDNA_P Parameter: Timepoint (hr) Value: 0.5
  misc_feature: MA Experiment 20000093 PARAMETER Experiment Name: At_42deg_Heat_cDNA_P Parameter: Tissue Value: Aerial
  misc_feature: MA Experiment ID: 20000111 Result: Up-regulated in Transcription
  misc_feature: MA Experiment 20000111 PARAMETER Experiment Name: At_42deg_Heat_cDNA_P Parameter: Temperature (deg C) Value: 42 vs. 22
  misc_feature: MA Experiment 20000111 PARAMETER Experiment Name: At_42deg_Heat_cDNA_P Parameter: Timepoint (hr) Value: 6
  misc_feature: MA Experiment 20000111 PARAMETER Experiment Name: At_42deg_Heat_cDNA_P Parameter: Tissue Value: Aerial
  misc_feature: MA Experiment ID: 20000113 Result: Up-regulated in Transcription
  misc_feature: MA Experiment 20000113 PARAMETER Experiment Name: At_42deg_Heat_cDNA_P Parameter: Temperature (deg C) Value: 42 vs. 22
  misc_feature: MA Experiment 20000113 PARAMETER Experiment Name: At_42deg_Heat_cDNA_P Parameter: Timepoint (hr) Value: 8
  misc_feature: MA Experiment 20000113 PARAMETER Experiment Name: At_42deg_Heat_cDNA_P Parameter: Tissue Value: Aerial
  misc_feature: MA Experiment ID: 20000144 Result: Up-regulated in Transcription
  misc_feature: MA Experiment 20000144 PARAMETER Experiment Name: At_42deg_Heat_cDNA_P Parameter: Temperature (deg C) Value: 42 vs. 22
  misc_feature: MA Experiment 20000144 PARAMETER Experiment Name: At_42deg_Heat_cDNA_P Parameter: Timepoint (hr) Value: 1
  misc_feature: MA Experiment 20000144 PARAMETER Experiment Name: At_42deg_Heat_cDNA_P Parameter: Tissue Value: Aerial
  misc_feature: MA Experiment ID: 20000166 Result: Up-regulated in Transcription
  misc_feature: MA Experiment 20000166 PARAMETER Experiment Name: At_100uM_ABA_P Parameter: Age (day) Value: 14
  misc_feature: MA Experiment 20000166 PARAMETER Experiment Name: At_100uM_ABA_P Parameter: Organism Value: A. thaliana
  misc_feature: MA Experiment 20000166 PARAMETER Experiment Name: At_100uM_ABA_P Parameter: Plant Line Value: WS
  misc_feature: MA Experiment 20000166 PARAMETER Experiment Name: At_100uM_ABA_P Parameter: Timepoint (hr) Value: 1
  misc_feature: MA Experiment 20000166 PARAMETER Experiment Name: At_100uM_ABA_P Parameter: Tissue Value: Aerial
  misc_feature: MA Experiment 20000166 PARAMETER Experiment Name: At_100uM_ABA_P Parameter: Treatment Value: 100uM ABA vs. No Treatment
  misc_feature: MA Experiment ID: 20000173 Result: Up-regulated in Transcription
  misc_feature: MA Experiment 20000173 PARAMETER Experiment Name: At_42deg_Heat_P Parameter: Age (day) Value: 14
  misc_feature: MA Experiment 20000173 PARAMETER Experiment Name: At_42deg_Heat_P Parameter: Organism Value: A. thaliana
  misc_feature: MA Experiment 20000173 PARAMETER Experiment Name: At_42deg_Heat_P Parameter: Plant Line Value: WS
  misc_feature: MA Experiment 20000173 PARAMETER Experiment Name: At_42deg_Heat_P Parameter: Temperature (deg C) Value: 42 vs. 22
  misc_feature: MA Experiment 20000173 PARAMETER Experiment Name: At_42deg_Heat_P Parameter: Timepoint (hr) Value: 6
  misc_feature: MA Experiment 20000173 PARAMETER Experiment Name: At_42deg_Heat_P Parameter: Tissue Value: Aerial
  misc_feature: MA Experiment ID: 20000182 Result: Up-regulated in Transcription
  misc_feature: MA Experiment 20000182 PARAMETER Experiment Name: At_2mM_SA_P Parameter: Age (day) Value: 14
  misc_feature: MA Experiment 20000182 PARAMETER Experiment Name: At_2mM_SA_P Parameter: Organism Value: A. thaliana
  misc_feature: MA Experiment 20000182 PARAMETER Experiment Name: At_2mM_SA_P Parameter: Plant Line Value: WS
  misc_feature: MA Experiment 20000182 PARAMETER Experiment Name: At_2mM_SA_P Parameter: Timepoint (hr) Value: 6
  misc_feature: MA Experiment 20000182 PARAMETER Experiment Name: At_2mM_SA_P Parameter: Tissue Value: Aerial
  misc_feature: MA Experiment 20000182 PARAMETER Experiment Name: At_2mM_SA_P Parameter: Treatment Value: 2mM SA vs. No Treatment
  misc_feature: MA Experiment ID: 20000268 Result: Up-regulated in Transcription
  misc_feature: MA Experiment 20000268 PARAMETER Experiment Name: At_100mM_NaCl__P Parameter: Age (day) Value: 14
  misc_feature: MA Experiment 20000268 PARAMETER Experiment Name: At_100mM_NaCl__P Parameter: Organism Value: A. thaliana
  misc_feature: MA Experiment 20000268 PARAMETER Experiment Name: At_100mM_NaCl__P Parameter: Plant Line Value: WS
  misc_feature: MA Experiment 20000268 PARAMETER Experiment Name: At_100mM_NaCl__P Parameter: Timepoint (hr) Value: 6
  misc_feature: MA Experiment 20000268 PARAMETER Experiment Name: At_100mM_NaCl__P Parameter: Tissue Value: Whole Plant
  misc_feature: MA Experiment 20000268 PARAMETER Experiment Name: At_100mM_NaCl__P Parameter: Treatment Value: 100mM NaCl vs. No Treatment
  misc_feature: MA Experiment ID: 20000286 Result: Down-regulated in Transcription
  misc_feature: MA Experiment 20000286 PARAMETER Experiment Name: At_Open_Flower_P Parameter: Age (day) Value: 21
  misc_feature: MA Experiment 20000286 PARAMETER Experiment Name: At_Open_Flower_P Parameter: Plant Line Value: WS
  misc_feature: MA Experiment 20000286 PARAMETER Experiment Name: At_Open_Flower_P Parameter: Tissue Value: Half Open vs. Whole Plant
  misc_feature: MA Experiment ID: 20000306 Result: Down-regulated in Transcription
  misc_feature: MA Experiment 20000306 PARAMETER Experiment Name: At_Germinating_Seeds_Sub_P Parameter: Age (hr) Value: 6 vs. 0
  misc_feature: MA Experiment 20000306 PARAMETER Experiment Name: At_Germinating_Seeds_Sub_P Parameter: Organism Value: A. thaliana
  misc_feature: MA Experiment 20000306 PARAMETER Experiment Name: At_Germinating_Seeds_Sub_P Parameter: Plant Line Value: WS
  misc_feature: MA Experiment 20000306 PARAMETER Experiment Name: At_Germinating_Seeds_Sub_P Parameter: Tissue Value: Germinating Seeds
  misc_feature: MA Experiment ID: 20000307 Result: Down-regulated in Transcription
  misc_feature: MA Experiment 20000307 PARAMETER Experiment Name: At_Germinating_Seeds_Sub_P Parameter: Age (hr) Value: 24 vs. 0
  misc_feature: MA Experiment 20000307 PARAMETER Experiment Name: At_Germinating_Seeds_Sub_P Parameter: Organism Value: A. thaliana
  misc_feature: MA Experiment 20000307 PARAMETER Experiment Name: At_Germinating_Seeds_Sub_P Parameter: Plant Line Value: WS
  misc_feature: MA Experiment 20000307 PARAMETER Experiment Name: At_Germinating_Seeds_Sub_P Parameter: Tissue Value: Germinating Seeds
  misc_feature: MA Experiment ID: 20000327 Result: Up-regulated in Transcription
  misc_feature: MA Experiment 20000327 PARAMETER Experiment Name: At_42deg_Heat_Sub_P Parameter: Age (day) Value: 14
  misc_feature: MA Experiment 20000327 PARAMETER Experiment Name: At_42deg_Heat_Sub_P Parameter: Organism Value: A. thaliana
  misc_feature: MA Experiment 20000327 PARAMETER Experiment Name: At_42deg_Heat_Sub_P Parameter: Plant Line Value: WS
  misc_feature: MA Experiment 20000327 PARAMETER Experiment Name: At_42deg_Heat_Sub_P Parameter: Temperature (deg C) Value: 42 vs. 22
  misc_feature: MA Experiment 20000327 PARAMETER Experiment Name: At_42deg_Heat_Sub_P Parameter: Timepoint (hr) Value: 1
  misc_feature: MA Experiment 20000327 PARAMETER Experiment Name: At_42deg_Heat_Sub_P Parameter: Tissue Value: Aerial
  misc_feature: MA Experiment ID: 20000328 Result: Up-regulated in Transcription
  misc_feature: MA Experiment 20000328 PARAMETER Experiment Name: At_42deg_Heat_Sub_P Parameter: Age (day) Value: 14
  misc_feature: MA Experiment 20000328 PARAMETER Experiment Name: At_42deg_Heat_Sub_P Parameter: Organism Value: A. thaliana
  misc_feature: MA Experiment 20000328 PARAMETER Experiment Name: At_42deg_Heat_Sub_P Parameter: Plant Line Value: WS
  misc_feature: MA Experiment 20000328 PARAMETER Experiment Name: At_42deg_Heat_Sub_P Parameter: Temperature (deg C) Value: 42 vs. 22
  misc_feature: MA Experiment 20000328 PARAMETER Experiment Name: At_42deg_Heat_Sub_P Parameter: Timepoint (hr) Value: 6
  misc_feature: MA Experiment 20000328 PARAMETER Experiment Name: At_42deg_Heat_Sub_P Parameter: Tissue Value: Aerial
  misc_feature: MA Experiment ID: 20000346 Result: Up-regulated in Transcription
  misc_feature: MA Experiment 20000346 PARAMETER Experiment Name: At_2mM_SA_Sub_P Parameter: Age (day) Value: 14
  misc_feature: MA Experiment 20000346 PARAMETER Experiment Name: At_2mM_SA_Sub_P Parameter: Organism Value: A. thaliana
  misc_feature: MA Experiment 20000346 PARAMETER Experiment Name: At_2mM_SA_Sub_P Parameter: Plant Line Value: WS
  misc_feature: MA Experiment 20000346 PARAMETER Experiment Name: At_2mM_SA_Sub_P Parameter: Timepoint (hr) Value: 1
  misc_feature: MA Experiment 20000346 PARAMETER Experiment Name: At_2mM_SA_Sub_P Parameter: Tissue Value: Aerial
  misc_feature: MA Experiment 20000346 PARAMETER Experiment Name: At_2mM_SA_Sub_P Parameter: Treatment Value: 2mM SA vs. No Treatment
  misc_feature: MA Experiment ID: 20000347 Result: Up-regulated in Transcription
  misc_feature: MA Experiment 20000347 PARAMETER Experiment Name: At_2mM_SA_Sub_P Parameter: Age (day) Value: 14
  misc_feature: MA Experiment 20000347 PARAMETER Experiment Name: At_2mM_SA_Sub_P Parameter: Organism Value: A. thaliana
  misc_feature: MA Experiment 20000347 PARAMETER Experiment Name: At_2mM_SA_Sub_P Parameter: Plant Line Value: WS
  misc_feature: MA Experiment 20000347 PARAMETER Experiment Name: At_2mM_SA_Sub_P Parameter: Timepoint (hr) Value: 6
  misc_feature: MA Experiment 20000347 PARAMETER Experiment Name: At_2mM_SA_Sub_P Parameter: Tissue Value: Aerial
  misc_feature: MA Experiment 20000347 PARAMETER Experiment Name: At_2mM_SA_Sub_P Parameter: Treatment Value: 2mM SA vs. No Treatment
  misc_feature: MA Experiment ID: 20000355 Result: Down-regulated in Transcription
  misc_feature: MA Experiment 20000355 PARAMETER Experiment Name: At_Siliques_Sub_P Parameter: Age (day) Value: 21
  misc_feature: MA Experiment 20000355 PARAMETER Experiment Name: At_Siliques_Sub_P Parameter: Organism Value: A. thaliana
  misc_feature: MA Experiment 20000355 PARAMETER Experiment Name: At_Siliques_Sub_P Parameter: Plant Line Value: WS
  misc_feature: MA Experiment 20000355 PARAMETER Experiment Name: At_Siliques_Sub_P Parameter: Tissue Value: Less Than 5mm Siliques vs. Whole Plant
  misc_feature: MA Experiment ID: 20000436 Result: Up-regulated in Transcription
  misc_feature: MA Experiment 20000436 PARAMETER Experiment Name: At_Drought_P Parameter: Age (day) Value: 7
  misc_feature: MA Experiment 20000436 PARAMETER Experiment Name: At_Drought_P Parameter: Organism Value: A. thaliana
  misc_feature: MA Experiment 20000436 PARAMETER Experiment Name: At_Drought_P Parameter: Plant Line Value: WS
  misc_feature: MA Experiment 20000436 PARAMETER Experiment Name: At_Drought_P Parameter: Timepoint (hr) Value: 12
  misc_feature: MA Experiment 20000436 PARAMETER Experiment Name: At_Drought_P Parameter: Tissue Value: Whole Plant
  misc_feature: MA Experiment 20000436 PARAMETER Experiment Name: At_Drought_P Parameter: Treatment Value: Drought vs. No Drought
  misc_feature: MA Experiment ID: 20000437 Result: Up-regulated in Transcription
  misc_feature: MA Experiment 20000437 PARAMETER Experiment Name: At_Drought_P Parameter: Age (day) Value: 8
  misc_feature: MA Experiment 20000437 PARAMETER Experiment Name: At_Drought_P Parameter: Organism Value: A. thaliana
  misc_feature: MA Experiment 20000437 PARAMETER Experiment Name: At_Drought_P Parameter: Plant Line Value: WS
  misc_feature: MA Experiment 20000437 PARAMETER Experiment Name: At_Drought_P Parameter: Timepoint (hr) Value: 24
  misc_feature: MA Experiment 20000437 PARAMETER Experiment Name: At_Drought_P Parameter: Tissue Value: Whole Plant
  misc_feature: MA Experiment 20000437 PARAMETER Experiment Name: At_Drought_P Parameter: Treatment Value: Drought vs. No Drought
  misc_feature: MA Experiment ID: 20001556 Result: Up-regulated in Transcription
  misc_feature: MA Experiment 20001556 PARAMETER Experiment Name: At_Drought_Soil_Dry_P Parameter: Age (day) Value: 26
  misc_feature: MA Experiment 20001556 PARAMETER Experiment Name: At_Drought_Soil_Dry_P Parameter: Organism Value: A. thaliana
  misc_feature: MA Experiment 20001556 PARAMETER Experiment Name: At_Drought_Soil_Dry_P Parameter: Plant Line Value: WS
  misc_feature: MA Experiment 20001556 PARAMETER Experiment Name: At_Drought_Soil_Dry_P Parameter: Post Timepoint (hr) Value: None
  misc_feature: MA Experiment 20001556 PARAMETER Experiment Name: At_Drought_Soil_Dry_P Parameter: Post-Treatment Value: None
  misc_feature: MA Experiment 20001556 PARAMETER Experiment Name: At_Drought_Soil_Dry_P Parameter: Timepoint (day) Value: 12
  misc_feature: MA Experiment 20001556 PARAMETER Experiment Name: At_Drought_Soil_Dry_P Parameter: Treatment Value: Drought vs. No Drought
  misc_feature: MA Experiment ID: 20001557 Result: Up-regulated in Transcription
  misc_feature: MA Experiment 20001557 PARAMETER Experiment Name: At_Drought_Soil_Dry_P Parameter: Age (day) Value: 27
  misc_feature: MA Experiment 20001557 PARAMETER Experiment Name: At_Drought_Soil_Dry_P Parameter: Organism Value: A. thaliana
  misc_feature: MA Experiment 20001557 PARAMETER Experiment Name: At_Drought_Soil_Dry_P Parameter: Plant Line Value: WS
  misc_feature: MA Experiment 20001557 PARAMETER Experiment Name: At_Drought_Soil_Dry_P Parameter: Post Timepoint (hr) Value: 3
  misc_feature: MA Experiment 20001557 PARAMETER Experiment Name: At_Drought_Soil_Dry_P Parameter: Post-Treatment Value: Re-Water vs. No Drought
  misc_feature: MA Experiment 20001557 PARAMETER Experiment Name: At_Drought_Soil_Dry_P Parameter: Timepoint (day) Value: 13
  misc_feature: MA Experiment 20001557 PARAMETER Experiment Name: At_Drought_Soil_Dry_P Parameter: Treatment Value: Drought vs. No Drought
  misc_feature: MA Experiment ID: 20001559 Result: Up-regulated in Transcription
  misc_feature: MA Experiment 20001559 PARAMETER Experiment Name: At_Drought_Soil_Dry_P Parameter: Age (day) Value: 28
  misc_feature: MA Experiment 20001559 PARAMETER Experiment Name: At_Drought_Soil_Dry_P Parameter: Organism Value: A. thaliana
  misc_feature: MA Experiment 20001559 PARAMETER Experiment Name: At_Drought_Soil_Dry_P Parameter: Plant Line Value: WS
  misc_feature: MA Experiment 20001559 PARAMETER Experiment Name: At_Drought_Soil_Dry_P Parameter: Post Timepoint (hr) Value: 29
  misc_feature: MA Experiment 20001559 PARAMETER Experiment Name: At_Drought_Soil_Dry_P Parameter: Post-Treatment Value: Re-Water vs. No Drought
  misc_feature: MA Experiment 20001559 PARAMETER Experiment Name: At_Drought_Soil_Dry_P Parameter: Timepoint (day) Value: 14
  misc_feature: MA Experiment 20001559 PARAMETER Experiment Name: At_Drought_Soil_Dry_P Parameter: Treatment Value: Drought vs. No Drought
  misc_feature: MA Experiment ID: 20001560 Result: Up-regulated in Transcription
  misc_feature: MA Experiment 20001560 PARAMETER Experiment Name: At_Drought_Soil_Dry_P Parameter: Age (day) Value: 28
  misc_feature: MA Experiment 20001560 PARAMETER Experiment Name: At_Drought_Soil_Dry_P Parameter: Organism Value: A. thaliana
  misc_feature: MA Experiment 20001560 PARAMETER Experiment Name: At_Drought_Soil_Dry_P Parameter: Plant Line Value: WS
  misc_feature: MA Experiment 20001560 PARAMETER Experiment Name: At_Drought_Soil_Dry_P Parameter: Post Timepoint (hr) Value: None
  misc_feature: MA Experiment 20001560 PARAMETER Experiment Name: At_Drought_Soil_Dry_P Parameter: Post-Treatment Value: None
  misc_feature: MA Experiment 20001560 PARAMETER Experiment Name: At_Drought_Soil_Dry_P Parameter: Timepoint (day) Value: 14
  misc_feature: MA Experiment 20001560 PARAMETER Experiment Name: At_Drought_Soil_Dry_P Parameter: Treatment Value: Drought vs. No Drought
  misc_feature: MA Experiment ID: 20001904 Result: Up-regulated in Transcription
  misc_feature: MA Experiment 20001904 PARAMETER Experiment Name: At_Drought_Reproduction_P Parameter: Age (day) Value: 37
  misc_feature: MA Experiment 20001904 PARAMETER Experiment Name: At_Drought_Reproduction_P Parameter: Organism Value: A. thaliana
  misc_feature: MA Experiment 20001904 PARAMETER Experiment Name: At_Drought_Reproduction_P Parameter: Plant Line Value: WS
  misc_feature: MA Experiment 20001904 PARAMETER Experiment Name: At_Drought_Reproduction_P Parameter: Timepoint (day) Value: 7
  misc_feature: MA Experiment 20001904 PARAMETER Experiment Name: At_Drought_Reproduction_P Parameter: Tissue Value: Rosettes
  misc_feature: MA Experiment 20001904 PARAMETER Experiment Name: At_Drought_Reproduction_P Parameter: Treatment Value: Drought vs. No Drought
  misc_feature: MA Experiment ID: 20001905 Result: Up-regulated in Transcription
  misc_feature: MA Experiment 20001905 PARAMETER Experiment Name: At_Drought_Reproduction_P Parameter: Age (day) Value: 40
  misc_feature: MA Experiment 20001905 PARAMETER Experiment Name: At_Drought_Reproduction_P Parameter: Organism Value: A. thaliana
  misc_feature: MA Experiment 20001905 PARAMETER Experiment Name: At_Drought_Reproduction_P Parameter: Plant Line Value: WS
  misc_feature: MA Experiment 20001905 PARAMETER Experiment Name: At_Drought_Reproduction_P Parameter: Timepoint (day) Value: 10
  misc_feature: MA Experiment 20001905 PARAMETER Experiment Name: At_Drought_Reproduction_P Parameter: Tissue Value: Rosettes
  misc_feature: MA Experiment 20001905 PARAMETER Experiment Name: At_Drought_Reproduction_P Parameter: Treatment Value: Drought vs. No Drought
  misc_feature: MA Experiment ID: 20001906 Result: Up-regulated in Transcription
  misc_feature: MA Experiment 20001906 PARAMETER Experiment Name: At_Drought_Reproduction_P Parameter: Age (day) Value: 35
  misc_feature: MA Experiment 20001906 PARAMETER Experiment Name: At_Drought_Reproduction_P Parameter: Organism Value: A. thaliana
  misc_feature: MA Experiment 20001906 PARAMETER Experiment Name: At_Drought_Reproduction_P Parameter: Plant Line Value: WS
  misc_feature: MA Experiment 20001906 PARAMETER Experiment Name: At_Drought_Reproduction_P Parameter: Timepoint (day) Value: 5
  misc_feature: MA Experiment 20001906 PARAMETER Experiment Name: At_Drought_Reproduction_P Parameter: Tissue Value: Siliques
  misc_feature: MA Experiment 20001906 PARAMETER Experiment Name: At_Drought_Reproduction_P Parameter: Treatment Value: Drought vs. No Drought
  misc_feature: MA Experiment ID: 20001908 Result: Up-regulated in Transcription
  misc_feature: MA Experiment 20001908 PARAMETER Experiment Name: At_Drought_Reproduction_P Parameter: Age (day) Value: 40
  misc_feature: MA Experiment 20001908 PARAMETER Experiment Name: At_Drought_Reproduction_P Parameter: Organism Value: A. thaliana
  misc_feature: MA Experiment 20001908 PARAMETER Experiment Name: At_Drought_Reproduction_P Parameter: Plant Line Value: WS
  misc_feature: MA Experiment 20001908 PARAMETER Experiment Name: At_Drought_Reproduction_P Parameter: Timepoint (day) Value: 10
  misc_feature: MA Experiment 20001908 PARAMETER Experiment Name: At_Drought_Reproduction_P Parameter: Tissue Value: Siliques
  misc_feature: MA Experiment 20001908 PARAMETER Experiment Name: At_Drought_Reproduction_P Parameter: Treatment Value: Drought vs. No Drought
  misc_feature: MA Experiment ID: 20001911 Result: Up-regulated in Transcription
  misc_feature: MA Experiment 20001911 PARAMETER Experiment Name: At_Drought_Reproduction_P Parameter: Age (day) Value: 40
  misc_feature: MA Experiment 20001911 PARAMETER Experiment Name: At_Drought_Reproduction_P Parameter: Organism Value: A. thaliana
  misc_feature: MA Experiment 20001911 PARAMETER Experiment Name: At_Drought_Reproduction_P Parameter: Plant Line Value: WS
  misc_feature: MA Experiment 20001911 PARAMETER Experiment Name: At_Drought_Reproduction_P Parameter: Timepoint (day) Value: 10
  misc_feature: MA Experiment 20001911 PARAMETER Experiment Name: At_Drought_Reproduction_P Parameter: Tissue Value: Flowers
  misc_feature: MA Experiment 20001911 PARAMETER Experiment Name: At_Drought_Reproduction_P Parameter: Treatment Value: Drought vs. No Drought
aagtttcaaaaacgccaagtttcagaggtagagagagagatactacaattgattaggataggatcaggatcatcctcaacaacctcctcctaattcctcctccattcatagtaacaataatattaagaaagagggtaaactatgtcagaattattacagttgcctccaggtttccgatttcaccctaccgatgaagagcttgtcatgcactatctctgccgcaaatgtgcctctcagtccatcgccgttccgatcatcgctgagatcgatctctacaaatacgatccatgggagcttcctggtttagccttgtatggtgagaaggaatggtacttcttctctcccagggacagaaaatatcccaacggttcgcgtcctaaccggtccgctggttctggttactggaaagctaccggagctgataaaccgatcggactacctaaaccggtcggaattaagaaagctcttgttttctacgccggcaaagctccaaagggagagaaaaccaattggatcatgcacgagtaccgtctcgccgacgttgaccggtccgttcgcaagaagaagaatagtctcaggctggatgattgggttctctgccggatttacaacaaaaaaggagctaccgagaggcggggaccaccgcctccggttgtttacggcgacgaaatcatggaggagaagccgaaggtgacggagatggttatgcctccgccgccgcaacagacaagtgagttcgcgtatttcgacacgtcggattcggtgccgaagctgcatactacggattcgagttgctcggagcaggtggtgtcgccggagttcacgagcgaggttcagagcgagcccaagtggaaagattggtcggccgtaagtaatgacaataacaatacccttgattttgggtttaattacattgatgccaccgtggataacgcgtttggaggaggagggagtagtaatcagatgtttccgctacaggatatgttcatgtacatgcagaagccttactagaagggaattcctttcctgccgccgaaacgcaacgcaaaacgaccctcgtttttgcgtttatggcaacacgagaccgttttatatggtcaatgagtgtgccgattcggccattagatttctgttcagtcttcgtttattctatagaccgtccgatttcagatcatccctaatcggacggtggtcgttggatgtatcagtagtgtattactgtgttaggtagaagaaaatccacttgttcttaaattggcataaaagtcagaagctaatatttatatgtgcc

SEQ ID NO: 103033 - protein, 289 aa, Arabidopsis thaliana; identical to SEQ ID NO: 34865
  peptide (1)..(289): Ceres Seq. ID no. 13611830
  misc_feature (7)..(132): Pfam Name: No apical meristem (NAM) protein Pfam Description: No apical meristem (NAM) protein
  misc_feature (1)..(289): Homolog of NCBI NO: 15223456 NR Description: No apical meristem (NAM) protein family
  misc_feature (1)..(289): Homolog of NCBI NO: 31322576 NR Description: NAC-domain protein 5-11 [Brassica napus]
  misc_feature (1)..(289): Homolog of NCBI NO: 31322578 NR Description: NAC-domain protein 18 [Brassica napus]
  misc_feature (61)..(289): Homolog of NCBI NO: 480618 NR Description: ATAF1 protein - Arabidopsis thaliana (fragment)
  misc_feature (1)..(289): Homolog of NCBI NO: 21105748 NR Description: nam-like protein 10 [Petunia x hybrida]
  misc_feature (5)..(289): Homolog of NCBI NO: 25458553 NR Description: OsNAC6 protein [imported] - rice OsNAC6 protein [Oryza sativa] >gi|13272281|gb|AAK17067.1| NAC6
  misc_feature (1)..(289): Homolog of NCBI NO: 40647397 NR Description: NAC domain protein [Lycopersicon esculentum]
  misc_feature (1)..(289): Homolog of NCBI NO: 14485513 NR Description: putative NAC domain protein [Solanum tuberosum]
  misc_feature (1)..(237): Homolog of NCBI NO: 22326685 NR Description: No apical meristem (NAM) protein family thaliana] >gi|13548337|emb|CAC35884.1| ATAF2 protein [Arabidopsis >gi|19424091|gb|AAL87335.1| unknown protein [Arabidopsis
  misc_feature (5)..(165): Homolog of NCBI NO: 15223963 NR Description: No apical meristem (NAM) protein family

SEQ ID NO: 103034 - protein, 268 aa, Arabidopsis thaliana; identical to SEQ ID NO: 34866
  peptide (1)..(268): Ceres Seq. ID no. 13611831
  misc_feature (1)..(111): Pfam Name: No apical meristem (NAM) protein Pfam Description: No apical meristem (NAM) protein
  misc_feature (1)..(268): Homolog of NCBI NO: 15223456 NR Description: No apical meristem (NAM) protein family
  misc_feature (1)..(268): Homolog of NCBI NO: 31322576 NR Description: NAC-domain protein 5-11 [Brassica napus]
  misc_feature (1)..(268): Homolog of NCBI NO: 31322578 NR Description: NAC-domain protein 18 [Brassica napus]
  misc_feature (40)..(268): Homolog of NCBI NO: 480618 NR Description: ATAF1 protein - Arabidopsis thaliana (fragment)
  misc_feature (1)..(268): Homolog of NCBI NO: 21105748 NR Description: nam-like protein 10 [Petunia x hybrida]
  misc_feature (1)..(268): Homolog of NCBI NO: 25458553 NR Description: OsNAC6 protein [imported] - rice OsNAC6 protein [Oryza sativa] >gi|13272281|gb|AAK17067.1| NAC6
  misc_feature (1)..(268): Homolog of NCBI NO: 40647397 NR Description: NAC domain protein [Lycopersicon esculentum]
  misc_feature (1)..(268): Homolog of NCBI NO: 14485513 NR Description: putative NAC domain protein [Solanum tuberosum]
  misc_feature (1)..(216): Homolog of NCBI NO: 22326685 NR Description: No apical meristem (NAM) protein family thaliana] >gi|13548337|emb|CAC35884.1| ATAF2 protein [Arabidopsis >gi|19424091|gb|AAL87335.1| unknown protein [Arabidopsis
  misc_feature (1)..(144): Homolog of NCBI NO: 15223963 NR Description: No apical meristem (NAM) protein family

SEQ ID NO: 103035 - protein, 164 aa, Arabidopsis thaliana; identical to SEQ ID NO: 34867
  peptide (1)..(164): Ceres Seq. ID no. 13611832
  misc_feature (1)..(164): Homolog of NCBI NO: 15223456 NR Description: No apical meristem (NAM) protein family
  misc_feature (1)..(164): Homolog of NCBI NO: 31322576 NR Description: NAC-domain protein 5-11 [Brassica napus]
  misc_feature (1)..(164): Homolog of NCBI NO: 31322578 NR Description: NAC-domain protein 18 [Brassica napus]
  misc_feature (1)..(164): Homolog of NCBI NO: 480618 NR Description: ATAF1 protein - Arabidopsis thaliana (fragment)
  misc_feature (1)..(164): Homolog of NCBI NO: 21105748 NR Description: nam-like protein 10 [Petunia x hybrida]
  misc_feature (1)..(164): Homolog of NCBI NO: 25458553 NR Description: OsNAC6 protein [imported] - rice OsNAC6 protein [Oryza sativa] >gi|13272281|gb|AAK17067.1| NAC6
  misc_feature (1)..(164): Homolog of NCBI NO: 40647397 NR Description: NAC domain protein [Lycopersicon esculentum]
  misc_feature (1)..(164): Homolog of NCBI NO: 14485513 NR Description: putative NAC domain protein [Solanum tuberosum]
  misc_feature (1)..(112): Homolog of NCBI NO: 22326685 NR Description: No apical meristem (NAM) protein family thaliana] >gi|13548337|emb|CAC35884.1| ATAF2 protein [Arabidopsis >gi|19424091|gb|AAL87335.1| unknown protein [Arabidopsis
  misc_feature (1)..(40): Homolog of NCBI NO: 15223963 NR Description: No apical meristem (NAM) protein family

SEQ ID NO: 103036 - DNA, 1511 bp, Arabidopsis thaliana
  misc_feature (1)..(1511): Ceres Seq. ID no. 13611837
  misc_feature: MA Experiment ID: 108434 Result: Up-regulated in Transcription
  misc_feature: MA Experiment 108434 PARAMETER Experiment Name: At_Root_Tips_cDNA_P Parameter: Tissue Value: Root Tips
  misc_feature: MA Experiment ID: 108462 Result: Down-regulated in Transcription
  misc_feature: MA Experiment 108462 PARAMETER Experiment Name: At_Germinating_Seeds_cDNA_P Parameter: Age (day) Value: 2 vs. 0
  misc_feature: MA Experiment 108462 PARAMETER Experiment Name: At_Germinating_Seeds_cDNA_P Parameter: Tissue Value: Germinating Seeds
  misc_feature: MA Experiment ID: 108464 Result: Down-regulated in Transcription
  misc_feature: MA Experiment 108464 PARAMETER Experiment Name: At_Germinating_Seeds_cDNA_P Parameter: Age (day) Value: 4 vs. 0
  misc_feature: MA Experiment 108464 PARAMETER Experiment Name: At_Germinating_Seeds_cDNA_P Parameter: Tissue Value: Germinating Seeds
  misc_feature: MA Experiment ID: 108573 Result: Up-regulated in Transcription
  misc_feature: MA Experiment 108573 PARAMETER Experiment Name: At_Drought_cDNA_P Parameter: Timepoint (hr) Value: 6
  misc_feature: MA Experiment 108573 PARAMETER Experiment Name: At_Drought_cDNA_P Parameter: Tissue Value: Aerial
  misc_feature: MA Experiment 108573 PARAMETER Experiment Name: At_Drought_cDNA_P Parameter: Treatment Value: Drought vs. No Drought
  misc_feature: MA Experiment ID: 108595 Result: Down-regulated in Transcription
  misc_feature: MA Experiment 108595 PARAMETER Experiment Name: At_Ler-pi_Ovule_cDNA_P Parameter: Plant Line Value: null
  misc_feature: MA Experiment ID: 20000179 Result: Down-regulated in Transcription
  misc_feature: MA Experiment 20000179 PARAMETER Experiment Name: At_Germinating_Seeds_P Parameter: Age (hr) Value: 6 vs. 0
  misc_feature: MA Experiment 20000179 PARAMETER Experiment Name: At_Germinating_Seeds_P Parameter: Tissue Value: Germinating Seeds
  misc_feature: MA Experiment ID: 20000180 Result: Down-regulated in Transcription
  misc_feature: MA Experiment 20000180 PARAMETER Experiment Name: At_Germinating_Seeds_P Parameter: Age (hr) Value: 24 vs. 0
  misc_feature: MA Experiment 20000180 PARAMETER Experiment Name: At_Germinating_Seeds_P Parameter: Tissue Value: Germinating Seeds
  misc_feature: MA Experiment ID: 20000224 Result: Down-regulated in Transcription
  misc_feature: MA Experiment ID: 20000306 Result: Down-regulated in Transcription
  misc_feature: MA Experiment 20000306 PARAMETER Experiment Name: At_Germinating_Seeds_Sub_P Parameter: Age (hr) Value: 6 vs. 0
  misc_feature: MA Experiment 20000306 PARAMETER Experiment Name: At_Germinating_Seeds_Sub_P Parameter: Organism Value: A. thaliana
  misc_feature: MA Experiment 20000306 PARAMETER Experiment Name: At_Germinating_Seeds_Sub_P Parameter: Plant Line Value: WS
  misc_feature: MA Experiment 20000306 PARAMETER Experiment Name: At_Germinating_Seeds_Sub_P Parameter: Tissue Value: Germinating Seeds
  misc_feature: MA Experiment ID: 20000307 Result: Down-regulated in Transcription
  misc_feature: MA Experiment 20000307 PARAMETER Experiment Name: At_Germinating_Seeds_Sub_P Parameter: Age (hr) Value: 24 vs. 0
  misc_feature: MA Experiment 20000307 PARAMETER Experiment Name: At_Germinating_Seeds_Sub_P Parameter: Organism Value: A. thaliana
  misc_feature: MA Experiment 20000307 PARAMETER Experiment Name: At_Germinating_Seeds_Sub_P Parameter: Plant Line Value: WS
  misc_feature: MA Experiment 20000307 PARAMETER Experiment Name: At_Germinating_Seeds_Sub_P Parameter: Tissue Value: Germinating Seeds
  misc_feature: MA Experiment ID: 20000329 Result: Up-regulated in Transcription
  misc_feature: MA Experiment 20000329 PARAMETER Experiment Name: At_4deg_Cold_Sub_P Parameter: Age (day) Value: 14
  misc_feature: MA Experiment 20000329 PARAMETER Experiment Name: At_4deg_Cold_Sub_P Parameter: Organism Value: A. thaliana
  misc_feature: MA Experiment 20000329 PARAMETER Experiment Name: At_4deg_Cold_Sub_P Parameter: Plant Line Value: WS
  misc_feature: MA Experiment 20000329 PARAMETER Experiment Name: At_4deg_Cold_Sub_P Parameter: Temperature (deg C) Value: 4 vs. 22
  misc_feature: MA Experiment 20000329 PARAMETER Experiment Name: At_4deg_Cold_Sub_P Parameter: Timepoint (hr) Value: 6
  misc_feature: MA Experiment 20000329 PARAMETER Experiment Name: At_4deg_Cold_Sub_P Parameter: Tissue Value: Aerial
  misc_feature: MA Experiment ID: 20000355 Result: Up-regulated in Transcription
  misc_feature: MA Experiment 20000355 PARAMETER Experiment Name: At_Siliques_Sub_P Parameter: Age (day) Value: 21
  misc_feature: MA Experiment 20000355 PARAMETER Experiment Name: At_Siliques_Sub_P Parameter: Organism Value: A. thaliana
  misc_feature: MA Experiment 20000355 PARAMETER Experiment Name: At_Siliques_Sub_P Parameter: Plant Line Value: WS
  misc_feature: MA Experiment 20000355 PARAMETER Experiment Name: At_Siliques_Sub_P Parameter: Tissue Value: Less Than 5mm Siliques vs. Whole Plant
  misc_feature: MA Experiment ID: 20000440 Result: Up-regulated in Transcription
  misc_feature: MA Experiment 20000440 PARAMETER Experiment Name: At_Closed-Flower__Sub_P Parameter: Tissue Value: Closed Flower vs. Whole Plant
  misc_feature: MA Experiment ID: 20001905 Result: Up-regulated in Transcription
  misc_feature: MA Experiment 20001905 PARAMETER Experiment Name: At_Drought_Reproduction_P Parameter: Age (day) Value: 40
  misc_feature: MA Experiment 20001905 PARAMETER Experiment Name: At_Drought_Reproduction_P Parameter: Organism Value: A. thaliana
  misc_feature: MA Experiment 20001905 PARAMETER Experiment Name: At_Drought_Reproduction_P Parameter: Plant Line Value: WS
  misc_feature: MA Experiment 20001905 PARAMETER Experiment Name: At_Drought_Reproduction_P Parameter: Timepoint (day) Value: 10
  misc_feature: MA Experiment 20001905 PARAMETER Experiment Name: At_Drought_Reproduction_P Parameter: Tissue Value: Rosettes
  misc_feature: MA Experiment 20001905 PARAMETER Experiment Name: At_Drought_Reproduction_P Parameter: Treatment Value: Drought vs. No Drought
gtacgccaaatatctaacaaggagctctttagattgagactagtggaagagagacgagcaaggaattagcaatggcggcggatttgccggaggcgacagtacagaacattctggaccaagagtctcttaaatgggttttcgtcggaggtaaaggaggtgttgggaagacgacatgcagttcaattctcgcaatttgtctcgccagtgttcgatcctccgttctcatcatctccaccgatcctgctcacaatcttagtgatgcctttcagcaacgcttcactaaatctcccactttggttcaaggtttctctaatctctttgccatggaggtagatcctaccgttgaaactgatgacatggctggtacagacgggatggatggtttattctctgatttggcaaatgcgattcctggaatcgatgaggctatgagttttgctgagatgttgaagttggtgcaaacaatggattatgctactattgtgtttgacactgctcctactggacatactctccgcctgttacagtttccggccacactagaaaagggactttcgaagttgatgtcattgaagagtagatttggtggcttgatgactcagatgagccgtatgtttggcatggaggatgagttcggagaggatgctttgctgggaagacttgagggcttgaaagatgtgattgagcaagtaaatcggcaattcaaagacccggatatgactacgttcgtttgtgtctgcatccccgagttcttgtctctctatgaaacagagagacttgttcaggaactcgccaagtttgagattgacacgcataacattatcatcaaccaagtactatacgacgacgaagatgtggagtccaagttgctcagagcaaggatgcggatgcaacagaagtatcttgatcagttttatatgctatacgatgactttaatatcacaaagcttcctctgcttccggaagaggtgacaggggttgaagccttaaaggcgttttcacataagttcttgacgccgtaccatcctaccactagcaggagcaatgtagaggagctggagaggaaagtacacacattgcgtttgcagttaaaaacagctgaagaagaactcgaacgggtcaagagtggctaaagataaggctctgttcttccctttaattgtggaaaattaaaactgaatctttttctctctagttcttcatctagcaacaactctttataggacaggaaagaagatcaagcagaatcttcttttgcgttgttttattgttatgcattggatttgtttttatatttgtaataatcatgactacatagactcatatctaccaagaaatcgttgttttacgacttaatcagctttttatatattaagttgaagggtatctgtgacaagcgaatgctatgatctcttgtaacagctttttatatactgtagactggtcttgcaacagagaaggaaaattcatgtaaaaaaattatagtaaataagagatgttttgatttattg

SEQ ID NO: 103037 - protein, 353 aa, Arabidopsis thaliana
  peptide (1)..(353): Ceres Seq. ID no. 13611838
  misc_feature (19)..(315): Pfam Name: Anion-transporting ATPase Pfam Description: Anion-transporting ATPase
  misc_feature (1)..(353): Homolog of NCBI NO: 18378897 NR Description: arsA homolog (hASNA-I) -related [Arabidopsis
  misc_feature (1)..(353): Homolog of NCBI NO: 25290846 NR Description: hypothetical protein F22M8.4 [imported] - thaliana >gi|8570442|gb|AAF76469.1|AC020622_3 Contains similarity
  misc_feature (7)..(319): Homolog of NCBI NO: 31214034 NR Description: ENSANGP00000018739 [Anopheles gambiae]
  misc_feature (1)..(321): Homolog of NCBI NO: 19717679 NR Description: arsenite transport subunit A [Dictyostelium
  misc_feature (1)..(319): Homolog of NCBI NO: 24586297 NR Description: CG1598-PA [Drosophila melanogaster]
  misc_feature (1)..(319): Homolog of NCBI NO: 17945070 NR Description: RE07422p [Drosophila melanogaster]
  misc_feature (1)..(323): Homolog of NCBI NO: 6647417 NR Description: Arsenical pump-driving ATPase
  misc_feature (1)..(323): Homolog of NCBI NO: 12025542 NR Description: arsA (bacterial) arsenite transporter,
  misc_feature (1)..(323): Homolog of NCBI NO: 2905657 NR Description: arsenite translocating ATPase [Homo sapiens]
  misc_feature (7)..(323): Homolog of NCBI NO: 4757796 NR Description: arsA arsenite transporter, ATP-binding, homolog
MAADLPEATVQNILDQESLKWVFVGGKGGVGKTTCSSILAICLASVRSSVLIISTDPAHNLSDAFQQRFTKSPTLVQGFSNLFAMEVDPTVETDDMAGTDGMDGLFSDLANAIPGIDEAMSFAEMLKLVQTMDYATIVFDTAPTGHTLRLLQFPATLEKGLSKLMSLKSRFGGLMTQMSRMFGMEDEFGEDALLGRLEGLKDVIEQVNRQFKDPDMTTFVCVCIPEFLSLYETERLVQELAKFEIDTHNIIINQVLYDDEDVESKLLRARMRMQQKYLDQFYMLYDDFNITKLPLLPEEVTGVEALKAFSHKFLTPYHPTTSRSNVEELERKVHTLRLQLKTAEEELERVKSG

SEQ ID NO: 103038 - protein, 269 aa, Arabidopsis thaliana
  peptide (1)..(269): Ceres Seq. ID no. 13611839
  misc_feature (1)..(231): Pfam Name: Anion-transporting ATPase Pfam Description: Anion-transporting ATPase
  misc_feature (1)..(269): Homolog of NCBI NO: 18378897 NR Description: arsA homolog (hASNA-I) -related [Arabidopsis
  misc_feature (1)..(269): Homolog of NCBI NO: 25290846 NR Description: hypothetical protein F22M8.4 [imported] - thaliana >gi|8570442|gb|AAF76469.1|AC020622_3 Contains similarity
  misc_feature (1)..(235): Homolog of NCBI NO: 31214034 NR Description: ENSANGP00000018739 [Anopheles gambiae]
  misc_feature (1)..(237): Homolog of NCBI NO: 19717679 NR Description: arsenite transport subunit A [Dictyostelium
  misc_feature (1)..(235): Homolog of NCBI NO: 24586297 NR Description: CG1598-PA [Drosophila melanogaster]
  misc_feature (1)..(235): Homolog of NCBI NO: 17945070 NR Description: RE07422p [Drosophila melanogaster]
  misc_feature (1)..(239): Homolog of NCBI NO: 6647417 NR Description: Arsenical pump-driving ATPase
  misc_feature (1)..(239): Homolog of NCBI NO: 12025542 NR Description: arsA (bacterial) arsenite transporter,
  misc_feature (1)..(239): Homolog of NCBI NO: 2905657 NR Description: arsenite translocating ATPase [Homo sapiens]
  misc_feature (1)..(239): Homolog of NCBI NO: 4757796 NR Description: arsA arsenite transporter, ATP-binding, homolog
MEVDPTVETDDMAGTDGMDGLFSDLANAIPGIDEAMSFAEMLKLVQTMDYATIVFDTAPTGHTLRLLQFPATLEKGLSKLMSLKSRFGGLMTQMSRMFGMEDEFGEDALLGRLEGLKDVIEQVNRQFKDPDMTTFVCVCIPEFLSLYETERLVQELAKFEIDTHNIIINQVLYDDEDVESKLLRARMRMQQKYLDQFYMLYDDFNITKLPLLPEEVTGVEALKAFSHKFLTPYHPTTSRSNVEELERKVHTLRLQLKTAEEELERVKSG

SEQ ID NO: 103039 - protein, 258 aa, Arabidopsis thaliana
  peptide (1)..(258): Ceres Seq. ID no. 13611840
  misc_feature (1)..(220): Pfam Name: Anion-transporting ATPase Pfam Description: Anion-transporting ATPase
  misc_feature (1)..(258): Homolog of NCBI NO: 18378897 NR Description: arsA homolog (hASNA-I) -related [Arabidopsis
  misc_feature (1)..(258): Homolog of NCBI NO: 25290846 NR Description: hypothetical protein F22M8.4 [imported] - thaliana >gi|8570442|gb|AAF76469.1|AC020622_3 Contains similarity
  misc_feature (1)..(224): Homolog of NCBI NO: 31214034 NR Description: ENSANGP00000018739 [Anopheles gambiae]
  misc_feature (1)..(226): Homolog of NCBI NO: 19717679 NR Description: arsenite transport subunit A [Dictyostelium
  misc_feature (1)..(224): Homolog of NCBI NO: 24586297 NR Description: CG1598-PA [Drosophila melanogaster]
  misc_feature (1)..(224): Homolog of NCBI NO: 17945070 NR Description: RE07422p [Drosophila melanogaster]
  misc_feature (1)..(228): Homolog of NCBI NO: 6647417 NR Description: Arsenical pump-driving ATPase
  misc_feature (1)..(228): Homolog of NCBI NO: 12025542 NR Description: arsA (bacterial) arsenite transporter,
  misc_feature (1)..(228): Homolog of NCBI NO: 2905657 NR Description: arsenite translocating ATPase [Homo sapiens]
  misc_feature (1)..(228): Homolog of NCBI NO: 4757796 NR Description: arsA arsenite transporter, ATP-binding, homolog
MAGTDGMDGLFSDLANAIPGIDEAMSFAEMLKLVQTMDYATIVFDTAPTGHTLRLLQFPATLEKGLSKLMSLKSRFGGLMTQMSRMFGMEDEFGEDALLGRLEGLKDVIEQVNRQFKDPDMTTFVCVCIPEFLSLYETERLVQELAKFEIDTHNIIINQVLYDDEDVESKLLRARMRMQQKYLDQFYMLYDDFNITKLPLLPEEVTGVEALKAFSHKFLTPYHPTTSRSNVEELERKVHTLRLQLKTAEEELERVKSG

SEQ ID NO: 103040 - DNA, 1662 bp, Arabidopsis thaliana
  misc_feature (1)..(1662): Ceres Seq. ID no. 13611845
  misc_feature: MA Experiment ID: 20000184 Result: Up-regulated in Transcription
  misc_feature: MA Experiment 20000184 PARAMETER Experiment Name: At_Shoots__P Parameter: Age (day) Value: 7
  misc_feature: MA Experiment 20000184 PARAMETER Experiment Name: At_Shoots__P Parameter: Tissue Value: Shoots vs. Whole Plant
  misc_feature: MA Experiment ID: 20000227 Result: Up-regulated in Transcription
  misc_feature: MA Experiment 20000227 PARAMETER Experiment Name: At_Root-Tips-vs-Tops_P Parameter: Tissue Value: Root Tips vs. Root Tops
  misc_feature: MA Experiment ID: 20000264 Result: Up-regulated in Transcription
  misc_feature: MA Experiment 20000264 PARAMETER Experiment Name: At_Open_Flower_P Parameter: Age (day) Value: 21
  misc_feature: MA Experiment 20000264 PARAMETER Experiment Name: At_Open_Flower_P Parameter: Plant Line Value: WS
  misc_feature: MA Experiment 20000264 PARAMETER Experiment Name: At_Open_Flower_P Parameter: Tissue Value: Open Flower vs. Whole Plant
  misc_feature: MA Experiment ID: 20000307 Result: Up-regulated in Transcription
  misc_feature: MA Experiment 20000307 PARAMETER Experiment Name: At_Germinating_Seeds_Sub_P Parameter: Age (hr) Value: 24 vs. 0
  misc_feature: MA Experiment 20000307 PARAMETER Experiment Name: At_Germinating_Seeds_Sub_P Parameter: Organism Value: A. thaliana
  misc_feature: MA Experiment 20000307 PARAMETER Experiment Name: At_Germinating_Seeds_Sub_P Parameter: Plant Line Value: WS
  misc_feature: MA Experiment 20000307 PARAMETER Experiment Name: At_Germinating_Seeds_Sub_P Parameter: Tissue Value: Germinating Seeds
  misc_feature: MA Experiment ID: 20000314 Result: Up-regulated in Transcription
  misc_feature: MA Experiment 20000314 PARAMETER Experiment Name: At_14day_Shoots-Roots_Sub_P Parameter: Age (day) Value: 14
  misc_feature: MA Experiment 20000314 PARAMETER Experiment Name: At_14day_Shoots-Roots_Sub_P Parameter: Organism Value: A. thaliana
  misc_feature: MA Experiment 20000314 PARAMETER Experiment Name: At_14day_Shoots-Roots_Sub_P Parameter: Plant Line Value: WS
  misc_feature: MA Experiment 20000314 PARAMETER Experiment Name: At_14day_Shoots-Roots_Sub_P Parameter: Tissue Value: Roots vs. Whole Plant
  misc_feature: MA Experiment ID: 20000315 Result: Up-regulated in Transcription
  misc_feature: MA Experiment 20000315 PARAMETER Experiment Name: At_14day_Shoots-Roots_Sub_P Parameter: Age (day) Value: 14
  misc_feature: MA Experiment 20000315 PARAMETER Experiment Name: At_14day_Shoots-Roots_Sub_P Parameter: Organism Value: A. thaliana
  misc_feature: MA Experiment 20000315 PARAMETER Experiment Name: At_14day_Shoots-Roots_Sub_P Parameter: Plant Line Value: WS
  misc_feature: MA Experiment 20000315 PARAMETER Experiment Name: At_14day_Shoots-Roots_Sub_P Parameter: Tissue Value: Shoots vs. Whole Plant
  misc_feature: MA Experiment ID: 20000794 Result: Up-regulated in Transcription
  misc_feature: MA Experiment 20000794 PARAMETER Experiment Name: At_Petals_P Parameter: Age (day) Value: 23-25 days
  misc_feature: MA Experiment 20000794 PARAMETER Experiment Name: At_Petals_P Parameter: Plant Line Value: WS
  misc_feature: MA Experiment 20000794 PARAMETER Experiment Name: At_Petals_P Parameter: Tissue Value: Petals vs. Whole plant
  misc_feature: MA Experiment ID: 20001557 Result: Up-regulated in Transcription
  misc_feature: MA Experiment 20001557 PARAMETER Experiment Name: At_Drought_Soil_Dry_P Parameter: Age (day) Value: 27
  misc_feature: MA Experiment 20001557 PARAMETER Experiment Name: At_Drought_Soil_Dry_P Parameter: Organism Value: A. thaliana
  misc_feature: MA Experiment 20001557 PARAMETER Experiment Name: At_Drought_Soil_Dry_P Parameter: Plant Line Value: WS
  misc_feature: MA Experiment 20001557 PARAMETER Experiment Name: At_Drought_Soil_Dry_P Parameter: Post Timepoint (hr) Value: 3
  misc_feature: MA Experiment 20001557 PARAMETER Experiment Name: At_Drought_Soil_Dry_P Parameter: Post-Treatment Value: Re-Water vs. No Drought
  misc_feature: MA Experiment 20001557 PARAMETER Experiment Name: At_Drought_Soil_Dry_P Parameter: Timepoint (day) Value: 13
  misc_feature: MA Experiment 20001557 PARAMETER Experiment Name: At_Drought_Soil_Dry_P Parameter: Treatment Value: Drought vs. No Drought
  misc_feature: MA Experiment ID: 20001905 Result: Up-regulated in Transcription
  misc_feature: MA Experiment 20001905 PARAMETER Experiment Name: At_Drought_Reproduction_P Parameter: Age (day) Value: 40
  misc_feature: MA Experiment 20001905 PARAMETER Experiment Name: At_Drought_Reproduction_P Parameter: Organism Value: A. thaliana
  misc_feature: MA Experiment 20001905 PARAMETER Experiment Name: At_Drought_Reproduction_P Parameter: Plant Line Value: WS
  misc_feature: MA Experiment 20001905 PARAMETER Experiment Name: At_Drought_Reproduction_P Parameter: Timepoint (day) Value: 10
  misc_feature: MA Experiment 20001905 PARAMETER Experiment Name: At_Drought_Reproduction_P Parameter: Tissue Value: Rosettes
  misc_feature: MA Experiment 20001905 PARAMETER Experiment Name: At_Drought_Reproduction_P Parameter: Treatment Value: Drought vs. No Drought
  misc_feature: MA Experiment ID: 20001910 Result: Up-regulated in Transcription
  misc_feature: MA Experiment 20001910 PARAMETER Experiment Name: At_Drought_Reproduction_P Parameter: Age (day) Value: 37
  misc_feature: MA Experiment 20001910 PARAMETER Experiment Name: At_Drought_Reproduction_P Parameter: Organism Value: A. thaliana
  misc_feature: MA Experiment 20001910 PARAMETER Experiment Name: At_Drought_Reproduction_P Parameter: Plant Line Value: WS
  misc_feature: MA Experiment 20001910 PARAMETER Experiment Name: At_Drought_Reproduction_P Parameter: Timepoint (day) Value: 7
  misc_feature: MA Experiment 20001910 PARAMETER Experiment Name: At_Drought_Reproduction_P Parameter: Tissue Value: Flowers
  misc_feature: MA Experiment 20001910 PARAMETER Experiment Name: At_Drought_Reproduction_P Parameter: Treatment Value: Drought vs. No Drought
ctcccgacgccattatccttcaccctcggagcttttcttgaagcagggattcttctaatcattaatccctacttctttctttcttttttgtttgttctcctttgagatctatctagtactagtagtaaaaccccctcccctccattgaatttgaattgaattgaatctctgggaatcaaatctttgatgtcgcatctggacgacattccttctacgcctgggaaattcaagatgatggataaatcccccttcttcctgcaccgtactcgttggcaatcctccgtcgccaagcttgccttttggtcccttgtctttttcggattgctcttcatcttcttctaccgatctcccatctccaatcccgattcctctcgccgctctcttcgcacctactcttggggcggtcccgcctgggagaaacgcgtccgatcctccgctcgtgtccgcacccgcaacggcgtctccgttctcgtcaccggggccgccggtttcgtcgggactcacgtctctgccgctcttaaacgacgcggcgacggcgttctaggcctcgacaacttcaacgattactacgacacctctctcaagagatctcgacaagccctcctcgagagaagcggagtgttcatcgttgaaggagacatcaacgatctgtctctcctcaagaagctcttcgaggtcgtccctttcactcacgtcatgcatcttgccgctcaagctggtgtcagatacgccatggagaaccccggctcctacgttcacagcaacatcgctggtttcgttaacctcctcgaggtctgtaaatccgctaatcctcagccggcgatcgtgtgggcatcgtctagctccgtctacggtttaaacaccaaagtccccttctctgagaaagacagaacagatcagcctgcgagtctctacgctgcgaccaagaaagctggagaagagattgcccacacttacaaccacatctacgggctctctctcaccggcttgaggtttttcacggtgtacgggccgtggggaagacctgacatggcttacttcttcttcaccagagacatcctcaaagggaaagctatttcgatcttcgaaggagccaatcacggaacagtggctagggatttcacatacatcgatgacatagtgaaaggatgtttgggggctctggacacggcggagaagagcacagggagtggtggcaagaagcggggagcggctcagctaagggtattcaacctggggaacacatctccggtgccggtgacggatcttgtgagtatattggagagattgttgaaagtgaaagccaagaggaacatgatgaagctgccgaggaatggtgatgtgcccttcacacatgctaatatcagttcggcacagagagagtttgggtacaaaccaagcacggatttgcagactggtctaaagaagtttgtgagatggtatcttggttactacaagcaggggggaaagaaagttgctgctgctgcttgaatattgataattcacaagattctttagtgtatagtgagtgagtggattgatacacaccataaagaagagacatgattcattcgagattatatattctttacatttgtattctgctttgtaatttcgatctcttgagtcgaatctctgatatttatttcataggaagttcac

SEQ ID NO: 103041 - protein, 434 aa, Arabidopsis thaliana; identical to SEQ ID NO: 40836
  peptide (1)..(434): Ceres Seq. ID no. 13611846
  misc_feature (94)..(423): Pfam Name: NAD dependent epimerase/dehydratase family Pfam Description: NAD dependent epimerase/dehydratase family
  misc_feature (1)..(434): Homolog of NCBI NO: 15217591 NR Description: nucleotide sugar epimerase family [Arabidopsis
  misc_feature (16)..(434): Homolog of NCBI NO: 21536982 NR Description: nucleotide sugar epimerase, putative [Arabidopsis
  misc_feature (1)..(432): Homolog of NCBI NO: 15236712 NR Description: nucleotide sugar epimerase family [Arabidopsis
  misc_feature (1)..(432): Homolog of NCBI NO: 15225451 NR Description: nucleotide sugar epimerase family [Arabidopsis
  misc_feature (1)..(429): Homolog of NCBI NO: 15234486 NR Description: nucleotide sugar epimerase family [Arabidopsis
  misc_feature (1)..(429): Homolog of NCBI NO: 15293119 NR Description: putative nucleotide sugar epimerase [Arabidopsis
  misc_feature (1)..(423): Homolog of NCBI NO: 15234745 NR Description: nucleotide sugar epimerase family [Arabidopsis
  misc_feature (70)..(423): Homolog of NCBI NO: 15229524 NR Description: NAD-dependent epimerase/dehydratase family
  misc_feature (70)..(423): Homolog of NCBI NO: 24417280 NR Description: unknown [Arabidopsis thaliana]
  misc_feature (61)..(431): Homolog of NCBI NO: 29647497 NR Description: OJ1191_A10.21 [Oryza sativa (japonica

SEQ ID NO: 103042 - protein, 419 aa, Arabidopsis thaliana; identical to SEQ ID NO: 40837
  peptide (1)..(419): Ceres Seq. ID no. 13611847
  misc_feature (79)..(408): Pfam Name: NAD dependent epimerase/dehydratase family Pfam Description: NAD dependent epimerase/dehydratase family
  misc_feature (1)..(419): Homolog of NCBI NO: 15217591 NR Description: nucleotide sugar epimerase family [Arabidopsis
  misc_feature (1)..(419): Homolog of NCBI NO: 21536982 NR Description: nucleotide sugar epimerase, putative [Arabidopsis
  misc_feature (1)..(417): Homolog of NCBI NO: 15236712 NR Description: nucleotide sugar epimerase family [Arabidopsis
  misc_feature (1)..(417): Homolog of NCBI NO: 15225451 NR Description: nucleotide sugar epimerase family [Arabidopsis
  misc_feature (1)..(414): Homolog of NCBI NO: 15234486 NR Description: nucleotide sugar epimerase family [Arabidopsis
  misc_feature (1)..(414): Homolog of NCBI NO: 15293119 NR Description: putative nucleotide sugar epimerase [Arabidopsis
  misc_feature (1)..(408): Homolog of NCBI NO: 15234745 NR Description: nucleotide sugar epimerase family [Arabidopsis
  misc_feature (55)..(408): Homolog of NCBI NO: 15229524 NR Description: NAD-dependent epimerase/dehydratase family
  misc_feature (55)..(408): Homolog of NCBI NO: 24417280 NR Description: unknown [Arabidopsis thaliana]
  misc_feature (46)..(416): Homolog of NCBI NO: 29647497 NR Description: OJ1191_A10.21 [Oryza sativa (japonica

SEQ ID NO: 103043 - protein, 418 aa, Arabidopsis thaliana; identical to SEQ ID NO: 40838
  peptide (1)..(418): Ceres Seq. ID no. 13611848
  misc_feature (78)..(407): Pfam Name: NAD dependent epimerase/dehydratase family Pfam Description: NAD dependent epimerase/dehydratase family
  misc_feature (1)..(418): Homolog of NCBI NO: 15217591 NR Description: nucleotide sugar epimerase family [Arabidopsis
  misc_feature (1)..(418): Homolog of NCBI NO: 21536982 NR Description: nucleotide sugar epimerase, putative [Arabidopsis
  misc_feature (1)..(416): Homolog of NCBI NO: 15236712 NR Description: nucleotide sugar epimerase family [Arabidopsis
  misc_feature (1)..(416): Homolog of NCBI NO: 15225451 NR Description: nucleotide sugar epimerase family [Arabidopsis
  misc_feature (1)..(413): Homolog of NCBI NO: 15234486 NR Description: nucleotide sugar epimerase family [Arabidopsis
  misc_feature (1)..(413): Homolog of NCBI NO: 15293119 NR Description: putative nucleotide sugar epimerase [Arabidopsis
  misc_feature (1)..(407): Homolog of NCBI NO: 15234745 NR Description: nucleotide sugar epimerase family [Arabidopsis
  misc_feature (54)..(407): Homolog of NCBI NO: 15229524 NR Description: NAD-dependent epimerase/dehydratase family
  misc_feature (54)..(407): Homolog of NCBI NO: 24417280 NR Description: unknown [Arabidopsis thaliana]
  misc_feature (45)..(415): Homolog of NCBI NO: 29647497 NR Description: OJ1191_A10.21 [Oryza sativa (japonica

SEQ ID NO: 103044 - DNA, 1365 bp, Arabidopsis thaliana
  misc_feature (1)..(1365): Ceres Seq. ID no. 13611852
  misc_feature: MA Experiment ID: 108433 Result: Up-regulated in Transcription
  misc_feature: MA Experiment 108433 PARAMETER Experiment Name: At_rhl_Mutant2_cDNA_P Parameter: Age (day) Value: 7
  misc_feature: MA Experiment 108433 PARAMETER Experiment Name: At_rhl_Mutant2_cDNA_P Parameter: Organism Value: A. thaliana
  misc_feature: MA Experiment 108433 PARAMETER Experiment Name: At_rhl_Mutant2_cDNA_P Parameter: Plant Line Value: rhl Mutant vs. wt landsburg
  misc_feature: MA Experiment 108433 PARAMETER Experiment Name: At_rhl_Mutant2_cDNA_P Parameter: Tissue Value: Roots
  misc_feature: MA Experiment ID: 108434 Result: Down-regulated in Transcription
  misc_feature: MA Experiment 108434 PARAMETER Experiment Name: At_Root_Tips_cDNA_P Parameter: Tissue Value: Root Tips
  misc_feature: MA Experiment ID: 108488 Result: Down-regulated in Transcription
  misc_feature: MA Experiment ID: 108573 Result: Up-regulated in Transcription
  misc_feature: MA Experiment 108573 PARAMETER Experiment Name: At_Drought_cDNA_P Parameter: Timepoint (hr) Value: 6
  misc_feature: MA Experiment 108573 PARAMETER Experiment Name: At_Drought_cDNA_P Parameter: Tissue Value: Aerial
  misc_feature: MA Experiment 108573 PARAMETER Experiment Name: At_Drought_cDNA_P Parameter: Treatment Value: Drought vs. No Drought
  misc_feature: MA Experiment ID: 108579 Result: Down-regulated in Transcription
  misc_feature: MA Experiment 108579 PARAMETER Experiment Name: At_4deg_Cold_cDNA_P Parameter: Temperature (deg C) Value: 4 vs. 22
  misc_feature: MA Experiment 108579 PARAMETER Experiment Name: At_4deg_Cold_cDNA_P Parameter: Timepoint (hr) Value: 6
  misc_feature: MA Experiment 108579 PARAMETER Experiment Name: At_4deg_Cold_cDNA_P Parameter: Tissue Value: Aerial
  misc_feature: MA Experiment ID: 20000069 Result: Up-regulated in Transcription
  misc_feature: MA Experiment 20000069 PARAMETER Experiment Name: At_100uM_ABA_Mutants_cDNA_P Parameter: Plant Line Value: CS23
  misc_feature: MA Experiment 20000069 PARAMETER Experiment Name: At_100uM_ABA_Mutants_cDNA_P Parameter: Timepoint (hr) Value: 6
  misc_feature: MA Experiment 20000069 PARAMETER Experiment Name: At_100uM_ABA_Mutants_cDNA_P Parameter: Tissue Value: Aerial
  misc_feature: MA Experiment 20000069 PARAMETER Experiment Name: At_100uM_ABA_Mutants_cDNA_P Parameter: Treatment Value: 100uM ABA vs. No Treatment
  misc_feature: MA Experiment ID: 20000070 Result: Up-regulated in Transcription
  misc_feature: MA Experiment 20000070 PARAMETER Experiment Name: At_100uM_ABA_Mutants_cDNA_P Parameter: Plant Line Value: CS24
  misc_feature: MA Experiment 20000070 PARAMETER Experiment Name: At_100uM_ABA_Mutants_cDNA_P Parameter: Timepoint (hr) Value: 6
  misc_feature: MA Experiment 20000070 PARAMETER Experiment Name: At_100uM_ABA_Mutants_cDNA_P Parameter: Tissue Value: Aerial
  misc_feature: MA Experiment 20000070 PARAMETER Experiment Name: At_100uM_ABA_Mutants_cDNA_P Parameter: Treatment Value: 100uM ABA vs. No Treatment
  misc_feature: MA Experiment ID: 20000071 Result: Up-regulated in Transcription
  misc_feature: MA Experiment 20000071 PARAMETER Experiment Name: At_100uM_ABA_Mutants_cDNA_P Parameter: Plant Line Value: CS8104
  misc_feature: MA Experiment 20000071 PARAMETER Experiment Name: At_100uM_ABA_Mutants_cDNA_P Parameter: Timepoint (hr) Value: 6
  misc_feature: MA Experiment 20000071 PARAMETER Experiment Name: At_100uM_ABA_Mutants_cDNA_P Parameter: Tissue Value: Aerial
  misc_feature: MA Experiment 20000071 PARAMETER Experiment Name: At_100uM_ABA_Mutants_cDNA_P Parameter: Treatment Value: 100uM ABA vs. No Treatment
  misc_feature: MA Experiment ID: 20000086 Result: Up-regulated in Transcription
  misc_feature: MA Experiment 20000086 PARAMETER Experiment Name: At_100uM_ABA_Mutants_cDNA_P Parameter: Plant Line Value: CS22
  misc_feature: MA Experiment 20000086 PARAMETER Experiment Name: At_100uM_ABA_Mutants_cDNA_P Parameter: Timepoint (hr) Value: 6
  misc_feature: MA Experiment 20000086 PARAMETER Experiment Name: At_100uM_ABA_Mutants_cDNA_P Parameter: Tissue Value: Aerial
  misc_feature: MA Experiment 20000086 PARAMETER Experiment Name: At_100uM_ABA_Mutants_cDNA_P Parameter: Treatment Value: 100uM ABA vs. No Treatment
  misc_feature: MA Experiment ID: 20000088 Result: Up-regulated in Transcription
  misc_feature: MA Experiment 20000088 PARAMETER Experiment Name: At_100uM_ABA_Mutants_cDNA_P Parameter: Plant Line Value: Landsberg
  misc_feature: MA Experiment 20000088 PARAMETER Experiment Name: At_100uM_ABA_Mutants_cDNA_P Parameter: Timepoint (hr) Value: 6
  misc_feature: MA Experiment 20000088 PARAMETER Experiment Name: At_100uM_ABA_Mutants_cDNA_P Parameter: Tissue Value: Aerial
  misc_feature: MA Experiment 20000088 PARAMETER Experiment Name: At_100uM_ABA_Mutants_cDNA_P Parameter: Treatment Value: 100uM ABA vs. No Treatment
  misc_feature: MA Experiment ID: 20000117 Result: Up-regulated in Transcription
  misc_feature: MA Experiment 20000117 PARAMETER Experiment Name: At_100uM_ABA_Mutants_cDNA_P Parameter: Plant Line Value: Columbia
  misc_feature: MA Experiment 20000117 PARAMETER Experiment Name: At_100uM_ABA_Mutants_cDNA_P Parameter: Timepoint (hr) Value: 6
  misc_feature: MA Experiment 20000117 PARAMETER Experiment Name: At_100uM_ABA_Mutants_cDNA_P Parameter: Tissue Value: Aerial
  misc_feature: MA Experiment 20000117 PARAMETER Experiment Name: At_100uM_ABA_Mutants_cDNA_P Parameter: Treatment Value: 100uM ABA vs. No Treatment
  misc_feature: MA Experiment ID: 20000315 Result: Down-regulated in Transcription
  misc_feature: MA Experiment 20000315 PARAMETER Experiment Name: At_14day_Shoots-Roots_Sub_P Parameter: Age (day) Value: 14
  misc_feature: MA Experiment 20000315 PARAMETER Experiment Name: At_14day_Shoots-Roots_Sub_P Parameter: Organism Value: A. thaliana
  misc_feature: MA Experiment 20000315 PARAMETER Experiment Name: At_14day_Shoots-Roots_Sub_P Parameter: Plant Line Value: WS
  misc_feature: MA Experiment 20000315 PARAMETER Experiment Name: At_14day_Shoots-Roots_Sub_P Parameter: Tissue Value: Shoots vs. Whole Plant
  misc_feature: MA Experiment ID: 20000329 Result: Down-regulated in Transcription
  misc_feature: MA Experiment 20000329 PARAMETER Experiment Name: At_4deg_Cold_Sub_P Parameter: Age (day) Value: 14
  misc_feature: MA Experiment 20000329 PARAMETER Experiment Name: At_4deg_Cold_Sub_P Parameter: Organism Value: A. thaliana
  misc_feature: MA Experiment 20000329 PARAMETER Experiment Name: At_4deg_Cold_Sub_P Parameter: Plant Line Value: WS
  misc_feature: MA Experiment 20000329 PARAMETER Experiment Name: At_4deg_Cold_Sub_P Parameter: Temperature (deg C) Value: 4 vs. 22
  misc_feature: MA Experiment 20000329 PARAMETER Experiment Name: At_4deg_Cold_Sub_P Parameter: Timepoint (hr) Value: 6
  misc_feature: MA Experiment 20000329 PARAMETER Experiment Name: At_4deg_Cold_Sub_P Parameter: Tissue Value: Aerial
  misc_feature: MA Experiment ID: 20000438 Result: Down-regulated in Transcription
  misc_feature: MA Experiment 20000438 PARAMETER Experiment Name: At_Shoots__P Parameter: Age (day) Value: 14
  misc_feature: MA Experiment 20000438 PARAMETER Experiment Name: At_Shoots__P Parameter: Tissue Value: Shoots vs. Whole Plant
  misc_feature: MA Experiment ID: 20000440 Result: Down-regulated in Transcription
  misc_feature: MA Experiment 20000440 PARAMETER Experiment Name: At_Closed-Flower__Sub_P Parameter: Tissue Value: Closed Flower vs. Whole Plant
  misc_feature: MA Experiment ID: 20000794 Result: Up-regulated in Transcription
  misc_feature: MA Experiment 20000794 PARAMETER Experiment Name: At_Petals_P Parameter: Age (day) Value: 23-25 days
  misc_feature: MA Experiment 20000794 PARAMETER Experiment Name: At_Petals_P Parameter: Plant Line Value: WS
  misc_feature: MA Experiment 20000794 PARAMETER Experiment Name: At_Petals_P Parameter: Tissue Value: Petals vs. Whole plant
  misc_feature: MA Experiment ID: 20001450 Result: Up-regulated in Transcription
  misc_feature: MA Experiment 20001450 PARAMETER Experiment Name: At_Far-red-induction_P Parameter: Age (day) Value: 7
  misc_feature: MA Experiment 20001450 PARAMETER Experiment Name: At_Far-red-induction_P Parameter: Light Value: Far-red vs. White
  misc_feature: MA Experiment 20001450 PARAMETER Experiment Name: At_Far-red-induction_P Parameter: Organism Value: A. thaliana
  misc_feature: MA Experiment 20001450 PARAMETER Experiment Name: At_Far-red-induction_P Parameter: Plant Line Value: Columbia
  misc_feature: MA Experiment 20001450 PARAMETER Experiment Name: At_Far-red-induction_P Parameter: Timepoint (hr) Value: 8
  misc_feature: MA Experiment 20001450 PARAMETER Experiment Name: At_Far-red-induction_P Parameter: Tissue Value: Whole Plant
  misc_feature: MA Experiment ID: 20001451 Result: Up-regulated in Transcription
  misc_feature: MA Experiment 20001451 PARAMETER Experiment Name: At_Far-red-induction_P Parameter: Age (day) Value: 7
  misc_feature: MA Experiment 20001451 PARAMETER Experiment Name: At_Far-red-induction_P Parameter: Light Value: Far-red vs. White
  misc_feature: MA Experiment 20001451 PARAMETER Experiment Name: At_Far-red-induction_P Parameter: Organism Value: A. thaliana
  misc_feature: MA Experiment 20001451 PARAMETER Experiment Name: At_Far-red-induction_P Parameter: Plant Line Value: Columbia
  misc_feature: MA Experiment 20001451 PARAMETER Experiment Name: At_Far-red-induction_P Parameter: Timepoint (hr) Value: 24
  misc_feature: MA Experiment 20001451 PARAMETER Experiment Name: At_Far-red-induction_P Parameter: Tissue Value: Whole Plant
  misc_feature: MA Experiment ID: 20001557 Result: Down-regulated in Transcription
  misc_feature: MA Experiment 20001557 PARAMETER Experiment Name: At_Drought_Soil_Dry_P Parameter: Age (day) Value: 27
  misc_feature: MA Experiment 20001557 PARAMETER Experiment Name: At_Drought_Soil_Dry_P Parameter: Organism Value: A. thaliana
  misc_feature: MA Experiment 20001557 PARAMETER Experiment Name: At_Drought_Soil_Dry_P Parameter: Plant Line Value: WS
  misc_feature: MA Experiment 20001557 PARAMETER Experiment Name: At_Drought_Soil_Dry_P Parameter: Post Timepoint (hr) Value: 3
  misc_feature: MA Experiment 20001557 PARAMETER Experiment Name: At_Drought_Soil_Dry_P Parameter: Post-Treatment Value: Re-Water vs. No Drought
  misc_feature: MA Experiment 20001557 PARAMETER Experiment Name: At_Drought_Soil_Dry_P Parameter: Timepoint (day) Value: 13
  misc_feature: MA Experiment 20001557 PARAMETER Experiment Name: At_Drought_Soil_Dry_P Parameter: Treatment Value: Drought vs. No Drought
  misc_feature: MA Experiment ID: 20001558 Result: Down-regulated in Transcription
  misc_feature: MA Experiment 20001558 PARAMETER Experiment Name: At_Drought_Soil_Dry_P Parameter: Age (day) Value: 27
  misc_feature: MA Experiment 20001558 PARAMETER Experiment Name: At_Drought_Soil_Dry_P Parameter: Organism Value: A. thaliana
  misc_feature: MA Experiment 20001558 PARAMETER Experiment Name: At_Drought_Soil_Dry_P Parameter: Plant Line Value: WS
  misc_feature: MA Experiment 20001558 PARAMETER Experiment Name: At_Drought_Soil_Dry_P Parameter: Post Timepoint (hr) Value: 6
  misc_feature: MA Experiment 20001558 PARAMETER Experiment Name: At_Drought_Soil_Dry_P Parameter: Post-Treatment Value: Re-Water vs. No Drought
  misc_feature: MA Experiment 20001558 PARAMETER Experiment Name: At_Drought_Soil_Dry_P Parameter: Timepoint (day) Value: 13
  misc_feature: MA Experiment 20001558 PARAMETER Experiment Name: At_Drought_Soil_Dry_P Parameter: Treatment Value: Drought vs. No Drought
aagcctctctctgtctcttcctagaaaagaaaactttgtaccttttccaaagtctaagcaaatcattgtttttgattactggaactcgttgagggattgagaaaaaaataatcagaagagaaagatccatggctgataattgtatcagacttcttcactcagcctctgttttcttctgtttagggcttctaatttcatccttcaacttgttgcagggtattgcagctgaaaatctttccaagcagaaactgacctcatggattcttcagaatgagattgtaaaggaagtcaatgagaatccaaacgctggatggaaagcttctttcaatgatcggtttgcaaacgccactgttgcagagtttaagcgccttcttggtgttaaaccaacaccaaagacggaatttttgggtgtgcctattgtaagccatgatatatctttgaagcttccaaaagaatttgatgctagaaccgcttggtcacagtgcaccagtattggaaggatcttagatcagggtcactgtggttcttgctgggcctttggtgctgttgaatcactgtctgacagattctgcatcaaatataacatgaatgtttctttatctgtcaatgatcttttagcatgttgtggattcctttgcggtcaaggttgtaatggtggatacccaattgctgcgtggcggtactttaagcaccacggtgtagtcactgaagagtgtgatccatacttcgacaatactggttgctcgcacccgggatgtgaacccgcttaccctacaccaaaatgtgcaaggaaatgtgttagcggaaaccagctttggcgtgaatcaaaacattatggtgttagtgcgtacaaggtcagatctcaccctgatgacattatggcagaagtttacaaaaatggacctgttgaggttgccttcactgtttacgaggactttgcgcattacaaatctggagtgtacaagcacataacaggtactaacattggaggtcatgctgttaaacttattggctggggaacttctgatgacggtgaagattattggttgcttgcaaatcaatggaaccgaagctggggtgatgatgggtacttcaagatcaggagaggaacaaacgaatgtggcattgaacatggtgttgtagctggtttaccttcagacaggaacgtagttaaaggtattactacttcagatgatcttcttgtttcctcattttaaacaggaatatgtgtctctactctgtaatacataatttcccactgtgttgttgttaccaatgaaataaaacgactttcaacccaaaaagaagtctattgtatataccatttagctttttgttcatattcaatataatgtgttgttgttt

SEQ ID NO: 103045 - protein, 362 aa, Arabidopsis thaliana; identical to SEQ ID NO: 22660
  peptide (1)..(362): Ceres Seq. ID no. 13611853
  misc_feature (106)..(341): Pfam Name: Papain family cysteine protease Pfam Description: Papain family cysteine protease
  misc_feature (1)..(362): Homolog of NCBI NO: 18378947 NR Description: expressed protein [Arabidopsis thaliana] At1g02300/T6A9_10 [Arabidopsis thaliana] At1g02300/T6A9_10 [Arabidopsis thaliana]
  misc_feature (1)..(361): Homolog of NCBI NO: 2317912 NR Description: cathepsin B-like cysteine proteinase [Arabidopsis
  misc_feature (129)..(361): Homolog of NCBI NO: 18378945 NR Description: cathepsin B-like cysteine protease, putative
  misc_feature (1)..(126): Homolog of NCBI NO: 18378945 NR Description: cathepsin B-like cysteine protease, putative
  misc_feature (12)..(361): Homolog of NCBI NO: 18411686 NR Description: cathepsin B-like cysteine protease, putative thaliana] >gi|13877861|gb|AAK44008.1|AF370193_1 putative B cysteine protease [Arabidopsis thaliana]
  misc_feature (12)..(361): Homolog of NCBI NO: 30678927 NR Description: cathepsin B-like cysteine protease, putative
  misc_feature (20)..(361): Homolog of NCBI NO: 38639325 NR Description: cathepsin B-like cysteine proteinase [Solanum
  misc_feature (18)..(358): Homolog of NCBI NO: 609175 NR Description: cathepsin B-like cysteine proteinase [Nicotiana
  misc_feature (18)..(358): Homolog of NCBI NO: 2129942 NR Description: cathepsin B-like cysteine proteinase (EC
  misc_feature (20)..(361): Homolog of NCBI NO: 14582576 NR Description: cathepsin B-like cysteine proteinase [Ipomoea

SEQ ID NO: 103046 - protein, 210 aa, Arabidopsis thaliana; identical to SEQ ID NO: 22661
  peptide (1)..(210): Ceres Seq. ID no. 13611854
  misc_feature (1)..(189): Pfam Name: Papain family cysteine protease Pfam Description: Papain family cysteine protease
  misc_feature (1)..(210): Homolog of NCBI NO: 18378947 NR Description: expressed protein [Arabidopsis thaliana] At1g02300/T6A9_10 [Arabidopsis thaliana] At1g02300/T6A9_10 [Arabidopsis thaliana]
  misc_feature (1)..(209): Homolog of NCBI NO: 2317912 NR Description: cathepsin B-like cysteine proteinase [Arabidopsis
  misc_feature (1)..(209): Homolog of NCBI NO: 18378945 NR Description: cathepsin B-like cysteine protease, putative
  misc_feature (1)..(209): Homolog of NCBI NO: 18411686 NR Description: cathepsin B-like cysteine protease, putative thaliana] >gi|13877861|gb|AAK44008.1|AF370193_1 putative B cysteine protease [Arabidopsis thaliana]
  misc_feature (1)..(209): Homolog of NCBI NO: 30678927 NR Description: cathepsin B-like cysteine protease, putative
  misc_feature (1)..(209): Homolog of NCBI NO: 38639325 NR Description: cathepsin B-like cysteine proteinase [Solanum
  misc_feature (1)..(206): Homolog of NCBI NO: 609175 NR Description: cathepsin B-like cysteine proteinase [Nicotiana
  misc_feature (1)..(206): Homolog of NCBI NO: 2129942 NR Description: cathepsin B-like cysteine proteinase (EC
  misc_feature (1)..(209): Homolog of NCBI NO: 14582576 NR Description: cathepsin B-like cysteine proteinase [Ipomoea
  misc_feature (1)..(209): Homolog of NCBI NO: 6165885 NR Description: cathepsin B-like cysteine proteinase [Ipomoea

SEQ ID NO: 103047 - DNA, 822 bp, Arabidopsis thaliana
  misc_feature (1)..(822): Ceres Seq. ID no. 13611855
  misc_feature: MA Experiment ID: 108434 Result: Down-regulated in Transcription
  misc_feature: MA Experiment 108434 PARAMETER Experiment Name: At_Root_Tips_cDNA_P Parameter: Tissue Value: Root Tips
  misc_feature: MA Experiment ID: 108461 Result: Up-regulated in Transcription
  misc_feature: MA Experiment 108461 PARAMETER Experiment Name: At_Germinating_Seeds_cDNA_P Parameter: Age (day) Value: 1 vs. 0
  misc_feature: MA Experiment 108461 PARAMETER Experiment Name: At_Germinating_Seeds_cDNA_P Parameter: Tissue Value: Germinating Seeds
  misc_feature: MA Experiment ID: 108462 Result: Up-regulated in Transcription
  misc_feature: MA Experiment 108462 PARAMETER Experiment Name: At_Germinating_Seeds_cDNA_P Parameter: Age (day) Value: 2 vs. 0
  misc_feature: MA Experiment 108462 PARAMETER Experiment Name: At_Germinating_Seeds_cDNA_P Parameter: Tissue Value: Germinating Seeds
  misc_feature: MA Experiment ID: 108474 Result: Down-regulated in Transcription
  misc_feature: MA Experiment 108474 PARAMETER Experiment Name: At_Drought_Flowers_cDNA_P Parameter: Timepoint (hr) Value: null
  misc_feature: MA Experiment 108474 PARAMETER Experiment Name: At_Drought_Flowers_cDNA_P Parameter: Treatment Value: Drought vs. No Drought
  misc_feature: MA Experiment ID: 108573 Result: Up-regulated in Transcription
  misc_feature: MA Experiment 108573 PARAMETER Experiment Name: At_Drought_cDNA_P Parameter: Timepoint (hr) Value: 6
  misc_feature: MA Experiment 108573 PARAMETER Experiment Name: At_Drought_cDNA_P Parameter: Tissue Value: Aerial
  misc_feature: MA Experiment 108573 PARAMETER Experiment Name: At_Drought_cDNA_P Parameter: Treatment Value: Drought vs. No Drought
  misc_feature: MA Experiment ID: 108594 Result: Down-regulated in Transcription
  misc_feature: MA Experiment 108594 PARAMETER Experiment Name: At_Ler-rhl_Root_cDNA_P Parameter: Plant Line Value: null
  misc_feature: MA Experiment ID: 108668 Result: Down-regulated in Transcription
  misc_feature: MA Experiment 108668 PARAMETER Experiment Name: At_2mM_SA_cDNA_P Parameter: Plant Line Value: WS
  misc_feature: MA Experiment 108668 PARAMETER Experiment Name: At_2mM_SA_cDNA_P Parameter: Timepoint (hr) Value: 6
  misc_feature: MA Experiment 108668 PARAMETER Experiment Name: At_2mM_SA_cDNA_P Parameter: Treatment Value: 2mM SA vs. No Treatment
  misc_feature: MA Experiment ID: 20000111 Result: Down-regulated in Transcription
  misc_feature: MA Experiment 20000111 PARAMETER Experiment Name: At_42deg_Heat_cDNA_P Parameter: Temperature (deg C) Value: 42 vs. 22
  misc_feature: MA Experiment 20000111 PARAMETER Experiment Name: At_42deg_Heat_cDNA_P Parameter: Timepoint (hr) Value: 6
  misc_feature: MA Experiment 20000111 PARAMETER Experiment Name: At_42deg_Heat_cDNA_P Parameter: Tissue Value: Aerial
  misc_feature: MA Experiment ID: 20000113 Result: Down-regulated in Transcription
  misc_feature: MA Experiment 20000113 PARAMETER Experiment Name: At_42deg_Heat_cDNA_P Parameter: Temperature (deg C) Value: 42 vs. 22
  misc_feature: MA Experiment 20000113 PARAMETER Experiment Name: At_42deg_Heat_cDNA_P Parameter: Timepoint (hr) Value: 8
  misc_feature: MA Experiment 20000113 PARAMETER Experiment Name: At_42deg_Heat_cDNA_P Parameter: Tissue Value: Aerial
  misc_feature: MA Experiment ID: 20000173 Result: Down-regulated in Transcription
  misc_feature: MA Experiment 20000173 PARAMETER Experiment Name: At_42deg_Heat_P Parameter: Age (day) Value: 14
  misc_feature: MA Experiment 20000173 PARAMETER Experiment Name: At_42deg_Heat_P Parameter: Organism Value: A. thaliana
  misc_feature: MA Experiment 20000173 PARAMETER Experiment Name: At_42deg_Heat_P Parameter: Plant Line Value: WS
  misc_feature: MA Experiment 20000173 PARAMETER Experiment Name: At_42deg_Heat_P Parameter: Temperature (deg C) Value: 42 vs. 22
  misc_feature: MA Experiment 20000173 PARAMETER Experiment Name: At_42deg_Heat_P Parameter: Timepoint (hr) Value: 6
  misc_feature: MA Experiment 20000173 PARAMETER Experiment Name: At_42deg_Heat_P Parameter: Tissue Value: Aerial
  misc_feature: MA Experiment ID: 20000182 Result: Down-regulated in Transcription
  misc_feature: MA Experiment 20000182 PARAMETER Experiment Name: At_2mM_SA_P Parameter: Age (day) Value: 14
  misc_feature: MA Experiment 20000182 PARAMETER Experiment Name: At_2mM_SA_P Parameter: Organism Value: A. thaliana
  misc_feature: MA Experiment 20000182 PARAMETER Experiment Name: At_2mM_SA_P Parameter: Plant Line Value: WS
  misc_feature: MA Experiment 20000182 PARAMETER Experiment Name: At_2mM_SA_P Parameter: Timepoint (hr) Value: 6
  misc_feature: MA Experiment 20000182 PARAMETER Experiment Name: At_2mM_SA_P Parameter: Tissue Value: Aerial
  misc_feature: MA Experiment 20000182 PARAMETER Experiment Name: At_2mM_SA_P Parameter: Treatment Value: 2mM SA vs. No Treatment
  misc_feature: MA Experiment ID: 20000184 Result: Down-regulated in Transcription
  misc_feature: MA Experiment 20000184 PARAMETER Experiment Name: At_Shoots__P Parameter: Age (day) Value: 7
  misc_feature: MA Experiment 20000184 PARAMETER Experiment Name: At_Shoots__P Parameter: Tissue Value: Shoots vs. Whole Plant
  misc_feature: MA Experiment ID: 20000185 Result: Up-regulated in Transcription
  misc_feature: MA Experiment 20000185 PARAMETER Experiment Name: At_Roots__P Parameter: Age (day) Value: 7 vs. 21
  misc_feature: MA Experiment 20000185 PARAMETER Experiment Name: At_Roots__P Parameter: Organism Value: A. thaliana
  misc_feature: MA Experiment 20000185 PARAMETER Experiment Name: At_Roots__P Parameter: Tissue Value: Roots vs. Whole Plant
  misc_feature: MA Experiment ID: 20000227 Result: Down-regulated in Transcription
  misc_feature: MA Experiment 20000227 PARAMETER Experiment Name: At_Root-Tips-vs-Tops_P Parameter: Tissue Value: Root Tips vs. Root Tops
  misc_feature: MA Experiment ID: 20000306 Result: Down-regulated in Transcription
  misc_feature: MA Experiment 20000306 PARAMETER Experiment Name: At_Germinating_Seeds_Sub_P Parameter: Age (hr) Value: 6 vs. 0
  misc_feature: MA Experiment 20000306 PARAMETER Experiment Name: At_Germinating_Seeds_Sub_P Parameter: Organism Value: A. thaliana
  misc_feature: MA Experiment 20000306 PARAMETER Experiment Name: At_Germinating_Seeds_Sub_P Parameter: Plant Line Value: WS
  misc_feature: MA Experiment 20000306 PARAMETER Experiment Name: At_Germinating_Seeds_Sub_P Parameter: Tissue Value: Germinating Seeds
  misc_feature: MA Experiment ID: 20000307 Result: Up-regulated in Transcription
  misc_feature: MA Experiment 20000307 PARAMETER Experiment Name: At_Germinating_Seeds_Sub_P Parameter: Age (hr) Value: 24 vs. 0
  misc_feature: MA Experiment 20000307 PARAMETER Experiment Name: At_Germinating_Seeds_Sub_P Parameter: Organism Value: A. thaliana
  misc_feature: MA Experiment 20000307 PARAMETER Experiment Name: At_Germinating_Seeds_Sub_P Parameter: Plant Line Value: WS
  misc_feature: MA Experiment 20000307 PARAMETER Experiment Name: At_Germinating_Seeds_Sub_P Parameter: Tissue Value: Germinating Seeds
  misc_feature: MA Experiment ID: 20000314 Result: Up-regulated in Transcription
  misc_feature: MA Experiment 20000314 PARAMETER Experiment Name: At_14day_Shoots-Roots_Sub_P Parameter: Age (day) Value: 14
  misc_feature: MA Experiment 20000314 PARAMETER Experiment Name: At_14day_Shoots-Roots_Sub_P Parameter: Organism Value: A. thaliana
  misc_feature: MA Experiment 20000314 PARAMETER Experiment Name: At_14day_Shoots-Roots_Sub_P Parameter: Plant Line Value: WS
  misc_feature: MA Experiment 20000314 PARAMETER Experiment Name: At_14day_Shoots-Roots_Sub_P Parameter: Tissue Value: Roots vs. Whole Plant
  misc_feature: MA Experiment ID: 20000315 Result: Down-regulated in Transcription
  misc_feature: MA Experiment 20000315 PARAMETER Experiment Name: At_14day_Shoots-Roots_Sub_P Parameter: Age (day) Value: 14
  misc_feature: MA Experiment 20000315 PARAMETER Experiment Name: At_14day_Shoots-Roots_Sub_P Parameter: Organism Value: A. thaliana
  misc_feature: MA Experiment 20000315 PARAMETER Experiment Name: At_14day_Shoots-Roots_Sub_P Parameter: Plant Line Value: WS
  misc_feature: MA Experiment 20000315 PARAMETER Experiment Name: At_14day_Shoots-Roots_Sub_P Parameter: Tissue Value: Shoots vs. Whole Plant
  misc_feature: MA Experiment ID: 20000327 Result: Down-regulated in Transcription
  misc_feature: MA Experiment 20000327 PARAMETER Experiment Name: At_42deg_Heat_Sub_P Parameter: Age (day) Value: 14
  misc_feature: MA Experiment 20000327 PARAMETER Experiment Name: At_42deg_Heat_Sub_P Parameter: Organism Value: A. thaliana
  misc_feature: MA Experiment 20000327 PARAMETER Experiment Name: At_42deg_Heat_Sub_P Parameter: Plant Line Value: WS
  misc_feature: MA Experiment 20000327 PARAMETER Experiment Name: At_42deg_Heat_Sub_P Parameter: Temperature (deg C) Value: 42 vs. 22
  misc_feature: MA Experiment 20000327 PARAMETER Experiment Name: At_42deg_Heat_Sub_P Parameter: Timepoint (hr) Value: 1
  misc_feature: MA Experiment 20000327 PARAMETER Experiment Name: At_42deg_Heat_Sub_P Parameter: Tissue Value: Aerial
  misc_feature: MA Experiment ID: 20000329 Result: Up-regulated in Transcription
  misc_feature: MA Experiment 20000329 PARAMETER Experiment Name: At_4deg_Cold_Sub_P Parameter: Age (day) Value: 14
  misc_feature: MA Experiment 20000329 PARAMETER Experiment Name: At_4deg_Cold_Sub_P Parameter: Organism Value: A. thaliana
  misc_feature: MA Experiment 20000329 PARAMETER Experiment Name: At_4deg_Cold_Sub_P Parameter: Plant Line Value: WS
  misc_feature: MA Experiment 20000329 PARAMETER Experiment Name: At_4deg_Cold_Sub_P Parameter: Temperature (deg C) Value: 4 vs. 22
  misc_feature: MA Experiment 20000329 PARAMETER Experiment Name: At_4deg_Cold_Sub_P Parameter: Timepoint (hr) Value: 6
  misc_feature: MA Experiment 20000329 PARAMETER Experiment Name: At_4deg_Cold_Sub_P Parameter: Tissue Value: Aerial
  misc_feature: MA Experiment ID: 20000439 Result: Up-regulated in Transcription
  misc_feature: MA Experiment 20000439 PARAMETER Experiment Name: At_Roots__P Parameter: Age (day) Value: 14 vs. 21
  misc_feature: MA Experiment 20000439 PARAMETER Experiment Name: At_Roots__P Parameter: Organism Value: A. thaliana
  misc_feature: MA Experiment 20000439 PARAMETER Experiment Name: At_Roots__P Parameter: Tissue Value: Roots vs. Whole Plant
  misc_feature: MA Experiment ID: 20000794 Result: Down-regulated in Transcription
  misc_feature: MA Experiment 20000794 PARAMETER Experiment Name: At_Petals_P Parameter: Age (day) Value: 23-25 days
  misc_feature: MA Experiment 20000794 PARAMETER Experiment Name: At_Petals_P Parameter: Plant Line Value: WS
  misc_feature: MA Experiment 20000794 PARAMETER Experiment Name: At_Petals_P Parameter: Tissue Value: Petals vs. Whole plant
  misc_feature: MA Experiment ID: 20001451 Result: Up-regulated in Transcription
  misc_feature: MA Experiment 20001451 PARAMETER Experiment Name: At_Far-red-induction_P Parameter: Age (day) Value: 7
  misc_feature: MA Experiment 20001451 PARAMETER Experiment Name: At_Far-red-induction_P Parameter: Light Value: Far-red vs. White
  misc_feature: MA Experiment 20001451 PARAMETER Experiment Name: At_Far-red-induction_P Parameter: Organism Value: A. thaliana
  misc_feature: MA Experiment 20001451 PARAMETER Experiment Name: At_Far-red-induction_P Parameter: Plant Line Value: Columbia
  misc_feature: MA Experiment 20001451 PARAMETER Experiment Name: At_Far-red-induction_P Parameter: Timepoint (hr) Value: 24
  misc_feature: MA Experiment 20001451 PARAMETER Experiment Name: At_Far-red-induction_P Parameter: Tissue Value: Whole Plant
  misc_feature: MA Experiment ID: 20001556 Result: Down-regulated in Transcription
  misc_feature: MA Experiment 20001556 PARAMETER Experiment Name: At_Drought_Soil_Dry_P Parameter: Age (day) Value: 26
  misc_feature: MA Experiment 20001556 PARAMETER Experiment Name: At_Drought_Soil_Dry_P Parameter: Organism Value: A. thaliana
  misc_feature: MA Experiment 20001556 PARAMETER Experiment Name: At_Drought_Soil_Dry_P Parameter: Plant Line Value: WS
  misc_feature: MA Experiment 20001556 PARAMETER Experiment Name: At_Drought_Soil_Dry_P Parameter: Post Timepoint (hr) Value: None
  misc_feature: MA Experiment 20001556 PARAMETER Experiment Name: At_Drought_Soil_Dry_P Parameter: Post-Treatment Value: None
  misc_feature: MA Experiment 20001556 PARAMETER Experiment Name: At_Drought_Soil_Dry_P Parameter: Timepoint (day) Value: 12
  misc_feature: MA Experiment 20001556 PARAMETER Experiment Name: At_Drought_Soil_Dry_P Parameter: Treatment Value: Drought vs. No Drought
  misc_feature: MA Experiment ID: 20001557 Result: Down-regulated in Transcription
  misc_feature: MA Experiment 20001557 PARAMETER Experiment Name: At_Drought_Soil_Dry_P Parameter: Age (day) Value: 27
  misc_feature: MA Experiment 20001557 PARAMETER Experiment Name: At_Drought_Soil_Dry_P Parameter: Organism Value: A. thaliana
  misc_feature: MA Experiment 20001557 PARAMETER Experiment Name: At_Drought_Soil_Dry_P Parameter: Plant Line Value: WS
  misc_feature: MA Experiment 20001557 PARAMETER Experiment Name: At_Drought_Soil_Dry_P Parameter: Post Timepoint (hr) Value: 3
  misc_feature: MA Experiment 20001557 PARAMETER Experiment Name: At_Drought_Soil_Dry_P Parameter: Post-Treatment Value: Re-Water vs. No Drought
  misc_feature: MA Experiment 20001557 PARAMETER Experiment Name: At_Drought_Soil_Dry_P Parameter: Timepoint (day) Value: 13
  misc_feature: MA Experiment 20001557 PARAMETER Experiment Name: At_Drought_Soil_Dry_P Parameter: Treatment Value: Drought vs. No Drought
  misc_feature: MA Experiment ID: 20001558 Result: Down-regulated in Transcription
  misc_feature: MA Experiment 20001558 PARAMETER Experiment Name: At_Drought_Soil_Dry_P Parameter: Age (day) Value: 27
  misc_feature: MA Experiment 20001558 PARAMETER Experiment Name: At_Drought_Soil_Dry_P Parameter: Organism Value: A. thaliana
  misc_feature: MA Experiment 20001558 PARAMETER Experiment Name: At_Drought_Soil_Dry_P Parameter: Plant Line Value: WS
  misc_feature: MA Experiment 20001558 PARAMETER Experiment Name: At_Drought_Soil_Dry_P Parameter: Post Timepoint (hr) Value: 6
  misc_feature: MA Experiment 20001558 PARAMETER Experiment Name: At_Drought_Soil_Dry_P Parameter: Post-Treatment Value: Re-Water vs. No Drought
  misc_feature: MA Experiment 20001558 PARAMETER Experiment Name: At_Drought_Soil_Dry_P Parameter: Timepoint (day) Value: 13
  misc_feature: MA Experiment 20001558 PARAMETER Experiment Name: At_Drought_Soil_Dry_P Parameter: Treatment Value: Drought vs. No Drought
  misc_feature: MA Experiment ID: 20001560 Result: Down-regulated in Transcription
  misc_feature: MA Experiment 20001560 PARAMETER Experiment Name: At_Drought_Soil_Dry_P Parameter: Age (day) Value: 28
  misc_feature: MA Experiment 20001560 PARAMETER Experiment Name: At_Drought_Soil_Dry_P Parameter: Organism Value: A. thaliana
  misc_feature: MA Experiment 20001560 PARAMETER Experiment Name: At_Drought_Soil_Dry_P Parameter: Plant Line Value: WS
  misc_feature: MA Experiment 20001560 PARAMETER Experiment Name: At_Drought_Soil_Dry_P Parameter: Post Timepoint (hr) Value: None
  misc_feature: MA Experiment 20001560 PARAMETER Experiment Name: At_Drought_Soil_Dry_P Parameter: Post-Treatment Value: None
  misc_feature: MA Experiment 20001560 PARAMETER Experiment Name: At_Drought_Soil_Dry_P Parameter: Timepoint (day) Value: 14
  misc_feature: MA Experiment 20001560 PARAMETER Experiment Name: At_Drought_Soil_Dry_P Parameter: Treatment Value: Drought vs. No Drought
atagttaaataaaattcatcttttcacggatatatttaatttggagccatgatgaattcaagaatttctattatcattgcgttatcttgcattatgatcacttcaattcgtgcatacgatcccgacgctcttcaagatctctgcgttgccgataaatctcacggaaccaaactgaatggatttccgtgcaaggaaacattaaacatcacggagtccgacttcttcttcgccggaatctcaaaacccgccgtcataaactctacgatgggttcggccgtaacaggagccaacgtggaaaagatcccaggcctcaacactctctccgtctccttagcacgtatagactacgcgccgggaggtttaaacccaccgcacactcacccacgcgccaccgaagtcgtctacgttctagaaggagagcttgaggttggatttatcacaacagcgaataagcttttcactaaaaccataaagattggtgaagttttcgtttttccaagagggcttgtgcattttcaaaagaacaatgggaaatctcccgcgtcggttttgtcggcatttaatagtcagttgccgggaacggcttctgttgcggcaaccctatttgcggcagagccggctttgccggaagatgtgttaactaagacttttcaagtgggatctaagatggttgataagattaaggaaaggcttgccactaaaaaataattcataaaagtttaaaaaaaaaataaaaacatgaaaatataatgtaaccgttacctagaaagattttatttaacactactgtattgaataaaaaggtgttactgtgattatctt

SEQ ID NO: 103048 - protein, 219 aa, Arabidopsis thaliana
  peptide (1)..(219): Ceres Seq. ID no. 13611856
  misc_feature (59)..(209): Pfam Name: Cupin Pfam Description: Cupin
  misc_feature (1)..(219): Homolog of NCBI NO: 18202917 NR Description: Germin-like protein subfamily 2 member 2 precursor
  misc_feature (1)..(219): Homolog of NCBI NO: 26449711 NR Description: putative germin [Arabidopsis thaliana]
  misc_feature (20)..(219): Homolog of NCBI NO: 1934730 NR Description: germin-like protein [Arabidopsis thaliana]
  misc_feature (20)..(219): Homolog of NCBI NO: 15228673 NR Description: germin-like protein (GLP10) [Arabidopsis thaliana]
  misc_feature (7)..(219): Homolog of NCBI NO: 34904670 NR Description: putative germin protein [Oryza sativa (japonica group)] >gi|5042461|gb|AAD38298.1| putative oxalate oxidase
  misc_feature (1)..(219): Homolog of NCBI NO: 15217561 NR Description: germin-like protein (GLP4) (GLP5) [Arabidopsis
  misc_feature (4)..(214): Homolog of NCBI NO: 34902528 NR Description: probable germin protein 4 [Oryza sativa (japonica
  misc_feature (6)..(219): Homolog of NCBI NO: 18203442 NR Description: Rhicadhesin receptor precursor (Germin-like
  misc_feature (6)..(219): Homolog of NCBI NO: 7447341 NR Description: germin homolog - potato
  misc_feature (1)..(219): Homolog of NCBI NO: 27805638 NR Description: Nectarin 1 precursor (Superoxide dismutase [Mn])
MMNSRISIIIALSCIMITSIRAYDPDALQDLCVADKSHGTKLNGFPCKETLNITESDFFFAGISKPAVINSTMGSAVTGANVEKIPGLNTLSVSLARIDYAPGGLNPPHTHPRATEVVYVLEGELEVGFITTANKLFTKTIKIGEVFVFPRGLVHFQKNNGKSPASVLSAFNSQLPGTASVAATLFAAEPALPEDVLTKTFQVGSKMVDKIKERLATKK

SEQ ID NO: 103049 - protein, 218 aa, Arabidopsis thaliana
  peptide (1)..(218): Ceres Seq. ID no. 13611857
  misc_feature (58)..(208): Pfam Name: Cupin Pfam Description: Cupin
  misc_feature (1)..(218): Homolog of NCBI NO: 18202917 NR Description: Germin-like protein subfamily 2 member 2 precursor
  misc_feature (1)..(218): Homolog of NCBI NO: 26449711 NR Description: putative germin [Arabidopsis thaliana]
  misc_feature (19)..(218): Homolog of NCBI NO: 1934730 NR Description: germin-like protein [Arabidopsis thaliana]
  misc_feature (19)..(218): Homolog of NCBI NO: 15228673 NR Description: germin-like protein (GLP10) [Arabidopsis thaliana]
  misc_feature (6)..(218): Homolog of NCBI NO: 34904670 NR Description: putative germin protein [Oryza sativa (japonica group)] >gi|5042461|gb|AAD38298.1| putative oxalate oxidase
  misc_feature (1)..(218): Homolog of NCBI NO: 15217561 NR Description: germin-like protein (GLP4) (GLP5) [Arabidopsis
  misc_feature (3)..(213): Homolog of NCBI NO: 34902528 NR Description: probable germin protein 4 [Oryza sativa (japonica
  misc_feature (5)..(218): Homolog of NCBI NO: 18203442 NR Description: Rhicadhesin receptor precursor (Germin-like
  misc_feature (5)..(218): Homolog of NCBI NO: 7447341 NR Description: germin homolog - potato
  misc_feature (1)..(218): Homolog of NCBI NO: 27805638 NR Description: Nectarin 1 precursor (Superoxide dismutase [Mn])
MNSRISIIIALSCIMITSIRAYDPDALQDLCVADKSHGTKLNGFPCKETLNITESDFFFAGISKPAVINSTMGSAVTGANVEKIPGLNTLSVSLARIDYAPGGLNPPHTHPRATEVVYVLEGELEVGFITTANKLFTKTIKIGEVFVFPRGLVHFQKNNGKSPASVLSAFNSQLPGTASVAATLFAAEPALPEDVLTKTFQVGSKMVDKIKERLATKK

SEQ ID NO: 103050 - protein, 204 aa, Arabidopsis thaliana
  peptide (1)..(204): Ceres Seq. ID no. 13611858
  misc_feature (44)..(194): Pfam Name: Cupin Pfam Description: Cupin
  misc_feature (1)..(204): Homolog of NCBI NO: 18202917 NR Description: Germin-like protein subfamily 2 member 2 precursor
  misc_feature (1)..(204): Homolog of NCBI NO: 26449711 NR Description: putative germin [Arabidopsis thaliana]
  misc_feature (5)..(204): Homolog of NCBI NO: 1934730 NR Description: germin-like protein [Arabidopsis thaliana]
  misc_feature (5)..(204): Homolog of NCBI NO: 15228673 NR Description: germin-like protein (GLP10) [Arabidopsis thaliana]
  misc_feature (1)..(204): Homolog of NCBI NO: 34904670 NR Description: putative germin protein [Oryza sativa (japonica group)] >gi|5042461|gb|AAD38298.1| putative oxalate oxidase
  misc_feature (1)..(204): Homolog of NCBI NO: 15217561 NR Description: germin-like protein (GLP4) (GLP5) [Arabidopsis
  misc_feature (1)..(199): Homolog of NCBI NO: 34902528 NR Description: probable germin protein 4 [Oryza sativa (japonica
  misc_feature (1)..(204): Homolog of NCBI NO: 18203442 NR Description: Rhicadhesin receptor precursor (Germin-like
  misc_feature (1)..(204): Homolog of NCBI NO: 7447341 NR Description: germin homolog - potato
  misc_feature (1)..(204): Homolog of NCBI NO: 27805638 NR Description: Nectarin 1 precursor (Superoxide dismutase [Mn])
MITSIRAYDPDALQDLCVADKSHGTKLNGFPCKETLNITESDFFFAGISKPAVINSTMGSAVTGANVEKIPGLNTLSVSLARIDYAPGGLNPPHTHPRATEVVYVLEGELEVGFITTANKLFTKTIKIGEVFVFPRGLVHFQKNNGKSPASVLSAFNSQLPGTASVAATLFAAEPALPEDVLTKTFQVGSKMVDKIKERLATKK

SEQ ID NO: 103051 - DNA, 989 bp, Arabidopsis thaliana
  misc_feature (1)..(989): Ceres Seq. ID no. 13611863
  misc_feature: MA Experiment ID: 108434 Result: Down-regulated in Transcription
  misc_feature: MA Experiment 108434 PARAMETER Experiment Name: At_Root_Tips_cDNA_P Parameter: Tissue Value: Root Tips
  misc_feature: MA Experiment ID: 108462 Result: Up-regulated in Transcription
  misc_feature: MA Experiment 108462 PARAMETER Experiment Name: At_Germinating_Seeds_cDNA_P Parameter: Age (day) Value: 2 vs. 0
  misc_feature: MA Experiment 108462 PARAMETER Experiment Name: At_Germinating_Seeds_cDNA_P Parameter: Tissue Value: Germinating Seeds
  misc_feature: MA Experiment ID: 108463 Result: Up-regulated in Transcription
  misc_feature: MA Experiment 108463 PARAMETER Experiment Name: At_Germinating_Seeds_cDNA_P Parameter: Age (day) Value: 3 vs. 0
  misc_feature: MA Experiment 108463 PARAMETER Experiment Name: At_Germinating_Seeds_cDNA_P Parameter: Tissue Value: Germinating Seeds
  misc_feature: MA Experiment ID: 108464 Result: Up-regulated in Transcription
  misc_feature: MA Experiment 108464 PARAMETER Experiment Name: At_Germinating_Seeds_cDNA_P Parameter: Age (day) Value: 4 vs. 0
  misc_feature: MA Experiment 108464 PARAMETER Experiment Name: At_Germinating_Seeds_cDNA_P Parameter: Tissue Value: Germinating Seeds
  misc_feature: MA Experiment ID: 108573 Result: Down-regulated in Transcription
  misc_feature: MA Experiment 108573 PARAMETER Experiment Name: At_Drought_cDNA_P Parameter: Timepoint (hr) Value: 6
  misc_feature: MA Experiment 108573 PARAMETER Experiment Name: At_Drought_cDNA_P Parameter: Tissue Value: Aerial
  misc_feature: MA Experiment 108573 PARAMETER Experiment Name: At_Drought_cDNA_P Parameter: Treatment Value: Drought vs. No Drought
  misc_feature: MA Experiment ID: 108585 Result: Up-regulated in Transcription
  misc_feature: MA Experiment 108585 PARAMETER Experiment Name: At_5mM_NaNP_cDNA_P Parameter: Timepoint (hr) Value: 6
  misc_feature: MA Experiment 108585 PARAMETER Experiment Name: At_5mM_NaNP_cDNA_P Parameter: Tissue Value: Aerial
  misc_feature: MA Experiment 108585 PARAMETER Experiment Name: At_5mM_NaNP_cDNA_P Parameter: Treatment Value: null
  misc_feature: MA Experiment ID: 108668 Result: Up-regulated in Transcription
  misc_feature: MA Experiment 108668 PARAMETER Experiment Name: At_2mM_SA_cDNA_P Parameter: Plant Line Value: WS
  misc_feature: MA Experiment 108668 PARAMETER Experiment Name: At_2mM_SA_cDNA_P Parameter: Timepoint (hr) Value: 6
  misc_feature: MA Experiment 108668 PARAMETER Experiment Name: At_2mM_SA_cDNA_P Parameter: Treatment Value: 2mM SA vs. No Treatment
  misc_feature: MA Experiment ID: 20000090 Result: Up-regulated in Transcription
  misc_feature: MA Experiment ID: 20000111 Result: Down-regulated in Transcription
  misc_feature: MA Experiment 20000111 PARAMETER Experiment Name: At_42deg_Heat_cDNA_P Parameter: Temperature (deg C) Value: 42 vs. 22
  misc_feature: MA Experiment 20000111 PARAMETER Experiment Name: At_42deg_Heat_cDNA_P Parameter: Timepoint (hr) Value: 6
  misc_feature: MA Experiment 20000111 PARAMETER Experiment Name: At_42deg_Heat_cDNA_P Parameter: Tissue Value: Aerial
  misc_feature: MA Experiment ID: 20000144 Result: Down-regulated in Transcription
  misc_feature: MA Experiment 20000144 PARAMETER Experiment Name: At_42deg_Heat_cDNA_P Parameter: Temperature (deg C) Value: 42 vs. 22
  misc_feature: MA Experiment 20000144 PARAMETER Experiment Name: At_42deg_Heat_cDNA_P Parameter: Timepoint (hr) Value: 1
  misc_feature: MA Experiment 20000144 PARAMETER Experiment Name: At_42deg_Heat_cDNA_P Parameter: Tissue Value: Aerial
  misc_feature: MA Experiment ID: 20000171 Result: Down-regulated in Transcription
  misc_feature: MA Experiment 20000171 PARAMETER Experiment Name: At_42deg_Heat_P Parameter: Age (day) Value: 14
  misc_feature: MA Experiment 20000171 PARAMETER Experiment Name: At_42deg_Heat_P Parameter: Organism Value: A. thaliana
  misc_feature: MA Experiment 20000171 PARAMETER Experiment Name: At_42deg_Heat_P Parameter: Plant Line Value: WS
  misc_feature: MA Experiment 20000171 PARAMETER Experiment Name: At_42deg_Heat_P Parameter: Temperature (deg C) Value: 42 vs. 22
  misc_feature: MA Experiment 20000171 PARAMETER Experiment Name: At_42deg_Heat_P Parameter: Timepoint (hr) Value: 1
  misc_feature: MA Experiment 20000171 PARAMETER Experiment Name: At_42deg_Heat_P Parameter: Tissue Value: Aerial
  misc_feature: MA Experiment ID: 20000179 Result: Down-regulated in Transcription
  misc_feature: MA Experiment 20000179 PARAMETER Experiment Name: At_Germinating_Seeds_P Parameter: Age (hr) Value: 6 vs. 0
  misc_feature: MA Experiment 20000179 PARAMETER Experiment Name: At_Germinating_Seeds_P Parameter: Tissue Value: Germinating Seeds
  misc_feature: MA Experiment ID: 20000182 Result: Up-regulated in Transcription
  misc_feature: MA Experiment 20000182 PARAMETER Experiment Name: At_2mM_SA_P Parameter: Age (day) Value: 14
  misc_feature: MA Experiment 20000182 PARAMETER Experiment Name: At_2mM_SA_P Parameter: Organism Value: A. thaliana
  misc_feature: MA Experiment 20000182 PARAMETER Experiment Name: At_2mM_SA_P Parameter: Plant Line Value: WS
  misc_feature: MA Experiment 20000182 PARAMETER Experiment Name: At_2mM_SA_P Parameter: Timepoint (hr) Value: 6
  misc_feature: MA Experiment 20000182 PARAMETER Experiment Name: At_2mM_SA_P Parameter: Tissue Value: Aerial
  misc_feature: MA Experiment 20000182 PARAMETER Experiment Name: At_2mM_SA_P Parameter: Treatment Value: 2mM SA vs. No Treatment
  misc_feature: MA Experiment ID: 20000185 Result: Up-regulated in Transcription
  misc_feature: MA Experiment 20000185 PARAMETER Experiment Name: At_Roots__P Parameter: Age (day) Value: 7 vs. 21
  misc_feature: MA Experiment 20000185 PARAMETER Experiment Name: At_Roots__P Parameter: Organism Value: A. thaliana
  misc_feature: MA Experiment 20000185 PARAMETER Experiment Name: At_Roots__P Parameter: Tissue Value: Roots vs. Whole Plant
  misc_feature: MA Experiment ID: 20000224 Result: Down-regulated in Transcription
  misc_feature: MA Experiment ID: 20000264 Result: Down-regulated in Transcription
  misc_feature: MA Experiment 20000264 PARAMETER Experiment Name: At_Open_Flower_P Parameter: Age (day) Value: 21
  misc_feature: MA Experiment 20000264 PARAMETER Experiment Name: At_Open_Flower_P Parameter: Plant Line Value: WS
  misc_feature: MA Experiment 20000264 PARAMETER Experiment Name: At_Open_Flower_P Parameter: Tissue Value: Open Flower vs. Whole Plant
  misc_feature: MA Experiment ID: 20000267 Result: Down-regulated in Transcription
  misc_feature: MA Experiment 20000267 PARAMETER Experiment Name: At_Drought_P Parameter: Age (day) Value: 7
  misc_feature: MA Experiment 20000267 PARAMETER Experiment Name: At_Drought_P Parameter: Organism Value: A. thaliana
  misc_feature: MA Experiment 20000267 PARAMETER Experiment Name: At_Drought_P Parameter: Plant Line Value: WS
  misc_feature: MA Experiment 20000267 PARAMETER Experiment Name: At_Drought_P Parameter: Timepoint (hr) Value: 6
  misc_feature: MA Experiment 20000267 PARAMETER Experiment Name: At_Drought_P Parameter: Tissue Value: Whole Plant
  misc_feature: MA Experiment 20000267 PARAMETER Experiment Name: At_Drought_P Parameter: Treatment Value: Drought vs. No Drought
  misc_feature: MA Experiment ID: 20000286 Result: Down-regulated in Transcription
  misc_feature: MA Experiment 20000286 PARAMETER Experiment Name: At_Open_Flower_P Parameter: Age (day) Value: 21
  misc_feature: MA Experiment 20000286 PARAMETER Experiment Name: At_Open_Flower_P Parameter: Plant Line Value: WS
  misc_feature: MA Experiment 20000286 PARAMETER Experiment Name: At_Open_Flower_P Parameter: Tissue Value: Half Open vs. Whole Plant
  misc_feature: MA Experiment ID: 20000306 Result: Down-regulated in Transcription
  misc_feature: MA Experiment 20000306 PARAMETER Experiment Name: At_Germinating_Seeds_Sub_P Parameter: Age (hr) Value: 6 vs. 0
  misc_feature: MA Experiment 20000306 PARAMETER Experiment Name: At_Germinating_Seeds_Sub_P Parameter: Organism Value: A. thaliana
  misc_feature: MA Experiment 20000306 PARAMETER Experiment Name: At_Germinating_Seeds_Sub_P Parameter: Plant Line Value: WS
  misc_feature: MA Experiment 20000306 PARAMETER Experiment Name: At_Germinating_Seeds_Sub_P Parameter: Tissue Value: Germinating Seeds
  misc_feature: MA Experiment ID: 20000307 Result: Up-regulated in Transcription
  misc_feature: MA Experiment 20000307 PARAMETER Experiment Name: At_Germinating_Seeds_Sub_P Parameter: Age (hr) Value: 24 vs. 0
  misc_feature: MA Experiment 20000307 PARAMETER Experiment Name: At_Germinating_Seeds_Sub_P Parameter: Organism Value: A. thaliana
  misc_feature: MA Experiment 20000307 PARAMETER Experiment Name: At_Germinating_Seeds_Sub_P Parameter: Plant Line Value: WS
  misc_feature: MA Experiment 20000307 PARAMETER Experiment Name: At_Germinating_Seeds_Sub_P Parameter: Tissue Value: Germinating Seeds
  misc_feature: MA Experiment ID: 20000314 Result: Up-regulated in Transcription
  misc_feature: MA Experiment 20000314 PARAMETER Experiment Name: At_14day_Shoots-Roots_Sub_P Parameter: Age (day) Value: 14
  misc_feature: MA Experiment 20000314 PARAMETER Experiment Name: At_14day_Shoots-Roots_Sub_P Parameter: Organism Value: A. thaliana
  misc_feature: MA Experiment 20000314 PARAMETER Experiment Name: At_14day_Shoots-Roots_Sub_P Parameter: Plant Line Value: WS
  misc_feature: MA Experiment 20000314 PARAMETER Experiment Name: At_14day_Shoots-Roots_Sub_P Parameter: Tissue Value: Roots vs. Whole Plant
  misc_feature: MA Experiment ID: 20000328 Result: Down-regulated in Transcription
  misc_feature: MA Experiment 20000328 PARAMETER Experiment Name: At_42deg_Heat_Sub_P Parameter: Age (day) Value: 14
  misc_feature: MA Experiment 20000328 PARAMETER Experiment Name: At_42deg_Heat_Sub_P Parameter: Organism Value: A. thaliana
  misc_feature: MA Experiment 20000328 PARAMETER Experiment Name: At_42deg_Heat_Sub_P Parameter: Plant Line Value: WS
  misc_feature: MA Experiment 20000328 PARAMETER Experiment Name: At_42deg_Heat_Sub_P Parameter: Temperature (deg C) Value: 42 vs. 22
  misc_feature: MA Experiment 20000328 PARAMETER Experiment Name: At_42deg_Heat_Sub_P Parameter: Timepoint (hr) Value: 6
  misc_feature: MA Experiment 20000328 PARAMETER Experiment Name: At_42deg_Heat_Sub_P Parameter: Tissue Value: Aerial
  misc_feature: MA Experiment ID: 20000347 Result: Up-regulated in Transcription
  misc_feature: MA Experiment 20000347 PARAMETER Experiment Name: At_2mM_SA_Sub_P Parameter: Age (day) Value: 14
  misc_feature: MA Experiment 20000347 PARAMETER Experiment Name: At_2mM_SA_Sub_P Parameter: Organism Value: A. thaliana
  misc_feature: MA Experiment 20000347 PARAMETER Experiment Name: At_2mM_SA_Sub_P Parameter: Plant Line Value: WS
  misc_feature: MA Experiment 20000347 PARAMETER Experiment Name: At_2mM_SA_Sub_P Parameter: Timepoint (hr) Value: 6
  misc_feature: MA Experiment 20000347 PARAMETER Experiment Name: At_2mM_SA_Sub_P Parameter: Tissue Value: Aerial
  misc_feature: MA Experiment 20000347 PARAMETER Experiment Name: At_2mM_SA_Sub_P Parameter: Treatment Value: 2mM SA vs. No Treatment
  misc_feature: MA Experiment ID: 20000352 Result: Down-regulated in Transcription
  misc_feature: MA Experiment 20000352 PARAMETER Experiment Name: At_Drought_Sub_P Parameter: Age (day) Value: 7
  misc_feature: MA Experiment 20000352 PARAMETER Experiment Name: At_Drought_Sub_P Parameter: Organism Value: A. thaliana
  misc_feature: MA Experiment 20000352 PARAMETER Experiment Name: At_Drought_Sub_P Parameter: Plant Line Value: WS
  misc_feature: MA Experiment 20000352 PARAMETER Experiment Name: At_Drought_Sub_P Parameter: Timepoint (hr) Value: 6
  misc_feature: MA Experiment 20000352 PARAMETER Experiment Name: At_Drought_Sub_P Parameter: Tissue Value: Whole Plant
  misc_feature: MA Experiment 20000352 PARAMETER Experiment Name: At_Drought_Sub_P Parameter: Treatment Value: Drought vs. No Drought
  misc_feature: MA Experiment ID: 20000436 Result: Down-regulated in Transcription
  misc_feature: MA Experiment 20000436 PARAMETER Experiment Name: At_Drought_P Parameter: Age (day) Value: 7
  misc_feature: MA Experiment 20000436 PARAMETER Experiment Name: At_Drought_P Parameter: Organism Value: A. thaliana
  misc_feature: MA Experiment 20000436 PARAMETER Experiment Name: At_Drought_P Parameter: Plant Line Value: WS
  misc_feature: MA Experiment 20000436 PARAMETER Experiment Name: At_Drought_P Parameter: Timepoint (hr) Value: 12
  misc_feature: MA Experiment 20000436 PARAMETER Experiment Name: At_Drought_P Parameter: Tissue Value: Whole Plant
  misc_feature: MA Experiment 20000436 PARAMETER Experiment Name: At_Drought_P Parameter: Treatment Value: Drought vs. No Drought
  misc_feature: MA Experiment ID: 20000437 Result: Down-regulated in Transcription
  misc_feature: MA Experiment 20000437 PARAMETER Experiment Name: At_Drought_P Parameter: Age (day) Value: 8
  misc_feature: MA Experiment 20000437 PARAMETER Experiment Name: At_Drought_P Parameter: Organism Value: A. thaliana
  misc_feature: MA Experiment 20000437 PARAMETER Experiment Name: At_Drought_P Parameter: Plant Line Value: WS
  misc_feature: MA Experiment 20000437 PARAMETER Experiment Name: At_Drought_P Parameter: Timepoint (hr) Value: 24
  misc_feature: MA Experiment 20000437 PARAMETER Experiment Name: At_Drought_P Parameter: Tissue Value: Whole Plant
  misc_feature: MA Experiment 20000437 PARAMETER Experiment Name: At_Drought_P Parameter: Treatment Value: Drought vs. No Drought
  misc_feature: MA Experiment ID: 20000439 Result: Up-regulated in Transcription
  misc_feature: MA Experiment 20000439 PARAMETER Experiment Name: At_Roots__P Parameter: Age (day) Value: 14 vs. 21
  misc_feature: MA Experiment 20000439 PARAMETER Experiment Name: At_Roots__P Parameter: Organism Value: A. thaliana
  misc_feature: MA Experiment 20000439 PARAMETER Experiment Name: At_Roots__P Parameter: Tissue Value: Roots vs. Whole Plant
  misc_feature: MA Experiment ID: 20000709 Result: Down-regulated in Transcription
  misc_feature: MA Experiment 20000709 PARAMETER Experiment Name: At_15mM_NH4NO3_L-to-H_P Parameter: Age (hr) Value: 14
  misc_feature: MA Experiment 20000709 PARAMETER Experiment Name: At_15mM_NH4NO3_L-to-H_P Parameter: Organism Value: A. thaliana
  misc_feature: MA Experiment 20000709 PARAMETER Experiment Name: At_15mM_NH4NO3_L-to-H_P Parameter: Plant Line Value: WS
  misc_feature: MA Experiment 20000709 PARAMETER Experiment Name: At_15mM_NH4NO3_L-to-H_P Parameter: Timepoint (hr) Value: 4
  misc_feature: MA Experiment 20000709 PARAMETER Experiment Name: At_15mM_NH4NO3_L-to-H_P Parameter: Tissue Value: Aerial
  misc_feature: MA Experiment 20000709 PARAMETER Experiment Name: At_15mM_NH4NO3_L-to-H_P Parameter: Treatment Value: 15mM NH4NO3 vs. 30mM Mannitol
  misc_feature: MA Experiment ID: 20001557 Result: Down-regulated in Transcription
  misc_feature: MA Experiment 20001557 PARAMETER Experiment Name: At_Drought_Soil_Dry_P Parameter: Age (day) Value: 27
  misc_feature: MA Experiment 20001557 PARAMETER Experiment Name: At_Drought_Soil_Dry_P Parameter: Organism Value: A. thaliana
  misc_feature: MA Experiment 20001557 PARAMETER Experiment Name: At_Drought_Soil_Dry_P Parameter: Plant Line Value: WS
  misc_feature: MA Experiment 20001557 PARAMETER Experiment Name: At_Drought_Soil_Dry_P Parameter: Post Timepoint (hr) Value: 3
  misc_feature: MA Experiment 20001557 PARAMETER Experiment Name: At_Drought_Soil_Dry_P Parameter: Post-Treatment Value: Re-Water vs. No Drought
  misc_feature: MA Experiment 20001557 PARAMETER Experiment Name: At_Drought_Soil_Dry_P Parameter: Timepoint (day) Value: 13
  misc_feature: MA Experiment 20001557 PARAMETER Experiment Name: At_Drought_Soil_Dry_P Parameter: Treatment Value: Drought vs. No Drought
  misc_feature: MA Experiment ID: 20001558 Result: Down-regulated in Transcription
  misc_feature: MA Experiment 20001558 PARAMETER Experiment Name: At_Drought_Soil_Dry_P Parameter: Age (day) Value: 27
  misc_feature: MA Experiment 20001558 PARAMETER Experiment Name: At_Drought_Soil_Dry_P Parameter: Organism Value: A. thaliana
  misc_feature: MA Experiment 20001558 PARAMETER Experiment Name: At_Drought_Soil_Dry_P Parameter: Plant Line Value: WS
  misc_feature: MA Experiment 20001558 PARAMETER Experiment Name: At_Drought_Soil_Dry_P Parameter: Post Timepoint (hr) Value: 6
  misc_feature: MA Experiment 20001558 PARAMETER Experiment Name: At_Drought_Soil_Dry_P Parameter: Post-Treatment Value: Re-Water vs. No Drought
  misc_feature: MA Experiment 20001558 PARAMETER Experiment Name: At_Drought_Soil_Dry_P Parameter: Timepoint (day) Value: 13
  misc_feature: MA Experiment 20001558 PARAMETER Experiment Name: At_Drought_Soil_Dry_P Parameter: Treatment Value: Drought vs. No Drought
  misc_feature: MA Experiment ID: 20001773 Result: Down-regulated in Transcription
  misc_feature: MA Experiment 20001773 PARAMETER Experiment Name: At_Far-red-enriched-adult_P Parameter: Age (day) Value: 30
  misc_feature: MA Experiment 20001773 PARAMETER Experiment Name: At_Far-red-enriched-adult_P Parameter: Light Value: Far-red enriched vs. White
  misc_feature: MA Experiment 20001773 PARAMETER Experiment Name: At_Far-red-enriched-adult_P Parameter: Organism Value: A. thaliana
  misc_feature: MA Experiment 20001773 PARAMETER Experiment Name: At_Far-red-enriched-adult_P Parameter: Plant Line Value: Columbia
  misc_feature: MA Experiment 20001773 PARAMETER Experiment Name: At_Far-red-enriched-adult_P Parameter: Timepoint (hr) Value: 48
  misc_feature: MA Experiment 20001773 PARAMETER Experiment Name: At_Far-red-enriched-adult_P Parameter: Tissue Value: Aerial
atcaagatcgatccctctctaaaaatggctcaacaacactcttttctcctcttatgcttcttcctctcaatctcttatttactatcttccgcccaaaccgaagccacctcaatcgagagattagtgccaagagacctctacaacaaaattttcatccacaaggacaataccgcttgtcccgcaaatggtttctacacttacgaatcatttgtccaagcgacgaggcggtttccgagattcgggagcgtaggaagccccgtgacacaacgactcgaagtggctgcatttttggctcagatttcacacgagacgaccggaggatgggcaacggcaccagacggaccgtacgcttggggattatgctttaaagaagaagtgagtccacaaagcacttattgtgattcttctgatacacagtggccttgtttccctaacaagacttatcaaggaagaggtccaattcaactatcgtggaactacaattacggaccggccggtcgagccttaggattcgacggtctaaggaatccagaaacggtgtcaaataattcagtgatagcttttcaaacagcactttggttttggatgacgccacagagtcccaaaccttcgtgccatgacgtcatgatcggaaaataccgacctacggcggcggatttggcagctaaccggaccggcgggtttggtttaaccacaaatataataaatggcggtttagagtgtgggattcctggagacggacgggtcaatgaccgaatcgggttttttcagagatatactgggctgtttaaagtagcaactgggccgaatttggactgtgaaaatcaaaggccttatgcttaaacaattaatttggttgacccgaaatatgtatgtttataaacaaaaagtcaacatgtatgtttatggcattgcccacacatggagccataaaaggggtttatattcaataatgtaattcaatttaatgtgatttgatggttttgatt

SEQ ID NO: 103052 - protein, 280 aa, Arabidopsis thaliana
  peptide (1)..(280): Ceres Seq. ID no. 13611864
  misc_feature (9)..(280): Homolog of NCBI NO: 15217733 NR Description: glycosyl hydrolase family 19 (chitinase)
  misc_feature (9)..(280): Homolog of NCBI NO: 15234281 NR Description: glycosyl hydrolase family 19 (chitinase)
  misc_feature (9)..(279): Homolog of NCBI NO: 5880845 NR Description: chitinase precursor [Petroselinum crispum]
  misc_feature (14)..(279): Homolog of NCBI NO: 5880847 NR Description: chitinase precursor [Petroselinum crispum]
  misc_feature (14)..(279): Homolog of NCBI NO: 2129820 NR Description: chitinase (EC 3.2.1.14) class II - peanut
  misc_feature (21)..(279): Homolog of NCBI NO: 6002766 NR Description: class II chitinase [Fragaria x ananassa]
  misc_feature (34)..(272): Homolog of NCBI NO: 4008074 NR Description: chitinase [Cynodon dactylon]
  misc_feature (38)..(279): Homolog of NCBI NO: 34894264 NR Description: unnamed protein product [Oryza sativa (japonica group)] >gi|8096375|dbj|BAA95846.1| unnamed protein product
  misc_feature (73)..(279): Homolog of NCBI NO: 4008072 NR Description: chitinase [Cynodon dactylon]
  misc_feature (41)..(280): Homolog of NCBI NO: 21426919 NR Description: chitinase [Leucaena leucocephala]
IKIDPSLKMAQQHSFLLLCFFLSISYLLSSAQTEATSIERLVPRDLYNKIFIHKDNTACPANGFYTYESFVQATRRFPRFGSVGSPVTQRLEVAAFLAQISHETTGGWATAPDGPYAWGLCFKEEVSPQSTYCDSSDTQWPCFPNKTYQGRGPIQLSWNYNYGPAGRALGFDGLRNPETVSNNSVIAFQTALWFWMTPQSPKPSCHDVMIGKYRPTAADLAANRTGGFGLTTNIINGGLECGIPGDGRVNDRIGFFQRYTGLFKVATGPNLDCENQRPYA

SEQ ID NO: 103053 - protein, 272 aa, Arabidopsis thaliana
  peptide (1)..(272): Ceres Seq. ID no. 13611865
  misc_feature (1)..(272): Homolog of NCBI NO: 15217733 NR Description: glycosyl hydrolase family 19 (chitinase)
  misc_feature (1)..(272): Homolog of NCBI NO: 15234281 NR Description: glycosyl hydrolase family 19 (chitinase)
  misc_feature (1)..(271): Homolog of NCBI NO: 5880845 NR Description: chitinase precursor [Petroselinum crispum]
  misc_feature (6)..(271): Homolog of NCBI NO: 5880847 NR Description: chitinase precursor [Petroselinum crispum]
  misc_feature (6)..(271): Homolog of NCBI NO: 2129820 NR Description: chitinase (EC 3.2.1.14) class II - peanut
  misc_feature (13)..(271): Homolog of NCBI NO: 6002766 NR Description: class II chitinase [Fragaria x ananassa]
  misc_feature (26)..(264): Homolog of NCBI NO: 4008074 NR Description: chitinase [Cynodon dactylon]
  misc_feature (30)..(271): Homolog of NCBI NO: 34894264 NR Description: unnamed protein product [Oryza sativa (japonica group)] >gi|8096375|dbj|BAA95846.1| unnamed protein product
  misc_feature (65)..(271): Homolog of NCBI NO: 4008072 NR Description: chitinase [Cynodon dactylon]
  misc_feature (33)..(272): Homolog of NCBI NO: 21426919 NR Description: chitinase [Leucaena leucocephala]
MAQQHSFLLLCFFLSISYLLSSAQTEATSIERLVPRDLYNKIFIHKDNTACPANGFYTYESFVQATRRFPRFGSVGSPVTQRLEVAAFLAQISHETTGGWATAPDGPYAWGLCFKEEVSPQSTYCDSSDTQWPCFPNKTYQGRGPIQLSWNYNYGPAGRALGFDGLRNPETVSNNSVIAFQTALWFWMTPQSPKPSCHDVMIGKYRPTAADLAANRTGGFGLTTNIINGGLECGIPGDGRVNDRIGFFQRYTGLFKVATGPNLDCENQRPYA

SEQ ID NO: 103054 - DNA, 1787 bp, Arabidopsis thaliana
  misc_feature (1)..(1787): Ceres Seq. ID no. 13611866
  misc_feature: MA Experiment ID: 108434 Result: Up-regulated in Transcription
  misc_feature: MA Experiment 108434 PARAMETER Experiment Name: At_Root_Tips_cDNA_P Parameter: Tissue Value: Root Tips
  misc_feature: MA Experiment ID: 108461 Result: Down-regulated in Transcription
  misc_feature: MA Experiment 108461 PARAMETER Experiment Name: At_Germinating_Seeds_cDNA_P Parameter: Age (day) Value: 1 vs. 0
  misc_feature: MA Experiment 108461 PARAMETER Experiment Name: At_Germinating_Seeds_cDNA_P Parameter: Tissue Value: Germinating Seeds
  misc_feature: MA Experiment ID: 108462 Result: Down-regulated in Transcription
  misc_feature: MA Experiment 108462 PARAMETER Experiment Name: At_Germinating_Seeds_cDNA_P Parameter: Age (day) Value: 2 vs. 0
  misc_feature: MA Experiment 108462 PARAMETER Experiment Name: At_Germinating_Seeds_cDNA_P Parameter: Tissue Value: Germinating Seeds
  misc_feature: MA Experiment ID: 108463 Result: Down-regulated in Transcription
  misc_feature: MA Experiment 108463 PARAMETER Experiment Name: At_Germinating_Seeds_cDNA_P Parameter: Age (day) Value: 3 vs. 0
  misc_feature: MA Experiment 108463 PARAMETER Experiment Name: At_Germinating_Seeds_cDNA_P Parameter: Tissue Value: Germinating Seeds
  misc_feature: MA Experiment ID: 108464 Result: Down-regulated in Transcription
  misc_feature: MA Experiment 108464 PARAMETER Experiment Name: At_Germinating_Seeds_cDNA_P Parameter: Age (day) Value: 4 vs. 0
  misc_feature: MA Experiment 108464 PARAMETER Experiment Name: At_Germinating_Seeds_cDNA_P Parameter: Tissue Value: Germinating Seeds
  misc_feature: MA Experiment ID: 108572 Result: Down-regulated in Transcription
  misc_feature: MA Experiment 108572 PARAMETER Experiment Name: At_Drought_cDNA_P Parameter: Timepoint (hr) Value: 1
  misc_feature: MA Experiment 108572 PARAMETER Experiment Name: At_Drought_cDNA_P Parameter: Tissue Value: Aerial
  misc_feature: MA Experiment 108572 PARAMETER Experiment Name: At_Drought_cDNA_P Parameter: Treatment Value: Drought vs. No Drought
  misc_feature: MA Experiment ID: 20000179 Result: Down-regulated in Transcription
  misc_feature: MA Experiment 20000179 PARAMETER Experiment Name: At_Germinating_Seeds_P Parameter: Age (hr) Value: 6 vs. 0
  misc_feature: MA Experiment 20000179 PARAMETER Experiment Name: At_Germinating_Seeds_P Parameter: Tissue Value: Germinating Seeds
  misc_feature: MA Experiment ID: 20000180 Result: Down-regulated in Transcription
  misc_feature: MA Experiment 20000180 PARAMETER Experiment Name: At_Germinating_Seeds_P Parameter: Age (hr) Value: 24 vs. 0
  misc_feature: MA Experiment 20000180 PARAMETER Experiment Name: At_Germinating_Seeds_P Parameter: Tissue Value: Germinating Seeds
  misc_feature: MA Experiment ID: 20000306 Result: Down-regulated in Transcription
  misc_feature: MA Experiment 20000306 PARAMETER Experiment Name: At_Germinating_Seeds_Sub_P Parameter: Age (hr) Value: 6 vs. 0
  misc_feature: MA Experiment 20000306 PARAMETER Experiment Name: At_Germinating_Seeds_Sub_P Parameter: Organism Value: A. thaliana
  misc_feature: MA Experiment 20000306 PARAMETER Experiment Name: At_Germinating_Seeds_Sub_P Parameter: Plant Line Value: WS
  misc_feature: MA Experiment 20000306 PARAMETER Experiment Name: At_Germinating_Seeds_Sub_P Parameter: Tissue Value: Germinating Seeds
  misc_feature: MA Experiment ID: 20000307 Result: Down-regulated in Transcription
  misc_feature: MA Experiment 20000307 PARAMETER Experiment Name: At_Germinating_Seeds_Sub_P Parameter: Age (hr) Value: 24 vs. 0
  misc_feature: MA Experiment 20000307 PARAMETER Experiment Name: At_Germinating_Seeds_Sub_P Parameter: Organism Value: A. thaliana
  misc_feature: MA Experiment 20000307 PARAMETER Experiment Name: At_Germinating_Seeds_Sub_P Parameter: Plant Line Value: WS
  misc_feature: MA Experiment 20000307 PARAMETER Experiment Name: At_Germinating_Seeds_Sub_P Parameter: Tissue Value: Germinating Seeds
  misc_feature: MA Experiment ID: 20000315 Result: Down-regulated in Transcription
  misc_feature: MA Experiment 20000315 PARAMETER Experiment Name: At_14day_Shoots-Roots_Sub_P Parameter: Age (day) Value: 14
  misc_feature: MA Experiment 20000315 PARAMETER Experiment Name: At_14day_Shoots-Roots_Sub_P Parameter: Organism Value: A. thaliana
  misc_feature: MA Experiment 20000315 PARAMETER Experiment Name: At_14day_Shoots-Roots_Sub_P Parameter: Plant Line Value: WS
  misc_feature: MA Experiment 20000315 PARAMETER Experiment Name: At_14day_Shoots-Roots_Sub_P Parameter: Tissue Value: Shoots vs. Whole Plant
  misc_feature: MA Experiment ID: 20000437 Result: Down-regulated in Transcription
  misc_feature: MA Experiment 20000437 PARAMETER Experiment Name: At_Drought_P Parameter: Age (day) Value: 8
  misc_feature: MA Experiment 20000437 PARAMETER Experiment Name: At_Drought_P Parameter: Organism Value: A. thaliana
  misc_feature: MA Experiment 20000437 PARAMETER Experiment Name: At_Drought_P Parameter: Plant Line Value: WS
  misc_feature: MA Experiment 20000437 PARAMETER Experiment Name: At_Drought_P Parameter: Timepoint (hr) Value: 24
  misc_feature: MA Experiment 20000437 PARAMETER Experiment Name: At_Drought_P Parameter: Tissue Value: Whole Plant
  misc_feature: MA Experiment 20000437 PARAMETER Experiment Name: At_Drought_P Parameter: Treatment Value: Drought vs. No Drought
  misc_feature: MA Experiment ID: 20001557 Result: Up-regulated in Transcription
  misc_feature: MA Experiment 20001557 PARAMETER Experiment Name: At_Drought_Soil_Dry_P Parameter: Age (day) Value: 27
  misc_feature: MA Experiment 20001557 PARAMETER Experiment Name: At_Drought_Soil_Dry_P Parameter: Organism Value: A. thaliana
  misc_feature: MA Experiment 20001557 PARAMETER Experiment Name: At_Drought_Soil_Dry_P Parameter: Plant Line Value: WS
  misc_feature: MA Experiment 20001557 PARAMETER Experiment Name: At_Drought_Soil_Dry_P Parameter: Post Timepoint (hr) Value: 3
  misc_feature: MA Experiment 20001557 PARAMETER Experiment Name: At_Drought_Soil_Dry_P Parameter: Post-Treatment Value: Re-Water vs. No Drought
  misc_feature: MA Experiment 20001557 PARAMETER Experiment Name: At_Drought_Soil_Dry_P Parameter: Timepoint (day) Value: 13
  misc_feature: MA Experiment 20001557 PARAMETER Experiment Name: At_Drought_Soil_Dry_P Parameter: Treatment Value: Drought vs. No Drought
  misc_feature: MA Experiment ID: 20001558 Result: Up-regulated in Transcription
  misc_feature: MA Experiment 20001558 PARAMETER Experiment Name: At_Drought_Soil_Dry_P Parameter: Age (day) Value: 27
  misc_feature: MA Experiment 20001558 PARAMETER Experiment Name: At_Drought_Soil_Dry_P Parameter: Organism Value: A. thaliana
  misc_feature: MA Experiment 20001558 PARAMETER Experiment Name: At_Drought_Soil_Dry_P Parameter: Plant Line Value: WS
  misc_feature: MA Experiment 20001558 PARAMETER Experiment Name: At_Drought_Soil_Dry_P Parameter: Post Timepoint (hr) Value: 6
  misc_feature: MA Experiment 20001558 PARAMETER Experiment Name: At_Drought_Soil_Dry_P Parameter: Post-Treatment Value: Re-Water vs. No Drought
  misc_feature: MA Experiment 20001558 PARAMETER Experiment Name: At_Drought_Soil_Dry_P Parameter: Timepoint (day) Value: 13
  misc_feature: MA Experiment 20001558 PARAMETER Experiment Name: At_Drought_Soil_Dry_P Parameter: Treatment Value: Drought vs. No Drought
atccttacaacaaaaatgaatttccgtaatctgattgcttccggttctcgcctcggcaagaggttctgtgcaacggtatttgctccggcgtcggcgactggcatcgtcgaagcctctgtttcttctccagcggcggcgaatgtcgtcgaagcctctgtttcttctccggcggcggagaatggcgtcagaacctctgttgctgctccgacggtggcttcaaggcagcgagagttgtacaagaaactttctatgcttagtgtgacgggaggaacagtggcagagacgttaaatcagttcatcatggagggtattactgtcagaaaagacgatctctttcgctgtgctaaaacccttcgcaaattccgtcgacctcaacacgcttttgagatctttgattggatggagaagaggaaaatgacattttctgtgtctgatcatgcaatttgtttggatctaattggaaagactaaaggtttagaagcagctgagaactactttaacaacttagatccttctgcaaagaatcatcagtcgacttatggggcgctcatgaactgttactgtgttgaacttgaggaagagaaagcaaaggctcattttgagataatggatgagcttaactttgttaacaattcgttaccgtttaataacatgatgtctatgtacatgcggttgagtcaaccggagaaggtacctgtgttggttgatgcgatgaaacagaggggtatatctccttgtggtgtcacttactctatatggatgcagagctgtggaagtttgaatgacttagatggattagagaagattatagatgagatggggaaagacagtgaagctaaaaccacttggaatactttctctaatctggctgcaatctacactaaagctggtctttacgagaaggcggattctgcactgaaatctatggaggagaaaatgaatcctaacaaccgtgattcccaccattttctcatgagtttgtacgctggaatctcgaaaggtcctgaggtttatagggtttgggaatcgctgaagaaggctcgtcctgaggtcaacaacttgagctatctagtcatgttacaagcgatgagtaaactaggcgacttagatgggattaagaagattttcacagagtgggaatcgaaatgctgggcttacgatatgaggctggctaatatcgcgattaacacgtatttgaaagggaatatgtatgaagaagcagagaagattcttgatggtgccatgaaaaagtctaaaggtcctttctccaaagcgagacagcttctgatgatccatctgttggagaacgataaagcggatttggctatgaagcatttggaagcagcggtttctgattctgcagagaacaaagacgaatggggctggagctcagagctggtcagcttgtttttccttcactttgagaaagctaaagatgttgatggagcggaagatttctgcaagattttgtcgaattggaaacctcttgattctgaaactatgacatttctcataaagacttatgcagcagcagagaagactagtcctgatatgcgagagagattgtctcaacagcagatcgaagtaagcgaggagatccaagacttgcttaaaacagtttgtccctaaactaagtaataaatgtgattagcacgttatgtttaaacttgtgtcccgtttagagtttccagttccagaaaacaaagcttagttctttttttaagtctttgacatatgtgtcggttacatagtggaagatctcataaacaattaagtgtttctttcat

SEQ ID NO: 103055 - protein, 542 aa, Arabidopsis thaliana
  peptide (1)..(542): Ceres Seq. ID no. 13611867
  misc_feature (319)..(353): Pfam Name: PPR repeat Pfam Description: PPR repeat
  misc_feature (6)..(542): Homolog of NCBI NO: 15217734 NR Description: pentatricopeptide (PPR) repeat-containing protein
  misc_feature (6)..(542): Homolog of NCBI NO: 17529324 NR Description: unknown protein [Arabidopsis thaliana]
  misc_feature (51)..(542): Homolog of NCBI NO: 18411800 NR Description: pentatricopeptide (PPR) repeat-containing protein thaliana] >gi|14517494|gb|AAK62637.1| AT4g01990/T7B11_26 thaliana] >gi|16323354|gb|AAL15390.1| AT4g01990/T7B11_26
  misc_feature (51)..(542): Homolog of NCBI NO: 25407143 NR Description: hypothetical protein AT4g01990 [imported] - thaliana >gi|4558568|gb|AAD22661.1|AC007138_25 hypothetical [Arabidopsis thaliana] >gi|7268583|emb|CAB80692.1| hypothetical
  misc_feature (75)..(540): Homolog of NCBI NO: 15219808 NR Description: pentatricopeptide (PPR) repeat-containing protein
  misc_feature (78)..(540): Homolog of NCBI NO: 34905490 NR Description: P0682B08.20 [Oryza sativa (japonica
  misc_feature (14)..(509): Homolog of NCBI NO: 32488964 NR Description: OSJNBb0038F03.9 [Oryza sativa (japonica
  misc_feature (78)..(505): Homolog of NCBI NO: 20453085 NR Description: At1g02150/T7I23.8 [Arabidopsis thaliana]
  misc_feature (78)..(505): Homolog of NCBI NO: 22329290 NR Description: pentatricopeptide (PPR) repeat-containing protein thaliana] >gi|2317908|gb|AAC24372.1| Unknown protein [Arabidopsis
  misc_feature (10)..(517): Homolog of NCBI NO: 34393591 NR Description: putative DNA-binding protein [Oryza sativa
ILTTKMNFRNLIASGSRLGKRFCATVFAPASATGIVEASVSSPAAANVVEASVSSPAAENGVRTSVAAPTVASRQRELYKKLSMLSVTGGTVAETLNQFIMEGITVRKDDLFRCAKTLRKFRRPQHAFEIFDWMEKRKMTFSVSDHAICLDLIGKTKGLEAAENYFNNLDPSAKNHQSTYGALMNCYCVELEEEKAKAHFEIMDELNFVNNSLPFNNMMSMYMRLSQPEKVPVLVDAMKQRGISPCGVTYSIWMQSCGSLNDLDGLEKIIDEMGKDSEAKTTWNTFSNLAAIYTKAGLYEKADSALKSMEEKMNPNNRDSHHFLMSLYAGISKGPEVYRVWESLKKARPEVNNLSYLVMLQAMSKLGDLDGIKKIFTEWESKCWAYDMRLANIAINTYLKGNMYEEAEKILDGAMKKSKGPFSKARQLLMIHLLENDKADLAMKHLEAAVSDSAENKDEWGWSSELVSLFFLHFEKAKDVDGAEDFCKILSNWKPLDSETMTFLIKTYAAAEKTSPDMRERLSQQQIEVSEEIQDLLKTVCP

SEQ ID NO: 103056 - protein, 537 aa, Arabidopsis thaliana
  peptide (1)..(537): Ceres Seq. ID no. 13611868
  misc_feature (314)..(348): Pfam Name: PPR repeat Pfam Description: PPR repeat
  misc_feature (1)..(537): Homolog of NCBI NO: 15217734 NR Description: pentatricopeptide (PPR) repeat-containing protein
  misc_feature (1)..(537): Homolog of NCBI NO: 17529324 NR Description: unknown protein [Arabidopsis thaliana]
  misc_feature (46)..(537): Homolog of NCBI NO: 18411800 NR Description: pentatricopeptide (PPR) repeat-containing protein thaliana] >gi|14517494|gb|AAK62637.1| AT4g01990/T7B11_26 thaliana] >gi|16323354|gb|AAL15390.1| AT4g01990/T7B11_26
  misc_feature (46)..(537): Homolog of NCBI NO: 25407143 NR Description: hypothetical protein AT4g01990 [imported] - thaliana >gi|4558568|gb|AAD22661.1|AC007138_25 hypothetical [Arabidopsis thaliana] >gi|7268583|emb|CAB80692.1| hypothetical
  misc_feature (70)..(535): Homolog of NCBI NO: 15219808 NR Description: pentatricopeptide (PPR) repeat-containing protein
  misc_feature (73)..(535): Homolog of NCBI NO: 34905490 NR Description: P0682B08.20 [Oryza sativa (japonica
  misc_feature (9)..(504): Homolog of NCBI NO: 32488964 NR Description: OSJNBb0038F03.9 [Oryza sativa (japonica
  misc_feature (73)..(500): Homolog of NCBI NO: 20453085 NR Description: At1g02150/T7I23.8 [Arabidopsis thaliana]
  misc_feature (73)..(500): Homolog of NCBI NO: 22329290 NR Description: pentatricopeptide (PPR) repeat-containing protein thaliana] >gi|2317908|gb|AAC24372.1| Unknown protein [Arabidopsis
  misc_feature (5)..(512): Homolog of NCBI NO: 34393591 NR Description: putative DNA-binding protein [Oryza sativa
MNFRNLIASGSRLGKRFCATVFAPASATGIVEASVSSPAAANVVEASVSSPAAENGVRTSVAAPTVASRQRELYKKLSMLSVTGGTVAETLNQFIMEGITVRKDDLFRCAKTLRKFRRPQHAFEIFDWMEKRKMTFSVSDHAICLDLIGKTKGLEAAENYFNNLDPSAKNHQSTYGALMNCYCVELEEEKAKAHFEIMDELNFVNNSLPFNNMMSMYMRLSQPEKVPVLVDAMKQRGISPCGVTYSIWMQSCGSLNDLDGLEKIIDEMGKDSEAKTTWNTFSNLAAIYTKAGLYEKADSALKSMEEKMNPNNRDSHHFLMSLYAGISKGPEVYRVWESLKKARPEVNNLSYLVMLQAMSKLGDLDGIKKIFTEWESKCWAYDMRLANIAINTYLKGNMYEEAEKILDGAMKKSKGPFSKARQLLMIHLLENDKADLAMKHLEAAVSDSAENKDEWGWSSELVSLFFLHFEKAKDVDGAEDFCKILSNWKPLDSETMTFLIKTYAAAEKTSPDMRERLSQQQIEVSEEIQDLLKTVCP

SEQ ID NO: 103057 - protein, 459 aa, Arabidopsis thaliana
  peptide (1)..(459): Ceres Seq. ID no. 13611869
  misc_feature (236)..(270): Pfam Name: PPR repeat Pfam Description: PPR repeat
  misc_feature (1)..(459): Homolog of NCBI NO: 15217734 NR Description: pentatricopeptide (PPR) repeat-containing protein
  misc_feature (1)..(459): Homolog of NCBI NO: 17529324 NR Description: unknown protein [Arabidopsis thaliana]
  misc_feature (1)..(459): Homolog of NCBI NO: 18411800 NR Description: pentatricopeptide (PPR) repeat-containing protein thaliana] >gi|14517494|gb|AAK62637.1| AT4g01990/T7B11_26 thaliana] >gi|16323354|gb|AAL15390.1| AT4g01990/T7B11_26
  misc_feature (1)..(459): Homolog of NCBI NO: 25407143 NR Description: hypothetical protein AT4g01990 [imported] - thaliana >gi|4558568|gb|AAD22661.1|AC007138_25 hypothetical [Arabidopsis thaliana] >gi|7268583|emb|CAB80692.1| hypothetical
  misc_feature (1)..(457): Homolog of NCBI NO: 15219808 NR Description: pentatricopeptide (PPR) repeat-containing protein
  misc_feature (1)..(457): Homolog of NCBI NO: 34905490 NR Description: P0682B08.20 [Oryza sativa (japonica
  misc_feature (1)..(426): Homolog of NCBI NO: 32488964 NR Description: OSJNBb0038F03.9 [Oryza sativa (japonica
  misc_feature (1)..(422): Homolog of NCBI NO: 20453085 NR Description: At1g02150/T7I23.8 [Arabidopsis thaliana]
  misc_feature (1)..(422): Homolog of NCBI NO: 22329290 NR Description: pentatricopeptide (PPR) repeat-containing protein thaliana] >gi|2317908|gb|AAC24372.1| Unknown protein [Arabidopsis
  misc_feature (1)..(434): Homolog of NCBI NO: 34393591 NR Description: putative DNA-binding protein [Oryza sativa
MLSVTGGTVAETLNQFIMEGITVRKDDLFRCAKTLRKFRRPQHAFEIFDWMEKRKMTFSVSDHAICLDLIGKTKGLEAAENYFNNLDPSAKNHQSTYGALMNCYCVELEEEKAKAHFEIMDELNFVNNSLPFNNMMSMYMRLSQPEKVPVLVDAMKQRGISPCGVTYSIWMQSCGSLNDLDGLEKIIDEMGKDSEAKTTWNTFSNLAAIYTKAGLYEKADSALKSMEEKMNPNNRDSHHFLMSLYAGISKGPEVYRVWESLKKARPEVNNLSYLVMLQAMSKLGDLDGIKKIFTEWESKCWAYDMRLANIAINTYLKGNMYEEAEKILDGAMKKSKGPFSKARQLLMIHLLENDKADLAMKHLEAAVSDSAENKDEWGWSSELVSLFFLHFEKAKDVDGAEDFCKILSNWKPLDSETMTFLIKTYAAAEKTSPDMRERLSQQQIEVSEEIQDLLKTVCP

SEQ ID NO: 103058 - DNA, 639 bp, Arabidopsis thaliana
  misc_feature (1)..(639): Ceres Seq. ID no. 13611892
  misc_feature: MA Experiment ID: 108434 Result: Up-regulated in Transcription
  misc_feature: MA Experiment 108434 PARAMETER Experiment Name: At_Root_Tips_cDNA_P Parameter: Tissue Value: Root Tips
  misc_feature: MA Experiment ID: 108462 Result: Down-regulated in Transcription
  misc_feature: MA Experiment 108462 PARAMETER Experiment Name: At_Germinating_Seeds_cDNA_P Parameter: Age (day) Value: 2 vs. 0
  misc_feature: MA Experiment 108462 PARAMETER Experiment Name: At_Germinating_Seeds_cDNA_P Parameter: Tissue Value: Germinating Seeds
  misc_feature: MA Experiment ID: 108463 Result: Down-regulated in Transcription
  misc_feature: MA Experiment 108463 PARAMETER Experiment Name: At_Germinating_Seeds_cDNA_P Parameter: Age (day) Value: 3 vs. 0
  misc_feature: MA Experiment 108463 PARAMETER Experiment Name: At_Germinating_Seeds_cDNA_P Parameter: Tissue Value: Germinating Seeds
  misc_feature: MA Experiment ID: 108464 Result: Down-regulated in Transcription
  misc_feature: MA Experiment 108464 PARAMETER Experiment Name: At_Germinating_Seeds_cDNA_P Parameter: Age (day) Value: 4 vs. 0
  misc_feature: MA Experiment 108464 PARAMETER Experiment Name: At_Germinating_Seeds_cDNA_P Parameter: Tissue Value: Germinating Seeds
  misc_feature: MA Experiment ID: 108572 Result: Down-regulated in Transcription
  misc_feature: MA Experiment 108572 PARAMETER Experiment Name: At_Drought_cDNA_P Parameter: Timepoint (hr) Value: 1
  misc_feature: MA Experiment 108572 PARAMETER Experiment Name: At_Drought_cDNA_P Parameter: Tissue Value: Aerial
  misc_feature: MA Experiment 108572 PARAMETER Experiment Name: At_Drought_cDNA_P Parameter: Treatment Value: Drought vs. No Drought
  misc_feature: MA Experiment ID: 108573 Result: Down-regulated in Transcription
  misc_feature: MA Experiment 108573 PARAMETER Experiment Name: At_Drought_cDNA_P Parameter: Timepoint (hr) Value: 6
  misc_feature: MA Experiment 108573 PARAMETER Experiment Name: At_Drought_cDNA_P Parameter: Tissue Value: Aerial
  misc_feature: MA Experiment 108573 PARAMETER Experiment Name: At_Drought_cDNA_P Parameter: Treatment Value: Drought vs. No Drought
  misc_feature: MA Experiment ID: 108576 Result: Down-regulated in Transcription
  misc_feature: MA Experiment 108576 PARAMETER Experiment Name: At_42deg_Heat_cDNA_P Parameter: Temperature (deg C) Value: 42 vs. 22
  misc_feature: MA Experiment 108576 PARAMETER Experiment Name: At_42deg_Heat_cDNA_P Parameter: Timepoint (hr) Value: 1
  misc_feature: MA Experiment 108576 PARAMETER Experiment Name: At_42deg_Heat_cDNA_P Parameter: Tissue Value: Aerial
  misc_feature: MA Experiment ID: 20000112 Result: Down-regulated in Transcription
  misc_feature: MA Experiment 20000112 PARAMETER Experiment Name: At_42deg_Heat_cDNA_P Parameter: Temperature (deg C) Value: 42 vs. 22
  misc_feature: MA Experiment 20000112 PARAMETER Experiment Name: At_42deg_Heat_cDNA_P Parameter: Timepoint (hr) Value: 2
  misc_feature: MA Experiment 20000112 PARAMETER Experiment Name: At_42deg_Heat_cDNA_P Parameter: Tissue Value: Aerial
  misc_feature: MA Experiment ID: 20000327 Result: Down-regulated in Transcription
  misc_feature: MA Experiment 20000327 PARAMETER Experiment Name: At_42deg_Heat_Sub_P Parameter: Age (day) Value: 14
  misc_feature: MA Experiment 20000327 PARAMETER Experiment Name: At_42deg_Heat_Sub_P Parameter: Organism Value: A. thaliana
  misc_feature: MA Experiment 20000327 PARAMETER Experiment Name: At_42deg_Heat_Sub_P Parameter: Plant Line Value: WS
  misc_feature: MA Experiment 20000327 PARAMETER Experiment Name: At_42deg_Heat_Sub_P Parameter: Temperature (deg C) Value: 42 vs. 22
  misc_feature: MA Experiment 20000327 PARAMETER Experiment Name: At_42deg_Heat_Sub_P Parameter: Timepoint (hr) Value: 1
  misc_feature: MA Experiment 20000327 PARAMETER Experiment Name: At_42deg_Heat_Sub_P Parameter: Tissue Value: Aerial
  misc_feature: MA Experiment ID: 20000328 Result: Down-regulated in Transcription
  misc_feature: MA Experiment 20000328 PARAMETER Experiment Name: At_42deg_Heat_Sub_P Parameter: Age (day) Value: 14
  misc_feature: MA Experiment 20000328 PARAMETER Experiment Name: At_42deg_Heat_Sub_P Parameter: Organism Value: A. thaliana
  misc_feature: MA Experiment 20000328 PARAMETER Experiment Name: At_42deg_Heat_Sub_P Parameter: Plant Line Value: WS
  misc_feature: MA Experiment 20000328 PARAMETER Experiment Name: At_42deg_Heat_Sub_P Parameter: Temperature (deg C) Value: 42 vs. 22
  misc_feature: MA Experiment 20000328 PARAMETER Experiment Name: At_42deg_Heat_Sub_P Parameter: Timepoint (hr) Value: 6
  misc_feature: MA Experiment 20000328 PARAMETER Experiment Name: At_42deg_Heat_Sub_P Parameter: Tissue Value: Aerial
  misc_feature: MA Experiment ID: 20000352 Result: Down-regulated in Transcription
  misc_feature: MA Experiment 20000352 PARAMETER Experiment Name: At_Drought_Sub_P Parameter: Age (day) Value: 7
  misc_feature: MA Experiment 20000352 PARAMETER Experiment Name: At_Drought_Sub_P Parameter: Organism Value: A. thaliana
  misc_feature: MA Experiment 20000352 PARAMETER Experiment Name: At_Drought_Sub_P Parameter: Plant Line Value: WS
  misc_feature: MA Experiment 20000352 PARAMETER Experiment Name: At_Drought_Sub_P Parameter: Timepoint (hr) Value: 6
  misc_feature: MA Experiment 20000352 PARAMETER Experiment Name: At_Drought_Sub_P Parameter: Tissue Value: Whole Plant
  misc_feature: MA Experiment 20000352 PARAMETER Experiment Name: At_Drought_Sub_P Parameter: Treatment Value: Drought vs. No Drought
  misc_feature: MA Experiment ID: 20000355 Result: Up-regulated in Transcription
  misc_feature: MA Experiment 20000355 PARAMETER Experiment Name: At_Siliques_Sub_P Parameter: Age (day) Value: 21
  misc_feature: MA Experiment 20000355 PARAMETER Experiment Name: At_Siliques_Sub_P Parameter: Organism Value: A. thaliana
  misc_feature: MA Experiment 20000355 PARAMETER Experiment Name: At_Siliques_Sub_P Parameter: Plant Line Value: WS
  misc_feature: MA Experiment 20000355 PARAMETER Experiment Name: At_Siliques_Sub_P Parameter: Tissue Value: Less Than 5mm Siliques vs. Whole Plant
cagcacaaaaaaaccctaatttcttcacaaattcagcggcgatgaagttcaatccgcgtgtgagctcttctcgccggaagaacaggaaggctcacttcacagctccttcaagcgtgaggcgcgttctcatgagctcgccgttatccaaggatctccgtaacaaacacaacgtcagatccatgccgattcgtaaagacgacgaagtgcaagttgttcgtgggacgttcaagggaagagaagggaaggtgatgcaggtgtatcgccgcaagtgggtgattcacatcgagagaatcacaagggagaaagtcaacggatccacggtcaacgtcggagtcaatgcttcgaatgtgatgatcactaagctccgtctcgataaggataggaagtcgcttttggagcgtaaggctaatggacgcgccgccgccgataaggagaagggaaccaagttttcagccgaagatgtcatggagaacgtagattgatcttaacgtatggttttttcttcttcttttctagttttctattttgatttcattgatgatgatatgattcagaattcgaagttgaattttgtggttttcttatcaatgtacctcatttatgcttatatttctagctattgaaattggactgagattt

SEQ ID NO: 103059 - protein, 159 aa, Arabidopsis thaliana
  peptide (1)..(159): Ceres Seq. ID no. 13611893
  misc_feature (62)..(95): Pfam Name: KOW motif Pfam Description: KOW motif
  misc_feature (14)..(159): Homolog of NCBI NO: 15240766 NR Description: 60S ribosomal protein L26 (RPL26B) [Arabidopsis >gi|27734449|sp|Q9FJX2|R26B_ARATH 60S ribosomal protein L26B
  misc_feature (14)..(159): Homolog of NCBI NO: 15229631 NR Description: 60S ribosomal protein L26 (RPL26A) [Arabidopsis
  misc_feature (14)..(158): Homolog of NCBI NO: 3914740 NR Description: 60S ribosomal protein L26
  misc_feature (14)..(154): Homolog of NCBI NO: 34895672 NR Description: putative ribosomal protein L26 [Oryza sativa
  misc_feature (14)..(132): Homolog of NCBI NO: 3747050 NR Description: ribosomal protein L26 [Zea mays]
  misc_feature (14)..(158): Homolog of NCBI NO: 7705813 NR Description: ribosomal protein L26-like 1; ribosomal protein
  misc_feature (14)..(154): Homolog of NCBI NO: 4506621 NR Description: ribosomal protein L26; 60S ribosomal protein L26 sapiens] >gi|6677777|ref|NP_033106.1| ribosomal protein L26 [Mus >gi|20881715|ref|XP_122248.1| ribosomal protein L26 [Mus
  misc_feature (14)..(156): Homolog of NCBI NO: 22758898 NR Description: ribosomal protein L26 [Argopecten irradians]
  misc_feature (14)..(154): Homolog of NCBI NO: 132827 NR Description: 60S RIBOSOMAL PROTEIN L26 >gi|71312|pir||R5RT26
  misc_feature (14)..(154): Homolog of NCBI NO: 27729769 NR Description: similar to ribosomal protein L26 - mouse [Rattus
AQKNPNFFTNSAAMKFNPRVSSSRRKNRKAHFTAPSSVRRVLMSSPLSKDLRNKHNVRSMPIRKDDEVQVVRGTFKGREGKVMQVYRRKWVIHIERITREKVNGSTVNVGVNASNVMITKLRLDKDRKSLLERKANGRAAADKEKGTKFSAEDVMENVD

SEQ ID NO: 103060 - protein, 146 aa, Arabidopsis thaliana; identical to SEQ ID NO: 26350
  peptide (1)..(146): Ceres Seq. ID no. 13611894
  misc_feature (49)..(82): Pfam Name: KOW motif Pfam Description: KOW motif
  misc_feature (1)..(146): Homolog of NCBI NO: 15240766 NR Description: 60S ribosomal protein L26 (RPL26B) [Arabidopsis >gi|27734449|sp|Q9FJX2|R26B_ARATH 60S ribosomal protein L26B
  misc_feature (1)..(146): Homolog of NCBI NO: 15229631 NR Description: 60S ribosomal protein L26 (RPL26A) [Arabidopsis
  misc_feature (1)..(145): Homolog of NCBI NO: 3914740 NR Description: 60S ribosomal protein L26
  misc_feature (1)..(141): Homolog of NCBI NO: 34895672 NR Description: putative ribosomal protein L26 [Oryza sativa
  misc_feature (1)..(119): Homolog of NCBI NO: 3747050 NR Description: ribosomal protein L26 [Zea mays]
  misc_feature (1)..(145): Homolog of NCBI NO: 7705813 NR Description: ribosomal protein L26-like 1; ribosomal protein
  misc_feature (1)..(141): Homolog of NCBI NO: 4506621 NR Description: ribosomal protein L26; 60S ribosomal protein L26 sapiens] >gi|6677777|ref|NP_033106.1| ribosomal protein L26 [Mus >gi|20881715|ref|XP_122248.1| ribosomal protein L26 [Mus
  misc_feature (1)..(143): Homolog of NCBI NO: 22758898 NR Description: ribosomal protein L26 [Argopecten irradians]
  misc_feature (1)..(141): Homolog of NCBI NO: 132827 NR Description: 60S RIBOSOMAL PROTEIN L26 >gi|71312|pir||R5RT26
  misc_feature (1)..(141): Homolog of NCBI NO: 27729769 NR Description: similar to ribosomal protein L26 - mouse [Rattus

SEQ ID NO: 103061 - protein, 117 aa, Arabidopsis thaliana; identical to SEQ ID NO: 26351
  peptide (1)..(117): Ceres Seq. ID no. 13611895
  misc_feature (20)..(53): Pfam Name: KOW motif Pfam Description: KOW motif
  misc_feature (1)..(117): Homolog of NCBI NO: 15240766 NR Description: 60S ribosomal protein L26 (RPL26B) [Arabidopsis >gi|27734449|sp|Q9FJX2|R26B_ARATH 60S ribosomal protein L26B
  misc_feature (1)..(117): Homolog of NCBI NO: 15229631 NR Description: 60S ribosomal protein L26 (RPL26A) [Arabidopsis
  misc_feature (1)..(116): Homolog of NCBI NO: 3914740 NR Description: 60S ribosomal protein L26
  misc_feature (1)..(112): Homolog of NCBI NO: 34895672 NR Description: putative ribosomal protein L26 [Oryza sativa
  misc_feature (1)..(90): Homolog of NCBI NO: 3747050 NR Description: ribosomal protein L26 [Zea mays]
  misc_feature (1)..(116): Homolog of NCBI NO: 7705813 NR Description: ribosomal protein L26-like 1; ribosomal protein
  misc_feature (1)..(112): Homolog of NCBI NO: 4506621 NR Description: ribosomal protein L26; 60S ribosomal protein L26 sapiens] >gi|6677777|ref|NP_033106.1| ribosomal protein L26 [Mus >gi|20881715|ref|XP_122248.1| ribosomal protein L26 [Mus
  misc_feature (1)..(114): Homolog of NCBI NO: 22758898 NR Description: ribosomal protein L26 [Argopecten irradians]
  misc_feature (1)..(112): Homolog of NCBI NO: 132827 NR Description: 60S RIBOSOMAL PROTEIN L26 >gi|71312|pir||R5RT26
  misc_feature (1)..(112): Homolog of NCBI NO: 27729769 NR Description: similar to ribosomal protein L26 - mouse [Rattus

SEQ ID NO: 103062 - DNA, 1132 bp, Arabidopsis thaliana
  misc_feature (1)..(1132): Ceres Seq. ID no. 13611896
  misc_feature: MA Experiment ID: 108434 Result: Down-regulated in Transcription
  misc_feature: MA Experiment 108434 PARAMETER Experiment Name: At_Root_Tips_cDNA_P Parameter: Tissue Value: Root Tips
  misc_feature: MA Experiment ID: 108462 Result: Down-regulated in Transcription
  misc_feature: MA Experiment 108462 PARAMETER Experiment Name: At_Germinating_Seeds_cDNA_P Parameter: Age (day) Value: 2 vs. 0
  misc_feature: MA Experiment 108462 PARAMETER Experiment Name: At_Germinating_Seeds_cDNA_P Parameter: Tissue Value: Germinating Seeds
  misc_feature: MA Experiment ID: 108463 Result: Down-regulated in Transcription
  misc_feature: MA Experiment 108463 PARAMETER Experiment Name: At_Germinating_Seeds_cDNA_P Parameter: Age (day) Value: 3 vs. 0
  misc_feature: MA Experiment 108463 PARAMETER Experiment Name: At_Germinating_Seeds_cDNA_P Parameter: Tissue Value: Germinating Seeds
  misc_feature: MA Experiment ID: 108464 Result: Down-regulated in Transcription
  misc_feature: MA Experiment 108464 PARAMETER Experiment Name: At_Germinating_Seeds_cDNA_P Parameter: Age (day) Value: 4 vs. 0
  misc_feature: MA Experiment 108464 PARAMETER Experiment Name: At_Germinating_Seeds_cDNA_P Parameter: Tissue Value: Germinating Seeds
  misc_feature: MA Experiment ID: 108573 Result: Up-regulated in Transcription
  misc_feature: MA Experiment 108573 PARAMETER Experiment Name: At_Drought_cDNA_P Parameter: Timepoint (hr) Value: 6
  misc_feature: MA Experiment 108573 PARAMETER Experiment Name: At_Drought_cDNA_P Parameter: Tissue Value: Aerial
  misc_feature: MA Experiment 108573 PARAMETER Experiment Name: At_Drought_cDNA_P Parameter: Treatment Value: Drought vs. No Drought
  misc_feature: MA Experiment ID: 108594 Result: Up-regulated in Transcription
  misc_feature: MA Experiment 108594 PARAMETER Experiment Name: At_Ler-rhl_Root_cDNA_P Parameter: Plant Line Value: null
  misc_feature: MA Experiment ID: 20000111 Result: Up-regulated in Transcription
  misc_feature: MA Experiment 20000111 PARAMETER Experiment Name: At_42deg_Heat_cDNA_P Parameter: Temperature (deg C) Value: 42 vs. 22
  misc_feature: MA Experiment 20000111 PARAMETER Experiment Name: At_42deg_Heat_cDNA_P Parameter: Timepoint (hr) Value: 6
  misc_feature: MA Experiment 20000111 PARAMETER Experiment Name: At_42deg_Heat_cDNA_P Parameter: Tissue Value: Aerial
  misc_feature: MA Experiment ID: 20000113 Result: Up-regulated in Transcription
  misc_feature: MA Experiment 20000113 PARAMETER Experiment Name: At_42deg_Heat_cDNA_P Parameter: Temperature (deg C) Value: 42 vs. 22
  misc_feature: MA Experiment 20000113 PARAMETER Experiment Name: At_42deg_Heat_cDNA_P Parameter: Timepoint (hr) Value: 8
  misc_feature: MA Experiment 20000113 PARAMETER Experiment Name: At_42deg_Heat_cDNA_P Parameter: Tissue Value: Aerial
  misc_feature: MA Experiment ID: 20000173 Result: Up-regulated in Transcription
  misc_feature: MA Experiment 20000173 PARAMETER Experiment Name: At_42deg_Heat_P Parameter: Age (day) Value: 14
  misc_feature: MA Experiment 20000173 PARAMETER Experiment Name: At_42deg_Heat_P Parameter: Organism Value: A. thaliana
  misc_feature: MA Experiment 20000173 PARAMETER Experiment Name: At_42deg_Heat_P Parameter: Plant Line Value: WS
  misc_feature: MA Experiment 20000173 PARAMETER Experiment Name: At_42deg_Heat_P Parameter: Temperature (deg C) Value: 42 vs. 22
  misc_feature: MA Experiment 20000173 PARAMETER Experiment Name: At_42deg_Heat_P Parameter: Timepoint (hr) Value: 6
  misc_feature: MA Experiment 20000173 PARAMETER Experiment Name: At_42deg_Heat_P Parameter: Tissue Value: Aerial
  misc_feature: MA Experiment ID: 20000184 Result: Down-regulated in Transcription
  misc_feature: MA Experiment 20000184 PARAMETER Experiment Name: At_Shoots__P Parameter: Age (day) Value: 7
  misc_feature: MA Experiment 20000184 PARAMETER Experiment Name: At_Shoots__P Parameter: Tissue Value: Shoots vs. Whole Plant
  misc_feature: MA Experiment ID: 20000235 Result: Up-regulated in Transcription
  misc_feature: MA Experiment 20000235 PARAMETER Experiment Name: At_Siliques_P Parameter: Age (day) Value: 21
  misc_feature: MA Experiment 20000235 PARAMETER Experiment Name: At_Siliques_P Parameter: Organism Value: A. thaliana
  misc_feature: MA Experiment 20000235 PARAMETER Experiment Name: At_Siliques_P Parameter: Plant Line Value: WS
  misc_feature: MA Experiment 20000235 PARAMETER Experiment Name: At_Siliques_P Parameter: Tissue Value: 5-10mm Siliques vs. Whole Plant
  misc_feature: MA Experiment ID: 20000437 Result: Up-regulated in Transcription
  misc_feature: MA Experiment 20000437 PARAMETER Experiment Name: At_Drought_P Parameter: Age (day) Value: 8
  misc_feature: MA Experiment 20000437 PARAMETER Experiment Name: At_Drought_P Parameter: Organism Value: A. thaliana
  misc_feature: MA Experiment 20000437 PARAMETER Experiment Name: At_Drought_P Parameter: Plant Line Value: WS
  misc_feature: MA Experiment 20000437 PARAMETER Experiment Name: At_Drought_P Parameter: Timepoint (hr) Value: 24
  misc_feature: MA Experiment 20000437 PARAMETER Experiment Name: At_Drought_P Parameter: Tissue Value: Whole Plant
  misc_feature: MA Experiment 20000437 PARAMETER Experiment Name: At_Drought_P Parameter: Treatment Value: Drought vs. No Drought
  misc_feature: MA Experiment ID: 20000496 Result: Up-regulated in Transcription
  misc_feature: MA Experiment 20000496 PARAMETER Experiment Name: At_Guard_Cells_P Parameter: Harvest Date Value: 7/19/2002
  misc_feature: MA Experiment 20000496 PARAMETER Experiment Name: At_Guard_Cells_P Parameter: Organism Value: Canola
  misc_feature: MA Experiment 20000496 PARAMETER Experiment Name: At_Guard_Cells_P Parameter: Tissue Value: Guard Cells vs. Leaves
  misc_feature: MA Experiment ID: 20000794 Result: Up-regulated in Transcription
  misc_feature: MA Experiment 20000794 PARAMETER Experiment Name: At_Petals_P Parameter: Age (day) Value: 23-25 days
  misc_feature: MA Experiment 20000794 PARAMETER Experiment Name: At_Petals_P Parameter: Plant Line Value: WS
  misc_feature: MA Experiment 20000794 PARAMETER Experiment Name: At_Petals_P Parameter: Tissue Value: Petals vs. Whole plant
  misc_feature: MA Experiment ID: 20001556 Result: Down-regulated in Transcription
  misc_feature: MA Experiment 20001556 PARAMETER Experiment Name: At_Drought_Soil_Dry_P Parameter: Age (day) Value: 26
  misc_feature: MA Experiment 20001556 PARAMETER Experiment Name: At_Drought_Soil_Dry_P Parameter: Organism Value: A. thaliana
  misc_feature: MA Experiment 20001556 PARAMETER Experiment Name: At_Drought_Soil_Dry_P Parameter: Plant Line Value: WS
  misc_feature: MA Experiment 20001556 PARAMETER Experiment Name: At_Drought_Soil_Dry_P Parameter: Post Timepoint (hr) Value: None
  misc_feature: MA Experiment 20001556 PARAMETER Experiment Name: At_Drought_Soil_Dry_P Parameter: Post-Treatment Value: None
  misc_feature: MA Experiment 20001556 PARAMETER Experiment Name: At_Drought_Soil_Dry_P Parameter: Timepoint (day) Value: 12
  misc_feature: MA Experiment 20001556 PARAMETER Experiment Name: At_Drought_Soil_Dry_P Parameter: Treatment Value: Drought vs. No Drought
  misc_feature: MA Experiment ID: 20001557 Result: Down-regulated in Transcription
  misc_feature: MA Experiment 20001557 PARAMETER Experiment Name: At_Drought_Soil_Dry_P Parameter: Age (day) Value: 27
  misc_feature: MA Experiment 20001557 PARAMETER Experiment Name: At_Drought_Soil_Dry_P Parameter: Organism Value: A. thaliana
  misc_feature: MA Experiment 20001557 PARAMETER Experiment Name: At_Drought_Soil_Dry_P Parameter: Plant Line Value: WS
  misc_feature: MA Experiment 20001557 PARAMETER Experiment Name: At_Drought_Soil_Dry_P Parameter: Post Timepoint (hr) Value: 3
  misc_feature: MA Experiment 20001557 PARAMETER Experiment Name: At_Drought_Soil_Dry_P Parameter: Post-Treatment Value: Re-Water vs. No Drought
  misc_feature: MA Experiment 20001557 PARAMETER Experiment Name: At_Drought_Soil_Dry_P Parameter: Timepoint (day) Value: 13
  misc_feature: MA Experiment 20001557 PARAMETER Experiment Name: At_Drought_Soil_Dry_P Parameter: Treatment Value: Drought vs. No Drought
  misc_feature: MA Experiment ID: 20001560 Result: Down-regulated in Transcription
  misc_feature: MA Experiment 20001560 PARAMETER Experiment Name: At_Drought_Soil_Dry_P Parameter: Age (day) Value: 28
  misc_feature: MA Experiment 20001560 PARAMETER Experiment Name: At_Drought_Soil_Dry_P Parameter: Organism Value: A. thaliana
  misc_feature: MA Experiment 20001560 PARAMETER Experiment Name: At_Drought_Soil_Dry_P Parameter: Plant Line Value: WS
  misc_feature: MA Experiment 20001560 PARAMETER Experiment Name: At_Drought_Soil_Dry_P Parameter: Post Timepoint (hr) Value: None
  misc_feature: MA Experiment 20001560 PARAMETER Experiment Name: At_Drought_Soil_Dry_P Parameter: Post-Treatment Value: None
  misc_feature: MA Experiment 20001560 PARAMETER Experiment Name: At_Drought_Soil_Dry_P Parameter: Timepoint (day) Value: 14
  misc_feature: MA Experiment 20001560 PARAMETER Experiment Name: At_Drought_Soil_Dry_P Parameter: Treatment Value: Drought vs. No Drought
aagtttttgatttcagagtccaccgttgagcctgttcaattaaatcgttgaatctcgcggtgcgttttactttgattctttcgaattttttttatatggatgttgccgcgatggcgagatgtgtgggaaggtgctacgtttcgccggcgttcggtgagtctgaatcgcaccggttatcggagcggcggtttctgaaattgtctagctccacgaattcggatcccgccggtagtaaaagtttgaagcttcgcgggaaaattcatcggagaatgagctacttccgtccgatcatggcaaaagatgaatccatttcatcgcggtccggtgaaacgaagcaaatcaatggaaagcaaaagaacattgtctggcatgattgtcccgttactaaatccgacaggcaagaattaattaagcaaaagggatgtgtgatttggattactggcttaagtggttcaggtaaaagtagtctggcatgtgctcttagtcgagctttgcacaatcgtggaaagctttcgtatatacttgatggtgacaatgttcgacatggtttaaacagcgatcttagtttcgaagcagatgatcgagctgaaaacattcgaagagttggtgaagtggctaaactgtttgcagattctggtattatctgtattgcaagtttaatatctccttaccggatagaacgagctgcctgccgtgcattattaccacaaggagatttcattgaggtatttatggatgtgccactccatgtttgtgaagctagagatccaaagggcttatacaaacgtgcacgcgctggtaaaatcaaaggttttacaggagtagatgatccatatgaagcgcctttggattgcgagattgtaatacaaaacagtagagacaaggggctttcttcttcatcttcatcttcatcttcaccttcatcttcgtcttcttctctgtgtgaaatggcagatattgttgtgtcgtacttggaccaaaatggatacctgaagaaacactccacaaaatcacgtaattgtatgtaaatgtaatattaatatcattgttgtaacgtttcttaaacctattttacctatggacgattaaattgtgaaaacataaatgtaattcacaatctgcaaagagttgg

SEQ ID NO: 103063 - protein, 310 aa, Arabidopsis thaliana; identical to SEQ ID NO: 41933
  peptide (1)..(310): Ceres Seq. ID no. 13611897
  misc_feature (108)..(264): Pfam Name: Adenylylsulphate kinase Pfam Description: Adenylylsulphate kinase
  misc_feature (1)..(310): Homolog of NCBI NO: 18425199 NR Description: adenylylsulfate kinase-related protein thaliana] >gi|28393175|gb|AAO42019.1| putative adenylylsulfate [Arabidopsis thaliana] >gi|28827764|gb|AAO50726.1| putative
  misc_feature (6)..(310): Homolog of NCBI NO: 21537248 NR Description: adenylylsulfate kinase-like protein [Arabidopsis
  misc_feature (6)..(310): Homolog of NCBI NO: 9757873 NR Description: adenylylsulfate kinase-like protein [Arabidopsis
  misc_feature (45)..(300): Homolog of NCBI NO: 7387809 NR Description: Adenylylsulfate kinase, chloroplast precursor
  misc_feature (13)..(300): Homolog of NCBI NO: 15236087 NR Description: adenosine-5-phosphosulfate-kinase [Arabidopsis >gi|7387808|sp|O49196|KAP2_ARATH Adenylylsulfate kinase 2,
  misc_feature (3)..(266): Homolog of NCBI NO: 15225999 NR Description: adenosine phosphosulfate kinase -related thaliana] >gi|7387811|sp|Q43295|KAP1_ARATH Adenylylsulfate kinase
  misc_feature (3)..(266): Homolog of NCBI NO: 21553403 NR Description: putative adenosine phosphosulfate kinase
  misc_feature (85)..(299): Homolog of NCBI NO: 34393551 NR Description: putative adenosine-5'-phosphosulfate kinase
  misc_feature (84)..(300): Homolog of NCBI NO: 15228666 NR Description: adenylylsulfate kinase -related [Arabidopsis >gi|6006852|gb|AAF00628.1|AC009540_5 putative adenylylsulfate
  misc_feature (45)..(258): Homolog of NCBI NO: 6563285 NR Description: adenosine-5'-phosphosulfate kinase [Zea mays]

SEQ ID NO: 103064 - protein, 305 aa, Arabidopsis thaliana; identical to SEQ ID NO: 41934
  peptide (1)..(305): Ceres Seq. ID no. 13611898
  misc_feature (103)..(259): Pfam Name: Adenylylsulphate kinase Pfam Description: Adenylylsulphate kinase
  misc_feature (1)..(305): Homolog of NCBI NO: 18425199 NR Description: adenylylsulfate kinase-related protein thaliana] >gi|28393175|gb|AAO42019.1| putative adenylylsulfate [Arabidopsis thaliana] >gi|28827764|gb|AAO50726.1| putative
  misc_feature (1)..(305): Homolog of NCBI NO: 21537248 NR Description: adenylylsulfate kinase-like protein [Arabidopsis
  misc_feature (1)..(305): Homolog of NCBI NO: 9757873 NR Description: adenylylsulfate kinase-like protein [Arabidopsis
  misc_feature (40)..(295): Homolog of NCBI NO: 7387809 NR Description: Adenylylsulfate kinase, chloroplast precursor
  misc_feature (8)..(295): Homolog of NCBI NO: 15236087 NR Description: adenosine-5-phosphosulfate-kinase [Arabidopsis >gi|7387808|sp|O49196|KAP2_ARATH Adenylylsulfate kinase 2,
  misc_feature (1)..(261): Homolog of NCBI NO: 15225999 NR Description: adenosine phosphosulfate kinase -related thaliana] >gi|7387811|sp|Q43295|KAP1_ARATH Adenylylsulfate kinase
  misc_feature (1)..(261): Homolog of NCBI NO: 21553403 NR Description: putative adenosine phosphosulfate kinase
  misc_feature (80)..(294): Homolog of NCBI NO: 34393551 NR Description: putative adenosine-5'-phosphosulfate kinase
  misc_feature (79)..(295): Homolog of NCBI NO: 15228666 NR Description: adenylylsulfate kinase -related [Arabidopsis >gi|6006852|gb|AAF00628.1|AC009540_5 putative adenylylsulfate
  misc_feature (40)..(253): Homolog of NCBI NO: 6563285 NR Description: adenosine-5'-phosphosulfate kinase [Zea mays]

SEQ ID NO: 103065 - protein, 252 aa, Arabidopsis thaliana; identical to SEQ ID NO: 41935
  peptide (1)..(252): Ceres Seq. ID no. 13611899
  misc_feature (50)..(206): Pfam Name: Adenylylsulphate kinase Pfam Description: Adenylylsulphate kinase
  misc_feature (1)..(252): Homolog of NCBI NO: 18425199 NR Description: adenylylsulfate kinase-related protein thaliana] >gi|28393175|gb|AAO42019.1| putative adenylylsulfate [Arabidopsis thaliana] >gi|28827764|gb|AAO50726.1| putative
  misc_feature (1)..(252): Homolog of NCBI NO: 21537248 NR Description: adenylylsulfate kinase-like protein [Arabidopsis
  misc_feature (1)..(252): Homolog of NCBI NO: 9757873 NR Description: adenylylsulfate kinase-like protein [Arabidopsis
  misc_feature (1)..(242): Homolog of NCBI NO: 7387809 NR Description: Adenylylsulfate kinase, chloroplast precursor
  misc_feature (1)..(242): Homolog of NCBI NO: 15236087 NR Description: adenosine-5-phosphosulfate-kinase [Arabidopsis >gi|7387808|sp|O49196|KAP2_ARATH Adenylylsulfate kinase 2,
  misc_feature (1)..(208): Homolog of NCBI NO: 15225999 NR Description: adenosine phosphosulfate kinase -related thaliana] >gi|7387811|sp|Q43295|KAP1_ARATH Adenylylsulfate kinase
  misc_feature (1)..(208): Homolog of NCBI NO: 21553403 NR Description: putative adenosine phosphosulfate kinase
  misc_feature (27)..(241): Homolog of NCBI NO: 34393551 NR Description: putative adenosine-5'-phosphosulfate kinase
  misc_feature (26)..(242): Homolog of NCBI NO: 15228666 NR Description: adenylylsulfate kinase -related [Arabidopsis >gi|6006852|gb|AAF00628.1|AC009540_5 putative adenylylsulfate
  misc_feature (1)..(200): Homolog of NCBI NO: 6563285 NR Description: adenosine-5'-phosphosulfate kinase [Zea mays]

SEQ ID NO: 103066 - DNA, 708 bp, Arabidopsis thaliana
  misc_feature (1)..(708): Ceres Seq. ID no. 13611900
  misc_feature: MA Experiment ID: 108434 Result: Up-regulated in Transcription
  misc_feature: MA Experiment 108434 PARAMETER Experiment Name: At_Root_Tips_cDNA_P Parameter: Tissue Value: Root Tips
  misc_feature: MA Experiment ID: 20000180 Result: Up-regulated in Transcription
  misc_feature: MA Experiment 20000180 PARAMETER Experiment Name: At_Germinating_Seeds_P Parameter: Age (hr) Value: 24 vs. 0
  misc_feature: MA Experiment 20000180 PARAMETER Experiment Name: At_Germinating_Seeds_P Parameter: Tissue Value: Germinating Seeds
  misc_feature: MA Experiment ID: 20001451 Result: Down-regulated in Transcription
  misc_feature: MA Experiment 20001451 PARAMETER Experiment Name: At_Far-red-induction_P Parameter: Age (day) Value: 7
  misc_feature: MA Experiment 20001451 PARAMETER Experiment Name: At_Far-red-induction_P Parameter: Light Value: Far-red vs. White
  misc_feature: MA Experiment 20001451 PARAMETER Experiment Name: At_Far-red-induction_P Parameter: Organism Value: A. thaliana
  misc_feature: MA Experiment 20001451 PARAMETER Experiment Name: At_Far-red-induction_P Parameter: Plant Line Value: Columbia
  misc_feature: MA Experiment 20001451 PARAMETER Experiment Name: At_Far-red-induction_P Parameter: Timepoint (hr) Value: 24
  misc_feature: MA Experiment 20001451 PARAMETER Experiment Name: At_Far-red-induction_P Parameter: Tissue Value: Whole Plant
acagaagtagaagaaaccaaagcgaaatcaaaaagctcagcaattttccagatttctctaattgacgatggcgctttgtgctactactcaaaggactatccgtatagcggcgacgctccggcgtgttgctcgacctttcgctactgacgcggtggttgagtcggattacaagcgtggtgagatcggtaaggtctccggaatcccagaggagcatctttctcgcaaggtgataatatactcacctgctagaacagctacccagtcaggatctggaaaactcggaaaatggaagattaacttcgtctccaccttaaagtgggagaatccgttgatgggatggacttctacaggtgacccctatgctaatgttggtgactctgctcttgcttttgattctgaagaagctgctaagtcttttgctgagcgtcatggttgggattataaggtcaagaagcccaacacaccattattgaaggtcaagtcttactcggacaacttcaagtggaaaggcaatcctcaaccagaaaactgatgttacaccttcttccaattcttctcgagcaaaagaagaaacctcatttgatattaattctcatgtttctttgttattttagcatctgtgagctttttggttgaaaagaaccattatccatggctatgtttacttattacaataatatgatgatgatgatgaaacacactcctttg

SEQ ID NO: 103067 - protein, 154 aa, Arabidopsis thaliana; identical to SEQ ID NO: 21064
  peptide (1)..(154): Ceres Seq. ID no. 13611901
  misc_feature (52)..(154): Pfam Name: ETC complex I subunit conserved region Pfam Description: ETC complex I subunit conserved region
  misc_feature (1)..(154): Homolog of NCBI NO: 15240784 NR Description: expressed protein [Arabidopsis thaliana]
  misc_feature (1)..(154): Homolog of NCBI NO: 21555571 NR Description: unknown [Arabidopsis thaliana]
  misc_feature (19)..(136): Homolog of NCBI NO: 34901114 NR Description: NADH-ubiquinone oxidoreductase 18 kDa subunit,
  misc_feature (2)..(146): Homolog of NCBI NO: 4505369 NR Description: NADH dehydrogenase (ubiquinone) Fe-S protein 4,
  misc_feature (9)..(146): Homolog of NCBI NO: 13528960 NR Description: NADH dehydrogenase (ubiquinone) Fe-S protein 4
  misc_feature (1)..(146): Homolog of NCBI NO: 28461229 NR Description: NADH dehydrogenase (ubiquinone) Fe-S protein 4,
  misc_feature (38)..(146): Homolog of NCBI NO: 6754814 NR Description: NADH dehydrogenase (ubiquinone) Fe-S protein 4;
  misc_feature (38)..(146): Homolog of NCBI NO: 14919381 NR Description: NADH dehydrogenase (ubiquinone) Fe-S protein 4
  misc_feature (38)..(146): Homolog of NCBI NO: 19110803 NR Description: NADH dehydrogenase [Gallus gallus]
  misc_feature (38)..(153): Homolog of NCBI NO: 34334026 NR Description: NADH:ubiquinone oxidoreductase 18 kD-like subunit

SEQ ID NO: 103068 - DNA, 1487 bp, Arabidopsis thaliana
  misc_feature (1)..(1487): Ceres Seq. ID no. 13611906
  misc_feature: MA Experiment ID: 108488 Result: Up-regulated in Transcription
  misc_feature: MA Experiment ID: 20000069 Result: Down-regulated in Transcription
  misc_feature: MA Experiment 20000069 PARAMETER Experiment Name: At_100uM_ABA_Mutants_cDNA_P Parameter: Plant Line Value: CS23
  misc_feature: MA Experiment 20000069 PARAMETER Experiment Name: At_100uM_ABA_Mutants_cDNA_P Parameter: Timepoint (hr) Value: 6
  misc_feature: MA Experiment 20000069 PARAMETER Experiment Name: At_100uM_ABA_Mutants_cDNA_P Parameter: Tissue Value: Aerial
  misc_feature: MA Experiment 20000069 PARAMETER Experiment Name: At_100uM_ABA_Mutants_cDNA_P Parameter: Treatment Value: 100uM ABA vs. No Treatment
  misc_feature: MA Experiment ID: 20000070 Result: Down-regulated in Transcription
  misc_feature: MA Experiment 20000070 PARAMETER Experiment Name: At_100uM_ABA_Mutants_cDNA_P Parameter: Plant Line Value: CS24
  misc_feature: MA Experiment 20000070 PARAMETER Experiment Name: At_100uM_ABA_Mutants_cDNA_P Parameter: Timepoint (hr) Value: 6
  misc_feature: MA Experiment 20000070 PARAMETER Experiment Name: At_100uM_ABA_Mutants_cDNA_P Parameter: Tissue Value: Aerial
  misc_feature: MA Experiment 20000070 PARAMETER Experiment Name: At_100uM_ABA_Mutants_cDNA_P Parameter: Treatment Value: 100uM ABA vs. No Treatment
  misc_feature: MA Experiment ID: 20000071 Result: Down-regulated in Transcription
  misc_feature: MA Experiment 20000071 PARAMETER Experiment Name: At_100uM_ABA_Mutants_cDNA_P Parameter: Plant Line Value: CS8104
  misc_feature: MA Experiment 20000071 PARAMETER Experiment Name: At_100uM_ABA_Mutants_cDNA_P Parameter: Timepoint (hr) Value: 6
  misc_feature: MA Experiment 20000071 PARAMETER Experiment Name: At_100uM_ABA_Mutants_cDNA_P Parameter: Tissue Value: Aerial
  misc_feature: MA Experiment 20000071 PARAMETER Experiment Name: At_100uM_ABA_Mutants_cDNA_P Parameter: Treatment Value: 100uM ABA vs. No Treatment
  misc_feature: MA Experiment ID: 20000072 Result: Down-regulated in Transcription
  misc_feature: MA Experiment 20000072 PARAMETER Experiment Name: At_100uM_ABA_Mutants_cDNA_P Parameter: Plant Line Value: CS8105
  misc_feature: MA Experiment 20000072 PARAMETER Experiment Name: At_100uM_ABA_Mutants_cDNA_P Parameter: Timepoint (hr) Value: 6
  misc_feature: MA Experiment 20000072 PARAMETER Experiment Name: At_100uM_ABA_Mutants_cDNA_P Parameter: Tissue Value: Aerial
  misc_feature: MA Experiment 20000072 PARAMETER Experiment Name: At_100uM_ABA_Mutants_cDNA_P Parameter: Treatment Value: 100uM ABA vs. No Treatment
  misc_feature: MA Experiment ID: 20000087 Result: Down-regulated in Transcription
  misc_feature: MA Experiment 20000087 PARAMETER Experiment Name: At_100uM_ABA_Mutants_cDNA_P Parameter: Plant Line Value: WS
  misc_feature: MA Experiment 20000087 PARAMETER Experiment Name: At_100uM_ABA_Mutants_cDNA_P Parameter: Timepoint (hr) Value: 6
  misc_feature: MA Experiment 20000087 PARAMETER Experiment Name: At_100uM_ABA_Mutants_cDNA_P Parameter: Tissue Value: Aerial
  misc_feature: MA Experiment 20000087 PARAMETER Experiment Name: At_100uM_ABA_Mutants_cDNA_P Parameter: Treatment Value: 100uM ABA vs. No Treatment
  misc_feature: MA Experiment ID: 20000117 Result: Down-regulated in Transcription
  misc_feature: MA Experiment 20000117 PARAMETER Experiment Name: At_100uM_ABA_Mutants_cDNA_P Parameter: Plant Line Value: Columbia
  misc_feature: MA Experiment 20000117 PARAMETER Experiment Name: At_100uM_ABA_Mutants_cDNA_P Parameter: Timepoint (hr) Value: 6
  misc_feature: MA Experiment 20000117 PARAMETER Experiment Name: At_100uM_ABA_Mutants_cDNA_P Parameter: Tissue Value: Aerial
  misc_feature: MA Experiment 20000117 PARAMETER Experiment Name: At_100uM_ABA_Mutants_cDNA_P Parameter: Treatment Value: 100uM ABA vs. No Treatment
  misc_feature: MA Experiment ID: 20000185 Result: Down-regulated in Transcription
  misc_feature: MA Experiment 20000185 PARAMETER Experiment Name: At_Roots__P Parameter: Age (day) Value: 7 vs. 21
  misc_feature: MA Experiment 20000185 PARAMETER Experiment Name: At_Roots__P Parameter: Organism Value: A. thaliana
  misc_feature: MA Experiment 20000185 PARAMETER Experiment Name: At_Roots__P Parameter: Tissue Value: Roots vs. Whole Plant
  misc_feature: MA Experiment ID: 20000439 Result: Down-regulated in Transcription
  misc_feature: MA Experiment 20000439 PARAMETER Experiment Name: At_Roots__P Parameter: Age (day) Value: 14 vs. 21
  misc_feature: MA Experiment 20000439 PARAMETER Experiment Name: At_Roots__P Parameter: Organism Value: A. thaliana
  misc_feature: MA Experiment 20000439 PARAMETER Experiment Name: At_Roots__P Parameter: Tissue Value: Roots vs. Whole Plant
  misc_feature: MA Experiment ID: 20000794 Result: Down-regulated in Transcription
  misc_feature: MA Experiment 20000794 PARAMETER Experiment Name: At_Petals_P Parameter: Age (day) Value: 23-25 days
  misc_feature: MA Experiment 20000794 PARAMETER Experiment Name: At_Petals_P Parameter: Plant Line Value: WS
  misc_feature: MA Experiment 20000794 PARAMETER Experiment Name: At_Petals_P Parameter: Tissue Value: Petals vs. Whole plant
  misc_feature: MA Experiment ID: 20001450 Result: Down-regulated in Transcription
  misc_feature: MA Experiment 20001450 PARAMETER Experiment Name: At_Far-red-induction_P Parameter: Age (day) Value: 7
  misc_feature: MA Experiment 20001450 PARAMETER Experiment Name: At_Far-red-induction_P Parameter: Light Value: Far-red vs. White
  misc_feature: MA Experiment 20001450 PARAMETER Experiment Name: At_Far-red-induction_P Parameter: Organism Value: A. thaliana
  misc_feature: MA Experiment 20001450 PARAMETER Experiment Name: At_Far-red-induction_P Parameter: Plant Line Value: Columbia
  misc_feature: MA Experiment 20001450 PARAMETER Experiment Name: At_Far-red-induction_P Parameter: Timepoint (hr) Value: 8
  misc_feature: MA Experiment 20001450 PARAMETER Experiment Name: At_Far-red-induction_P Parameter: Tissue Value: Whole Plant
aacccaacgataaaacgcaggagccatagaagaataacagataaaactctctgtgtgagtgagtgagactcaaccatggcgtctttggctcagcaattctcgggattgagatgttccccactctcttcttcttctaggttatcgaggagagcttcgaagaactttccccagaacaaatctgcctctgtttctccgactattgtcgccgcggttgcaatgtctagcggtcaaacaaaggagcgtcttgagctgaagaagatgttcgaagatgcttatgaacgatgtagaacttctcctatggaaggtgttgctttcaccgtcgacgatttcgctgctgctattgaacaatacgacttcaattccgaaatcggcactagggtaaaaggaacagtgttcaagactgatgcaaatggtgcattagttgacatttctgcaaagtcatcggcttacttgtcggtagaacaagcgtgtattcatagaattaagcatgtggaagaagctggtattgtacctggtatggtggaagagtttgtcatcattggtgaaaatgaaagtgatgacagtttgctattgagcttaaggaatattcaatacgaacttgcttgggaacgttgcaggcagcttcaggctgaggatgttattgtcaaggctaaggttattggtgctaacaaaggtggattggttgctcttgtggaaggtcttcgtggatttgtgcccttttcgcagatatcatcgaaagcagcagctgaagagcttcttgaaaaagaaatacctcttaagtttgtggaggttgatgaggaacaaacaaagcttgtcctcagcaaccgtaaagctgtagcagatagccaagctcagcttggaattggatctgtggtcctcggagttgttcagagcttgaaaccttatggtgccttcattgacattggtggaatcaatgggcttcttcatgtcagtcagataagtcatgaccgtgtctcagatatcgcaactgttcttcagcctggtgacactttgaaggttatgatattgagtcacgaccgtgacagaggaagagtaagtctctccacaaagaagctggagccaacacctggtgatatgattcgtaacccaaaacttgtgttcgagaaggctgaggagatggctcagacattcagacagagaattgcgcaagcagaagccatggctcgtgcagacatgcttcgcttccaacctgagagtggactgacgctgagttctgacgggatactaggaccactcggatctgagttaccagatgatggcgtagatctaacggtcgacgacattccttctgcagttgatatttagattctaaagctttagtgtattttttcatacacaaaaacacctccttgagcttaattgaatatgtagtttacttcctacaagacattttatcatgtgtactttgtcttttgtaatcgatatgttctgttacaatgtcaagaaaccaaagaaaggctttgccc

SEQ ID NO: 103069 - protein, 416 aa, Arabidopsis thaliana; identical to SEQ ID NO: 26933
  peptide (1)..(416): Ceres Seq. ID no. 13611907
  misc_feature (95)..(169): Pfam Name: S1 RNA binding domain Pfam Description: S1 RNA binding domain
  misc_feature (1)..(416): Homolog of NCBI NO: 30692346 NR Description: ribosomal protein S1 [Arabidopsis thaliana] putative ribosomal protein S1 [Arabidopsis thaliana] Unknown protein [Arabidopsis thaliana]
  misc_feature (1)..(415): Homolog of NCBI NO: 133872 NR Description: 30S ribosomal protein S1, chloroplast precursor
  misc_feature (78)..(383): Homolog of NCBI NO: 22299589 NR Description: 30S ribosomal protein S1 [Thermosynechococcus BP- 1] >gi|22295773|dbj|BAC09598.1| 30S ribosomal protein S1
  misc_feature (74)..(369): Homolog of NCBI NO: 1173225 NR Description: 30S ribosomal protein S1 >gi|1075612|pir||S51485
  misc_feature (38)..(367): Homolog of NCBI NO: 33863935 NR Description: 30S ribosomal protein S1, homolog A marinus str. MIT 9313] >gi|33635519|emb|CAE21843.1| 30S ribosomal
  misc_feature (64)..(367): Homolog of NCBI NO: 33866517 NR Description: 30S ribosomal protein S1, homolog A sp. WH 8102] >gi|33633295|emb|CAE08500.1| 30S ribosomal protein
  misc_feature (78)..(415): Homolog of NCBI NO: 17227632 NR Description: 30S ribosomal protein S1 [Nostoc sp. PCC 7120]
  misc_feature (78)..(416): Homolog of NCBI NO: 23128852 NR Description: hypothetical protein [Nostoc punctiforme]
  misc_feature (78)..(369): Homolog of NCBI NO: 16330162 NR Description: 30S ribosomal protein S1 [Synechocystis sp. PCC >gi|2500385|sp|P73530|RS1A_SYNY3 30S ribosomal protein S1 homolog
  misc_feature (64)..(367): Homolog of NCBI NO: 33239803 NR Description: Ribosomal protein S1 [Prochlorococcus marinus marinus str. CCMP1375] >gi|33237329|gb|AAP99397.1| Ribosomal

SEQ ID NO: 103070 - protein, 369 aa, Arabidopsis thaliana; identical to SEQ ID NO: 26934
  peptide (1)..(369): Ceres Seq. ID no. 13611908
  misc_feature (48)..(122): Pfam Name: S1 RNA binding domain Pfam Description: S1 RNA binding domain
  misc_feature (1)..(369): Homolog of NCBI NO: 30692346 NR Description: ribosomal protein S1 [Arabidopsis thaliana] putative ribosomal protein S1 [Arabidopsis thaliana] Unknown protein [Arabidopsis thaliana]
  misc_feature (1)..(368): Homolog of NCBI NO: 133872 NR Description: 30S ribosomal protein S1, chloroplast precursor
  misc_feature (31)..(336): Homolog of NCBI NO: 22299589 NR Description: 30S ribosomal protein S1 [Thermosynechococcus BP- 1] >gi|22295773|dbj|BAC09598.1| 30S ribosomal protein S1
  misc_feature (27)..(322): Homolog of NCBI NO: 1173225 NR Description: 30S ribosomal protein S1 >gi|1075612|pir||S51485
  misc_feature (1)..(320): Homolog of NCBI NO: 33863935 NR Description: 30S ribosomal protein S1, homolog A marinus str. MIT 9313] >gi|33635519|emb|CAE21843.1| 30S ribosomal
  misc_feature (17)..(320): Homolog of NCBI NO: 33866517 NR Description: 30S ribosomal protein S1, homolog A sp. WH 8102] >gi|33633295|emb|CAE08500.1| 30S ribosomal protein
  misc_feature (31)..(368): Homolog of NCBI NO: 17227632 NR Description: 30S ribosomal protein S1 [Nostoc sp. PCC 7120]
  misc_feature (31)..(369): Homolog of NCBI NO: 23128852 NR Description: hypothetical protein [Nostoc punctiforme]
  misc_feature (31)..(322): Homolog of NCBI NO: 16330162 NR Description: 30S ribosomal protein S1 [Synechocystis sp. PCC >gi|2500385|sp|P73530|RS1A_SYNY3 30S ribosomal protein S1 homolog
  misc_feature (17)..(320): Homolog of NCBI NO: 33239803 NR Description: Ribosomal protein S1 [Prochlorococcus marinus marinus str. CCMP1375] >gi|33237329|gb|AAP99397.1| Ribosomal

SEQ ID NO: 103071 - protein, 355 aa, Arabidopsis thaliana; identical to SEQ ID NO: 26935
  peptide (1)..(355): Ceres Seq. ID no. 13611909
  misc_feature (34)..(108): Pfam Name: S1 RNA binding domain Pfam Description: S1 RNA binding domain
  misc_feature (1)..(355): Homolog of NCBI NO: 30692346 NR Description: ribosomal protein S1 [Arabidopsis thaliana] putative ribosomal protein S1 [Arabidopsis thaliana] Unknown protein [Arabidopsis thaliana]
  misc_feature (1)..(354): Homolog of NCBI NO: 133872 NR Description: 30S ribosomal protein S1, chloroplast precursor
  misc_feature (17)..(322): Homolog of NCBI NO: 22299589 NR Description: 30S ribosomal protein S1 [Thermosynechococcus BP- 1] >gi|22295773|dbj|BAC09598.1| 30S ribosomal protein S1
  misc_feature (13)..(308): Homolog of NCBI NO: 1173225 NR Description: 30S ribosomal protein S1 >gi|1075612|pir||S51485
  misc_feature (1)..(306): Homolog of NCBI NO: 33863935 NR Description: 30S ribosomal protein S1, homolog A marinus str. MIT 9313] >gi|33635519|emb|CAE21843.1| 30S ribosomal
  misc_feature (3)..(306): Homolog of NCBI NO: 33866517 NR Description: 30S ribosomal protein S1, homolog A sp. WH 8102] >gi|33633295|emb|CAE08500.1| 30S ribosomal protein
  misc_feature (17)..(354): Homolog of NCBI NO: 17227632 NR Description: 30S ribosomal protein S1 [Nostoc sp. PCC 7120]
  misc_feature (17)..(355): Homolog of NCBI NO: 23128852 NR Description: hypothetical protein [Nostoc punctiforme]
  misc_feature (17)..(308): Homolog of NCBI NO: 16330162 NR Description: 30S ribosomal protein S1 [Synechocystis sp. PCC >gi|2500385|sp|P73530|RS1A_SYNY3 30S ribosomal protein S1 homolog
  misc_feature (3)..(306): Homolog of NCBI NO: 33239803 NR Description: Ribosomal protein S1 [Prochlorococcus marinus marinus str. CCMP1375] >gi|33237329|gb|AAP99397.1| Ribosomal

SEQ ID NO: 103072 - DNA, 1169 bp, Arabidopsis thaliana
  misc_feature (1)..(1169): Ceres Seq. ID no. 13611910
  misc_feature: MA Experiment ID: 20000111 Result: Up-regulated in Transcription
  misc_feature: MA Experiment 20000111 PARAMETER Experiment Name: At_42deg_Heat_cDNA_P Parameter: Temperature (deg C) Value: 42 vs. 22
  misc_feature: MA Experiment 20000111 PARAMETER Experiment Name: At_42deg_Heat_cDNA_P Parameter: Timepoint (hr) Value: 6
  misc_feature: MA Experiment 20000111 PARAMETER Experiment Name: At_42deg_Heat_cDNA_P Parameter: Tissue Value: Aerial
  misc_feature: MA Experiment ID: 20000185 Result: Up-regulated in Transcription
  misc_feature: MA Experiment 20000185 PARAMETER Experiment Name: At_Roots__P Parameter: Age (day) Value: 7 vs. 21
  misc_feature: MA Experiment 20000185 PARAMETER Experiment Name: At_Roots__P Parameter: Organism Value: A. thaliana
  misc_feature: MA Experiment 20000185 PARAMETER Experiment Name: At_Roots__P Parameter: Tissue Value: Roots vs. Whole Plant
  misc_feature: MA Experiment ID: 20000439 Result: Up-regulated in Transcription
  misc_feature: MA Experiment 20000439 PARAMETER Experiment Name: At_Roots__P Parameter: Age (day) Value: 14 vs. 21
  misc_feature: MA Experiment 20000439 PARAMETER Experiment Name: At_Roots__P Parameter: Organism Value: A. thaliana
  misc_feature: MA Experiment 20000439 PARAMETER Experiment Name: At_Roots__P Parameter: Tissue Value: Roots vs. Whole Plant
  misc_feature: MA Experiment ID: 20001451 Result: Up-regulated in Transcription
  misc_feature: MA Experiment 20001451 PARAMETER Experiment Name: At_Far-red-induction_P Parameter: Age (day) Value: 7
  misc_feature: MA Experiment 20001451 PARAMETER Experiment Name: At_Far-red-induction_P Parameter: Light Value: Far-red vs. White
  misc_feature: MA Experiment 20001451 PARAMETER Experiment Name: At_Far-red-induction_P Parameter: Organism Value: A. thaliana
  misc_feature: MA Experiment 20001451 PARAMETER Experiment Name: At_Far-red-induction_P Parameter: Plant Line Value: Columbia
  misc_feature: MA Experiment 20001451 PARAMETER Experiment Name: At_Far-red-induction_P Parameter: Timepoint (hr) Value: 24
  misc_feature: MA Experiment 20001451 PARAMETER Experiment Name: At_Far-red-induction_P Parameter: Tissue Value: Whole Plant
attcaataaattcttcttttcttgcattttcaactcaatctttatctcatgctttcgtcttcgtcttcgtcaacggtggagcaaccatcacgtggcggaagtccgggaatcaacgccgtgtcctccgatgttttacggtctaacatcctaacccgcctcgacggttcctctctcgccgccctaagctgcacgtgctccaacctaaactctttttgctccgacgagtccctctggaggcaacaatgttccgctacatggccttctacctcggatacacgtgtccaaagcatcatctcaacgttccccgacggtcaccggacgtttttttccgattcctttccgtttcttgaacatgatgttgggatcaatctcccaccgtccgttgatacctcggagttaatctcagccgttgatatattctacaaagatgacgtgattttctcaagggttcatgttacagagacagtctctggttggttcctttgctcacctatgcgtgtcgatcttgtcgaaccgaaagaactaattccgaccagagttttggttacggaccaatgtaaggatgacacgtggaaaagtgacttggaagagaatctctccttgagctggatactcattgacccgacatgtaaacgtgcggcggatgtatcaacccgtaaacctgtctcggtgcaccgtcattggttaaccggagaagtccacgtaaaattctcctctatttttgtcgtgggcaacaagaaaaggtcggagcaagtggagttcactgtaacggtggtgctggcggtgtttaaccggagggaagaggagacagcagtgatgcagataagagaggtgagcctagtagcagaggacaaggatgggaggaatttaggagggaaggttagtttggaaattttggtggcggccatggggatgaaacgtaggtttagggcgggaggggaagaagaagggaaagagaagtacatagaatatatggagaggaagaccgcgaaggcggagatgaagtggcggcgagggaaagaaacggctatggagacggcggcgtgctggatcgccgtcctcttacttggtttccttttgtgtttttatctgtttatgcataaaaatttagtagctattatgaaaaaactaataaaatagttaaataatatgttttgattcaaaacttc

SEQ ID NO: 103073 - protein, 363 aa, Arabidopsis thaliana
  peptide (1)..(363): Ceres Seq. ID no. 13611911
  misc_feature (21)..(344): Homolog of NCBI NO: 15225867 NR Description: F-box protein family [Arabidopsis thaliana]
  misc_feature (6)..(347): Homolog of NCBI NO: 15227574 NR Description: F-box protein family [Arabidopsis thaliana]
  misc_feature (21)..(322): Homolog of NCBI NO: 32479726 NR Description: OJ991214_12.2 [Oryza sativa (japonica
MLSSSSSSTVEQPSRGGSPGINAVSSDVLRSNILTRLDGSSLAALSCTCSNLNSFCSDESLWRQQCSATWPSTSDTRVQSIISTFPDGHRTFFSDSFPFLEHDVGINLPPSVDTSELISAVDIFYKDDVIFSRVHVTETVSGWFLCSPMRVDLVEPKELIPTRVLVTDQCKDDTWKSDLEENLSLSWILIDPTCKRAADVSTRKPVSVHRHWLTGEVHVKFSSIFVVGNKKRSEQVEFTVTVVLAVFNRREEETAVMQIREVSLVAEDKDGRNLGGKVSLEILVAAMGMKRRFRAGGEEEGKEKYIEYMERKTAKAEMKWRRGKETAMETAACWIAVLLLGFLLCFYLFMHKNLVAIMKKLIK

SEQ ID NO: 103074 - protein, 215 aa, Arabidopsis thaliana
  peptide (1)..(215): Ceres Seq. ID no. 13611912
  misc_feature (1)..(196): Homolog of NCBI NO: 15225867 NR Description: F-box protein family [Arabidopsis thaliana]
  misc_feature (1)..(199): Homolog of NCBI NO: 15227574 NR Description: F-box protein family [Arabidopsis thaliana]
  misc_feature (1)..(174): Homolog of NCBI NO: 32479726 NR Description: OJ991214_12.2 [Oryza sativa (japonica
MRVDLVEPKELIPTRVLVTDQCKDDTWKSDLEENLSLSWILIDPTCKRAADVSTRKPVSVHRHWLTGEVHVKFSSIFVVGNKKRSEQVEFTVTVVLAVFNRREEETAVMQIREVSLVAEDKDGRNLGGKVSLEILVAAMGMKRRFRAGGEEEGKEKYIEYMERKTAKAEMKWRRGKETAMETAACWIAVLLLGFLLCFYLFMHKNLVAIMKKLIK

SEQ ID NO: 103075 - DNA, 1647 bp, Arabidopsis thaliana
  misc_feature (1)..(1647): Ceres Seq. ID no. 13611931
  misc_feature: MA Experiment ID: 108464 Result: Up-regulated in Transcription
  misc_feature: MA Experiment 108464 PARAMETER Experiment Name: At_Germinating_Seeds_cDNA_P Parameter: Age (day) Value: 4 vs. 0
  misc_feature: MA Experiment 108464 PARAMETER Experiment Name: At_Germinating_Seeds_cDNA_P Parameter: Tissue Value: Germinating Seeds
  misc_feature: MA Experiment ID: 108501 Result: Down-regulated in Transcription
  misc_feature: MA Experiment 108501 PARAMETER Experiment Name: At_ap2_floral_buds_cDNA_P Parameter: Plant Line Value: ap2 (Ler.)
  misc_feature: MA Experiment 108501 PARAMETER Experiment Name: At_ap2_floral_buds_cDNA_P Parameter: Tissue Value: Closed Flower
  misc_feature: MA Experiment ID: 108561 Result: Up-regulated in Transcription
  misc_feature: MA Experiment 108561 PARAMETER Experiment Name: At_100uM_ABA_cDNA_P Parameter: Timepoint (hr) Value: 6
  misc_feature: MA Experiment 108561 PARAMETER Experiment Name: At_100uM_ABA_cDNA_P Parameter: Tissue Value: Aerial
  misc_feature: MA Experiment 108561 PARAMETER Experiment Name: At_100uM_ABA_cDNA_P Parameter: Treatment Value: 100uM ABA vs. No Treatment
  misc_feature: MA Experiment ID: 108573 Result: Up-regulated in Transcription
  misc_feature: MA Experiment 108573 PARAMETER Experiment Name: At_Drought_cDNA_P Parameter: Timepoint (hr) Value: 6
  misc_feature: MA Experiment 108573 PARAMETER Experiment Name: At_Drought_cDNA_P Parameter: Tissue Value: Aerial
  misc_feature: MA Experiment 108573 PARAMETER Experiment Name: At_Drought_cDNA_P Parameter: Treatment Value: Drought vs. No Drought
  misc_feature: MA Experiment ID: 108574 Result: Down-regulated in Transcription
  misc_feature: MA Experiment 108574 PARAMETER Experiment Name: At_Wounding__cDNA_P Parameter: Timepoint (hr) Value: 1
  misc_feature: MA Experiment 108574 PARAMETER Experiment Name: At_Wounding__cDNA_P Parameter: Tissue Value: Aerial
  misc_feature: MA Experiment 108574 PARAMETER Experiment Name: At_Wounding__cDNA_P Parameter: Treatment Value: Wounding vs. No Wounding
  misc_feature: MA Experiment ID: 108579 Result: Down-regulated in Transcription
  misc_feature: MA Experiment 108579 PARAMETER Experiment Name: At_4deg_Cold_cDNA_P Parameter: Temperature (deg C) Value: 4 vs. 22
  misc_feature: MA Experiment 108579 PARAMETER Experiment Name: At_4deg_Cold_cDNA_P Parameter: Timepoint (hr) Value: 6
  misc_feature: MA Experiment 108579 PARAMETER Experiment Name: At_4deg_Cold_cDNA_P Parameter: Tissue Value: Aerial
  misc_feature: MA Experiment ID: 108594 Result: Up-regulated in Transcription
  misc_feature: MA Experiment 108594 PARAMETER Experiment Name: At_Ler-rhl_Root_cDNA_P Parameter: Plant Line Value: null
  misc_feature: MA Experiment ID: 108605 Result: Up-regulated in Transcription
  misc_feature: MA Experiment 108605 PARAMETER Experiment Name: At_100uM_ABA_cDNA_P Parameter: Timepoint (hr) Value: 6
  misc_feature: MA Experiment 108605 PARAMETER Experiment Name: At_100uM_ABA_cDNA_P Parameter: Tissue Value: Aerial
  misc_feature: MA Experiment 108605 PARAMETER Experiment Name: At_100uM_ABA_cDNA_P Parameter: Treatment Value: 100uM ABA vs. No Treatment
  misc_feature: MA Experiment ID: 108607 Result: Up-regulated in Transcription
  misc_feature: MA Experiment 108607 PARAMETER Experiment Name: At_100uM_ABA_cDNA_P Parameter: Timepoint (hr) Value: 4
  misc_feature: MA Experiment 108607 PARAMETER Experiment Name: At_100uM_ABA_cDNA_P Parameter: Tissue Value: Aerial
  misc_feature: MA Experiment 108607 PARAMETER Experiment Name: At_100uM_ABA_cDNA_P Parameter: Treatment Value: 100uM ABA vs. No Treatment
  misc_feature: MA Experiment ID: 20000069 Result: Up-regulated in Transcription
  misc_feature: MA Experiment 20000069 PARAMETER Experiment Name: At_100uM_ABA_Mutants_cDNA_P Parameter: Plant Line Value: CS23
  misc_feature: MA Experiment 20000069 PARAMETER Experiment Name: At_100uM_ABA_Mutants_cDNA_P Parameter: Timepoint (hr) Value: 6
  misc_feature: MA Experiment 20000069 PARAMETER Experiment Name: At_100uM_ABA_Mutants_cDNA_P Parameter: Tissue Value: Aerial
  misc_feature: MA Experiment 20000069 PARAMETER Experiment Name: At_100uM_ABA_Mutants_cDNA_P Parameter: Treatment Value: 100uM ABA vs. No Treatment
  misc_feature: MA Experiment ID: 20000070 Result: Up-regulated in Transcription
  misc_feature: MA Experiment 20000070 PARAMETER Experiment Name: At_100uM_ABA_Mutants_cDNA_P Parameter: Plant Line Value: CS24
  misc_feature: MA Experiment 20000070 PARAMETER Experiment Name: At_100uM_ABA_Mutants_cDNA_P Parameter: Timepoint (hr) Value: 6
  misc_feature: MA Experiment 20000070 PARAMETER Experiment Name: At_100uM_ABA_Mutants_cDNA_P Parameter: Tissue Value: Aerial
  misc_feature: MA Experiment 20000070 PARAMETER Experiment Name: At_100uM_ABA_Mutants_cDNA_P Parameter: Treatment Value: 100uM ABA vs. No Treatment
  misc_feature: MA Experiment ID: 20000071 Result: Up-regulated in Transcription
  misc_feature: MA Experiment 20000071 PARAMETER Experiment Name: At_100uM_ABA_Mutants_cDNA_P Parameter: Plant Line Value: CS8104
  misc_feature: MA Experiment 20000071 PARAMETER Experiment Name: At_100uM_ABA_Mutants_cDNA_P Parameter: Timepoint (hr) Value: 6
  misc_feature: MA Experiment 20000071 PARAMETER Experiment Name: At_100uM_ABA_Mutants_cDNA_P Parameter: Tissue Value: Aerial
  misc_feature: MA Experiment 20000071 PARAMETER Experiment Name: At_100uM_ABA_Mutants_cDNA_P Parameter: Treatment Value: 100uM ABA vs. No Treatment
  misc_feature: MA Experiment ID: 20000072 Result: Up-regulated in Transcription
  misc_feature: MA Experiment 20000072 PARAMETER Experiment Name: At_100uM_ABA_Mutants_cDNA_P Parameter: Plant Line Value: CS8105
  misc_feature: MA Experiment 20000072 PARAMETER Experiment Name: At_100uM_ABA_Mutants_cDNA_P Parameter: Timepoint (hr) Value: 6
  misc_feature: MA Experiment 20000072 PARAMETER Experiment Name: At_100uM_ABA_Mutants_cDNA_P Parameter: Tissue Value: Aerial
  misc_feature: MA Experiment 20000072 PARAMETER Experiment Name: At_100uM_ABA_Mutants_cDNA_P Parameter: Treatment Value: 100uM ABA vs. No Treatment
  misc_feature: MA Experiment ID: 20000086 Result: Up-regulated in Transcription
  misc_feature: MA Experiment 20000086 PARAMETER Experiment Name: At_100uM_ABA_Mutants_cDNA_P Parameter: Plant Line Value: CS22
  misc_feature: MA Experiment 20000086 PARAMETER Experiment Name: At_100uM_ABA_Mutants_cDNA_P Parameter: Timepoint (hr) Value: 6
  misc_feature: MA Experiment 20000086 PARAMETER Experiment Name: At_100uM_ABA_Mutants_cDNA_P Parameter: Tissue Value: Aerial
  misc_feature: MA Experiment 20000086 PARAMETER Experiment Name: At_100uM_ABA_Mutants_cDNA_P Parameter: Treatment Value: 100uM ABA vs. No Treatment
  misc_feature: MA Experiment ID: 20000087 Result: Up-regulated in Transcription
  misc_feature: MA Experiment 20000087 PARAMETER Experiment Name: At_100uM_ABA_Mutants_cDNA_P Parameter: Plant Line Value: WS
  misc_feature: MA Experiment 20000087 PARAMETER Experiment Name: At_100uM_ABA_Mutants_cDNA_P Parameter: Timepoint (hr) Value: 6
  misc_feature: MA Experiment 20000087 PARAMETER Experiment Name: At_100uM_ABA_Mutants_cDNA_P Parameter: Tissue Value: Aerial
  misc_feature: MA Experiment 20000087 PARAMETER Experiment Name: At_100uM_ABA_Mutants_cDNA_P Parameter: Treatment Value: 100uM ABA vs. No Treatment
  misc_feature: MA Experiment ID: 20000088 Result: Up-regulated in Transcription
  misc_feature: MA Experiment 20000088 PARAMETER Experiment Name: At_100uM_ABA_Mutants_cDNA_P Parameter: Plant Line Value: Landsberg
  misc_feature: MA Experiment 20000088 PARAMETER Experiment Name: At_100uM_ABA_Mutants_cDNA_P Parameter: Timepoint (hr) Value: 6
  misc_feature: MA Experiment 20000088 PARAMETER Experiment Name: At_100uM_ABA_Mutants_cDNA_P Parameter: Tissue Value: Aerial
  misc_feature: MA Experiment 20000088 PARAMETER Experiment Name: At_100uM_ABA_Mutants_cDNA_P Parameter: Treatment Value: 100uM ABA vs. No Treatment
  misc_feature: MA Experiment ID: 20000117 Result: Up-regulated in Transcription
  misc_feature: MA Experiment 20000117 PARAMETER Experiment Name: At_100uM_ABA_Mutants_cDNA_P Parameter: Plant Line Value: Columbia
  misc_feature: MA Experiment 20000117 PARAMETER Experiment Name: At_100uM_ABA_Mutants_cDNA_P Parameter: Timepoint (hr) Value: 6
  misc_feature: MA Experiment 20000117 PARAMETER Experiment Name: At_100uM_ABA_Mutants_cDNA_P Parameter: Tissue Value: Aerial
  misc_feature: MA Experiment 20000117 PARAMETER Experiment Name: At_100uM_ABA_Mutants_cDNA_P Parameter: Treatment Value: 100uM ABA vs. No Treatment
  misc_feature: MA Experiment ID: 20000169 Result: Up-regulated in Transcription
  misc_feature: MA Experiment 20000169 PARAMETER Experiment Name: At_100uM_ABA_P Parameter: Age (day) Value: 14
  misc_feature: MA Experiment 20000169 PARAMETER Experiment Name: At_100uM_ABA_P Parameter: Organism Value: A. thaliana
  misc_feature: MA Experiment 20000169 PARAMETER Experiment Name: At_100uM_ABA_P Parameter: Plant Line Value: WS
  misc_feature: MA Experiment 20000169 PARAMETER Experiment Name: At_100uM_ABA_P Parameter: Timepoint (hr) Value: 6
  misc_feature: MA Experiment 20000169 PARAMETER Experiment Name: At_100uM_ABA_P Parameter: Tissue Value: Aerial
  misc_feature: MA Experiment 20000169 PARAMETER Experiment Name: At_100uM_ABA_P Parameter: Treatment Value: 100uM ABA vs. No Treatment
  misc_feature: MA Experiment ID: 20000184 Result: Down-regulated in Transcription
  misc_feature: MA Experiment 20000184 PARAMETER Experiment Name: At_Shoots__P Parameter: Age (day) Value: 7
  misc_feature: MA Experiment 20000184 PARAMETER Experiment Name: At_Shoots__P Parameter: Tissue Value: Shoots vs. Whole Plant
  misc_feature: MA Experiment ID: 20000213 Result: Down-regulated in Transcription
  misc_feature: MA Experiment 20000213 PARAMETER Experiment Name: At_4deg_Cold_P Parameter: Timepoint (hr) Value: 2
  misc_feature: MA Experiment ID: 20000214 Result: Down-regulated in Transcription
  misc_feature: MA Experiment 20000214 PARAMETER Experiment Name: At_4deg_Cold_P Parameter: Timepoint (hr) Value: 6
  misc_feature: MA Experiment ID: 20000224 Result: Down-regulated in Transcription
  misc_feature: MA Experiment ID: 20000234 Result: Down-regulated in Transcription
  misc_feature: MA Experiment 20000234 PARAMETER Experiment Name: At_Siliques_P Parameter: Age (day) Value: 21
  misc_feature: MA Experiment 20000234 PARAMETER Experiment Name: At_Siliques_P Parameter: Organism Value: A. thaliana
  misc_feature: MA Experiment 20000234 PARAMETER Experiment Name: At_Siliques_P Parameter: Plant Line Value: WS
  misc_feature: MA Experiment 20000234 PARAMETER Experiment Name: At_Siliques_P Parameter: Tissue Value: Less Than 5mm Siliques vs. Whole Plant
  misc_feature: MA Experiment ID: 20000235 Result: Down-regulated in Transcription
  misc_feature: MA Experiment 20000235 PARAMETER Experiment Name: At_Siliques_P Parameter: Age (day) Value: 21
  misc_feature: MA Experiment 20000235 PARAMETER Experiment Name: At_Siliques_P Parameter: Organism Value: A. thaliana
  misc_feature: MA Experiment 20000235 PARAMETER Experiment Name: At_Siliques_P Parameter: Plant Line Value: WS
  misc_feature: MA Experiment 20000235 PARAMETER Experiment Name: At_Siliques_P Parameter: Tissue Value: 5-10mm Siliques vs. Whole Plant
  misc_feature: MA Experiment ID: 20000265 Result: Down-regulated in Transcription
  misc_feature: MA Experiment 20000265 PARAMETER Experiment Name: At_Open_Flower_P Parameter: Age (day) Value: 21
  misc_feature: MA Experiment 20000265 PARAMETER Experiment Name: At_Open_Flower_P Parameter: Plant Line Value: WS
  misc_feature: MA Experiment 20000265 PARAMETER Experiment Name: At_Open_Flower_P Parameter: Tissue Value: Closed Flower vs. Whole Plant
  misc_feature: MA Experiment ID: 20000286 Result: Down-regulated in Transcription
  misc_feature: MA Experiment 20000286 PARAMETER Experiment Name: At_Open_Flower_P Parameter: Age (day) Value: 21
  misc_feature: MA Experiment 20000286 PARAMETER Experiment Name: At_Open_Flower_P Parameter: Plant Line Value: WS
  misc_feature: MA Experiment 20000286 PARAMETER Experiment Name: At_Open_Flower_P Parameter: Tissue Value: Half Open vs. Whole Plant
  misc_feature: MA Experiment ID: 20000437 Result: Up-regulated in Transcription
  misc_feature: MA Experiment 20000437 PARAMETER Experiment Name: At_Drought_P Parameter: Age (day) Value: 8
  misc_feature: MA Experiment 20000437 PARAMETER Experiment Name: At_Drought_P Parameter: Organism Value: A. thaliana
  misc_feature: MA Experiment 20000437 PARAMETER Experiment Name: At_Drought_P Parameter: Plant Line Value: WS
  misc_feature: MA Experiment 20000437 PARAMETER Experiment Name: At_Drought_P Parameter: Timepoint (hr) Value: 24
  misc_feature: MA Experiment 20000437 PARAMETER Experiment Name: At_Drought_P Parameter: Tissue Value: Whole Plant
  misc_feature: MA Experiment 20000437 PARAMETER Experiment Name: At_Drought_P Parameter: Treatment Value: Drought vs. No Drought
  misc_feature: MA Experiment ID: 20000438 Result: Down-regulated in Transcription
  misc_feature: MA Experiment 20000438 PARAMETER Experiment Name: At_Shoots__P Parameter: Age (day) Value: 14
  misc_feature: MA Experiment 20000438 PARAMETER Experiment Name: At_Shoots__P Parameter: Tissue Value: Shoots vs. Whole Plant
  misc_feature: MA Experiment ID: 20000573 Result: Up-regulated in Transcription
  misc_feature: MA Experiment 20000573 PARAMETER Experiment Name: At_100uM_ABA_Mutants__P Parameter: Organism Value: A. thaliana
  misc_feature: MA Experiment 20000573 PARAMETER Experiment Name: At_100uM_ABA_Mutants__P Parameter: Plant Line Value: CS22 vs. Ler wt
  misc_feature: MA Experiment 20000573 PARAMETER Experiment Name: At_100uM_ABA_Mutants__P Parameter: Timepoint (hr) Value: N/A
  misc_feature: MA Experiment 20000573 PARAMETER Experiment Name: At_100uM_ABA_Mutants__P Parameter: Tissue Value: Whole Plant
  misc_feature: MA Experiment 20000573 PARAMETER Experiment Name: At_100uM_ABA_Mutants__P Parameter: Treatment Value: None
  misc_feature: MA Experiment ID: 20000574 Result: Up-regulated in Transcription
  misc_feature: MA Experiment 20000574 PARAMETER Experiment Name: At_100uM_ABA_Mutants__P Parameter: Organism Value: A. thaliana
  misc_feature: MA Experiment 20000574 PARAMETER Experiment Name: At_100uM_ABA_Mutants__P Parameter: Plant Line Value: CS23 vs. Ler wt
  misc_feature: MA Experiment 20000574 PARAMETER Experiment Name: At_100uM_ABA_Mutants__P Parameter: Timepoint (hr) Value: N/A
  misc_feature: MA Experiment 20000574 PARAMETER Experiment Name: At_100uM_ABA_Mutants__P Parameter: Tissue Value: Whole Plant
  misc_feature: MA Experiment 20000574 PARAMETER Experiment Name: At_100uM_ABA_Mutants__P Parameter: Treatment Value: None
  misc_feature: MA Experiment ID: 20000794 Result: Up-regulated in Transcription
  misc_feature: MA Experiment 20000794 PARAMETER Experiment Name: At_Petals_P Parameter: Age (day) Value: 23-25 days
  misc_feature: MA Experiment 20000794 PARAMETER Experiment Name: At_Petals_P Parameter: Plant Line Value: WS
  misc_feature: MA Experiment 20000794 PARAMETER Experiment Name: At_Petals_P Parameter: Tissue Value: Petals vs. Whole plant
  misc_feature: MA Experiment ID: 20001247 Result: Up-regulated in Transcription
  misc_feature: MA Experiment 20001247 PARAMETER Experiment Name: At_Far-red-induction_P Parameter: Age (day) Value: 7
  misc_feature: MA Experiment 20001247 PARAMETER Experiment Name: At_Far-red-induction_P Parameter: Light Value: Far-red vs. White
  misc_feature: MA Experiment 20001247 PARAMETER Experiment Name: At_Far-red-induction_P Parameter: Organism Value: A. thaliana
  misc_feature: MA Experiment 20001247 PARAMETER Experiment Name: At_Far-red-induction_P Parameter: Plant Line Value: Columbia
  misc_feature: MA Experiment 20001247 PARAMETER Experiment Name: At_Far-red-induction_P Parameter: Timepoint (hr) Value: 1
  misc_feature: MA Experiment 20001247 PARAMETER Experiment Name: At_Far-red-induction_P Parameter: Tissue Value: Whole Plant
  misc_feature: MA Experiment ID: 20001248 Result: Up-regulated in Transcription
  misc_feature: MA Experiment 20001248 PARAMETER Experiment Name: At_Far-red-induction_P Parameter: Age (day) Value: 7
  misc_feature: MA Experiment 20001248 PARAMETER Experiment Name: At_Far-red-induction_P Parameter: Light Value: Far-red vs. White
  misc_feature: MA Experiment 20001248 PARAMETER Experiment Name: At_Far-red-induction_P Parameter: Organism Value: A. thaliana
  misc_feature: MA Experiment 20001248 PARAMETER Experiment Name: At_Far-red-induction_P Parameter: Plant Line Value: Columbia
  misc_feature: MA Experiment 20001248 PARAMETER Experiment Name: At_Far-red-induction_P Parameter: Timepoint (hr) Value: 4
  misc_feature: MA Experiment 20001248 PARAMETER Experiment Name: At_Far-red-induction_P Parameter: Tissue Value: Whole Plant
  misc_feature: MA Experiment ID: 20001450 Result: Up-regulated in Transcription
  misc_feature: MA Experiment 20001450 PARAMETER Experiment Name: At_Far-red-induction_P Parameter: Age (day) Value: 7
  misc_feature: MA Experiment 20001450 PARAMETER Experiment Name: At_Far-red-induction_P Parameter: Light Value: Far-red vs. White
  misc_feature: MA Experiment 20001450 PARAMETER Experiment Name: At_Far-red-induction_P Parameter: Organism Value: A. thaliana
  misc_feature: MA Experiment 20001450 PARAMETER Experiment Name: At_Far-red-induction_P Parameter: Plant Line Value: Columbia
  misc_feature: MA Experiment 20001450 PARAMETER Experiment Name: At_Far-red-induction_P Parameter: Timepoint (hr) Value: 8
  misc_feature: MA Experiment 20001450 PARAMETER Experiment Name: At_Far-red-induction_P Parameter: Tissue Value: Whole Plant
  misc_feature: MA Experiment ID: 20001451 Result: Up-regulated in Transcription
  misc_feature: MA Experiment 20001451 PARAMETER Experiment Name: At_Far-red-induction_P Parameter: Age (day) Value: 7
  misc_feature: MA Experiment 20001451 PARAMETER Experiment Name: At_Far-red-induction_P Parameter: Light Value: Far-red vs. White
  misc_feature: MA Experiment 20001451 PARAMETER Experiment Name: At_Far-red-induction_P Parameter: Organism Value: A. thaliana
  misc_feature: MA Experiment 20001451 PARAMETER Experiment Name: At_Far-red-induction_P Parameter: Plant Line Value: Columbia
  misc_feature: MA Experiment 20001451 PARAMETER Experiment Name: At_Far-red-induction_P Parameter: Timepoint (hr) Value: 24
  misc_feature: MA Experiment 20001451 PARAMETER Experiment Name: At_Far-red-induction_P Parameter: Tissue Value: Whole Plant
gactcattgctcatatcttcttctcaattccaattttgtaatccttatctcaaattaatttctatttttataactacttaatctcaattagaagaagcctgctctctaataacaaaaaaaaaaagccgtttgggatttcttttacacgaacacattcttccgatctttcttgtttttaacttaccggtaataacgaagatatgcagaggtttttctccgccagatcgattctcggttacgccgtcaagacgcggaggaggtctttctcttctcgttcttcgtctctcctattcgacgacactcagttacagtttaaagaaagtgtatccaagtttgcgcaagataatatcgctcctcatgcagaaagaattgataaaactaattcatttccaaaggatgtaaacttatggaagctaatgggtgagtttaatctccatggaatcactgcgccagaggaatatggagggctaggtcttggttacttgtatcattgtattgcaatggaggaaatcagtcgggcctcgggttcagttgctttgtcttatggtgctcattccaacctttgcatcaatcaattggtgaggaatggaactgcagcccaaaaggaaaagtatttgccaaagcttatcagtggagagcatgttggtgctcttgcaatgagtgaacctaatgctggttcagatgttgttggcatgaaatgcaaggctgagaaggtagatggtggttatatactaaatggcaacaagatgtggtgcactaatggtccatctgctgaaacactggttgtttacgcgaaaactgatacaaaagcaggttccaaaggaatcacggctttcatcatagagaaaggaatgaccggattcagtactgctcagaaattggacaaactaggaatgcggggaagcgatacgtgtgagcttgtttttgagaattgcttcgttccagaggaaaatattctagacaaggaaggaaaaggagtgtatgttctgatgtcaggtctggatttggagagacttgttttagcagctgggcccttagggatcatgcaggcatgcctcgacaatgttcttccctatattcgccagagagaacaatttggtcgtccagttggggaatttcagtttatacagggtaaagttgctgatatgtacactgcattacaatcttcaaggtcatacgtttactctgttgcgagggactgtgacaatgggaaagttgacccaaaggactgcgccggaactattctttgtgcggccgagagagcaacgcaggtcgctttacaggcgatacaatgtttaggcggaaatggatacataaacgaatatgcaacaggacgccttctaagagatgcaaagctatatgaaatcggtgcagggacaagcgagatcagaaggattgtcatcggtcgcgagcttttcaaagaagaatagagataagtctgttttctgcattgccaatgcgacattttcattctgtacacgtatatataattcacagtgtccttaataacctcacaataagaaaaatagcttcaagcaatcctctagaaaccatatcaattattagtcacattatgtgtgacatgttatcacgataccagcatgccaatctaacactgacacttctggttaaacttactattttgtc

SEQ ID NO: 103076 - protein, 409 aa, Arabidopsis thaliana
  peptide (1)..(409): Ceres Seq. ID no. 13611932
  misc_feature (257)..(406): Pfam Name: Acyl-CoA dehydrogenase, C-terminal domain Pfam Description: Acyl-CoA dehydrogenase, C-terminal domain
  misc_feature (1)..(409): Homolog of NCBI NO: 15230664 NR Description: isovaleryl-CoA-dehydrogenase precursor (IVD)
  misc_feature (1)..(409): Homolog of NCBI NO: 17064982 NR Description: isovaleryl-CoA-dehydrogenase precursor (IVD)
  misc_feature (1)..(409): Homolog of NCBI NO: 25090618 NR Description: Isovaleryl-CoA dehydrogenase, mitochondrial
  misc_feature (3)..(409): Homolog of NCBI NO: 5869965 NR Description: Isovaleryl-CoA Dehydrogenase; auxin binding
  misc_feature (3)..(409): Homolog of NCBI NO: 5869967 NR Description: auxin binding protein (ABP44); isovaleryl-CoA
  misc_feature (1)..(409): Homolog of NCBI NO: 25453062 NR Description: Isovaleryl-CoA dehydrogenase 1, mitochondrial
  misc_feature (13)..(409): Homolog of NCBI NO: 25453061 NR Description: Isovaleryl-CoA dehydrogenase 2, mitochondrial
  misc_feature (24)..(406): Homolog of NCBI NO: 22963587 NR Description: hypothetical protein [Rhodopseudomonas palustris]
  misc_feature (28)..(408): Homolog of NCBI NO: 23056088 NR Description: hypothetical protein [Geobacter metallireducens]
  misc_feature (32)..(403): Homolog of NCBI NO: 9789985 NR Description: isovaleryl coenzyme A dehydrogenase; isovaleryl precursor [Mus musculus] >gi|7025453|gb|AAF35888.1|AF225989_1 dehydrogenase precursor [Mus musculus] >gi|7689117|gb|AAF67667.1|
MQRFFSARSILGYAVKTRRRSFSSRSSSLLFDDTQLQFKESVSKFAQDNIAPHAERIDKTNSFPKDVNLWKLMGEFNLHGITAPEEYGGLGLGYLYHCIAMEEISRASGSVALSYGAHSNLCINQLVRNGTAAQKEKYLPKLISGEHVGALAMSEPNAGSDVVGMKCKAEKVDGGYILNGNKMWCTNGPSAETLVVYAKTDTKAGSKGITAFIIEKGMTGFSTAQKLDKLGMRGSDTCELVFENCFVPEENILDKEGKGVYVLMSGLDLERLVLAAGPLGIMQACLDNVLPYIRQREQFGRPVGEFQFIQGKVADMYTALQSSRSYVYSVARDCDNGKVDPKDCAGTILCAAERATQVALQAIQCLGGNGYINEYATGRLLRDAKLYEIGAGTSEIRRIVIGRELFKEE

SEQ ID NO: 103077 - protein, 337 aa, Arabidopsis thaliana; identical to SEQ ID NO: 22500
  peptide (1)..(337): Ceres Seq. ID no. 13611933
  misc_feature (185)..(334): Pfam Name: Acyl-CoA dehydrogenase, C-terminal domain Pfam Description: Acyl-CoA dehydrogenase, C-terminal domain
  misc_feature (1)..(337): Homolog of NCBI NO: 15230664 NR Description: isovaleryl-CoA-dehydrogenase precursor (IVD)
  misc_feature (1)..(337): Homolog of NCBI NO: 17064982 NR Description: isovaleryl-CoA-dehydrogenase precursor (IVD)
  misc_feature (1)..(337): Homolog of NCBI NO: 25090618 NR Description: Isovaleryl-CoA dehydrogenase, mitochondrial
  misc_feature (1)..(337): Homolog of NCBI NO: 5869965 NR Description: Isovaleryl-CoA Dehydrogenase; auxin binding
  misc_feature (1)..(337): Homolog of NCBI NO: 5869967 NR Description: auxin binding protein (ABP44); isovaleryl-CoA
  misc_feature (1)..(337): Homolog of NCBI NO: 25453062 NR Description: Isovaleryl-CoA dehydrogenase 1, mitochondrial
  misc_feature (1)..(337): Homolog of NCBI NO: 25453061 NR Description: Isovaleryl-CoA dehydrogenase 2, mitochondrial
  misc_feature (1)..(334): Homolog of NCBI NO: 22963587 NR Description: hypothetical protein [Rhodopseudomonas palustris]
  misc_feature (1)..(336): Homolog of NCBI NO: 23056088 NR Description: hypothetical protein [Geobacter metallireducens]
  misc_feature (1)..(331): Homolog of NCBI NO: 9789985 NR Description: isovaleryl coenzyme A dehydrogenase; isovaleryl precursor [Mus musculus] >gi|7025453|gb|AAF35888.1|AF225989_1 dehydrogenase precursor [Mus musculus] >gi|7689117|gb|AAF67667.1|

SEQ ID NO: 103078 - protein, 309 aa, Arabidopsis thaliana; identical to SEQ ID NO: 22501
  peptide (1)..(309): Ceres Seq. ID no. 13611934
  misc_feature (157)..(306): Pfam Name: Acyl-CoA dehydrogenase, C-terminal domain Pfam Description: Acyl-CoA dehydrogenase, C-terminal domain
  misc_feature (1)..(309): Homolog of NCBI NO: 15230664 NR Description: isovaleryl-CoA-dehydrogenase precursor (IVD)
  misc_feature (1)..(309): Homolog of NCBI NO: 17064982 NR Description: isovaleryl-CoA-dehydrogenase precursor (IVD)
  misc_feature (1)..(309): Homolog of NCBI NO: 25090618 NR Description: Isovaleryl-CoA dehydrogenase, mitochondrial
  misc_feature (1)..(309): Homolog of NCBI NO: 5869965 NR Description: Isovaleryl-CoA Dehydrogenase; auxin binding
  misc_feature (1)..(309): Homolog of NCBI NO: 5869967 NR Description: auxin binding protein (ABP44); isovaleryl-CoA
  misc_feature (1)..(309): Homolog of NCBI NO: 25453062 NR Description: Isovaleryl-CoA dehydrogenase 1, mitochondrial
  misc_feature (1)..(309): Homolog of NCBI NO: 25453061 NR Description: Isovaleryl-CoA dehydrogenase 2, mitochondrial
  misc_feature (1)..(306): Homolog of NCBI NO: 22963587 NR Description: hypothetical protein [Rhodopseudomonas palustris]
  misc_feature (1)..(308): Homolog of NCBI NO: 23056088 NR Description: hypothetical protein [Geobacter metallireducens]
  misc_feature (1)..(303): Homolog of NCBI NO: 9789985 NR Description: isovaleryl coenzyme A dehydrogenase; isovaleryl precursor [Mus musculus] >gi|7025453|gb|AAF35888.1|AF225989_1 dehydrogenase precursor [Mus musculus] >gi|7689117|gb|AAF67667.1|

SEQ ID NO: 103079 - DNA, 1077 bp, Arabidopsis thaliana
  misc_feature (1)..(1077): Ceres Seq. ID no. 13611935
  misc_feature: MA Experiment ID: 108433 Result: Up-regulated in Transcription
  misc_feature: MA Experiment 108433 PARAMETER Experiment Name: At_rhl_Mutant2_cDNA_P Parameter: Age (day) Value: 7
  misc_feature: MA Experiment 108433 PARAMETER Experiment Name: At_rhl_Mutant2_cDNA_P Parameter: Organism Value: A. thaliana
  misc_feature: MA Experiment 108433 PARAMETER Experiment Name: At_rhl_Mutant2_cDNA_P Parameter: Plant Line Value: rhl Mutant vs. wt landsburg
  misc_feature: MA Experiment 108433 PARAMETER Experiment Name: At_rhl_Mutant2_cDNA_P Parameter: Tissue Value: Roots
  misc_feature: MA Experiment ID: 108501 Result: Up-regulated in Transcription
  misc_feature: MA Experiment 108501 PARAMETER Experiment Name: At_ap2_floral_buds_cDNA_P Parameter: Plant Line Value: ap2 (Ler.)
  misc_feature: MA Experiment 108501 PARAMETER Experiment Name: At_ap2_floral_buds_cDNA_P Parameter: Tissue Value: Closed Flower
  misc_feature: MA Experiment ID: 108572 Result: Up-regulated in Transcription
  misc_feature: MA Experiment 108572 PARAMETER Experiment Name: At_Drought_cDNA_P Parameter: Timepoint (hr) Value: 1
  misc_feature: MA Experiment 108572 PARAMETER Experiment Name: At_Drought_cDNA_P Parameter: Tissue Value: Aerial
  misc_feature: MA Experiment 108572 PARAMETER Experiment Name: At_Drought_cDNA_P Parameter: Treatment Value: Drought vs. No Drought
  misc_feature: MA Experiment ID: 108576 Result: Down-regulated in Transcription
  misc_feature: MA Experiment 108576 PARAMETER Experiment Name: At_42deg_Heat_cDNA_P Parameter: Temperature (deg C) Value: 42 vs. 22
  misc_feature: MA Experiment 108576 PARAMETER Experiment Name: At_42deg_Heat_cDNA_P Parameter: Timepoint (hr) Value: 1
  misc_feature: MA Experiment 108576 PARAMETER Experiment Name: At_42deg_Heat_cDNA_P Parameter: Tissue Value: Aerial
  misc_feature: MA Experiment ID: 108608 Result: Up-regulated in Transcription
  misc_feature: MA Experiment 108608 PARAMETER Experiment Name: At_100uM_ABA_cDNA_P Parameter: Timepoint (hr) Value: 1
  misc_feature: MA Experiment 108608 PARAMETER Experiment Name: At_100uM_ABA_cDNA_P Parameter: Tissue Value: Aerial
  misc_feature: MA Experiment 108608 PARAMETER Experiment Name: At_100uM_ABA_cDNA_P Parameter: Treatment Value: 100uM ABA vs. No Treatment
  misc_feature: MA Experiment ID: 20000071 Result: Up-regulated in Transcription
  misc_feature: MA Experiment 20000071 PARAMETER Experiment Name: At_100uM_ABA_Mutants_cDNA_P Parameter: Plant Line Value: CS8104
  misc_feature: MA Experiment 20000071 PARAMETER Experiment Name: At_100uM_ABA_Mutants_cDNA_P Parameter: Timepoint (hr) Value: 6
  misc_feature: MA Experiment 20000071 PARAMETER Experiment Name: At_100uM_ABA_Mutants_cDNA_P Parameter: Tissue Value: Aerial
  misc_feature: MA Experiment 20000071 PARAMETER Experiment Name: At_100uM_ABA_Mutants_cDNA_P Parameter: Treatment Value: 100uM ABA vs. No Treatment
  misc_feature: MA Experiment ID: 20000111 Result: Down-regulated in Transcription
  misc_feature: MA Experiment 20000111 PARAMETER Experiment Name: At_42deg_Heat_cDNA_P Parameter: Temperature (deg C) Value: 42 vs. 22
  misc_feature: MA Experiment 20000111 PARAMETER Experiment Name: At_42deg_Heat_cDNA_P Parameter: Timepoint (hr) Value: 6
  misc_feature: MA Experiment 20000111 PARAMETER Experiment Name: At_42deg_Heat_cDNA_P Parameter: Tissue Value: Aerial
  misc_feature: MA Experiment ID: 20000112 Result: Down-regulated in Transcription
  misc_feature: MA Experiment 20000112 PARAMETER Experiment Name: At_42deg_Heat_cDNA_P Parameter: Temperature (deg C) Value: 42 vs. 22
  misc_feature: MA Experiment 20000112 PARAMETER Experiment Name: At_42deg_Heat_cDNA_P Parameter: Timepoint (hr) Value: 2
  misc_feature: MA Experiment 20000112 PARAMETER Experiment Name: At_42deg_Heat_cDNA_P Parameter: Tissue Value: Aerial
  misc_feature: MA Experiment ID: 20000144 Result: Down-regulated in Transcription
  misc_feature: MA Experiment 20000144 PARAMETER Experiment Name: At_42deg_Heat_cDNA_P Parameter: Temperature (deg C) Value: 42 vs. 22
  misc_feature: MA Experiment 20000144 PARAMETER Experiment Name: At_42deg_Heat_cDNA_P Parameter: Timepoint (hr) Value: 1
  misc_feature: MA Experiment 20000144 PARAMETER Experiment Name: At_42deg_Heat_cDNA_P Parameter: Tissue Value: Aerial
  misc_feature: MA Experiment ID: 20000166 Result: Up-regulated in Transcription
  misc_feature: MA Experiment 20000166 PARAMETER Experiment Name: At_100uM_ABA_P Parameter: Age (day) Value: 14
  misc_feature: MA Experiment 20000166 PARAMETER Experiment Name: At_100uM_ABA_P Parameter: Organism Value: A. thaliana
  misc_feature: MA Experiment 20000166 PARAMETER Experiment Name: At_100uM_ABA_P Parameter: Plant Line Value: WS
  misc_feature: MA Experiment 20000166 PARAMETER Experiment Name: At_100uM_ABA_P Parameter: Timepoint (hr) Value: 1
  misc_feature: MA Experiment 20000166 PARAMETER Experiment Name: At_100uM_ABA_P Parameter: Tissue Value: Aerial
  misc_feature: MA Experiment 20000166 PARAMETER Experiment Name: At_100uM_ABA_P Parameter: Treatment Value: 100uM ABA vs. No Treatment
  misc_feature: MA Experiment ID: 20000171 Result: Down-regulated in Transcription
  misc_feature: MA Experiment 20000171 PARAMETER Experiment Name: At_42deg_Heat_P Parameter: Age (day) Value: 14
  misc_feature: MA Experiment 20000171 PARAMETER Experiment Name: At_42deg_Heat_P Parameter: Organism Value: A. thaliana
  misc_feature: MA Experiment 20000171 PARAMETER Experiment Name: At_42deg_Heat_P Parameter: Plant Line Value: WS
  misc_feature: MA Experiment 20000171 PARAMETER Experiment Name: At_42deg_Heat_P Parameter: Temperature (deg C) Value: 42 vs. 22
  misc_feature: MA Experiment 20000171 PARAMETER Experiment Name: At_42deg_Heat_P Parameter: Timepoint (hr) Value: 1
  misc_feature: MA Experiment 20000171 PARAMETER Experiment Name: At_42deg_Heat_P Parameter: Tissue Value: Aerial
  misc_feature: MA Experiment ID: 20000173 Result: Down-regulated in Transcription
  misc_feature: MA Experiment 20000173 PARAMETER Experiment Name: At_42deg_Heat_P Parameter: Age (day) Value: 14
  misc_feature: MA Experiment 20000173 PARAMETER Experiment Name: At_42deg_Heat_P Parameter: Organism Value: A. thaliana
  misc_feature: MA Experiment 20000173 PARAMETER Experiment Name: At_42deg_Heat_P Parameter: Plant Line Value: WS
  misc_feature: MA Experiment 20000173 PARAMETER Experiment Name: At_42deg_Heat_P Parameter: Temperature (deg C) Value: 42 vs. 22
  misc_feature: MA Experiment 20000173 PARAMETER Experiment Name: At_42deg_Heat_P Parameter: Timepoint (hr) Value: 6
  misc_feature: MA Experiment 20000173 PARAMETER Experiment Name: At_42deg_Heat_P Parameter: Tissue Value: Aerial
  misc_feature: MA Experiment ID: 20000185 Result: Up-regulated in Transcription
  misc_feature: MA Experiment 20000185 PARAMETER Experiment Name: At_Roots__P Parameter: Age (day) Value: 7 vs. 21
  misc_feature: MA Experiment 20000185 PARAMETER Experiment Name: At_Roots__P Parameter: Organism Value: A. thaliana
  misc_feature: MA Experiment 20000185 PARAMETER Experiment Name: At_Roots__P Parameter: Tissue Value: Roots vs. Whole Plant
  misc_feature: MA Experiment ID: 20000224 Result: Down-regulated in Transcription
  misc_feature: MA Experiment ID: 20000439 Result: Up-regulated in Transcription
  misc_feature: MA Experiment 20000439 PARAMETER Experiment Name: At_Roots__P Parameter: Age (day) Value: 14 vs. 21
  misc_feature: MA Experiment 20000439 PARAMETER Experiment Name: At_Roots__P Parameter: Organism Value: A. thaliana
  misc_feature: MA Experiment 20000439 PARAMETER Experiment Name: At_Roots__P Parameter: Tissue Value: Roots vs. Whole Plant
  misc_feature: MA Experiment ID: 20000451 Result: Down-regulated in Transcription
  misc_feature: MA Experiment 20000451 PARAMETER Experiment Name: At_CS6879_Shoots-Roots_P Parameter: Age (day) Value: 14
  misc_feature: MA Experiment 20000451 PARAMETER Experiment Name: At_CS6879_Shoots-Roots_P Parameter: Organism Value: A. thaliana
  misc_feature: MA Experiment 20000451 PARAMETER Experiment Name: At_CS6879_Shoots-Roots_P Parameter: Plant Line Value: CS6879 vs. WS
  misc_feature: MA Experiment 20000451 PARAMETER Experiment Name: At_CS6879_Shoots-Roots_P Parameter: Tissue Value: Roots
  misc_feature: MA Experiment ID: 20000496 Result: Down-regulated in Transcription
  misc_feature: MA Experiment 20000496 PARAMETER Experiment Name: At_Guard_Cells_P Parameter: Harvest Date Value: 7/19/2002
  misc_feature: MA Experiment 20000496 PARAMETER Experiment Name: At_Guard_Cells_P Parameter: Organism Value: Canola
  misc_feature: MA Experiment 20000496 PARAMETER Experiment Name: At_Guard_Cells_P Parameter: Tissue Value: Guard Cells vs. Leaves
  misc_feature: MA Experiment ID: 20001557 Result: Down-regulated in Transcription
  misc_feature: MA Experiment 20001557 PARAMETER Experiment Name: At_Drought_Soil_Dry_P Parameter: Age (day) Value: 27
  misc_feature: MA Experiment 20001557 PARAMETER Experiment Name: At_Drought_Soil_Dry_P Parameter: Organism Value: A. thaliana
  misc_feature: MA Experiment 20001557 PARAMETER Experiment Name: At_Drought_Soil_Dry_P Parameter: Plant Line Value: WS
  misc_feature: MA Experiment 20001557 PARAMETER Experiment Name: At_Drought_Soil_Dry_P Parameter: Post Timepoint (hr) Value: 3
  misc_feature: MA Experiment 20001557 PARAMETER Experiment Name: At_Drought_Soil_Dry_P Parameter: Post-Treatment Value: Re-Water vs. No Drought
  misc_feature: MA Experiment 20001557 PARAMETER Experiment Name: At_Drought_Soil_Dry_P Parameter: Timepoint (day) Value: 13
  misc_feature: MA Experiment 20001557 PARAMETER Experiment Name: At_Drought_Soil_Dry_P Parameter: Treatment Value: Drought vs. No Drought
  misc_feature: MA Experiment ID: 20001558 Result: Down-regulated in Transcription
  misc_feature: MA Experiment 20001558 PARAMETER Experiment Name: At_Drought_Soil_Dry_P Parameter: Age (day) Value: 27
  misc_feature: MA Experiment 20001558 PARAMETER Experiment Name: At_Drought_Soil_Dry_P Parameter: Organism Value: A. thaliana
  misc_feature: MA Experiment 20001558 PARAMETER Experiment Name: At_Drought_Soil_Dry_P Parameter: Plant Line Value: WS
  misc_feature: MA Experiment 20001558 PARAMETER Experiment Name: At_Drought_Soil_Dry_P Parameter: Post Timepoint (hr) Value: 6
  misc_feature: MA Experiment 20001558 PARAMETER Experiment Name: At_Drought_Soil_Dry_P Parameter: Post-Treatment Value: Re-Water vs. No Drought
  misc_feature: MA Experiment 20001558 PARAMETER Experiment Name: At_Drought_Soil_Dry_P Parameter: Timepoint (day) Value: 13
  misc_feature: MA Experiment 20001558 PARAMETER Experiment Name: At_Drought_Soil_Dry_P Parameter: Treatment Value: Drought vs. No Drought
  misc_feature: MA Experiment ID: 20001560 Result: Down-regulated in Transcription
  misc_feature: MA Experiment 20001560 PARAMETER Experiment Name: At_Drought_Soil_Dry_P Parameter: Age (day) Value: 28
  misc_feature: MA Experiment 20001560 PARAMETER Experiment Name: At_Drought_Soil_Dry_P Parameter: Organism Value: A. thaliana
  misc_feature: MA Experiment 20001560 PARAMETER Experiment Name: At_Drought_Soil_Dry_P Parameter: Plant Line Value: WS
  misc_feature: MA Experiment 20001560 PARAMETER Experiment Name: At_Drought_Soil_Dry_P Parameter: Post Timepoint (hr) Value: None
  misc_feature: MA Experiment 20001560 PARAMETER Experiment Name: At_Drought_Soil_Dry_P Parameter: Post-Treatment Value: None
  misc_feature: MA Experiment 20001560 PARAMETER Experiment Name: At_Drought_Soil_Dry_P Parameter: Timepoint (day) Value: 14
  misc_feature: MA Experiment 20001560 PARAMETER Experiment Name: At_Drought_Soil_Dry_P Parameter: Treatment Value: Drought vs. No Drought
  misc_feature: MA Experiment ID: 20001905 Result: Down-regulated in Transcription
  misc_feature: MA Experiment 20001905 PARAMETER Experiment Name: At_Drought_Reproduction_P Parameter: Age (day) Value: 40
  misc_feature: MA Experiment 20001905 PARAMETER Experiment Name: At_Drought_Reproduction_P Parameter: Organism Value: A. thaliana
  misc_feature: MA Experiment 20001905 PARAMETER Experiment Name: At_Drought_Reproduction_P Parameter: Plant Line Value: WS
  misc_feature: MA Experiment 20001905 PARAMETER Experiment Name: At_Drought_Reproduction_P Parameter: Timepoint (day) Value: 10
  misc_feature: MA Experiment 20001905 PARAMETER Experiment Name: At_Drought_Reproduction_P Parameter: Tissue Value: Rosettes
  misc_feature: MA Experiment 20001905 PARAMETER Experiment Name: At_Drought_Reproduction_P Parameter: Treatment Value: Drought vs. No Drought
  misc_feature: MA Experiment ID: 20001911 Result: Down-regulated in Transcription
  misc_feature: MA Experiment 20001911 PARAMETER Experiment Name: At_Drought_Reproduction_P Parameter: Age (day) Value: 40
  misc_feature: MA Experiment 20001911 PARAMETER Experiment Name: At_Drought_Reproduction_P Parameter: Organism Value: A. thaliana
  misc_feature: MA Experiment 20001911 PARAMETER Experiment Name: At_Drought_Reproduction_P Parameter: Plant Line Value: WS
  misc_feature: MA Experiment 20001911 PARAMETER Experiment Name: At_Drought_Reproduction_P Parameter: Timepoint (day) Value: 10
  misc_feature: MA Experiment 20001911 PARAMETER Experiment Name: At_Drought_Reproduction_P Parameter: Tissue Value: Flowers
  misc_feature: MA Experiment 20001911 PARAMETER Experiment Name: At_Drought_Reproduction_P Parameter: Treatment Value: Drought vs. No Drought
atgtcttcatcacctcttctttaacgcctctggctctgcatttctcagtctttttgcacaagaaacaaagctcaggaaaacctcaaaaccctaagctatgagaacaagcaaccatctcataggtttagtcaacttcctcactttcctcctctcaataccaatcctcggcggtggaatatggttaagcagccgagctaactccaccgactgtttaagattccttcaatggcctctcatcgtcatcggaatctcaatcatggtcgtatctttagctggattcgctggagcttgttaccgtaacaagttccttatgtggctatacctagtagtcatgcttctcatcatcgctgctcttatcggtttcatcatcttcgcttacgcggttacagataaaggatccggtcgaaccgtacttaaccggggttatcttgactattatcttgaagattactctggttggttgaaagatcgagtttctgatgatagctattggggtaaaattagttcttgtcttagagattctggtgcttgtagaaagattggaagaaattttaatggtgtacctgaaactgctgatatgttcttccttagaagacttagccctgttgagtccggttgttgcaagccaccaacagattgcggtttttcatatgtgaatgagaccggatgggacacgagaggagggatgataggaccgaaccaggactgtatggtgtggagcaacgaccagagcatgctctgttatcagtgtagttcttgtaaagctggtgttcttgggagtttgaagaagagttggagaaaagtatcggtgatcaacattgtggtacttatcattctagttatcttttacgttatcgcttatgcagcttataggaatgtcaagaggatcgataacgatgaaccggctggtgaagctaggatgacaaaatcacatcctagtcatttccatctttgatcaaaatttggaacagttcaaaaaaatgtatcgaggctttgatttatgtttaaaggttttagtacttttgtgtatgtttttggtatgtaacacatttttttgtgtgtatattatttatgttg

SEQ ID NO: 103080 - protein, 285 aa, Arabidopsis thaliana
  peptide (1)..(285): Ceres Seq. ID no. 13611936
  misc_feature (3)..(247): Pfam Name: Tetraspanin family Pfam Description: Tetraspanin family
  misc_feature (1)..(285): Homolog of NCBI NO: 15231187 NR Description: senescence-associated protein family [Arabidopsis
  misc_feature (1)..(276): Homolog of NCBI NO: 15238641 NR Description: senescence-associated protein family [Arabidopsis
  misc_feature (2)..(260): Homolog of NCBI NO: 3551954 NR Description: senescence-associated protein 5 [Hemerocallis
  misc_feature (2)..(266): Homolog of NCBI NO: 20197174 NR Description: hypothetical protein [Arabidopsis thaliana]
  misc_feature (1)..(266): Homolog of NCBI NO: 29367553 NR Description: senescence-associated protein-like protein [Oryza
  misc_feature (1)..(263): Homolog of NCBI NO: 15234374 NR Description: senescence-associated protein, putative
  misc_feature (1)..(262): Homolog of NCBI NO: 15234743 NR Description: senescence-associated protein family [Arabidopsis
  misc_feature (1)..(262): Homolog of NCBI NO: 21537169 NR Description: senescence-associated protein-like protein
  misc_feature (1)..(265): Homolog of NCBI NO: 15224802 NR Description: senescence-associated protein- related
  misc_feature (1)..(265): Homolog of NCBI NO: 15237490 NR Description: senescence-associated protein, putative
MRTSNHLIGLVNFLTFLLSIPILGGGIWLSSRANSTDCLRFLQWPLIVIGISIMVVSLAGFAGACYRNKFLMWLYLVVMLLIIAALIGFIIFAYAVTDKGSGRTVLNRGYLDYYLEDYSGWLKDRVSDDSYWGKISSCLRDSGACRKIGRNFNGVPETADMFFLRRLSPVESGCCKPPTDCGFSYVNETGWDTRGGMIGPNQDCMVWSNDQSMLCYQCSSCKAGVLGSLKKSWRKVSVINIVVLIILVIFYVIAYAAYRNVKRIDNDEPAGEARMTKSHPSHFHL

SEQ ID NO: 103081 - protein, 232 aa, Arabidopsis thaliana
  peptide (1)..(232): Ceres Seq. ID no. 13611937
  misc_feature (1)..(194): Pfam Name: Tetraspanin family Pfam Description: Tetraspanin family
  misc_feature (1)..(232): Homolog of NCBI NO: 15231187 NR Description: senescence-associated protein family [Arabidopsis
  misc_feature (1)..(223): Homolog of NCBI NO: 15238641 NR Description: senescence-associated protein family [Arabidopsis
  misc_feature (1)..(207): Homolog of NCBI NO: 3551954 NR Description: senescence-associated protein 5 [Hemerocallis
  misc_feature (1)..(213): Homolog of NCBI NO: 20197174 NR Description: hypothetical protein [Arabidopsis thaliana]
  misc_feature (1)..(213): Homolog of NCBI NO: 29367553 NR Description: senescence-associated protein-like protein [Oryza
  misc_feature (1)..(210): Homolog of NCBI NO: 15234374 NR Description: senescence-associated protein, putative
  misc_feature (1)..(209): Homolog of NCBI NO: 15234743 NR Description: senescence-associated protein family [Arabidopsis
  misc_feature (1)..(209): Homolog of NCBI NO: 21537169 NR Description: senescence-associated protein-like protein
  misc_feature (1)..(212): Homolog of NCBI NO: 15224802 NR Description: senescence-associated protein- related
  misc_feature (1)..(212): Homolog of NCBI NO: 15237490 NR Description: senescence-associated protein, putative
MVVSLAGFAGACYRNKFLMWLYLVVMLLIIAALIGFIIFAYAVTDKGSGRTVLNRGYLDYYLEDYSGWLKDRVSDDSYWGKISSCLRDSGACRKIGRNFNGVPETADMFFLRRLSPVESGCCKPPTDCGFSYVNETGWDTRGGMIGPNQDCMVWSNDQSMLCYQCSSCKAGVLGSLKKSWRKVSVINIVVLIILVIFYVIAYAAYRNVKRIDNDEPAGEARMTKSHPSHFHL

SEQ ID NO: 103082 - protein, 214 aa, Arabidopsis thaliana
  peptide (1)..(214): Ceres Seq. ID no. 13611938
  misc_feature (1)..(176): Pfam Name: Tetraspanin family Pfam Description: Tetraspanin family
  misc_feature (1)..(214): Homolog of NCBI NO: 15231187 NR Description: senescence-associated protein family [Arabidopsis
  misc_feature (1)..(205): Homolog of NCBI NO: 15238641 NR Description: senescence-associated protein family [Arabidopsis
  misc_feature (1)..(189): Homolog of NCBI NO: 3551954 NR Description: senescence-associated protein 5 [Hemerocallis
  misc_feature (1)..(195): Homolog of NCBI NO: 20197174 NR Description: hypothetical protein [Arabidopsis thaliana]
  misc_feature (1)..(195): Homolog of NCBI NO: 29367553 NR Description: senescence-associated protein-like protein [Oryza
  misc_feature (1)..(192): Homolog of NCBI NO: 15234374 NR Description: senescence-associated protein, putative
  misc_feature (1)..(191): Homolog of NCBI NO: 15234743 NR Description: senescence-associated protein family [Arabidopsis
  misc_feature (1)..(191): Homolog of NCBI NO: 21537169 NR Description: senescence-associated protein-like protein
  misc_feature (1)..(194): Homolog of NCBI NO: 15224802 NR Description: senescence-associated protein- related
  misc_feature (1)..(194): Homolog of NCBI NO: 15237490 NR Description: senescence-associated protein, putative
MWLYLVVMLLIIAALIGFIIFAYAVTDKGSGRTVLNRGYLDYYLEDYSGWLKDRVSDDSYWGKISSCLRDSGACRKIGRNFNGVPETADMFFLRRLSPVESGCCKPPTDCGFSYVNETGWDTRGGMIGPNQDCMVWSNDQSMLCYQCSSCKAGVLGSLKKSWRKVSVINIVVLIILVIFYVIAYAAYRNVKRIDNDEPAGEARMTKSHPSHFHL

SEQ ID NO: 103083 - DNA, 1039 bp, Arabidopsis thaliana
  misc_feature (1)..(1039): Ceres Seq. ID no. 13611939
  misc_feature: MA Experiment ID: 108462 Result: Up-regulated in Transcription
  misc_feature: MA Experiment 108462 PARAMETER Experiment Name: At_Germinating_Seeds_cDNA_P Parameter: Age (day) Value: 2 vs. 0
  misc_feature: MA Experiment 108462 PARAMETER Experiment Name: At_Germinating_Seeds_cDNA_P Parameter: Tissue Value: Germinating Seeds
  misc_feature: MA Experiment ID: 108463 Result: Up-regulated in Transcription
  misc_feature: MA Experiment 108463 PARAMETER Experiment Name: At_Germinating_Seeds_cDNA_P Parameter: Age (day) Value: 3 vs. 0
  misc_feature: MA Experiment 108463 PARAMETER Experiment Name: At_Germinating_Seeds_cDNA_P Parameter: Tissue Value: Germinating Seeds
  misc_feature: MA Experiment ID: 108464 Result: Up-regulated in Transcription
  misc_feature: MA Experiment 108464 PARAMETER Experiment Name: At_Germinating_Seeds_cDNA_P Parameter: Age (day) Value: 4 vs. 0
  misc_feature: MA Experiment 108464 PARAMETER Experiment Name: At_Germinating_Seeds_cDNA_P Parameter: Tissue Value: Germinating Seeds
  misc_feature: MA Experiment ID: 108489 Result: Up-regulated in Transcription
  misc_feature: MA Experiment ID: 108576 Result: Down-regulated in Transcription
  misc_feature: MA Experiment 108576 PARAMETER Experiment Name: At_42deg_Heat_cDNA_P Parameter: Temperature (deg C) Value: 42 vs. 22
  misc_feature: MA Experiment 108576 PARAMETER Experiment Name: At_42deg_Heat_cDNA_P Parameter: Timepoint (hr) Value: 1
  misc_feature: MA Experiment 108576 PARAMETER Experiment Name: At_42deg_Heat_cDNA_P Parameter: Tissue Value: Aerial
  misc_feature: MA Experiment ID: 108577 Result: Down-regulated in Transcription
  misc_feature: MA Experiment 108577 PARAMETER Experiment Name: At_42deg_Heat_cDNA_P Parameter: Temperature (deg C) Value: 42 vs. 22
  misc_feature: MA Experiment 108577 PARAMETER Experiment Name: At_42deg_Heat_cDNA_P Parameter: Timepoint (hr) Value: 6
  misc_feature: MA Experiment 108577 PARAMETER Experiment Name: At_42deg_Heat_cDNA_P Parameter: Tissue Value: Aerial
  misc_feature: MA Experiment ID: 108579 Result: Down-regulated in Transcription
  misc_feature: MA Experiment 108579 PARAMETER Experiment Name: At_4deg_Cold_cDNA_P Parameter: Temperature (deg C) Value: 4 vs. 22
  misc_feature: MA Experiment 108579 PARAMETER Experiment Name: At_4deg_Cold_cDNA_P Parameter: Timepoint (hr) Value: 6
  misc_feature: MA Experiment 108579 PARAMETER Experiment Name: At_4deg_Cold_cDNA_P Parameter: Tissue Value: Aerial
  misc_feature: MA Experiment ID: 108595 Result: Down-regulated in Transcription
  misc_feature: MA Experiment 108595 PARAMETER Experiment Name: At_Ler-pi_Ovule_cDNA_P Parameter: Plant Line Value: null
  misc_feature: MA Experiment ID: 108607 Result: Down-regulated in Transcription
  misc_feature: MA Experiment 108607 PARAMETER Experiment Name: At_100uM_ABA_cDNA_P Parameter: Timepoint (hr) Value: 4
  misc_feature: MA Experiment 108607 PARAMETER Experiment Name: At_100uM_ABA_cDNA_P Parameter: Tissue Value: Aerial
  misc_feature: MA Experiment 108607 PARAMETER Experiment Name: At_100uM_ABA_cDNA_P Parameter: Treatment Value: 100uM ABA vs. No Treatment
  misc_feature: MA Experiment ID: 108608 Result: Down-regulated in Transcription
  misc_feature: MA Experiment 108608 PARAMETER Experiment Name: At_100uM_ABA_cDNA_P Parameter: Timepoint (hr) Value: 1
  misc_feature: MA Experiment 108608 PARAMETER Experiment Name: At_100uM_ABA_cDNA_P Parameter: Tissue Value: Aerial
  misc_feature: MA Experiment 108608 PARAMETER Experiment Name: At_100uM_ABA_cDNA_P Parameter: Treatment Value: 100uM ABA vs. No Treatment
  misc_feature: MA Experiment ID: 20000069 Result: Down-regulated in Transcription
  misc_feature: MA Experiment 20000069 PARAMETER Experiment Name: At_100uM_ABA_Mutants_cDNA_P Parameter: Plant Line Value: CS23
  misc_feature: MA Experiment 20000069 PARAMETER Experiment Name: At_100uM_ABA_Mutants_cDNA_P Parameter: Timepoint (hr) Value: 6
  misc_feature: MA Experiment 20000069 PARAMETER Experiment Name: At_100uM_ABA_Mutants_cDNA_P Parameter: Tissue Value: Aerial
  misc_feature: MA Experiment 20000069 PARAMETER Experiment Name: At_100uM_ABA_Mutants_cDNA_P Parameter: Treatment Value: 100uM ABA vs. No Treatment
  misc_feature: MA Experiment ID: 20000070 Result: Down-regulated in Transcription
  misc_feature: MA Experiment 20000070 PARAMETER Experiment Name: At_100uM_ABA_Mutants_cDNA_P Parameter: Plant Line Value: CS24
  misc_feature: MA Experiment 20000070 PARAMETER Experiment Name: At_100uM_ABA_Mutants_cDNA_P Parameter: Timepoint (hr) Value: 6
  misc_feature: MA Experiment 20000070 PARAMETER Experiment Name: At_100uM_ABA_Mutants_cDNA_P Parameter: Tissue Value: Aerial
  misc_feature: MA Experiment 20000070 PARAMETER Experiment Name: At_100uM_ABA_Mutants_cDNA_P Parameter: Treatment Value: 100uM ABA vs. No Treatment
  misc_feature: MA Experiment ID: 20000087 Result: Down-regulated in Transcription
  misc_feature: MA Experiment 20000087 PARAMETER Experiment Name: At_100uM_ABA_Mutants_cDNA_P Parameter: Plant Line Value: WS
  misc_feature: MA Experiment 20000087 PARAMETER Experiment Name: At_100uM_ABA_Mutants_cDNA_P Parameter: Timepoint (hr) Value: 6
  misc_feature: MA Experiment 20000087 PARAMETER Experiment Name: At_100uM_ABA_Mutants_cDNA_P Parameter: Tissue Value: Aerial
  misc_feature: MA Experiment 20000087 PARAMETER Experiment Name: At_100uM_ABA_Mutants_cDNA_P Parameter: Treatment Value: 100uM ABA vs. No Treatment
  misc_feature: MA Experiment ID: 20000166 Result: Down-regulated in Transcription
  misc_feature: MA Experiment 20000166 PARAMETER Experiment Name: At_100uM_ABA_P Parameter: Age (day) Value: 14
  misc_feature: MA Experiment 20000166 PARAMETER Experiment Name: At_100uM_ABA_P Parameter: Organism Value: A. thaliana
  misc_feature: MA Experiment 20000166 PARAMETER Experiment Name: At_100uM_ABA_P Parameter: Plant Line Value: WS
  misc_feature: MA Experiment 20000166 PARAMETER Experiment Name: At_100uM_ABA_P Parameter: Timepoint (hr) Value: 1
  misc_feature: MA Experiment 20000166 PARAMETER Experiment Name: At_100uM_ABA_P Parameter: Tissue Value: Aerial
  misc_feature: MA Experiment 20000166 PARAMETER Experiment Name: At_100uM_ABA_P Parameter: Treatment Value: 100uM ABA vs. No Treatment
  misc_feature: MA Experiment ID: 20000180 Result: Up-regulated in Transcription
  misc_feature: MA Experiment 20000180 PARAMETER Experiment Name: At_Germinating_Seeds_P Parameter: Age (hr) Value: 24 vs. 0
  misc_feature: MA Experiment 20000180 PARAMETER Experiment Name: At_Germinating_Seeds_P Parameter: Tissue Value: Germinating Seeds
  misc_feature: MA Experiment ID: 20000184 Result: Up-regulated in Transcription
  misc_feature: MA Experiment 20000184 PARAMETER Experiment Name: At_Shoots__P Parameter: Age (day) Value: 7
  misc_feature: MA Experiment 20000184 PARAMETER Experiment Name: At_Shoots__P Parameter: Tissue Value: Shoots vs. Whole Plant
  misc_feature: MA Experiment ID: 20000185 Result: Up-regulated in Transcription
  misc_feature: MA Experiment 20000185 PARAMETER Experiment Name: At_Roots__P Parameter: Age (day) Value: 7 vs. 21
  misc_feature: MA Experiment 20000185 PARAMETER Experiment Name: At_Roots__P Parameter: Organism Value: A. thaliana
  misc_feature: MA Experiment 20000185 PARAMETER Experiment Name: At_Roots__P Parameter: Tissue Value: Roots vs. Whole Plant
  misc_feature: MA Experiment ID: 20000234 Result: Down-regulated in Transcription
  misc_feature: MA Experiment 20000234 PARAMETER Experiment Name: At_Siliques_P Parameter: Age (day) Value: 21
  misc_feature: MA Experiment 20000234 PARAMETER Experiment Name: At_Siliques_P Parameter: Organism Value: A. thaliana
  misc_feature: MA Experiment 20000234 PARAMETER Experiment Name: At_Siliques_P Parameter: Plant Line Value: WS
  misc_feature: MA Experiment 20000234 PARAMETER Experiment Name: At_Siliques_P Parameter: Tissue Value: Less Than 5mm Siliques vs. Whole Plant
  misc_feature: MA Experiment ID: 20000235 Result: Down-regulated in Transcription
  misc_feature: MA Experiment 20000235 PARAMETER Experiment Name: At_Siliques_P Parameter: Age (day) Value: 21
  misc_feature: MA Experiment 20000235 PARAMETER Experiment Name: At_Siliques_P Parameter: Organism Value: A. thaliana
  misc_feature: MA Experiment 20000235 PARAMETER Experiment Name: At_Siliques_P Parameter: Plant Line Value: WS
  misc_feature: MA Experiment 20000235 PARAMETER Experiment Name: At_Siliques_P Parameter: Tissue Value: 5-10mm Siliques vs. Whole Plant
  misc_feature: MA Experiment ID: 20000264 Result: Down-regulated in Transcription
  misc_feature: MA Experiment 20000264 PARAMETER Experiment Name: At_Open_Flower_P Parameter: Age (day) Value: 21
  misc_feature: MA Experiment 20000264 PARAMETER Experiment Name: At_Open_Flower_P Parameter: Plant Line Value: WS
  misc_feature: MA Experiment 20000264 PARAMETER Experiment Name: At_Open_Flower_P Parameter: Tissue Value: Open Flower vs. Whole Plant
  misc_feature: MA Experiment ID: 20000265 Result: Down-regulated in Transcription
  misc_feature: MA Experiment 20000265 PARAMETER Experiment Name: At_Open_Flower_P Parameter: Age (day) Value: 21
  misc_feature: MA Experiment 20000265 PARAMETER Experiment Name: At_Open_Flower_P Parameter: Plant Line Value: WS
  misc_feature: MA Experiment 20000265 PARAMETER Experiment Name: At_Open_Flower_P Parameter: Tissue Value: Closed Flower vs. Whole Plant
  misc_feature: MA Experiment ID: 20000268 Result: Down-regulated in Transcription
  misc_feature: MA Experiment 20000268 PARAMETER Experiment Name: At_100mM_NaCl__P Parameter: Age (day) Value: 14
  misc_feature: MA Experiment 20000268 PARAMETER Experiment Name: At_100mM_NaCl__P Parameter: Organism Value: A. thaliana
  misc_feature: MA Experiment 20000268 PARAMETER Experiment Name: At_100mM_NaCl__P Parameter: Plant Line Value: WS
  misc_feature: MA Experiment 20000268 PARAMETER Experiment Name: At_100mM_NaCl__P Parameter: Timepoint (hr) Value: 6
  misc_feature: MA Experiment 20000268 PARAMETER Experiment Name: At_100mM_NaCl__P Parameter: Tissue Value: Whole Plant
  misc_feature: MA Experiment 20000268 PARAMETER Experiment Name: At_100mM_NaCl__P Parameter: Treatment Value: 100mM NaCl vs. No Treatment
  misc_feature: MA Experiment ID: 20000269 Result: Down-regulated in Transcription
  misc_feature: MA Experiment 20000269 PARAMETER Experiment Name: At_1mM_KNO3_L-vs-H_Roots_P Parameter: Age (day) Value: 7,10,12
  misc_feature: MA Experiment 20000269 PARAMETER Experiment Name: At_1mM_KNO3_L-vs-H_Roots_P Parameter: Organism Value: A. thaliana
  misc_feature: MA Experiment 20000269 PARAMETER Experiment Name: At_1mM_KNO3_L-vs-H_Roots_P Parameter: Plant Line Value: WS
  misc_feature: MA Experiment 20000269 PARAMETER Experiment Name: At_1mM_KNO3_L-vs-H_Roots_P Parameter: Timepoint (day) Value: 7,10,12
  misc_feature: MA Experiment 20000269 PARAMETER Experiment Name: At_1mM_KNO3_L-vs-H_Roots_P Parameter: Tissue Value: Roots
  misc_feature: MA Experiment 20000269 PARAMETER Experiment Name: At_1mM_KNO3_L-vs-H_Roots_P Parameter: Treatment Value: 1mM KNO3 vs. 50mM KNO3
  misc_feature: MA Experiment ID: 20000286 Result: Down-regulated in Transcription
  misc_feature: MA Experiment 20000286 PARAMETER Experiment Name: At_Open_Flower_P Parameter: Age (day) Value: 21
  misc_feature: MA Experiment 20000286 PARAMETER Experiment Name: At_Open_Flower_P Parameter: Plant Line Value: WS
  misc_feature: MA Experiment 20000286 PARAMETER Experiment Name: At_Open_Flower_P Parameter: Tissue Value: Half Open vs. Whole Plant
  misc_feature: MA Experiment ID: 20000308 Result: Down-regulated in Transcription
  misc_feature: MA Experiment 20000308 PARAMETER Experiment Name: At_100mM_NaCl__P Parameter: Age (day) Value: 17
  misc_feature: MA Experiment 20000308 PARAMETER Experiment Name: At_100mM_NaCl__P Parameter: Organism Value: A. thaliana
  misc_feature: MA Experiment 20000308 PARAMETER Experiment Name: At_100mM_NaCl__P Parameter: Plant Line Value: WS
  misc_feature: MA Experiment 20000308 PARAMETER Experiment Name: At_100mM_NaCl__P Parameter: Timepoint (hr) Value: 72
  misc_feature: MA Experiment 20000308 PARAMETER Experiment Name: At_100mM_NaCl__P Parameter: Tissue Value: Whole Plant
  misc_feature: MA Experiment 20000308 PARAMETER Experiment Name: At_100mM_NaCl__P Parameter: Treatment Value: 100mM NaCl vs. No Treatment
  misc_feature: MA Experiment ID: 20000436 Result: Down-regulated in Transcription
  misc_feature: MA Experiment 20000436 PARAMETER Experiment Name: At_Drought_P Parameter: Age (day) Value: 7
  misc_feature: MA Experiment 20000436 PARAMETER Experiment Name: At_Drought_P Parameter: Organism Value: A. thaliana
  misc_feature: MA Experiment 20000436 PARAMETER Experiment Name: At_Drought_P Parameter: Plant Line Value: WS
  misc_feature: MA Experiment 20000436 PARAMETER Experiment Name: At_Drought_P Parameter: Timepoint (hr) Value: 12
  misc_feature: MA Experiment 20000436 PARAMETER Experiment Name: At_Drought_P Parameter: Tissue Value: Whole Plant
  misc_feature: MA Experiment 20000436 PARAMETER Experiment Name: At_Drought_P Parameter: Treatment Value: Drought vs. No Drought
  misc_feature: MA Experiment ID: 20000437 Result: Down-regulated in Transcription
  misc_feature: MA Experiment 20000437 PARAMETER Experiment Name: At_Drought_P Parameter: Age (day) Value: 8
  misc_feature: MA Experiment 20000437 PARAMETER Experiment Name: At_Drought_P Parameter: Organism Value: A. thaliana
  misc_feature: MA Experiment 20000437 PARAMETER Experiment Name: At_Drought_P Parameter: Plant Line Value: WS
  misc_feature: MA Experiment 20000437 PARAMETER Experiment Name: At_Drought_P Parameter: Timepoint (hr) Value: 24
  misc_feature: MA Experiment 20000437 PARAMETER Experiment Name: At_Drought_P Parameter: Tissue Value: Whole Plant
  misc_feature: MA Experiment 20000437 PARAMETER Experiment Name: At_Drought_P Parameter: Treatment Value: Drought vs. No Drought
  misc_feature: MA Experiment ID: 20000439 Result: Up-regulated in Transcription
  misc_feature: MA Experiment 20000439 PARAMETER Experiment Name: At_Roots__P Parameter: Age (day) Value: 14 vs. 21
  misc_feature: MA Experiment 20000439 PARAMETER Experiment Name: At_Roots__P Parameter: Organism Value: A. thaliana
  misc_feature: MA Experiment 20000439 PARAMETER Experiment Name: At_Roots__P Parameter: Tissue Value: Roots vs. Whole Plant
  misc_feature: MA Experiment ID: 20000453 Result: Down-regulated in Transcription
  misc_feature: MA Experiment 20000453 PARAMETER Experiment Name: At_100uM_ABA_P Parameter: Age (day) Value: 15
  misc_feature: MA Experiment 20000453 PARAMETER Experiment Name: At_100uM_ABA_P Parameter: Organism Value: A. thaliana
  misc_feature: MA Experiment 20000453 PARAMETER Experiment Name: At_100uM_ABA_P Parameter: Plant Line Value: WS
  misc_feature: MA Experiment 20000453 PARAMETER Experiment Name: At_100uM_ABA_P Parameter: Timepoint (hr) Value: 24
  misc_feature: MA Experiment 20000453 PARAMETER Experiment Name: At_100uM_ABA_P Parameter: Tissue Value: Aerial
  misc_feature: MA Experiment 20000453 PARAMETER Experiment Name: At_100uM_ABA_P Parameter: Treatment Value: 100uM ABA vs. No Treatment
  misc_feature: MA Experiment ID: 20000455 Result: Down-regulated in Transcription
  misc_feature: MA Experiment 20000455 PARAMETER Experiment Name: At_100uM_ABA_P Parameter: Age (day) Value: 16
  misc_feature: MA Experiment 20000455 PARAMETER Experiment Name: At_100uM_ABA_P Parameter: Organism Value: A. thaliana
  misc_feature: MA Experiment 20000455 PARAMETER Experiment Name: At_100uM_ABA_P Parameter: Plant Line Value: WS
  misc_feature: MA Experiment 20000455 PARAMETER Experiment Name: At_100uM_ABA_P Parameter: Timepoint (hr) Value: 48
  misc_feature: MA Experiment 20000455 PARAMETER Experiment Name: At_100uM_ABA_P Parameter: Tissue Value: Aerial
  misc_feature: MA Experiment 20000455 PARAMETER Experiment Name: At_100uM_ABA_P Parameter: Treatment Value: 100uM ABA vs. No Treatment
  misc_feature: MA Experiment ID: 20000709 Result: Up-regulated in Transcription
  misc_feature: MA Experiment 20000709 PARAMETER Experiment Name: At_15mM_NH4NO3_L-to-H_P Parameter: Age (hr) Value: 14
  misc_feature: MA Experiment 20000709 PARAMETER Experiment Name: At_15mM_NH4NO3_L-to-H_P Parameter: Organism Value: A. thaliana
  misc_feature: MA Experiment 20000709 PARAMETER Experiment Name: At_15mM_NH4NO3_L-to-H_P Parameter: Plant Line Value: WS
  misc_feature: MA Experiment 20000709 PARAMETER Experiment Name: At_15mM_NH4NO3_L-to-H_P Parameter: Timepoint (hr) Value: 4
  misc_feature: MA Experiment 20000709 PARAMETER Experiment Name: At_15mM_NH4NO3_L-to-H_P Parameter: Tissue Value: Aerial
  misc_feature: MA Experiment 20000709 PARAMETER Experiment Name: At_15mM_NH4NO3_L-to-H_P Parameter: Treatment Value: 15mM NH4NO3 vs. 30mM Mannitol
  misc_feature: MA Experiment ID: 20000794 Result: Down-regulated in Transcription
  misc_feature: MA Experiment 20000794 PARAMETER Experiment Name: At_Petals_P Parameter: Age (day) Value: 23-25 days
  misc_feature: MA Experiment 20000794 PARAMETER Experiment Name: At_Petals_P Parameter: Plant Line Value: WS
  misc_feature: MA Experiment 20000794 PARAMETER Experiment Name: At_Petals_P Parameter: Tissue Value: Petals vs. Whole plant
  misc_feature: MA Experiment ID: 20001247 Result: Up-regulated in Transcription
  misc_feature: MA Experiment 20001247 PARAMETER Experiment Name: At_Far-red-induction_P Parameter: Age (day) Value: 7
  misc_feature: MA Experiment 20001247 PARAMETER Experiment Name: At_Far-red-induction_P Parameter: Light Value: Far-red vs. White
  misc_feature: MA Experiment 20001247 PARAMETER Experiment Name: At_Far-red-induction_P Parameter: Organism Value: A. thaliana
  misc_feature: MA Experiment 20001247 PARAMETER Experiment Name: At_Far-red-induction_P Parameter: Plant Line Value: Columbia
  misc_feature: MA Experiment 20001247 PARAMETER Experiment Name: At_Far-red-induction_P Parameter: Timepoint (hr) Value: 1
  misc_feature: MA Experiment 20001247 PARAMETER Experiment Name: At_Far-red-induction_P Parameter: Tissue Value: Whole Plant
  misc_feature: MA Experiment ID: 20001451 Result: Up-regulated in Transcription
  misc_feature: MA Experiment 20001451 PARAMETER Experiment Name: At_Far-red-induction_P Parameter: Age (day) Value: 7
  misc_feature: MA Experiment 20001451 PARAMETER Experiment Name: At_Far-red-induction_P Parameter: Light Value: Far-red vs. White
  misc_feature: MA Experiment 20001451 PARAMETER Experiment Name: At_Far-red-induction_P Parameter: Organism Value: A. thaliana
  misc_feature: MA Experiment 20001451 PARAMETER Experiment Name: At_Far-red-induction_P Parameter: Plant Line Value: Columbia
  misc_feature: MA Experiment 20001451 PARAMETER Experiment Name: At_Far-red-induction_P Parameter: Timepoint (hr) Value: 24
  misc_feature: MA Experiment 20001451 PARAMETER Experiment Name: At_Far-red-induction_P Parameter: Tissue Value: Whole Plant
  misc_feature: MA Experiment ID: 20001457 Result: Up-regulated in Transcription
  misc_feature: MA Experiment 20001457 PARAMETER Experiment Name: At_50mM_NH4NO3_L-to-H_P Parameter: Age (day) Value: Undefined
  misc_feature: MA Experiment 20001457 PARAMETER Experiment Name: At_50mM_NH4NO3_L-to-H_P Parameter: Organism Value: Undefined
  misc_feature: MA Experiment 20001457 PARAMETER Experiment Name: At_50mM_NH4NO3_L-to-H_P Parameter: Plant Line Value: Undefined
  misc_feature: MA Experiment 20001457 PARAMETER Experiment Name: At_50mM_NH4NO3_L-to-H_P Parameter: Timepoint (hr) Value: 0.5
  misc_feature: MA Experiment 20001457 PARAMETER Experiment Name: At_50mM_NH4NO3_L-to-H_P Parameter: Tissue Value: Siliques
  misc_feature: MA Experiment 20001457 PARAMETER Experiment Name: At_50mM_NH4NO3_L-to-H_P Parameter: Treatment Value: 50mM NH4NO3 vs. 100mM Manitol
  misc_feature: MA Experiment ID: 20001458 Result: Up-regulated in Transcription
  misc_feature: MA Experiment 20001458 PARAMETER Experiment Name: At_50mM_NH4NO3_L-to-H_P Parameter: Age (day) Value: Undefined
  misc_feature: MA Experiment 20001458 PARAMETER Experiment Name: At_50mM_NH4NO3_L-to-H_P Parameter: Organism Value: Undefined
  misc_feature: MA Experiment 20001458 PARAMETER Experiment Name: At_50mM_NH4NO3_L-to-H_P Parameter: Plant Line Value: Undefined
  misc_feature: MA Experiment 20001458 PARAMETER Experiment Name: At_50mM_NH4NO3_L-to-H_P Parameter: Timepoint (hr) Value: 2
  misc_feature: MA Experiment 20001458 PARAMETER Experiment Name: At_50mM_NH4NO3_L-to-H_P Parameter: Tissue Value: Siliques
  misc_feature: MA Experiment 20001458 PARAMETER Experiment Name: At_50mM_NH4NO3_L-to-H_P Parameter: Treatment Value: 50mM NH4NO3 vs. 100mM Manitol
  misc_feature: MA Experiment ID: 20001459 Result: Up-regulated in Transcription
  misc_feature: MA Experiment 20001459 PARAMETER Experiment Name: At_50mM_NH4NO3_L-to-H_P Parameter: Age (day) Value: Undefined
  misc_feature: MA Experiment 20001459 PARAMETER Experiment Name: At_50mM_NH4NO3_L-to-H_P Parameter: Organism Value: Undefined
  misc_feature: MA Experiment 20001459 PARAMETER Experiment Name: At_50mM_NH4NO3_L-to-H_P Parameter: Plant Line Value: Undefined
  misc_feature: MA Experiment 20001459 PARAMETER Experiment Name: At_50mM_NH4NO3_L-to-H_P Parameter: Timepoint (hr) Value: 4
  misc_feature: MA Experiment 20001459 PARAMETER Experiment Name: At_50mM_NH4NO3_L-to-H_P Parameter: Tissue Value: Siliques
  misc_feature: MA Experiment 20001459 PARAMETER Experiment Name: At_50mM_NH4NO3_L-to-H_P Parameter: Treatment Value: 50mM NH4NO3 vs. 100mM Manitol
  misc_feature: MA Experiment ID: 20001554 Result: Down-regulated in Transcription
  misc_feature: MA Experiment 20001554 PARAMETER Experiment Name: At_Drought_Soil_Dry_P Parameter: Age (day) Value: 21
  misc_feature: MA Experiment 20001554 PARAMETER Experiment Name: At_Drought_Soil_Dry_P Parameter: Organism Value: A. thaliana
  misc_feature: MA Experiment 20001554 PARAMETER Experiment Name: At_Drought_Soil_Dry_P Parameter: Plant Line Value: WS
  misc_feature: MA Experiment 20001554 PARAMETER Experiment Name: At_Drought_Soil_Dry_P Parameter: Post Timepoint (hr) Value: None
  misc_feature: MA Experiment 20001554 PARAMETER Experiment Name: At_Drought_Soil_Dry_P Parameter: Post-Treatment Value: None
  misc_feature: MA Experiment 20001554 PARAMETER Experiment Name: At_Drought_Soil_Dry_P Parameter: Timepoint (day) Value: 7
  misc_feature: MA Experiment 20001554 PARAMETER Experiment Name: At_Drought_Soil_Dry_P Parameter: Treatment Value: Drought vs. No Drought
  misc_feature: MA Experiment ID: 20001555 Result: Down-regulated in Transcription
  misc_feature: MA Experiment 20001555 PARAMETER Experiment Name: At_Drought_Soil_Dry_P Parameter: Age (day) Value: 24
  misc_feature: MA Experiment 20001555 PARAMETER Experiment Name: At_Drought_Soil_Dry_P Parameter: Organism Value: A. thaliana
  misc_feature: MA Experiment 20001555 PARAMETER Experiment Name: At_Drought_Soil_Dry_P Parameter: Plant Line Value: WS
  misc_feature: MA Experiment 20001555 PARAMETER Experiment Name: At_Drought_Soil_Dry_P Parameter: Post Timepoint (hr) Value: None
  misc_feature: MA Experiment 20001555 PARAMETER Experiment Name: At_Drought_Soil_Dry_P Parameter: Post-Treatment Value: None
  misc_feature: MA Experiment 20001555 PARAMETER Experiment Name: At_Drought_Soil_Dry_P Parameter: Timepoint (day) Value: 10
  misc_feature: MA Experiment 20001555 PARAMETER Experiment Name: At_Drought_Soil_Dry_P Parameter: Treatment Value: Drought vs. No Drought
  misc_feature: MA Experiment ID: 20001556 Result: Down-regulated in Transcription
  misc_feature: MA Experiment 20001556 PARAMETER Experiment Name: At_Drought_Soil_Dry_P Parameter: Age (day) Value: 26
  misc_feature: MA Experiment 20001556 PARAMETER Experiment Name: At_Drought_Soil_Dry_P Parameter: Organism Value: A. thaliana
  misc_feature: MA Experiment 20001556 PARAMETER Experiment Name: At_Drought_Soil_Dry_P Parameter: Plant Line Value: WS
  misc_feature: MA Experiment 20001556 PARAMETER Experiment Name: At_Drought_Soil_Dry_P Parameter: Post Timepoint (hr) Value: None
  misc_feature: MA Experiment 20001556 PARAMETER Experiment Name: At_Drought_Soil_Dry_P Parameter: Post-Treatment Value: None
  misc_feature: MA Experiment 20001556 PARAMETER Experiment Name: At_Drought_Soil_Dry_P Parameter: Timepoint (day) Value: 12
  misc_feature: MA Experiment 20001556 PARAMETER Experiment Name: At_Drought_Soil_Dry_P Parameter: Treatment Value: Drought vs. No Drought
  misc_feature: MA Experiment ID: 20001559 Result: Down-regulated in Transcription
  misc_feature: MA Experiment 20001559 PARAMETER Experiment Name: At_Drought_Soil_Dry_P Parameter: Age (day) Value: 28
  misc_feature: MA Experiment 20001559 PARAMETER Experiment Name: At_Drought_Soil_Dry_P Parameter: Organism Value: A. thaliana
  misc_feature: MA Experiment 20001559 PARAMETER Experiment Name: At_Drought_Soil_Dry_P Parameter: Plant Line Value: WS
  misc_feature: MA Experiment 20001559 PARAMETER Experiment Name: At_Drought_Soil_Dry_P Parameter: Post Timepoint (hr) Value: 29
  misc_feature: MA Experiment 20001559 PARAMETER Experiment Name: At_Drought_Soil_Dry_P Parameter: Post-Treatment Value: Re-Water vs. No Drought
  misc_feature: MA Experiment 20001559 PARAMETER Experiment Name: At_Drought_Soil_Dry_P Parameter: Timepoint (day) Value: 14
  misc_feature: MA Experiment 20001559 PARAMETER Experiment Name: At_Drought_Soil_Dry_P Parameter: Treatment Value: Drought vs. No Drought
  misc_feature: MA Experiment ID: 20001757 Result: Up-regulated in Transcription
  misc_feature: MA Experiment 20001757 PARAMETER Experiment Name: At_50mM_NH4NO3_L-to-H_P Parameter: Timepoint (hr) Value: 6
  misc_feature: MA Experiment 20001757 PARAMETER Experiment Name: At_50mM_NH4NO3_L-to-H_P Parameter: Tissue Value: Leaf
  misc_feature: MA Experiment 20001757 PARAMETER Experiment Name: At_50mM_NH4NO3_L-to-H_P Parameter: Treatment Value: 50mM NH4NO3 vs 100mM Mannitol
  misc_feature: MA Experiment ID: 20001759 Result: Up-regulated in Transcription
  misc_feature: MA Experiment 20001759 PARAMETER Experiment Name: At_50mM_NH4NO3_L-to-H_P Parameter: Timepoint (hr) Value: 1
  misc_feature: MA Experiment 20001759 PARAMETER Experiment Name: At_50mM_NH4NO3_L-to-H_P Parameter: Tissue Value: Siliques
  misc_feature: MA Experiment 20001759 PARAMETER Experiment Name: At_50mM_NH4NO3_L-to-H_P Parameter: Treatment Value: 50mM NH4NO3 vs 100mM Mannitol
  misc_feature: MA Experiment ID: 20001760 Result: Up-regulated in Transcription
  misc_feature: MA Experiment 20001760 PARAMETER Experiment Name: At_50mM_NH4NO3_L-to-H_P Parameter: Timepoint (hr) Value: 2
  misc_feature: MA Experiment 20001760 PARAMETER Experiment Name: At_50mM_NH4NO3_L-to-H_P Parameter: Tissue Value: Siliques
  misc_feature: MA Experiment 20001760 PARAMETER Experiment Name: At_50mM_NH4NO3_L-to-H_P Parameter: Treatment Value: 50mM NH4NO3 vs 100mM Mannitol
  misc_feature: MA Experiment ID: 20001904 Result: Down-regulated in Transcription
  misc_feature: MA Experiment 20001904 PARAMETER Experiment Name: At_Drought_Reproduction_P Parameter: Age (day) Value: 37
  misc_feature: MA Experiment 20001904 PARAMETER Experiment Name: At_Drought_Reproduction_P Parameter: Organism Value: A. thaliana
  misc_feature: MA Experiment 20001904 PARAMETER Experiment Name: At_Drought_Reproduction_P Parameter: Plant Line Value: WS
  misc_feature: MA Experiment 20001904 PARAMETER Experiment Name: At_Drought_Reproduction_P Parameter: Timepoint (day) Value: 7
  misc_feature: MA Experiment 20001904 PARAMETER Experiment Name: At_Drought_Reproduction_P Parameter: Tissue Value: Rosettes
  misc_feature: MA Experiment 20001904 PARAMETER Experiment Name: At_Drought_Reproduction_P Parameter: Treatment Value: Drought vs. No Drought
  misc_feature: MA Experiment ID: 20001905 Result: Down-regulated in Transcription
  misc_feature: MA Experiment 20001905 PARAMETER Experiment Name: At_Drought_Reproduction_P Parameter: Age (day) Value: 40
  misc_feature: MA Experiment 20001905 PARAMETER Experiment Name: At_Drought_Reproduction_P Parameter: Organism Value: A. thaliana
  misc_feature: MA Experiment 20001905 PARAMETER Experiment Name: At_Drought_Reproduction_P Parameter: Plant Line Value: WS
  misc_feature: MA Experiment 20001905 PARAMETER Experiment Name: At_Drought_Reproduction_P Parameter: Timepoint (day) Value: 10
  misc_feature: MA Experiment 20001905 PARAMETER Experiment Name: At_Drought_Reproduction_P Parameter: Tissue Value: Rosettes
  misc_feature: MA Experiment 20001905 PARAMETER Experiment Name: At_Drought_Reproduction_P Parameter: Treatment Value: Drought vs. No Drought
  misc_feature: MA Experiment ID: 20001906 Result: Down-regulated in Transcription
  misc_feature: MA Experiment 20001906 PARAMETER Experiment Name: At_Drought_Reproduction_P Parameter: Age (day) Value: 35
  misc_feature: MA Experiment 20001906 PARAMETER Experiment Name: At_Drought_Reproduction_P Parameter: Organism Value: A. thaliana
  misc_feature: MA Experiment 20001906 PARAMETER Experiment Name: At_Drought_Reproduction_P Parameter: Plant Line Value: WS
  misc_feature: MA Experiment 20001906 PARAMETER Experiment Name: At_Drought_Reproduction_P Parameter: Timepoint (day) Value: 5
  misc_feature: MA Experiment 20001906 PARAMETER Experiment Name: At_Drought_Reproduction_P Parameter: Tissue Value: Siliques
  misc_feature: MA Experiment 20001906 PARAMETER Experiment Name: At_Drought_Reproduction_P Parameter: Treatment Value: Drought vs. No Drought
  misc_feature: MA Experiment ID: 20001908 Result: Down-regulated in Transcription
  misc_feature: MA Experiment 20001908 PARAMETER Experiment Name: At_Drought_Reproduction_P Parameter: Age (day) Value: 40
  misc_feature: MA Experiment 20001908 PARAMETER Experiment Name: At_Drought_Reproduction_P Parameter: Organism Value: A. thaliana
  misc_feature: MA Experiment 20001908 PARAMETER Experiment Name: At_Drought_Reproduction_P Parameter: Plant Line Value: WS
  misc_feature: MA Experiment 20001908 PARAMETER Experiment Name: At_Drought_Reproduction_P Parameter: Timepoint (day) Value: 10
  misc_feature: MA Experiment 20001908 PARAMETER Experiment Name: At_Drought_Reproduction_P Parameter: Tissue Value: Siliques
  misc_feature: MA Experiment 20001908 PARAMETER Experiment Name: At_Drought_Reproduction_P Parameter: Treatment Value: Drought vs. No Drought
  misc_feature: MA Experiment ID: 20001911 Result: Down-regulated in Transcription
  misc_feature: MA Experiment 20001911 PARAMETER Experiment Name: At_Drought_Reproduction_P Parameter: Age (day) Value: 40
  misc_feature: MA Experiment 20001911 PARAMETER Experiment Name: At_Drought_Reproduction_P Parameter: Organism Value: A. thaliana
  misc_feature: MA Experiment 20001911 PARAMETER Experiment Name: At_Drought_Reproduction_P Parameter: Plant Line Value: WS
  misc_feature: MA Experiment 20001911 PARAMETER Experiment Name: At_Drought_Reproduction_P Parameter: Timepoint (day) Value: 10
  misc_feature: MA Experiment 20001911 PARAMETER Experiment Name: At_Drought_Reproduction_P Parameter: Tissue Value: Flowers
  misc_feature: MA Experiment 20001911 PARAMETER Experiment Name: At_Drought_Reproduction_P Parameter: Treatment Value: Drought vs. No Drought
aaacattgaaacactttgtcccactctctctctttctctttcttgtaccaaaagctttttgaatctccaagattatagcaaaaccaaagataaaatactaacttaaaagatttctgaaaataatgagttgcaatggttgtcgagttctacgaaaaggttgcagtgagaattgcatcctccgtccatgtattcaatggatcgaatcacctgaagctcaaggccacgccaccgtcttcgtcgctaagttcttcggccgtgccggtttaatgtctttcatctccgccgtaccggaatctcaatgccctgctttgtttcagtctttgctatacgaagcttgtgggagaactgtgaatccggtgaacggagccgtcggattgttgtggacggggaattggaatgtttgtcaagcggcggttgagacggtgcttcgtggtggttctttaaaaccaataccggagcttcttaacggcggtggattcgccgggtttccgtctcctacttccgacgaagcttcggagatctgtacggaaatgttgaatctacgaaaagctgatgattccggtgatcggaacatttatcatcactgccgattctcaagctctagatctagatcaagatcaacagcttctccgccgaaacggaaacgattatcgtcggaacaacaaccttcgtcggagcttgatctctctcttattcctatttatccgattaaaaccttgccgtttaaggaagatacaccgtcgatgtactcggaggagtctgttaccacggtttcgtttcaaaacaacaacgccggtgatcggtacgtacgctgcggcggaggaggaggaggagcaacgacaaagttgctcaatctcttcgcttgaacggcgtcgtttttgttatgagggttaaaaatgtaatttcgagtaactttttgttgtggccttttttggattaatagcccttaatattttgtgaaatgtagcaaattacgtgatttatttctctctttaattatgagaaattatccaaagtaatagagaataatgatataatt

SEQ ID NO: 103084 - protein, 247 aa, Arabidopsis thaliana; identical to SEQ ID NO: 30451
  peptide (1)..(247): Ceres Seq. ID no. 13611940
  misc_feature (2)..(107): Pfam Name: Protein of unknown function DUF260 Pfam Description: Protein of unknown function DUF260
  misc_feature (1)..(247): Homolog of NCBI NO: 15229644 NR Description: lateral organ boundaries (LOB) domain protein, [Arabidopsis thaliana] >gi|29428046|sp|Q9SN23|LB38_ARATH LOB
  misc_feature (1)..(247): Homolog of NCBI NO: 21553886 NR Description: unknown [Arabidopsis thaliana]
  misc_feature (1)..(246): Homolog of NCBI NO: 15240739 NR Description: lateral organ boundaries (LOB) domain protein 37 [Arabidopsis thaliana] >gi|27805497|sp|Q9FN11|LB37_ARATH LOB protein 37 >gi|9758441|dbj|BAB09027.1|
  misc_feature (1)..(246): Homolog of NCBI NO: 21593577 NR Description: unknown [Arabidopsis thaliana]
  misc_feature (1)..(246): Homolog of NCBI NO: 21592894 NR Description: unknown [Arabidopsis thaliana]
  misc_feature (1)..(246): Homolog of NCBI NO: 15235604 NR Description: lateral organ boundaries (LOB) domain family
  misc_feature (1)..(216): Homolog of NCBI NO: 34394489 NR Description: putative lateral organ boundaries (LOB) domain
  misc_feature (1)..(247): Homolog of NCBI NO: 40539088 NR Description: expressed protein [Oryza sativa (japonica
  misc_feature (1)..(193): Homolog of NCBI NO: 15219829 NR Description: lateral organ boundaries (LOB) domain family
  misc_feature (1)..(111): Homolog of NCBI NO: 34895540 NR Description: unnamed protein product [Oryza sativa (japonica group)] >gi|9558469|dbj|BAB03390.1| unnamed protein product

SEQ ID NO: 103085 - protein, 199 aa, Arabidopsis thaliana; identical to SEQ ID NO: 30452
  peptide (1)..(199): Ceres Seq. ID no. 13611941
  misc_feature (1)..(59): Pfam Name: Protein of unknown function DUF260 Pfam Description: Protein of unknown function DUF260
  misc_feature (1)..(199): Homolog of NCBI NO: 15229644 NR Description: lateral organ boundaries (LOB) domain protein, [Arabidopsis thaliana] >gi|29428046|sp|Q9SN23|LB38_ARATH LOB
  misc_feature (1)..(199): Homolog of NCBI NO: 21553886 NR Description: unknown [Arabidopsis thaliana]
  misc_feature (1)..(198): Homolog of NCBI NO: 15240739 NR Description: lateral organ boundaries (LOB) domain protein 37 [Arabidopsis thaliana] >gi|27805497|sp|Q9FN11|LB37_ARATH LOB protein 37 >gi|9758441|dbj|BAB09027.1|
  misc_feature (1)..(198): Homolog of NCBI NO: 21593577 NR Description: unknown [Arabidopsis thaliana]
  misc_feature (1)..(198): Homolog of NCBI NO: 21592894 NR Description: unknown [Arabidopsis thaliana]
  misc_feature (1)..(198): Homolog of NCBI NO: 15235604 NR Description: lateral organ boundaries (LOB) domain family
  misc_feature (1)..(168): Homolog of NCBI NO: 34394489 NR Description: putative lateral organ boundaries (LOB) domain
  misc_feature (1)..(199): Homolog of NCBI NO: 40539088 NR Description: expressed protein [Oryza sativa (japonica
  misc_feature (1)..(145): Homolog of NCBI NO: 15219829 NR Description: lateral organ boundaries (LOB) domain family
  misc_feature (1)..(63): Homolog of NCBI NO: 34895540 NR Description: unnamed protein product [Oryza sativa (japonica group)] >gi|9558469|dbj|BAB03390.1| unnamed protein product

SEQ ID NO: 103086 - DNA, 1664 bp, Arabidopsis thaliana
  misc_feature (1)..(1664): Ceres Seq. ID no. 13611942
  misc_feature: MA Experiment ID: 108462 Result: Down-regulated in Transcription
  misc_feature: MA Experiment 108462 PARAMETER Experiment Name: At_Germinating_Seeds_cDNA_P Parameter: Age (day) Value: 2 vs. 0
  misc_feature: MA Experiment 108462 PARAMETER Experiment Name: At_Germinating_Seeds_cDNA_P Parameter: Tissue Value: Germinating Seeds
  misc_feature: MA Experiment ID: 20000171 Result: Down-regulated in Transcription
  misc_feature: MA Experiment 20000171 PARAMETER Experiment Name: At_42deg_Heat_P Parameter: Age (day) Value: 14
  misc_feature: MA Experiment 20000171 PARAMETER Experiment Name: At_42deg_Heat_P Parameter: Organism Value: A. thaliana
  misc_feature: MA Experiment 20000171 PARAMETER Experiment Name: At_42deg_Heat_P Parameter: Plant Line Value: WS
  misc_feature: MA Experiment 20000171 PARAMETER Experiment Name: At_42deg_Heat_P Parameter: Temperature (deg C) Value: 42 vs. 22
  misc_feature: MA Experiment 20000171 PARAMETER Experiment Name: At_42deg_Heat_P Parameter: Timepoint (hr) Value: 1
  misc_feature: MA Experiment 20000171 PARAMETER Experiment Name: At_42deg_Heat_P Parameter: Tissue Value: Aerial
  misc_feature: MA Experiment ID: 20000173 Result: Down-regulated in Transcription
  misc_feature: MA Experiment 20000173 PARAMETER Experiment Name: At_42deg_Heat_P Parameter: Age (day) Value: 14
  misc_feature: MA Experiment 20000173 PARAMETER Experiment Name: At_42deg_Heat_P Parameter: Organism Value: A. thaliana
  misc_feature: MA Experiment 20000173 PARAMETER Experiment Name: At_42deg_Heat_P Parameter: Plant Line Value: WS
  misc_feature: MA Experiment 20000173 PARAMETER Experiment Name: At_42deg_Heat_P Parameter: Temperature (deg C) Value: 42 vs. 22
  misc_feature: MA Experiment 20000173 PARAMETER Experiment Name: At_42deg_Heat_P Parameter: Timepoint (hr) Value: 6
  misc_feature: MA Experiment 20000173 PARAMETER Experiment Name: At_42deg_Heat_P Parameter: Tissue Value: Aerial
  misc_feature: MA Experiment ID: 20000179 Result: Down-regulated in Transcription
  misc_feature: MA Experiment 20000179 PARAMETER Experiment Name: At_Germinating_Seeds_P Parameter: Age (hr) Value: 6 vs. 0
  misc_feature: MA Experiment 20000179 PARAMETER Experiment Name: At_Germinating_Seeds_P Parameter: Tissue Value: Germinating Seeds
  misc_feature: MA Experiment ID: 20000180 Result: Down-regulated in Transcription
  misc_feature: MA Experiment 20000180 PARAMETER Experiment Name: At_Germinating_Seeds_P Parameter: Age (hr) Value: 24 vs. 0
  misc_feature: MA Experiment 20000180 PARAMETER Experiment Name: At_Germinating_Seeds_P Parameter: Tissue Value: Germinating Seeds
  misc_feature: MA Experiment ID: 20000184 Result: Down-regulated in Transcription
  misc_feature: MA Experiment 20000184 PARAMETER Experiment Name: At_Shoots__P Parameter: Age (day) Value: 7
  misc_feature: MA Experiment 20000184 PARAMETER Experiment Name: At_Shoots__P Parameter: Tissue Value: Shoots vs. Whole Plant
  misc_feature: MA Experiment ID: 20000437 Result: Down-regulated in Transcription
  misc_feature: MA Experiment 20000437 PARAMETER Experiment Name: At_Drought_P Parameter: Age (day) Value: 8
  misc_feature: MA Experiment 20000437 PARAMETER Experiment Name: At_Drought_P Parameter: Organism Value: A. thaliana
  misc_feature: MA Experiment 20000437 PARAMETER Experiment Name: At_Drought_P Parameter: Plant Line Value: WS
  misc_feature: MA Experiment 20000437 PARAMETER Experiment Name: At_Drought_P Parameter: Timepoint (hr) Value: 24
  misc_feature: MA Experiment 20000437 PARAMETER Experiment Name: At_Drought_P Parameter: Tissue Value: Whole Plant
  misc_feature: MA Experiment 20000437 PARAMETER Experiment Name: At_Drought_P Parameter: Treatment Value: Drought vs. No Drought
  misc_feature: MA Experiment ID: 20000495 Result: Down-regulated in Transcription
  misc_feature: MA Experiment 20000495 PARAMETER Experiment Name: At_Guard_Cells_P Parameter: Harvest Date Value: 8/2/2002
  misc_feature: MA Experiment 20000495 PARAMETER Experiment Name: At_Guard_Cells_P Parameter: Organism Value: A. thaliana
  misc_feature: MA Experiment 20000495 PARAMETER Experiment Name: At_Guard_Cells_P Parameter: Tissue Value: Guard Cells vs. Leaves
  misc_feature: MA Experiment ID: 20001558 Result: Up-regulated in Transcription
  misc_feature: MA Experiment 20001558 PARAMETER Experiment Name: At_Drought_Soil_Dry_P Parameter: Age (day) Value: 27
  misc_feature: MA Experiment 20001558 PARAMETER Experiment Name: At_Drought_Soil_Dry_P Parameter: Organism Value: A. thaliana
  misc_feature: MA Experiment 20001558 PARAMETER Experiment Name: At_Drought_Soil_Dry_P Parameter: Plant Line Value: WS
  misc_feature: MA Experiment 20001558 PARAMETER Experiment Name: At_Drought_Soil_Dry_P Parameter: Post Timepoint (hr) Value: 6
  misc_feature: MA Experiment 20001558 PARAMETER Experiment Name: At_Drought_Soil_Dry_P Parameter: Post-Treatment Value: Re-Water vs. No Drought
  misc_feature: MA Experiment 20001558 PARAMETER Experiment Name: At_Drought_Soil_Dry_P Parameter: Timepoint (day) Value: 13
  misc_feature: MA Experiment 20001558 PARAMETER Experiment Name: At_Drought_Soil_Dry_P Parameter: Treatment Value: Drought vs. No Drought
atctgcattgttctccgcctctctctctcaaactcttcagtttgcaaaacccttaagaaggtgtgaattagtaagtaatggggaagaagaagtttattgataagaaaaaggcggcgactttcgagttgtgtcctcgtgatacgtcagacccaagatacagtgatgcaccaggtggtgataagatcttcttacgagttgatcaaaaccctgttaacatcaatggtttcattgaagaagatgaagaagattttagagttagggtatcctgatgatggttataattacttggagcatttgagagagattaagaatactggtggtggttctaatttctatgtgaatcctaagtatgaggttgctcagttacctcgtgatgttaaggcttatgatgcgtctcgtgtgaagatctctggtatggtgaatgaagaaggtaatgataataagttgatgtatagtgttgcgtccaagactgttaacgtcaaggtgcagaaagctattgatcctgaagttgctgcgttgcttgaaaacagtgatgggtctgagtttggttctgatgttgaggatttggaagaagattttgttgttcaagctaatcttactcaaaagggtgaatcttctggtgtgagcaatggagagctcgagttttctgtaagacgtgaggttagagaaagagaaagtgatgaacctgtggctgaaaacccgagagttcctcgtcaaattgatgagctatttgatcagctcgaactcaatgaatatggaagtgatagtgacggtgatggttacatagctgaagatggagaagaagaagaagaagaagacttcatggctcaagaagttcagaatcttattcatgggaaggcaaaagattatgagcttgaagaaaaatatatgaaccctgcggatatactgaagaacagtgactctgtcagagataaagaggaagtggacactgctgctcatgttatccgccgaactgtagaatatggtgaaaattttgataacgggaatgaagatgaatttgtagagctgactgaagaaagcagcgatgaaagcgagaagcatgattgtgaaaccatagtctcaacatactcgaatctcgataacctccctggtaaaatccttgctgcagagtcagctaggcagaagaagctgagtgaaacattagctaacgcattgagttcaaatggaagaatcattaatctccaagggagagagaggattcctgtcgagtttttacctggtaggagagctgaacaaaccgatgtcaaagcggaaatcccaaaagctgaaccgatcaagaggaagactcatggtcaagagtcgaaagaagagaagaaagagcggaaaaatgctgtaaaagccgaaaagcgagaagcaaggataattaagaaacagacaaagatgctgtattgcggtgaaacgcagcgtgctcaaagagctgttgctacctctggtccatcgtcgagacctctaaaataatatgactaaggtaaaacaaaacaattctcagactgtttaaaaccagtttttccagccatttcgtgtaatatttgctgtttgttttttctttttcatcaagatttgaaaatcttgaatcttgttttggatgtggacttttgaatattatttattacttttactagtctaatttcgagaaagtgatg

SEQ ID NO: 103087 - protein, 438 aa, Arabidopsis thaliana; identical to SEQ ID NO: 42571
  peptide (1)..(438): Ceres Seq. ID no. 13611943
  misc_feature (27)..(438): Homolog of NCBI NO: 15229649 NR Description: expressed protein [Arabidopsis thaliana]
  misc_feature (27)..(434): Homolog of NCBI NO: 28927687 NR Description: unknown protein [Oryza sativa (japonica
  misc_feature (228)..(434): Homolog of NCBI NO: 31249721 NR Description: hypothetical protein [Oryza sativa (japonica
  misc_feature (27)..(144): Homolog of NCBI NO: 33146615 NR Description: unknown protein [Oryza sativa (japonica
  misc_feature (27)..(144): Homolog of NCBI NO: 34913326 NR Description: hypothetical protein~predicted by FGENESH etc.
  misc_feature (24)..(425): Homolog of NCBI NO: 31211149 NR Description: ENSANGP00000016262 [Anopheles gambiae]
  misc_feature (36)..(425): Homolog of NCBI NO: 21361875 NR Description: hypothetical protein FLJ14909 [Homo sapiens]
  misc_feature (36)..(425): Homolog of NCBI NO: 31324539 NR Description: RIKEN cDNA 2610020N02 gene [Mus musculus]
  misc_feature (214)..(425): Homolog of NCBI NO: 14042772 NR Description: unnamed protein product [Homo sapiens]

SEQ ID NO: 103088 - protein, 419 aa, Arabidopsis thaliana; identical to SEQ ID NO: 42572
  peptide (1)..(419): Ceres Seq. ID no. 13611944
  misc_feature (8)..(419): Homolog of NCBI NO: 15229649 NR Description: expressed protein [Arabidopsis thaliana]
  misc_feature (8)..(415): Homolog of NCBI NO: 28927687 NR Description: unknown protein [Oryza sativa (japonica
  misc_feature (209)..(415): Homolog of NCBI NO: 31249721 NR Description: hypothetical protein [Oryza sativa (japonica
  misc_feature (8)..(125): Homolog of NCBI NO: 33146615 NR Description: unknown protein [Oryza sativa (japonica
  misc_feature (8)..(125): Homolog of NCBI NO: 34913326 NR Description: hypothetical protein~predicted by FGENESH etc.
  misc_feature (5)..(406): Homolog of NCBI NO: 31211149 NR Description: ENSANGP00000016262 [Anopheles gambiae]
  misc_feature (17)..(406): Homolog of NCBI NO: 21361875 NR Description: hypothetical protein FLJ14909 [Homo sapiens]
  misc_feature (17)..(406): Homolog of NCBI NO: 31324539 NR Description: RIKEN cDNA 2610020N02 gene [Mus musculus]
  misc_feature (195)..(406): Homolog of NCBI NO: 14042772 NR Description: unnamed protein product [Homo sapiens]

SEQ ID NO: 103089 - protein, 413 aa, Arabidopsis thaliana; identical to SEQ ID NO: 42573
  peptide (1)..(413): Ceres Seq. ID no. 13611945
  misc_feature (2)..(413): Homolog of NCBI NO: 15229649 NR Description: expressed protein [Arabidopsis thaliana]
  misc_feature (2)..(409): Homolog of NCBI NO: 28927687 NR Description: unknown protein [Oryza sativa (japonica
  misc_feature (203)..(409): Homolog of NCBI NO: 31249721 NR Description: hypothetical protein [Oryza sativa (japonica
  misc_feature (2)..(119): Homolog of NCBI NO: 33146615 NR Description: unknown protein [Oryza sativa (japonica
  misc_feature (2)..(119): Homolog of NCBI NO: 34913326 NR Description: hypothetical protein~predicted by FGENESH etc.
  misc_feature (1)..(400): Homolog of NCBI NO: 31211149 NR Description: ENSANGP00000016262 [Anopheles gambiae]
  misc_feature (11)..(400): Homolog of NCBI NO: 21361875 NR Description: hypothetical protein FLJ14909 [Homo sapiens]
  misc_feature (11)..(400): Homolog of NCBI NO: 31324539 NR Description: RIKEN cDNA 2610020N02 gene [Mus musculus]
  misc_feature (189)..(400): Homolog of NCBI NO: 14042772 NR Description: unnamed protein product [Homo sapiens]

SEQ ID NO: 103090 - DNA, 673 bp, Arabidopsis thaliana
  misc_feature (1)..(673): Ceres Seq. ID no. 13611954
  misc_feature: MA Experiment ID: 108474 Result: Down-regulated in Transcription
  misc_feature: MA Experiment 108474 PARAMETER Experiment Name: At_Drought_Flowers_cDNA_P Parameter: Timepoint (hr) Value: null
  misc_feature: MA Experiment 108474 PARAMETER Experiment Name: At_Drought_Flowers_cDNA_P Parameter: Treatment Value: Drought vs. No Drought
  misc_feature: MA Experiment ID: 108595 Result: Up-regulated in Transcription
  misc_feature: MA Experiment 108595 PARAMETER Experiment Name: At_Ler-pi_Ovule_cDNA_P Parameter: Plant Line Value: null
  misc_feature: MA Experiment ID: 20000234 Result: Up-regulated in Transcription
  misc_feature: MA Experiment 20000234 PARAMETER Experiment Name: At_Siliques_P Parameter: Age (day) Value: 21
  misc_feature: MA Experiment 20000234 PARAMETER Experiment Name: At_Siliques_P Parameter: Organism Value: A. thaliana
  misc_feature: MA Experiment 20000234 PARAMETER Experiment Name: At_Siliques_P Parameter: Plant Line Value: WS
  misc_feature: MA Experiment 20000234 PARAMETER Experiment Name: At_Siliques_P Parameter: Tissue Value: Less Than 5mm Siliques vs. Whole Plant
  misc_feature: MA Experiment ID: 20000235 Result: Up-regulated in Transcription
  misc_feature: MA Experiment 20000235 PARAMETER Experiment Name: At_Siliques_P Parameter: Age (day) Value: 21
  misc_feature: MA Experiment 20000235 PARAMETER Experiment Name: At_Siliques_P Parameter: Organism Value: A. thaliana
  misc_feature: MA Experiment 20000235 PARAMETER Experiment Name: At_Siliques_P Parameter: Plant Line Value: WS
  misc_feature: MA Experiment 20000235 PARAMETER Experiment Name: At_Siliques_P Parameter: Tissue Value: 5-10mm Siliques vs. Whole Plant
  misc_feature: MA Experiment ID: 20000286 Result: Up-regulated in Transcription
  misc_feature: MA Experiment 20000286 PARAMETER Experiment Name: At_Open_Flower_P Parameter: Age (day) Value: 21
  misc_feature: MA Experiment 20000286 PARAMETER Experiment Name: At_Open_Flower_P Parameter: Plant Line Value: WS
  misc_feature: MA Experiment 20000286 PARAMETER Experiment Name: At_Open_Flower_P Parameter: Tissue Value: Half Open vs. Whole Plant
  misc_feature: MA Experiment ID: 20000441 Result: Down-regulated in Transcription
  misc_feature: MA Experiment 20000441 PARAMETER Experiment Name: At_1uM_BR-BRZ__P Parameter: Tissue Value: Shoot Apices
  misc_feature: MA Experiment 20000441 PARAMETER Experiment Name: At_1uM_BR-BRZ__P Parameter: Treatment Value: 1uM BR vs. No Treatment
aaaaatttactcggattttaaagcagattccttcgatctaaagaaagagagaaaatggagaatatgttaggtcttctaagacttcatgtgattagaggtgttaatcttgccatcagagattctcaaagcagtgatccttatgtcattgtccgtatgggaaaacagaagctacgaacccgtgtgatgaaaaagaatttgaatacagaatggaacgaagacttgacactttctgttactgatccaactcttcctgtcaagatcatggtgtacgatagggacaggttctcaagggatgataagatgggagatgcgatttttcacattgatccgttccttgaagccatcagaatccaaaaccaactaggaggactacctgaggggactgtaataatgaagatacaggcaagcagacaaaactgcttgtcagaagagagcaagattgtatggcacaaaggaaagattgtccagaacatgttccttaagcttcagaatgttgaacgaggggagatagagctgcagcttgagtggatcgatgtctccggcgccttgactgatgatgcggaggatgttgctttctagatcgactctatactacaagaaattcctgtgatgatacggcgaaaacaataacacaaactgatgtagtgatttactcaattaataatcttaatgc

SEQ ID NO: 103091 - protein, 174 aa, Arabidopsis thaliana
  peptide (1)..(174): Ceres Seq. ID no. 13611955
  misc_feature (8)..(87): Pfam Name: C2 domain Pfam Description: C2 domain
  misc_feature (1)..(174): Homolog of NCBI NO: 18408493 NR Description: C2 domain-containing protein [Arabidopsis
  misc_feature (1)..(164): Homolog of NCBI NO: 15240322 NR Description: C2 domain-containing protein [Arabidopsis >gi|9757984|dbj|BAB08320.1| contains similarity to GTPase protein~gene_id:K12B20.22 [Arabidopsis thaliana]
  misc_feature (1)..(164): Homolog of NCBI NO: 30684739 NR Description: C2 domain-containing protein [Arabidopsis
  misc_feature (1)..(163): Homolog of NCBI NO: 15221907 NR Description: C2 domain-containing protein [Arabidopsis
  misc_feature (1)..(163): Homolog of NCBI NO: 25405940 NR Description: protein T1N15.21 [imported] - Arabidopsis >gi|8778695|gb|AAF79703.1|AC020889_11 T1N15.21 [Arabidopsis
  misc_feature (1)..(164): Homolog of NCBI NO: 15219500 NR Description: C2 domain-containing protein [Arabidopsis
  misc_feature (5)..(163): Homolog of NCBI NO: 15226306 NR Description: C2 domain-containing protein [Arabidopsis
  misc_feature (1)..(164): Homolog of NCBI NO: 18409682 NR Description: C2 domain-containing protein [Arabidopsis
  misc_feature (1)..(164): Homolog of NCBI NO: 13430460 NR Description: unknown protein [Arabidopsis thaliana]
  misc_feature (1)..(163): Homolog of NCBI NO: 18409675 NR Description: C2 domain-containing protein [Arabidopsis
MENMLGLLRLHVIRGVNLAIRDSQSSDPYVIVRMGKQKLRTRVMKKNLNTEWNEDLTLSVTDPTLPVKIMVYDRDRFSRDDKMGDAIFHIDPFLEAIRIQNQLGGLPEGTVIMKIQASRQNCLSEESKIVWHKGKIVQNMFLKLQNVERGEIELQLEWIDVSGALTDDAEDVAF

SEQ ID NO: 103092 - protein, 171 aa, Arabidopsis thaliana
  peptide (1)..(171): Ceres Seq. ID no. 13611956
  misc_feature (5)..(84): Pfam Name: C2 domain Pfam Description: C2 domain
  misc_feature (1)..(171): Homolog of NCBI NO: 18408493 NR Description: C2 domain-containing protein [Arabidopsis
  misc_feature (1)..(161): Homolog of NCBI NO: 15240322 NR Description: C2 domain-containing protein [Arabidopsis >gi|9757984|dbj|BAB08320.1| contains similarity to GTPase protein~gene_id:K12B20.22 [Arabidopsis thaliana]
  misc_feature (1)..(161): Homolog of NCBI NO: 30684739 NR Description: C2 domain-containing protein [Arabidopsis
  misc_feature (1)..(160): Homolog of NCBI NO: 15221907 NR Description: C2 domain-containing protein [Arabidopsis
  misc_feature (1)..(160): Homolog of NCBI NO: 25405940 NR Description: protein T1N15.21 [imported] - Arabidopsis >gi|8778695|gb|AAF79703.1|AC020889_11 T1N15.21 [Arabidopsis
  misc_feature (1)..(161): Homolog of NCBI NO: 15219500 NR Description: C2 domain-containing protein [Arabidopsis
  misc_feature (2)..(160): Homolog of NCBI NO: 15226306 NR Description: C2 domain-containing protein [Arabidopsis
  misc_feature (1)..(161): Homolog of NCBI NO: 18409682 NR Description: C2 domain-containing protein [Arabidopsis
  misc_feature (1)..(161): Homolog of NCBI NO: 13430460 NR Description: unknown protein [Arabidopsis thaliana]
  misc_feature (1)..(160): Homolog of NCBI NO: 18409675 NR Description: C2 domain-containing protein [Arabidopsis
MLGLLRLHVIRGVNLAIRDSQSSDPYVIVRMGKQKLRTRVMKKNLNTEWNEDLTLSVTDPTLPVKIMVYDRDRFSRDDKMGDAIFHIDPFLEAIRIQNQLGGLPEGTVIMKIQASRQNCLSEESKIVWHKGKIVQNMFLKLQNVERGEIELQLEWIDVSGALTDDAEDVAF

SEQ ID NO: 103093 - protein, 141 aa, Arabidopsis thaliana
  peptide (1)..(141): Ceres Seq. ID no. 13611957
  misc_feature (1)..(54): Pfam Name: C2 domain Pfam Description: C2 domain
  misc_feature (1)..(141): Homolog of NCBI NO: 18408493 NR Description: C2 domain-containing protein [Arabidopsis
  misc_feature (1)..(131): Homolog of NCBI NO: 15240322 NR Description: C2 domain-containing protein [Arabidopsis >gi|9757984|dbj|BAB08320.1| contains similarity to GTPase protein~gene_id:K12B20.22 [Arabidopsis thaliana]
  misc_feature (1)..(131): Homolog of NCBI NO: 30684739 NR Description: C2 domain-containing protein [Arabidopsis
  misc_feature (1)..(130): Homolog of NCBI NO: 15221907 NR Description: C2 domain-containing protein [Arabidopsis
  misc_feature (1)..(130): Homolog of NCBI NO: 25405940 NR Description: protein T1N15.21 [imported] - Arabidopsis >gi|8778695|gb|AAF79703.1|AC020889_11 T1N15.21 [Arabidopsis
  misc_feature (1)..(131): Homolog of NCBI NO: 15219500 NR Description: C2 domain-containing protein [Arabidopsis
  misc_feature (1)..(130): Homolog of NCBI NO: 15226306 NR Description: C2 domain-containing protein [Arabidopsis
  misc_feature (1)..(131): Homolog of NCBI NO: 18409682 NR Description: C2 domain-containing protein [Arabidopsis
  misc_feature (1)..(131): Homolog of NCBI NO: 13430460 NR Description: unknown protein [Arabidopsis thaliana]
  misc_feature (1)..(130): Homolog of NCBI NO: 18409675 NR Description: C2 domain-containing protein [Arabidopsis
MGKQKLRTRVMKKNLNTEWNEDLTLSVTDPTLPVKIMVYDRDRFSRDDKMGDAIFHIDPFLEAIRIQNQLGGLPEGTVIMKIQASRQNCLSEESKIVWHKGKIVQNMFLKLQNVERGEIELQLEWIDVSGALTDDAEDVAF

SEQ ID NO: 103094 - DNA, 1115 bp, Arabidopsis thaliana
  misc_feature (1)..(1115): Ceres Seq. ID no. 13611958
  misc_feature: MA Experiment ID: 108434 Result: Down-regulated in Transcription
  misc_feature: MA Experiment 108434 PARAMETER Experiment Name: At_Root_Tips_cDNA_P Parameter: Tissue Value: Root Tips
  misc_feature: MA Experiment ID: 108461 Result: Up-regulated in Transcription
  misc_feature: MA Experiment 108461 PARAMETER Experiment Name: At_Germinating_Seeds_cDNA_P Parameter: Age (day) Value: 1 vs. 0
  misc_feature: MA Experiment 108461 PARAMETER Experiment Name: At_Germinating_Seeds_cDNA_P Parameter: Tissue Value: Germinating Seeds
  misc_feature: MA Experiment ID: 108462 Result: Up-regulated in Transcription
  misc_feature: MA Experiment 108462 PARAMETER Experiment Name: At_Germinating_Seeds_cDNA_P Parameter: Age (day) Value: 2 vs. 0
  misc_feature: MA Experiment 108462 PARAMETER Experiment Name: At_Germinating_Seeds_cDNA_P Parameter: Tissue Value: Germinating Seeds
  misc_feature: MA Experiment ID: 108463 Result: Up-regulated in Transcription
  misc_feature: MA Experiment 108463 PARAMETER Experiment Name: At_Germinating_Seeds_cDNA_P Parameter: Age (day) Value: 3 vs. 0
  misc_feature: MA Experiment 108463 PARAMETER Experiment Name: At_Germinating_Seeds_cDNA_P Parameter: Tissue Value: Germinating Seeds
  misc_feature: MA Experiment ID: 108572 Result: Up-regulated in Transcription
  misc_feature: MA Experiment 108572 PARAMETER Experiment Name: At_Drought_cDNA_P Parameter: Timepoint (hr) Value: 1
  misc_feature: MA Experiment 108572 PARAMETER Experiment Name: At_Drought_cDNA_P Parameter: Tissue Value: Aerial
  misc_feature: MA Experiment 108572 PARAMETER Experiment Name: At_Drought_cDNA_P Parameter: Treatment Value: Drought vs. No Drought
  misc_feature: MA Experiment ID: 108573 Result: Up-regulated in Transcription
  misc_feature: MA Experiment 108573 PARAMETER Experiment Name: At_Drought_cDNA_P Parameter: Timepoint (hr) Value: 6
  misc_feature: MA Experiment 108573 PARAMETER Experiment Name: At_Drought_cDNA_P Parameter: Tissue Value: Aerial
  misc_feature: MA Experiment 108573 PARAMETER Experiment Name: At_Drought_cDNA_P Parameter: Treatment Value: Drought vs. No Drought
  misc_feature: MA Experiment ID: 108594 Result: Down-regulated in Transcription
  misc_feature: MA Experiment 108594 PARAMETER Experiment Name: At_Ler-rhl_Root_cDNA_P Parameter: Plant Line Value: null
  misc_feature: MA Experiment ID: 20000069 Result: Up-regulated in Transcription
  misc_feature: MA Experiment 20000069 PARAMETER Experiment Name: At_100uM_ABA_Mutants_cDNA_P Parameter: Plant Line Value: CS23
  misc_feature: MA Experiment 20000069 PARAMETER Experiment Name: At_100uM_ABA_Mutants_cDNA_P Parameter: Timepoint (hr) Value: 6
  misc_feature: MA Experiment 20000069 PARAMETER Experiment Name: At_100uM_ABA_Mutants_cDNA_P Parameter: Tissue Value: Aerial
  misc_feature: MA Experiment 20000069 PARAMETER Experiment Name: At_100uM_ABA_Mutants_cDNA_P Parameter: Treatment Value: 100uM ABA vs. No Treatment
  misc_feature: MA Experiment ID: 20000071 Result: Up-regulated in Transcription
  misc_feature: MA Experiment 20000071 PARAMETER Experiment Name: At_100uM_ABA_Mutants_cDNA_P Parameter: Plant Line Value: CS8104
  misc_feature: MA Experiment 20000071 PARAMETER Experiment Name: At_100uM_ABA_Mutants_cDNA_P Parameter: Timepoint (hr) Value: 6
  misc_feature: MA Experiment 20000071 PARAMETER Experiment Name: At_100uM_ABA_Mutants_cDNA_P Parameter: Tissue Value: Aerial
  misc_feature: MA Experiment 20000071 PARAMETER Experiment Name: At_100uM_ABA_Mutants_cDNA_P Parameter: Treatment Value: 100uM ABA vs. No Treatment
  misc_feature: MA Experiment ID: 20000072 Result: Up-regulated in Transcription
  misc_feature: MA Experiment 20000072 PARAMETER Experiment Name: At_100uM_ABA_Mutants_cDNA_P Parameter: Plant Line Value: CS8105
  misc_feature: MA Experiment 20000072 PARAMETER Experiment Name: At_100uM_ABA_Mutants_cDNA_P Parameter: Timepoint (hr) Value: 6
  misc_feature: MA Experiment 20000072 PARAMETER Experiment Name: At_100uM_ABA_Mutants_cDNA_P Parameter: Tissue Value: Aerial
  misc_feature: MA Experiment 20000072 PARAMETER Experiment Name: At_100uM_ABA_Mutants_cDNA_P Parameter: Treatment Value: 100uM ABA vs. No Treatment
  misc_feature: MA Experiment ID: 20000086 Result: Up-regulated in Transcription
  misc_feature: MA Experiment 20000086 PARAMETER Experiment Name: At_100uM_ABA_Mutants_cDNA_P Parameter: Plant Line Value: CS22
  misc_feature: MA Experiment 20000086 PARAMETER Experiment Name: At_100uM_ABA_Mutants_cDNA_P Parameter: Timepoint (hr) Value: 6
  misc_feature: MA Experiment 20000086 PARAMETER Experiment Name: At_100uM_ABA_Mutants_cDNA_P Parameter: Tissue Value: Aerial
  misc_feature: MA Experiment 20000086 PARAMETER Experiment Name: At_100uM_ABA_Mutants_cDNA_P Parameter: Treatment Value: 100uM ABA vs. No Treatment
  misc_feature: MA Experiment ID: 20000180 Result: Up-regulated in Transcription
  misc_feature: MA Experiment 20000180 PARAMETER Experiment Name: At_Germinating_Seeds_P Parameter: Age (hr) Value: 24 vs. 0
  misc_feature: MA Experiment 20000180 PARAMETER Experiment Name: At_Germinating_Seeds_P Parameter: Tissue Value: Germinating Seeds
  misc_feature: MA Experiment ID: 20000184 Result: Up-regulated in Transcription
  misc_feature: MA Experiment 20000184 PARAMETER Experiment Name: At_Shoots__P Parameter: Age (day) Value: 7
  misc_feature: MA Experiment 20000184 PARAMETER Experiment Name: At_Shoots__P Parameter: Tissue Value: Shoots vs. Whole Plant
  misc_feature: MA Experiment ID: 20000227 Result: Down-regulated in Transcription
  misc_feature: MA Experiment 20000227 PARAMETER Experiment Name: At_Root-Tips-vs-Tops_P Parameter: Tissue Value: Root Tips vs. Root Tops
  misc_feature: MA Experiment ID: 20000439 Result: Up-regulated in Transcription
  misc_feature: MA Experiment 20000439 PARAMETER Experiment Name: At_Roots__P Parameter: Age (day) Value: 14 vs. 21
  misc_feature: MA Experiment 20000439 PARAMETER Experiment Name: At_Roots__P Parameter: Organism Value: A. thaliana
  misc_feature: MA Experiment 20000439 PARAMETER Experiment Name: At_Roots__P Parameter: Tissue Value: Roots vs. Whole Plant
  misc_feature: MA Experiment ID: 20000451 Result: Down-regulated in Transcription
  misc_feature: MA Experiment 20000451 PARAMETER Experiment Name: At_CS6879_Shoots-Roots_P Parameter: Age (day) Value: 14
  misc_feature: MA Experiment 20000451 PARAMETER Experiment Name: At_CS6879_Shoots-Roots_P Parameter: Organism Value: A. thaliana
  misc_feature: MA Experiment 20000451 PARAMETER Experiment Name: At_CS6879_Shoots-Roots_P Parameter: Plant Line Value: CS6879 vs. WS
  misc_feature: MA Experiment 20000451 PARAMETER Experiment Name: At_CS6879_Shoots-Roots_P Parameter: Tissue Value: Roots
  misc_feature: MA Experiment ID: 20000460 Result: Down-regulated in Transcription
  misc_feature: MA Experiment 20000460 PARAMETER Experiment Name: At_10percent_PEG_P Parameter: Age (day) Value: 12
  misc_feature: MA Experiment 20000460 PARAMETER Experiment Name: At_10percent_PEG_P Parameter: Organism Value: A. thaliana
  misc_feature: MA Experiment 20000460 PARAMETER Experiment Name: At_10percent_PEG_P Parameter: Plant Line Value: WS
  misc_feature: MA Experiment 20000460 PARAMETER Experiment Name: At_10percent_PEG_P Parameter: Timepoint (day) Value: 12
  misc_feature: MA Experiment 20000460 PARAMETER Experiment Name: At_10percent_PEG_P Parameter: Tissue Value: Whole Plant
  misc_feature: MA Experiment 20000460 PARAMETER Experiment Name: At_10percent_PEG_P Parameter: Treatment Value: 10percent PEG vs. No Treatment
  misc_feature: MA Experiment ID: 20000573 Result: Up-regulated in Transcription
  misc_feature: MA Experiment 20000573 PARAMETER Experiment Name: At_100uM_ABA_Mutants__P Parameter: Organism Value: A. thaliana
  misc_feature: MA Experiment 20000573 PARAMETER Experiment Name: At_100uM_ABA_Mutants__P Parameter: Plant Line Value: CS22 vs. Ler wt
  misc_feature: MA Experiment 20000573 PARAMETER Experiment Name: At_100uM_ABA_Mutants__P Parameter: Timepoint (hr) Value: N/A
  misc_feature: MA Experiment 20000573 PARAMETER Experiment Name: At_100uM_ABA_Mutants__P Parameter: Tissue Value: Whole Plant
  misc_feature: MA Experiment 20000573 PARAMETER Experiment Name: At_100uM_ABA_Mutants__P Parameter: Treatment Value: None
  misc_feature: MA Experiment ID: 20000574 Result: Up-regulated in Transcription
  misc_feature: MA Experiment 20000574 PARAMETER Experiment Name: At_100uM_ABA_Mutants__P Parameter: Organism Value: A. thaliana
  misc_feature: MA Experiment 20000574 PARAMETER Experiment Name: At_100uM_ABA_Mutants__P Parameter: Plant Line Value: CS23 vs. Ler wt
  misc_feature: MA Experiment 20000574 PARAMETER Experiment Name: At_100uM_ABA_Mutants__P Parameter: Timepoint (hr) Value: N/A
  misc_feature: MA Experiment 20000574 PARAMETER Experiment Name: At_100uM_ABA_Mutants__P Parameter: Tissue Value: Whole Plant
  misc_feature: MA Experiment 20000574 PARAMETER Experiment Name: At_100uM_ABA_Mutants__P Parameter: Treatment Value: None
  misc_feature: MA Experiment ID: 20000575 Result: Down-regulated in Transcription
  misc_feature: MA Experiment 20000575 PARAMETER Experiment Name: At_100uM_ABA_Mutants__P Parameter: Organism Value: A. thaliana
  misc_feature: MA Experiment 20000575 PARAMETER Experiment Name: At_100uM_ABA_Mutants__P Parameter: Plant Line Value: CS22
  misc_feature: MA Experiment 20000575 PARAMETER Experiment Name: At_100uM_ABA_Mutants__P Parameter: Timepoint (hr) Value: 6
  misc_feature: MA Experiment 20000575 PARAMETER Experiment Name: At_100uM_ABA_Mutants__P Parameter: Tissue Value: Whole Plant
  misc_feature: MA Experiment 20000575 PARAMETER Experiment Name: At_100uM_ABA_Mutants__P Parameter: Treatment Value: 1uM ABA vs. No Treatment
  misc_feature: MA Experiment ID: 20000576 Result: Down-regulated in Transcription
  misc_feature: MA Experiment 20000576 PARAMETER Experiment Name: At_100uM_ABA_Mutants__P Parameter: Organism Value: A. thaliana
  misc_feature: MA Experiment 20000576 PARAMETER Experiment Name: At_100uM_ABA_Mutants__P Parameter: Plant Line Value: CS23
  misc_feature: MA Experiment 20000576 PARAMETER Experiment Name: At_100uM_ABA_Mutants__P Parameter: Timepoint (hr) Value: 6
  misc_feature: MA Experiment 20000576 PARAMETER Experiment Name: At_100uM_ABA_Mutants__P Parameter: Tissue Value: Whole Plant
  misc_feature: MA Experiment 20000576 PARAMETER Experiment Name: At_100uM_ABA_Mutants__P Parameter: Treatment Value: 1uM ABA vs. No Treatment
atcattacttaagccaacctaccaataataataaaagagaaatgaacggcgaaggaaaggttgtttgcgtcaccggagcttccggatacatagcttcttggattgttaagcttttgctcctccgtggctacaccgtcagggccaccgtccgaaacccaatggatacaaagaaaacaaatcatcttcttacacttgaaggtgcaagtgaaagactaaaactgttcaaatcagatcttttggaagaaggttctttcgatcaagctatagagggatgcgacggtgtcttccatactgcctctccagtttcattaaccgttacagatcctcagactgagatgatcgatccggcggttaatggtactttgaacgttttgagaacgtgcgccaaagtttcttctgtgaagagggtcattgtaacatcgtccactgctgctactctttctattaacccaaacgacgtggtggacgaaaccgtcttcaccgatctaagtgtttacttagcgatgaaggcatggtatggatattcaaaaactttggctgaggaaacagcgtggcggtttgctaaagaaaacgggatcgatttggttgtaatgaatccaggaaacgtgatcggaccagttttgcagccaactcttaattactctgtagaagtgattgtggatctgataaatggtaaaaacccttccaatagtttttactataggttcatggacgtgagagatgtttctcttgctcatatcaaagcgttcgaggtcccttctgctagtggcagatacatacttgctgatccagatgtaacaatgaaagacattcaaaagcttttacatgaactgtttcctgatttgtgccgtgttgataaggataatgagaatgaggtgggtgaaatggcatacaaagtgtgtgtcgataaattgaaaagtttgggaattgagttcactcctatcaaagaatctctcaaggatactgttgttagccttaaggagaggtgtcttcttatatgatcattgacatggactccttgtcatatctttatttttcttgtgatttttaataataaatatgatgtctattgtctaagctttcacaatgtaatgaaatatttgattataatcttc

SEQ ID NO: 103095 - protein, 332 aa, Arabidopsis thaliana
  peptide (1)..(332): Ceres Seq. ID no. 13611959
  misc_feature (21)..(214): Pfam Name: NAD dependent epimerase/dehydratase family Pfam Description: NAD dependent epimerase/dehydratase family
  misc_feature (14)..(332): Homolog of NCBI NO: 30697406 NR Description: cinnamyl-alcohol dehydrogenase (CAD) family
  misc_feature (14)..(332): Homolog of NCBI NO: 12597772 NR Description: cinnamyl alcohol dehydrogenase, putative
  misc_feature (14)..(331): Homolog of NCBI NO: 15217529 NR Description: cinnamyl-alcohol dehydrogenase (CAD) family
  misc_feature (10)..(331): Homolog of NCBI NO: 15217528 NR Description: cinnamyl-alcohol dehydrogenase (CAD) family
  misc_feature (14)..(331): Homolog of NCBI NO: 25284016 NR Description: hypothetical protein [imported] - Arabidopsis >gi|3482923|gb|AAC33208.1| Highly similar to cinnamyl alcohol
  misc_feature (18)..(331): Homolog of NCBI NO: 15217530 NR Description: cinnamyl-alcohol dehydrogenase (CAD) family
  misc_feature (18)..(331): Homolog of NCBI NO: 15217531 NR Description: cinnamyl-alcohol dehydrogenase (CAD) family
  misc_feature (51)..(331): Homolog of NCBI NO: 30681183 NR Description: cinnamyl-alcohol dehydrogenase (CAD) family
  misc_feature (51)..(331): Homolog of NCBI NO: 16648726 NR Description: At1g09500/F14J9_16 [Arabidopsis thaliana]
  misc_feature (15)..(328): Homolog of NCBI NO: 15239741 NR Description: cinnamyl-alcohol dehydrogenase (CAD), putative
HYLSQPTNNNKREMNGEGKVVCVTGASGYIASWIVKLLLLRGYTVRATVRNPMDTKKTNHLLTLEGASERLKLFKSDLLEEGSFDQAIEGCDGVFHTASPVSLTVTDPQTEMIDPAVNGTLNVLRTCAKVSSVKRVIVTSSTAATLSINPNDVVDETVFTDLSVYLAMKAWYGYSKTLAEETAWRFAKENGIDLVVMNPGNVIGPVLQPTLNYSVEVIVDLINGKNPSNSFYYRFMDVRDVSLAHIKAFEVPSASGRYILADPDVTMKDIQKLLHELFPDLCRVDKDNENEVGEMAYKVCVDKLKSLGIEFTPIKESLKDTVVSLKERCLLI

SEQ ID NO: 103096 - protein, 319 aa, Arabidopsis thaliana
  peptide (1)..(319): Ceres Seq. ID no. 13611960
  misc_feature (8)..(201): Pfam Name: NAD dependent epimerase/dehydratase family Pfam Description: NAD dependent epimerase/dehydratase family
  misc_feature (1)..(319): Homolog of NCBI NO: 30697406 NR Description: cinnamyl-alcohol dehydrogenase (CAD) family
  misc_feature (1)..(319): Homolog of NCBI NO: 12597772 NR Description: cinnamyl alcohol dehydrogenase, putative
  misc_feature (1)..(318): Homolog of NCBI NO: 15217529 NR Description: cinnamyl-alcohol dehydrogenase (CAD) family
  misc_feature (1)..(318): Homolog of NCBI NO: 15217528 NR Description: cinnamyl-alcohol dehydrogenase (CAD) family
  misc_feature (1)..(318): Homolog of NCBI NO: 25284016 NR Description: hypothetical protein [imported] - Arabidopsis >gi|3482923|gb|AAC33208.1| Highly similar to cinnamyl alcohol
  misc_feature (5)..(318): Homolog of NCBI NO: 15217530 NR Description: cinnamyl-alcohol dehydrogenase (CAD) family
  misc_feature (5)..(318): Homolog of NCBI NO: 15217531 NR Description: cinnamyl-alcohol dehydrogenase (CAD) family
  misc_feature (38)..(318): Homolog of NCBI NO: 30681183 NR Description: cinnamyl-alcohol dehydrogenase (CAD) family
  misc_feature (38)..(318): Homolog of NCBI NO: 16648726 NR Description: At1g09500/F14J9_16 [Arabidopsis thaliana]
  misc_feature (2)..(315): Homolog of NCBI NO: 15239741 NR Description: cinnamyl-alcohol dehydrogenase (CAD), putative
MNGEGKVVCVTGASGYIASWIVKLLLLRGYTVRATVRNPMDTKKTNHLLTLEGASERLKLFKSDLLEEGSFDQAIEGCDGVFHTASPVSLTVTDPQTEMIDPAVNGTLNVLRTCAKVSSVKRVIVTSSTAATLSINPNDVVDETVFTDLSVYLAMKAWYGYSKTLAEETAWRFAKENGIDLVVMNPGNVIGPVLQPTLNYSVEVIVDLINGKNPSNSFYYRFMDVRDVSLAHIKAFEVPSASGRYILADPDVTMKDIQKLLHELFPDLCRVDKDNENEVGEMAYKVCVDKLKSLGIEFTPIKESLKDTVVSLKERCLLI

SEQ ID NO: 103097 - protein, 280 aa, Arabidopsis thaliana
  peptide (1)..(280): Ceres Seq. ID no. 13611961
  misc_feature (1)..(162): Pfam Name: NAD dependent epimerase/dehydratase family Pfam Description: NAD dependent epimerase/dehydratase family
  misc_feature (1)..(280): Homolog of NCBI NO: 30697406 NR Description: cinnamyl-alcohol dehydrogenase (CAD) family
  misc_feature (1)..(280): Homolog of NCBI NO: 12597772 NR Description: cinnamyl alcohol dehydrogenase, putative
  misc_feature (1)..(279): Homolog of NCBI NO: 15217529 NR Description: cinnamyl-alcohol dehydrogenase (CAD) family
  misc_feature (1)..(279): Homolog of NCBI NO: 15217528 NR Description: cinnamyl-alcohol dehydrogenase (CAD) family
  misc_feature (1)..(279): Homolog of NCBI NO: 25284016 NR Description: hypothetical protein [imported] - Arabidopsis >gi|3482923|gb|AAC33208.1| Highly similar to cinnamyl alcohol
  misc_feature (1)..(279): Homolog of NCBI NO: 15217530 NR Description: cinnamyl-alcohol dehydrogenase (CAD) family
  misc_feature (1)..(279): Homolog of NCBI NO: 15217531 NR Description: cinnamyl-alcohol dehydrogenase (CAD) family
  misc_feature (1)..(279): Homolog of NCBI NO: 30681183 NR Description: cinnamyl-alcohol dehydrogenase (CAD) family
  misc_feature (1)..(279): Homolog of NCBI NO: 16648726 NR Description: At1g09500/F14J9_16 [Arabidopsis thaliana]
  misc_feature (1)..(276): Homolog of NCBI NO: 15239741 NR Description: cinnamyl-alcohol dehydrogenase (CAD), putative
MDTKKTNHLLTLEGASERLKLFKSDLLEEGSFDQAIEGCDGVFHTASPVSLTVTDPQTEMIDPAVNGTLNVLRTCAKVSSVKRVIVTSSTAATLSINPNDVVDETVFTDLSVYLAMKAWYGYSKTLAEETAWRFAKENGIDLVVMNPGNVIGPVLQPTLNYSVEVIVDLINGKNPSNSFYYRFMDVRDVSLAHIKAFEVPSASGRYILADPDVTMKDIQKLLHELFPDLCRVDKDNENEVGEMAYKVCVDKLKSLGIEFTPIKESLKDTVVSLKERCLLI

SEQ ID NO: 103098 - DNA, 470 bp, Arabidopsis thaliana
  misc_feature (1)..(470): Ceres Seq. ID no. 13611962
  misc_feature: MA Experiment ID: 108473 Result: Down-regulated in Transcription
  misc_feature: MA Experiment 108473 PARAMETER Experiment Name: At_Drought_Flowers_cDNA_P Parameter: Timepoint (hr) Value: 7 d
  misc_feature: MA Experiment 108473 PARAMETER Experiment Name: At_Drought_Flowers_cDNA_P Parameter: Tissue Value: Flower
  misc_feature: MA Experiment 108473 PARAMETER Experiment Name: At_Drought_Flowers_cDNA_P Parameter: Treatment Value: Drought vs. No Drought
  misc_feature: MA Experiment ID: 108501 Result: Down-regulated in Transcription
  misc_feature: MA Experiment 108501 PARAMETER Experiment Name: At_ap2_floral_buds_cDNA_P Parameter: Plant Line Value: ap2 (Ler.)
  misc_feature: MA Experiment 108501 PARAMETER Experiment Name: At_ap2_floral_buds_cDNA_P Parameter: Tissue Value: Closed Flower
  misc_feature: MA Experiment ID: 108576 Result: Up-regulated in Transcription
  misc_feature: MA Experiment 108576 PARAMETER Experiment Name: At_42deg_Heat_cDNA_P Parameter: Temperature (deg C) Value: 42 vs. 22
  misc_feature: MA Experiment 108576 PARAMETER Experiment Name: At_42deg_Heat_cDNA_P Parameter: Timepoint (hr) Value: 1
  misc_feature: MA Experiment 108576 PARAMETER Experiment Name: At_42deg_Heat_cDNA_P Parameter: Tissue Value: Aerial
  misc_feature: MA Experiment ID: 20000087 Result: Up-regulated in Transcription
  misc_feature: MA Experiment 20000087 PARAMETER Experiment Name: At_100uM_ABA_Mutants_cDNA_P Parameter: Plant Line Value: WS
  misc_feature: MA Experiment 20000087 PARAMETER Experiment Name: At_100uM_ABA_Mutants_cDNA_P Parameter: Timepoint (hr) Value: 6
  misc_feature: MA Experiment 20000087 PARAMETER Experiment Name: At_100uM_ABA_Mutants_cDNA_P Parameter: Tissue Value: Aerial
  misc_feature: MA Experiment 20000087 PARAMETER Experiment Name: At_100uM_ABA_Mutants_cDNA_P Parameter: Treatment Value: 100uM ABA vs. No Treatment
  misc_feature: MA Experiment ID: 20000184 Result: Down-regulated in Transcription
  misc_feature: MA Experiment 20000184 PARAMETER Experiment Name: At_Shoots__P Parameter: Age (day) Value: 7
  misc_feature: MA Experiment 20000184 PARAMETER Experiment Name: At_Shoots__P Parameter: Tissue Value: Shoots vs. Whole Plant
  misc_feature: MA Experiment ID: 20000185 Result: Down-regulated in Transcription
  misc_feature: MA Experiment 20000185 PARAMETER Experiment Name: At_Roots__P Parameter: Age (day) Value: 7 vs. 21
  misc_feature: MA Experiment 20000185 PARAMETER Experiment Name: At_Roots__P Parameter: Organism Value: A. thaliana
  misc_feature: MA Experiment 20000185 PARAMETER Experiment Name: At_Roots__P Parameter: Tissue Value: Roots vs. Whole Plant
  misc_feature: MA Experiment ID: 20000234 Result: Down-regulated in Transcription
  misc_feature: MA Experiment 20000234 PARAMETER Experiment Name: At_Siliques_P Parameter: Age (day) Value: 21
  misc_feature: MA Experiment 20000234 PARAMETER Experiment Name: At_Siliques_P Parameter: Organism Value: A. thaliana
  misc_feature: MA Experiment 20000234 PARAMETER Experiment Name: At_Siliques_P Parameter: Plant Line Value: WS
  misc_feature: MA Experiment 20000234 PARAMETER Experiment Name: At_Siliques_P Parameter: Tissue Value: Less Than 5mm Siliques vs. Whole Plant
  misc_feature: MA Experiment ID: 20000235 Result: Down-regulated in Transcription
  misc_feature: MA Experiment 20000235 PARAMETER Experiment Name: At_Siliques_P Parameter: Age (day) Value: 21
  misc_feature: MA Experiment 20000235 PARAMETER Experiment Name: At_Siliques_P Parameter: Organism Value: A. thaliana
  misc_feature: MA Experiment 20000235 PARAMETER Experiment Name: At_Siliques_P Parameter: Plant Line Value: WS
  misc_feature: MA Experiment 20000235 PARAMETER Experiment Name: At_Siliques_P Parameter: Tissue Value: 5-10mm Siliques vs. Whole Plant
  misc_feature: MA Experiment ID: 20000265 Result: Up-regulated in Transcription
  misc_feature: MA Experiment 20000265 PARAMETER Experiment Name: At_Open_Flower_P Parameter: Age (day) Value: 21
  misc_feature: MA Experiment 20000265 PARAMETER Experiment Name: At_Open_Flower_P Parameter: Plant Line Value: WS
  misc_feature: MA Experiment 20000265 PARAMETER Experiment Name: At_Open_Flower_P Parameter: Tissue Value: Closed Flower vs. Whole Plant
  misc_feature: MA Experiment ID: 20000286 Result: Up-regulated in Transcription
  misc_feature: MA Experiment 20000286 PARAMETER Experiment Name: At_Open_Flower_P Parameter: Age (day) Value: 21
  misc_feature: MA Experiment 20000286 PARAMETER Experiment Name: At_Open_Flower_P Parameter: Plant Line Value: WS
  misc_feature: MA Experiment 20000286 PARAMETER Experiment Name: At_Open_Flower_P Parameter: Tissue Value: Half Open vs. Whole Plant
  misc_feature: MA Experiment ID: 20000438 Result: Down-regulated in Transcription
  misc_feature: MA Experiment 20000438 PARAMETER Experiment Name: At_Shoots__P Parameter: Age (day) Value: 14
  misc_feature: MA Experiment 20000438 PARAMETER Experiment Name: At_Shoots__P Parameter: Tissue Value: Shoots vs. Whole Plant
  misc_feature: MA Experiment ID: 20000794 Result: Down-regulated in Transcription
  misc_feature: MA Experiment 20000794 PARAMETER Experiment Name: At_Petals_P Parameter: Age (day) Value: 23-25 days
  misc_feature: MA Experiment 20000794 PARAMETER Experiment Name: At_Petals_P Parameter: Plant Line Value: WS
  misc_feature: MA Experiment 20000794 PARAMETER Experiment Name: At_Petals_P Parameter: Tissue Value: Petals vs. Whole plant
  misc_feature: MA Experiment ID: 20001760 Result: Up-regulated in Transcription
  misc_feature: MA Experiment 20001760 PARAMETER Experiment Name: At_50mM_NH4NO3_L-to-H_P Parameter: Timepoint (hr) Value: 2
  misc_feature: MA Experiment 20001760 PARAMETER Experiment Name: At_50mM_NH4NO3_L-to-H_P Parameter: Tissue Value: Siliques
  misc_feature: MA Experiment 20001760 PARAMETER Experiment Name: At_50mM_NH4NO3_L-to-H_P Parameter: Treatment Value: 50mM NH4NO3 vs 100mM Mannitol
  misc_feature: MA Experiment ID: 20001770 Result: Down-regulated in Transcription
  misc_feature: MA Experiment 20001770 PARAMETER Experiment Name: At_Far-red-enriched-adult_P Parameter: Age (day) Value: 28
  misc_feature: MA Experiment 20001770 PARAMETER Experiment Name: At_Far-red-enriched-adult_P Parameter: Light Value: Far-red enriched vs. White
  misc_feature: MA Experiment 20001770 PARAMETER Experiment Name: At_Far-red-enriched-adult_P Parameter: Organism Value: A. thaliana
  misc_feature: MA Experiment 20001770 PARAMETER Experiment Name: At_Far-red-enriched-adult_P Parameter: Plant Line Value: Columbia
  misc_feature: MA Experiment 20001770 PARAMETER Experiment Name: At_Far-red-enriched-adult_P Parameter: Timepoint (hr) Value: 8
  misc_feature: MA Experiment 20001770 PARAMETER Experiment Name: At_Far-red-enriched-adult_P Parameter: Tissue Value: Aerial
  misc_feature: MA Experiment ID: 20001771 Result: Up-regulated in Transcription
  misc_feature: MA Experiment 20001771 PARAMETER Experiment Name: At_Far-red-enriched-adult_P Parameter: Age (day) Value: 28
  misc_feature: MA Experiment 20001771 PARAMETER Experiment Name: At_Far-red-enriched-adult_P Parameter: Light Value: Far-red enriched vs. White
  misc_feature: MA Experiment 20001771 PARAMETER Experiment Name: At_Far-red-enriched-adult_P Parameter: Organism Value: A. thaliana
  misc_feature: MA Experiment 20001771 PARAMETER Experiment Name: At_Far-red-enriched-adult_P Parameter: Plant Line Value: Columbia
  misc_feature: MA Experiment 20001771 PARAMETER Experiment Name: At_Far-red-enriched-adult_P Parameter: Timepoint (hr) Value: 16
  misc_feature: MA Experiment 20001771 PARAMETER Experiment Name: At_Far-red-enriched-adult_P Parameter: Tissue Value: Aerial
  misc_feature: MA Experiment ID: 20001906 Result: Up-regulated in Transcription
  misc_feature: MA Experiment 20001906 PARAMETER Experiment Name: At_Drought_Reproduction_P Parameter: Age (day) Value: 35
  misc_feature: MA Experiment 20001906 PARAMETER Experiment Name: At_Drought_Reproduction_P Parameter: Organism Value: A. thaliana
  misc_feature: MA Experiment 20001906 PARAMETER Experiment Name: At_Drought_Reproduction_P Parameter: Plant Line Value: WS
  misc_feature: MA Experiment 20001906 PARAMETER Experiment Name: At_Drought_Reproduction_P Parameter: Timepoint (day) Value: 5
  misc_feature: MA Experiment 20001906 PARAMETER Experiment Name: At_Drought_Reproduction_P Parameter: Tissue Value: Siliques
  misc_feature: MA Experiment 20001906 PARAMETER Experiment Name: At_Drought_Reproduction_P Parameter: Treatment Value: Drought vs. No Drought
aatatagaatataaccatattccggacatgaagatcgtgacattggtactcgtcgtcttcgtcatactttcgacatcattcccggctgccatcaaagccgaagacacgggagatacaggaaatgtgggagtgacatgtgacgcaaggcagcttcagccttgccttgccgcgattacgggaggaggacaaccctcaggtgcatgttgtgcaaagcttacagagcaacagtcatgcctctgtggtttcgctaagaaccctgcgttcgcacagtacattagctctccaaacgctcgcaaagtgctccttgcttgcaatgttgcttatcccacttgttgaaacttatctagagattttataaataaataaacgaaaggaaataaattacattatatcaaacgttatgatacaattcaaccgtttgtgttaatgtactggcttacatggttaaataaagtttattttcttggttg

SEQ ID NO: 103099 - protein, 111 aa, Arabidopsis thaliana; identical to SEQ ID NO: 35767
  peptide (1)..(111): Ceres Seq. ID no. 13611963
  misc_feature (46)..(111): Pfam Name: Protease inhibitor/seed storage/LTP family Pfam Description: Protease inhibitor/seed storage/LTP family
  misc_feature (10)..(111): Homolog of NCBI NO: 15219758 NR Description: lipid transfer protein family [Arabidopsis >gi|12597761|gb|AAG60074.1|AC013288_8 lipid transfer protein, [Arabidopsis thaliana] >gi|21554330|gb|AAM63437.1| lipid transfer
  misc_feature (22)..(111): Homolog of NCBI NO: 7488524 NR Description: lipid transfer like protein - turnip (fragment)
  misc_feature (10)..(111): Homolog of NCBI NO: 15240847 NR Description: protease inhibitor/seed storage/lipid transfer (LTP) family [Arabidopsis thaliana] >gi|10177792|dbj|BAB11283.1| to unknown protein like protein [Arabidopsis thaliana]
  misc_feature (10)..(111): Homolog of NCBI NO: 32395583 NR Description: seed specific protein Bn15D80B [Brassica napus]
  misc_feature (10)..(111): Homolog of NCBI NO: 18421731 NR Description: protease inhibitor/seed storage/lipid transfer
  misc_feature (10)..(111): Homolog of NCBI NO: 21555147 NR Description: lipid transfer-like protein [Arabidopsis thaliana]
  misc_feature (10)..(111): Homolog of NCBI NO: 15240856 NR Description: protease inhibitor/seed storage/lipid transfer (LTP) family [Arabidopsis thaliana] >gi|10177793|dbj|BAB11284.1| to unknown protein~sp|Q43681 [Arabidopsis lipid transfer protein
  misc_feature (29)..(111): Homolog of NCBI NO: 7489543 NR Description: probable lipid transfer protein - rice
  misc_feature (43)..(111): Homolog of NCBI NO: 18402345 NR Description: protease inhibitor/seed storage/lipid transfer (LTP) family [Arabidopsis thaliana] >gi|15028045|gb|AAK76553.1| lipid transfer protein [Arabidopsis thaliana]
  misc_feature (38)..(111): Homolog of NCBI NO: 3183088 NR Description: Probable nonspecific lipid-transfer protein AKCS9

SEQ ID NO: 103100 - protein, 102 aa, Arabidopsis thaliana; identical to SEQ ID NO: 24515
  peptide (1)..(102): Ceres Seq. ID no. 13611964
  misc_feature (37)..(102): Pfam Name: Protease inhibitor/seed storage/LTP family Pfam Description: Protease inhibitor/seed storage/LTP family
  misc_feature (1)..(102): Homolog of NCBI NO: 15219758 NR Description: lipid transfer protein family [Arabidopsis >gi|12597761|gb|AAG60074.1|AC013288_8 lipid transfer protein, [Arabidopsis thaliana] >gi|21554330|gb|AAM63437.1| lipid transfer
  misc_feature (13)..(102): Homolog of NCBI NO: 7488524 NR Description: lipid transfer like protein - turnip (fragment)
  misc_feature (1)..(102): Homolog of NCBI NO: 15240847 NR Description: protease inhibitor/seed storage/lipid transfer (LTP) family [Arabidopsis thaliana] >gi|10177792|dbj|BAB11283.1| to unknown protein like protein [Arabidopsis thaliana]
  misc_feature (1)..(102): Homolog of NCBI NO: 32395583 NR Description: seed specific protein Bn15D80B [Brassica napus]
  misc_feature (1)..(102): Homolog of NCBI NO: 18421731 NR Description: protease inhibitor/seed storage/lipid transfer
  misc_feature (1)..(102): Homolog of NCBI NO: 21555147 NR Description: lipid transfer-like protein [Arabidopsis thaliana]
  misc_feature (1)..(102): Homolog of NCBI NO: 15240856 NR Description: protease inhibitor/seed storage/lipid transfer (LTP) family [Arabidopsis thaliana] >gi|10177793|dbj|BAB11284.1| to unknown protein~sp|Q43681 [Arabidopsis lipid transfer protein
  misc_feature (20)..(102): Homolog of NCBI NO: 7489543 NR Description: probable lipid transfer protein - rice
  misc_feature (34)..(102): Homolog of NCBI NO: 18402345 NR Description: protease inhibitor/seed storage/lipid transfer (LTP) family [Arabidopsis thaliana] >gi|15028045|gb|AAK76553.1| lipid transfer protein [Arabidopsis thaliana]
  misc_feature (29)..(102): Homolog of NCBI NO: 3183088 NR Description: Probable nonspecific lipid-transfer protein AKCS9

SEQ ID NO: 103101 - DNA, 604 bp, Arabidopsis thaliana
  misc_feature (1)..(604): Ceres Seq. ID no. 13611974
  misc_feature: MA Experiment ID: 108434 Result: Up-regulated in Transcription
  misc_feature: MA Experiment 108434 PARAMETER Experiment Name: At_Root_Tips_cDNA_P Parameter: Tissue Value: Root Tips
  misc_feature: MA Experiment ID: 108461 Result: Down-regulated in Transcription
  misc_feature: MA Experiment 108461 PARAMETER Experiment Name: At_Germinating_Seeds_cDNA_P Parameter: Age (day) Value: 1 vs. 0
  misc_feature: MA Experiment 108461 PARAMETER Experiment Name: At_Germinating_Seeds_cDNA_P Parameter: Tissue Value: Germinating Seeds
  misc_feature: MA Experiment ID: 108462 Result: Down-regulated in Transcription
  misc_feature: MA Experiment 108462 PARAMETER Experiment Name: At_Germinating_Seeds_cDNA_P Parameter: Age (day) Value: 2 vs. 0
  misc_feature: MA Experiment 108462 PARAMETER Experiment Name: At_Germinating_Seeds_cDNA_P Parameter: Tissue Value: Germinating Seeds
  misc_feature: MA Experiment ID: 108463 Result: Down-regulated in Transcription
  misc_feature: MA Experiment 108463 PARAMETER Experiment Name: At_Germinating_Seeds_cDNA_P Parameter: Age (day) Value: 3 vs. 0
  misc_feature: MA Experiment 108463 PARAMETER Experiment Name: At_Germinating_Seeds_cDNA_P Parameter: Tissue Value: Germinating Seeds
  misc_feature: MA Experiment ID: 108464 Result: Down-regulated in Transcription
  misc_feature: MA Experiment 108464 PARAMETER Experiment Name: At_Germinating_Seeds_cDNA_P Parameter: Age (day) Value: 4 vs. 0
  misc_feature: MA Experiment 108464 PARAMETER Experiment Name: At_Germinating_Seeds_cDNA_P Parameter: Tissue Value: Germinating Seeds
  misc_feature: MA Experiment ID: 20000234 Result: Up-regulated in Transcription
  misc_feature: MA Experiment 20000234 PARAMETER Experiment Name: At_Siliques_P Parameter: Age (day) Value: 21
  misc_feature: MA Experiment 20000234 PARAMETER Experiment Name: At_Siliques_P Parameter: Organism Value: A. thaliana
  misc_feature: MA Experiment 20000234 PARAMETER Experiment Name: At_Siliques_P Parameter: Plant Line Value: WS
  misc_feature: MA Experiment 20000234 PARAMETER Experiment Name: At_Siliques_P Parameter: Tissue Value: Less Than 5mm Siliques vs. Whole Plant
  misc_feature: MA Experiment ID: 20001560 Result: Up-regulated in Transcription
  misc_feature: MA Experiment 20001560 PARAMETER Experiment Name: At_Drought_Soil_Dry_P Parameter: Age (day) Value: 28
  misc_feature: MA Experiment 20001560 PARAMETER Experiment Name: At_Drought_Soil_Dry_P Parameter: Organism Value: A. thaliana
  misc_feature: MA Experiment 20001560 PARAMETER Experiment Name: At_Drought_Soil_Dry_P Parameter: Plant Line Value: WS
  misc_feature: MA Experiment 20001560 PARAMETER Experiment Name: At_Drought_Soil_Dry_P Parameter: Post Timepoint (hr) Value: None
  misc_feature: MA Experiment 20001560 PARAMETER Experiment Name: At_Drought_Soil_Dry_P Parameter: Post-Treatment Value: None
  misc_feature: MA Experiment 20001560 PARAMETER Experiment Name: At_Drought_Soil_Dry_P Parameter: Timepoint (day) Value: 14
  misc_feature: MA Experiment 20001560 PARAMETER Experiment Name: At_Drought_Soil_Dry_P Parameter: Treatment Value: Drought vs. No Drought
gcagagcgagctacaagaagaagcgaaacacacccagaagaagaagaagaacaacaacgaagtaaacaatggagtctgagaaaaagatagctcatgagatcggtggtgtcaaaaacgacgctcttcgatttggtcttcacggcgttaagagcaacatcatcggatctcacccactcgaatcgtcatacgaatctgaaaagaaatcgaaagaggcgttgaagaggacggtcattgcgcatgcctacgggactgcacttccgttgaagatggatatggataggcaaattctctcaaggtttcagagacctcctggaccaattccgtcgtcgatgctcggtttagaagtctacacgggagctgtggatgactttggttttgaggattacttgaatgatcctcgtgattccgagacattcaagccggtagacttccaccacgggatggaagttcgtcttggcatctcaaagggaccgatttacccaagtttcatgtaacccttcatgggtggttttttttatcggttgtttttggatcatgactcatcgtgtatgaacttatttcaaccttagacttgtattctctcttgagttaagtttgaaatcag

SEQ ID NO: 103102 - protein, 141 aa, Arabidopsis thaliana; identical to SEQ ID NO: 20875
  peptide (1)..(141): Ceres Seq. ID no. 13611975
  misc_feature (3)..(132): Pfam Name: Proteasome maturation factor UMP1 Pfam Description: Proteasome maturation factor UMP1
  misc_feature (1)..(141): Homolog of NCBI NO: 18408726 NR Description: expressed protein [Arabidopsis thaliana] Unknown protein [Arabidopsis thaliana] unknown [Arabidopsis thaliana] >gi|26449510|dbj|BAC41881.1|
  misc_feature (1)..(141): Homolog of NCBI NO: 9828633 NR Description: F1N21.7 [Arabidopsis thaliana]
  misc_feature (1)..(141): Homolog of NCBI NO: 15240969 NR Description: expressed protein [Arabidopsis thaliana] gb|AAB95243.1~gene_id:MBB18.20~similar to unknown protein thaliana] >gi|19347883|gb|AAL85998.1| unknown protein
  misc_feature (4)..(141): Homolog of NCBI NO: 25493097 NR Description: hypothetical protein [imported] - Picea mariana
  misc_feature (95)..(141): Homolog of NCBI NO: 6049098 NR Description: unknown [Picea abies]
  misc_feature (96)..(141): Homolog of NCBI NO: 2996130 NR Description: hypothetical protein [Picea mariana]
  misc_feature (96)..(141): Homolog of NCBI NO: 2996132 NR Description: hypothetical protein [Picea mariana]
  misc_feature (96)..(141): Homolog of NCBI NO: 2996128 NR Description: hypothetical protein [Picea mariana]
  misc_feature (16)..(131): Homolog of NCBI NO: 27691986 NR Description: similar to hypothetical protein HSPC014 [Homo
  misc_feature (16)..(131): Homolog of NCBI NO: 7705429 NR Description: chromosome 13 open reading frame 12 [Homo >gi|4679014|gb|AAD26995.1| HSPC014 [Homo sapiens] HSPC036 protein [Homo sapiens]

SEQ ID NO: 103103 - protein, 75 aa, Arabidopsis thaliana; identical to SEQ ID NO: 20876
  peptide (1)..(75): Ceres Seq. ID no. 13611976
  misc_feature (1)..(66): Pfam Name: Proteasome maturation factor UMP1 Pfam Description: Proteasome maturation factor UMP1
  misc_feature (1)..(75): Homolog of NCBI NO: 18408726 NR Description: expressed protein [Arabidopsis thaliana] Unknown protein [Arabidopsis thaliana] unknown [Arabidopsis thaliana] >gi|26449510|dbj|BAC41881.1|
  misc_feature (1)..(75): Homolog of NCBI NO: 9828633 NR Description: F1N21.7 [Arabidopsis thaliana]
  misc_feature (1)..(75): Homolog of NCBI NO: 15240969 NR Description: expressed protein [Arabidopsis thaliana] gb|AAB95243.1~gene_id:MBB18.20~similar to unknown protein thaliana] >gi|19347883|gb|AAL85998.1| unknown protein
  misc_feature (1)..(75): Homolog of NCBI NO: 25493097 NR Description: hypothetical protein [imported] - Picea mariana
  misc_feature (29)..(75): Homolog of NCBI NO: 6049098 NR Description: unknown [Picea abies]
  misc_feature (30)..(75): Homolog of NCBI NO: 2996130 NR Description: hypothetical protein [Picea mariana]
  misc_feature (30)..(75): Homolog of NCBI NO: 2996132 NR Description: hypothetical protein [Picea mariana]
  misc_feature (30)..(75): Homolog of NCBI NO: 2996128 NR Description: hypothetical protein [Picea mariana]
  misc_feature (1)..(65): Homolog of NCBI NO: 27691986 NR Description: similar to hypothetical protein HSPC014 [Homo
  misc_feature (1)..(65): Homolog of NCBI NO: 7705429 NR Description: chromosome 13 open reading frame 12 [Homo >gi|4679014|gb|AAD26995.1| HSPC014 [Homo sapiens] HSPC036 protein [Homo sapiens]

SEQ ID NO: 103104 - protein, 73 aa, Arabidopsis thaliana; identical to SEQ ID NO: 20877
  peptide (1)..(73): Ceres Seq. ID no. 13611977
  misc_feature (1)..(64): Pfam Name: Proteasome maturation factor UMP1 Pfam Description: Proteasome maturation factor UMP1
  misc_feature (1)..(73): Homolog of NCBI NO: 18408726 NR Description: expressed protein [Arabidopsis thaliana] Unknown protein [Arabidopsis thaliana] unknown [Arabidopsis thaliana] >gi|26449510|dbj|BAC41881.1|
  misc_feature (1)..(73): Homolog of NCBI NO: 9828633 NR Description: F1N21.7 [Arabidopsis thaliana]
  misc_feature (1)..(73): Homolog of NCBI NO: 15240969 NR Description: expressed protein [Arabidopsis thaliana] gb|AAB95243.1~gene_id:MBB18.20~similar to unknown protein thaliana] >gi|19347883|gb|AAL85998.1| unknown protein
  misc_feature (1)..(73): Homolog of NCBI NO: 25493097 NR Description: hypothetical protein [imported] - Picea mariana
  misc_feature (27)..(73): Homolog of NCBI NO: 6049098 NR Description: unknown [Picea abies]
  misc_feature (28)..(73): Homolog of NCBI NO: 2996130 NR Description: hypothetical protein [Picea mariana]
  misc_feature (28)..(73): Homolog of NCBI NO: 2996132 NR Description: hypothetical protein [Picea mariana]
  misc_feature (28)..(73): Homolog of NCBI NO: 2996128 NR Description: hypothetical protein [Picea mariana]
  misc_feature (1)..(63): Homolog of NCBI NO: 27691986 NR Description: similar to hypothetical protein HSPC014 [Homo
  misc_feature (1)..(63): Homolog of NCBI NO: 7705429 NR Description: chromosome 13 open reading frame 12 [Homo >gi|4679014|gb|AAD26995.1| HSPC014 [Homo sapiens] HSPC036 protein [Homo sapiens]

SEQ ID NO: 103105 - DNA, 1420 bp, Arabidopsis thaliana
  misc_feature (1)..(1420): Ceres Seq. ID no. 13611978
  misc_feature: MA Experiment ID: 108435 Result: Down-regulated in Transcription
  misc_feature: MA Experiment 108435 PARAMETER Experiment Name: At_stm_Mutants_cDNA_P Parameter: Plant Line Value: wt Landsburg vs stm
  misc_feature: MA Experiment 108435 PARAMETER Experiment Name: At_stm_Mutants_cDNA_P Parameter: Tissue Value: Shoot Apical Meristem Region
  misc_feature: MA Experiment ID: 108595 Result: Down-regulated in Transcription
  misc_feature: MA Experiment 108595 PARAMETER Experiment Name: At_Ler-pi_Ovule_cDNA_P Parameter: Plant Line Value: null
  misc_feature: MA Experiment ID: 20000185 Result: Down-regulated in Transcription
  misc_feature: MA Experiment 20000185 PARAMETER Experiment Name: At_Roots__P Parameter: Age (day) Value: 7 vs. 21
  misc_feature: MA Experiment 20000185 PARAMETER Experiment Name: At_Roots__P Parameter: Organism Value: A. thaliana
  misc_feature: MA Experiment 20000185 PARAMETER Experiment Name: At_Roots__P Parameter: Tissue Value: Roots vs. Whole Plant
  misc_feature: MA Experiment ID: 20000286 Result: Down-regulated in Transcription
  misc_feature: MA Experiment 20000286 PARAMETER Experiment Name: At_Open_Flower_P Parameter: Age (day) Value: 21
  misc_feature: MA Experiment 20000286 PARAMETER Experiment Name: At_Open_Flower_P Parameter: Plant Line Value: WS
  misc_feature: MA Experiment 20000286 PARAMETER Experiment Name: At_Open_Flower_P Parameter: Tissue Value: Half Open vs. Whole Plant
  misc_feature: MA Experiment ID: 20000439 Result: Down-regulated in Transcription
  misc_feature: MA Experiment 20000439 PARAMETER Experiment Name: At_Roots__P Parameter: Age (day) Value: 14 vs. 21
  misc_feature: MA Experiment 20000439 PARAMETER Experiment Name: At_Roots__P Parameter: Organism Value: A. thaliana
  misc_feature: MA Experiment 20000439 PARAMETER Experiment Name: At_Roots__P Parameter: Tissue Value: Roots vs. Whole Plant
aatctccgacggaggaaaagtagccaccgcttgacgaatcattcatcaacacacgcagagagctctgaatctcgaggaagaagatggtgaggatcattcctatggctgcttcctccattcgaccttccctcgcctgcttctctgattctcctcgcttccccatctccctcctctccagaaatctctctcgcactctccatgttcctcaatcacagctttttggtttaacttctcataagcttttgagaagaagtgtaaactgtttaggagttgctgaatctggtaaagcagctcaagctactacacaagatgatcttctcacctgggttaagaatgataagagaagaatgcttcatgttgtttatcgtgttggcgatatggaccggacgataaagttttatactgaatgtcttgggatgaagcttctacgtaagcgtgatataccagaagagaagtatactaatgctttccttggttatggaccggaagattcacactttgtgattgagcttacttataattatggagttgacaagtatgacattggggctggttttggtcactttggtattgcggtcgatgatgtggcgaaaactgtagagcttgtgaaagccaaagggggaaaagtaagccgggagcctggtcctgtcaaaggtggcaaaactgtaatagcattcattgaagatcctgatggttacaaatttgaactcttggaaagaggtcctacaccagaacctctttgccaagttatgctccgtgttggtgatctcgatagggccataaagttctatgagaaggcttttggaatggaacttctgcgaacaagagacaacccagagtacaagtacacaatagccatgatgggatatggtccagaagataaatttcctgtcctagagctgacatataactatggtgtcactgaatatgataaaggaaatgcttatgctcagatagcaatagggacggatgatgtgtacaaaactgcagaagctataaaactctttgggggaaaaatcacgagggagcctggtcccttaccaggtattagcacgaagatcaccgcgtgtctggatcctgatggttggaaatcggtatttgtggacaacattgactttctcaaagaactggagtgagaggagaaagcagaagagaggcaacaaatgcacgaaaatggcttatgagggagacaggaggagaggccttgttgtgaattacatcagtttggggtttgatataatctctctcagtgctgaatatttttatcaaagtgaatgatttgtttttcagaatatagtgtagttgtttaatttacagtataaaagcctatgttgcgtctttgtatattagttccacttaacattaattgccaataaataagatgataagtgaatgatattcaagaaaaaatcttatgcct

SEQ ID NO: 103106 - protein, 350 aa, Arabidopsis thaliana; identical to SEQ ID NO: 29221
  peptide (1)..(350): Ceres Seq. ID no. 13611979
  misc_feature (1)..(350): Homolog of NCBI NO: 15220397 NR Description: glyoxalase I, putative (lactoylglutathione lyase) thaliana] >gi|16930396|gb|AAL31884.1|AF419551_1 [Arabidopsis thaliana] >gi|19310505|gb|AAL84986.1|
  misc_feature (1)..(350): Homolog of NCBI NO: 21537360 NR Description: glyoxalase I, putative [Arabidopsis thaliana]
  misc_feature (1)..(350): Homolog of NCBI NO: 25350143 NR Description: protein F1N21.10 [imported] - Arabidopsis >gi|9828630|gb|AAG00253.1|AC002130_18 F1N21.10 [Arabidopsis
  misc_feature (68)..(350): Homolog of NCBI NO: 7619802 NR Description: putative glyoxalase I [Triticum aestivum]
  misc_feature (68)..(350): Homolog of NCBI NO: 11281993 NR Description: lactoylglutathione lyase (EC 4.4.1.5) [imported]
  misc_feature (68)..(350): Homolog of NCBI NO: 2213425 NR Description: hypothetical protein [Citrus x paradisi]
  misc_feature (66)..(350): Homolog of NCBI NO: 4126809 NR Description: glyoxalase I [Oryza sativa (japonica
  misc_feature (66)..(350): Homolog of NCBI NO: 16580747 NR Description: glyoxalase I [Oryza sativa (japonica
  misc_feature (72)..(350): Homolog of NCBI NO: 1808684 NR Description: hypothetical protein [Sporobolus stapfianus]
  misc_feature (77)..(350): Homolog of NCBI NO: 15221116 NR Description: glyoxalase I, putative (lactoylglutathione lyase) thaliana] >gi|30682443|ref|NP_849643.1| glyoxalase I, putative

SEQ ID NO: 103107 - protein, 344 aa, Arabidopsis thaliana; identical to SEQ ID NO: 29222
  peptide (1)..(344): Ceres Seq. ID no. 13611980
  misc_feature (1)..(344): Homolog of NCBI NO: 15220397 NR Description: glyoxalase I, putative (lactoylglutathione lyase) thaliana] >gi|16930396|gb|AAL31884.1|AF419551_1 [Arabidopsis thaliana] >gi|19310505|gb|AAL84986.1|
  misc_feature (1)..(344): Homolog of NCBI NO: 21537360 NR Description: glyoxalase I, putative [Arabidopsis thaliana]
  misc_feature (1)..(344): Homolog of NCBI NO: 25350143 NR Description: protein F1N21.10 [imported] - Arabidopsis >gi|9828630|gb|AAG00253.1|AC002130_18 F1N21.10 [Arabidopsis
  misc_feature (62)..(344): Homolog of NCBI NO: 7619802 NR Description: putative glyoxalase I [Triticum aestivum]
  misc_feature (62)..(344): Homolog of NCBI NO: 11281993 NR Description: lactoylglutathione lyase (EC 4.4.1.5) [imported]
  misc_feature (62)..(344): Homolog of NCBI NO: 2213425 NR Description: hypothetical protein [Citrus x paradisi]
  misc_feature (60)..(344): Homolog of NCBI NO: 4126809 NR Description: glyoxalase I [Oryza sativa (japonica
  misc_feature (60)..(344): Homolog of NCBI NO: 16580747 NR Description: glyoxalase I [Oryza sativa (japonica
  misc_feature (66)..(344): Homolog of NCBI NO: 1808684 NR Description: hypothetical protein [Sporobolus stapfianus]
  misc_feature (71)..(344): Homolog of NCBI NO: 15221116 NR Description: glyoxalase I, putative (lactoylglutathione lyase) thaliana] >gi|30682443|ref|NP_849643.1| glyoxalase I, putative

SEQ ID NO: 103108 - protein, 262 aa, Arabidopsis thaliana; identical to SEQ ID NO: 29223
  peptide (1)..(262): Ceres Seq. ID no. 13611981
  misc_feature (1)..(262): Homolog of NCBI NO: 15220397 NR Description: glyoxalase I, putative (lactoylglutathione lyase) thaliana] >gi|16930396|gb|AAL31884.1|AF419551_1 [Arabidopsis thaliana] >gi|19310505|gb|AAL84986.1|
  misc_feature (1)..(262): Homolog of NCBI NO: 21537360 NR Description: glyoxalase I, putative [Arabidopsis thaliana]
  misc_feature (1)..(262): Homolog of NCBI NO: 25350143 NR Description: protein F1N21.10 [imported] - Arabidopsis >gi|9828630|gb|AAG00253.1|AC002130_18 F1N21.10 [Arabidopsis
  misc_feature (1)..(262): Homolog of NCBI NO: 7619802 NR Description: putative glyoxalase I [Triticum aestivum]
  misc_feature (1)..(262): Homolog of NCBI NO: 11281993 NR Description: lactoylglutathione lyase (EC 4.4.1.5) [imported]
  misc_feature (1)..(262): Homolog of NCBI NO: 2213425 NR Description: hypothetical protein [Citrus x paradisi]
  misc_feature (1)..(262): Homolog of NCBI NO: 4126809 NR Description: glyoxalase I [Oryza sativa (japonica
  misc_feature (1)..(262): Homolog of NCBI NO: 16580747 NR Description: glyoxalase I [Oryza sativa (japonica
  misc_feature (1)..(262): Homolog of NCBI NO: 1808684 NR Description: hypothetical protein [Sporobolus stapfianus]
  misc_feature (1)..(262): Homolog of NCBI NO: 15221116 NR Description: glyoxalase I, putative (lactoylglutathione lyase) thaliana] >gi|30682443|ref|NP_849643.1| glyoxalase I, putative

SEQ ID NO: 103109 - DNA, 1048 bp, Arabidopsis thaliana
  misc_feature (1)..(1048): Ceres Seq. ID no. 13612002
  misc_feature: MA Experiment ID: 108434 Result: Down-regulated in Transcription
  misc_feature: MA Experiment 108434 PARAMETER Experiment Name: At_Root_Tips_cDNA_P Parameter: Tissue Value: Root Tips
  misc_feature: MA Experiment ID: 108668 Result: Up-regulated in Transcription
  misc_feature: MA Experiment 108668 PARAMETER Experiment Name: At_2mM_SA_cDNA_P Parameter: Plant Line Value: WS
  misc_feature: MA Experiment 108668 PARAMETER Experiment Name: At_2mM_SA_cDNA_P Parameter: Timepoint (hr) Value: 6
  misc_feature: MA Experiment 108668 PARAMETER Experiment Name: At_2mM_SA_cDNA_P Parameter: Treatment Value: 2mM SA vs. No Treatment
  misc_feature: MA Experiment ID: 20000090 Result: Up-regulated in Transcription
  misc_feature: MA Experiment ID: 20000182 Result: Up-regulated in Transcription
  misc_feature: MA Experiment 20000182 PARAMETER Experiment Name: At_2mM_SA_P Parameter: Age (day) Value: 14
  misc_feature: MA Experiment 20000182 PARAMETER Experiment Name: At_2mM_SA_P Parameter: Organism Value: A. thaliana
  misc_feature: MA Experiment 20000182 PARAMETER Experiment Name: At_2mM_SA_P Parameter: Plant Line Value: WS
  misc_feature: MA Experiment 20000182 PARAMETER Experiment Name: At_2mM_SA_P Parameter: Timepoint (hr) Value: 6
  misc_feature: MA Experiment 20000182 PARAMETER Experiment Name: At_2mM_SA_P Parameter: Tissue Value: Aerial
  misc_feature: MA Experiment 20000182 PARAMETER Experiment Name: At_2mM_SA_P Parameter: Treatment Value: 2mM SA vs. No Treatment
ggagtctctcttgtcttcgtttgtgtttggtttttttggactttgaccttccttggcttggacttgagaccaaaaaaaaaaaaaggagaagaagaccatcgttgttctccgatggctattaacagaattgctcatggttctctgtttctgacggtagtcttgttctttctgacggttaattacggcgaagctatatggttgacgattccgacgacgggtggaacgaagtgtgtctccgaggagatacagagcaacgtcgtcgttttggctgattactatgtcgtcgatgagcataatcctgaaaatacacctgctgtttcttctaaggtaacatctccgtatgggaacaatcttcatcaccaagaaaatgtaacacatggtcagtttgcattcacaactcaagaagctgggaactacttggcttgtttctggattgattccagtcatcacttagccaatcctataacccttggggttgattggaagatgggtattgcagctaaagactgggactctgttgctaaaaaggaaaagatcgagggtgttgagcttcagttgaggagacttgaagggttggtgctgtcgattcgtgagaacttaaactatataaaagacagggaagcggagatgcgagaagtgagtgaaacaaccaactcaagagtggcttggttcagtataatgtcactcggggtttgcgttgtggttgtgggttcacagatactgtatctgaagaggtatttccacaagaagaaacttatctagaaacttggcctgaaggatactcttactatatattagtaacatcacacatccctaccttgaaaagagggataagctcaagattgtagagttgaattggttaaaaaatcgaagaacgcgttttcatttatattttctgtgaaactttactactgtcgatagttagagatcattgagtttgtgcacagtcacttttgtgttttgattgatctcttttggagttaaaaaaaaaaatacaggtaatgtgacaatgtaccaaaagttctttctttcacaggcattttggggt

SEQ ID NO: 103110 - protein, 253 aa, Arabidopsis thaliana
  peptide (1)..(253): Ceres Seq. ID no. 13612003
  misc_feature (46)..(253): Pfam Name: emp24/gp25L/p24 family Pfam Description: emp24/gp25L/p24 family
  misc_feature (38)..(253): Homolog of NCBI NO: 15219136 NR Description: emp24/gp25L/p24 family [Arabidopsis thaliana]
  misc_feature (38)..(180): Homolog of NCBI NO: 25402945 NR Description: protein T26F17.12 [imported] - Arabidopsis >gi|6552742|gb|AAF16541.1|AC013482_15 T26F17.12 [Arabidopsis
  misc_feature (49)..(253): Homolog of NCBI NO: 15217563 NR Description: emp24/gp25L/p24 family [Arabidopsis thaliana]
  misc_feature (47)..(253): Homolog of NCBI NO: 15223626 NR Description: emp24/gp25L/p24 family [Arabidopsis thaliana]
  misc_feature (63)..(253): Homolog of NCBI NO: 15228372 NR Description: emp24/gp25L/p24 family [Arabidopsis thaliana]
  misc_feature (104)..(230): Homolog of NCBI NO: 40641597 NR Description: putative transmembrane protein-like protein
  misc_feature (72)..(253): Homolog of NCBI NO: 33146897 NR Description: putative transmembrane protein [Oryza sativa
  misc_feature (47)..(253): Homolog of NCBI NO: 18396016 NR Description: emp24/gp25L/p24 family [Arabidopsis thaliana]
  misc_feature (47)..(253): Homolog of NCBI NO: 21618241 NR Description: unknown [Arabidopsis thaliana]
  misc_feature (38)..(253): Homolog of NCBI NO: 18921314 NR Description: putative transmembrane protein [Oryza sativa]
GVSLVFVCVWFFWTLTFLGLDLRPKKKKGEEDHRCSPMAINRIAHGSLFLTVVLFFLTVNYGEAIWLTIPTTGGTKCVSEEIQSNVVVLADYYVVDEHNPENTPAVSSKVTSPYGNNLHHQENVTHGQFAFTTQEAGNYLACFWIDSSHHLANPITLGVDWKMGIAAKDWDSVAKKEKIEGVELQLRRLEGLVLSIRENLNYIKDREAEMREVSETTNSRVAWFSIMSLGVCVVVVGSQILYLKRYFHKKKLI

SEQ ID NO: 103111 - protein, 216 aa, Arabidopsis thaliana; identical to SEQ ID NO: 42255
  peptide (1)..(216): Ceres Seq. ID no. 13612004
  misc_feature (9)..(216): Pfam Name: emp24/gp25L/p24 family Pfam Description: emp24/gp25L/p24 family
  misc_feature (1)..(216): Homolog of NCBI NO: 15219136 NR Description: emp24/gp25L/p24 family [Arabidopsis thaliana]
  misc_feature (1)..(143): Homolog of NCBI NO: 25402945 NR Description: protein T26F17.12 [imported] - Arabidopsis >gi|6552742|gb|AAF16541.1|AC013482_15 T26F17.12 [Arabidopsis
  misc_feature (12)..(216): Homolog of NCBI NO: 15217563 NR Description: emp24/gp25L/p24 family [Arabidopsis thaliana]
  misc_feature (10)..(216): Homolog of NCBI NO: 15223626 NR Description: emp24/gp25L/p24 family [Arabidopsis thaliana]
  misc_feature (26)..(216): Homolog of NCBI NO: 15228372 NR Description: emp24/gp25L/p24 family [Arabidopsis thaliana]
  misc_feature (67)..(193): Homolog of NCBI NO: 40641597 NR Description: putative transmembrane protein-like protein
  misc_feature (35)..(216): Homolog of NCBI NO: 33146897 NR Description: putative transmembrane protein [Oryza sativa
  misc_feature (10)..(216): Homolog of NCBI NO: 18396016 NR Description: emp24/gp25L/p24 family [Arabidopsis thaliana]
  misc_feature (10)..(216): Homolog of NCBI NO: 21618241 NR Description: unknown [Arabidopsis thaliana]
  misc_feature (1)..(216): Homolog of NCBI NO: 18921314 NR Description: putative transmembrane protein [Oryza sativa]

SEQ ID NO: 103112 - DNA, 1483 bp, Arabidopsis thaliana
  misc_feature (1)..(1483): Ceres Seq. ID no. 13612013
  misc_feature: MA Experiment ID: 108473 Result: Down-regulated in Transcription
  misc_feature: MA Experiment 108473 PARAMETER Experiment Name: At_Drought_Flowers_cDNA_P Parameter: Timepoint (hr) Value: 7 d
  misc_feature: MA Experiment 108473 PARAMETER Experiment Name: At_Drought_Flowers_cDNA_P Parameter: Tissue Value: Flower
  misc_feature: MA Experiment 108473 PARAMETER Experiment Name: At_Drought_Flowers_cDNA_P Parameter: Treatment Value: Drought vs. No Drought
  misc_feature: MA Experiment ID: 108501 Result: Down-regulated in Transcription
  misc_feature: MA Experiment 108501 PARAMETER Experiment Name: At_ap2_floral_buds_cDNA_P Parameter: Plant Line Value: ap2 (Ler.)
  misc_feature: MA Experiment 108501 PARAMETER Experiment Name: At_ap2_floral_buds_cDNA_P Parameter: Tissue Value: Closed Flower
  misc_feature: MA Experiment ID: 20000265 Result: Up-regulated in Transcription
  misc_feature: MA Experiment 20000265 PARAMETER Experiment Name: At_Open_Flower_P Parameter: Age (day) Value: 21
  misc_feature: MA Experiment 20000265 PARAMETER Experiment Name: At_Open_Flower_P Parameter: Plant Line Value: WS
  misc_feature: MA Experiment 20000265 PARAMETER Experiment Name: At_Open_Flower_P Parameter: Tissue Value: Closed Flower vs. Whole Plant
  misc_feature: MA Experiment ID: 20000286 Result: Up-regulated in Transcription
  misc_feature: MA Experiment 20000286 PARAMETER Experiment Name: At_Open_Flower_P Parameter: Age (day) Value: 21
  misc_feature: MA Experiment 20000286 PARAMETER Experiment Name: At_Open_Flower_P Parameter: Plant Line Value: WS
  misc_feature: MA Experiment 20000286 PARAMETER Experiment Name: At_Open_Flower_P Parameter: Tissue Value: Half Open vs. Whole Plant
aaaattatacgtcttaaaagatttcttctctcttctctgatcgtctctctttgtgtgctcacaatgaagcacaacaacaaagtctccaagagacttactatgacatgggttcctcttctttgcatttcttgctttttcctcggagcaatcttcacctccaaattacgatcagcttcgtcggattccggtagccagctcattttacagcaccggcgtgatcaggagcttaagattgttacccaagattatgctcatgagaaaaagaaatcacaagacaatgatgtaatggaagaggttttaaaaactcataaagcaatcgaatcattggataagtcagtttctatgcttcagaagcagctctctgctacacatagccctcaacagattgtgaatgtctcagcaaccaattcttcaacagaaggaaaccaaaagaacaaagtttttatggtgattggtatcaatactgcatttagcagtcgaaaacgtcgcgattcgcttagagagacttggatgcctcaaggggaaaagcttgagaaattggaaaaagagaagggaattgtcgtcaaatttatgattggacacagttcaacgccaaacagtatgttggataaggagattgattcagaagatgctcaatacaacgatttctttaggctggatcatgtcgaaggatattacaatctatctgcaaaaaccaaaagcttcttctctagtgcagttgcaaagtgggatgctgagttttatgtcaagattgatgatgatgttcacgtcaatcttggcacgcttgcttccacattagcaagtcaccgttctaagccaagggtctacattggatgtatgaaatccggtcctgtccttaccaaaaagacggccaagtaccgtgaacccgagttttggaaatttggagaagaaggtaacaaatatttccgacatgctacgggacagatttatgccatatcaaaggatcttgccacatacatatctaacaaccagccaattttgcataagtatgcaaatgaagatgtgacactcgggtcatggtttatcggtcttgaggttgagcaaatcgatgatcgtaatttctgttgtggtactcctccagactgtgaaatgagggcagaggctggcgaaatgtgtgtggctacatttgactggaagtgtagtggagtatgcagatcagtcgatagaatgtggatggttcatgtgatgtgtggtgaaggtagtaaagctgtgtgggacgcaaatttaaaactctcttagatcggagaaagacacaagagaagatgaacattttgttttgtaaagaaccaaaaggtatacaaatgtgagaaaagacgctgaggaagaccttttagttcaatattctcgttttatttgtggaaaaataaaaactaaaaagaaagaatgagactttctatagatacagacgtgacatacttgcttcttataaacattttgctcgatatgaacaattctatttctt

SEQ ID NO: 103113 - protein, 419 aa, Arabidopsis thaliana
  peptide (1)..(419): Ceres Seq. ID no. 13612014
  misc_feature (161)..(359): Pfam Name: Galactosyltransferase Pfam Description: Galactosyltransferase
  misc_feature (22)..(419): Homolog of NCBI NO: 18395060 NR Description: galactosyltransferase family [Arabidopsis
  misc_feature (22)..(416): Homolog of NCBI NO: 30699558 NR Description: Avr9 elicitor response protein -related
  misc_feature (22)..(416): Homolog of NCBI NO: 12323294 NR Description: putative (Avr9) elicitor response protein;
  misc_feature (22)..(416): Homolog of NCBI NO: 34365705 NR Description: At1g77810 [Arabidopsis thaliana]
  misc_feature (26)..(414): Homolog of NCBI NO: 4138265 NR Description: Avr9 elicitor response protein [Nicotiana tabacum]
  misc_feature (39)..(407): Homolog of NCBI NO: 15217544 NR Description: galactosyltransferase family [Arabidopsis
  misc_feature (20)..(414): Homolog of NCBI NO: 15220440 NR Description: galactosyltransferase family [Arabidopsis
  misc_feature (36)..(414): Homolog of NCBI NO: 15225684 NR Description: galactosyltransferase family [Arabidopsis
  misc_feature (260)..(418): Homolog of NCBI NO: 25370617 NR Description: protein F28K19.2 [imported] - Arabidopsis >gi|6573782|gb|AAF17702.1|AC009243_29 F28K19.2 [Arabidopsis
  misc_feature (190)..(260): Homolog of NCBI NO: 25370617 NR Description: protein F28K19.2 [imported] - Arabidopsis >gi|6573782|gb|AAF17702.1|AC009243_29 F28K19.2 [Arabidopsis
KIIRLKRFLLSSLIVSLCVLTMKHNNKVSKRLTMTWVPLLCISCFFLGAIFTSKLRSASSDSGSQLILQHRRDQELKIVTQDYAHEKKKSQDNDVMEEVLKTHKAIESLDKSVSMLQKQLSATHSPQQIVNVSATNSSTEGNQKNKVFMVIGINTAFSSRKRRDSLRETWMPQGEKLEKLEKEKGIVVKFMIGHSSTPNSMLDKEIDSEDAQYNDFFRLDHVEGYYNLSAKTKSFFSSAVAKWDAEFYVKIDDDVHVNLGTLASTLASHRSKPRVYIGCMKSGPVLTKKTAKYREPEFWKFGEEGNKYFRHATGQIYAISKDLATYISNNQPILHKYANEDVTLGSWFIGLEVEQIDDRNFCCGTPPDCEMRAEAGEMCVATFDWKCSGVCRSVDRMWMVHVMCGEGSKAVWDANLKLS

SEQ ID NO: 103114 - protein, 398 aa, Arabidopsis thaliana
  peptide (1)..(398): Ceres Seq. ID no. 13612015
  misc_feature (140)..(338): Pfam Name: Galactosyltransferase Pfam Description: Galactosyltransferase
  misc_feature (1)..(398): Homolog of NCBI NO: 18395060 NR Description: galactosyltransferase family [Arabidopsis
  misc_feature (1)..(395): Homolog of NCBI NO: 30699558 NR Description: Avr9 elicitor response protein -related
  misc_feature (1)..(395): Homolog of NCBI NO: 12323294 NR Description: putative (Avr9) elicitor response protein;
  misc_feature (1)..(395): Homolog of NCBI NO: 34365705 NR Description: At1g77810 [Arabidopsis thaliana]
  misc_feature (5)..(393): Homolog of NCBI NO: 4138265 NR Description: Avr9 elicitor response protein [Nicotiana tabacum]
  misc_feature (18)..(386): Homolog of NCBI NO: 15217544 NR Description: galactosyltransferase family [Arabidopsis
  misc_feature (1)..(393): Homolog of NCBI NO: 15220440 NR Description: galactosyltransferase family [Arabidopsis
  misc_feature (15)..(393): Homolog of NCBI NO: 15225684 NR Description: galactosyltransferase family [Arabidopsis
  misc_feature (239)..(397): Homolog of NCBI NO: 25370617 NR Description: protein F28K19.2 [imported] - Arabidopsis >gi|6573782|gb|AAF17702.1|AC009243_29 F28K19.2 [Arabidopsis
  misc_feature (169)..(239): Homolog of NCBI NO: 25370617 NR Description: protein F28K19.2 [imported] - Arabidopsis >gi|6573782|gb|AAF17702.1|AC009243_29 F28K19.2 [Arabidopsis
MKHNNKVSKRLTMTWVPLLCISCFFLGAIFTSKLRSASSDSGSQLILQHRRDQELKIVTQDYAHEKKKSQDNDVMEEVLKTHKAIESLDKSVSMLQKQLSATHSPQQIVNVSATNSSTEGNQKNKVFMVIGINTAFSSRKRRDSLRETWMPQGEKLEKLEKEKGIVVKFMIGHSSTPNSMLDKEIDSEDAQYNDFFRLDHVEGYYNLSAKTKSFFSSAVAKWDAEFYVKIDDDVHVNLGTLASTLASHRSKPRVYIGCMKSGPVLTKKTAKYREPEFWKFGEEGNKYFRHATGQIYAISKDLATYISNNQPILHKYANEDVTLGSWFIGLEVEQIDDRNFCCGTPPDCEMRAEAGEMCVATFDWKCSGVCRSVDRMWMVHVMCGEGSKAVWDANLKLS

SEQ ID NO: 103115 - protein, 386 aa, Arabidopsis thaliana
  peptide (1)..(386): Ceres Seq. ID no. 13612016
  misc_feature (128)..(326): Pfam Name: Galactosyltransferase Pfam Description: Galactosyltransferase
  misc_feature (1)..(386): Homolog of NCBI NO: 18395060 NR Description: galactosyltransferase family [Arabidopsis
  misc_feature (1)..(383): Homolog of NCBI NO: 30699558 NR Description: Avr9 elicitor response protein -related
  misc_feature (1)..(383): Homolog of NCBI NO: 12323294 NR Description: putative (Avr9) elicitor response protein;
  misc_feature (1)..(383): Homolog of NCBI NO: 34365705 NR Description: At1g77810 [Arabidopsis thaliana]
  misc_feature (1)..(381): Homolog of NCBI NO: 4138265 NR Description: Avr9 elicitor response protein [Nicotiana tabacum]
  misc_feature (6)..(374): Homolog of NCBI NO: 15217544 NR Description: galactosyltransferase family [Arabidopsis
  misc_feature (1)..(381): Homolog of NCBI NO: 15220440 NR Description: galactosyltransferase family [Arabidopsis
  misc_feature (3)..(381): Homolog of NCBI NO: 15225684 NR Description: galactosyltransferase family [Arabidopsis
  misc_feature (227)..(385): Homolog of NCBI NO: 25370617 NR Description: protein F28K19.2 [imported] - Arabidopsis >gi|6573782|gb|AAF17702.1|AC009243_29 F28K19.2 [Arabidopsis
  misc_feature (157)..(227): Homolog of NCBI NO: 25370617 NR Description: protein F28K19.2 [imported] - Arabidopsis >gi|6573782|gb|AAF17702.1|AC009243_29 F28K19.2 [Arabidopsis
MTWVPLLCISCFFLGAIFTSKLRSASSDSGSQLILQHRRDQELKIVTQDYAHEKKKSQDNDVMEEVLKTHKAIESLDKSVSMLQKQLSATHSPQQIVNVSATNSSTEGNQKNKVFMVIGINTAFSSRKRRDSLRETWMPQGEKLEKLEKEKGIVVKFMIGHSSTPNSMLDKEIDSEDAQYNDFFRLDHVEGYYNLSAKTKSFFSSAVAKWDAEFYVKIDDDVHVNLGTLASTLASHRSKPRVYIGCMKSGPVLTKKTAKYREPEFWKFGEEGNKYFRHATGQIYAISKDLATYISNNQPILHKYANEDVTLGSWFIGLEVEQIDDRNFCCGTPPDCEMRAEAGEMCVATFDWKCSGVCRSVDRMWMVHVMCGEGSKAVWDANLKLS

SEQ ID NO: 103116 - DNA, 1261 bp, Arabidopsis thaliana
  misc_feature (1)..(1261): Ceres Seq. ID no. 13612017
acttctctctctctctcttcataatcttttcattgatcatcgaccaaccaaaaacaaaaaaaactcaaaaaatccaaaaaaatcagatctttgaaagcttttcttttgtaacactcgaaaaatggatccgtcctgtgcaaactcagtgaacggattctactcatttctaaacagatcaatggaagatctcgaaagagtttatctttcaaacaatttcatgtccgtacacttcttacagagagctctctgtcttctccgtacctctcactctcatctcactctcttagttcaaaaacttcaacttcccgtcggtgacaaatggctcgatgagtatatggacgaaagctccaaactttgggaagcttgtctcgtcatcaaatccgccgtctcctccgtcgaaaacttctcctccgccggaatttcgatcgcttccaccctcgaccgtcgtctctctcctcagctttctcgtcaggtgataagggcgatatcaggatgtagaagagaagcgatagggatagaggaagaaaacagagcattaatggagaacagagttcaaaggtttccgttttggtcggaacaaacgtcggcgacggcgatggagtcgtcgacgaagttacaaaacgggttcagtggttttcgcggcgtgctttacgcgacgaggaacatgagttcgcttctccttatggttttaatgaacggtctcgtctactgttttcccggagacgcggcaacgcaaacgcagacgcagataacgcaaacgcagagtcaagtcggaggtttcgccggagcaatggggaggttgcagcagagagtggcggctgaggttgggaggatggggataaggaaaggaatattgatgcacgagtatcgccggagcaaagcggcgttggaggagcttaaagcggagctggagcggcggttctgcggtggcggtggtggtgggggagagagggaggaggaggaggaggacgagagggagctgagagagagagttgagaatctgaaagggtattttggtaatttaaggaatgggacagagagtatagtggcgcaaatcgatgatttcttcgatgagattgttgaaggaaggaaaaagcttttggatttctgcagccatagatgatgaaatatcaaaagctgacattttgttttttatgtttacatgaaaaaaaaaaaaaaaagttgggttaggctttaggctctagatgaatcagttggtagggagttgttgtaattttttcttttttactttgttgttatg

SEQ ID NO: 103117 - protein, 333 aa, Arabidopsis thaliana; identical to SEQ ID NO: 24815
  peptide (1)..(333): Ceres Seq. ID no. 13612018
  misc_feature (1)..(333): Homolog of NCBI NO: 18395063 NR Description: expressed protein [Arabidopsis thaliana]
  misc_feature (1)..(333): Homolog of NCBI NO: 21593454 NR Description: unknown [Arabidopsis thaliana]
  misc_feature (1)..(333): Homolog of NCBI NO: 22330710 NR Description: hypothetical protein [Arabidopsis thaliana]
  misc_feature (117)..(272): Homolog of NCBI NO: 6573780 NR Description: F28K19.7 [Arabidopsis thaliana]
  misc_feature (4)..(118): Homolog of NCBI NO: 6573780 NR Description: F28K19.7 [Arabidopsis thaliana]
  misc_feature (222)..(333): Homolog of NCBI NO: 6573780 NR Description: F28K19.7 [Arabidopsis thaliana]
  misc_feature (9)..(332): Homolog of NCBI NO: 34907302 NR Description: hypothetical protein~similar to Arabidopsis

SEQ ID NO: 103118 - protein, 314 aa, Arabidopsis thaliana; identical to SEQ ID NO: 24816
  peptide (1)..(314): Ceres Seq. ID no. 13612019
  misc_feature (1)..(314): Homolog of NCBI NO: 18395063 NR Description: expressed protein [Arabidopsis thaliana]
  misc_feature (1)..(314): Homolog of NCBI NO: 21593454 NR Description: unknown [Arabidopsis thaliana]
  misc_feature (1)..(314): Homolog of NCBI NO: 22330710 NR Description: hypothetical protein [Arabidopsis thaliana]
  misc_feature (98)..(253): Homolog of NCBI NO: 6573780 NR Description: F28K19.7 [Arabidopsis thaliana]
  misc_feature (1)..(99): Homolog of NCBI NO: 6573780 NR Description: F28K19.7 [Arabidopsis thaliana]
  misc_feature (203)..(314): Homolog of NCBI NO: 6573780 NR Description: F28K19.7 [Arabidopsis thaliana]
  misc_feature (1)..(313): Homolog of NCBI NO: 34907302 NR Description: hypothetical protein~similar to Arabidopsis

SEQ ID NO: 103119 - protein, 301 aa, Arabidopsis thaliana; identical to SEQ ID NO: 24817
  peptide (1)..(301): Ceres Seq. ID no. 13612020
  misc_feature (1)..(301): Homolog of NCBI NO: 18395063 NR Description: expressed protein [Arabidopsis thaliana]
  misc_feature (1)..(301): Homolog of NCBI NO: 21593454 NR Description: unknown [Arabidopsis thaliana]
  misc_feature (1)..(301): Homolog of NCBI NO: 22330710 NR Description: hypothetical protein [Arabidopsis thaliana]
  misc_feature (85)..(240): Homolog of NCBI NO: 6573780 NR Description: F28K19.7 [Arabidopsis thaliana]
  misc_feature (1)..(86): Homolog of NCBI NO: 6573780 NR Description: F28K19.7 [Arabidopsis thaliana]
  misc_feature (190)..(301): Homolog of NCBI NO: 6573780 NR Description: F28K19.7 [Arabidopsis thaliana]
  misc_feature (1)..(300): Homolog of NCBI NO: 34907302 NR Description: hypothetical protein~similar to Arabidopsis

SEQ ID NO: 103120 - DNA, 776 bp, Arabidopsis thaliana
  misc_feature (1)..(776): Ceres Seq. ID no. 13612027
  misc_feature: MA Experiment ID: 108435 Result: Down-regulated in Transcription
  misc_feature: MA Experiment 108435 PARAMETER Experiment Name: At_stm_Mutants_cDNA_P Parameter: Plant Line Value: wt Landsburg vs stm
  misc_feature: MA Experiment 108435 PARAMETER Experiment Name: At_stm_Mutants_cDNA_P Parameter: Tissue Value: Shoot Apical Meristem Region
  misc_feature: MA Experiment ID: 108462 Result: Up-regulated in Transcription
  misc_feature: MA Experiment 108462 PARAMETER Experiment Name: At_Germinating_Seeds_cDNA_P Parameter: Age (day) Value: 2 vs. 0
  misc_feature: MA Experiment 108462 PARAMETER Experiment Name: At_Germinating_Seeds_cDNA_P Parameter: Tissue Value: Germinating Seeds
  misc_feature: MA Experiment ID: 108463 Result: Up-regulated in Transcription
  misc_feature: MA Experiment 108463 PARAMETER Experiment Name: At_Germinating_Seeds_cDNA_P Parameter: Age (day) Value: 3 vs. 0
  misc_feature: MA Experiment 108463 PARAMETER Experiment Name: At_Germinating_Seeds_cDNA_P Parameter: Tissue Value: Germinating Seeds
  misc_feature: MA Experiment ID: 108464 Result: Up-regulated in Transcription
  misc_feature: MA Experiment 108464 PARAMETER Experiment Name: At_Germinating_Seeds_cDNA_P Parameter: Age (day) Value: 4 vs. 0
  misc_feature: MA Experiment 108464 PARAMETER Experiment Name: At_Germinating_Seeds_cDNA_P Parameter: Tissue Value: Germinating Seeds
  misc_feature: MA Experiment ID: 108488 Result: Up-regulated in Transcription
  misc_feature: MA Experiment ID: 108595 Result: Down-regulated in Transcription
  misc_feature: MA Experiment 108595 PARAMETER Experiment Name: At_Ler-pi_Ovule_cDNA_P Parameter: Plant Line Value: null
  misc_feature: MA Experiment ID: 20000069 Result: Down-regulated in Transcription
  misc_feature: MA Experiment 20000069 PARAMETER Experiment Name: At_100uM_ABA_Mutants_cDNA_P Parameter: Plant Line Value: CS23
  misc_feature: MA Experiment 20000069 PARAMETER Experiment Name: At_100uM_ABA_Mutants_cDNA_P Parameter: Timepoint (hr) Value: 6
  misc_feature: MA Experiment 20000069 PARAMETER Experiment Name: At_100uM_ABA_Mutants_cDNA_P Parameter: Tissue Value: Aerial
  misc_feature: MA Experiment 20000069 PARAMETER Experiment Name: At_100uM_ABA_Mutants_cDNA_P Parameter: Treatment Value: 100uM ABA vs. No Treatment
  misc_feature: MA Experiment ID: 20000071 Result: Down-regulated in Transcription
  misc_feature: MA Experiment 20000071 PARAMETER Experiment Name: At_100uM_ABA_Mutants_cDNA_P Parameter: Plant Line Value: CS8104
  misc_feature: MA Experiment 20000071 PARAMETER Experiment Name: At_100uM_ABA_Mutants_cDNA_P Parameter: Timepoint (hr) Value: 6
  misc_feature: MA Experiment 20000071 PARAMETER Experiment Name: At_100uM_ABA_Mutants_cDNA_P Parameter: Tissue Value: Aerial
  misc_feature: MA Experiment 20000071 PARAMETER Experiment Name: At_100uM_ABA_Mutants_cDNA_P Parameter: Treatment Value: 100uM ABA vs. No Treatment
  misc_feature: MA Experiment ID: 20000072 Result: Down-regulated in Transcription
  misc_feature: MA Experiment 20000072 PARAMETER Experiment Name: At_100uM_ABA_Mutants_cDNA_P Parameter: Plant Line Value: CS8105
  misc_feature: MA Experiment 20000072 PARAMETER Experiment Name: At_100uM_ABA_Mutants_cDNA_P Parameter: Timepoint (hr) Value: 6
  misc_feature: MA Experiment 20000072 PARAMETER Experiment Name: At_100uM_ABA_Mutants_cDNA_P Parameter: Tissue Value: Aerial
  misc_feature: MA Experiment 20000072 PARAMETER Experiment Name: At_100uM_ABA_Mutants_cDNA_P Parameter: Treatment Value: 100uM ABA vs. No Treatment
  misc_feature: MA Experiment ID: 20000086 Result: Down-regulated in Transcription
  misc_feature: MA Experiment 20000086 PARAMETER Experiment Name: At_100uM_ABA_Mutants_cDNA_P Parameter: Plant Line Value: CS22
  misc_feature: MA Experiment 20000086 PARAMETER Experiment Name: At_100uM_ABA_Mutants_cDNA_P Parameter: Timepoint (hr) Value: 6
  misc_feature: MA Experiment 20000086 PARAMETER Experiment Name: At_100uM_ABA_Mutants_cDNA_P Parameter: Tissue Value: Aerial
  misc_feature: MA Experiment 20000086 PARAMETER Experiment Name: At_100uM_ABA_Mutants_cDNA_P Parameter: Treatment Value: 100uM ABA vs. No Treatment
  misc_feature: MA Experiment ID: 20000087 Result: Down-regulated in Transcription
  misc_feature: MA Experiment 20000087 PARAMETER Experiment Name: At_100uM_ABA_Mutants_cDNA_P Parameter: Plant Line Value: WS
  misc_feature: MA Experiment 20000087 PARAMETER Experiment Name: At_100uM_ABA_Mutants_cDNA_P Parameter: Timepoint (hr) Value: 6
  misc_feature: MA Experiment 20000087 PARAMETER Experiment Name: At_100uM_ABA_Mutants_cDNA_P Parameter: Tissue Value: Aerial
  misc_feature: MA Experiment 20000087 PARAMETER Experiment Name: At_100uM_ABA_Mutants_cDNA_P Parameter: Treatment Value: 100uM ABA vs. No Treatment
  misc_feature: MA Experiment ID: 20000088 Result: Down-regulated in Transcription
  misc_feature: MA Experiment 20000088 PARAMETER Experiment Name: At_100uM_ABA_Mutants_cDNA_P Parameter: Plant Line Value: Landsberg
  misc_feature: MA Experiment 20000088 PARAMETER Experiment Name: At_100uM_ABA_Mutants_cDNA_P Parameter: Timepoint (hr) Value: 6
  misc_feature: MA Experiment 20000088 PARAMETER Experiment Name: At_100uM_ABA_Mutants_cDNA_P Parameter: Tissue Value: Aerial
  misc_feature: MA Experiment 20000088 PARAMETER Experiment Name: At_100uM_ABA_Mutants_cDNA_P Parameter: Treatment Value: 100uM ABA vs. No Treatment
  misc_feature: MA Experiment ID: 20000117 Result: Down-regulated in Transcription
  misc_feature: MA Experiment 20000117 PARAMETER Experiment Name: At_100uM_ABA_Mutants_cDNA_P Parameter: Plant Line Value: Columbia
  misc_feature: MA Experiment 20000117 PARAMETER Experiment Name: At_100uM_ABA_Mutants_cDNA_P Parameter: Timepoint (hr) Value: 6
  misc_feature: MA Experiment 20000117 PARAMETER Experiment Name: At_100uM_ABA_Mutants_cDNA_P Parameter: Tissue Value: Aerial
  misc_feature: MA Experiment 20000117 PARAMETER Experiment Name: At_100uM_ABA_Mutants_cDNA_P Parameter: Treatment Value: 100uM ABA vs. No Treatment
  misc_feature: MA Experiment ID: 20000180 Result: Up-regulated in Transcription
  misc_feature: MA Experiment 20000180 PARAMETER Experiment Name: At_Germinating_Seeds_P Parameter: Age (hr) Value: 24 vs. 0
  misc_feature: MA Experiment 20000180 PARAMETER Experiment Name: At_Germinating_Seeds_P Parameter: Tissue Value: Germinating Seeds
  misc_feature: MA Experiment ID: 20000184 Result: Up-regulated in Transcription
  misc_feature: MA Experiment 20000184 PARAMETER Experiment Name: At_Shoots__P Parameter: Age (day) Value: 7
  misc_feature: MA Experiment 20000184 PARAMETER Experiment Name: At_Shoots__P Parameter: Tissue Value: Shoots vs. Whole Plant
  misc_feature: MA Experiment ID: 20000185 Result: Down-regulated in Transcription
  misc_feature: MA Experiment 20000185 PARAMETER Experiment Name: At_Roots__P Parameter: Age (day) Value: 7 vs. 21
  misc_feature: MA Experiment 20000185 PARAMETER Experiment Name: At_Roots__P Parameter: Organism Value: A. thaliana
  misc_feature: MA Experiment 20000185 PARAMETER Experiment Name: At_Roots__P Parameter: Tissue Value: Roots vs. Whole Plant
  misc_feature: MA Experiment ID: 20000224 Result: Down-regulated in Transcription
  misc_feature: MA Experiment ID: 20000227 Result: Down-regulated in Transcription
  misc_feature: MA Experiment 20000227 PARAMETER Experiment Name: At_Root-Tips-vs-Tops_P Parameter: Tissue Value: Root Tips vs. Root Tops
  misc_feature: MA Experiment ID: 20000264 Result: Down-regulated in Transcription
  misc_feature: MA Experiment 20000264 PARAMETER Experiment Name: At_Open_Flower_P Parameter: Age (day) Value: 21
  misc_feature: MA Experiment 20000264 PARAMETER Experiment Name: At_Open_Flower_P Parameter: Plant Line Value: WS
  misc_feature: MA Experiment 20000264 PARAMETER Experiment Name: At_Open_Flower_P Parameter: Tissue Value: Open Flower vs. Whole Plant
  misc_feature: MA Experiment ID: 20000438 Result: Up-regulated in Transcription
  misc_feature: MA Experiment 20000438 PARAMETER Experiment Name: At_Shoots__P Parameter: Age (day) Value: 14
  misc_feature: MA Experiment 20000438 PARAMETER Experiment Name: At_Shoots__P Parameter: Tissue Value: Shoots vs. Whole Plant
  misc_feature: MA Experiment ID: 20000439 Result: Down-regulated in Transcription
  misc_feature: MA Experiment 20000439 PARAMETER Experiment Name: At_Roots__P Parameter: Age (day) Value: 14 vs. 21
  misc_feature: MA Experiment 20000439 PARAMETER Experiment Name: At_Roots__P Parameter: Organism Value: A. thaliana
  misc_feature: MA Experiment 20000439 PARAMETER Experiment Name: At_Roots__P Parameter: Tissue Value: Roots vs. Whole Plant
  misc_feature: MA Experiment ID: 20000794 Result: Down-regulated in Transcription
  misc_feature: MA Experiment 20000794 PARAMETER Experiment Name: At_Petals_P Parameter: Age (day) Value: 23-25 days
  misc_feature: MA Experiment 20000794 PARAMETER Experiment Name: At_Petals_P Parameter: Plant Line Value: WS
  misc_feature: MA Experiment 20000794 PARAMETER Experiment Name: At_Petals_P Parameter: Tissue Value: Petals vs. Whole plant
  misc_feature: MA Experiment ID: 20001557 Result: Down-regulated in Transcription
  misc_feature: MA Experiment 20001557 PARAMETER Experiment Name: At_Drought_Soil_Dry_P Parameter: Age (day) Value: 27
  misc_feature: MA Experiment 20001557 PARAMETER Experiment Name: At_Drought_Soil_Dry_P Parameter: Organism Value: A. thaliana
  misc_feature: MA Experiment 20001557 PARAMETER Experiment Name: At_Drought_Soil_Dry_P Parameter: Plant Line Value: WS
  misc_feature: MA Experiment 20001557 PARAMETER Experiment Name: At_Drought_Soil_Dry_P Parameter: Post Timepoint (hr) Value: 3
  misc_feature: MA Experiment 20001557 PARAMETER Experiment Name: At_Drought_Soil_Dry_P Parameter: Post-Treatment Value: Re-Water vs. No Drought
  misc_feature: MA Experiment 20001557 PARAMETER Experiment Name: At_Drought_Soil_Dry_P Parameter: Timepoint (day) Value: 13
  misc_feature: MA Experiment 20001557 PARAMETER Experiment Name: At_Drought_Soil_Dry_P Parameter: Treatment Value: Drought vs. No Drought
  misc_feature: MA Experiment ID: 20001757 Result: Up-regulated in Transcription
  misc_feature: MA Experiment 20001757 PARAMETER Experiment Name: At_50mM_NH4NO3_L-to-H_P Parameter: Timepoint (hr) Value: 6
  misc_feature: MA Experiment 20001757 PARAMETER Experiment Name: At_50mM_NH4NO3_L-to-H_P Parameter: Tissue Value: Leaf
  misc_feature: MA Experiment 20001757 PARAMETER Experiment Name: At_50mM_NH4NO3_L-to-H_P Parameter: Treatment Value: 50mM NH4NO3 vs 100mM Mannitol
tttcattctcttcttacaccttttctccagagttccgacaatggcttcagcatcagcgacagctactcttctcaaacccaatcttccgccgcataaaccgaccatcatcgcctcctccgtatctccgcctcttcctcctccacgtcgcaaccacctcctccgccgcgatttcctctccctggcggcaacatccacgcttctaacacaatcgattcagtttctagctccggcgccggtctccgccgctgaagatgaagagtatatcaaagatacgtcggcagtgatcagtaaagtaaggagtacgctttcgatgcagaagacagatccgaatgtggctgatgcggtggcggagctgagagaagcgtcgaattcttgggttgccaagtaccggaaagagaaagctcttctcggaaaagcttctttccgggatatatactcggcgttgaatgctgtttcaggtcattatgtgagttttggtccgacggctccgattccggcgaagaggaaggcgaggattcttgaagagatggaaactgctgagaaagctctcacaagaggaagatgaaaaaactgcagtcaggccttcttctccattttcttgttgatgaaaattttattttcctaaaaatgccaatcgaattatatgagaagagaaacttgaattggctcgcctgcttttttttttcattcctgtaaaatacttaatgttctgcatgataattgcttaattatcattatcagagatacttatataacttatatcgaattccattttc

SEQ ID NO: 103121 - protein, 187 aa, Arabidopsis thaliana
  peptide (1)..(187): Ceres Seq. ID no. 13612028
  misc_feature (14)..(187): Homolog of NCBI NO: 18379115 NR Description: photosystem II protein family [Arabidopsis
  misc_feature (14)..(107): Homolog of NCBI NO: 11692876 NR Description: At1g03600 [Arabidopsis thaliana]
  misc_feature (67)..(185): Homolog of NCBI NO: 22300006 NR Description: photosystem II 11 kD protein [Thermosynechococcus
  misc_feature (86)..(186): Homolog of NCBI NO: 17228753 NR Description: photosystem II 11 kD protein [Nostoc sp. PCC 7120]
  misc_feature (53)..(186): Homolog of NCBI NO: 23125315 NR Description: hypothetical protein [Nostoc punctiforme]
  misc_feature (58)..(186): Homolog of NCBI NO: 33866304 NR Description: possible photosystem II Psb27 protein sp. WH 8102] >gi|33639279|emb|CAE08287.1| possible photosystem II
  misc_feature (87)..(186): Homolog of NCBI NO: 23041360 NR Description: hypothetical protein [Trichodesmium erythraeum
  misc_feature (50)..(187): Homolog of NCBI NO: 33863528 NR Description: possible Photosystem II reaction center Psb27 [Prochlorococcus marinus str. MIT 9313] possible Photosystem II reaction center Psb27 protein
  misc_feature (87)..(186): Homolog of NCBI NO: 6919945 NR Description: Photosystem II 11 kDa protein precursor
  misc_feature (87)..(186): Homolog of NCBI NO: 16331054 NR Description: photosystem II 11 kD protein [Synechocystis sp.
FILFLHLFSRVPTMASASATATLLKPNLPPHKPTIIASSVSPPLPPPRRNHLLRRDFLSLAATSTLLTQSIQFLAPAPVSAAEDEEYIKDTSAVISKVRSTLSMQKTDPNVADAVAELREASNSWVAKYRKEKALLGKASFRDIYSALNAVSGHYVSFGPTAPIPAKRKARILEEMETAEKALTRGR

SEQ ID NO: 103122 - protein, 174 aa, Arabidopsis thaliana; identical to SEQ ID NO: 39959
  peptide (1)..(174): Ceres Seq. ID no. 13612029
  misc_feature (1)..(174): Homolog of NCBI NO: 18379115 NR Description: photosystem II protein family [Arabidopsis
  misc_feature (1)..(94): Homolog of NCBI NO: 11692876 NR Description: At1g03600 [Arabidopsis thaliana]
  misc_feature (54)..(172): Homolog of NCBI NO: 22300006 NR Description: photosystem II 11 kD protein [Thermosynechococcus
  misc_feature (73)..(173): Homolog of NCBI NO: 17228753 NR Description: photosystem II 11 kD protein [Nostoc sp. PCC 7120]
  misc_feature (40)..(173): Homolog of NCBI NO: 23125315 NR Description: hypothetical protein [Nostoc punctiforme]
  misc_feature (45)..(173): Homolog of NCBI NO: 33866304 NR Description: possible photosystem II Psb27 protein sp. WH 8102] >gi|33639279|emb|CAE08287.1| possible photosystem II
  misc_feature (74)..(173): Homolog of NCBI NO: 23041360 NR Description: hypothetical protein [Trichodesmium erythraeum
  misc_feature (37)..(174): Homolog of NCBI NO: 33863528 NR Description: possible Photosystem II reaction center Psb27 [Prochlorococcus marinus str. MIT 9313] possible Photosystem II reaction center Psb27 protein
  misc_feature (74)..(173): Homolog of NCBI NO: 6919945 NR Description: Photosystem II 11 kDa protein precursor
  misc_feature (74)..(173): Homolog of NCBI NO: 16331054 NR Description: photosystem II 11 kD protein [Synechocystis sp.

SEQ ID NO: 103123 - DNA, 4071 bp, Arabidopsis thaliana
  misc_feature (1)..(4071): Ceres Seq. ID no. 13612036
  misc_feature: MA Experiment ID: 20000180 Result: Up-regulated in Transcription
  misc_feature: MA Experiment 20000180 PARAMETER Experiment Name: At_Germinating_Seeds_P Parameter: Age (hr) Value: 24 vs. 0
  misc_feature: MA Experiment 20000180 PARAMETER Experiment Name: At_Germinating_Seeds_P Parameter: Tissue Value: Germinating Seeds
  misc_feature: MA Experiment ID: 20000185 Result: Up-regulated in Transcription
  misc_feature: MA Experiment 20000185 PARAMETER Experiment Name: At_Roots__P Parameter: Age (day) Value: 7 vs. 21
  misc_feature: MA Experiment 20000185 PARAMETER Experiment Name: At_Roots__P Parameter: Organism Value: A. thaliana
  misc_feature: MA Experiment 20000185 PARAMETER Experiment Name: At_Roots__P Parameter: Tissue Value: Roots vs. Whole Plant
  misc_feature: MA Experiment ID: 20000227 Result: Up-regulated in Transcription
  misc_feature: MA Experiment 20000227 PARAMETER Experiment Name: At_Root-Tips-vs-Tops_P Parameter: Tissue Value: Root Tips vs. Root Tops
  misc_feature: MA Experiment ID: 20000234 Result: Up-regulated in Transcription
  misc_feature: MA Experiment 20000234 PARAMETER Experiment Name: At_Siliques_P Parameter: Age (day) Value: 21
  misc_feature: MA Experiment 20000234 PARAMETER Experiment Name: At_Siliques_P Parameter: Organism Value: A. thaliana
  misc_feature: MA Experiment 20000234 PARAMETER Experiment Name: At_Siliques_P Parameter: Plant Line Value: WS
  misc_feature: MA Experiment 20000234 PARAMETER Experiment Name: At_Siliques_P Parameter: Tissue Value: Less Than 5mm Siliques vs. Whole Plant
  misc_feature: MA Experiment ID: 20000264 Result: Up-regulated in Transcription
  misc_feature: MA Experiment 20000264 PARAMETER Experiment Name: At_Open_Flower_P Parameter: Age (day) Value: 21
  misc_feature: MA Experiment 20000264 PARAMETER Experiment Name: At_Open_Flower_P Parameter: Plant Line Value: WS
  misc_feature: MA Experiment 20000264 PARAMETER Experiment Name: At_Open_Flower_P Parameter: Tissue Value: Open Flower vs. Whole Plant
  misc_feature: MA Experiment ID: 20000265 Result: Up-regulated in Transcription
  misc_feature: MA Experiment 20000265 PARAMETER Experiment Name: At_Open_Flower_P Parameter: Age (day) Value: 21
  misc_feature: MA Experiment 20000265 PARAMETER Experiment Name: At_Open_Flower_P Parameter: Plant Line Value: WS
  misc_feature: MA Experiment 20000265 PARAMETER Experiment Name: At_Open_Flower_P Parameter: Tissue Value: Closed Flower vs. Whole Plant
  misc_feature: MA Experiment ID: 20000286 Result: Up-regulated in Transcription
  misc_feature: MA Experiment 20000286 PARAMETER Experiment Name: At_Open_Flower_P Parameter: Age (day) Value: 21
  misc_feature: MA Experiment 20000286 PARAMETER Experiment Name: At_Open_Flower_P Parameter: Plant Line Value: WS
  misc_feature: MA Experiment 20000286 PARAMETER Experiment Name: At_Open_Flower_P Parameter: Tissue Value: Half Open vs. Whole Plant
  misc_feature: MA Experiment ID: 20000439 Result: Up-regulated in Transcription
  misc_feature: MA Experiment 20000439 PARAMETER Experiment Name: At_Roots__P Parameter: Age (day) Value: 14 vs. 21
  misc_feature: MA Experiment 20000439 PARAMETER Experiment Name: At_Roots__P Parameter: Organism Value: A. thaliana
  misc_feature: MA Experiment 20000439 PARAMETER Experiment Name: At_Roots__P Parameter: Tissue Value: Roots vs. Whole Plant
  misc_feature: MA Experiment ID: 20000495 Result: Up-regulated in Transcription
  misc_feature: MA Experiment 20000495 PARAMETER Experiment Name: At_Guard_Cells_P Parameter: Harvest Date Value: 8/2/2002
  misc_feature: MA Experiment 20000495 PARAMETER Experiment Name: At_Guard_Cells_P Parameter: Organism Value: A. thaliana
  misc_feature: MA Experiment 20000495 PARAMETER Experiment Name: At_Guard_Cells_P Parameter: Tissue Value: Guard Cells vs. Leaves
  misc_feature: MA Experiment ID: 20000794 Result: Up-regulated in Transcription
  misc_feature: MA Experiment 20000794 PARAMETER Experiment Name: At_Petals_P Parameter: Age (day) Value: 23-25 days
  misc_feature: MA Experiment 20000794 PARAMETER Experiment Name: At_Petals_P Parameter: Plant Line Value: WS
  misc_feature: MA Experiment 20000794 PARAMETER Experiment Name: At_Petals_P Parameter: Tissue Value: Petals vs. Whole plant
aatgagaagaggcaattaaaaatctcccgtgactctcgtctccccatctctctctctccctctgcccaaatttctggggcaaatttgttcatcagatctactacaatctctctttttcttcgggtatggagggccaacgaggcagtaattcttcgttgagctctggcaatggcaccgaagtcgccaccgacgtttcttcttgcttctatgttcccaatccctctggaaccgatttcgatgccgagtcgtcttctcttcctcctctctccccagctcctcaagtggcattgtcaattcctgcggagcttgccgccgccattcccctcatcgatcgcttccaggttgaagcttttctgcggctaatgcagaaacaaatccagtctgctgggaagcgtggcttcttctattccaaaaagtcctctggctccaatgtccgcgagcgcttcacatttgaggatatgctttgctttcaaaaggatccaatccccacatctctcctcaagattaacagcgatctcgtcagccgtgctaccaagttgtttcatctcatcttaaaatatatgggtgttgattcatctgatcgatctacgcctcccagtttagatgaacgcattgacctcgttggaaagctcttcaaaaaaactttgaagcgtgttgaactcagggacgaactttttgcccaaatctccaaacagactagacataatcctgacaggcaatacttgatcaaagcttgggaattgatgtacttatgtgcctcctctatgcctcctagcaaagatatcggtggatatctatctgagtatattcataatgtcgcacacgatgcaactattgaaccggatgctcaggttcttgctgttaacactttgaaagctttaaagcgctctatcaaagctggtcctaggcacaccacacctggtcgtgaagaaattgaagcccttttgaccggtagaaagctcacaaccattgtcttctttctcgatgaaacttttgaagaaatttcatatgacatggctaccacagtgtctgatgctgttgaggagctagctggaacaattaaactatcagctttctctagctttagtttgtttgaatgtcgtaaagttgtttcaagttctaaatcatctgatcccggaaatgaggaatatataggattggatgataacaagtatattggagatctcctcgcagaatttaaagctattaaagatcgaaataaaggagagatactacactgcaaactggtatttaaaaaaaaattattccgagagtctgatgaagctgtaacagatctgatgtttgtgcaactttcgtatgttcaactgcaacatgactatttgctaggaaactatcctgttgggagggacgatgctgcacagctttgtgccttgcaaattcttgttgggattgggtttgtcaatagtccagagtcatgcattgattggacatcacttcttgagcggtttttgccaagacaaatagcaataacccgagcaaagcgtgaatgggaattggatatccttgctcgctaccgttcaatggagaacgtgaccaaagatgatgcaagacaacaatttctacggatactgaaggcactgccatacgggaattcagttttttttagcgtacgcaagatagatgatccgatcggtcttttacctgggcgaatcattttgggtatcaacaaacgtggggttcacttttttcgaccggttcctaaagaatatctgcactctgctgaactacgtgacatcatgcaatttggcagcagtaacactgctgtctttttcaaaatgagagtcgctggtgttcttcacatatttcagttcgagacaaaacagggagaagaaatttgtgttgctttgcaaacacatataaatgatgtcatgttgcgtcgttactccaaagctcgatctgctgccaatagcttggttaatggagatatatcttgtagttctaagccgcaaaattttgaagtgtatgaaaaacgtttgcaagatttgtctaaggcttatgaagagtcccaaaagaagattgagaagttgatggatgaacaacaagagaaaaatcagcaagaagttactctgcgtgaagagttagaagctatacacaatggtttggagcttgaaaggagaaaattgttggaggttactttagaccgagataaacttaggtcattgtgtgacgagaagggaacaactattcaatccttgatgtctgaactgcgaggaatggaagcaaggttggcaaagtcgggcaacacaaaatcaagtaaagagacaaaatcagaattagccgaaatgaataatcagatattatacaagatccaaaaggagttagaagttcgaaataaggaattgcatgtcgcagttgataattcaaagaggttgttgagtgaaaacaagatattggagcaaaatctcaatattgaaaagaagaaaaaagaggaggttgaaattcatcaaaagagatatgaacaagaaaaaaaggtgttaaagcttcgagtttctgaacttgaaaataagcttgaagtacttgctcaagacttggatagtgctgagtctacgattgaaagtaagaattctgacatgctgctgttgcaaaataacttgaaagaacttgaggagttaagagaaatgaaagaggacattgacagaaaaaatgagcaaacagctgccattttgaaaatgcaaggagcccaacttgctgagctagaaatactttataaggaagaacaagttttaaggaaaagatactataataccatagaagatatgaaagggaagattagagtttattgtcgaataagacctctaaatgaaaaagagagttcagagagggaaaaacaaatgctgacaactgtggatgagtttactgttgaacatccatggaaagacgacaaaagaaagcaacacatatatgatcgcgtatttgacatgcgtgctagtcaagatgatatctttgaagacacaaagtatttggtacagtcggctgtagatgggtataacgtttgcatctttgcatatggtcaaactggttctggaaaaactttcactatatatgggcatgagagcaatcctggactcacacctcgagctacaaaggaactgttcaacatattaaagcgagatagcaagagattttcattttctctaaaggcatatatggtggaactttatcaagacacacttgtagaccttttgttaccaaaaagtgcaagacgcttgaaactagagattaaaaaagattcaaagggaatggtctttgtagagaatgtgacaactattcctatatcaactttggaggaactgcgaatgattcttgaacggggatcggaacgacgacatgtttctggaacaaatatgaatgaagaaagctcaagatctcacctcatattatcagttgttattgaaagtattgatcttcaaacccagtctgctgcgaggggcaagctgagttttgtggatcttgctggttctgagagagttaaaaagtcgggctcagctggttgtcaactcaaagaagctcaaagtatcaacaaatcactttctgcattaggtgatgttattggtgctttatcttctggcaaccagcatattccttataggaatcacaagctaacgatgttgatgagcgattcattgggcggcaatgccaagacgttaatgtttgttaatgtgtctccagccgaatcaaatttggacgagacgtacaattctcttctatatgcatcgagagtgagaacgatcgtgaatgatcccagcaaacatatatcatccaaagagatggtgcgattgaagaagttggtagcatactggaaagagcaagccggtaaaaaaggtgaggaagaagacttggtggatattgaggaagatcgtacacgaaaagatgaggcagatagttgaagaaagctgacatgaaattcgtctaggtgaaattgagactatagtatcactggttttcaccattctttttgtaggaagttcctgctttatagtagagtttctatcgaagagtagtcctatatgtctcaaactttctctcttttgatgagatcttcattacaag

SEQ ID NO: 103124 - protein, 1260 aa, Arabidopsis thaliana
  peptide (1)..(1260): Ceres Seq. ID no. 13612037
  misc_feature (312)..(499): Pfam Name: FERM domain (Band 4.1 family) Pfam Description: FERM domain (Band 4.1 family)
  misc_feature (631)..(1245): Homolog of NCBI NO: 6166459 NR Description: kinesin-C [Strongylocentrotus purpuratus]
  misc_feature (610)..(1213): Homolog of NCBI NO: 19923321 NR Description: kinesin family member C3 [Homo sapiens]
  misc_feature (594)..(1209): Homolog of NCBI NO: 1762638 NR Description: microtubule-based motor protein
  misc_feature (627)..(1222): Homolog of NCBI NO: 18416938 NR Description: kinesin-like protein B (katB) [Arabidopsis
  misc_feature (627)..(1222): Homolog of NCBI NO: 7446304 NR Description: kinesin-related protein katB - Arabidopsis
  misc_feature (708)..(1250): Homolog of NCBI NO: 15218418 NR Description: kinesin-related protein [Arabidopsis thaliana]
  misc_feature (604)..(1222): Homolog of NCBI NO: 10176794 NR Description: kinesin-like protein [Arabidopsis thaliana]
  misc_feature (621)..(1206): Homolog of NCBI NO: 19114370 NR Description: kinesin-like protein [Schizosaccharomyces pombe]
  misc_feature (723)..(1213): Homolog of NCBI NO: 14124976 NR Description: Similar to kinesin family member C3 [Homo sapiens]
  misc_feature (851)..(1209): Homolog of NCBI NO: 11245496 NR Description: C-terminal kinesin KIFC1 [Trypanosoma brucei]
MEGQRGSNSSLSSGNGTEVATDVSSCFYVPNPSGTDFDAESSSLPPLSPAPQVALSIPAELAAAIPLIDRFQVEAFLRLMQKQIQSAGKRGFFYSKKSSGSNVRERFTFEDMLCFQKDPIPTSLLKINSDLVSRATKLFHLILKYMGVDSSDRSTPPSLDERIDLVGKLFKKTLKRVELRDELFAQISKQTRHNPDRQYLIKAWELMYLCASSMPPSKDIGGYLSEYIHNVAHDATIEPDAQVLAVNTLKALKRSIKAGPRHTTPGREEIEALLTGRKLTTIVFFLDETFEEISYDMATTVSDAVEELAGTIKLSAFSSFSLFECRKVVSSSKSSDPGNEEYIGLDDNKYIGDLLAEFKAIKDRNKGEILHCKLVFKKKLFRESDEAVTDLMFVQLSYVQLQHDYLLGNYPVGRDDAAQLCALQILVGIGFVNSPESCIDWTSLLERFLPRQIAITRAKREWELDILARYRSMENVTKDDARQQFLRILKALPYGNSVFFSVRKIDDPIGLLPGRIILGINKRGVHFFRPVPKEYLHSAELRDIMQFGSSNTAVFFKMRVAGVLHIFQFETKQGEEICVALQTHINDVMLRRYSKARSAANSLVNGDISCSSKPQNFEVYEKRLQDLSKAYEESQKKIEKLMDEQQEKNQQEVTLREELEAIHNGLELERRKLLEVTLDRDKLRSLCDEKGTTIQSLMSELRGMEARLAKSGNTKSSKETKSELAEMNNQILYKIQKELEVRNKELHVAVDNSKRLLSENKILEQNLNIEKKKKEEVEIHQKRYEQEKKVLKLRVSELENKLEVLAQDLDSAESTIESKNSDMLLLQNNLKELEELREMKEDIDRKNEQTAAILKMQGAQLAELEILYKEEQVLRKRYYNTIEDMKGKIRVYCRIRPLNEKESSEREKQMLTTVDEFTVEHPWKDDKRKQHIYDRVFDMRASQDDIFEDTKYLVQSAVDGYNVCIFAYGQTGSGKTFTIYGHESNPGLTPRATKELFNILKRDSKRFSFSLKAYMVELYQDTLVDLLLPKSARRLKLEIKKDSKGMVFVENVTTIPISTLEELRMILERGSERRHVSGTNMNEESSRSHLILSVVIESIDLQTQSAARGKLSFVDLAGSERVKKSGSAGCQLKEAQSINKSLSALGDVIGALSSGNQHIPYRNHKLTMLMSDSLGGNAKTLMFVNVSPAESNLDETYNSLLYASRVRTIVNDPSKHISSKEMVRLKKLVAYWKEQAGKKGEEEDLVDIEEDRTRKDEADS

SEQ ID NO: 103125 - protein, 1181 aa, Arabidopsis thaliana
  peptide (1)..(1181): Ceres Seq. ID no. 13612038
  misc_feature (233)..(420): Pfam Name: FERM domain (Band 4.1 family) Pfam Description: FERM domain (Band 4.1 family)
  misc_feature (552)..(1166): Homolog of NCBI NO: 6166459 NR Description: kinesin-C [Strongylocentrotus purpuratus]
  misc_feature (531)..(1134): Homolog of NCBI NO: 19923321 NR Description: kinesin family member C3 [Homo sapiens]
  misc_feature (515)..(1130): Homolog of NCBI NO: 1762638 NR Description: microtubule-based motor protein
  misc_feature (548)..(1143): Homolog of NCBI NO: 18416938 NR Description: kinesin-like protein B (katB) [Arabidopsis
  misc_feature (548)..(1143): Homolog of NCBI NO: 7446304 NR Description: kinesin-related protein katB - Arabidopsis
  misc_feature (629)..(1171): Homolog of NCBI NO: 15218418 NR Description: kinesin-related protein [Arabidopsis thaliana]
  misc_feature (525)..(1143): Homolog of NCBI NO: 10176794 NR Description: kinesin-like protein [Arabidopsis thaliana]
  misc_feature (542)..(1127): Homolog of NCBI NO: 19114370 NR Description: kinesin-like protein [Schizosaccharomyces pombe]
  misc_feature (644)..(1134): Homolog of NCBI NO: 14124976 NR Description: Similar to kinesin family member C3 [Homo sapiens]
  misc_feature (772)..(1130): Homolog of NCBI NO: 11245496 NR Description: C-terminal kinesin KIFC1 [Trypanosoma brucei]
MQKQIQSAGKRGFFYSKKSSGSNVRERFTFEDMLCFQKDPIPTSLLKINSDLVSRATKLFHLILKYMGVDSSDRSTPPSLDERIDLVGKLFKKTLKRVELRDELFAQISKQTRHNPDRQYLIKAWELMYLCASSMPPSKDIGGYLSEYIHNVAHDATIEPDAQVLAVNTLKALKRSIKAGPRHTTPGREEIEALLTGRKLTTIVFFLDETFEEISYDMATTVSDAVEELAGTIKLSAFSSFSLFECRKVVSSSKSSDPGNEEYIGLDDNKYIGDLLAEFKAIKDRNKGEILHCKLVFKKKLFRESDEAVTDLMFVQLSYVQLQHDYLLGNYPVGRDDAAQLCALQILVGIGFVNSPESCIDWTSLLERFLPRQIAITRAKREWELDILARYRSMENVTKDDARQQFLRILKALPYGNSVFFSVRKIDDPIGLLPGRIILGINKRGVHFFRPVPKEYLHSAELRDIMQFGSSNTAVFFKMRVAGVLHIFQFETKQGEEICVALQTHINDVMLRRYSKARSAANSLVNGDISCSSKPQNFEVYEKRLQDLSKAYEESQKKIEKLMDEQQEKNQQEVTLREELEAIHNGLELERRKLLEVTLDRDKLRSLCDEKGTTIQSLMSELRGMEARLAKSGNTKSSKETKSELAEMNNQILYKIQKELEVRNKELHVAVDNSKRLLSENKILEQNLNIEKKKKEEVEIHQKRYEQEKKVLKLRVSELENKLEVLAQDLDSAESTIESKNSDMLLLQNNLKELEELREMKEDIDRKNEQTAAILKMQGAQLAELEILYKEEQVLRKRYYNTIEDMKGKIRVYCRIRPLNEKESSEREKQMLTTVDEFTVEHPWKDDKRKQHIYDRVFDMRASQDDIFEDTKYLVQSAVDGYNVCIFAYGQTGSGKTFTIYGHESNPGLTPRATKELFNILKRDSKRFSFSLKAYMVELYQDTLVDLLLPKSARRLKLEIKKDSKGMVFVENVTTIPISTLEELRMILERGSERRHVSGTNMNEESSRSHLILSVVIESIDLQTQSAARGKLSFVDLAGSERVKKSGSAGCQLKEAQSINKSLSALGDVIGALSSGNQHIPYRNHKLTMLMSDSLGGNAKTLMFVNVSPAESNLDETYNSLLYASRVRTIVNDPSKHISSKEMVRLKKLVAYWKEQAGKKGEEEDLVDIEEDRTRKDEADS

SEQ ID NO: 103126 - protein, 1149 aa, Arabidopsis thaliana
  peptide (1)..(1149): Ceres Seq. ID no. 13612039
  misc_feature (201)..(388): Pfam Name: FERM domain (Band 4.1 family) Pfam Description: FERM domain (Band 4.1 family)
  misc_feature (520)..(1134): Homolog of NCBI NO: 6166459 NR Description: kinesin-C [Strongylocentrotus purpuratus]
  misc_feature (499)..(1102): Homolog of NCBI NO: 19923321 NR Description: kinesin family member C3 [Homo sapiens]
  misc_feature (483)..(1098): Homolog of NCBI NO: 1762638 NR Description: microtubule-based motor protein
  misc_feature (516)..(1111): Homolog of NCBI NO: 18416938 NR Description: kinesin-like protein B (katB) [Arabidopsis
  misc_feature (516)..(1111): Homolog of NCBI NO: 7446304 NR Description: kinesin-related protein katB - Arabidopsis
  misc_feature (597)..(1139): Homolog of NCBI NO: 15218418 NR Description: kinesin-related protein [Arabidopsis thaliana]
  misc_feature (493)..(1111): Homolog of NCBI NO: 10176794 NR Description: kinesin-like protein [Arabidopsis thaliana]
  misc_feature (510)..(1095): Homolog of NCBI NO: 19114370 NR Description: kinesin-like protein [Schizosaccharomyces pombe]
  misc_feature (612)..(1102): Homolog of NCBI NO: 14124976 NR Description: Similar to kinesin family member C3 [Homo sapiens]
  misc_feature (740)..(1098): Homolog of NCBI NO: 11245496 NR Description: C-terminal kinesin KIFC1 [Trypanosoma brucei]
MLCFQKDPIPTSLLKINSDLVSRATKLFHLILKYMGVDSSDRSTPPSLDERIDLVGKLFKKTLKRVELRDELFAQISKQTRHNPDRQYLIKAWELMYLCASSMPPSKDIGGYLSEYIHNVAHDATIEPDAQVLAVNTLKALKRSIKAGPRHTTPGREEIEALLTGRKLTTIVFFLDETFEEISYDMATTVSDAVEELAGTIKLSAFSSFSLFECRKVVSSSKSSDPGNEEYIGLDDNKYIGDLLAEFKAIKDRNKGEILHCKLVFKKKLFRESDEAVTDLMFVQLSYVQLQHDYLLGNYPVGRDDAAQLCALQILVGIGFVNSPESCIDWTSLLERFLPRQIAITRAKREWELDILARYRSMENVTKDDARQQFLRILKALPYGNSVFFSVRKIDDPIGLLPGRIILGINKRGVHFFRPVPKEYLHSAELRDIMQFGSSNTAVFFKMRVAGVLHIFQFETKQGEEICVALQTHINDVMLRRYSKARSAANSLVNGDISCSSKPQNFEVYEKRLQDLSKAYEESQKKIEKLMDEQQEKNQQEVTLREELEAIHNGLELERRKLLEVTLDRDKLRSLCDEKGTTIQSLMSELRGMEARLAKSGNTKSSKETKSELAEMNNQILYKIQKELEVRNKELHVAVDNSKRLLSENKILEQNLNIEKKKKEEVEIHQKRYEQEKKVLKLRVSELENKLEVLAQDLDSAESTIESKNSDMLLLQNNLKELEELREMKEDIDRKNEQTAAILKMQGAQLAELEILYKEEQVLRKRYYNTIEDMKGKIRVYCRIRPLNEKESSEREKQMLTTVDEFTVEHPWKDDKRKQHIYDRVFDMRASQDDIFEDTKYLVQSAVDGYNVCIFAYGQTGSGKTFTIYGHESNPGLTPRATKELFNILKRDSKRFSFSLKAYMVELYQDTLVDLLLPKSARRLKLEIKKDSKGMVFVENVTTIPISTLEELRMILERGSERRHVSGTNMNEESSRSHLILSVVIESIDLQTQSAARGKLSFVDLAGSERVKKSGSAGCQLKEAQSINKSLSALGDVIGALSSGNQHIPYRNHKLTMLMSDSLGGNAKTLMFVNVSPAESNLDETYNSLLYASRVRTIVNDPSKHISSKEMVRLKKLVAYWKEQAGKKGEEEDLVDIEEDRTRKDEADS

SEQ ID NO: 103127 - DNA, 1263 bp, Arabidopsis thaliana
  misc_feature (1)..(1263): Ceres Seq. ID no. 13612055
  misc_feature: MA Experiment ID: 20000030 Result: Up-regulated in Transcription
  misc_feature: MA Experiment 20000030 PARAMETER Experiment Name: At_CS6630_Roots_cDNA_P Parameter: Plant Line Value: CS6630 vs. WS
  misc_feature: MA Experiment 20000030 PARAMETER Experiment Name: At_CS6630_Roots_cDNA_P Parameter: Tissue Value: Roots
  misc_feature: MA Experiment ID: 20000184 Result: Up-regulated in Transcription
  misc_feature: MA Experiment 20000184 PARAMETER Experiment Name: At_Shoots__P Parameter: Age (day) Value: 7
  misc_feature: MA Experiment 20000184 PARAMETER Experiment Name: At_Shoots__P Parameter: Tissue Value: Shoots vs. Whole Plant
  misc_feature: MA Experiment ID: 20000286 Result: Down-regulated in Transcription
  misc_feature: MA Experiment 20000286 PARAMETER Experiment Name: At_Open_Flower_P Parameter: Age (day) Value: 21
  misc_feature: MA Experiment 20000286 PARAMETER Experiment Name: At_Open_Flower_P Parameter: Plant Line Value: WS
  misc_feature: MA Experiment 20000286 PARAMETER Experiment Name: At_Open_Flower_P Parameter: Tissue Value: Half Open vs. Whole Plant
  misc_feature: MA Experiment ID: 20000437 Result: Down-regulated in Transcription
  misc_feature: MA Experiment 20000437 PARAMETER Experiment Name: At_Drought_P Parameter: Age (day) Value: 8
  misc_feature: MA Experiment 20000437 PARAMETER Experiment Name: At_Drought_P Parameter: Organism Value: A. thaliana
  misc_feature: MA Experiment 20000437 PARAMETER Experiment Name: At_Drought_P Parameter: Plant Line Value: WS
  misc_feature: MA Experiment 20000437 PARAMETER Experiment Name: At_Drought_P Parameter: Timepoint (hr) Value: 24
  misc_feature: MA Experiment 20000437 PARAMETER Experiment Name: At_Drought_P Parameter: Tissue Value: Whole Plant
  misc_feature: MA Experiment 20000437 PARAMETER Experiment Name: At_Drought_P Parameter: Treatment Value: Drought vs. No Drought
  misc_feature: MA Experiment ID: 20000438 Result: Up-regulated in Transcription
  misc_feature: MA Experiment 20000438 PARAMETER Experiment Name: At_Shoots__P Parameter: Age (day) Value: 14
  misc_feature: MA Experiment 20000438 PARAMETER Experiment Name: At_Shoots__P Parameter: Tissue Value: Shoots vs. Whole Plant
  misc_feature: MA Experiment ID: 20000451 Result: Up-regulated in Transcription
  misc_feature: MA Experiment 20000451 PARAMETER Experiment Name: At_CS6879_Shoots-Roots_P Parameter: Age (day) Value: 14
  misc_feature: MA Experiment 20000451 PARAMETER Experiment Name: At_CS6879_Shoots-Roots_P Parameter: Organism Value: A. thaliana
  misc_feature: MA Experiment 20000451 PARAMETER Experiment Name: At_CS6879_Shoots-Roots_P Parameter: Plant Line Value: CS6879 vs. WS
  misc_feature: MA Experiment 20000451 PARAMETER Experiment Name: At_CS6879_Shoots-Roots_P Parameter: Tissue Value: Roots
  misc_feature: MA Experiment ID: 20000452 Result: Up-regulated in Transcription
  misc_feature: MA Experiment 20000452 PARAMETER Experiment Name: At_CS6879_Shoots-Roots_P Parameter: Age (day) Value: 14
  misc_feature: MA Experiment 20000452 PARAMETER Experiment Name: At_CS6879_Shoots-Roots_P Parameter: Organism Value: A. thaliana
  misc_feature: MA Experiment 20000452 PARAMETER Experiment Name: At_CS6879_Shoots-Roots_P Parameter: Plant Line Value: CS6879 vs. WS
  misc_feature: MA Experiment 20000452 PARAMETER Experiment Name: At_CS6879_Shoots-Roots_P Parameter: Tissue Value: Shoots
  misc_feature: MA Experiment ID: 20000573 Result: Down-regulated in Transcription
  misc_feature: MA Experiment 20000573 PARAMETER Experiment Name: At_100uM_ABA_Mutants__P Parameter: Organism Value: A. thaliana
  misc_feature: MA Experiment 20000573 PARAMETER Experiment Name: At_100uM_ABA_Mutants__P Parameter: Plant Line Value: CS22 vs. Ler wt
  misc_feature: MA Experiment 20000573 PARAMETER Experiment Name: At_100uM_ABA_Mutants__P Parameter: Timepoint (hr) Value: N/A
  misc_feature: MA Experiment 20000573 PARAMETER Experiment Name: At_100uM_ABA_Mutants__P Parameter: Tissue Value: Whole Plant
  misc_feature: MA Experiment 20000573 PARAMETER Experiment Name: At_100uM_ABA_Mutants__P Parameter: Treatment Value: None
  misc_feature: MA Experiment ID: 20000574 Result: Down-regulated in Transcription
  misc_feature: MA Experiment 20000574 PARAMETER Experiment Name: At_100uM_ABA_Mutants__P Parameter: Organism Value: A. thaliana
  misc_feature: MA Experiment 20000574 PARAMETER Experiment Name: At_100uM_ABA_Mutants__P Parameter: Plant Line Value: CS23 vs. Ler wt
  misc_feature: MA Experiment 20000574 PARAMETER Experiment Name: At_100uM_ABA_Mutants__P Parameter: Timepoint (hr) Value: N/A
  misc_feature: MA Experiment 20000574 PARAMETER Experiment Name: At_100uM_ABA_Mutants__P Parameter: Tissue Value: Whole Plant
  misc_feature: MA Experiment 20000574 PARAMETER Experiment Name: At_100uM_ABA_Mutants__P Parameter: Treatment Value: None
  misc_feature: MA Experiment ID: 20001450 Result: Up-regulated in Transcription
  misc_feature: MA Experiment 20001450 PARAMETER Experiment Name: At_Far-red-induction_P Parameter: Age (day) Value: 7
  misc_feature: MA Experiment 20001450 PARAMETER Experiment Name: At_Far-red-induction_P Parameter: Light Value: Far-red vs. White
  misc_feature: MA Experiment 20001450 PARAMETER Experiment Name: At_Far-red-induction_P Parameter: Organism Value: A. thaliana
  misc_feature: MA Experiment 20001450 PARAMETER Experiment Name: At_Far-red-induction_P Parameter: Plant Line Value: Columbia
  misc_feature: MA Experiment 20001450 PARAMETER Experiment Name: At_Far-red-induction_P Parameter: Timepoint (hr) Value: 8
  misc_feature: MA Experiment 20001450 PARAMETER Experiment Name: At_Far-red-induction_P Parameter: Tissue Value: Whole Plant
  misc_feature: MA Experiment ID: 20001451 Result: Up-regulated in Transcription
  misc_feature: MA Experiment 20001451 PARAMETER Experiment Name: At_Far-red-induction_P Parameter: Age (day) Value: 7
  misc_feature: MA Experiment 20001451 PARAMETER Experiment Name: At_Far-red-induction_P Parameter: Light Value: Far-red vs. White
  misc_feature: MA Experiment 20001451 PARAMETER Experiment Name: At_Far-red-induction_P Parameter: Organism Value: A. thaliana
  misc_feature: MA Experiment 20001451 PARAMETER Experiment Name: At_Far-red-induction_P Parameter: Plant Line Value: Columbia
  misc_feature: MA Experiment 20001451 PARAMETER Experiment Name: At_Far-red-induction_P Parameter: Timepoint (hr) Value: 24
  misc_feature: MA Experiment 20001451 PARAMETER Experiment Name: At_Far-red-induction_P Parameter: Tissue Value: Whole Plant
  misc_feature: MA Experiment ID: 20001557 Result: Down-regulated in Transcription
  misc_feature: MA Experiment 20001557 PARAMETER Experiment Name: At_Drought_Soil_Dry_P Parameter: Age (day) Value: 27
  misc_feature: MA Experiment 20001557 PARAMETER Experiment Name: At_Drought_Soil_Dry_P Parameter: Organism Value: A. thaliana
  misc_feature: MA Experiment 20001557 PARAMETER Experiment Name: At_Drought_Soil_Dry_P Parameter: Plant Line Value: WS
  misc_feature: MA Experiment 20001557 PARAMETER Experiment Name: At_Drought_Soil_Dry_P Parameter: Post Timepoint (hr) Value: 3
  misc_feature: MA Experiment 20001557 PARAMETER Experiment Name: At_Drought_Soil_Dry_P Parameter: Post-Treatment Value: Re-Water vs. No Drought
  misc_feature: MA Experiment 20001557 PARAMETER Experiment Name: At_Drought_Soil_Dry_P Parameter: Timepoint (day) Value: 13
  misc_feature: MA Experiment 20001557 PARAMETER Experiment Name: At_Drought_Soil_Dry_P Parameter: Treatment Value: Drought vs. No Drought
  misc_feature: MA Experiment ID: 20001558 Result: Down-regulated in Transcription
  misc_feature: MA Experiment 20001558 PARAMETER Experiment Name: At_Drought_Soil_Dry_P Parameter: Age (day) Value: 27
  misc_feature: MA Experiment 20001558 PARAMETER Experiment Name: At_Drought_Soil_Dry_P Parameter: Organism Value: A. thaliana
  misc_feature: MA Experiment 20001558 PARAMETER Experiment Name: At_Drought_Soil_Dry_P Parameter: Plant Line Value: WS
  misc_feature: MA Experiment 20001558 PARAMETER Experiment Name: At_Drought_Soil_Dry_P Parameter: Post Timepoint (hr) Value: 6
  misc_feature: MA Experiment 20001558 PARAMETER Experiment Name: At_Drought_Soil_Dry_P Parameter: Post-Treatment Value: Re-Water vs. No Drought
  misc_feature: MA Experiment 20001558 PARAMETER Experiment Name: At_Drought_Soil_Dry_P Parameter: Timepoint (day) Value: 13
  misc_feature: MA Experiment 20001558 PARAMETER Experiment Name: At_Drought_Soil_Dry_P Parameter: Treatment Value: Drought vs. No Drought
  misc_feature: MA Experiment ID: 20001757 Result: Up-regulated in Transcription
  misc_feature: MA Experiment 20001757 PARAMETER Experiment Name: At_50mM_NH4NO3_L-to-H_P Parameter: Timepoint (hr) Value: 6
  misc_feature: MA Experiment 20001757 PARAMETER Experiment Name: At_50mM_NH4NO3_L-to-H_P Parameter: Tissue Value: Leaf
  misc_feature: MA Experiment 20001757 PARAMETER Experiment Name: At_50mM_NH4NO3_L-to-H_P Parameter: Treatment Value: 50mM NH4NO3 vs 100mM Mannitol
aaatccacagagattttctctctttgatcacaattcaatcatacactctattctcatctcttactcaggtcaaaactctctaaagttggaatcttgatttggtttttaaggtaagattagctcaaaatgagtttaggtgctttgatggaagagaagagaagagcaacaacttcatcttcttcttctcaggtacatatgtcaaatgatatagattggcaaatgcttgataaatcgaggtttttcttcctcggtgctgctcttttctccggtgtatccactgctctttaccctattgtagttctcaaaacaaggcaacaagtctctccgactcgtgtctcatgtgccaacatttctctggctattgctagacttgaaggtcttaaagggttttacaagggttttggaacatctttgcttggaaccatcccggctcgtgctctctatatgactgctctagagattacaaagagtagtgtaggtcaagcaactgttaggttaggattgtctgatactacgtctttggctgttgctaatggtgcagctggtttgacctcggctgtggctgcccagactgtctggactccgattgatattgtgagtcaagggcttatggttcaaggcgatgtctccttgagtaagcatcttcctggagtgatgaactcttgcagatacagaaatgggtttgatgcttttagaaagattctttacacagatggaccaagagggttctacagaggatttgggatctcgatcttgacttacgcaccttccaacgcggtttggtgggcgtcttattctttggctcaaaaatcaatttggtctcgatacaagcactcctacaaccacaaggaagatgctggtggctcagtggtggttcaagcgttgagtgcagctacagcaagcggttgctcggctttagtaactatgccagtagacacaatcaagacgcggttgcaagtcttagacgcagaagagaacgggaggagacgagcaatgacagtgatgcagtcagtgaagagcttgatgaaggaaggaggagttggtgcttgttacagaggattaggaccaagatgggtctcaatgtcgatgtccgcaacaacgatgatcacaacctacgagttcttgaagcgcctagcaacaaagaagcagaaatgatatattgataaaaccttgttgtgttaagactaaccaaaatacttttgattgagtttgaagaatgttaataaacaaacataaaacagagcaaaagatcattacccctaa

SEQ ID NO: 103128 - protein, 342 aa, Arabidopsis thaliana; identical to SEQ ID NO: 27640
  peptide (1)..(342): Ceres Seq. ID no. 13612056
  misc_feature (1)..(342): Homolog of NCBI NO: 15239622 NR Description: mitochondrial carrier protein family [Arabidopsis >gi|16604515|gb|AAL24263.1| AT5g26200/T19G15_50 [Arabidopsis >gi|23308179|gb|AAN18059.1| At5g26200/T19G15_50 [Arabidopsis
  misc_feature (1)..(342): Homolog of NCBI NO: 21594326 NR Description: mitochondrial carrier-like protein [Arabidopsis
  misc_feature (7)..(342): Homolog of NCBI NO: 7486721 NR Description: hypothetical protein F9D12.12 - Arabidopsis >gi|3319342|gb|AAC26231.1| similar to mitochondrial carrier
  misc_feature (1)..(342): Homolog of NCBI NO: 18410193 NR Description: mitochondrial carrier protein family [Arabidopsis
  misc_feature (1)..(280): Homolog of NCBI NO: 37534064 NR Description: putative Tricarboxylate transport protein,
  misc_feature (14)..(342): Homolog of NCBI NO: 21326111 NR Description: putative mitochondrial carrier protein [Sorghum
  misc_feature (14)..(342): Homolog of NCBI NO: 12061241 NR Description: 36I5.1 [Oryza sativa (japonica cultivar-group)]
  misc_feature (13)..(342): Homolog of NCBI NO: 18496651 NR Description: putative mitochondrial carrier protein [Triticum
  misc_feature (27)..(336): Homolog of NCBI NO: 18417739 NR Description: mitochondrial carrier protein family [Arabidopsis >gi|15292889|gb|AAK92815.1| putative mitochondrial carrier [Arabidopsis thaliana] >gi|18252183|gb|AAL61924.1| putative
  misc_feature (27)..(231): Homolog of NCBI NO: 11358653 NR Description: probable mitochondrial carrier protein - thaliana >gi|9755609|emb|CAC01763.1| putative mitochondrial

SEQ ID NO: 103129 - protein, 336 aa, Arabidopsis thaliana; identical to SEQ ID NO: 27641
  peptide (1)..(336): Ceres Seq. ID no. 13612057
  misc_feature (1)..(336): Homolog of NCBI NO: 15239622 NR Description: mitochondrial carrier protein family [Arabidopsis >gi|16604515|gb|AAL24263.1| AT5g26200/T19G15_50 [Arabidopsis >gi|23308179|gb|AAN18059.1| At5g26200/T19G15_50 [Arabidopsis
  misc_feature (1)..(336): Homolog of NCBI NO: 21594326 NR Description: mitochondrial carrier-like protein [Arabidopsis
  misc_feature (1)..(336): Homolog of NCBI NO: 7486721 NR Description: hypothetical protein F9D12.12 - Arabidopsis >gi|3319342|gb|AAC26231.1| similar to mitochondrial carrier
  misc_feature (1)..(336): Homolog of NCBI NO: 18410193 NR Description: mitochondrial carrier protein family [Arabidopsis
  misc_feature (1)..(274): Homolog of NCBI NO: 37534064 NR Description: putative Tricarboxylate transport protein,
  misc_feature (8)..(336): Homolog of NCBI NO: 21326111 NR Description: putative mitochondrial carrier protein [Sorghum
  misc_feature (8)..(336): Homolog of NCBI NO: 12061241 NR Description: 36I5.1 [Oryza sativa (japonica cultivar-group)]
  misc_feature (7)..(336): Homolog of NCBI NO: 18496651 NR Description: putative mitochondrial carrier protein [Triticum
  misc_feature (21)..(330): Homolog of NCBI NO: 18417739 NR Description: mitochondrial carrier protein family [Arabidopsis >gi|15292889|gb|AAK92815.1| putative mitochondrial carrier [Arabidopsis thaliana] >gi|18252183|gb|AAL61924.1| putative
  misc_feature (21)..(225): Homolog of NCBI NO: 11358653 NR Description: probable mitochondrial carrier protein - thaliana >gi|9755609|emb|CAC01763.1| putative mitochondrial

SEQ ID NO: 103130 - protein, 319 aa, Arabidopsis thaliana; identical to SEQ ID NO: 27642
  peptide (1)..(319): Ceres Seq. ID no. 13612058
  misc_feature (1)..(319): Homolog of NCBI NO: 15239622 NR Description: mitochondrial carrier protein family [Arabidopsis >gi|16604515|gb|AAL24263.1| AT5g26200/T19G15_50 [Arabidopsis >gi|23308179|gb|AAN18059.1| At5g26200/T19G15_50 [Arabidopsis
  misc_feature (1)..(319): Homolog of NCBI NO: 21594326 NR Description: mitochondrial carrier-like protein [Arabidopsis
  misc_feature (1)..(319): Homolog of NCBI NO: 7486721 NR Description: hypothetical protein F9D12.12 - Arabidopsis >gi|3319342|gb|AAC26231.1| similar to mitochondrial carrier
  misc_feature (1)..(319): Homolog of NCBI NO: 18410193 NR Description: mitochondrial carrier protein family [Arabidopsis
  misc_feature (1)..(257): Homolog of NCBI NO: 37534064 NR Description: putative Tricarboxylate transport protein,
  misc_feature (1)..(319): Homolog of NCBI NO: 21326111 NR Description: putative mitochondrial carrier protein [Sorghum
  misc_feature (1)..(319): Homolog of NCBI NO: 12061241 NR Description: 36I5.1 [Oryza sativa (japonica cultivar-group)]
  misc_feature (1)..(319): Homolog of NCBI NO: 18496651 NR Description: putative mitochondrial carrier protein [Triticum
  misc_feature (4)..(313): Homolog of NCBI NO: 18417739 NR Description: mitochondrial carrier protein family [Arabidopsis >gi|15292889|gb|AAK92815.1| putative mitochondrial carrier [Arabidopsis thaliana] >gi|18252183|gb|AAL61924.1| putative
  misc_feature (4)..(208): Homolog of NCBI NO: 11358653 NR Description: probable mitochondrial carrier protein - thaliana >gi|9755609|emb|CAC01763.1| putative mitochondrial

SEQ ID NO: 103131 - DNA, 842 bp, Arabidopsis thaliana
  misc_feature (1)..(842): Ceres Seq. ID no. 13612066
  misc_feature: MA Experiment ID: 108435 Result: Up-regulated in Transcription
  misc_feature: MA Experiment 108435 PARAMETER Experiment Name: At_stm_Mutants_cDNA_P Parameter: Plant Line Value: wt Landsburg vs stm
  misc_feature: MA Experiment 108435 PARAMETER Experiment Name: At_stm_Mutants_cDNA_P Parameter: Tissue Value: Shoot Apical Meristem Region
  misc_feature: MA Experiment ID: 108461 Result: Down-regulated in Transcription
  misc_feature: MA Experiment 108461 PARAMETER Experiment Name: At_Germinating_Seeds_cDNA_P Parameter: Age (day) Value: 1 vs. 0
  misc_feature: MA Experiment 108461 PARAMETER Experiment Name: At_Germinating_Seeds_cDNA_P Parameter: Tissue Value: Germinating Seeds
  misc_feature: MA Experiment ID: 108462 Result: Down-regulated in Transcription
  misc_feature: MA Experiment 108462 PARAMETER Experiment Name: At_Germinating_Seeds_cDNA_P Parameter: Age (day) Value: 2 vs. 0
  misc_feature: MA Experiment 108462 PARAMETER Experiment Name: At_Germinating_Seeds_cDNA_P Parameter: Tissue Value: Germinating Seeds
  misc_feature: MA Experiment ID: 108463 Result: Down-regulated in Transcription
  misc_feature: MA Experiment 108463 PARAMETER Experiment Name: At_Germinating_Seeds_cDNA_P Parameter: Age (day) Value: 3 vs. 0
  misc_feature: MA Experiment 108463 PARAMETER Experiment Name: At_Germinating_Seeds_cDNA_P Parameter: Tissue Value: Germinating Seeds
  misc_feature: MA Experiment ID: 108594 Result: Up-regulated in Transcription
  misc_feature: MA Experiment 108594 PARAMETER Experiment Name: At_Ler-rhl_Root_cDNA_P Parameter: Plant Line Value: null
  misc_feature: MA Experiment ID: 108668 Result: Up-regulated in Transcription
  misc_feature: MA Experiment 108668 PARAMETER Experiment Name: At_2mM_SA_cDNA_P Parameter: Plant Line Value: WS
  misc_feature: MA Experiment 108668 PARAMETER Experiment Name: At_2mM_SA_cDNA_P Parameter: Timepoint (hr) Value: 6
  misc_feature: MA Experiment 108668 PARAMETER Experiment Name: At_2mM_SA_cDNA_P Parameter: Treatment Value: 2mM SA vs. No Treatment
  misc_feature: MA Experiment ID: 20000182 Result: Up-regulated in Transcription
  misc_feature: MA Experiment 20000182 PARAMETER Experiment Name: At_2mM_SA_P Parameter: Age (day) Value: 14
  misc_feature: MA Experiment 20000182 PARAMETER Experiment Name: At_2mM_SA_P Parameter: Organism Value: A. thaliana
  misc_feature: MA Experiment 20000182 PARAMETER Experiment Name: At_2mM_SA_P Parameter: Plant Line Value: WS
  misc_feature: MA Experiment 20000182 PARAMETER Experiment Name: At_2mM_SA_P Parameter: Timepoint (hr) Value: 6
  misc_feature: MA Experiment 20000182 PARAMETER Experiment Name: At_2mM_SA_P Parameter: Tissue Value: Aerial
  misc_feature: MA Experiment 20000182 PARAMETER Experiment Name: At_2mM_SA_P Parameter: Treatment Value: 2mM SA vs. No Treatment
  misc_feature: MA Experiment ID: 20000184 Result: Down-regulated in Transcription
  misc_feature: MA Experiment 20000184 PARAMETER Experiment Name: At_Shoots__P Parameter: Age (day) Value: 7
  misc_feature: MA Experiment 20000184 PARAMETER Experiment Name: At_Shoots__P Parameter: Tissue Value: Shoots vs. Whole Plant
  misc_feature: MA Experiment ID: 20000234 Result: Up-regulated in Transcription
  misc_feature: MA Experiment 20000234 PARAMETER Experiment Name: At_Siliques_P Parameter: Age (day) Value: 21
  misc_feature: MA Experiment 20000234 PARAMETER Experiment Name: At_Siliques_P Parameter: Organism Value: A. thaliana
  misc_feature: MA Experiment 20000234 PARAMETER Experiment Name: At_Siliques_P Parameter: Plant Line Value: WS
  misc_feature: MA Experiment 20000234 PARAMETER Experiment Name: At_Siliques_P Parameter: Tissue Value: Less Than 5mm Siliques vs. Whole Plant
  misc_feature: MA Experiment ID: 20000264 Result: Up-regulated in Transcription
  misc_feature: MA Experiment 20000264 PARAMETER Experiment Name: At_Open_Flower_P Parameter: Age (day) Value: 21
  misc_feature: MA Experiment 20000264 PARAMETER Experiment Name: At_Open_Flower_P Parameter: Plant Line Value: WS
  misc_feature: MA Experiment 20000264 PARAMETER Experiment Name: At_Open_Flower_P Parameter: Tissue Value: Open Flower vs. Whole Plant
  misc_feature: MA Experiment ID: 20000265 Result: Up-regulated in Transcription
  misc_feature: MA Experiment 20000265 PARAMETER Experiment Name: At_Open_Flower_P Parameter: Age (day) Value: 21
  misc_feature: MA Experiment 20000265 PARAMETER Experiment Name: At_Open_Flower_P Parameter: Plant Line Value: WS
  misc_feature: MA Experiment 20000265 PARAMETER Experiment Name: At_Open_Flower_P Parameter: Tissue Value: Closed Flower vs. Whole Plant
  misc_feature: MA Experiment ID: 20000286 Result: Up-regulated in Transcription
  misc_feature: MA Experiment 20000286 PARAMETER Experiment Name: At_Open_Flower_P Parameter: Age (day) Value: 21
  misc_feature: MA Experiment 20000286 PARAMETER Experiment Name: At_Open_Flower_P Parameter: Plant Line Value: WS
  misc_feature: MA Experiment 20000286 PARAMETER Experiment Name: At_Open_Flower_P Parameter: Tissue Value: Half Open vs. Whole Plant
  misc_feature: MA Experiment ID: 20000794 Result: Up-regulated in Transcription
  misc_feature: MA Experiment 20000794 PARAMETER Experiment Name: At_Petals_P Parameter: Age (day) Value: 23-25 days
  misc_feature: MA Experiment 20000794 PARAMETER Experiment Name: At_Petals_P Parameter: Plant Line Value: WS
  misc_feature: MA Experiment 20000794 PARAMETER Experiment Name: At_Petals_P Parameter: Tissue Value: Petals vs. Whole plant
attgtgaatttattagtaatttataaattcatcaaaaacaaactcttttcagaaaaaaaataacaacaacaacaataatggcgtcttttgcaacccatcttgttgttgttgttacaatgttgtttgtagccatggcctccgcggagatgcttcaagatgtttgtgttgctgatttgtctaatgcggtcaaggtcaacggatacacttgcaaggactcaacacaaataacaccagaagacttctacttcaaaggcttagccaacattgccgccacaaacacctctaccggctcagtcgtgaccggagccaacgtagaaaagctaccgggactcaacactctcggcctctccatgtcccgcatcgactacgccccaaacggcctaaacccaccccatgtccacccacgtgcctccgagatcattttcgtccttgaaggtcagctctatgttggctttgtaacaaccgctggaaaactcatcgccaagaaccttaacaagggagacgttttcaccttccccaagggactcatccatttccagaagaacattgccaacagtccagcatctgtactcgcagccttcgatagccaattgcccggaacacaatcacttgtcgcctctctctttggagctcttcccgatgacattctggccaagtcattccagctcaaacacaaacaggttaagaagatcaaactgagatacgcacccaagaaatgagtttgtttttgtttatattgtaaacactaagcaaagaagaatgaatcaatataaagtttgcaactttaaaactattatgagatgaaactaaagaactgataaaaagctttgttttcattgttt

SEQ ID NO: 103132 - protein, 213 aa, Arabidopsis thaliana; identical to SEQ ID NO: 29517
  peptide (1)..(213): Ceres Seq. ID no. 13612067
  misc_feature (58)..(203): Pfam Name: Cupin Pfam Description: Cupin
  misc_feature (1)..(213): Homolog of NCBI NO: 30690288 NR Description: germin-like protein, putative [Arabidopsis
  misc_feature (1)..(213): Homolog of NCBI NO: 21553437 NR Description: nectarin-like protein [Arabidopsis thaliana]
  misc_feature (4)..(213): Homolog of NCBI NO: 7447332 NR Description: germin homolog F21E10.2 - Arabidopsis thaliana
  misc_feature (1)..(213): Homolog of NCBI NO: 15230582 NR Description: germin-like protein (GLP8) [Arabidopsis thaliana]
  misc_feature (4)..(213): Homolog of NCBI NO: 21592538 NR Description: germin-like protein [Arabidopsis thaliana]
  misc_feature (1)..(213): Homolog of NCBI NO: 15217561 NR Description: germin-like protein (GLP4) (GLP5) [Arabidopsis
  misc_feature (8)..(213): Homolog of NCBI NO: 18203442 NR Description: Rhicadhesin receptor precursor (Germin-like
  misc_feature (23)..(213): Homolog of NCBI NO: 1934730 NR Description: germin-like protein [Arabidopsis thaliana]
  misc_feature (23)..(213): Homolog of NCBI NO: 15228673 NR Description: germin-like protein (GLP10) [Arabidopsis thaliana]
  misc_feature (8)..(213): Homolog of NCBI NO: 34904670 NR Description: putative germin protein [Oryza sativa (japonica group)] >gi|5042461|gb|AAD38298.1| putative oxalate oxidase

SEQ ID NO: 103133 - protein, 200 aa, Arabidopsis thaliana; identical to SEQ ID NO: 29518
  peptide (1)..(200): Ceres Seq. ID no. 13612068
  misc_feature (45)..(190): Pfam Name: Cupin Pfam Description: Cupin
  misc_feature (1)..(200): Homolog of NCBI NO: 30690288 NR Description: germin-like protein, putative [Arabidopsis
  misc_feature (1)..(200): Homolog of NCBI NO: 21553437 NR Description: nectarin-like protein [Arabidopsis thaliana]
  misc_feature (1)..(200): Homolog of NCBI NO: 7447332 NR Description: germin homolog F21E10.2 - Arabidopsis thaliana
  misc_feature (1)..(200): Homolog of NCBI NO: 15230582 NR Description: germin-like protein (GLP8) [Arabidopsis thaliana]
  misc_feature (1)..(200): Homolog of NCBI NO: 21592538 NR Description: germin-like protein [Arabidopsis thaliana]
  misc_feature (1)..(200): Homolog of NCBI NO: 15217561 NR Description: germin-like protein (GLP4) (GLP5) [Arabidopsis
  misc_feature (1)..(200): Homolog of NCBI NO: 18203442 NR Description: Rhicadhesin receptor precursor (Germin-like
  misc_feature (10)..(200): Homolog of NCBI NO: 1934730 NR Description: germin-like protein [Arabidopsis thaliana]
  misc_feature (10)..(200): Homolog of NCBI NO: 15228673 NR Description: germin-like protein (GLP10) [Arabidopsis thaliana]
  misc_feature (1)..(200): Homolog of NCBI NO: 34904670 NR Description: putative germin protein [Oryza sativa (japonica group)] >gi|5042461|gb|AAD38298.1| putative oxalate oxidase

SEQ ID NO: 103134 - protein, 195 aa, Arabidopsis thaliana; identical to SEQ ID NO: 29519
  peptide (1)..(195): Ceres Seq. ID no. 13612069
  misc_feature (40)..(185): Pfam Name: Cupin Pfam Description: Cupin
  misc_feature (1)..(195): Homolog of NCBI NO: 30690288 NR Description: germin-like protein, putative [Arabidopsis
  misc_feature (1)..(195): Homolog of NCBI NO: 21553437 NR Description: nectarin-like protein [Arabidopsis thaliana]
  misc_feature (1)..(195): Homolog of NCBI NO: 7447332 NR Description: germin homolog F21E10.2 - Arabidopsis thaliana
  misc_feature (1)..(195): Homolog of NCBI NO: 15230582 NR Description: germin-like protein (GLP8) [Arabidopsis thaliana]
  misc_feature (1)..(195): Homolog of NCBI NO: 21592538 NR Description: germin-like protein [Arabidopsis thaliana]
  misc_feature (1)..(195): Homolog of NCBI NO: 15217561 NR Description: germin-like protein (GLP4) (GLP5) [Arabidopsis
  misc_feature (1)..(195): Homolog of NCBI NO: 18203442 NR Description: Rhicadhesin receptor precursor (Germin-like
  misc_feature (5)..(195): Homolog of NCBI NO: 1934730 NR Description: germin-like protein [Arabidopsis thaliana]
  misc_feature (5)..(195): Homolog of NCBI NO: 15228673 NR Description: germin-like protein (GLP10) [Arabidopsis thaliana]
  misc_feature (1)..(195): Homolog of NCBI NO: 34904670 NR Description: putative germin protein [Oryza sativa (japonica group)] >gi|5042461|gb|AAD38298.1| putative oxalate oxidase

SEQ ID NO: 103135 - DNA, 1190 bp, Arabidopsis thaliana
  misc_feature (1)..(1190): Ceres Seq. ID no. 13612077
  misc_feature: MA Experiment ID: 20000111 Result: Down-regulated in Transcription
  misc_feature: MA Experiment 20000111 PARAMETER Experiment Name: At_42deg_Heat_cDNA_P Parameter: Temperature (deg C) Value: 42 vs. 22
  misc_feature: MA Experiment 20000111 PARAMETER Experiment Name: At_42deg_Heat_cDNA_P Parameter: Timepoint (hr) Value: 6
  misc_feature: MA Experiment 20000111 PARAMETER Experiment Name: At_42deg_Heat_cDNA_P Parameter: Tissue Value: Aerial
  misc_feature: MA Experiment ID: 20000173 Result: Down-regulated in Transcription
  misc_feature: MA Experiment 20000173 PARAMETER Experiment Name: At_42deg_Heat_P Parameter: Age (day) Value: 14
  misc_feature: MA Experiment 20000173 PARAMETER Experiment Name: At_42deg_Heat_P Parameter: Organism Value: A. thaliana
  misc_feature: MA Experiment 20000173 PARAMETER Experiment Name: At_42deg_Heat_P Parameter: Plant Line Value: WS
  misc_feature: MA Experiment 20000173 PARAMETER Experiment Name: At_42deg_Heat_P Parameter: Temperature (deg C) Value: 42 vs. 22
  misc_feature: MA Experiment 20000173 PARAMETER Experiment Name: At_42deg_Heat_P Parameter: Timepoint (hr) Value: 6
  misc_feature: MA Experiment 20000173 PARAMETER Experiment Name: At_42deg_Heat_P Parameter: Tissue Value: Aerial
  misc_feature: MA Experiment ID: 20000179 Result: Up-regulated in Transcription
  misc_feature: MA Experiment 20000179 PARAMETER Experiment Name: At_Germinating_Seeds_P Parameter: Age (hr) Value: 6 vs. 0
  misc_feature: MA Experiment 20000179 PARAMETER Experiment Name: At_Germinating_Seeds_P Parameter: Tissue Value: Germinating Seeds
  misc_feature: MA Experiment ID: 20000180 Result: Up-regulated in Transcription
  misc_feature: MA Experiment 20000180 PARAMETER Experiment Name: At_Germinating_Seeds_P Parameter: Age (hr) Value: 24 vs. 0
  misc_feature: MA Experiment 20000180 PARAMETER Experiment Name: At_Germinating_Seeds_P Parameter: Tissue Value: Germinating Seeds
  misc_feature: MA Experiment ID: 20000184 Result: Down-regulated in Transcription
  misc_feature: MA Experiment 20000184 PARAMETER Experiment Name: At_Shoots__P Parameter: Age (day) Value: 7
  misc_feature: MA Experiment 20000184 PARAMETER Experiment Name: At_Shoots__P Parameter: Tissue Value: Shoots vs. Whole Plant
  misc_feature: MA Experiment ID: 20001905 Result: Up-regulated in Transcription
  misc_feature: MA Experiment 20001905 PARAMETER Experiment Name: At_Drought_Reproduction_P Parameter: Age (day) Value: 40
  misc_feature: MA Experiment 20001905 PARAMETER Experiment Name: At_Drought_Reproduction_P Parameter: Organism Value: A. thaliana
  misc_feature: MA Experiment 20001905 PARAMETER Experiment Name: At_Drought_Reproduction_P Parameter: Plant Line Value: WS
  misc_feature: MA Experiment 20001905 PARAMETER Experiment Name: At_Drought_Reproduction_P Parameter: Timepoint (day) Value: 10
  misc_feature: MA Experiment 20001905 PARAMETER Experiment Name: At_Drought_Reproduction_P Parameter: Tissue Value: Rosettes
  misc_feature: MA Experiment 20001905 PARAMETER Experiment Name: At_Drought_Reproduction_P Parameter: Treatment Value: Drought vs. No Drought
atccaaagaattaaaaaccataataaaaaaagaagataaaaagacgaattccagaaaaaaaagacgcaaaatcgtcgtcgtcgtcttcgtctttgcatttcgtcggaatcttttgattcttgaatcggaatatctctgtttttgttttatccggactcaagatcaattcggattcttggaatttatttgattttttgttgttgttgttgaaaaagtggattctttggtttcgatttgtaataatcttcgtagaaaaaatggattctgattcttggagtgatcgtctcgcatcggcttcaagaagatatcagctcgatttcttgtctcgatctgacaatttcttggggtttgaggagatagaaggagaagatgacttcagggaggagtatgcttgcccgttctgttcagactattttgatatcgtctctctatgctgtcacattgatgaagatcatcctatggatgcaaaaaatggggtatgtcccatttgtgcggtgaaagtgagctctgatatgattgctcatataaccctacaacatgcaaatatgttcaaggtgacgcggaaaaggaaatcaagaagaggcggggctcaatccatgctatcgatcttgaagagagagtttcctgatggaaattttcagagcctatttgaaggaacatcacgtgctgtatcctcttcttctgccagtatagctgctgatcctttactgtcttcattcatttcaccaatggctgatgactttttcatttctgagtcaagtctatgtgcagacacaagttctgccaagaaaacattgaatcagagtttgcctgaaaggaatgttgagaagcagtctctttcagcagaggatcacagagaaaagttgaaacagagcgagttcgttcaagggatattgagctctatgattcttgaagacggcttataaaggagaaacatattccggtaacttgtctacggttagatgattcagcgattggaaaatgtaacggctttgttgtgttaaacgcaacaattgatttgggaaagggtttgggaataagcagaataatgtaaaagagagacatgataatgagtattatttttaacttatgaactacatatttgctttaatgaacactcgaattgtctgtacaccgtaggtcttacaaaaagaaaccaaaaaaaggtatgtatttgatcatatatttgc

SEQ ID NO: 103136 - protein, 222 aa, Arabidopsis thaliana
  peptide (1)..(222): Ceres Seq. ID no. 13612078
  misc_feature (26)..(217): Pfam Name: Drought induced 19 protein (Di19) Pfam Description: Drought induced 19 protein (Di19)
  misc_feature (1)..(222): Homolog of NCBI NO: 15240426 NR Description: drought-induced protein -related [Arabidopsis
  misc_feature (26)..(222): Homolog of NCBI NO: 7485240 NR Description: hypothetical protein A_IG002P16.10 - Arabidopsis >gi|2191171|gb|AAB61057.1| similar to A. thaliana DI19 mRNA
  misc_feature (1)..(222): Homolog of NCBI NO: 28393233 NR Description: unknown protein [Arabidopsis thaliana]
  misc_feature (129)..(222): Homolog of NCBI NO: 15230036 NR Description: drought-induced protein -related [Arabidopsis >gi|6714440|gb|AAF26127.1|AC011620_3 unknown protein [Arabidopsis
  misc_feature (1)..(86): Homolog of NCBI NO: 15230036 NR Description: drought-induced protein -related [Arabidopsis >gi|6714440|gb|AAF26127.1|AC011620_3 unknown protein [Arabidopsis
  misc_feature (1)..(220): Homolog of NCBI NO: 25992529 NR Description: fiber protein Fb2 [Gossypium barbadense]
  misc_feature (11)..(220): Homolog of NCBI NO: 18377875 NR Description: AT3g06760/F3E22_10 [Arabidopsis thaliana]
  misc_feature (14)..(220): Homolog of NCBI NO: 15028023 NR Description: unknown protein [Arabidopsis thaliana]
  misc_feature (14)..(220): Homolog of NCBI NO: 1076316 NR Description: drought-induced protein Di19 - Arabidopsis
  misc_feature (1)..(220): Homolog of NCBI NO: 13937216 NR Description: AT5g49230/K21P3_11 [Arabidopsis thaliana]
MDSDSWSDRLASASRRYQLDFLSRSDNFLGFEEIEGEDDFREEYACPFCSDYFDIVSLCCHIDEDHPMDAKNGVCPICAVKVSSDMIAHITLQHANMFKVTRKRKSRRGGAQSMLSILKREFPDGNFQSLFEGTSRAVSSSSASIAADPLLSSFISPMADDFFISESSLCADTSSAKKTLNQSLPERNVEKQSLSAEDHREKLKQSEFVQGILSSMILEDGL

SEQ ID NO: 103137 - protein, 155 aa, Arabidopsis thaliana
  peptide (1)..(155): Ceres Seq. ID no. 13612079
  misc_feature (1)..(150): Pfam Name: Drought induced 19 protein (Di19) Pfam Description: Drought induced 19 protein (Di19)
  misc_feature (1)..(155): Homolog of NCBI NO: 15240426 NR Description: drought-induced protein -related [Arabidopsis
  misc_feature (1)..(155): Homolog of NCBI NO: 7485240 NR Description: hypothetical protein A_IG002P16.10 - Arabidopsis >gi|2191171|gb|AAB61057.1| similar to A. thaliana DI19 mRNA
  misc_feature (1)..(155): Homolog of NCBI NO: 28393233 NR Description: unknown protein [Arabidopsis thaliana]
  misc_feature (62)..(155): Homolog of NCBI NO: 15230036 NR Description: drought-induced protein -related [Arabidopsis >gi|6714440|gb|AAF26127.1|AC011620_3 unknown protein [Arabidopsis
  misc_feature (1)..(19): Homolog of NCBI NO: 15230036 NR Description: drought-induced protein -related [Arabidopsis >gi|6714440|gb|AAF26127.1|AC011620_3 unknown protein [Arabidopsis
  misc_feature (1)..(153): Homolog of NCBI NO: 25992529 NR Description: fiber protein Fb2 [Gossypium barbadense]
  misc_feature (1)..(153): Homolog of NCBI NO: 18377875 NR Description: AT3g06760/F3E22_10 [Arabidopsis thaliana]
  misc_feature (1)..(153): Homolog of NCBI NO: 15028023 NR Description: unknown protein [Arabidopsis thaliana]
  misc_feature (1)..(153): Homolog of NCBI NO: 1076316 NR Description: drought-induced protein Di19 - Arabidopsis
  misc_feature (1)..(153): Homolog of NCBI NO: 13937216 NR Description: AT5g49230/K21P3_11 [Arabidopsis thaliana]
MDAKNGVCPICAVKVSSDMIAHITLQHANMFKVTRKRKSRRGGAQSMLSILKREFPDGNFQSLFEGTSRAVSSSSASIAADPLLSSFISPMADDFFISESSLCADTSSAKKTLNQSLPERNVEKQSLSAEDHREKLKQSEFVQGILSSMILEDGL

SEQ ID NO: 103138 - protein, 137 aa, Arabidopsis thaliana; identical to SEQ ID NO: 26320
  peptide (1)..(137): Ceres Seq. ID no. 13612080
  misc_feature (1)..(132): Pfam Name: Drought induced 19 protein (Di19) Pfam Description: Drought induced 19 protein (Di19)
  misc_feature (1)..(137): Homolog of NCBI NO: 15240426 NR Description: drought-induced protein -related [Arabidopsis
  misc_feature (1)..(137): Homolog of NCBI NO: 7485240 NR Description: hypothetical protein A_IG002P16.10 - Arabidopsis >gi|2191171|gb|AAB61057.1| similar to A. thaliana DI19 mRNA
  misc_feature (1)..(137): Homolog of NCBI NO: 28393233 NR Description: unknown protein [Arabidopsis thaliana]
  misc_feature (44)..(137): Homolog of NCBI NO: 15230036 NR Description: drought-induced protein -related [Arabidopsis >gi|6714440|gb|AAF26127.1|AC011620_3 unknown protein [Arabidopsis
  misc_feature (1)..(135): Homolog of NCBI NO: 25992529 NR Description: fiber protein Fb2 [Gossypium barbadense]
  misc_feature (1)..(135): Homolog of NCBI NO: 18377875 NR Description: AT3g06760/F3E22_10 [Arabidopsis thaliana]
  misc_feature (1)..(135): Homolog of NCBI NO: 15028023 NR Description: unknown protein [Arabidopsis thaliana]
  misc_feature (1)..(135): Homolog of NCBI NO: 1076316 NR Description: drought-induced protein Di19 - Arabidopsis
  misc_feature (1)..(135): Homolog of NCBI NO: 13937216 NR Description: AT5g49230/K21P3_11 [Arabidopsis thaliana]
  misc_feature (1)..(135): Homolog of NCBI NO: 15239827 NR Description: drought-induced protein -related [Arabidopsis

SEQ ID NO: 103139 - DNA, 1286 bp, Arabidopsis thaliana
  misc_feature (1)..(1286): Ceres Seq. ID no. 13612081
  misc_feature: MA Experiment ID: 108579 Result: Down-regulated in Transcription
  misc_feature: MA Experiment 108579 PARAMETER Experiment Name: At_4deg_Cold_cDNA_P Parameter: Temperature (deg C) Value: 4 vs. 22
  misc_feature: MA Experiment 108579 PARAMETER Experiment Name: At_4deg_Cold_cDNA_P Parameter: Timepoint (hr) Value: 6
  misc_feature: MA Experiment 108579 PARAMETER Experiment Name: At_4deg_Cold_cDNA_P Parameter: Tissue Value: Aerial
  misc_feature: MA Experiment ID: 20000070 Result: Up-regulated in Transcription
  misc_feature: MA Experiment 20000070 PARAMETER Experiment Name: At_100uM_ABA_Mutants_cDNA_P Parameter: Plant Line Value: CS24
  misc_feature: MA Experiment 20000070 PARAMETER Experiment Name: At_100uM_ABA_Mutants_cDNA_P Parameter: Timepoint (hr) Value: 6
  misc_feature: MA Experiment 20000070 PARAMETER Experiment Name: At_100uM_ABA_Mutants_cDNA_P Parameter: Tissue Value: Aerial
  misc_feature: MA Experiment 20000070 PARAMETER Experiment Name: At_100uM_ABA_Mutants_cDNA_P Parameter: Treatment Value: 100uM ABA vs. No Treatment
  misc_feature: MA Experiment ID: 20000071 Result: Up-regulated in Transcription
  misc_feature: MA Experiment 20000071 PARAMETER Experiment Name: At_100uM_ABA_Mutants_cDNA_P Parameter: Plant Line Value: CS8104
  misc_feature: MA Experiment 20000071 PARAMETER Experiment Name: At_100uM_ABA_Mutants_cDNA_P Parameter: Timepoint (hr) Value: 6
  misc_feature: MA Experiment 20000071 PARAMETER Experiment Name: At_100uM_ABA_Mutants_cDNA_P Parameter: Tissue Value: Aerial
  misc_feature: MA Experiment 20000071 PARAMETER Experiment Name: At_100uM_ABA_Mutants_cDNA_P Parameter: Treatment Value: 100uM ABA vs. No Treatment
  misc_feature: MA Experiment ID: 20000089 Result: Up-regulated in Transcription
  misc_feature: MA Experiment ID: 20000090 Result: Up-regulated in Transcription
  misc_feature: MA Experiment ID: 20000111 Result: Down-regulated in Transcription
  misc_feature: MA Experiment 20000111 PARAMETER Experiment Name: At_42deg_Heat_cDNA_P Parameter: Temperature (deg C) Value: 42 vs. 22
  misc_feature: MA Experiment 20000111 PARAMETER Experiment Name: At_42deg_Heat_cDNA_P Parameter: Timepoint (hr) Value: 6
  misc_feature: MA Experiment 20000111 PARAMETER Experiment Name: At_42deg_Heat_cDNA_P Parameter: Tissue Value: Aerial
  misc_feature: MA Experiment ID: 20000117 Result: Up-regulated in Transcription
  misc_feature: MA Experiment 20000117 PARAMETER Experiment Name: At_100uM_ABA_Mutants_cDNA_P Parameter: Plant Line Value: Columbia
  misc_feature: MA Experiment 20000117 PARAMETER Experiment Name: At_100uM_ABA_Mutants_cDNA_P Parameter: Timepoint (hr) Value: 6
  misc_feature: MA Experiment 20000117 PARAMETER Experiment Name: At_100uM_ABA_Mutants_cDNA_P Parameter: Tissue Value: Aerial
  misc_feature: MA Experiment 20000117 PARAMETER Experiment Name: At_100uM_ABA_Mutants_cDNA_P Parameter: Treatment Value: 100uM ABA vs. No Treatment
  misc_feature: MA Experiment ID: 20000451 Result: Down-regulated in Transcription
  misc_feature: MA Experiment 20000451 PARAMETER Experiment Name: At_CS6879_Shoots-Roots_P Parameter: Age (day) Value: 14
  misc_feature: MA Experiment 20000451 PARAMETER Experiment Name: At_CS6879_Shoots-Roots_P Parameter: Organism Value: A. thaliana
  misc_feature: MA Experiment 20000451 PARAMETER Experiment Name: At_CS6879_Shoots-Roots_P Parameter: Plant Line Value: CS6879 vs. WS
  misc_feature: MA Experiment 20000451 PARAMETER Experiment Name: At_CS6879_Shoots-Roots_P Parameter: Tissue Value: Roots
  misc_feature: MA Experiment ID: 20000452 Result: Down-regulated in Transcription
  misc_feature: MA Experiment 20000452 PARAMETER Experiment Name: At_CS6879_Shoots-Roots_P Parameter: Age (day) Value: 14
  misc_feature: MA Experiment 20000452 PARAMETER Experiment Name: At_CS6879_Shoots-Roots_P Parameter: Organism Value: A. thaliana
  misc_feature: MA Experiment 20000452 PARAMETER Experiment Name: At_CS6879_Shoots-Roots_P Parameter: Plant Line Value: CS6879 vs. WS
  misc_feature: MA Experiment 20000452 PARAMETER Experiment Name: At_CS6879_Shoots-Roots_P Parameter: Tissue Value: Shoots
  misc_feature: MA Experiment ID: 20000495 Result: Up-regulated in Transcription
  misc_feature: MA Experiment 20000495 PARAMETER Experiment Name: At_Guard_Cells_P Parameter: Harvest Date Value: 8/2/2002
  misc_feature: MA Experiment 20000495 PARAMETER Experiment Name: At_Guard_Cells_P Parameter: Organism Value: A. thaliana
  misc_feature: MA Experiment 20000495 PARAMETER Experiment Name: At_Guard_Cells_P Parameter: Tissue Value: Guard Cells vs. Leaves
  misc_feature: MA Experiment ID: 20000794 Result: Up-regulated in Transcription
  misc_feature: MA Experiment 20000794 PARAMETER Experiment Name: At_Petals_P Parameter: Age (day) Value: 23-25 days
  misc_feature: MA Experiment 20000794 PARAMETER Experiment Name: At_Petals_P Parameter: Plant Line Value: WS
  misc_feature: MA Experiment 20000794 PARAMETER Experiment Name: At_Petals_P Parameter: Tissue Value: Petals vs. Whole plant
ttcggtcaaaaacaaaagaatctaaaaatagcaagttcatcgtttgatattttagagtttaacaagaagaatcttgaaagccgtcacctacagatctgaagaatattctcaaggatagagagagaaatggcgacggacttcaagtctttaccagtcatcgacatctctcgtttactcctcaagtgtgatgatcccgacatggcagaggatgtcggtgtggccgaggttgtccagcaactggataaagcttgtcgggacgccggattcttctacgtgataggccatggaatatcagaggatgttattaacaaggttagagagatcactcgtgagttctttaagcttccttatgaagagaaacttaaaatcaaaatgactccagctgctggatacagaggatatcagagaattggagaaaatgtgaccaaaggaataccagatattcatgaagccattgattgttacagagagattaagcaggggaagtatggggatataggcaaagttatggaagggccaaaccagtggccagagaatcctcaggagtttaaagagttgatggaggagtatattaagctatgtacagatctttctagaaagattttgagaggaatctccttagctcttgctggatcaccttatgagttcgagggaaagatggctggtgatcctttttgggtgatgcgtcttattggttatccaggtgctgagttcacaaatggccaacctgaaaatgatattggatgtggagctcacactgactatggcttgttaactcttgtgaatcaagatgatgacaaaactgctcttcaggtgagaaacttgggcggtgagtggatatcagccattccaatccctggatcgtttgtttgcaacatcggtgacatgttaaagatactttcaaacggagtatacgaatccacacttcatagagtgatcaataactctcctcaataccgtgtttgtgtcgcattcttctatgagactaacttcgacgcggtggtggagccattggatatatgtaaacagaagtacccgggagggagaggaggatgccaagttttcaaaagagctgtgtatggagagcatctcgtaagtaaagtccagaccaactttgctatgtaatggaaggcagatctctctctccttctttgtacacaatacaccaacttatcttaaagtttgatttgtaataatagtaaggtacttctttacttctgtgttatcattggatatacatgtatttgcttcaaaaaacaaaatgaaaaaggtaatttagtttgttg

SEQ ID NO: 103140 - protein, 332 aa, Arabidopsis thaliana
  peptide (1)..(332): Ceres Seq. ID no. 13612082
  misc_feature (182)..(287): Pfam Name: 2OG-Fe(II) oxygenase superfamily Pfam Description: 2OG-Fe(II) oxygenase superfamily
  misc_feature (1)..(332): Homolog of NCBI NO: 18409039 NR Description: oxidoreductase (din11), putative [Arabidopsis
  misc_feature (1)..(332): Homolog of NCBI NO: 21554579 NR Description: flavonol synthase-like protein [Arabidopsis
  misc_feature (1)..(332): Homolog of NCBI NO: 11255902 NR Description: flavonol synthase-like protein - Arabidopsis
  misc_feature (1)..(331): Homolog of NCBI NO: 19423910 NR Description: unknown protein [Arabidopsis thaliana]
  misc_feature (1)..(331): Homolog of NCBI NO: 22331716 NR Description: oxidoreductase (din11), putative [Arabidopsis >gi|24030245|gb|AAN41298.1| unknown protein [Arabidopsis
  misc_feature (1)..(331): Homolog of NCBI NO: 11255891 NR Description: hypothetical protein T9C5.210 - Arabidopsis >gi|6561962|emb|CAB62466.1| putative protein [Arabidopsis
  misc_feature (6)..(330): Homolog of NCBI NO: 15229181 NR Description: oxidoreductase (din11), putative [Arabidopsis
  misc_feature (1)..(330): Homolog of NCBI NO: 6984228 NR Description: putative flavonol synthase-like protein
  misc_feature (4)..(298): Homolog of NCBI NO: 23130050 NR Description: hypothetical protein [Nostoc punctiforme]
  misc_feature (1)..(122): Homolog of NCBI NO: 10834554 NR Description: 2-oxoacid-dependent oxidase [Arabidopsis thaliana]
MATDFKSLPVIDISRLLLKCDDPDMAEDVGVAEVVQQLDKACRDAGFFYVIGHGISEDVINKVREITREFFKLPYEEKLKIKMTPAAGYRGYQRIGENVTKGIPDIHEAIDCYREIKQGKYGDIGKVMEGPNQWPENPQEFKELMEEYIKLCTDLSRKILRGISLALAGSPYEFEGKMAGDPFWVMRLIGYPGAEFTNGQPENDIGCGAHTDYGLLTLVNQDDDKTALQVRNLGGEWISAIPIPGSFVCNIGDMLKILSNGVYESTLHRVINNSPQYRVCVAFFYETNFDAVVEPLDICKQKYPGGRGGCQVFKRAVYGEHLVSKVQTNFAM

SEQ ID NO: 103141 - protein, 308 aa, Arabidopsis thaliana
  peptide (1)..(308): Ceres Seq. ID no. 13612083
  misc_feature (158)..(263): Pfam Name: 2OG-Fe(II) oxygenase superfamily Pfam Description: 2OG-Fe(II) oxygenase superfamily
  misc_feature (1)..(308): Homolog of NCBI NO: 18409039 NR Description: oxidoreductase (din11), putative [Arabidopsis
  misc_feature (1)..(308): Homolog of NCBI NO: 21554579 NR Description: flavonol synthase-like protein [Arabidopsis
  misc_feature (1)..(308): Homolog of NCBI NO: 11255902 NR Description: flavonol synthase-like protein - Arabidopsis
  misc_feature (1)..(307): Homolog of NCBI NO: 19423910 NR Description: unknown protein [Arabidopsis thaliana]
  misc_feature (1)..(307): Homolog of NCBI NO: 22331716 NR Description: oxidoreductase (din11), putative [Arabidopsis >gi|24030245|gb|AAN41298.1| unknown protein [Arabidopsis
  misc_feature (1)..(307): Homolog of NCBI NO: 11255891 NR Description: hypothetical protein T9C5.210 - Arabidopsis >gi|6561962|emb|CAB62466.1| putative protein [Arabidopsis
  misc_feature (1)..(306): Homolog of NCBI NO: 15229181 NR Description: oxidoreductase (din11), putative [Arabidopsis
  misc_feature (1)..(306): Homolog of NCBI NO: 6984228 NR Description: putative flavonol synthase-like protein
  misc_feature (1)..(274): Homolog of NCBI NO: 23130050 NR Description: hypothetical protein [Nostoc punctiforme]
  misc_feature (1)..(98): Homolog of NCBI NO: 10834554 NR Description: 2-oxoacid-dependent oxidase [Arabidopsis thaliana]
MAEDVGVAEVVQQLDKACRDAGFFYVIGHGISEDVINKVREITREFFKLPYEEKLKIKMTPAAGYRGYQRIGENVTKGIPDIHEAIDCYREIKQGKYGDIGKVMEGPNQWPENPQEFKELMEEYIKLCTDLSRKILRGISLALAGSPYEFEGKMAGDPFWVMRLIGYPGAEFTNGQPENDIGCGAHTDYGLLTLVNQDDDKTALQVRNLGGEWISAIPIPGSFVCNIGDMLKILSNGVYESTLHRVINNSPQYRVCVAFFYETNFDAVVEPLDICKQKYPGGRGGCQVFKRAVYGEHLVSKVQTNFAM

SEQ ID NO: 103142 - protein, 250 aa, Arabidopsis thaliana
  peptide (1)..(250): Ceres Seq. ID no. 13612084
  misc_feature (100)..(205): Pfam Name: 2OG-Fe(II) oxygenase superfamily Pfam Description: 2OG-Fe(II) oxygenase superfamily
  misc_feature (1)..(250): Homolog of NCBI NO: 18409039 NR Description: oxidoreductase (din11), putative [Arabidopsis
  misc_feature (1)..(250): Homolog of NCBI NO: 21554579 NR Description: flavonol synthase-like protein [Arabidopsis
  misc_feature (1)..(250): Homolog of NCBI NO: 11255902 NR Description: flavonol synthase-like protein - Arabidopsis
  misc_feature (1)..(249): Homolog of NCBI NO: 19423910 NR Description: unknown protein [Arabidopsis thaliana]
  misc_feature (1)..(249): Homolog of NCBI NO: 22331716 NR Description: oxidoreductase (din11), putative [Arabidopsis >gi|24030245|gb|AAN41298.1| unknown protein [Arabidopsis
  misc_feature (1)..(249): Homolog of NCBI NO: 11255891 NR Description: hypothetical protein T9C5.210 - Arabidopsis >gi|6561962|emb|CAB62466.1| putative protein [Arabidopsis
  misc_feature (1)..(248): Homolog of NCBI NO: 15229181 NR Description: oxidoreductase (din11), putative [Arabidopsis
  misc_feature (1)..(248): Homolog of NCBI NO: 6984228 NR Description: putative flavonol synthase-like protein
  misc_feature (1)..(216): Homolog of NCBI NO: 23130050 NR Description: hypothetical protein [Nostoc punctiforme]
  misc_feature (1)..(40): Homolog of NCBI NO: 10834554 NR Description: 2-oxoacid-dependent oxidase [Arabidopsis thaliana]
MTPAAGYRGYQRIGENVTKGIPDIHEAIDCYREIKQGKYGDIGKVMEGPNQWPENPQEFKELMEEYIKLCTDLSRKILRGISLALAGSPYEFEGKMAGDPFWVMRLIGYPGAEFTNGQPENDIGCGAHTDYGLLTLVNQDDDKTALQVRNLGGEWISAIPIPGSFVCNIGDMLKILSNGVYESTLHRVINNSPQYRVCVAFFYETNFDAVVEPLDICKQKYPGGRGGCQVFKRAVYGEHLVSKVQTNFAM

SEQ ID NO: 103143 - DNA, 1473 bp, Arabidopsis thaliana
  misc_feature (1)..(1473): Ceres Seq. ID no. 13612088
  misc_feature: MA Experiment ID: 20000184 Result: Down-regulated in Transcription
  misc_feature: MA Experiment 20000184 PARAMETER Experiment Name: At_Shoots__P Parameter: Age (day) Value: 7
  misc_feature: MA Experiment 20000184 PARAMETER Experiment Name: At_Shoots__P Parameter: Tissue Value: Shoots vs. Whole Plant
  misc_feature: MA Experiment ID: 20000227 Result: Down-regulated in Transcription
  misc_feature: MA Experiment 20000227 PARAMETER Experiment Name: At_Root-Tips-vs-Tops_P Parameter: Tissue Value: Root Tips vs. Root Tops
  misc_feature: MA Experiment ID: 20000234 Result: Down-regulated in Transcription
  misc_feature: MA Experiment 20000234 PARAMETER Experiment Name: At_Siliques_P Parameter: Age (day) Value: 21
  misc_feature: MA Experiment 20000234 PARAMETER Experiment Name: At_Siliques_P Parameter: Organism Value: A. thaliana
  misc_feature: MA Experiment 20000234 PARAMETER Experiment Name: At_Siliques_P Parameter: Plant Line Value: WS
  misc_feature: MA Experiment 20000234 PARAMETER Experiment Name: At_Siliques_P Parameter: Tissue Value: Less Than 5mm Siliques vs. Whole Plant
  misc_feature: MA Experiment ID: 20000265 Result: Down-regulated in Transcription
  misc_feature: MA Experiment 20000265 PARAMETER Experiment Name: At_Open_Flower_P Parameter: Age (day) Value: 21
  misc_feature: MA Experiment 20000265 PARAMETER Experiment Name: At_Open_Flower_P Parameter: Plant Line Value: WS
  misc_feature: MA Experiment 20000265 PARAMETER Experiment Name: At_Open_Flower_P Parameter: Tissue Value: Closed Flower vs. Whole Plant
  misc_feature: MA Experiment ID: 20000286 Result: Down-regulated in Transcription
  misc_feature: MA Experiment 20000286 PARAMETER Experiment Name: At_Open_Flower_P Parameter: Age (day) Value: 21
  misc_feature: MA Experiment 20000286 PARAMETER Experiment Name: At_Open_Flower_P Parameter: Plant Line Value: WS
  misc_feature: MA Experiment 20000286 PARAMETER Experiment Name: At_Open_Flower_P Parameter: Tissue Value: Half Open vs. Whole Plant
  misc_feature: MA Experiment ID: 20000437 Result: Up-regulated in Transcription
  misc_feature: MA Experiment 20000437 PARAMETER Experiment Name: At_Drought_P Parameter: Age (day) Value: 8
  misc_feature: MA Experiment 20000437 PARAMETER Experiment Name: At_Drought_P Parameter: Organism Value: A. thaliana
  misc_feature: MA Experiment 20000437 PARAMETER Experiment Name: At_Drought_P Parameter: Plant Line Value: WS
  misc_feature: MA Experiment 20000437 PARAMETER Experiment Name: At_Drought_P Parameter: Timepoint (hr) Value: 24
  misc_feature: MA Experiment 20000437 PARAMETER Experiment Name: At_Drought_P Parameter: Tissue Value: Whole Plant
  misc_feature: MA Experiment 20000437 PARAMETER Experiment Name: At_Drought_P Parameter: Treatment Value: Drought vs. No Drought
  misc_feature: MA Experiment ID: 20000438 Result: Down-regulated in Transcription
  misc_feature: MA Experiment 20000438 PARAMETER Experiment Name: At_Shoots__P Parameter: Age (day) Value: 14
  misc_feature: MA Experiment 20000438 PARAMETER Experiment Name: At_Shoots__P Parameter: Tissue Value: Shoots vs. Whole Plant
  misc_feature: MA Experiment ID: 20000439 Result: Down-regulated in Transcription
  misc_feature: MA Experiment 20000439 PARAMETER Experiment Name: At_Roots__P Parameter: Age (day) Value: 14 vs. 21
  misc_feature: MA Experiment 20000439 PARAMETER Experiment Name: At_Roots__P Parameter: Organism Value: A. thaliana
  misc_feature: MA Experiment 20000439 PARAMETER Experiment Name: At_Roots__P Parameter: Tissue Value: Roots vs. Whole Plant
  misc_feature: MA Experiment ID: 20001248 Result: Up-regulated in Transcription
  misc_feature: MA Experiment 20001248 PARAMETER Experiment Name: At_Far-red-induction_P Parameter: Age (day) Value: 7
  misc_feature: MA Experiment 20001248 PARAMETER Experiment Name: At_Far-red-induction_P Parameter: Light Value: Far-red vs. White
  misc_feature: MA Experiment 20001248 PARAMETER Experiment Name: At_Far-red-induction_P Parameter: Organism Value: A. thaliana
  misc_feature: MA Experiment 20001248 PARAMETER Experiment Name: At_Far-red-induction_P Parameter: Plant Line Value: Columbia
  misc_feature: MA Experiment 20001248 PARAMETER Experiment Name: At_Far-red-induction_P Parameter: Timepoint (hr) Value: 4
  misc_feature: MA Experiment 20001248 PARAMETER Experiment Name: At_Far-red-induction_P Parameter: Tissue Value: Whole Plant
  misc_feature: MA Experiment ID: 20001558 Result: Down-regulated in Transcription
  misc_feature: MA Experiment 20001558 PARAMETER Experiment Name: At_Drought_Soil_Dry_P Parameter: Age (day) Value: 27
  misc_feature: MA Experiment 20001558 PARAMETER Experiment Name: At_Drought_Soil_Dry_P Parameter: Organism Value: A. thaliana
  misc_feature: MA Experiment 20001558 PARAMETER Experiment Name: At_Drought_Soil_Dry_P Parameter: Plant Line Value: WS
  misc_feature: MA Experiment 20001558 PARAMETER Experiment Name: At_Drought_Soil_Dry_P Parameter: Post Timepoint (hr) Value: 6
  misc_feature: MA Experiment 20001558 PARAMETER Experiment Name: At_Drought_Soil_Dry_P Parameter: Post-Treatment Value: Re-Water vs. No Drought
  misc_feature: MA Experiment 20001558 PARAMETER Experiment Name: At_Drought_Soil_Dry_P Parameter: Timepoint (day) Value: 13
  misc_feature: MA Experiment 20001558 PARAMETER Experiment Name: At_Drought_Soil_Dry_P Parameter: Treatment Value: Drought vs. No Drought
ctttgtctttctcattcgtcgttgatccatctttttcccccaaattcatatccttccttagatatttttctccttcttcttcttctagattccagctactccagaagattcttcgacttaatctgatgtgattaggaagagcaatagaggaagagaagaatcagaaaaaatggatccggcgactaattcaccgattatgccgattgatttaccgattatgcacgacagtgatcgttacgacttcgttaaagatattggctctggtaatttcggcgttgctcgtctcatgaccgatagagtcaccaaggagcttgttgctgttaaatacatcgagagaggagaaaagattgatgaaaatgttcagagggagattatcaatcatagatcattgagacatcctaatattgttaggtttaaagaggtgattttgacgccttcccatttggctattgttatggaatatgctgctggtggagaactttatgagcggatttgtaatgccggacggtttagtgaagatgaggctcggttcttctttcagcagcttatatctggagttagctattgtcatgcaatgcaaatatgccatcgggatctgaagctggaaaatacattgttagatggaagtccggcacctcgtttgaaaatatgtgattttggttattccaagtcttctgttcttcattcccaaccaaagtcaactgttggtactcctgcatacattgcaccagagattcttcttcgacaggaatatgatggcaagcttgcagatgtatggtcttgcggtgtaacattatatgtaatgttggttggagcttatccattcgaggatccacaggagccacgagattatcgaaagacaatacaaagaatccttagtgtcacatactcgatcccagaggacttacacctctcaccagaatgtcgccatctaatatcgaggatcttcgtggctgatccggcaacaagaatcactattccggagatcacatccgataaatggttcttgaagaatctaccaggtgatttgatggatgagaaccgaatgggaagtcagtttcaagagcctgagcagccaatgcagagccttgacacgattatgcagataatatcggaggctacgattccgactgttcgtaatcgttgcctcgatgatttcatggcggataatcttgatctagacgatgacatggatgactttgattccgaatctgagattgatgttgacagtagtggagagatagtttatgctctctgagattcctgaggacaaagtctgttttgtccgtactgttgagacacaccactggagttttgtcttagctccacgcactccatcgttcatttttggatcgtttgttgttttttactctacaagctttggattcacatacatatatatgtattgtaatgtaatatgtaatatattctatgtatttctctttgtttaataactattggcacattttatac

SEQ ID NO: 103144 - protein, 362 aa, Arabidopsis thaliana
  peptide (1)..(362): Ceres Seq. ID no. 13612089
  misc_feature (23)..(279): Pfam Name: Protein kinase domain Pfam Description: Protein kinase domain
  misc_feature (1)..(362): Homolog of NCBI NO: 15229772 NR Description: protein kinase, putative [Arabidopsis thaliana]
  misc_feature (1)..(362): Homolog of NCBI NO: 21593534 NR Description: protein kinase SPK-2 [Arabidopsis thaliana]
  misc_feature (11)..(362): Homolog of NCBI NO: 15240124 NR Description: serine/threonine protein kinase, putative
  misc_feature (14)..(362): Homolog of NCBI NO: 20260398 NR Description: putative protein [Arabidopsis thaliana]
  misc_feature (12)..(362): Homolog of NCBI NO: 31415944 NR Description: putative serine-threonine protein kinase [Oryza
  misc_feature (1)..(362): Homolog of NCBI NO: 18418337 NR Description: protein kinase, putative [Arabidopsis thaliana]
  misc_feature (1)..(362): Homolog of NCBI NO: 7446439 NR Description: probable serine/threonine-specific protein kinase
  misc_feature (10)..(362): Homolog of NCBI NO: 6739629 NR Description: abscisic acid-activated protein kinase [Vicia
  misc_feature (21)..(362): Homolog of NCBI NO: 29164823 NR Description: abcisic acid-inducible protein kinanase [Oryza
  misc_feature (21)..(362): Homolog of NCBI NO: 34906840 NR Description: putative protein kinase HvPKABA1(Abcisic
MDPATNSPIMPIDLPIMHDSDRYDFVKDIGSGNFGVARLMTDRVTKELVAVKYIERGEKIDENVQREIINHRSLRHPNIVRFKEVILTPSHLAIVMEYAAGGELYERICNAGRFSEDEARFFFQQLISGVSYCHAMQICHRDLKLENTLLDGSPAPRLKICDFGYSKSSVLHSQPKSTVGTPAYIAPEILLRQEYDGKLADVWSCGVTLYVMLVGAYPFEDPQEPRDYRKTIQRILSVTYSIPEDLHLSPECRHLISRIFVADPATRITIPEITSDKWFLKNLPGDLMDENRMGSQFQEPEQPMQSLDTIMQIISEATIPTVRNRCLDDFMADNLDLDDDMDDFDSESEIDVDSSGEIVYAL

SEQ ID NO: 103145 - protein, 353 aa, Arabidopsis thaliana
  peptide (1)..(353): Ceres Seq. ID no. 13612090
  misc_feature (14)..(270): Pfam Name: Protein kinase domain Pfam Description: Protein kinase domain
  misc_feature (1)..(353): Homolog of NCBI NO: 15229772 NR Description: protein kinase, putative [Arabidopsis thaliana]
  misc_feature (1)..(353): Homolog of NCBI NO: 21593534 NR Description: protein kinase SPK-2 [Arabidopsis thaliana]
  misc_feature (2)..(353): Homolog of NCBI NO: 15240124 NR Description: serine/threonine protein kinase, putative
  misc_feature (5)..(353): Homolog of NCBI NO: 20260398 NR Description: putative protein [Arabidopsis thaliana]
  misc_feature (3)..(353): Homolog of NCBI NO: 31415944 NR Description: putative serine-threonine protein kinase [Oryza
  misc_feature (1)..(353): Homolog of NCBI NO: 18418337 NR Description: protein kinase, putative [Arabidopsis thaliana]
  misc_feature (1)..(353): Homolog of NCBI NO: 7446439 NR Description: probable serine/threonine-specific protein kinase
  misc_feature (1)..(353): Homolog of NCBI NO: 6739629 NR Description: abscisic acid-activated protein kinase [Vicia
  misc_feature (12)..(353): Homolog of NCBI NO: 29164823 NR Description: abcisic acid-inducible protein kinanase [Oryza
  misc_feature (12)..(353): Homolog of NCBI NO: 34906840 NR Description: putative protein kinase HvPKABA1(Abcisic
MPIDLPIMHDSDRYDFVKDIGSGNFGVARLMTDRVTKELVAVKYIERGEKIDENVQREIINHRSLRHPNIVRFKEVILTPSHLAIVMEYAAGGELYERICNAGRFSEDEARFFFQQLISGVSYCHAMQICHRDLKLENTLLDGSPAPRLKICDFGYSKSSVLHSQPKSTVGTPAYIAPEILLRQEYDGKLADVWSCGVTLYVMLVGAYPFEDPQEPRDYRKTIQRILSVTYSIPEDLHLSPECRHLISRIFVADPATRITIPEITSDKWFLKNLPGDLMDENRMGSQFQEPEQPMQSLDTIMQIISEATIPTVRNRCLDDFMADNLDLDDDMDDFDSESEIDVDSSGEIVYAL

SEQ ID NO: 103146 - protein, 346 aa, Arabidopsis thaliana
  peptide (1)..(346): Ceres Seq. ID no. 13612091
  misc_feature (7)..(263): Pfam Name: Protein kinase domain Pfam Description: Protein kinase domain
  misc_feature (1)..(346): Homolog of NCBI NO: 15229772 NR Description: protein kinase, putative [Arabidopsis thaliana]
  misc_feature (1)..(346): Homolog of NCBI NO: 21593534 NR Description: protein kinase SPK-2 [Arabidopsis thaliana]
  misc_feature (1)..(346): Homolog of NCBI NO: 15240124 NR Description: serine/threonine protein kinase, putative
  misc_feature (1)..(346): Homolog of NCBI NO: 20260398 NR Description: putative protein [Arabidopsis thaliana]
  misc_feature (1)..(346): Homolog of NCBI NO: 31415944 NR Description: putative serine-threonine protein kinase [Oryza
  misc_feature (1)..(346): Homolog of NCBI NO: 18418337 NR Description: protein kinase, putative [Arabidopsis thaliana]
  misc_feature (1)..(346): Homolog of NCBI NO: 7446439 NR Description: probable serine/threonine-specific protein kinase
  misc_feature (1)..(346): Homolog of NCBI NO: 6739629 NR Description: abscisic acid-activated protein kinase [Vicia
  misc_feature (5)..(346): Homolog of NCBI NO: 29164823 NR Description: abcisic acid-inducible protein kinanase [Oryza
  misc_feature (5)..(346): Homolog of NCBI NO: 34906840 NR Description: putative protein kinase HvPKABA1(Abcisic
MHDSDRYDFVKDIGSGNFGVARLMTDRVTKELVAVKYIERGEKIDENVQREIINHRSLRHPNIVRFKEVILTPSHLAIVMEYAAGGELYERICNAGRFSEDEARFFFQQLISGVSYCHAMQICHRDLKLENTLLDGSPAPRLKICDFGYSKSSVLHSQPKSTVGTPAYIAPEILLRQEYDGKLADVWSCGVTLYVMLVGAYPFEDPQEPRDYRKTIQRILSVTYSIPEDLHLSPECRHLISRIFVADPATRITIPEITSDKWFLKNLPGDLMDENRMGSQFQEPEQPMQSLDTIMQIISEATIPTVRNRCLDDFMADNLDLDDDMDDFDSESEIDVDSSGEIVYAL

SEQ ID NO: 103147 - DNA, 1191 bp, Arabidopsis thaliana
  misc_feature (1)..(1191): Ceres Seq. ID no. 13612109
  misc_feature: MA Experiment ID: 108434 Result: Up-regulated in Transcription
  misc_feature: MA Experiment 108434 PARAMETER Experiment Name: At_Root_Tips_cDNA_P Parameter: Tissue Value: Root Tips
  misc_feature: MA Experiment ID: 108462 Result: Down-regulated in Transcription
  misc_feature: MA Experiment 108462 PARAMETER Experiment Name: At_Germinating_Seeds_cDNA_P Parameter: Age (day) Value: 2 vs. 0
  misc_feature: MA Experiment 108462 PARAMETER Experiment Name: At_Germinating_Seeds_cDNA_P Parameter: Tissue Value: Germinating Seeds
  misc_feature: MA Experiment ID: 108501 Result: Up-regulated in Transcription
  misc_feature: MA Experiment 108501 PARAMETER Experiment Name: At_ap2_floral_buds_cDNA_P Parameter: Plant Line Value: ap2 (Ler.)
  misc_feature: MA Experiment 108501 PARAMETER Experiment Name: At_ap2_floral_buds_cDNA_P Parameter: Tissue Value: Closed Flower
acacttcactccaacgtgaaacctgcaaactgaacttatctcttcatattttctttagcttctcttaattttacacttagggttttcaaaccagtagagagagagagaagtgtgtaagagcgatgatgcagactccgtacactacttcaacgcaggggcaatattgtcattcttgtggaatgttccaccaccatagccaaagctgctgctacaacaacaacaacaactccaacgccggttcttactcgatggtcttctccatgcaaaacggtggcgttttcgagcagaacggtgaggactatcatcactcttcctccctcgttgactgcactctctctcttggaactccttctacgaggctttgtgaggaagatgagaaacgtagacgctctacttcatctggtgcttcttcttgcatctccaacttttgggacttgattcacaccaaaaacaacaactccaaaacggcaccgtacaataacgttccttctttctccgctaacaagccaagtcgcggttgttccggtggtggtggtggcggaggaggcggtggcggaggtgactctcttctcgctagacgctgtgccaactgtgacactacttctactccactatggaggaatggtcctagaggccctaagtccctatgcaacgcatgcggcattcgtttcaagaaggaagagagaagaactactgcggctacaggaaacaccgtcgtcggagctgcaccggttcaaaccgaccagtacgggcatcacaactctggctacaataattaccatgctgccactaataacaacaataataatggtactccgtgggctcatcaccactcgacgcagagggttccgtgtaattatccggcaaatgagatcaggttcatggatgattacggcagtggagtagcaaacaacgttgaatccgacggtgctcacggcggtgttccgttcctttcttggaggcttaatgtagcggatagggcaagtcttgtccatgactttaccagatgaaaggagaatagaaaacgacgttagattctcttaaaatttccatgtggtttaattatgtctaattaaaaaaaaaccaagaaaatatttctgaaaaaaatagaagtgtatatcgagagacgatgttgatgtttattgatagtgacggtctaacttatggtttatctataaagtaccgttctgg

SEQ ID NO: 103148 - protein, 295 aa, Arabidopsis thaliana
  peptide (1)..(295): Ceres Seq. ID no. 13612110
  misc_feature (1)..(295): Homolog of NCBI NO: 18409199 NR Description: GATA zinc finger protein [Arabidopsis thaliana]
  misc_feature (2)..(295): Homolog of NCBI NO: 7488381 NR Description: transcription factor homolog F18B3.150 -
  misc_feature (2)..(295): Homolog of NCBI NO: 21555178 NR Description: transcription factor-like protein [Arabidopsis
  misc_feature (137)..(294): Homolog of NCBI NO: 15234463 NR Description: GATA zinc finger protein [Arabidopsis thaliana]
  misc_feature (43)..(127): Homolog of NCBI NO: 15234463 NR Description: GATA zinc finger protein [Arabidopsis thaliana]
  misc_feature (144)..(253): Homolog of NCBI NO: 15224164 NR Description: GATA zinc finger protein [Arabidopsis thaliana]
  misc_feature (35)..(118): Homolog of NCBI NO: 15224164 NR Description: GATA zinc finger protein [Arabidopsis thaliana]
  misc_feature (122)..(193): Homolog of NCBI NO: 34912080 NR Description: P0671D01.19 [Oryza sativa (japonica
  misc_feature (23)..(173): Homolog of NCBI NO: 5091599 NR Description: 10A19I.2 [Oryza sativa]
  misc_feature (173)..(202): Homolog of NCBI NO: 5091599 NR Description: 10A19I.2 [Oryza sativa]
MMQTPYTTSTQGQYCHSCGMFHHHSQSCCYNNNNNSNAGSYSMVFSMQNGGVFEQNGEDYHHSSSLVDCTLSLGTPSTRLCEEDEKRRRSTSSGASSCISNFWDLIHTKNNNSKTAPYNNVPSFSANKPSRGCSGGGGGGGGGGGGDSLLARRCANCDTTSTPLWRNGPRGPKSLCNACGIRFKKEERRTTAATGNTVVGAAPVQTDQYGHHNSGYNNYHAATNNNNNNGTPWAHHHSTQRVPCNYPANEIRFMDDYGSGVANNVESDGAHGGVPFLSWRLNVADRASLVHDFTR

SEQ ID NO: 103149 - protein, 294 aa, Arabidopsis thaliana
  peptide (1)..(294): Ceres Seq. ID no. 13612111
  misc_feature (1)..(294): Homolog of NCBI NO: 18409199 NR Description: GATA zinc finger protein [Arabidopsis thaliana]
  misc_feature (1)..(294): Homolog of NCBI NO: 7488381 NR Description: transcription factor homolog F18B3.150 -
  misc_feature (1)..(294): Homolog of NCBI NO: 21555178 NR Description: transcription factor-like protein [Arabidopsis
  misc_feature (136)..(293): Homolog of NCBI NO: 15234463 NR Description: GATA zinc finger protein [Arabidopsis thaliana]
  misc_feature (42)..(126): Homolog of NCBI NO: 15234463 NR Description: GATA zinc finger protein [Arabidopsis thaliana]
  misc_feature (143)..(252): Homolog of NCBI NO: 15224164 NR Description: GATA zinc finger protein [Arabidopsis thaliana]
  misc_feature (34)..(117): Homolog of NCBI NO: 15224164 NR Description: GATA zinc finger protein [Arabidopsis thaliana]
  misc_feature (121)..(192): Homolog of NCBI NO: 34912080 NR Description: P0671D01.19 [Oryza sativa (japonica
  misc_feature (22)..(172): Homolog of NCBI NO: 5091599 NR Description: 10A19I.2 [Oryza sativa]
  misc_feature (172)..(201): Homolog of NCBI NO: 5091599 NR Description: 10A19I.2 [Oryza sativa]
MQTPYTTSTQGQYCHSCGMFHHHSQSCCYNNNNNSNAGSYSMVFSMQNGGVFEQNGEDYHHSSSLVDCTLSLGTPSTRLCEEDEKRRRSTSSGASSCISNFWDLIHTKNNNSKTAPYNNVPSFSANKPSRGCSGGGGGGGGGGGGDSLLARRCANCDTTSTPLWRNGPRGPKSLCNACGIRFKKEERRTTAATGNTVVGAAPVQTDQYGHHNSGYNNYHAATNNNNNNGTPWAHHHSTQRVPCNYPANEIRFMDDYGSGVANNVESDGAHGGVPFLSWRLNVADRASLVHDFTR

SEQ ID NO: 103150 - protein, 276 aa, Arabidopsis thaliana
  peptide (1)..(276): Ceres Seq. ID no. 13612112
  misc_feature (1)..(276): Homolog of NCBI NO: 18409199 NR Description: GATA zinc finger protein [Arabidopsis thaliana]
  misc_feature (1)..(276): Homolog of NCBI NO: 7488381 NR Description: transcription factor homolog F18B3.150 -
  misc_feature (1)..(276): Homolog of NCBI NO: 21555178 NR Description: transcription factor-like protein [Arabidopsis
  misc_feature (118)..(275): Homolog of NCBI NO: 15234463 NR Description: GATA zinc finger protein [Arabidopsis thaliana]
  misc_feature (24)..(108): Homolog of NCBI NO: 15234463 NR Description: GATA zinc finger protein [Arabidopsis thaliana]
  misc_feature (125)..(234): Homolog of NCBI NO: 15224164 NR Description: GATA zinc finger protein [Arabidopsis thaliana]
  misc_feature (16)..(99): Homolog of NCBI NO: 15224164 NR Description: GATA zinc finger protein [Arabidopsis thaliana]
  misc_feature (103)..(174): Homolog of NCBI NO: 34912080 NR Description: P0671D01.19 [Oryza sativa (japonica
  misc_feature (4)..(154): Homolog of NCBI NO: 5091599 NR Description: 10A19I.2 [Oryza sativa]
  misc_feature (154)..(183): Homolog of NCBI NO: 5091599 NR Description: 10A19I.2 [Oryza sativa]
MFHHHSQSCCYNNNNNSNAGSYSMVFSMQNGGVFEQNGEDYHHSSSLVDCTLSLGTPSTRLCEEDEKRRRSTSSGASSCISNFWDLIHTKNNNSKTAPYNNVPSFSANKPSRGCSGGGGGGGGGGGGDSLLARRCANCDTTSTPLWRNGPRGPKSLCNACGIRFKKEERRTTAATGNTVVGAAPVQTDQYGHHNSGYNNYHAATNNNNNNGTPWAHHHSTQRVPCNYPANEIRFMDDYGSGVANNVESDGAHGGVPFLSWRLNVADRASLVHDFTR

SEQ ID NO: 103151 - DNA, 852 bp, Arabidopsis thaliana
  misc_feature (1)..(852): Ceres Seq. ID no. 13612113
  misc_feature: MA Experiment ID: 108434 Result: Up-regulated in Transcription
  misc_feature: MA Experiment 108434 PARAMETER Experiment Name: At_Root_Tips_cDNA_P Parameter: Tissue Value: Root Tips
  misc_feature: MA Experiment ID: 108462 Result: Down-regulated in Transcription
  misc_feature: MA Experiment 108462 PARAMETER Experiment Name: At_Germinating_Seeds_cDNA_P Parameter: Age (day) Value: 2 vs. 0
  misc_feature: MA Experiment 108462 PARAMETER Experiment Name: At_Germinating_Seeds_cDNA_P Parameter: Tissue Value: Germinating Seeds
  misc_feature: MA Experiment ID: 108463 Result: Down-regulated in Transcription
  misc_feature: MA Experiment 108463 PARAMETER Experiment Name: At_Germinating_Seeds_cDNA_P Parameter: Age (day) Value: 3 vs. 0
  misc_feature: MA Experiment 108463 PARAMETER Experiment Name: At_Germinating_Seeds_cDNA_P Parameter: Tissue Value: Germinating Seeds
  misc_feature: MA Experiment ID: 108464 Result: Down-regulated in Transcription
  misc_feature: MA Experiment 108464 PARAMETER Experiment Name: At_Germinating_Seeds_cDNA_P Parameter: Age (day) Value: 4 vs. 0
  misc_feature: MA Experiment 108464 PARAMETER Experiment Name: At_Germinating_Seeds_cDNA_P Parameter: Tissue Value: Germinating Seeds
  misc_feature: MA Experiment ID: 20000794 Result: Down-regulated in Transcription
  misc_feature: MA Experiment 20000794 PARAMETER Experiment Name: At_Petals_P Parameter: Age (day) Value: 23-25 days
  misc_feature: MA Experiment 20000794 PARAMETER Experiment Name: At_Petals_P Parameter: Plant Line Value: WS
  misc_feature: MA Experiment 20000794 PARAMETER Experiment Name: At_Petals_P Parameter: Tissue Value: Petals vs. Whole plant
  misc_feature: MA Experiment ID: 20001556 Result: Up-regulated in Transcription
  misc_feature: MA Experiment 20001556 PARAMETER Experiment Name: At_Drought_Soil_Dry_P Parameter: Age (day) Value: 26
  misc_feature: MA Experiment 20001556 PARAMETER Experiment Name: At_Drought_Soil_Dry_P Parameter: Organism Value: A. thaliana
  misc_feature: MA Experiment 20001556 PARAMETER Experiment Name: At_Drought_Soil_Dry_P Parameter: Plant Line Value: WS
  misc_feature: MA Experiment 20001556 PARAMETER Experiment Name: At_Drought_Soil_Dry_P Parameter: Post Timepoint (hr) Value: None
  misc_feature: MA Experiment 20001556 PARAMETER Experiment Name: At_Drought_Soil_Dry_P Parameter: Post-Treatment Value: None
  misc_feature: MA Experiment 20001556 PARAMETER Experiment Name: At_Drought_Soil_Dry_P Parameter: Timepoint (day) Value: 12
  misc_feature: MA Experiment 20001556 PARAMETER Experiment Name: At_Drought_Soil_Dry_P Parameter: Treatment Value: Drought vs. No Drought
  misc_feature: MA Experiment ID: 20001560 Result: Up-regulated in Transcription
  misc_feature: MA Experiment 20001560 PARAMETER Experiment Name: At_Drought_Soil_Dry_P Parameter: Age (day) Value: 28
  misc_feature: MA Experiment 20001560 PARAMETER Experiment Name: At_Drought_Soil_Dry_P Parameter: Organism Value: A. thaliana
  misc_feature: MA Experiment 20001560 PARAMETER Experiment Name: At_Drought_Soil_Dry_P Parameter: Plant Line Value: WS
  misc_feature: MA Experiment 20001560 PARAMETER Experiment Name: At_Drought_Soil_Dry_P Parameter: Post Timepoint (hr) Value: None
  misc_feature: MA Experiment 20001560 PARAMETER Experiment Name: At_Drought_Soil_Dry_P Parameter: Post-Treatment Value: None
  misc_feature: MA Experiment 20001560 PARAMETER Experiment Name: At_Drought_Soil_Dry_P Parameter: Timepoint (day) Value: 14
  misc_feature: MA Experiment 20001560 PARAMETER Experiment Name: At_Drought_Soil_Dry_P Parameter: Treatment Value: Drought vs. No Drought
  misc_feature: MA Experiment ID: 20001757 Result: Up-regulated in Transcription
  misc_feature: MA Experiment 20001757 PARAMETER Experiment Name: At_50mM_NH4NO3_L-to-H_P Parameter: Timepoint (hr) Value: 6
  misc_feature: MA Experiment 20001757 PARAMETER Experiment Name: At_50mM_NH4NO3_L-to-H_P Parameter: Tissue Value: Leaf
  misc_feature: MA Experiment 20001757 PARAMETER Experiment Name: At_50mM_NH4NO3_L-to-H_P Parameter: Treatment Value: 50mM NH4NO3 vs 100mM Mannitol
tttcaagtctcgaactttgttggaatcggctaagtgataatttcgaagcttgatcggtaaatccaggagcttttggatcggaatctgttcgctgatgctttggtgaaaatgggtttcggtgcaattagatcgattttgcgtccattgtcgagaaccttagtttcgcgtgccgtcgttaactactcgtctgcgccgttcaatgcgacgattccggctgctaaacccgagttatgttccttcttcggtggatcgatgactcatttgaggttaccatggattccaatggctaaccattttcatagcttaagcttgactgatactcggctcccgaagagacgacccatgactcatcccaagaggaaaagatccaaattgaaacctccagggccttatgcatacgttcaatatacacctggccagccaatttcttcaaacaatcctaatgagggaagtgtgaagagaagaaatgcgaagaagcgcatagggcagcgtcgtgcttttatactgtctgagaagaagaagaggcaagcgctggtgcaagaggcgaagaggaagaagagaattaagcaagtggaacgtaagatggctgctgtcgctagggaccgagcatgggctgaaagactgattgagcttcaacagctggaagaagagaagaagaaatcaatgtcttcttgagatcaaacatagaaataatcctaaatgacaatctcttttcttgtcttgagttagagaattactcttctttgttgtgtttggcatgttctcttgagagttaactcgctatgttgtctgaagaactgagagttacttgacgtttgtgttctttatatccagtcatgtgtttcttgtttc

SEQ ID NO: 103152 - protein, 188 aa, Arabidopsis thaliana
  peptide (1)..(188): Ceres Seq. ID no. 13612114
  misc_feature (1)..(188): Homolog of NCBI NO: 18409234 NR Description: expressed protein [Arabidopsis thaliana]
  misc_feature (1)..(188): Homolog of NCBI NO: 21553452 NR Description: unknown [Arabidopsis thaliana]
MGFGAIRSILRPLSRTLVSRAVVNYSSAPFNATIPAAKPELCSFFGGSMTHLRLPWIPMANHFHSLSLTDTRLPKRRPMTHPKRKRSKLKPPGPYAYVQYTPGQPISSNNPNEGSVKRRNAKKRIGQRRAFILSEKKKRQALVQEAKRKKRIKQVERKMAAVARDRAWAERLIELQQLEEEKKKSMSS

SEQ ID NO: 103153 - protein, 140 aa, Arabidopsis thaliana
  peptide (1)..(140): Ceres Seq. ID no. 13612115
  misc_feature (1)..(140): Homolog of NCBI NO: 18409234 NR Description: expressed protein [Arabidopsis thaliana]
  misc_feature (1)..(140): Homolog of NCBI NO: 21553452 NR Description: unknown [Arabidopsis thaliana]
MTHLRLPWIPMANHFHSLSLTDTRLPKRRPMTHPKRKRSKLKPPGPYAYVQYTPGQPISSNNPNEGSVKRRNAKKRIGQRRAFILSEKKKRQALVQEAKRKKRIKQVERKMAAVARDRAWAERLIELQQLEEEKKKSMSS

SEQ ID NO: 103154 - protein, 130 aa, Arabidopsis thaliana; identical to SEQ ID NO: 29556
  peptide (1)..(130): Ceres Seq. ID no. 13612116
  misc_feature (1)..(130): Homolog of NCBI NO: 18409234 NR Description: expressed protein [Arabidopsis thaliana]
  misc_feature (1)..(130): Homolog of NCBI NO: 21553452 NR Description: unknown [Arabidopsis thaliana]

SEQ ID NO: 103155 - DNA, 904 bp, Arabidopsis thaliana
  misc_feature (1)..(904): Ceres Seq. ID no. 13612117
  misc_feature: MA Experiment ID: 108577 Result: Down-regulated in Transcription
  misc_feature: MA Experiment 108577 PARAMETER Experiment Name: At_42deg_Heat_cDNA_P Parameter: Temperature (deg C) Value: 42 vs. 22
  misc_feature: MA Experiment 108577 PARAMETER Experiment Name: At_42deg_Heat_cDNA_P Parameter: Timepoint (hr) Value: 6
  misc_feature: MA Experiment 108577 PARAMETER Experiment Name: At_42deg_Heat_cDNA_P Parameter: Tissue Value: Aerial
  misc_feature: MA Experiment ID: 20000111 Result: Down-regulated in Transcription
  misc_feature: MA Experiment 20000111 PARAMETER Experiment Name: At_42deg_Heat_cDNA_P Parameter: Temperature (deg C) Value: 42 vs. 22
  misc_feature: MA Experiment 20000111 PARAMETER Experiment Name: At_42deg_Heat_cDNA_P Parameter: Timepoint (hr) Value: 6
  misc_feature: MA Experiment 20000111 PARAMETER Experiment Name: At_42deg_Heat_cDNA_P Parameter: Tissue Value: Aerial
  misc_feature: MA Experiment ID: 20000113 Result: Down-regulated in Transcription
  misc_feature: MA Experiment 20000113 PARAMETER Experiment Name: At_42deg_Heat_cDNA_P Parameter: Temperature (deg C) Value: 42 vs. 22
  misc_feature: MA Experiment 20000113 PARAMETER Experiment Name: At_42deg_Heat_cDNA_P Parameter: Timepoint (hr) Value: 8
  misc_feature: MA Experiment 20000113 PARAMETER Experiment Name: At_42deg_Heat_cDNA_P Parameter: Tissue Value: Aerial
  misc_feature: MA Experiment ID: 20000224 Result: Down-regulated in Transcription
atcgttcgtaaaattggggccgagagagaaacaaaaatttcccaggaaaaaggcagtgattgaagattgtattagatccgattaatcgtcttcctggtcgcttgaactgagaatcaaataattgagctcaactggatttggatatgggagagacagcaacagattcagaacatcgcatgatgatcggattatcggatcctatgaaaattgatcccaaaagagaccggtttccatgctgcattgtttggacacctcttcccttcatttcatggctggttcccttcatcggccacgtcggtatctgcagagaagacggtgtcatcctcgactttgcaggacctaattttgtctgtgttgataattttgcatttggagctgtttctcgatatattcaaatcaacaaagaaatggagtcatctcgttcttccagttctggtatgttcaatggtgagaggagatatgagcaagaagaagatagtcatgagaaagagccaacatgggatgatgcactgagaaaaagcacgcaagagtaccaacatcactcatataacatactcacatgcaactgtcattcctttgtagccaacaacctgaaccgtctatctataaagtcaggcggatggaacgtggtgaatctcgcgacactagtgcttttcaagggacgttgggtgaacaaaacggctatagtaaagtccttgttgcctccactcatagtctacactataggaatcttactcggtggttggactttcattgcctcctgctcgattctagtggttttgcttaccgggtggttcatcattggaacgtattgtttcaagaaactgattcagctgtagatttgaatcataatgtacaaatgatgtctacaaaatgttttttactttttacgatggatatttac

SEQ ID NO: 103156 - protein, 231 aa, Arabidopsis thaliana; identical to SEQ ID NO: 21948
  peptide (1)..(231): Ceres Seq. ID no. 13612118
  misc_feature (21)..(204): Pfam Name: Protein of unknown function (DUF778) Pfam Description: Protein of unknown function (DUF778)
  misc_feature (1)..(231): Homolog of NCBI NO: 15230386 NR Description: expressed protein [Arabidopsis thaliana]
  misc_feature (20)..(231): Homolog of NCBI NO: 21592754 NR Description: unknown [Arabidopsis thaliana]
  misc_feature (21)..(229): Homolog of NCBI NO: 7452462 NR Description: hypothetical protein At2g26070 [imported] - thaliana >gi|3413706|gb|AAC31229.1| hypothetical protein
  misc_feature (21)..(229): Homolog of NCBI NO: 30682996 NR Description: expressed protein [Arabidopsis thaliana]
  misc_feature (1)..(229): Homolog of NCBI NO: 34910502 NR Description: P0456F08.26 [Oryza sativa (japonica
  misc_feature (38)..(229): Homolog of NCBI NO: 26449550 NR Description: unknown protein [Arabidopsis thaliana]
  misc_feature (101)..(231): Homolog of NCBI NO: 34897172 NR Description: hypothetical protein [Oryza sativa (japonica group)] >gi|28209510|gb|AAO37528.1| hypothetical protein [Oryza
  misc_feature (4)..(86): Homolog of NCBI NO: 14149779 NR Description: hypothetical protein DKFZp564D0478 [Homo sapiens] hypothetical protein [Homo sapiens]
  misc_feature (119)..(198): Homolog of NCBI NO: 14149779 NR Description: hypothetical protein DKFZp564D0478 [Homo sapiens] hypothetical protein [Homo sapiens]
  misc_feature (4)..(86): Homolog of NCBI NO: 27732675 NR Description: similar to hypothetical protein DKFZp564D0478

SEQ ID NO: 103157 - protein, 220 aa, Arabidopsis thaliana; identical to SEQ ID NO: 21949
  peptide (1)..(220): Ceres Seq. ID no. 13612119
  misc_feature (10)..(193): Pfam Name: Protein of unknown function (DUF778) Pfam Description: Protein of unknown function (DUF778)
  misc_feature (1)..(220): Homolog of NCBI NO: 15230386 NR Description: expressed protein [Arabidopsis thaliana]
  misc_feature (9)..(220): Homolog of NCBI NO: 21592754 NR Description: unknown [Arabidopsis thaliana]
  misc_feature (10)..(218): Homolog of NCBI NO: 7452462 NR Description: hypothetical protein At2g26070 [imported] - thaliana >gi|3413706|gb|AAC31229.1| hypothetical protein
  misc_feature (10)..(218): Homolog of NCBI NO: 30682996 NR Description: expressed protein [Arabidopsis thaliana]
  misc_feature (1)..(218): Homolog of NCBI NO: 34910502 NR Description: P0456F08.26 [Oryza sativa (japonica
  misc_feature (27)..(218): Homolog of NCBI NO: 26449550 NR Description: unknown protein [Arabidopsis thaliana]
  misc_feature (90)..(220): Homolog of NCBI NO: 34897172 NR Description: hypothetical protein [Oryza sativa (japonica group)] >gi|28209510|gb|AAO37528.1| hypothetical protein [Oryza
  misc_feature (1)..(75): Homolog of NCBI NO: 14149779 NR Description: hypothetical protein DKFZp564D0478 [Homo sapiens] hypothetical protein [Homo sapiens]
  misc_feature (108)..(187): Homolog of NCBI NO: 14149779 NR Description: hypothetical protein DKFZp564D0478 [Homo sapiens] hypothetical protein [Homo sapiens]
  misc_feature (1)..(75): Homolog of NCBI NO: 27732675 NR Description: similar to hypothetical protein DKFZp564D0478

SEQ ID NO: 103158 - protein, 219 aa, Arabidopsis thaliana; identical to SEQ ID NO: 21950
  peptide (1)..(219): Ceres Seq. ID no. 13612120
  misc_feature (9)..(192): Pfam Name: Protein of unknown function (DUF778) Pfam Description: Protein of unknown function (DUF778)
  misc_feature (1)..(219): Homolog of NCBI NO: 15230386 NR Description: expressed protein [Arabidopsis thaliana]
  misc_feature (8)..(219): Homolog of NCBI NO: 21592754 NR Description: unknown [Arabidopsis thaliana]
  misc_feature (9)..(217): Homolog of NCBI NO: 7452462 NR Description: hypothetical protein At2g26070 [imported] - thaliana >gi|3413706|gb|AAC31229.1| hypothetical protein
  misc_feature (9)..(217): Homolog of NCBI NO: 30682996 NR Description: expressed protein [Arabidopsis thaliana]
  misc_feature (1)..(217): Homolog of NCBI NO: 34910502 NR Description: P0456F08.26 [Oryza sativa (japonica
  misc_feature (26)..(217): Homolog of NCBI NO: 26449550 NR Description: unknown protein [Arabidopsis thaliana]
  misc_feature (89)..(219): Homolog of NCBI NO: 34897172 NR Description: hypothetical protein [Oryza sativa (japonica group)] >gi|28209510|gb|AAO37528.1| hypothetical protein [Oryza
  misc_feature (1)..(74): Homolog of NCBI NO: 14149779 NR Description: hypothetical protein DKFZp564D0478 [Homo sapiens] hypothetical protein [Homo sapiens]
  misc_feature (107)..(186): Homolog of NCBI NO: 14149779 NR Description: hypothetical protein DKFZp564D0478 [Homo sapiens] hypothetical protein [Homo sapiens]
  misc_feature (1)..(74): Homolog of NCBI NO: 27732675 NR Description: similar to hypothetical protein DKFZp564D0478

SEQ ID NO: 103159 - DNA, 1416 bp, Arabidopsis thaliana
  misc_feature (1)..(1416): Ceres Seq. ID no. 13612121
  misc_feature: MA Experiment ID: 108461 Result: Up-regulated in Transcription
  misc_feature: MA Experiment 108461 PARAMETER Experiment Name: At_Germinating_Seeds_cDNA_P Parameter: Age (day) Value: 1 vs. 0
  misc_feature: MA Experiment 108461 PARAMETER Experiment Name: At_Germinating_Seeds_cDNA_P Parameter: Tissue Value: Germinating Seeds
  misc_feature: MA Experiment ID: 108462 Result: Up-regulated in Transcription
  misc_feature: MA Experiment 108462 PARAMETER Experiment Name: At_Germinating_Seeds_cDNA_P Parameter: Age (day) Value: 2 vs. 0
  misc_feature: MA Experiment 108462 PARAMETER Experiment Name: At_Germinating_Seeds_cDNA_P Parameter: Tissue Value: Germinating Seeds
  misc_feature: MA Experiment ID: 108577 Result: Down-regulated in Transcription
  misc_feature: MA Experiment 108577 PARAMETER Experiment Name: At_42deg_Heat_cDNA_P Parameter: Temperature (deg C) Value: 42 vs. 22
  misc_feature: MA Experiment 108577 PARAMETER Experiment Name: At_42deg_Heat_cDNA_P Parameter: Timepoint (hr) Value: 6
  misc_feature: MA Experiment 108577 PARAMETER Experiment Name: At_42deg_Heat_cDNA_P Parameter: Tissue Value: Aerial
  misc_feature: MA Experiment ID: 108585 Result: Up-regulated in Transcription
  misc_feature: MA Experiment 108585 PARAMETER Experiment Name: At_5mM_NaNP_cDNA_P Parameter: Timepoint (hr) Value: 6
  misc_feature: MA Experiment 108585 PARAMETER Experiment Name: At_5mM_NaNP_cDNA_P Parameter: Tissue Value: Aerial
  misc_feature: MA Experiment 108585 PARAMETER Experiment Name: At_5mM_NaNP_cDNA_P Parameter: Treatment Value: null
  misc_feature: MA Experiment ID: 20000087 Result: Up-regulated in Transcription
  misc_feature: MA Experiment 20000087 PARAMETER Experiment Name: At_100uM_ABA_Mutants_cDNA_P Parameter: Plant Line Value: WS
  misc_feature: MA Experiment 20000087 PARAMETER Experiment Name: At_100uM_ABA_Mutants_cDNA_P Parameter: Timepoint (hr) Value: 6
  misc_feature: MA Experiment 20000087 PARAMETER Experiment Name: At_100uM_ABA_Mutants_cDNA_P Parameter: Tissue Value: Aerial
  misc_feature: MA Experiment 20000087 PARAMETER Experiment Name: At_100uM_ABA_Mutants_cDNA_P Parameter: Treatment Value: 100uM ABA vs. No Treatment
  misc_feature: MA Experiment ID: 20000093 Result: Down-regulated in Transcription
  misc_feature: MA Experiment 20000093 PARAMETER Experiment Name: At_42deg_Heat_cDNA_P Parameter: Temperature (deg C) Value: 42 vs. 22
  misc_feature: MA Experiment 20000093 PARAMETER Experiment Name: At_42deg_Heat_cDNA_P Parameter: Timepoint (hr) Value: 0.5
  misc_feature: MA Experiment 20000093 PARAMETER Experiment Name: At_42deg_Heat_cDNA_P Parameter: Tissue Value: Aerial
  misc_feature: MA Experiment ID: 20000111 Result: Down-regulated in Transcription
  misc_feature: MA Experiment 20000111 PARAMETER Experiment Name: At_42deg_Heat_cDNA_P Parameter: Temperature (deg C) Value: 42 vs. 22
  misc_feature: MA Experiment 20000111 PARAMETER Experiment Name: At_42deg_Heat_cDNA_P Parameter: Timepoint (hr) Value: 6
  misc_feature: MA Experiment 20000111 PARAMETER Experiment Name: At_42deg_Heat_cDNA_P Parameter: Tissue Value: Aerial
  misc_feature: MA Experiment ID: 20000112 Result: Down-regulated in Transcription
  misc_feature: MA Experiment 20000112 PARAMETER Experiment Name: At_42deg_Heat_cDNA_P Parameter: Temperature (deg C) Value: 42 vs. 22
  misc_feature: MA Experiment 20000112 PARAMETER Experiment Name: At_42deg_Heat_cDNA_P Parameter: Timepoint (hr) Value: 2
  misc_feature: MA Experiment 20000112 PARAMETER Experiment Name: At_42deg_Heat_cDNA_P Parameter: Tissue Value: Aerial
  misc_feature: MA Experiment ID: 20000113 Result: Down-regulated in Transcription
  misc_feature: MA Experiment 20000113 PARAMETER Experiment Name: At_42deg_Heat_cDNA_P Parameter: Temperature (deg C) Value: 42 vs. 22
  misc_feature: MA Experiment 20000113 PARAMETER Experiment Name: At_42deg_Heat_cDNA_P Parameter: Timepoint (hr) Value: 8
  misc_feature: MA Experiment 20000113 PARAMETER Experiment Name: At_42deg_Heat_cDNA_P Parameter: Tissue Value: Aerial
  misc_feature: MA Experiment ID: 20000144 Result: Down-regulated in Transcription
  misc_feature: MA Experiment 20000144 PARAMETER Experiment Name: At_42deg_Heat_cDNA_P Parameter: Temperature (deg C) Value: 42 vs. 22
  misc_feature: MA Experiment 20000144 PARAMETER Experiment Name: At_42deg_Heat_cDNA_P Parameter: Timepoint (hr) Value: 1
  misc_feature: MA Experiment 20000144 PARAMETER Experiment Name: At_42deg_Heat_cDNA_P Parameter: Tissue Value: Aerial
  misc_feature: MA Experiment ID: 20000171 Result: Down-regulated in Transcription
  misc_feature: MA Experiment 20000171 PARAMETER Experiment Name: At_42deg_Heat_P Parameter: Age (day) Value: 14
  misc_feature: MA Experiment 20000171 PARAMETER Experiment Name: At_42deg_Heat_P Parameter: Organism Value: A. thaliana
  misc_feature: MA Experiment 20000171 PARAMETER Experiment Name: At_42deg_Heat_P Parameter: Plant Line Value: WS
  misc_feature: MA Experiment 20000171 PARAMETER Experiment Name: At_42deg_Heat_P Parameter: Temperature (deg C) Value: 42 vs. 22
  misc_feature: MA Experiment 20000171 PARAMETER Experiment Name: At_42deg_Heat_P Parameter: Timepoint (hr) Value: 1
  misc_feature: MA Experiment 20000171 PARAMETER Experiment Name: At_42deg_Heat_P Parameter: Tissue Value: Aerial
  misc_feature: MA Experiment ID: 20000173 Result: Down-regulated in Transcription
  misc_feature: MA Experiment 20000173 PARAMETER Experiment Name: At_42deg_Heat_P Parameter: Age (day) Value: 14
  misc_feature: MA Experiment 20000173 PARAMETER Experiment Name: At_42deg_Heat_P Parameter: Organism Value: A. thaliana
  misc_feature: MA Experiment 20000173 PARAMETER Experiment Name: At_42deg_Heat_P Parameter: Plant Line Value: WS
  misc_feature: MA Experiment 20000173 PARAMETER Experiment Name: At_42deg_Heat_P Parameter: Temperature (deg C) Value: 42 vs. 22
  misc_feature: MA Experiment 20000173 PARAMETER Experiment Name: At_42deg_Heat_P Parameter: Timepoint (hr) Value: 6
  misc_feature: MA Experiment 20000173 PARAMETER Experiment Name: At_42deg_Heat_P Parameter: Tissue Value: Aerial
  misc_feature: MA Experiment ID: 20000179 Result: Up-regulated in Transcription
  misc_feature: MA Experiment 20000179 PARAMETER Experiment Name: At_Germinating_Seeds_P Parameter: Age (hr) Value: 6 vs. 0
  misc_feature: MA Experiment 20000179 PARAMETER Experiment Name: At_Germinating_Seeds_P Parameter: Tissue Value: Germinating Seeds
  misc_feature: MA Experiment ID: 20000180 Result: Up-regulated in Transcription
  misc_feature: MA Experiment 20000180 PARAMETER Experiment Name: At_Germinating_Seeds_P Parameter: Age (hr) Value: 24 vs. 0
  misc_feature: MA Experiment 20000180 PARAMETER Experiment Name: At_Germinating_Seeds_P Parameter: Tissue Value: Germinating Seeds
  misc_feature: MA Experiment ID: 20001557 Result: Up-regulated in Transcription
  misc_feature: MA Experiment 20001557 PARAMETER Experiment Name: At_Drought_Soil_Dry_P Parameter: Age (day) Value: 27
  misc_feature: MA Experiment 20001557 PARAMETER Experiment Name: At_Drought_Soil_Dry_P Parameter: Organism Value: A. thaliana
  misc_feature: MA Experiment 20001557 PARAMETER Experiment Name: At_Drought_Soil_Dry_P Parameter: Plant Line Value: WS
  misc_feature: MA Experiment 20001557 PARAMETER Experiment Name: At_Drought_Soil_Dry_P Parameter: Post Timepoint (hr) Value: 3
  misc_feature: MA Experiment 20001557 PARAMETER Experiment Name: At_Drought_Soil_Dry_P Parameter: Post-Treatment Value: Re-Water vs. No Drought
  misc_feature: MA Experiment 20001557 PARAMETER Experiment Name: At_Drought_Soil_Dry_P Parameter: Timepoint (day) Value: 13
  misc_feature: MA Experiment 20001557 PARAMETER Experiment Name: At_Drought_Soil_Dry_P Parameter: Treatment Value: Drought vs. No Drought
aattcaacacggattttcaacacagagctgacgttagcatttgtctctgaaatcccagatccgaaaacccaacaatggcgtcagagaacaacggatccagatccgattccgaatccatcaccgctcccaaagctgattccaccgtcgttgaaccgaggaagatagctctgatcaccggaatcaccggccaggacggatcatacctgacggagttccttctcggaaaaggctacgaagttcatggtctgatccgtcgatcatcgaatttcaacacccagcgaatcaaccatatctacatcgatccacacaatgtcaacaaagctctgatgaaactccactacgccgatctcaccgacgcttcctctctccgtcgttggatcgatgtgatcaaacctgacgaagtttataacctagctgctcaatctcacgtcgctgtctccttcgagatccctgattacacagccgatgtagtcgcaaccggtgctctccgtctccttgaagccgtcagatctcacaccatcgacagtggccgtaccgtcaagtattaccaagccggatcttcggagatgtttggatcaactcctcctccacaatcggagacgacgccgattcacctcagatctccttacgcagcttccaaatgcgctgctcattggtacacagtgaattacagagaggcgtacggtctcttcgcttgtaacggaatcttgttcaatcacgagtcacctcgccgtggtgagaatttcgtgacgaggaagatcacaagagcattgggaaggatcaaggttggtttgcagacgaagctattccttgggaatttgcaagcgtcaagagattggggatttgcaggagattatgtggaagcaatgtggttgatgttgcagcaagagaagccagatgattacgttgtggcaacagaggaaggacacacagtggaagagtttcttgatgtgtcatttgggtatttgggactcaattggaaagattatgttgagattgaccagaggtactttaggcctgctgaagtagataaccttcaaggagatgcaagcaaggcaaaggaagtgttggggtggaaaccacaagtagggtttgagaagcttgtgaagatgatggttgatgaagatcttgagcttgctaagagggagaaagtgcttgttgatgctggatacatggatgctaagcagcaaccttgatttgatcaattatacaaagatggagtttcttacatttatctgcttttatagagttttaaatttcgtttttttttctttctctttttgttgctttggtggttgtttgttgtctttttatgttttagtttctttgttgctttttaagttatctaaattgtttccctccaatgagttgaggatgaaagcgcagtgaattttgaatgaaggagcaaaaagaatc

SEQ ID NO: 103160 - protein, 373 aa, Arabidopsis thaliana
  peptide (1)..(373): Ceres Seq. ID no. 13612122
  misc_feature (31)..(355): Pfam Name: NAD dependent epimerase/dehydratase family Pfam Description: NAD dependent epimerase/dehydratase family
  misc_feature (1)..(373): Homolog of NCBI NO: 15230418 NR Description: GDP-D-mannose-4,6-dehydratase (MUR1) [Arabidopsis
  misc_feature (1)..(373): Homolog of NCBI NO: 1764100 NR Description: GDP-D-mannose-4,6-dehydratase [Arabidopsis
  misc_feature (1)..(373): Homolog of NCBI NO: 28373938 NR Description: Chain A, Crystal Structure Of The Gdp-Mannose 4,6-
  misc_feature (1)..(373): Homolog of NCBI NO: 21536808 NR Description: GDP-D-mannose-4,6-dehydratase MUR1 [Arabidopsis
  misc_feature (21)..(373): Homolog of NCBI NO: 15239334 NR Description: GDP-D-mannose 4,6-dehydratase, putative
  misc_feature (7)..(373): Homolog of NCBI NO: 7939611 NR Description: root cap-specific protein [Zea mays]
  misc_feature (28)..(352): Homolog of NCBI NO: 22298176 NR Description: GDP-mannose 4,6-dehydratase [Thermosynechococcus
  misc_feature (29)..(353): Homolog of NCBI NO: 4097914 NR Description: putative GDP-D-mannose dehydratase [Anabaena sp.
  misc_feature (29)..(352): Homolog of NCBI NO: 16329177 NR Description: GDP-D-mannose dehydratase [Synechocystis sp. PCC
  misc_feature (28)..(353): Homolog of NCBI NO: 23128163 NR Description: hypothetical protein [Nostoc punctiforme]
MASENNGSRSDSESITAPKADSTVVEPRKIALITGITGQDGSYLTEFLLGKGYEVHGLIRRSSNFNTQRINHIYIDPHNVNKALMKLHYADLTDASSLRRWIDVIKPDEVYNLAAQSHVAVSFEIPDYTADVVATGALRLLEAVRSHTIDSGRTVKYYQAGSSEMFGSTPPPQSETTPIHLRSPYAASKCAAHWYTVNYREAYGLFACNGILFNHESPRRGENFVTRKITRALGRIKVGLQTKLFLGNLQASRDWGFAGDYVEAMWLMLQQEKPDDYVVATEEGHTVEEFLDVSFGYLGLNWKDYVEIDQRYFRPAEVDNLQGDASKAKEVLGWKPQVGFEKLVKMMVDEDLELAKREKVLVDAGYMDAKQQP

SEQ ID NO: 103161 - protein, 289 aa, Arabidopsis thaliana
  peptide (1)..(289): Ceres Seq. ID no. 13612123
  misc_feature (1)..(271): Pfam Name: NAD dependent epimerase/dehydratase family Pfam Description: NAD dependent epimerase/dehydratase family
  misc_feature (1)..(289): Homolog of NCBI NO: 15230418 NR Description: GDP-D-mannose-4,6-dehydratase (MUR1) [Arabidopsis
  misc_feature (1)..(289): Homolog of NCBI NO: 1764100 NR Description: GDP-D-mannose-4,6-dehydratase [Arabidopsis
  misc_feature (1)..(289): Homolog of NCBI NO: 28373938 NR Description: Chain A, Crystal Structure Of The Gdp-Mannose 4,6-
  misc_feature (1)..(289): Homolog of NCBI NO: 21536808 NR Description: GDP-D-mannose-4,6-dehydratase MUR1 [Arabidopsis
  misc_feature (1)..(289): Homolog of NCBI NO: 15239334 NR Description: GDP-D-mannose 4,6-dehydratase, putative
  misc_feature (1)..(289): Homolog of NCBI NO: 7939611 NR Description: root cap-specific protein [Zea mays]
  misc_feature (1)..(268): Homolog of NCBI NO: 22298176 NR Description: GDP-mannose 4,6-dehydratase [Thermosynechococcus
  misc_feature (1)..(269): Homolog of NCBI NO: 4097914 NR Description: putative GDP-D-mannose dehydratase [Anabaena sp.
  misc_feature (1)..(268): Homolog of NCBI NO: 16329177 NR Description: GDP-D-mannose dehydratase [Synechocystis sp. PCC
  misc_feature (1)..(269): Homolog of NCBI NO: 23128163 NR Description: hypothetical protein [Nostoc punctiforme]
MKLHYADLTDASSLRRWIDVIKPDEVYNLAAQSHVAVSFEIPDYTADVVATGALRLLEAVRSHTIDSGRTVKYYQAGSSEMFGSTPPPQSETTPIHLRSPYAASKCAAHWYTVNYREAYGLFACNGILFNHESPRRGENFVTRKITRALGRIKVGLQTKLFLGNLQASRDWGFAGDYVEAMWLMLQQEKPDDYVVATEEGHTVEEFLDVSFGYLGLNWKDYVEIDQRYFRPAEVDNLQGDASKAKEVLGWKPQVGFEKLVKMMVDEDLELAKREKVLVDAGYMDAKQQP

SEQ ID NO: 103162 - protein, 209 aa, Arabidopsis thaliana
  peptide (1)..(209): Ceres Seq. ID no. 13612124
  misc_feature (1)..(191): Pfam Name: NAD dependent epimerase/dehydratase family Pfam Description: NAD dependent epimerase/dehydratase family
  misc_feature (1)..(209): Homolog of NCBI NO: 15230418 NR Description: GDP-D-mannose-4,6-dehydratase (MUR1) [Arabidopsis
  misc_feature (1)..(209): Homolog of NCBI NO: 1764100 NR Description: GDP-D-mannose-4,6-dehydratase [Arabidopsis
  misc_feature (1)..(209): Homolog of NCBI NO: 28373938 NR Description: Chain A, Crystal Structure Of The Gdp-Mannose 4,6-
  misc_feature (1)..(209): Homolog of NCBI NO: 21536808 NR Description: GDP-D-mannose-4,6-dehydratase MUR1 [Arabidopsis
  misc_feature (1)..(209): Homolog of NCBI NO: 15239334 NR Description: GDP-D-mannose 4,6-dehydratase, putative
  misc_feature (1)..(209): Homolog of NCBI NO: 7939611 NR Description: root cap-specific protein [Zea mays]
  misc_feature (1)..(188): Homolog of NCBI NO: 22298176 NR Description: GDP-mannose 4,6-dehydratase [Thermosynechococcus
  misc_feature (1)..(189): Homolog of NCBI NO: 4097914 NR Description: putative GDP-D-mannose dehydratase [Anabaena sp.
  misc_feature (1)..(188): Homolog of NCBI NO: 16329177 NR Description: GDP-D-mannose dehydratase [Synechocystis sp. PCC
  misc_feature (1)..(189): Homolog of NCBI NO: 23128163 NR Description: hypothetical protein [Nostoc punctiforme]
MFGSTPPPQSETTPIHLRSPYAASKCAAHWYTVNYREAYGLFACNGILFNHESPRRGENFVTRKITRALGRIKVGLQTKLFLGNLQASRDWGFAGDYVEAMWLMLQQEKPDDYVVATEEGHTVEEFLDVSFGYLGLNWKDYVEIDQRYFRPAEVDNLQGDASKAKEVLGWKPQVGFEKLVKMMVDEDLELAKREKVLVDAGYMDAKQQP

SEQ ID NO: 103163 - DNA, 1644 bp, Arabidopsis thaliana
  misc_feature (1)..(1644): Ceres Seq. ID no. 13612125
  misc_feature: MA Experiment ID: 108461 Result: Up-regulated in Transcription
  misc_feature: MA Experiment 108461 PARAMETER Experiment Name: At_Germinating_Seeds_cDNA_P Parameter: Age (day) Value: 1 vs. 0
  misc_feature: MA Experiment 108461 PARAMETER Experiment Name: At_Germinating_Seeds_cDNA_P Parameter: Tissue Value: Germinating Seeds
  misc_feature: MA Experiment ID: 108462 Result: Up-regulated in Transcription
  misc_feature: MA Experiment 108462 PARAMETER Experiment Name: At_Germinating_Seeds_cDNA_P Parameter: Age (day) Value: 2 vs. 0
  misc_feature: MA Experiment 108462 PARAMETER Experiment Name: At_Germinating_Seeds_cDNA_P Parameter: Tissue Value: Germinating Seeds
  misc_feature: MA Experiment ID: 108464 Result: Up-regulated in Transcription
  misc_feature: MA Experiment 108464 PARAMETER Experiment Name: At_Germinating_Seeds_cDNA_P Parameter: Age (day) Value: 4 vs. 0
  misc_feature: MA Experiment 108464 PARAMETER Experiment Name: At_Germinating_Seeds_cDNA_P Parameter: Tissue Value: Germinating Seeds
  misc_feature: MA Experiment ID: 108488 Result: Down-regulated in Transcription
  misc_feature: MA Experiment ID: 108573 Result: Up-regulated in Transcription
  misc_feature: MA Experiment 108573 PARAMETER Experiment Name: At_Drought_cDNA_P Parameter: Timepoint (hr) Value: 6
  misc_feature: MA Experiment 108573 PARAMETER Experiment Name: At_Drought_cDNA_P Parameter: Tissue Value: Aerial
  misc_feature: MA Experiment 108573 PARAMETER Experiment Name: At_Drought_cDNA_P Parameter: Treatment Value: Drought vs. No Drought
  misc_feature: MA Experiment ID: 108595 Result: Down-regulated in Transcription
  misc_feature: MA Experiment 108595 PARAMETER Experiment Name: At_Ler-pi_Ovule_cDNA_P Parameter: Plant Line Value: null
  misc_feature: MA Experiment ID: 20001757 Result: Down-regulated in Transcription
  misc_feature: MA Experiment 20001757 PARAMETER Experiment Name: At_50mM_NH4NO3_L-to-H_P Parameter: Timepoint (hr) Value: 6
  misc_feature: MA Experiment 20001757 PARAMETER Experiment Name: At_50mM_NH4NO3_L-to-H_P Parameter: Tissue Value: Leaf
  misc_feature: MA Experiment 20001757 PARAMETER Experiment Name: At_50mM_NH4NO3_L-to-H_P Parameter: Treatment Value: 50mM NH4NO3 vs 100mM Mannitol
aacgacaacacgacgaagatgaatccttctcacggtggcgacgacaagcaacgaccggcgatgtatccccaagttgatcaatccattcctgataatccttttgcttctacaaatccttacgtcgcttcttcaccttatctatatccttctctatcctctcataatctcggacctaatctcttcccagaccacggagatgcatccaacgaccaatcaccatctgctcctcctcaggcgacggaggaggttctcatccgtgttcccggcgctattctcaaccttatcgacaaatcctacagcgttgaactcgcgtgcggtgatttcaccatcgttcgaattatccaggggcaaaacattgtagcggttctagccaatgttggaaatgagattcaatggccgttgacgaagaacgaggttgcagctaaggttgatggatctcactatttcttttcgattcatccgccaaaggagaaaggtcaaggatctgggtctgattcagatgatgaacaagggcaaaagagtaaatcgaaatcggatgatgagattcttaattacggattgaccattgcttcgaaagggcaagagaatgtattacttgtgcttgatcaggttttacgagactacagttgtttcacagagcagagaatgtctgaaaaagccaaggagactggagaagaggtgctgggaaattcagtggtggcggacacttcgccggaggagcttaagggtgagagaaaggatgttgtggaaggtcaatgtgcggcgtattggacaacacttgcaccgaatgtcgaggattatactcacagtactgctaaaatgatagcttccgggtcaggtaagctgatcagagggatactgtggtgtggggatgtaactgtggagagactcaagaagggaaacgaggttatgaagaataggcttagtcgtgctgagaaggagaaagatgttagccctgagacactgaggagaatcaagagggttaagagagtgacacaaatgacagagaaagttgccactggtgttctttctggtgttgtcaaagtctcgggattcatcactggttcaatggcaaactcaaaagctggaaagaagctttttggtctcttgcctggagagattgttctcgcatccctcgatggatttagcaagatctgtgatgctgttgaagttgctgggaaaaacgtaatgtcgacttcatcaactgtcacaacagaattagtcaatcacaggtacggcacaaaagcagcagaggctactaacgaagggctagacgcagcgggacatgcatttggaacggcatgggttgctttcaagattcgaaaggcatttaaccccaaaaatgtcataaagccttcatcattggccaagtctgtttcggaactaaaggctaagaaaggctccaagtaaacactaaacagccttcaactgttctgtgttcatctaaacttgcatttagtttttcattttggaaaagtatatgaagattgattgatgtaactctatatttagttttctgtgtatattgtgattctatgtaaactatataaacagtttcttccaatcttctcccatttatgggtttgatttgtaacttcttaatgcatcgagaagcagtattagtactctttatctttcttttgt

SEQ ID NO: 103164 - protein, 469 aa, Arabidopsis thaliana; identical to SEQ ID NO: 39627
  peptide (1)..(469): Ceres Seq. ID no. 13612126
  misc_feature (7)..(469): Homolog of NCBI NO: 15230434 NR Description: expressed protein [Arabidopsis thaliana]
  misc_feature (15)..(458): Homolog of NCBI NO: 15227905 NR Description: senescence-associated protein 12 -related
  misc_feature (15)..(458): Homolog of NCBI NO: 21593641 NR Description: putative senescence-associated protein 12
  misc_feature (32)..(469): Homolog of NCBI NO: 15320412 NR Description: ERD7 protein [Arabidopsis thaliana]
  misc_feature (19)..(469): Homolog of NCBI NO: 18419759 NR Description: hypothetical protein [Arabidopsis thaliana]
  misc_feature (19)..(463): Homolog of NCBI NO: 7486396 NR Description: hypothetical protein F4B14.250 - Arabidopsis >gi|3036802|emb|CAA18492.1| putative protein [Arabidopsis >gi|3805864|emb|CAA21484.1| putative protein [Arabidopsis
  misc_feature (231)..(464): Homolog of NCBI NO: 18855022 NR Description: putative senescence-associated protein [Oryza
  misc_feature (32)..(163): Homolog of NCBI NO: 18855022 NR Description: putative senescence-associated protein [Oryza
  misc_feature (254)..(458): Homolog of NCBI NO: 3551958 NR Description: senescence-associated protein 12 [Hemerocallis
  misc_feature (179)..(460): Homolog of NCBI NO: 26450712 NR Description: unknown protein [Arabidopsis thaliana]

SEQ ID NO: 103165 - protein, 463 aa, Arabidopsis thaliana; identical to SEQ ID NO: 39628
  peptide (1)..(463): Ceres Seq. ID no. 13612127
  misc_feature (1)..(463): Homolog of NCBI NO: 15230434 NR Description: expressed protein [Arabidopsis thaliana]
  misc_feature (9)..(452): Homolog of NCBI NO: 15227905 NR Description: senescence-associated protein 12 -related
  misc_feature (9)..(452): Homolog of NCBI NO: 21593641 NR Description: putative senescence-associated protein 12
  misc_feature (26)..(463): Homolog of NCBI NO: 15320412 NR Description: ERD7 protein [Arabidopsis thaliana]
  misc_feature (13)..(463): Homolog of NCBI NO: 18419759 NR Description: hypothetical protein [Arabidopsis thaliana]
  misc_feature (13)..(457): Homolog of NCBI NO: 7486396 NR Description: hypothetical protein F4B14.250 - Arabidopsis >gi|3036802|emb|CAA18492.1| putative protein [Arabidopsis >gi|3805864|emb|CAA21484.1| putative protein [Arabidopsis
  misc_feature (225)..(458): Homolog of NCBI NO: 18855022 NR Description: putative senescence-associated protein [Oryza
  misc_feature (26)..(157): Homolog of NCBI NO: 18855022 NR Description: putative senescence-associated protein [Oryza
  misc_feature (248)..(452): Homolog of NCBI NO: 3551958 NR Description: senescence-associated protein 12 [Hemerocallis
  misc_feature (173)..(454): Homolog of NCBI NO: 26450712 NR Description: unknown protein [Arabidopsis thaliana]

SEQ ID NO: 103166 - protein, 449 aa, Arabidopsis thaliana; identical to SEQ ID NO: 39629
  peptide (1)..(449): Ceres Seq. ID no. 13612128
  misc_feature (1)..(449): Homolog of NCBI NO: 15230434 NR Description: expressed protein [Arabidopsis thaliana]
  misc_feature (1)..(438): Homolog of NCBI NO: 15227905 NR Description: senescence-associated protein 12 -related
  misc_feature (1)..(438): Homolog of NCBI NO: 21593641 NR Description: putative senescence-associated protein 12
  misc_feature (12)..(449): Homolog of NCBI NO: 15320412 NR Description: ERD7 protein [Arabidopsis thaliana]
  misc_feature (1)..(449): Homolog of NCBI NO: 18419759 NR Description: hypothetical protein [Arabidopsis thaliana]
  misc_feature (1)..(443): Homolog of NCBI NO: 7486396 NR Description: hypothetical protein F4B14.250 - Arabidopsis >gi|3036802|emb|CAA18492.1| putative protein [Arabidopsis >gi|3805864|emb|CAA21484.1| putative protein [Arabidopsis
  misc_feature (211)..(444): Homolog of NCBI NO: 18855022 NR Description: putative senescence-associated protein [Oryza
  misc_feature (12)..(143): Homolog of NCBI NO: 18855022 NR Description: putative senescence-associated protein [Oryza
  misc_feature (234)..(438): Homolog of NCBI NO: 3551958 NR Description: senescence-associated protein 12 [Hemerocallis
  misc_feature (159)..(440): Homolog of NCBI NO: 26450712 NR Description: unknown protein [Arabidopsis thaliana]

SEQ ID NO: 103167 - DNA, 1162 bp, Arabidopsis thaliana
  misc_feature (1)..(1162): Ceres Seq. ID no. 13612129
  misc_feature: MA Experiment ID: 108434 Result: Up-regulated in Transcription
  misc_feature: MA Experiment 108434 PARAMETER Experiment Name: At_Root_Tips_cDNA_P Parameter: Tissue Value: Root Tips
  misc_feature: MA Experiment ID: 108461 Result: Down-regulated in Transcription
  misc_feature: MA Experiment 108461 PARAMETER Experiment Name: At_Germinating_Seeds_cDNA_P Parameter: Age (day) Value: 1 vs. 0
  misc_feature: MA Experiment 108461 PARAMETER Experiment Name: At_Germinating_Seeds_cDNA_P Parameter: Tissue Value: Germinating Seeds
  misc_feature: MA Experiment ID: 108462 Result: Down-regulated in Transcription
  misc_feature: MA Experiment 108462 PARAMETER Experiment Name: At_Germinating_Seeds_cDNA_P Parameter: Age (day) Value: 2 vs. 0
  misc_feature: MA Experiment 108462 PARAMETER Experiment Name: At_Germinating_Seeds_cDNA_P Parameter: Tissue Value: Germinating Seeds
  misc_feature: MA Experiment ID: 108463 Result: Down-regulated in Transcription
  misc_feature: MA Experiment 108463 PARAMETER Experiment Name: At_Germinating_Seeds_cDNA_P Parameter: Age (day) Value: 3 vs. 0
  misc_feature: MA Experiment 108463 PARAMETER Experiment Name: At_Germinating_Seeds_cDNA_P Parameter: Tissue Value: Germinating Seeds
  misc_feature: MA Experiment ID: 108464 Result: Down-regulated in Transcription
  misc_feature: MA Experiment 108464 PARAMETER Experiment Name: At_Germinating_Seeds_cDNA_P Parameter: Age (day) Value: 4 vs. 0
  misc_feature: MA Experiment 108464 PARAMETER Experiment Name: At_Germinating_Seeds_cDNA_P Parameter: Tissue Value: Germinating Seeds
  misc_feature: MA Experiment ID: 20001451 Result: Down-regulated in Transcription
  misc_feature: MA Experiment 20001451 PARAMETER Experiment Name: At_Far-red-induction_P Parameter: Age (day) Value: 7
  misc_feature: MA Experiment 20001451 PARAMETER Experiment Name: At_Far-red-induction_P Parameter: Light Value: Far-red vs. White
  misc_feature: MA Experiment 20001451 PARAMETER Experiment Name: At_Far-red-induction_P Parameter: Organism Value: A. thaliana
  misc_feature: MA Experiment 20001451 PARAMETER Experiment Name: At_Far-red-induction_P Parameter: Plant Line Value: Columbia
  misc_feature: MA Experiment 20001451 PARAMETER Experiment Name: At_Far-red-induction_P Parameter: Timepoint (hr) Value: 24
  misc_feature: MA Experiment 20001451 PARAMETER Experiment Name: At_Far-red-induction_P Parameter: Tissue Value: Whole Plant
aagtcgggaatcgtttactgtgaaataaaaacgagagagagtttttgaagaagaagaaagaacactcacaagatccagaaaaaggtaaaagatggcgagatacgatcgagcaatcactgtattctcccccgatggtcacctcttccaagtagagtatgccctagaagccgtccgaaagggtaacgccgccgtcggagtccgcggcacagatactgtcgtcctcgccgtcgaaaagaaatccacccctaagctccaggattccagatcagcaaggaagatagtgagccttgataatcacattgcattggcctgtgctggactgaaagcagatgctcgtgtcttgataaacaaggcgaggatagagtgtcaaagccacaggcttacgttggaggacccagttactgttgagtacattactcggtacatagcagggcttcaacagaagtatactcaaagtggtggtgtgaggccttttggtctttccactcttattgttgggtttgatccctacactcgtatacccgcgctttatcagaccgatccatctggtacattctctgcttggaaagctaatgcaactgggagaaactctaactcaattagggagtttctggagaaaaactacaaagaaagcgctggccaagaaactgttaagcttgctatccgtgctctgcttgaggttgttgagagtgggggaaagaacattgaggttgctgtaatgacacgagaggaaggtgttctgaagcaactagaagaagaagaaattgatatcattgtggctgagatcgaagcagagaaggctgcagctgaagcagccaagaaaggccctgcgaaggaaacatgaaccagatcttaaagtagcggtctcagattatgagttgtaatgctggttcaaagtcagggatattcaagggttgaatagaaaatctagaccgcatgaaatggtttgttggattactagcctatttgacactgttgctttaaatcttaaatgacattttagcggagtttcgatacttgtcagttggaactatggcatgttcagtattctagatgactttgcatttgcgctcaagagttgtagattttgattttggaaacgttgtttcttactaaacatgtctctcttcttattatctccattgtgtaacttaccgttttt

SEQ ID NO: 103168 - protein, 250 aa, Arabidopsis thaliana; identical to SEQ ID NO: 23104
  peptide (1)..(250): Ceres Seq. ID no. 13612130
  misc_feature (27)..(210): Pfam Name: Proteasome A-type and B-type Pfam Description: Proteasome A-type and B-type
  misc_feature (1)..(250): Homolog of NCBI NO: 15230435 NR Description: 20S proteasome alpha subunit D (PAD1)
  misc_feature (1)..(250): Homolog of NCBI NO: 21593040 NR Description: multicatalytic endopeptidase complex alpha chain
  misc_feature (1)..(250): Homolog of NCBI NO: 15239271 NR Description: 20S proteasome alpha subunit D2 (PAD2)
  misc_feature (1)..(250): Homolog of NCBI NO: 12229936 NR Description: Proteasome subunit alpha type 7 (20S proteasome
  misc_feature (1)..(244): Homolog of NCBI NO: 3334299 NR Description: Proteasome subunit alpha type 7 (20S proteasome
  misc_feature (1)..(250): Homolog of NCBI NO: 7435885 NR Description: probable C 3.4.25.1 proteasome endopeptidase
  misc_feature (1)..(235): Homolog of NCBI NO: 2511580 NR Description: multicatalytic endopeptidase [Arabidopsis >gi|2511582|emb|CAA73623.1| multicatalytic endopeptidase
  misc_feature (1)..(250): Homolog of NCBI NO: 12644044 NR Description: Proteasome subunit alpha type 7 (20S proteasome
  misc_feature (35)..(250): Homolog of NCBI NO: 14594917 NR Description: putative alpha4 proteasome subunit [Nicotiana
  misc_feature (2)..(250): Homolog of NCBI NO: 12229928 NR Description: Proteasome subunit alpha type 7 (Proteasome alpha 4) >gi|6683668|dbj|BAA89276.1| alpha 4 subunit of 20S

SEQ ID NO: 103169 - DNA, 926 bp, Arabidopsis thaliana
  misc_feature (1)..(926): Ceres Seq. ID no. 13612152
  misc_feature: MA Experiment ID: 108461 Result: Down-regulated in Transcription
  misc_feature: MA Experiment 108461 PARAMETER Experiment Name: At_Germinating_Seeds_cDNA_P Parameter: Age (day) Value: 1 vs. 0
  misc_feature: MA Experiment 108461 PARAMETER Experiment Name: At_Germinating_Seeds_cDNA_P Parameter: Tissue Value: Germinating Seeds
  misc_feature: MA Experiment ID: 20000179 Result: Down-regulated in Transcription
  misc_feature: MA Experiment 20000179 PARAMETER Experiment Name: At_Germinating_Seeds_P Parameter: Age (hr) Value: 6 vs. 0
  misc_feature: MA Experiment 20000179 PARAMETER Experiment Name: At_Germinating_Seeds_P Parameter: Tissue Value: Germinating Seeds
  misc_feature: MA Experiment ID: 20000184 Result: Down-regulated in Transcription
  misc_feature: MA Experiment 20000184 PARAMETER Experiment Name: At_Shoots__P Parameter: Age (day) Value: 7
  misc_feature: MA Experiment 20000184 PARAMETER Experiment Name: At_Shoots__P Parameter: Tissue Value: Shoots vs. Whole Plant
  misc_feature: MA Experiment ID: 20000234 Result: Down-regulated in Transcription
  misc_feature: MA Experiment 20000234 PARAMETER Experiment Name: At_Siliques_P Parameter: Age (day) Value: 21
  misc_feature: MA Experiment 20000234 PARAMETER Experiment Name: At_Siliques_P Parameter: Organism Value: A. thaliana
  misc_feature: MA Experiment 20000234 PARAMETER Experiment Name: At_Siliques_P Parameter: Plant Line Value: WS
  misc_feature: MA Experiment 20000234 PARAMETER Experiment Name: At_Siliques_P Parameter: Tissue Value: Less Than 5mm Siliques vs. Whole Plant
  misc_feature: MA Experiment ID: 20000235 Result: Down-regulated in Transcription
  misc_feature: MA Experiment 20000235 PARAMETER Experiment Name: At_Siliques_P Parameter: Age (day) Value: 21
  misc_feature: MA Experiment 20000235 PARAMETER Experiment Name: At_Siliques_P Parameter: Organism Value: A. thaliana
  misc_feature: MA Experiment 20000235 PARAMETER Experiment Name: At_Siliques_P Parameter: Plant Line Value: WS
  misc_feature: MA Experiment 20000235 PARAMETER Experiment Name: At_Siliques_P Parameter: Tissue Value: 5-10mm Siliques vs. Whole Plant
  misc_feature: MA Experiment ID: 20000438 Result: Down-regulated in Transcription
  misc_feature: MA Experiment 20000438 PARAMETER Experiment Name: At_Shoots__P Parameter: Age (day) Value: 14
  misc_feature: MA Experiment 20000438 PARAMETER Experiment Name: At_Shoots__P Parameter: Tissue Value: Shoots vs. Whole Plant
  misc_feature: MA Experiment ID: 20001451 Result: Up-regulated in Transcription
  misc_feature: MA Experiment 20001451 PARAMETER Experiment Name: At_Far-red-induction_P Parameter: Age (day) Value: 7
  misc_feature: MA Experiment 20001451 PARAMETER Experiment Name: At_Far-red-induction_P Parameter: Light Value: Far-red vs. White
  misc_feature: MA Experiment 20001451 PARAMETER Experiment Name: At_Far-red-induction_P Parameter: Organism Value: A. thaliana
  misc_feature: MA Experiment 20001451 PARAMETER Experiment Name: At_Far-red-induction_P Parameter: Plant Line Value: Columbia
  misc_feature: MA Experiment 20001451 PARAMETER Experiment Name: At_Far-red-induction_P Parameter: Timepoint (hr) Value: 24
  misc_feature: MA Experiment 20001451 PARAMETER Experiment Name: At_Far-red-induction_P Parameter: Tissue Value: Whole Plant
aggtaaccggtaataagcatctctttctcttttcctcctccttcaggcctcatctcttactctctctctgatcgtcgtctttttcttttgattctgcttttttccgctaggtttctgagatcttccattcgtctcgaattaagttgctacgatgaaaacagcaaaggggaaagataaagttaagaccacaaaggaagccttgaagccagttgatgacagaaaggtgggaaagaggaaggcaccggctgagaagcctactaaacgagagactcgtaaagagaagaaggctaaaaaggacccaaacaaaccaaaaagagctcctagtgccttctttgtctttctagaagattttagggtcacgttcaagaaagaaaatccaaatgtgaaggccgtctctgctgttgggaaagctggagggcagaaatggaagtcaatgtctcaagctgaaaaagctccatatgaagagaaagctgcaaaaaggaaagctgaatatgagaagcaaatggatgcatacaacaaaaacttggaggaagggagtgatgaatctgaaaagtctagatctgagataaatgatgaagatgaagccagtggggaggaagaactattagagaaggaagcggcaggtgatgatgaagaagaagaagaggaagaagatgacgatgatgatgacgacgaggaagaagactaaatcagggatagaaatcagattttgtatctcaagcttaactgcagatccttaagcagaagtaagtattttgtaatttgtgtgtggacgagaactatagatctaaaatcgtgtgtttttttgtttttcttttcctaagaaagcgaaacagttgttagcatctctcaggatgtctgtttcagctttttgccacaacaaacaatgtaccaatgtctgcgttagtgatcatccaaaccaaaac

SEQ ID NO: 103170 - protein, 178 aa, Arabidopsis thaliana; identical to SEQ ID NO: 39493
  peptide (1)..(178): Ceres Seq. ID no. 13612153
  misc_feature (53)..(122): Pfam Name: HMG (high mobility group) box Pfam Description: HMG (high mobility group) box
  misc_feature (1)..(178): Homolog of NCBI NO: 15231065 NR Description: high mobility group protein 2-related
  misc_feature (24)..(175): Homolog of NCBI NO: 1052956 NR Description: high mobility group protein 2 HMG2 [Ipomoea nil]
  misc_feature (22)..(170): Homolog of NCBI NO: 7446213 NR Description: high mobility group protein HMG-1 - common tobacco
  misc_feature (36)..(150): Homolog of NCBI NO: 18394900 NR Description: expressed protein [Arabidopsis thaliana]
  misc_feature (11)..(171): Homolog of NCBI NO: 541968 NR Description: high mobility group protein HMG-1 - garden pea
  misc_feature (36)..(150): Homolog of NCBI NO: 25402921 NR Description: protein F2D10.18 [imported] - Arabidopsis >gi|8886929|gb|AAF80615.1|AC069251_8 F2D10.18 [Arabidopsis
  misc_feature (24)..(166): Homolog of NCBI NO: 729736 NR Description: HMG1/2-LIKE PROTEIN >gi|1085860|pir||S40302 high
  misc_feature (22)..(169): Homolog of NCBI NO: 7446212 NR Description: high mobility group protein - potato
  misc_feature (33)..(164): Homolog of NCBI NO: 25402921 NR Description: protein F2D10.18 [imported] - Arabidopsis >gi|8886929|gb|AAF80615.1|AC069251_8 F2D10.18 [Arabidopsis
  misc_feature (33)..(150): Homolog of NCBI NO: 18394898 NR Description: expressed protein [Arabidopsis thaliana]

SEQ ID NO: 103171 - DNA, 2421 bp, Arabidopsis thaliana
  misc_feature (1)..(2421): Ceres Seq. ID no. 13612154
  misc_feature: MA Experiment ID: 108474 Result: Up-regulated in Transcription
  misc_feature: MA Experiment 108474 PARAMETER Experiment Name: At_Drought_Flowers_cDNA_P Parameter: Timepoint (hr) Value: null
  misc_feature: MA Experiment 108474 PARAMETER Experiment Name: At_Drought_Flowers_cDNA_P Parameter: Treatment Value: Drought vs. No Drought
  misc_feature: MA Experiment ID: 108488 Result: Up-regulated in Transcription
  misc_feature: MA Experiment ID: 108576 Result: Down-regulated in Transcription
  misc_feature: MA Experiment 108576 PARAMETER Experiment Name: At_42deg_Heat_cDNA_P Parameter: Temperature (deg C) Value: 42 vs. 22
  misc_feature: MA Experiment 108576 PARAMETER Experiment Name: At_42deg_Heat_cDNA_P Parameter: Timepoint (hr) Value: 1
  misc_feature: MA Experiment 108576 PARAMETER Experiment Name: At_42deg_Heat_cDNA_P Parameter: Tissue Value: Aerial
  misc_feature: MA Experiment ID: 108577 Result: Down-regulated in Transcription
  misc_feature: MA Experiment 108577 PARAMETER Experiment Name: At_42deg_Heat_cDNA_P Parameter: Temperature (deg C) Value: 42 vs. 22
  misc_feature: MA Experiment 108577 PARAMETER Experiment Name: At_42deg_Heat_cDNA_P Parameter: Timepoint (hr) Value: 6
  misc_feature: MA Experiment 108577 PARAMETER Experiment Name: At_42deg_Heat_cDNA_P Parameter: Tissue Value: Aerial
  misc_feature: MA Experiment ID: 108668 Result: Down-regulated in Transcription
  misc_feature: MA Experiment 108668 PARAMETER Experiment Name: At_2mM_SA_cDNA_P Parameter: Plant Line Value: WS
  misc_feature: MA Experiment 108668 PARAMETER Experiment Name: At_2mM_SA_cDNA_P Parameter: Timepoint (hr) Value: 6
  misc_feature: MA Experiment 108668 PARAMETER Experiment Name: At_2mM_SA_cDNA_P Parameter: Treatment Value: 2mM SA vs. No Treatment
  misc_feature: MA Experiment ID: 20000072 Result: Down-regulated in Transcription
  misc_feature: MA Experiment 20000072 PARAMETER Experiment Name: At_100uM_ABA_Mutants_cDNA_P Parameter: Plant Line Value: CS8105
  misc_feature: MA Experiment 20000072 PARAMETER Experiment Name: At_100uM_ABA_Mutants_cDNA_P Parameter: Timepoint (hr) Value: 6
  misc_feature: MA Experiment 20000072 PARAMETER Experiment Name: At_100uM_ABA_Mutants_cDNA_P Parameter: Tissue Value: Aerial
  misc_feature: MA Experiment 20000072 PARAMETER Experiment Name: At_100uM_ABA_Mutants_cDNA_P Parameter: Treatment Value: 100uM ABA vs. No Treatment
  misc_feature: MA Experiment ID: 20000087 Result: Down-regulated in Transcription
  misc_feature: MA Experiment 20000087 PARAMETER Experiment Name: At_100uM_ABA_Mutants_cDNA_P Parameter: Plant Line Value: WS
  misc_feature: MA Experiment 20000087 PARAMETER Experiment Name: At_100uM_ABA_Mutants_cDNA_P Parameter: Timepoint (hr) Value: 6
  misc_feature: MA Experiment 20000087 PARAMETER Experiment Name: At_100uM_ABA_Mutants_cDNA_P Parameter: Tissue Value: Aerial
  misc_feature: MA Experiment 20000087 PARAMETER Experiment Name: At_100uM_ABA_Mutants_cDNA_P Parameter: Treatment Value: 100uM ABA vs. No Treatment
  misc_feature: MA Experiment ID: 20000113 Result: Down-regulated in Transcription
  misc_feature: MA Experiment 20000113 PARAMETER Experiment Name: At_42deg_Heat_cDNA_P Parameter: Temperature (deg C) Value: 42 vs. 22
  misc_feature: MA Experiment 20000113 PARAMETER Experiment Name: At_42deg_Heat_cDNA_P Parameter: Timepoint (hr) Value: 8
  misc_feature: MA Experiment 20000113 PARAMETER Experiment Name: At_42deg_Heat_cDNA_P Parameter: Tissue Value: Aerial
  misc_feature: MA Experiment ID: 20000173 Result: Down-regulated in Transcription
  misc_feature: MA Experiment 20000173 PARAMETER Experiment Name: At_42deg_Heat_P Parameter: Age (day) Value: 14
  misc_feature: MA Experiment 20000173 PARAMETER Experiment Name: At_42deg_Heat_P Parameter: Organism Value: A. thaliana
  misc_feature: MA Experiment 20000173 PARAMETER Experiment Name: At_42deg_Heat_P Parameter: Plant Line Value: WS
  misc_feature: MA Experiment 20000173 PARAMETER Experiment Name: At_42deg_Heat_P Parameter: Temperature (deg C) Value: 42 vs. 22
  misc_feature: MA Experiment 20000173 PARAMETER Experiment Name: At_42deg_Heat_P Parameter: Timepoint (hr) Value: 6
  misc_feature: MA Experiment 20000173 PARAMETER Experiment Name: At_42deg_Heat_P Parameter: Tissue Value: Aerial
  misc_feature: MA Experiment ID: 20000224 Result: Up-regulated in Transcription
  misc_feature: MA Experiment ID: 20000496 Result: Up-regulated in Transcription
  misc_feature: MA Experiment 20000496 PARAMETER Experiment Name: At_Guard_Cells_P Parameter: Harvest Date Value: 7/19/2002
  misc_feature: MA Experiment 20000496 PARAMETER Experiment Name: At_Guard_Cells_P Parameter: Organism Value: Canola
  misc_feature: MA Experiment 20000496 PARAMETER Experiment Name: At_Guard_Cells_P Parameter: Tissue Value: Guard Cells vs. Leaves
  misc_feature: MA Experiment ID: 20000573 Result: Down-regulated in Transcription
  misc_feature: MA Experiment 20000573 PARAMETER Experiment Name: At_100uM_ABA_Mutants__P Parameter: Organism Value: A. thaliana
  misc_feature: MA Experiment 20000573 PARAMETER Experiment Name: At_100uM_ABA_Mutants__P Parameter: Plant Line Value: CS22 vs. Ler wt
  misc_feature: MA Experiment 20000573 PARAMETER Experiment Name: At_100uM_ABA_Mutants__P Parameter: Timepoint (hr) Value: N/A
  misc_feature: MA Experiment 20000573 PARAMETER Experiment Name: At_100uM_ABA_Mutants__P Parameter: Tissue Value: Whole Plant
  misc_feature: MA Experiment 20000573 PARAMETER Experiment Name: At_100uM_ABA_Mutants__P Parameter: Treatment Value: None
  misc_feature: MA Experiment ID: 20001248 Result: Down-regulated in Transcription
  misc_feature: MA Experiment 20001248 PARAMETER Experiment Name: At_Far-red-induction_P Parameter: Age (day) Value: 7
  misc_feature: MA Experiment 20001248 PARAMETER Experiment Name: At_Far-red-induction_P Parameter: Light Value: Far-red vs. White
  misc_feature: MA Experiment 20001248 PARAMETER Experiment Name: At_Far-red-induction_P Parameter: Organism Value: A. thaliana
  misc_feature: MA Experiment 20001248 PARAMETER Experiment Name: At_Far-red-induction_P Parameter: Plant Line Value: Columbia
  misc_feature: MA Experiment 20001248 PARAMETER Experiment Name: At_Far-red-induction_P Parameter: Timepoint (hr) Value: 4
  misc_feature: MA Experiment 20001248 PARAMETER Experiment Name: At_Far-red-induction_P Parameter: Tissue Value: Whole Plant
  misc_feature: MA Experiment ID: 20001905 Result: Down-regulated in Transcription
  misc_feature: MA Experiment 20001905 PARAMETER Experiment Name: At_Drought_Reproduction_P Parameter: Age (day) Value: 40
  misc_feature: MA Experiment 20001905 PARAMETER Experiment Name: At_Drought_Reproduction_P Parameter: Organism Value: A. thaliana
  misc_feature: MA Experiment 20001905 PARAMETER Experiment Name: At_Drought_Reproduction_P Parameter: Plant Line Value: WS
  misc_feature: MA Experiment 20001905 PARAMETER Experiment Name: At_Drought_Reproduction_P Parameter: Timepoint (day) Value: 10
  misc_feature: MA Experiment 20001905 PARAMETER Experiment Name: At_Drought_Reproduction_P Parameter: Tissue Value: Rosettes
  misc_feature: MA Experiment 20001905 PARAMETER Experiment Name: At_Drought_Reproduction_P Parameter: Treatment Value: Drought vs. No Drought
atctctctctttcttcttccactcgtgaaagaaagaccagagagttttctcctgatccacacaacaacaacaacacagagatcccaaatccggaagatatcttcttctctcataactcagtttactcagattcactgaaacatacaattaagttaaccgtcagtctctcacctgcagcaaaattcactcttctgctaataatgttctccacagagattcatctattgatcattttgactttttcaggaaccagagatgaaaaattatagttaaggttagtagtagtagataggtttaataaatttgtagttaagtaacccaaaaaaataacattaaactaaaatccaacactagaaaccagagagaccctcttaacgacaacaacctctctgtacacaagacaacaaacactctctacaaaaacactactctttccttcttcttctctctactctattctaattctaaagagagagagaaaagctatggatggatatgaagctactaggattgtgctctctagaatccaaagcttagaccctgaaaacgcatcaaagatcatgggtcttctccttcttcaagatcacggtgaaaaagagatgataaggctagcttttggtccagagactcttgttcactctgttatagtgaaagccaagaaagagttaggtctcatgaactgttcaaggtctccgtggagtcatcaagatgagttgattagccctaagaacaaccgtggctcttcactcaatccagcttctttgcccttttacgctaatggaggaagatcttctagggatttaaccaacgatttcgagctcatggatgatatgaactccagaagtactgattttttgggctctgtgcatgcgagaagcggtagctgcgttttggacggtttagggtatggtggtgattctgatttagggtttggaggtgtgccctgttcttacttcgctagaggcttctgcaaaaacggagctagctgcagattcgtccacagtgatggaggagctgatttggttggctccccaagcagaatcgagcttcttaggtctaactcggtacccccaagacttgctcaccacttcatgactcgctcttctctcccttctttttcaactaaaggtgttaacttgcagcaaaacgatgttcaaagagctgctgctgctttgatgataggagatgaattgcagaagcttggaagatggagacctgaaaggattgatctttctgctatggcttgtccagcttcaagacagatctatctgacattccctgccgacagtaggttcagggaggaagatgtgtccaattacttcagtacttttggaccagttcaagatgtgaggataccatatcagcaaaagagaatgtttggttttgtgacatttgtgtaccctgagactgttaagagcattctcgccaaagggaatcctcactttgtgtgtgattccagagttcttgtcaagccttacaaggagaaaggcaaagtccctgacaaatacagaactaaccaaacaacagagcgagaactgtccccaacaggccttgattctagccctagggacgttctaggagggagagggttttataacaacactcaagatgtgttgtggaggagtaagtttgaagaagagattcttgaacttcagagcagaaggctgatgaatctgcagcttcttgacgtcaagaagcatttccaactcaattcccctaccaacattcactctccgaatcctttcagccaatcacttatatctccacgcccattgtccgtgatcaagagagagtatgatggaggagagaaagggaaaggaagttctaaagaaggatctgatgatgatacaatgaatctaccagagaggttggaggatagcttgccagatagtccgtttgcatcgcccgctcatcatttgcttctgtttgctgattctgctgacaataacggatcggatctgtggtcgccttcttctgataatgatgataattctactccttctacactctccgactccttcaactctttcaactaccaaatgccaaggttaccggcgattggaatgttacccggtaggggtggaccaacctgtcgtgttgggatataaacaggaagtgaagtaagaaaagaaaaaaactgataaaatagagagacccttaataaccaaaaagatgcagaggtgtaaaaaataaaaagcaggaaatttgatgtaagagataggagaagagaaagaaggaagattgttgtaccatttctctagttttaatgtgttatgtgatgatggaccacacaagatgatgtaatatgatatgatatgatatatataatataggacaagaagtgtaatctctctaaagatatacaaaagaaaagagagattatcatttgagtttgaaaagtcaatatgttcttgtccgtgc

SEQ ID NO: 103172 - protein, 540 aa, Arabidopsis thaliana; identical to SEQ ID NO: 37383
  peptide (1)..(540): Ceres Seq. ID no. 13612155
  misc_feature (272)..(328): Pfam Name: RNA recognition motif. (a.k.a. RRM, RBD, or RNP domain) Pfam Description: RNA recognition motif. (a.k.a. RRM, RBD, or RNP
  misc_feature (1)..(540): Homolog of NCBI NO: 15231090 NR Description: RNA recognition motif (RRM)-containing protein
  misc_feature (1)..(540): Homolog of NCBI NO: 19423979 NR Description: unknown protein [Arabidopsis thaliana]
  misc_feature (1)..(540): Homolog of NCBI NO: 21594547 NR Description: unknown [Arabidopsis thaliana]
  misc_feature (174)..(357): Homolog of NCBI NO: 15229435 NR Description: RNA recognition motif (RRM)-containing protein
  misc_feature (447)..(540): Homolog of NCBI NO: 15229435 NR Description: RNA recognition motif (RRM)-containing protein
  misc_feature (1)..(61): Homolog of NCBI NO: 15229435 NR Description: RNA recognition motif (RRM)-containing protein
  misc_feature (375)..(423): Homolog of NCBI NO: 15229435 NR Description: RNA recognition motif (RRM)-containing protein
  misc_feature (176)..(424): Homolog of NCBI NO: 38230504 NR Description: predicted protein [Populus alba x Populus tremula]
  misc_feature (1)..(147): Homolog of NCBI NO: 38230504 NR Description: predicted protein [Populus alba x Populus tremula]
  misc_feature (435)..(521): Homolog of NCBI NO: 38230504 NR Description: predicted protein [Populus alba x Populus tremula]

SEQ ID NO: 103173 - protein, 515 aa, Arabidopsis thaliana; identical to SEQ ID NO: 37384
  peptide (1)..(515): Ceres Seq. ID no. 13612156
  misc_feature (247)..(303): Pfam Name: RNA recognition motif. (a.k.a. RRM, RBD, or RNP domain) Pfam Description: RNA recognition motif. (a.k.a. RRM, RBD, or RNP
  misc_feature (1)..(515): Homolog of NCBI NO: 15231090 NR Description: RNA recognition motif (RRM)-containing protein
  misc_feature (1)..(515): Homolog of NCBI NO: 19423979 NR Description: unknown protein [Arabidopsis thaliana]
  misc_feature (1)..(515): Homolog of NCBI NO: 21594547 NR Description: unknown [Arabidopsis thaliana]
  misc_feature (149)..(332): Homolog of NCBI NO: 15229435 NR Description: RNA recognition motif (RRM)-containing protein
  misc_feature (422)..(515): Homolog of NCBI NO: 15229435 NR Description: RNA recognition motif (RRM)-containing protein
  misc_feature (1)..(36): Homolog of NCBI NO: 15229435 NR Description: RNA recognition motif (RRM)-containing protein
  misc_feature (350)..(398): Homolog of NCBI NO: 15229435 NR Description: RNA recognition motif (RRM)-containing protein
  misc_feature (151)..(399): Homolog of NCBI NO: 38230504 NR Description: predicted protein [Populus alba x Populus tremula]
  misc_feature (1)..(122): Homolog of NCBI NO: 38230504 NR Description: predicted protein [Populus alba x Populus tremula]
  misc_feature (410)..(496): Homolog of NCBI NO: 38230504 NR Description: predicted protein [Populus alba x Populus tremula]

SEQ ID NO: 103174 - protein, 502 aa, Arabidopsis thaliana; identical to SEQ ID NO: 37385
  peptide (1)..(502): Ceres Seq. ID no. 13612157
  misc_feature (234)..(290): Pfam Name: RNA recognition motif. (a.k.a. RRM, RBD, or RNP domain) Pfam Description: RNA recognition motif. (a.k.a. RRM, RBD, or RNP
  misc_feature (1)..(502): Homolog of NCBI NO: 15231090 NR Description: RNA recognition motif (RRM)-containing protein
  misc_feature (1)..(502): Homolog of NCBI NO: 19423979 NR Description: unknown protein [Arabidopsis thaliana]
  misc_feature (1)..(502): Homolog of NCBI NO: 21594547 NR Description: unknown [Arabidopsis thaliana]
  misc_feature (136)..(319): Homolog of NCBI NO: 15229435 NR Description: RNA recognition motif (RRM)-containing protein
  misc_feature (409)..(502): Homolog of NCBI NO: 15229435 NR Description: RNA recognition motif (RRM)-containing protein
  misc_feature (1)..(23): Homolog of NCBI NO: 15229435 NR Description: RNA recognition motif (RRM)-containing protein
  misc_feature (337)..(385): Homolog of NCBI NO: 15229435 NR Description: RNA recognition motif (RRM)-containing protein
  misc_feature (138)..(386): Homolog of NCBI NO: 38230504 NR Description: predicted protein [Populus alba x Populus tremula]
  misc_feature (1)..(109): Homolog of NCBI NO: 38230504 NR Description: predicted protein [Populus alba x Populus tremula]
  misc_feature (397)..(483): Homolog of NCBI NO: 38230504 NR Description: predicted protein [Populus alba x Populus tremula]

SEQ ID NO: 103175 - DNA, 1451 bp, Arabidopsis thaliana
  misc_feature (1)..(1451): Ceres Seq. ID no. 13612158
  misc_feature: MA Experiment ID: 20000180 Result: Up-regulated in Transcription
  misc_feature: MA Experiment 20000180 PARAMETER Experiment Name: At_Germinating_Seeds_P Parameter: Age (hr) Value: 24 vs. 0
  misc_feature: MA Experiment 20000180 PARAMETER Experiment Name: At_Germinating_Seeds_P Parameter: Tissue Value: Germinating Seeds
  misc_feature: MA Experiment ID: 20000794 Result: Up-regulated in Transcription
  misc_feature: MA Experiment 20000794 PARAMETER Experiment Name: At_Petals_P Parameter: Age (day) Value: 23-25 days
  misc_feature: MA Experiment 20000794 PARAMETER Experiment Name: At_Petals_P Parameter: Plant Line Value: WS
  misc_feature: MA Experiment 20000794 PARAMETER Experiment Name: At_Petals_P Parameter: Tissue Value: Petals vs. Whole plant
  misc_feature: MA Experiment ID: 20001904 Result: Up-regulated in Transcription
  misc_feature: MA Experiment 20001904 PARAMETER Experiment Name: At_Drought_Reproduction_P Parameter: Age (day) Value: 37
  misc_feature: MA Experiment 20001904 PARAMETER Experiment Name: At_Drought_Reproduction_P Parameter: Organism Value: A. thaliana
  misc_feature: MA Experiment 20001904 PARAMETER Experiment Name: At_Drought_Reproduction_P Parameter: Plant Line Value: WS
  misc_feature: MA Experiment 20001904 PARAMETER Experiment Name: At_Drought_Reproduction_P Parameter: Timepoint (day) Value: 7
  misc_feature: MA Experiment 20001904 PARAMETER Experiment Name: At_Drought_Reproduction_P Parameter: Tissue Value: Rosettes
  misc_feature: MA Experiment 20001904 PARAMETER Experiment Name: At_Drought_Reproduction_P Parameter: Treatment Value: Drought vs. No Drought
  misc_feature: MA Experiment ID: 20001905 Result: Up-regulated in Transcription
  misc_feature: MA Experiment 20001905 PARAMETER Experiment Name: At_Drought_Reproduction_P Parameter: Age (day) Value: 40
  misc_feature: MA Experiment 20001905 PARAMETER Experiment Name: At_Drought_Reproduction_P Parameter: Organism Value: A. thaliana
  misc_feature: MA Experiment 20001905 PARAMETER Experiment Name: At_Drought_Reproduction_P Parameter: Plant Line Value: WS
  misc_feature: MA Experiment 20001905 PARAMETER Experiment Name: At_Drought_Reproduction_P Parameter: Timepoint (day) Value: 10
  misc_feature: MA Experiment 20001905 PARAMETER Experiment Name: At_Drought_Reproduction_P Parameter: Tissue Value: Rosettes
  misc_feature: MA Experiment 20001905 PARAMETER Experiment Name: At_Drought_Reproduction_P Parameter: Treatment Value: Drought vs. No Drought
  misc_feature: MA Experiment ID: 20001911 Result: Up-regulated in Transcription
  misc_feature: MA Experiment 20001911 PARAMETER Experiment Name: At_Drought_Reproduction_P Parameter: Age (day) Value: 40
  misc_feature: MA Experiment 20001911 PARAMETER Experiment Name: At_Drought_Reproduction_P Parameter: Organism Value: A. thaliana
  misc_feature: MA Experiment 20001911 PARAMETER Experiment Name: At_Drought_Reproduction_P Parameter: Plant Line Value: WS
  misc_feature: MA Experiment 20001911 PARAMETER Experiment Name: At_Drought_Reproduction_P Parameter: Timepoint (day) Value: 10
  misc_feature: MA Experiment 20001911 PARAMETER Experiment Name: At_Drought_Reproduction_P Parameter: Tissue Value: Flowers
  misc_feature: MA Experiment 20001911 PARAMETER Experiment Name: At_Drought_Reproduction_P Parameter: Treatment Value: Drought vs. No Drought
gagtctaatcaaatgtgccttaatttacaaaaatgacttctcacgactcacgccattaaactccacgtacacctttccctttcactttcatcttcttcttccctcgattcaatgggttatctctcctgcaaagctggatccgccgtcgcaatcgccgtttcatctgccgcatcaacctccggatccacctccagcaaagcttctgctcctcccgaatctcccattgaagaccgtcctagacttcgtcgtttcctccatcgcgatctcgaatcagccacaggaggtttcgacatcaacaatctcctcggacgtggaagccatggaagcgtttacaaagctgtcatcggttcacgtcacatcgcggtcaagagaccttcgaaatctcgagaaatcagccgtgagttccacaacgaattcgagattctctccagaatccgtagccctaggtttgtgaatctcttaggttttagcgccgataactccaaagaaccacttctcgttgttgaattcatgggaaacggaagcttatacgacgtgattcactcagataccgttttaaactccggtgcgatttcgagctggagtaagagaatcaaaatcgctcttcagattgcaaaagccgtacatcttctacattctcaagagacaccgatcatacacagagatataaaatcagcaaacgtattgatggataagaatctaaacgcgaagctaggcgatttcggattagcgatcagatgcaatgttgatgatcaaaaagtgaaatcaacaccacctgcaggaacaatgggttacttagatccagattacgtaacggctgatagattaagcacgaaaactgatgtgtttagcttcgggatcttgttgttagagataatcagcggaagaaaagcaatcgacgttagatattcgccgtcgtttatagtagattgggcgattccgatgataaaaagaggcaaaatcggtgggatttatgatccgagaatcggaccaccgattgatgtaagtgtgaggaatcatttggggttagtggcggctaagtgtgtgagaacgtgtagagagaaacggccggggatggaggaagtggttgggtggctcacggggttgactaagtcggttaggtcacgacggtgggatgagttaagcattggaaacccgtgtatgatggtcgagacggtgggtggtcgacccgtggaatgattttttatttgtttaaaatcaagtgcttcgctttgaagccattgttttttctcttatgggttggtcaatttattcatttaacataataaagcatatactgtaacatcatggttgcatatggtatttgactggatcatcatattcataactaccgcttgttctaaaaacatgccatgtaaagccttttgcactagtgcataactttctcatatcacaagttttttagcatctctttgtagagttggaacttt

SEQ ID NO: 103176 - protein, 362 aa, Arabidopsis thaliana; identical to SEQ ID NO: 43811
  peptide (1)..(362): Ceres Seq. ID no. 13612159
  misc_feature (1)..(362): Homolog of NCBI NO: 15231097 NR Description: protein kinase family [Arabidopsis thaliana]
  misc_feature (1)..(344): Homolog of NCBI NO: 15218652 NR Description: protein kinase family [Arabidopsis thaliana] F3M18.17 [Arabidopsis thaliana] >gi|19715603|gb|AAL91624.1|
  misc_feature (1)..(351): Homolog of NCBI NO: 3913366 NR Description: Putative receptor protein kinase CRINKLY4
  misc_feature (43)..(351): Homolog of NCBI NO: 15721862 NR Description: CR4 [Oryza sativa]
  misc_feature (19)..(358): Homolog of NCBI NO: 15231681 NR Description: protein kinase family [Arabidopsis thaliana]
  misc_feature (1)..(338): Homolog of NCBI NO: 11358842 NR Description: serine/threonine-specific protein kinase-like
  misc_feature (44)..(338): Homolog of NCBI NO: 15237244 NR Description: protein kinase family [Arabidopsis thaliana]
  misc_feature (1)..(341): Homolog of NCBI NO: 34902334 NR Description: Putative serine/threonine protein kinase [Oryza
  misc_feature (44)..(335): Homolog of NCBI NO: 10998537 NR Description: cytokinin-regulated kinase 1 [Nicotiana tabacum]
  misc_feature (43)..(348): Homolog of NCBI NO: 15238823 NR Description: protein kinase, putative [Arabidopsis thaliana]

SEQ ID NO: 103177 - protein, 229 aa, Arabidopsis thaliana; identical to SEQ ID NO: 43812
  peptide (1)..(229): Ceres Seq. ID no. 13612160
  misc_feature (1)..(229): Homolog of NCBI NO: 15231097 NR Description: protein kinase family [Arabidopsis thaliana]
  misc_feature (1)..(211): Homolog of NCBI NO: 15218652 NR Description: protein kinase family [Arabidopsis thaliana] F3M18.17 [Arabidopsis thaliana] >gi|19715603|gb|AAL91624.1|
  misc_feature (1)..(218): Homolog of NCBI NO: 3913366 NR Description: Putative receptor protein kinase CRINKLY4
  misc_feature (1)..(218): Homolog of NCBI NO: 15721862 NR Description: CR4 [Oryza sativa]
  misc_feature (1)..(225): Homolog of NCBI NO: 15231681 NR Description: protein kinase family [Arabidopsis thaliana]
  misc_feature (1)..(205): Homolog of NCBI NO: 11358842 NR Description: serine/threonine-specific protein kinase-like
  misc_feature (1)..(205): Homolog of NCBI NO: 15237244 NR Description: protein kinase family [Arabidopsis thaliana]
  misc_feature (1)..(208): Homolog of NCBI NO: 34902334 NR Description: Putative serine/threonine protein kinase [Oryza
  misc_feature (1)..(202): Homolog of NCBI NO: 10998537 NR Description: cytokinin-regulated kinase 1 [Nicotiana tabacum]
  misc_feature (1)..(215): Homolog of NCBI NO: 15238823 NR Description: protein kinase, putative [Arabidopsis thaliana]

SEQ ID NO: 103178 - DNA, 1557 bp, Arabidopsis thaliana
  misc_feature (1)..(1557): Ceres Seq. ID no. 13612169
  misc_feature: MA Experiment ID: 108462 Result: Down-regulated in Transcription
  misc_feature: MA Experiment 108462 PARAMETER Experiment Name: At_Germinating_Seeds_cDNA_P Parameter: Age (day) Value: 2 vs. 0
  misc_feature: MA Experiment 108462 PARAMETER Experiment Name: At_Germinating_Seeds_cDNA_P Parameter: Tissue Value: Germinating Seeds
  misc_feature: MA Experiment ID: 108463 Result: Down-regulated in Transcription
  misc_feature: MA Experiment 108463 PARAMETER Experiment Name: At_Germinating_Seeds_cDNA_P Parameter: Age (day) Value: 3 vs. 0
  misc_feature: MA Experiment 108463 PARAMETER Experiment Name: At_Germinating_Seeds_cDNA_P Parameter: Tissue Value: Germinating Seeds
  misc_feature: MA Experiment ID: 108464 Result: Down-regulated in Transcription
  misc_feature: MA Experiment 108464 PARAMETER Experiment Name: At_Germinating_Seeds_cDNA_P Parameter: Age (day) Value: 4 vs. 0
  misc_feature: MA Experiment 108464 PARAMETER Experiment Name: At_Germinating_Seeds_cDNA_P Parameter: Tissue Value: Germinating Seeds
  misc_feature: MA Experiment ID: 20000180 Result: Down-regulated in Transcription
  misc_feature: MA Experiment 20000180 PARAMETER Experiment Name: At_Germinating_Seeds_P Parameter: Age (hr) Value: 24 vs. 0
  misc_feature: MA Experiment 20000180 PARAMETER Experiment Name: At_Germinating_Seeds_P Parameter: Tissue Value: Germinating Seeds
ggggaagacaattccgagaaaatagagagtagagagatcctaaagagtcaaaagaggtcaggtgattgattaacccgttgaataatctccttctcccgttgaatcgggtcgaaatagttgaactttaagccaaaccctagcttgaggaggaagaggaatggtcggcgtgatgaacagattgaggaatctggacgcttaccctaaaatcaatgaagatttctacaggcgtactctttctggtggtgttatcaccctcgcctcttctattgtcatgctaattctcttcttctccgagcttcagctgtacattcacccggttactgagactcagcttcgtgttgatacatcaagaggagagaagctacggattaattttgatgttacattccctgcgcttcaatgttcgattattagtcttgattccatggatatcagtggggagaggcaccttgatgtgcgacatgacattattaaaaggagattagactcttctggcaatgtcatcgaggcaaaacaagacggaattggtcatactaagattgaaaaacctttacaaaaacatggtggaaggttggaacacaatgaaacatactgtggttcctgttttggagcagaagcgtcagatgatgcttgttgtaattcatgtgaggaagttcgcgaagcttaccgaaagaaaggttgggccctctcggaccctgaatcaatcgaccagtgtaaaagagaaggctttgtgcaaaaggtaaaagatgaagaaggtgaaggttgtaatgttcacggtttcttggaagttaacaaagttgctgggaactttcatttcattcctgggcaaagctttcatcaatccggttttcaatttcatgatatgttattgttccagcaaggcaactacaatattagccacaaggtcaacaggttggcctttggagactttttccccggtgtagtgaaccctcttgatggtgtgcagtggaatcaggggaaacagagtggcgtctatcaatacttcatcaaggtggtaccaagcatatacaccgatgttcaccagaatacaatacagtcaaaccagttctctgtgacagaacatttccagaacatggaagcaggtcgcatgcaatctccgcctggtgttttcttctactatgatctatcgccaattaaggtgatatttgaggagcaacatgtggagttcttgcacttcctaacaaatgtttgcgctatagtaggaggtatcttcacggtatcgggaatagtagattcgttcatataccatggacaacgagcaattaagaagaaaatggagattggtaaattcaactgagttgtttgatattctccacactttcttgatcagctactggagaatcatctctacgggttttacagttagacattaggtttgaatttgtgacaatgcgatgatttaaagaattttgtagtactgtaagatattccaggatctgaactttgcctttcactattcactatctcttcataggcaacatacaaagtgtaaaatgttgttatcaccgattgaaacgaatgttaatttttcctatt

SEQ ID NO: 103179 - protein, 386 aa, Arabidopsis thaliana; identical to SEQ ID NO: 30033
  peptide (1)..(386): Ceres Seq. ID no. 13612170
  misc_feature (1)..(386): Homolog of NCBI NO: 18395087 NR Description: expressed protein [Arabidopsis thaliana]
  misc_feature (1)..(386): Homolog of NCBI NO: 30693281 NR Description: expressed protein [Arabidopsis thaliana]
  misc_feature (1)..(386): Homolog of NCBI NO: 38347102 NR Description: OSJNBa0006M15.17 [Oryza sativa (japonica
  misc_feature (149)..(362): Homolog of NCBI NO: 6598578 NR Description: F5J5.4 [Arabidopsis thaliana]
  misc_feature (1)..(154): Homolog of NCBI NO: 6598578 NR Description: F5J5.4 [Arabidopsis thaliana]
  misc_feature (358)..(386): Homolog of NCBI NO: 6598578 NR Description: F5J5.4 [Arabidopsis thaliana]
  misc_feature (5)..(384): Homolog of NCBI NO: 28278376 NR Description: Similar to serologically defined breast cancer
  misc_feature (5)..(384): Homolog of NCBI NO: 13384938 NR Description: serologically defined breast cancer antigen 84; segment, Chr 2, University of California at Los Angeles 1 [Mus >gi|12844094|dbj|BAB26233.1| unnamed protein product [Mus
  misc_feature (5)..(384): Homolog of NCBI NO: 34860248 NR Description: similar to serologically defined breast cancer
  misc_feature (5)..(384): Homolog of NCBI NO: 7706278 NR Description: serologically defined breast cancer antigen 84 sapiens] >gi|4689108|gb|AAD27763.1|AF077030_1 hypothetical 43.2

SEQ ID NO: 103180 - protein, 382 aa, Arabidopsis thaliana; identical to SEQ ID NO: 30034
  peptide (1)..(382): Ceres Seq. ID no. 13612171
  misc_feature (1)..(382): Homolog of NCBI NO: 18395087 NR Description: expressed protein [Arabidopsis thaliana]
  misc_feature (1)..(382): Homolog of NCBI NO: 30693281 NR Description: expressed protein [Arabidopsis thaliana]
  misc_feature (1)..(382): Homolog of NCBI NO: 38347102 NR Description: OSJNBa0006M15.17 [Oryza sativa (japonica
  misc_feature (145)..(358): Homolog of NCBI NO: 6598578 NR Description: F5J5.4 [Arabidopsis thaliana]
  misc_feature (1)..(150): Homolog of NCBI NO: 6598578 NR Description: F5J5.4 [Arabidopsis thaliana]
  misc_feature (354)..(382): Homolog of NCBI NO: 6598578 NR Description: F5J5.4 [Arabidopsis thaliana]
  misc_feature (1)..(380): Homolog of NCBI NO: 28278376 NR Description: Similar to serologically defined breast cancer
  misc_feature (1)..(380): Homolog of NCBI NO: 13384938 NR Description: serologically defined breast cancer antigen 84; segment, Chr 2, University of California at Los Angeles 1 [Mus >gi|12844094|dbj|BAB26233.1| unnamed protein product [Mus
  misc_feature (1)..(380): Homolog of NCBI NO: 34860248 NR Description: similar to serologically defined breast cancer
  misc_feature (1)..(380): Homolog of NCBI NO: 7706278 NR Description: serologically defined breast cancer antigen 84 sapiens] >gi|4689108|gb|AAD27763.1|AF077030_1 hypothetical 43.2

SEQ ID NO: 103181 - protein, 348 aa, Arabidopsis thaliana; identical to SEQ ID NO: 30035
  peptide (1)..(348): Ceres Seq. ID no. 13612172
  misc_feature (1)..(348): Homolog of NCBI NO: 18395087 NR Description: expressed protein [Arabidopsis thaliana]
  misc_feature (1)..(348): Homolog of NCBI NO: 30693281 NR Description: expressed protein [Arabidopsis thaliana]
  misc_feature (1)..(348): Homolog of NCBI NO: 38347102 NR Description: OSJNBa0006M15.17 [Oryza sativa (japonica
  misc_feature (111)..(324): Homolog of NCBI NO: 6598578 NR Description: F5J5.4 [Arabidopsis thaliana]
  misc_feature (1)..(116): Homolog of NCBI NO: 6598578 NR Description: F5J5.4 [Arabidopsis thaliana]
  misc_feature (320)..(348): Homolog of NCBI NO: 6598578 NR Description: F5J5.4 [Arabidopsis thaliana]
  misc_feature (1)..(346): Homolog of NCBI NO: 28278376 NR Description: Similar to serologically defined breast cancer
  misc_feature (1)..(346): Homolog of NCBI NO: 13384938 NR Description: serologically defined breast cancer antigen 84; segment, Chr 2, University of California at Los Angeles 1 [Mus >gi|12844094|dbj|BAB26233.1| unnamed protein product [Mus
  misc_feature (1)..(346): Homolog of NCBI NO: 34860248 NR Description: similar to serologically defined breast cancer
  misc_feature (1)..(346): Homolog of NCBI NO: 7706278 NR Description: serologically defined breast cancer antigen 84 sapiens] >gi|4689108|gb|AAD27763.1|AF077030_1 hypothetical 43.2

SEQ ID NO: 103182 - DNA, 1862 bp, Arabidopsis thaliana
  misc_feature (1)..(1862): Ceres Seq. ID no. 13612173
  misc_feature: MA Experiment ID: 20000180 Result: Up-regulated in Transcription
  misc_feature: MA Experiment 20000180 PARAMETER Experiment Name: At_Germinating_Seeds_P Parameter: Age (hr) Value: 24 vs. 0
  misc_feature: MA Experiment 20000180 PARAMETER Experiment Name: At_Germinating_Seeds_P Parameter: Tissue Value: Germinating Seeds
  misc_feature: MA Experiment ID: 20000184 Result: Up-regulated in Transcription
  misc_feature: MA Experiment 20000184 PARAMETER Experiment Name: At_Shoots__P Parameter: Age (day) Value: 7
  misc_feature: MA Experiment 20000184 PARAMETER Experiment Name: At_Shoots__P Parameter: Tissue Value: Shoots vs. Whole Plant
  misc_feature: MA Experiment ID: 20000185 Result: Up-regulated in Transcription
  misc_feature: MA Experiment 20000185 PARAMETER Experiment Name: At_Roots__P Parameter: Age (day) Value: 7 vs. 21
  misc_feature: MA Experiment 20000185 PARAMETER Experiment Name: At_Roots__P Parameter: Organism Value: A. thaliana
  misc_feature: MA Experiment 20000185 PARAMETER Experiment Name: At_Roots__P Parameter: Tissue Value: Roots vs. Whole Plant
  misc_feature: MA Experiment ID: 20000264 Result: Up-regulated in Transcription
  misc_feature: MA Experiment 20000264 PARAMETER Experiment Name: At_Open_Flower_P Parameter: Age (day) Value: 21
  misc_feature: MA Experiment 20000264 PARAMETER Experiment Name: At_Open_Flower_P Parameter: Plant Line Value: WS
  misc_feature: MA Experiment 20000264 PARAMETER Experiment Name: At_Open_Flower_P Parameter: Tissue Value: Open Flower vs. Whole Plant
  misc_feature: MA Experiment ID: 20000286 Result: Up-regulated in Transcription
  misc_feature: MA Experiment 20000286 PARAMETER Experiment Name: At_Open_Flower_P Parameter: Age (day) Value: 21
  misc_feature: MA Experiment 20000286 PARAMETER Experiment Name: At_Open_Flower_P Parameter: Plant Line Value: WS
  misc_feature: MA Experiment 20000286 PARAMETER Experiment Name: At_Open_Flower_P Parameter: Tissue Value: Half Open vs. Whole Plant
  misc_feature: MA Experiment ID: 20000439 Result: Up-regulated in Transcription
  misc_feature: MA Experiment 20000439 PARAMETER Experiment Name: At_Roots__P Parameter: Age (day) Value: 14 vs. 21
  misc_feature: MA Experiment 20000439 PARAMETER Experiment Name: At_Roots__P Parameter: Organism Value: A. thaliana
  misc_feature: MA Experiment 20000439 PARAMETER Experiment Name: At_Roots__P Parameter: Tissue Value: Roots vs. Whole Plant
  misc_feature: MA Experiment ID: 20000495 Result: Down-regulated in Transcription
  misc_feature: MA Experiment 20000495 PARAMETER Experiment Name: At_Guard_Cells_P Parameter: Harvest Date Value: 8/2/2002
  misc_feature: MA Experiment 20000495 PARAMETER Experiment Name: At_Guard_Cells_P Parameter: Organism Value: A. thaliana
  misc_feature: MA Experiment 20000495 PARAMETER Experiment Name: At_Guard_Cells_P Parameter: Tissue Value: Guard Cells vs. Leaves
  misc_feature: MA Experiment ID: 20000527 Result: Down-regulated in Transcription
  misc_feature: MA Experiment 20000527 PARAMETER Experiment Name: At_10percent_PEG_P Parameter: Age (day) Value: 20
  misc_feature: MA Experiment 20000527 PARAMETER Experiment Name: At_10percent_PEG_P Parameter: Organism Value: A. thaliana
  misc_feature: MA Experiment 20000527 PARAMETER Experiment Name: At_10percent_PEG_P Parameter: Plant Line Value: WS
  misc_feature: MA Experiment 20000527 PARAMETER Experiment Name: At_10percent_PEG_P Parameter: Timepoint (day) Value: 20
  misc_feature: MA Experiment 20000527 PARAMETER Experiment Name: At_10percent_PEG_P Parameter: Tissue Value: Whole Plant
  misc_feature: MA Experiment 20000527 PARAMETER Experiment Name: At_10percent_PEG_P Parameter: Treatment Value: 10percent PEG vs. No Treatment
  misc_feature: MA Experiment ID: 20001248 Result: Down-regulated in Transcription
  misc_feature: MA Experiment 20001248 PARAMETER Experiment Name: At_Far-red-induction_P Parameter: Age (day) Value: 7
  misc_feature: MA Experiment 20001248 PARAMETER Experiment Name: At_Far-red-induction_P Parameter: Light Value: Far-red vs. White
  misc_feature: MA Experiment 20001248 PARAMETER Experiment Name: At_Far-red-induction_P Parameter: Organism Value: A. thaliana
  misc_feature: MA Experiment 20001248 PARAMETER Experiment Name: At_Far-red-induction_P Parameter: Plant Line Value: Columbia
  misc_feature: MA Experiment 20001248 PARAMETER Experiment Name: At_Far-red-induction_P Parameter: Timepoint (hr) Value: 4
  misc_feature: MA Experiment 20001248 PARAMETER Experiment Name: At_Far-red-induction_P Parameter: Tissue Value: Whole Plant
  misc_feature: MA Experiment ID: 20001450 Result: Down-regulated in Transcription
  misc_feature: MA Experiment 20001450 PARAMETER Experiment Name: At_Far-red-induction_P Parameter: Age (day) Value: 7
  misc_feature: MA Experiment 20001450 PARAMETER Experiment Name: At_Far-red-induction_P Parameter: Light Value: Far-red vs. White
  misc_feature: MA Experiment 20001450 PARAMETER Experiment Name: At_Far-red-induction_P Parameter: Organism Value: A. thaliana
  misc_feature: MA Experiment 20001450 PARAMETER Experiment Name: At_Far-red-induction_P Parameter: Plant Line Value: Columbia
  misc_feature: MA Experiment 20001450 PARAMETER Experiment Name: At_Far-red-induction_P Parameter: Timepoint (hr) Value: 8
  misc_feature: MA Experiment 20001450 PARAMETER Experiment Name: At_Far-red-induction_P Parameter: Tissue Value: Whole Plant
  misc_feature: MA Experiment ID: 20001451 Result: Down-regulated in Transcription
  misc_feature: MA Experiment 20001451 PARAMETER Experiment Name: At_Far-red-induction_P Parameter: Age (day) Value: 7
  misc_feature: MA Experiment 20001451 PARAMETER Experiment Name: At_Far-red-induction_P Parameter: Light Value: Far-red vs. White
  misc_feature: MA Experiment 20001451 PARAMETER Experiment Name: At_Far-red-induction_P Parameter: Organism Value: A. thaliana
  misc_feature: MA Experiment 20001451 PARAMETER Experiment Name: At_Far-red-induction_P Parameter: Plant Line Value: Columbia
  misc_feature: MA Experiment 20001451 PARAMETER Experiment Name: At_Far-red-induction_P Parameter: Timepoint (hr) Value: 24
  misc_feature: MA Experiment 20001451 PARAMETER Experiment Name: At_Far-red-induction_P Parameter: Tissue Value: Whole Plant
  misc_feature: MA Experiment ID: 20001905 Result: Up-regulated in Transcription
  misc_feature: MA Experiment 20001905 PARAMETER Experiment Name: At_Drought_Reproduction_P Parameter: Age (day) Value: 40
  misc_feature: MA Experiment 20001905 PARAMETER Experiment Name: At_Drought_Reproduction_P Parameter: Organism Value: A. thaliana
  misc_feature: MA Experiment 20001905 PARAMETER Experiment Name: At_Drought_Reproduction_P Parameter: Plant Line Value: WS
  misc_feature: MA Experiment 20001905 PARAMETER Experiment Name: At_Drought_Reproduction_P Parameter: Timepoint (day) Value: 10
  misc_feature: MA Experiment 20001905 PARAMETER Experiment Name: At_Drought_Reproduction_P Parameter: Tissue Value: Rosettes
  misc_feature: MA Experiment 20001905 PARAMETER Experiment Name: At_Drought_Reproduction_P Parameter: Treatment Value: Drought vs. No Drought
  misc_feature: MA Experiment ID: 20001911 Result: Down-regulated in Transcription
  misc_feature: MA Experiment 20001911 PARAMETER Experiment Name: At_Drought_Reproduction_P Parameter: Age (day) Value: 40
  misc_feature: MA Experiment 20001911 PARAMETER Experiment Name: At_Drought_Reproduction_P Parameter: Organism Value: A. thaliana
  misc_feature: MA Experiment 20001911 PARAMETER Experiment Name: At_Drought_Reproduction_P Parameter: Plant Line Value: WS
  misc_feature: MA Experiment 20001911 PARAMETER Experiment Name: At_Drought_Reproduction_P Parameter: Timepoint (day) Value: 10
  misc_feature: MA Experiment 20001911 PARAMETER Experiment Name: At_Drought_Reproduction_P Parameter: Tissue Value: Flowers
  misc_feature: MA Experiment 20001911 PARAMETER Experiment Name: At_Drought_Reproduction_P Parameter: Treatment Value: Drought vs. No Drought
aggtttcgtgtaacatttcacacacacatttgtcgaaatcttaacaccaatcccaaatcagaaaaatcaaaactttttattttattttatcaaaatggcgcttatgaatggaagcatgaatctatcatcggtcaaatcatcgatgatcaaccaccgtcaaccaaacttctcctccgccgtctccagacccacttctttccggatctccgccgtgcaaaccgacccaaaaacaccagctgcttcatcggcgtcggcggcgacgacgactccggcaacgttgacgaagcccgttggagttaatgtgggtaaaggaaaatgggcaccagagagttggaggacgaagaaagctttacagcaaccggactatccagatttagctgcgcttgaagctgtgctagagacgatcgaagcttttcctccgatcgtgttcgccggagaagctagattgcttgaggaacgattaggacaagcagcgatgggtgaagcgtttctgttacaaggaggagattgtgcagagagtttcaaagagtttaatgcgaataacattcgtgatactttcaggattcttcttcagatgggtgctgtgttgatgttcggaggtcaagtccctgttgttaaggttgggagaatggcgggtcaatttgcgaaaccaagatcggattcgtttgaggagaaagatggagtgaaattgcctagttacagaggagataacattaatggagatgcgtttgattcgaaatctaggattcctgatccacagaggatgattagagcttattgtcaatctgcagctactttgaatcttttgagagcttttgctactggtggttatgctgctatgcagagagttactcaatggaatcttgatttcactgaacgtagtgagcaaggagacaggtaccgtgaactagctaaccgtgttgatgaagcgcttggtttcatgcacgctgctggattaacgctcgatcatcccataatgcaaacaaccgacttctggacttctcatgaatgtttgctcttgccttatgaacaatcactaacaaggcttgactcaacctctggtctctactacgattgttctgcccatatgatttgggtcggtgagcgaaccagacagctagatggtgcccatgtcgagttcttaagaggtgttgctaatcctcttggaatcaaggtgagtgataaaatggatccaaaggagctagtgaagttgattgagatcttgaatgctgacaataagcctggaaggattacaataatcacaagaatgggagctgagaatatgagagtgaagcttcctcatttgatcagagaagtgcgacgtgctggacagattgtgacttgggtcagtgatccaatgcacggaaacaccattaaggctccttgtggtctcaagactcgtccctttgacgccatcttggctgaagtgagagctttcttcgacgtgcacgagcaagaaggtagccaccccggaggaattcacctagaaatgactggtcagaacgtgaccgagtgcatcggtggttcacgcacagtcacattcgacgacttgggttcacgttaccacacgcactgtgatcctcgccttaatgcttcacagtctcttgagctctccttcatcatcgccgaacgtcttagaaagagacgcatcaagtctcaaaaggcttttgccctctaatcaaataaacattgcttataataatatctatctatataaatgtgtgtgtgtgtgaacttaatacaatctcatttatctttgattcaaatcttgagtcaaaagaacgcttaaggtttctgttttaatgttgttagtgagtattatttccattttggatttaatataatcatggatggttgggttt

SEQ ID NO: 103183 - protein, 527 aa, Arabidopsis thaliana; identical to SEQ ID NO: 22234
  peptide (1)..(527): Ceres Seq. ID no. 13612174
  misc_feature (74)..(511): Pfam Name: Class-II DAHP synthetase family Pfam Description: Class-II DAHP synthetase family
  misc_feature (1)..(527): Homolog of NCBI NO: 15219878 NR Description: 2-dehydro-3-deoxyphosphoheptonate aldolase
  misc_feature (1)..(526): Homolog of NCBI NO: 2398679 NR Description: 3-deoxy-D-arabino-heptulosonate 7-phosphate
  misc_feature (1)..(523): Homolog of NCBI NO: 7488957 NR Description: probable 2-dehydro-3-deoxy-phosphoheptonate
  misc_feature (24)..(522): Homolog of NCBI NO: 114193 NR Description: Phospho-2-dehydro-3-deoxyheptonate aldolase 1,
  misc_feature (3)..(525): Homolog of NCBI NO: 24745903 NR Description: 3-deoxy-D-arabino-heptulosonate 7-phosphate
  misc_feature (3)..(522): Homolog of NCBI NO: 584777 NR Description: Phospho-2-dehydro-3-deoxyheptonate aldolase 1,
  misc_feature (25)..(522): Homolog of NCBI NO: 584778 NR Description: Phospho-2-dehydro-3-deoxyheptonate aldolase 2,
  misc_feature (1)..(521): Homolog of NCBI NO: 34906844 NR Description: putative phospho-2-dehydro-3-deoxyheptonate
  misc_feature (31)..(525): Homolog of NCBI NO: 2546988 NR Description: 2-dehydro-3-deoxyphosphoheptonate aldolase;
  misc_feature (1)..(523): Homolog of NCBI NO: 15236093 NR Description: 2-dehydro-3-deoxyphosphoheptonate aldolase (DHS1)

SEQ ID NO: 103184 - protein, 524 aa, Arabidopsis thaliana; identical to SEQ ID NO: 22235
  peptide (1)..(524): Ceres Seq. ID no. 13612175
  misc_feature (71)..(508): Pfam Name: Class-II DAHP synthetase family Pfam Description: Class-II DAHP synthetase family
  misc_feature (1)..(524): Homolog of NCBI NO: 15219878 NR Description: 2-dehydro-3-deoxyphosphoheptonate aldolase
  misc_feature (1)..(523): Homolog of NCBI NO: 2398679 NR Description: 3-deoxy-D-arabino-heptulosonate 7-phosphate
  misc_feature (1)..(520): Homolog of NCBI NO: 7488957 NR Description: probable 2-dehydro-3-deoxy-phosphoheptonate
  misc_feature (21)..(519): Homolog of NCBI NO: 114193 NR Description: Phospho-2-dehydro-3-deoxyheptonate aldolase 1,
  misc_feature (1)..(522): Homolog of NCBI NO: 24745903 NR Description: 3-deoxy-D-arabino-heptulosonate 7-phosphate
  misc_feature (1)..(519): Homolog of NCBI NO: 584777 NR Description: Phospho-2-dehydro-3-deoxyheptonate aldolase 1,
  misc_feature (22)..(519): Homolog of NCBI NO: 584778 NR Description: Phospho-2-dehydro-3-deoxyheptonate aldolase 2,
  misc_feature (1)..(518): Homolog of NCBI NO: 34906844 NR Description: putative phospho-2-dehydro-3-deoxyheptonate
  misc_feature (28)..(522): Homolog of NCBI NO: 2546988 NR Description: 2-dehydro-3-deoxyphosphoheptonate aldolase;
  misc_feature (1)..(520): Homolog of NCBI NO: 15236093 NR Description: 2-dehydro-3-deoxyphosphoheptonate aldolase (DHS1)

SEQ ID NO: 103185 - protein, 520 aa, Arabidopsis thaliana; identical to SEQ ID NO: 22236
  peptide (1)..(520): Ceres Seq. ID no. 13612176
  misc_feature (67)..(504): Pfam Name: Class-II DAHP synthetase family Pfam Description: Class-II DAHP synthetase family
  misc_feature (1)..(520): Homolog of NCBI NO: 15219878 NR Description: 2-dehydro-3-deoxyphosphoheptonate aldolase
  misc_feature (1)..(519): Homolog of NCBI NO: 2398679 NR Description: 3-deoxy-D-arabino-heptulosonate 7-phosphate
  misc_feature (1)..(516): Homolog of NCBI NO: 7488957 NR Description: probable 2-dehydro-3-deoxy-phosphoheptonate
  misc_feature (17)..(515): Homolog of NCBI NO: 114193 NR Description: Phospho-2-dehydro-3-deoxyheptonate aldolase 1,
  misc_feature (1)..(518): Homolog of NCBI NO: 24745903 NR Description: 3-deoxy-D-arabino-heptulosonate 7-phosphate
  misc_feature (1)..(515): Homolog of NCBI NO: 584777 NR Description: Phospho-2-dehydro-3-deoxyheptonate aldolase 1,
  misc_feature (18)..(515): Homolog of NCBI NO: 584778 NR Description: Phospho-2-dehydro-3-deoxyheptonate aldolase 2,
  misc_feature (1)..(514): Homolog of NCBI NO: 34906844 NR Description: putative phospho-2-dehydro-3-deoxyheptonate
  misc_feature (24)..(518): Homolog of NCBI NO: 2546988 NR Description: 2-dehydro-3-deoxyphosphoheptonate aldolase;
  misc_feature (1)..(516): Homolog of NCBI NO: 15236093 NR Description: 2-dehydro-3-deoxyphosphoheptonate aldolase (DHS1)

SEQ ID NO: 103186 - DNA, 1479 bp, Arabidopsis thaliana
  misc_feature (1)..(1479): Ceres Seq. ID no. 13612177
  misc_feature: MA Experiment ID: 108435 Result: Down-regulated in Transcription
  misc_feature: MA Experiment 108435 PARAMETER Experiment Name: At_stm_Mutants_cDNA_P Parameter: Plant Line Value: wt Landsburg vs stm
  misc_feature: MA Experiment 108435 PARAMETER Experiment Name: At_stm_Mutants_cDNA_P Parameter: Tissue Value: Shoot Apical Meristem Region
  misc_feature: MA Experiment ID: 108461 Result: Up-regulated in Transcription
  misc_feature: MA Experiment 108461 PARAMETER Experiment Name: At_Germinating_Seeds_cDNA_P Parameter: Age (day) Value: 1 vs. 0
  misc_feature: MA Experiment 108461 PARAMETER Experiment Name: At_Germinating_Seeds_cDNA_P Parameter: Tissue Value: Germinating Seeds
  misc_feature: MA Experiment ID: 108462 Result: Up-regulated in Transcription
  misc_feature: MA Experiment 108462 PARAMETER Experiment Name: At_Germinating_Seeds_cDNA_P Parameter: Age (day) Value: 2 vs. 0
  misc_feature: MA Experiment 108462 PARAMETER Experiment Name: At_Germinating_Seeds_cDNA_P Parameter: Tissue Value: Germinating Seeds
  misc_feature: MA Experiment ID: 108463 Result: Up-regulated in Transcription
  misc_feature: MA Experiment 108463 PARAMETER Experiment Name: At_Germinating_Seeds_cDNA_P Parameter: Age (day) Value: 3 vs. 0
  misc_feature: MA Experiment 108463 PARAMETER Experiment Name: At_Germinating_Seeds_cDNA_P Parameter: Tissue Value: Germinating Seeds
  misc_feature: MA Experiment ID: 108464 Result: Up-regulated in Transcription
  misc_feature: MA Experiment 108464 PARAMETER Experiment Name: At_Germinating_Seeds_cDNA_P Parameter: Age (day) Value: 4 vs. 0
  misc_feature: MA Experiment 108464 PARAMETER Experiment Name: At_Germinating_Seeds_cDNA_P Parameter: Tissue Value: Germinating Seeds
  misc_feature: MA Experiment ID: 108473 Result: Up-regulated in Transcription
  misc_feature: MA Experiment 108473 PARAMETER Experiment Name: At_Drought_Flowers_cDNA_P Parameter: Timepoint (hr) Value: 7 d
  misc_feature: MA Experiment 108473 PARAMETER Experiment Name: At_Drought_Flowers_cDNA_P Parameter: Tissue Value: Flower
  misc_feature: MA Experiment 108473 PARAMETER Experiment Name: At_Drought_Flowers_cDNA_P Parameter: Treatment Value: Drought vs. No Drought
  misc_feature: MA Experiment ID: 108489 Result: Down-regulated in Transcription
  misc_feature: MA Experiment ID: 108577 Result: Down-regulated in Transcription
  misc_feature: MA Experiment 108577 PARAMETER Experiment Name: At_42deg_Heat_cDNA_P Parameter: Temperature (deg C) Value: 42 vs. 22
  misc_feature: MA Experiment 108577 PARAMETER Experiment Name: At_42deg_Heat_cDNA_P Parameter: Timepoint (hr) Value: 6
  misc_feature: MA Experiment 108577 PARAMETER Experiment Name: At_42deg_Heat_cDNA_P Parameter: Tissue Value: Aerial
  misc_feature: MA Experiment ID: 108585 Result: Down-regulated in Transcription
  misc_feature: MA Experiment 108585 PARAMETER Experiment Name: At_5mM_NaNP_cDNA_P Parameter: Timepoint (hr) Value: 6
  misc_feature: MA Experiment 108585 PARAMETER Experiment Name: At_5mM_NaNP_cDNA_P Parameter: Tissue Value: Aerial
  misc_feature: MA Experiment 108585 PARAMETER Experiment Name: At_5mM_NaNP_cDNA_P Parameter: Treatment Value: null
  misc_feature: MA Experiment ID: 108594 Result: Down-regulated in Transcription
  misc_feature: MA Experiment 108594 PARAMETER Experiment Name: At_Ler-rhl_Root_cDNA_P Parameter: Plant Line Value: null
  misc_feature: MA Experiment ID: 108595 Result: Down-regulated in Transcription
  misc_feature: MA Experiment 108595 PARAMETER Experiment Name: At_Ler-pi_Ovule_cDNA_P Parameter: Plant Line Value: null
  misc_feature: MA Experiment ID: 20000070 Result: Down-regulated in Transcription
  misc_feature: MA Experiment 20000070 PARAMETER Experiment Name: At_100uM_ABA_Mutants_cDNA_P Parameter: Plant Line Value: CS24
  misc_feature: MA Experiment 20000070 PARAMETER Experiment Name: At_100uM_ABA_Mutants_cDNA_P Parameter: Timepoint (hr) Value: 6
  misc_feature: MA Experiment 20000070 PARAMETER Experiment Name: At_100uM_ABA_Mutants_cDNA_P Parameter: Tissue Value: Aerial
  misc_feature: MA Experiment 20000070 PARAMETER Experiment Name: At_100uM_ABA_Mutants_cDNA_P Parameter: Treatment Value: 100uM ABA vs. No Treatment
  misc_feature: MA Experiment ID: 20000071 Result: Down-regulated in Transcription
  misc_feature: MA Experiment 20000071 PARAMETER Experiment Name: At_100uM_ABA_Mutants_cDNA_P Parameter: Plant Line Value: CS8104
  misc_feature: MA Experiment 20000071 PARAMETER Experiment Name: At_100uM_ABA_Mutants_cDNA_P Parameter: Timepoint (hr) Value: 6
  misc_feature: MA Experiment 20000071 PARAMETER Experiment Name: At_100uM_ABA_Mutants_cDNA_P Parameter: Tissue Value: Aerial
  misc_feature: MA Experiment 20000071 PARAMETER Experiment Name: At_100uM_ABA_Mutants_cDNA_P Parameter: Treatment Value: 100uM ABA vs. No Treatment
  misc_feature: MA Experiment ID: 20000111 Result: Down-regulated in Transcription
  misc_feature: MA Experiment 20000111 PARAMETER Experiment Name: At_42deg_Heat_cDNA_P Parameter: Temperature (deg C) Value: 42 vs. 22
  misc_feature: MA Experiment 20000111 PARAMETER Experiment Name: At_42deg_Heat_cDNA_P Parameter: Timepoint (hr) Value: 6
  misc_feature: MA Experiment 20000111 PARAMETER Experiment Name: At_42deg_Heat_cDNA_P Parameter: Tissue Value: Aerial
  misc_feature: MA Experiment ID: 20000112 Result: Down-regulated in Transcription
  misc_feature: MA Experiment 20000112 PARAMETER Experiment Name: At_42deg_Heat_cDNA_P Parameter: Temperature (deg C) Value: 42 vs. 22
  misc_feature: MA Experiment 20000112 PARAMETER Experiment Name: At_42deg_Heat_cDNA_P Parameter: Timepoint (hr) Value: 2
  misc_feature: MA Experiment 20000112 PARAMETER Experiment Name: At_42deg_Heat_cDNA_P Parameter: Tissue Value: Aerial
  misc_feature: MA Experiment ID: 20000113 Result: Down-regulated in Transcription
  misc_feature: MA Experiment 20000113 PARAMETER Experiment Name: At_42deg_Heat_cDNA_P Parameter: Temperature (deg C) Value: 42 vs. 22
  misc_feature: MA Experiment 20000113 PARAMETER Experiment Name: At_42deg_Heat_cDNA_P Parameter: Timepoint (hr) Value: 8
  misc_feature: MA Experiment 20000113 PARAMETER Experiment Name: At_42deg_Heat_cDNA_P Parameter: Tissue Value: Aerial
  misc_feature: MA Experiment ID: 20000117 Result: Down-regulated in Transcription
  misc_feature: MA Experiment 20000117 PARAMETER Experiment Name: At_100uM_ABA_Mutants_cDNA_P Parameter: Plant Line Value: Columbia
  misc_feature: MA Experiment 20000117 PARAMETER Experiment Name: At_100uM_ABA_Mutants_cDNA_P Parameter: Timepoint (hr) Value: 6
  misc_feature: MA Experiment 20000117 PARAMETER Experiment Name: At_100uM_ABA_Mutants_cDNA_P Parameter: Tissue Value: Aerial
  misc_feature: MA Experiment 20000117 PARAMETER Experiment Name: At_100uM_ABA_Mutants_cDNA_P Parameter: Treatment Value: 100uM ABA vs. No Treatment
  misc_feature: MA Experiment ID: 20000173 Result: Down-regulated in Transcription
  misc_feature: MA Experiment 20000173 PARAMETER Experiment Name: At_42deg_Heat_P Parameter: Age (day) Value: 14
  misc_feature: MA Experiment 20000173 PARAMETER Experiment Name: At_42deg_Heat_P Parameter: Organism Value: A. thaliana
  misc_feature: MA Experiment 20000173 PARAMETER Experiment Name: At_42deg_Heat_P Parameter: Plant Line Value: WS
  misc_feature: MA Experiment 20000173 PARAMETER Experiment Name: At_42deg_Heat_P Parameter: Temperature (deg C) Value: 42 vs. 22
  misc_feature: MA Experiment 20000173 PARAMETER Experiment Name: At_42deg_Heat_P Parameter: Timepoint (hr) Value: 6
  misc_feature: MA Experiment 20000173 PARAMETER Experiment Name: At_42deg_Heat_P Parameter: Tissue Value: Aerial
  misc_feature: MA Experiment ID: 20000179 Result: Up-regulated in Transcription
  misc_feature: MA Experiment 20000179 PARAMETER Experiment Name: At_Germinating_Seeds_P Parameter: Age (hr) Value: 6 vs. 0
  misc_feature: MA Experiment 20000179 PARAMETER Experiment Name: At_Germinating_Seeds_P Parameter: Tissue Value: Germinating Seeds
  misc_feature: MA Experiment ID: 20000180 Result: Up-regulated in Transcription
  misc_feature: MA Experiment 20000180 PARAMETER Experiment Name: At_Germinating_Seeds_P Parameter: Age (hr) Value: 24 vs. 0
  misc_feature: MA Experiment 20000180 PARAMETER Experiment Name: At_Germinating_Seeds_P Parameter: Tissue Value: Germinating Seeds
  misc_feature: MA Experiment ID: 20000182 Result: Down-regulated in Transcription
  misc_feature: MA Experiment 20000182 PARAMETER Experiment Name: At_2mM_SA_P Parameter: Age (day) Value: 14
  misc_feature: MA Experiment 20000182 PARAMETER Experiment Name: At_2mM_SA_P Parameter: Organism Value: A. thaliana
  misc_feature: MA Experiment 20000182 PARAMETER Experiment Name: At_2mM_SA_P Parameter: Plant Line Value: WS
  misc_feature: MA Experiment 20000182 PARAMETER Experiment Name: At_2mM_SA_P Parameter: Timepoint (hr) Value: 6
  misc_feature: MA Experiment 20000182 PARAMETER Experiment Name: At_2mM_SA_P Parameter: Tissue Value: Aerial
  misc_feature: MA Experiment 20000182 PARAMETER Experiment Name: At_2mM_SA_P Parameter: Treatment Value: 2mM SA vs. No Treatment
  misc_feature: MA Experiment ID: 20000224 Result: Down-regulated in Transcription
  misc_feature: MA Experiment ID: 20000227 Result: Down-regulated in Transcription
  misc_feature: MA Experiment 20000227 PARAMETER Experiment Name: At_Root-Tips-vs-Tops_P Parameter: Tissue Value: Root Tips vs. Root Tops
  misc_feature: MA Experiment ID: 20000265 Result: Up-regulated in Transcription
  misc_feature: MA Experiment 20000265 PARAMETER Experiment Name: At_Open_Flower_P Parameter: Age (day) Value: 21
  misc_feature: MA Experiment 20000265 PARAMETER Experiment Name: At_Open_Flower_P Parameter: Plant Line Value: WS
  misc_feature: MA Experiment 20000265 PARAMETER Experiment Name: At_Open_Flower_P Parameter: Tissue Value: Closed Flower vs. Whole Plant
  misc_feature: MA Experiment ID: 20000438 Result: Up-regulated in Transcription
  misc_feature: MA Experiment 20000438 PARAMETER Experiment Name: At_Shoots__P Parameter: Age (day) Value: 14
  misc_feature: MA Experiment 20000438 PARAMETER Experiment Name: At_Shoots__P Parameter: Tissue Value: Shoots vs. Whole Plant
  misc_feature: MA Experiment ID: 20000794 Result: Down-regulated in Transcription
  misc_feature: MA Experiment 20000794 PARAMETER Experiment Name: At_Petals_P Parameter: Age (day) Value: 23-25 days
  misc_feature: MA Experiment 20000794 PARAMETER Experiment Name: At_Petals_P Parameter: Plant Line Value: WS
  misc_feature: MA Experiment 20000794 PARAMETER Experiment Name: At_Petals_P Parameter: Tissue Value: Petals vs. Whole plant
  misc_feature: MA Experiment ID: 20001905 Result: Down-regulated in Transcription
  misc_feature: MA Experiment 20001905 PARAMETER Experiment Name: At_Drought_Reproduction_P Parameter: Age (day) Value: 40
  misc_feature: MA Experiment 20001905 PARAMETER Experiment Name: At_Drought_Reproduction_P Parameter: Organism Value: A. thaliana
  misc_feature: MA Experiment 20001905 PARAMETER Experiment Name: At_Drought_Reproduction_P Parameter: Plant Line Value: WS
  misc_feature: MA Experiment 20001905 PARAMETER Experiment Name: At_Drought_Reproduction_P Parameter: Timepoint (day) Value: 10
  misc_feature: MA Experiment 20001905 PARAMETER Experiment Name: At_Drought_Reproduction_P Parameter: Tissue Value: Rosettes
  misc_feature: MA Experiment 20001905 PARAMETER Experiment Name: At_Drought_Reproduction_P Parameter: Treatment Value: Drought vs. No Drought
aaaagataagatacgaagaacaagagccccctctctctctctcgtccactcacctattgtgtatctcatcatcaccatggacaagacatttttctctagcaacgaagggaaaccaattacatgcaaagcagcaatatgtagaaaagcaggagaagcattggtgattgaagacatccacgtggatccaccccaagcttatgaagttaggattaagattttatgtacttctctatgtcacactgatcttactttctggaaactaagctttggaccaatttcaaggtttcctaggattcttggacacgaagcagtcggtgtggtcgagagcattggtgaaaacgtggacggatttaaacaaggtgacgtcgttttgccagtttttcatccttattgtgaagaatgcaaagactgcaaatcttcaaaaaccaactggtgtgacagatatgccgaagatttcatatcaaacacaagacgatatggaatggcttcaagattcaaagattcttcaggagaagtgattcatcattttctctttgtctcaagtttttccgaatacaccgtcgtggatattgcacatcttgtcaaaatatctcctgaaatccccgttgataaagcggctttgctcagctgcggtgtctccacaggaattggagcagcttggaaggtggctaacgtggaagaaggctccaccattgcaatttttggccttggtgctgttggacttgcggttgcagaaggagccaggctacgaggagccgcaaagattattggtattgataccaattctgataaattcgagctaggtaagaaatttggttttacggatttcatcaatccgaccttatgcggagaaaagaagattagtgaggtcattaaagaaatgacagaaggaggagttgactatagtttcgaatgcgttggcttagcttctttacttaacgaggctttcatcagtacccgcacgggaacaggtaaaactgtaatgttggggatggagaagcatgcagcgccaattagtttgggtagttttgatcttttaagaggcagagttatttgcggaagcttgttcggtggtctgaaatccaaacttgatattcccattctagtggatcattacctaaaaaaggagctcaatctggatagtttcattacacacgaactgaatttcaaagaaattaataaggctttcgctttattagaggaaggaaagtctctccgctgcattctatggatggataagtaactatccagcttcatatttgcactttataatcttctcgtggatcttgtttagattatcttcctttgtctttcaagatgctttgtcttgttaccttgcaatttttgttctttccacacgagctacaaacttatcatttggtagtccaaaccccttaacattgtgttttctgatggttacaaatattatgacaccttgtatttgttgatcaatgatcattatagtactaattgcttcta

SEQ ID NO: 103187 - protein, 413 aa, Arabidopsis thaliana; identical to SEQ ID NO: 25700
  peptide (1)..(413): Ceres Seq. ID no. 13612178
  misc_feature (26)..(413): Homolog of NCBI NO: 15219882 NR Description: alcohol dehydrogenase (ADH), putative
  misc_feature (26)..(413): Homolog of NCBI NO: 18415840 NR Description: alcohol dehydrogenase (ADH), putative
  misc_feature (31)..(413): Homolog of NCBI NO: 21618210 NR Description: alcohol dehydrogenase like protein [Arabidopsis
  misc_feature (26)..(413): Homolog of NCBI NO: 11250327 NR Description: probable alcohol dehydrogenase (EC 1.1.1.1)
  misc_feature (26)..(413): Homolog of NCBI NO: 15219884 NR Description: alcohol dehydrogenase (ADH), putative
  misc_feature (28)..(413): Homolog of NCBI NO: 7705214 NR Description: alcohol dehydrogenase ADH [Lycopersicon
  misc_feature (28)..(413): Homolog of NCBI NO: 1076579 NR Description: probable alcohol dehydrogenase (EC 1.1.1.1) ADH3a
  misc_feature (37)..(411): Homolog of NCBI NO: 15238330 NR Description: alcohol dehydrogenase (ADH), putative thaliana] >gi|10177010|dbj|BAB10198.1| alcohol dehydrogenase thaliana] >gi|19698971|gb|AAL91221.1| alcohol dehydrogenase
  misc_feature (32)..(413): Homolog of NCBI NO: 7705215 NR Description: alcohol dehydrogenase ADH [Lycopersicon
  misc_feature (32)..(413): Homolog of NCBI NO: 1076580 NR Description: probable alcohol dehydrogenase (EC 1.1.1.1) ADH3b

SEQ ID NO: 103188 - protein, 388 aa, Arabidopsis thaliana; identical to SEQ ID NO: 25701
  peptide (1)..(388): Ceres Seq. ID no. 13612179
  misc_feature (1)..(388): Homolog of NCBI NO: 15219882 NR Description: alcohol dehydrogenase (ADH), putative
  misc_feature (1)..(388): Homolog of NCBI NO: 18415840 NR Description: alcohol dehydrogenase (ADH), putative
  misc_feature (6)..(388): Homolog of NCBI NO: 21618210 NR Description: alcohol dehydrogenase like protein [Arabidopsis
  misc_feature (1)..(388): Homolog of NCBI NO: 11250327 NR Description: probable alcohol dehydrogenase (EC 1.1.1.1)
  misc_feature (1)..(388): Homolog of NCBI NO: 15219884 NR Description: alcohol dehydrogenase (ADH), putative
  misc_feature (3)..(388): Homolog of NCBI NO: 7705214 NR Description: alcohol dehydrogenase ADH [Lycopersicon
  misc_feature (3)..(388): Homolog of NCBI NO: 1076579 NR Description: probable alcohol dehydrogenase (EC 1.1.1.1) ADH3a
  misc_feature (12)..(386): Homolog of NCBI NO: 15238330 NR Description: alcohol dehydrogenase (ADH), putative thaliana] >gi|10177010|dbj|BAB10198.1| alcohol dehydrogenase thaliana] >gi|19698971|gb|AAL91221.1| alcohol dehydrogenase
  misc_feature (7)..(388): Homolog of NCBI NO: 7705215 NR Description: alcohol dehydrogenase ADH [Lycopersicon
  misc_feature (7)..(388): Homolog of NCBI NO: 1076580 NR Description: probable alcohol dehydrogenase (EC 1.1.1.1) ADH3b

SEQ ID NO: 103189 - protein, 253 aa, Arabidopsis thaliana; identical to SEQ ID NO: 25702
  peptide (1)..(253): Ceres Seq. ID no. 13612180
  misc_feature (1)..(253): Homolog of NCBI NO: 15219882 NR Description: alcohol dehydrogenase (ADH), putative
  misc_feature (1)..(253): Homolog of NCBI NO: 18415840 NR Description: alcohol dehydrogenase (ADH), putative
  misc_feature (1)..(253): Homolog of NCBI NO: 21618210 NR Description: alcohol dehydrogenase like protein [Arabidopsis
  misc_feature (1)..(253): Homolog of NCBI NO: 11250327 NR Description: probable alcohol dehydrogenase (EC 1.1.1.1)
  misc_feature (1)..(253): Homolog of NCBI NO: 15219884 NR Description: alcohol dehydrogenase (ADH), putative
  misc_feature (1)..(253): Homolog of NCBI NO: 7705214 NR Description: alcohol dehydrogenase ADH [Lycopersicon
  misc_feature (1)..(253): Homolog of NCBI NO: 1076579 NR Description: probable alcohol dehydrogenase (EC 1.1.1.1) ADH3a
  misc_feature (1)..(251): Homolog of NCBI NO: 15238330 NR Description: alcohol dehydrogenase (ADH), putative thaliana] >gi|10177010|dbj|BAB10198.1| alcohol dehydrogenase thaliana] >gi|19698971|gb|AAL91221.1| alcohol dehydrogenase
  misc_feature (1)..(253): Homolog of NCBI NO: 7705215 NR Description: alcohol dehydrogenase ADH [Lycopersicon
  misc_feature (1)..(253): Homolog of NCBI NO: 1076580 NR Description: probable alcohol dehydrogenase (EC 1.1.1.1) ADH3b

SEQ ID NO: 103190 - DNA, 1215 bp, Arabidopsis thaliana
  misc_feature (1)..(1215): Ceres Seq. ID no. 13612181
  misc_feature: MA Experiment ID: 108501 Result: Up-regulated in Transcription
  misc_feature: MA Experiment 108501 PARAMETER Experiment Name: At_ap2_floral_buds_cDNA_P Parameter: Plant Line Value: ap2 (Ler.)
  misc_feature: MA Experiment 108501 PARAMETER Experiment Name: At_ap2_floral_buds_cDNA_P Parameter: Tissue Value: Closed Flower
  misc_feature: MA Experiment ID: 108595 Result: Up-regulated in Transcription
  misc_feature: MA Experiment 108595 PARAMETER Experiment Name: At_Ler-pi_Ovule_cDNA_P Parameter: Plant Line Value: null
  misc_feature: MA Experiment ID: 20000070 Result: Up-regulated in Transcription
  misc_feature: MA Experiment 20000070 PARAMETER Experiment Name: At_100uM_ABA_Mutants_cDNA_P Parameter: Plant Line Value: CS24
  misc_feature: MA Experiment 20000070 PARAMETER Experiment Name: At_100uM_ABA_Mutants_cDNA_P Parameter: Timepoint (hr) Value: 6
  misc_feature: MA Experiment 20000070 PARAMETER Experiment Name: At_100uM_ABA_Mutants_cDNA_P Parameter: Tissue Value: Aerial
  misc_feature: MA Experiment 20000070 PARAMETER Experiment Name: At_100uM_ABA_Mutants_cDNA_P Parameter: Treatment Value: 100uM ABA vs. No Treatment
  misc_feature: MA Experiment ID: 20000071 Result: Up-regulated in Transcription
  misc_feature: MA Experiment 20000071 PARAMETER Experiment Name: At_100uM_ABA_Mutants_cDNA_P Parameter: Plant Line Value: CS8104
  misc_feature: MA Experiment 20000071 PARAMETER Experiment Name: At_100uM_ABA_Mutants_cDNA_P Parameter: Timepoint (hr) Value: 6
  misc_feature: MA Experiment 20000071 PARAMETER Experiment Name: At_100uM_ABA_Mutants_cDNA_P Parameter: Tissue Value: Aerial
  misc_feature: MA Experiment 20000071 PARAMETER Experiment Name: At_100uM_ABA_Mutants_cDNA_P Parameter: Treatment Value: 100uM ABA vs. No Treatment
  misc_feature: MA Experiment ID: 20000117 Result: Up-regulated in Transcription
  misc_feature: MA Experiment 20000117 PARAMETER Experiment Name: At_100uM_ABA_Mutants_cDNA_P Parameter: Plant Line Value: Columbia
  misc_feature: MA Experiment 20000117 PARAMETER Experiment Name: At_100uM_ABA_Mutants_cDNA_P Parameter: Timepoint (hr) Value: 6
  misc_feature: MA Experiment 20000117 PARAMETER Experiment Name: At_100uM_ABA_Mutants_cDNA_P Parameter: Tissue Value: Aerial
  misc_feature: MA Experiment 20000117 PARAMETER Experiment Name: At_100uM_ABA_Mutants_cDNA_P Parameter: Treatment Value: 100uM ABA vs. No Treatment
  misc_feature: MA Experiment ID: 20000224 Result: Down-regulated in Transcription
aaattttgttttctctccttctctctccctctctcggtttctcaatctttcttattttttccataattctgaatttttcttttcaacaatctccggctaaaaaatgcccttagaggctgtcgtatacccgcaagatccattcggatatctctccaattgcaaagattttatgttccacgacttatactctcaagaagagttcgtagctcaagatacgaagaacaacattgataagttagggcatgaacagagctttgtggaacaaggtaaggaggacgatcatcaatggcgagactatcatcagtatcctttgttgatcccttcgttgggagaagagcttggtcttaccgccattgatgtggagagtcatcctcctccacagcaccggaggaagaggaggagaacgagaaactgcaagaacaaggaagagatcgagaaccagagaatgactcacatcgccgtcgagagaaatcgccggaaacagatgaacgagtatctggctgtgctccgttctctaatgccgtcgtcgtatgctcaaagaggagatcaagcgtcgatagtaggaggagctataaactacgtgaaggagttagagcatattttacaatctatggagccgaagagaactaggactcatgatcccaaaggagacaagactagcactagctcgttagtgggtccattcacagattttttcagcttcccacaatattctacaaagtcatcatcagatgtaccggaaagctcatcttcaccggcggagatagaggttacggtggcagaaagccatgcgaacatcaagataatgacgaagaagaaaccgaggcagcttcttaagctcataacttctttacaaagcctaaggctcactcttcttcatctcaatgtcaccactctccacaactccattctctactccatcagcgtcagggttgaagaaggaagccaactgaataccgtggacgacattgcaacagctttgaatcaaaccataaggaggattcaagaagagacataattcagcaaatagattataattaacttgttttatttttattttattttgaaataactgaaatcagttttctaattttttttttttttcactattcctctaatcctccctatgtaagttgcatttttgtctcttgtaatgaatcaatggtcataaagatctgaacaaaaaaattgaataaaagaaaatggtttaagtcg

SEQ ID NO: 103191 - protein, 304 aa, Arabidopsis thaliana; identical to SEQ ID NO: 26945
  peptide (1)..(304): Ceres Seq. ID no. 13612182
  misc_feature (113)..(164): Pfam Name: Helix-loop-helix DNA-binding domain Pfam Description: Helix-loop-helix DNA-binding domain
  misc_feature (1)..(304): Homolog of NCBI NO: 21593808 NR Description: unknown [Arabidopsis thaliana]
  misc_feature (1)..(304): Homolog of NCBI NO: 18395124 NR Description: bHLH protein family [Arabidopsis thaliana]
  misc_feature (107)..(304): Homolog of NCBI NO: 25513460 NR Description: F12K8.16 protein - Arabidopsis thaliana
  misc_feature (1)..(61): Homolog of NCBI NO: 25513460 NR Description: F12K8.16 protein - Arabidopsis thaliana
  misc_feature (1)..(304): Homolog of NCBI NO: 15218391 NR Description: bHLH protein family [Arabidopsis thaliana]
  misc_feature (80)..(217): Homolog of NCBI NO: 34902426 NR Description: Unknown protein [Oryza sativa (japonica
  misc_feature (205)..(303): Homolog of NCBI NO: 34902426 NR Description: Unknown protein [Oryza sativa (japonica
  misc_feature (95)..(208): Homolog of NCBI NO: 37533680 NR Description: putative helix-loop-helix DNA-binding protein
  misc_feature (219)..(304): Homolog of NCBI NO: 37533680 NR Description: putative helix-loop-helix DNA-binding protein
  misc_feature (1)..(277): Homolog of NCBI NO: 28558779 NR Description: helix-loop-helix-like protein [Cucumis melo]

SEQ ID NO: 103192 - protein, 282 aa, Arabidopsis thaliana; identical to SEQ ID NO: 26946
  peptide (1)..(282): Ceres Seq. ID no. 13612183
  misc_feature (91)..(142): Pfam Name: Helix-loop-helix DNA-binding domain Pfam Description: Helix-loop-helix DNA-binding domain
  misc_feature (1)..(282): Homolog of NCBI NO: 21593808 NR Description: unknown [Arabidopsis thaliana]
  misc_feature (1)..(282): Homolog of NCBI NO: 18395124 NR Description: bHLH protein family [Arabidopsis thaliana]
  misc_feature (85)..(282): Homolog of NCBI NO: 25513460 NR Description: F12K8.16 protein - Arabidopsis thaliana
  misc_feature (1)..(39): Homolog of NCBI NO: 25513460 NR Description: F12K8.16 protein - Arabidopsis thaliana
  misc_feature (1)..(282): Homolog of NCBI NO: 15218391 NR Description: bHLH protein family [Arabidopsis thaliana]
  misc_feature (58)..(195): Homolog of NCBI NO: 34902426 NR Description: Unknown protein [Oryza sativa (japonica
  misc_feature (183)..(281): Homolog of NCBI NO: 34902426 NR Description: Unknown protein [Oryza sativa (japonica
  misc_feature (73)..(186): Homolog of NCBI NO: 37533680 NR Description: putative helix-loop-helix DNA-binding protein
  misc_feature (197)..(282): Homolog of NCBI NO: 37533680 NR Description: putative helix-loop-helix DNA-binding protein
  misc_feature (1)..(255): Homolog of NCBI NO: 28558779 NR Description: helix-loop-helix-like protein [Cucumis melo]

SEQ ID NO: 103193 - protein, 190 aa, Arabidopsis thaliana; identical to SEQ ID NO: 26947
  peptide (1)..(190): Ceres Seq. ID no. 13612184
  misc_feature (1)..(50): Pfam Name: Helix-loop-helix DNA-binding domain Pfam Description: Helix-loop-helix DNA-binding domain
  misc_feature (1)..(190): Homolog of NCBI NO: 21593808 NR Description: unknown [Arabidopsis thaliana]
  misc_feature (1)..(190): Homolog of NCBI NO: 18395124 NR Description: bHLH protein family [Arabidopsis thaliana]
  misc_feature (1)..(190): Homolog of NCBI NO: 25513460 NR Description: F12K8.16 protein - Arabidopsis thaliana
  misc_feature (1)..(190): Homolog of NCBI NO: 15218391 NR Description: bHLH protein family [Arabidopsis thaliana]
  misc_feature (1)..(103): Homolog of NCBI NO: 34902426 NR Description: Unknown protein [Oryza sativa (japonica
  misc_feature (91)..(189): Homolog of NCBI NO: 34902426 NR Description: Unknown protein [Oryza sativa (japonica
  misc_feature (1)..(94): Homolog of NCBI NO: 37533680 NR Description: putative helix-loop-helix DNA-binding protein
  misc_feature (105)..(190): Homolog of NCBI NO: 37533680 NR Description: putative helix-loop-helix DNA-binding protein
  misc_feature (1)..(163): Homolog of NCBI NO: 28558779 NR Description: helix-loop-helix-like protein [Cucumis melo]
  misc_feature (79)..(168): Homolog of NCBI NO: 38346722 NR Description: OSJNBa0086O06.20 [Oryza sativa (japonica

SEQ ID NO: 103194 - DNA, 815 bp, Arabidopsis thaliana
  misc_feature (1)..(815): Ceres Seq. ID no. 13612185
  misc_feature: MA Experiment ID: 108573 Result: Up-regulated in Transcription
  misc_feature: MA Experiment 108573 PARAMETER Experiment Name: At_Drought_cDNA_P Parameter: Timepoint (hr) Value: 6
  misc_feature: MA Experiment 108573 PARAMETER Experiment Name: At_Drought_cDNA_P Parameter: Tissue Value: Aerial
  misc_feature: MA Experiment 108573 PARAMETER Experiment Name: At_Drought_cDNA_P Parameter: Treatment Value: Drought vs. No Drought
  misc_feature: MA Experiment ID: 108585 Result: Up-regulated in Transcription
  misc_feature: MA Experiment 108585 PARAMETER Experiment Name: At_5mM_NaNP_cDNA_P Parameter: Timepoint (hr) Value: 6
  misc_feature: MA Experiment 108585 PARAMETER Experiment Name: At_5mM_NaNP_cDNA_P Parameter: Tissue Value: Aerial
  misc_feature: MA Experiment 108585 PARAMETER Experiment Name: At_5mM_NaNP_cDNA_P Parameter: Treatment Value: null
  misc_feature: MA Experiment ID: 108668 Result: Up-regulated in Transcription
  misc_feature: MA Experiment 108668 PARAMETER Experiment Name: At_2mM_SA_cDNA_P Parameter: Plant Line Value: WS
  misc_feature: MA Experiment 108668 PARAMETER Experiment Name: At_2mM_SA_cDNA_P Parameter: Timepoint (hr) Value: 6
  misc_feature: MA Experiment 108668 PARAMETER Experiment Name: At_2mM_SA_cDNA_P Parameter: Treatment Value: 2mM SA vs. No Treatment
  misc_feature: MA Experiment ID: 20000182 Result: Up-regulated in Transcription
  misc_feature: MA Experiment 20000182 PARAMETER Experiment Name: At_2mM_SA_P Parameter: Age (day) Value: 14
  misc_feature: MA Experiment 20000182 PARAMETER Experiment Name: At_2mM_SA_P Parameter: Organism Value: A. thaliana
  misc_feature: MA Experiment 20000182 PARAMETER Experiment Name: At_2mM_SA_P Parameter: Plant Line Value: WS
  misc_feature: MA Experiment 20000182 PARAMETER Experiment Name: At_2mM_SA_P Parameter: Timepoint (hr) Value: 6
  misc_feature: MA Experiment 20000182 PARAMETER Experiment Name: At_2mM_SA_P Parameter: Tissue Value: Aerial
  misc_feature: MA Experiment 20000182 PARAMETER Experiment Name: At_2mM_SA_P Parameter: Treatment Value: 2mM SA vs. No Treatment
  misc_feature: MA Experiment ID: 20000184 Result: Down-regulated in Transcription
  misc_feature: MA Experiment 20000184 PARAMETER Experiment Name: At_Shoots__P Parameter: Age (day) Value: 7
  misc_feature: MA Experiment 20000184 PARAMETER Experiment Name: At_Shoots__P Parameter: Tissue Value: Shoots vs. Whole Plant
  misc_feature: MA Experiment ID: 20000185 Result: Down-regulated in Transcription
  misc_feature: MA Experiment 20000185 PARAMETER Experiment Name: At_Roots__P Parameter: Age (day) Value: 7 vs. 21
  misc_feature: MA Experiment 20000185 PARAMETER Experiment Name: At_Roots__P Parameter: Organism Value: A. thaliana
  misc_feature: MA Experiment 20000185 PARAMETER Experiment Name: At_Roots__P Parameter: Tissue Value: Roots vs. Whole Plant
  misc_feature: MA Experiment ID: 20000234 Result: Down-regulated in Transcription
  misc_feature: MA Experiment 20000234 PARAMETER Experiment Name: At_Siliques_P Parameter: Age (day) Value: 21
  misc_feature: MA Experiment 20000234 PARAMETER Experiment Name: At_Siliques_P Parameter: Organism Value: A. thaliana
  misc_feature: MA Experiment 20000234 PARAMETER Experiment Name: At_Siliques_P Parameter: Plant Line Value: WS
  misc_feature: MA Experiment 20000234 PARAMETER Experiment Name: At_Siliques_P Parameter: Tissue Value: Less Than 5mm Siliques vs. Whole Plant
  misc_feature: MA Experiment ID: 20000264 Result: Down-regulated in Transcription
  misc_feature: MA Experiment 20000264 PARAMETER Experiment Name: At_Open_Flower_P Parameter: Age (day) Value: 21
  misc_feature: MA Experiment 20000264 PARAMETER Experiment Name: At_Open_Flower_P Parameter: Plant Line Value: WS
  misc_feature: MA Experiment 20000264 PARAMETER Experiment Name: At_Open_Flower_P Parameter: Tissue Value: Open Flower vs. Whole Plant
  misc_feature: MA Experiment ID: 20000265 Result: Down-regulated in Transcription
  misc_feature: MA Experiment 20000265 PARAMETER Experiment Name: At_Open_Flower_P Parameter: Age (day) Value: 21
  misc_feature: MA Experiment 20000265 PARAMETER Experiment Name: At_Open_Flower_P Parameter: Plant Line Value: WS
  misc_feature: MA Experiment 20000265 PARAMETER Experiment Name: At_Open_Flower_P Parameter: Tissue Value: Closed Flower vs. Whole Plant
  misc_feature: MA Experiment ID: 20000286 Result: Down-regulated in Transcription
  misc_feature: MA Experiment 20000286 PARAMETER Experiment Name: At_Open_Flower_P Parameter: Age (day) Value: 21
  misc_feature: MA Experiment 20000286 PARAMETER Experiment Name: At_Open_Flower_P Parameter: Plant Line Value: WS
  misc_feature: MA Experiment 20000286 PARAMETER Experiment Name: At_Open_Flower_P Parameter: Tissue Value: Half Open vs. Whole Plant
  misc_feature: MA Experiment ID: 20000438 Result: Down-regulated in Transcription
  misc_feature: MA Experiment 20000438 PARAMETER Experiment Name: At_Shoots__P Parameter: Age (day) Value: 14
  misc_feature: MA Experiment 20000438 PARAMETER Experiment Name: At_Shoots__P Parameter: Tissue Value: Shoots vs. Whole Plant
  misc_feature: MA Experiment ID: 20000439 Result: Down-regulated in Transcription
  misc_feature: MA Experiment 20000439 PARAMETER Experiment Name: At_Roots__P Parameter: Age (day) Value: 14 vs. 21
  misc_feature: MA Experiment 20000439 PARAMETER Experiment Name: At_Roots__P Parameter: Organism Value: A. thaliana
  misc_feature: MA Experiment 20000439 PARAMETER Experiment Name: At_Roots__P Parameter: Tissue Value: Roots vs. Whole Plant
  misc_feature: MA Experiment ID: 20000495 Result: Down-regulated in Transcription
  misc_feature: MA Experiment 20000495 PARAMETER Experiment Name: At_Guard_Cells_P Parameter: Harvest Date Value: 8/2/2002
  misc_feature: MA Experiment 20000495 PARAMETER Experiment Name: At_Guard_Cells_P Parameter: Organism Value: A. thaliana
  misc_feature: MA Experiment 20000495 PARAMETER Experiment Name: At_Guard_Cells_P Parameter: Tissue Value: Guard Cells vs. Leaves
  misc_feature: MA Experiment ID: 20000794 Result: Down-regulated in Transcription
  misc_feature: MA Experiment 20000794 PARAMETER Experiment Name: At_Petals_P Parameter: Age (day) Value: 23-25 days
  misc_feature: MA Experiment 20000794 PARAMETER Experiment Name: At_Petals_P Parameter: Plant Line Value: WS
  misc_feature: MA Experiment 20000794 PARAMETER Experiment Name: At_Petals_P Parameter: Tissue Value: Petals vs. Whole plant
  misc_feature: MA Experiment ID: 20001247 Result: Up-regulated in Transcription
  misc_feature: MA Experiment 20001247 PARAMETER Experiment Name: At_Far-red-induction_P Parameter: Age (day) Value: 7
  misc_feature: MA Experiment 20001247 PARAMETER Experiment Name: At_Far-red-induction_P Parameter: Light Value: Far-red vs. White
  misc_feature: MA Experiment 20001247 PARAMETER Experiment Name: At_Far-red-induction_P Parameter: Organism Value: A. thaliana
  misc_feature: MA Experiment 20001247 PARAMETER Experiment Name: At_Far-red-induction_P Parameter: Plant Line Value: Columbia
  misc_feature: MA Experiment 20001247 PARAMETER Experiment Name: At_Far-red-induction_P Parameter: Timepoint (hr) Value: 1
  misc_feature: MA Experiment 20001247 PARAMETER Experiment Name: At_Far-red-induction_P Parameter: Tissue Value: Whole Plant
  misc_feature: MA Experiment ID: 20001451 Result: Down-regulated in Transcription
  misc_feature: MA Experiment 20001451 PARAMETER Experiment Name: At_Far-red-induction_P Parameter: Age (day) Value: 7
  misc_feature: MA Experiment 20001451 PARAMETER Experiment Name: At_Far-red-induction_P Parameter: Light Value: Far-red vs. White
  misc_feature: MA Experiment 20001451 PARAMETER Experiment Name: At_Far-red-induction_P Parameter: Organism Value: A. thaliana
  misc_feature: MA Experiment 20001451 PARAMETER Experiment Name: At_Far-red-induction_P Parameter: Plant Line Value: Columbia
  misc_feature: MA Experiment 20001451 PARAMETER Experiment Name: At_Far-red-induction_P Parameter: Timepoint (hr) Value: 24
  misc_feature: MA Experiment 20001451 PARAMETER Experiment Name: At_Far-red-induction_P Parameter: Tissue Value: Whole Plant
actctatagagcttccgaagaacgacgctgcgacgagagagactaatagcagaggaggaagacgaagacgacaatgaatgcgccaccggagaacgaactttgttcgatatgccatggccacttcaacgctccttgccaatccaattgctctcactggttctgcgggaactgcattatgctagtttggaggcatggatctacattacggccatgcaaatgtcccttgtgtcgtcgtccgataagtttgttagttccttctgaggaaacagtgagaagtcggaatgatgctacagtttctgaggttcttcatgatgttgaaacttacaaccgtgtctttggtggacagtcaagtggccttattcagaggatgcaagaccttcccttcttactccgaaggttgttgcgagaaatgatggatccacaaagaacgcttccactcgtcatcagagctcgtgtttatattgcgttgatactcagtgcgatttacataatcagcccaatagatatcattccggaaggagtcttgggggttatcggtttactagatgatcttctcatagccctgatttgtttcctccatgtcgctgctctctaccgatccgttctctattcccgtcatggtggttcgtgaacctctttgaagttttcacatcattaatcatcacagttgaagtaccatggtttacttgtttgaccctatctttttgactgttagacttaggaaacttgatttggatgataaaacgaaatggtcctttcctttattactatttcagtaacagatgcattatattggtgaaggaattgaatttctc

SEQ ID NO: 103195 - protein, 185 aa, Arabidopsis thaliana
  peptide (1)..(185): Ceres Seq. ID no. 13612186
  misc_feature (10)..(52): Pfam Name: Zinc finger, C3HC4 type (RING finger) Pfam Description: Zinc finger, C3HC4 type (RING finger)
  misc_feature (1)..(185): Homolog of NCBI NO: 18395127 NR Description: zinc finger (C3HC4-type RING finger) protein
  misc_feature (1)..(185): Homolog of NCBI NO: 21554064 NR Description: unknown [Arabidopsis thaliana]
  misc_feature (1)..(185): Homolog of NCBI NO: 18410010 NR Description: zinc finger (C3HC4-type RING finger) protein [Arabidopsis thaliana] >gi|13878189|gb|AAK44172.1|AF370357_1 protein [Arabidopsis thaliana] >gi|16323398|gb|AAL15193.1|
  misc_feature (58)..(185): Homolog of NCBI NO: 25518502 NR Description: hypothetical protein F12K8.14 - Arabidopsis >gi|6587838|gb|AAF18527.1|AC006551_13 Hypothetical protein
  misc_feature (4)..(184): Homolog of NCBI NO: 28376707 NR Description: unknown protein [Oryza sativa (japonica
  misc_feature (62)..(184): Homolog of NCBI NO: 25406151 NR Description: unknown protein T9N14.2 [imported] - Arabidopsis
  misc_feature (1)..(175): Homolog of NCBI NO: 21553438 NR Description: unknown [Arabidopsis thaliana]
  misc_feature (1)..(175): Homolog of NCBI NO: 18418331 NR Description: zinc finger (C3HC4-type RING finger) protein
  misc_feature (1)..(175): Homolog of NCBI NO: 26453304 NR Description: unknown protein [Arabidopsis thaliana]
  misc_feature (10)..(184): Homolog of NCBI NO: 33604158 NR Description: Unknown (protein for MGC:65779) [Danio rerio]
MNAPPENELCSICHGHFNAPCQSNCSHWFCGNCIMLVWRHGSTLRPCKCPLCRRPISLLVPSEETVRSRNDATVSEVLHDVETYNRVFGGQSSGLIQRMQDLPFLLRRLLREMMDPQRTLPLVIRARVYIALILSAIYIISPIDIIPEGVLGVIGLLDDLLIALICFLHVAALYRSVLYSRHGGS

SEQ ID NO: 103196 - protein, 151 aa, Arabidopsis thaliana; identical to SEQ ID NO: 26156
  peptide (1)..(151): Ceres Seq. ID no. 13612187
  misc_feature (1)..(151): Homolog of NCBI NO: 18395127 NR Description: zinc finger (C3HC4-type RING finger) protein
  misc_feature (1)..(151): Homolog of NCBI NO: 21554064 NR Description: unknown [Arabidopsis thaliana]
  misc_feature (1)..(151): Homolog of NCBI NO: 18410010 NR Description: zinc finger (C3HC4-type RING finger) protein [Arabidopsis thaliana] >gi|13878189|gb|AAK44172.1|AF370357_1 protein [Arabidopsis thaliana] >gi|16323398|gb|AAL15193.1|
  misc_feature (24)..(151): Homolog of NCBI NO: 25518502 NR Description: hypothetical protein F12K8.14 - Arabidopsis >gi|6587838|gb|AAF18527.1|AC006551_13 Hypothetical protein
  misc_feature (1)..(150): Homolog of NCBI NO: 28376707 NR Description: unknown protein [Oryza sativa (japonica
  misc_feature (28)..(150): Homolog of NCBI NO: 25406151 NR Description: unknown protein T9N14.2 [imported] - Arabidopsis
  misc_feature (1)..(141): Homolog of NCBI NO: 21553438 NR Description: unknown [Arabidopsis thaliana]
  misc_feature (1)..(141): Homolog of NCBI NO: 18418331 NR Description: zinc finger (C3HC4-type RING finger) protein
  misc_feature (1)..(141): Homolog of NCBI NO: 26453304 NR Description: unknown protein [Arabidopsis thaliana]
  misc_feature (1)..(150): Homolog of NCBI NO: 33604158 NR Description: Unknown (protein for MGC:65779) [Danio rerio]

SEQ ID NO: 103197 - DNA, 1767 bp, Arabidopsis thaliana
  misc_feature (1)..(1767): Ceres Seq. ID no. 13612188
  misc_feature: MA Experiment ID: 108461 Result: Up-regulated in Transcription
  misc_feature: MA Experiment 108461 PARAMETER Experiment Name: At_Germinating_Seeds_cDNA_P Parameter: Age (day) Value: 1 vs. 0
  misc_feature: MA Experiment 108461 PARAMETER Experiment Name: At_Germinating_Seeds_cDNA_P Parameter: Tissue Value: Germinating Seeds
  misc_feature: MA Experiment ID: 108463 Result: Up-regulated in Transcription
  misc_feature: MA Experiment 108463 PARAMETER Experiment Name: At_Germinating_Seeds_cDNA_P Parameter: Age (day) Value: 3 vs. 0
  misc_feature: MA Experiment 108463 PARAMETER Experiment Name: At_Germinating_Seeds_cDNA_P Parameter: Tissue Value: Germinating Seeds
  misc_feature: MA Experiment ID: 108464 Result: Up-regulated in Transcription
  misc_feature: MA Experiment 108464 PARAMETER Experiment Name: At_Germinating_Seeds_cDNA_P Parameter: Age (day) Value: 4 vs. 0
  misc_feature: MA Experiment 108464 PARAMETER Experiment Name: At_Germinating_Seeds_cDNA_P Parameter: Tissue Value: Germinating Seeds
  misc_feature: MA Experiment ID: 108585 Result: Up-regulated in Transcription
  misc_feature: MA Experiment 108585 PARAMETER Experiment Name: At_5mM_NaNP_cDNA_P Parameter: Timepoint (hr) Value: 6
  misc_feature: MA Experiment 108585 PARAMETER Experiment Name: At_5mM_NaNP_cDNA_P Parameter: Tissue Value: Aerial
  misc_feature: MA Experiment 108585 PARAMETER Experiment Name: At_5mM_NaNP_cDNA_P Parameter: Treatment Value: null
  misc_feature: MA Experiment ID: 20000070 Result: Down-regulated in Transcription
  misc_feature: MA Experiment 20000070 PARAMETER Experiment Name: At_100uM_ABA_Mutants_cDNA_P Parameter: Plant Line Value: CS24
  misc_feature: MA Experiment 20000070 PARAMETER Experiment Name: At_100uM_ABA_Mutants_cDNA_P Parameter: Timepoint (hr) Value: 6
  misc_feature: MA Experiment 20000070 PARAMETER Experiment Name: At_100uM_ABA_Mutants_cDNA_P Parameter: Tissue Value: Aerial
  misc_feature: MA Experiment 20000070 PARAMETER Experiment Name: At_100uM_ABA_Mutants_cDNA_P Parameter: Treatment Value: 100uM ABA vs. No Treatment
  misc_feature: MA Experiment ID: 20000071 Result: Down-regulated in Transcription
  misc_feature: MA Experiment 20000071 PARAMETER Experiment Name: At_100uM_ABA_Mutants_cDNA_P Parameter: Plant Line Value: CS8104
  misc_feature: MA Experiment 20000071 PARAMETER Experiment Name: At_100uM_ABA_Mutants_cDNA_P Parameter: Timepoint (hr) Value: 6
  misc_feature: MA Experiment 20000071 PARAMETER Experiment Name: At_100uM_ABA_Mutants_cDNA_P Parameter: Tissue Value: Aerial
  misc_feature: MA Experiment 20000071 PARAMETER Experiment Name: At_100uM_ABA_Mutants_cDNA_P Parameter: Treatment Value: 100uM ABA vs. No Treatment
  misc_feature: MA Experiment ID: 20000089 Result: Down-regulated in Transcription
  misc_feature: MA Experiment ID: 20000117 Result: Down-regulated in Transcription
  misc_feature: MA Experiment 20000117 PARAMETER Experiment Name: At_100uM_ABA_Mutants_cDNA_P Parameter: Plant Line Value: Columbia
  misc_feature: MA Experiment 20000117 PARAMETER Experiment Name: At_100uM_ABA_Mutants_cDNA_P Parameter: Timepoint (hr) Value: 6
  misc_feature: MA Experiment 20000117 PARAMETER Experiment Name: At_100uM_ABA_Mutants_cDNA_P Parameter: Tissue Value: Aerial
  misc_feature: MA Experiment 20000117 PARAMETER Experiment Name: At_100uM_ABA_Mutants_cDNA_P Parameter: Treatment Value: 100uM ABA vs. No Treatment
  misc_feature: MA Experiment ID: 20000306 Result: Up-regulated in Transcription
  misc_feature: MA Experiment 20000306 PARAMETER Experiment Name: At_Germinating_Seeds_Sub_P Parameter: Age (hr) Value: 6 vs. 0
  misc_feature: MA Experiment 20000306 PARAMETER Experiment Name: At_Germinating_Seeds_Sub_P Parameter: Organism Value: A. thaliana
  misc_feature: MA Experiment 20000306 PARAMETER Experiment Name: At_Germinating_Seeds_Sub_P Parameter: Plant Line Value: WS
  misc_feature: MA Experiment 20000306 PARAMETER Experiment Name: At_Germinating_Seeds_Sub_P Parameter: Tissue Value: Germinating Seeds
  misc_feature: MA Experiment ID: 20000307 Result: Up-regulated in Transcription
  misc_feature: MA Experiment 20000307 PARAMETER Experiment Name: At_Germinating_Seeds_Sub_P Parameter: Age (hr) Value: 24 vs. 0
  misc_feature: MA Experiment 20000307 PARAMETER Experiment Name: At_Germinating_Seeds_Sub_P Parameter: Organism Value: A. thaliana
  misc_feature: MA Experiment 20000307 PARAMETER Experiment Name: At_Germinating_Seeds_Sub_P Parameter: Plant Line Value: WS
  misc_feature: MA Experiment 20000307 PARAMETER Experiment Name: At_Germinating_Seeds_Sub_P Parameter: Tissue Value: Germinating Seeds
  misc_feature: MA Experiment ID: 20000327 Result: Down-regulated in Transcription
  misc_feature: MA Experiment 20000327 PARAMETER Experiment Name: At_42deg_Heat_Sub_P Parameter: Age (day) Value: 14
  misc_feature: MA Experiment 20000327 PARAMETER Experiment Name: At_42deg_Heat_Sub_P Parameter: Organism Value: A. thaliana
  misc_feature: MA Experiment 20000327 PARAMETER Experiment Name: At_42deg_Heat_Sub_P Parameter: Plant Line Value: WS
  misc_feature: MA Experiment 20000327 PARAMETER Experiment Name: At_42deg_Heat_Sub_P Parameter: Temperature (deg C) Value: 42 vs. 22
  misc_feature: MA Experiment 20000327 PARAMETER Experiment Name: At_42deg_Heat_Sub_P Parameter: Timepoint (hr) Value: 1
  misc_feature: MA Experiment 20000327 PARAMETER Experiment Name: At_42deg_Heat_Sub_P Parameter: Tissue Value: Aerial
  misc_feature: MA Experiment ID: 20000328 Result: Down-regulated in Transcription
  misc_feature: MA Experiment 20000328 PARAMETER Experiment Name: At_42deg_Heat_Sub_P Parameter: Age (day) Value: 14
  misc_feature: MA Experiment 20000328 PARAMETER Experiment Name: At_42deg_Heat_Sub_P Parameter: Organism Value: A. thaliana
  misc_feature: MA Experiment 20000328 PARAMETER Experiment Name: At_42deg_Heat_Sub_P Parameter: Plant Line Value: WS
  misc_feature: MA Experiment 20000328 PARAMETER Experiment Name: At_42deg_Heat_Sub_P Parameter: Temperature (deg C) Value: 42 vs. 22
  misc_feature: MA Experiment 20000328 PARAMETER Experiment Name: At_42deg_Heat_Sub_P Parameter: Timepoint (hr) Value: 6
  misc_feature: MA Experiment 20000328 PARAMETER Experiment Name: At_42deg_Heat_Sub_P Parameter: Tissue Value: Aerial
  misc_feature: MA Experiment ID: 20000440 Result: Down-regulated in Transcription
  misc_feature: MA Experiment 20000440 PARAMETER Experiment Name: At_Closed-Flower__Sub_P Parameter: Tissue Value: Closed Flower vs. Whole Plant
atatttatcacatttttcttcaccggctgatttgtttgcccggagattatctctccgtcgtaattaagatctatacacacagaaacacaaagttaaagaatcctcatggaaggagtaaactcttcaagctctatatccgacctagacgaattggctcggttacttgaccggccgagggtaaatattgaacggaaaagatcgtttgacgagaggtccttcagcgaaatgggaatcttcgacaacgttaattctcccggaggatgggaaactccggtgtcttcggctagaaactcgtttgagccacatcctatggttgcagaggcttgggatgctttgagacgatcattggtttactttcgtggccaaccggttggtactatcgctgcttatgaccatgctactgaggaagtcttgaattatgatcaggttttcgtaagagactttgttccaagtgcactagcttttctcatgaacggagaaccagacatagttaaaaactttctcctcaagacaattcaaatccaaggaagggagaaaagaatagaccgattcaagctcggtgaaggcgcaatgccggctagtttcaaggtcattcacgacccgatcaaggaaaccgactctatcaatgctgactttggcgagagcgcgattggaagagtggctccggtggactcaggtttctggtggatcattctccttagagcctacacaaaatccaccggagacacttctctagctgaaacatctgaatgtcaaaagggaatgagactcattctctctctttgtctctccgaaggtttcgatactttccctaccttactttgtgctgatggctgctccatgatcgatcgaagaatgggggtttacgggtatccgatagagatccaagctctcttcttcatggctcttagatcagcaatgtcgatgctaaagcacgacgcggaaggtaaagagttcatggagaggatagtgaagcggctacacgcgcttagcttccacatgagaagttatttctggctcgattttcagcagctcaacgacatttaccgttacaaaacagaagagtactcgcacacagcggttaacaagttcaacgttatccctgactcgatccctgagtgggtcttcgatttcatgcctctacgtggcggttactttataggaaacgttagtccagctcgtatggattttaggtggttcgctctaggcaactgcgtagcgatccttgcttctttagccacgcctgagcagtcggcttcaatcatggacttgatagaggaacggtgggaggagttggtcggagagatgccggttaaaatttgtcatccggcaatcgagagccatgagtggaggattgttaccggttgcgaccctaagaatactcgttggagttaccataacggtggttcttggccagtattgttgtggctattaacagctgcatgcataaagacgggacggccacaaatagcaagacgggccatagacctggcggaagcacggctgttgaaggatggttggccggagtactacgacgggaaatcaggaaggttcatcggaaaacaggcgaggaagtttcagacatggtctatcgccggttacttggtcgccaagatgttgttggaagatccttctcatcttggaatgatctcattggaagaagacaaacagactaaacctgtcattaagagatcttattcttggacttgataatttgttgtcaattcttttgagaagagcaggctaaaatttgatctaaattttgtt

SEQ ID NO: 103198 - protein, 534 aa, Arabidopsis thaliana
  peptide (1)..(534): Ceres Seq. ID no. 13612189
  misc_feature (61)..(528): Pfam Name: Plant neutral invertase Pfam Description: Plant neutral invertase
  misc_feature (1)..(534): Homolog of NCBI NO: 18395144 NR Description: invertase -related [Arabidopsis thaliana]
  misc_feature (1)..(534): Homolog of NCBI NO: 21594008 NR Description: putative invertase [Arabidopsis thaliana]
  misc_feature (41)..(534): Homolog of NCBI NO: 7487359 NR Description: hypothetical protein T22J18.18 - Arabidopsis >gi|3287693|gb|AAC25521.1|AAC25521 Similar to LIM17 gene product from the genome of Synechocystis sp. gb|D90916. [Arabidopsis
  misc_feature (1)..(534): Homolog of NCBI NO: 18413234 NR Description: neutral invertase like protein [Arabidopsis
  misc_feature (1)..(534): Homolog of NCBI NO: 25354737 NR Description: neutral invertase like protein [imported] - thaliana >gi|7267646|emb|CAB78074.1| neutral invertase like
  misc_feature (1)..(533): Homolog of NCBI NO: 30693221 NR Description: invertase -related [Arabidopsis thaliana]
  misc_feature (41)..(534): Homolog of NCBI NO: 15218303 NR Description: neutral invertase -related [Arabidopsis thaliana]
  misc_feature (41)..(534): Homolog of NCBI NO: 38344939 NR Description: OSJNBa0084A10.15 [Oryza sativa (japonica
  misc_feature (12)..(52): Homolog of NCBI NO: 38344939 NR Description: OSJNBa0084A10.15 [Oryza sativa (japonica
  misc_feature (10)..(534): Homolog of NCBI NO: 15236209 NR Description: invertase - like protein [Arabidopsis thaliana]
MEGVNSSSSISDLDELARLLDRPRVNIERKRSFDERSFSEMGIFDNVNSPGGWETPVSSARNSFEPHPMVAEAWDALRRSLVYFRGQPVGTIAAYDHATEEVLNYDQVFVRDFVPSALAFLMNGEPDIVKNFLLKTIQIQGREKRIDRFKLGEGAMPASFKVIHDPIKETDSINADFGESAIGRVAPVDSGFWWIILLRAYTKSTGDTSLAETSECQKGMRLILSLCLSEGFDTFPTLLCADGCSMIDRRMGVYGYPIEIQALFFMALRSAMSMLKHDAEGKEFMERIVKRLHALSFHMRSYFWLDFQQLNDIYRYKTEEYSHTAVNKFNVIPDSIPEWVFDFMPLRGGYFIGNVSPARMDFRWFALGNCVAILASLATPEQSASIMDLIEERWEELVGEMPVKICHPAIESHEWRIVTGCDPKNTRWSYHNGGSWPVLLWLLTAACIKTGRPQIARRAIDLAEARLLKDGWPEYYDGKSGRFIGKQARKFQTWSIAGYLVAKMLLEDPSHLGMISLEEDKQTKPVIKRSYSWT

SEQ ID NO: 103199 - protein, 494 aa, Arabidopsis thaliana
  peptide (1)..(494): Ceres Seq. ID no. 13612190
  misc_feature (21)..(488): Pfam Name: Plant neutral invertase Pfam Description: Plant neutral invertase
  misc_feature (1)..(494): Homolog of NCBI NO: 18395144 NR Description: invertase -related [Arabidopsis thaliana]
  misc_feature (1)..(494): Homolog of NCBI NO: 21594008 NR Description: putative invertase [Arabidopsis thaliana]
  misc_feature (1)..(494): Homolog of NCBI NO: 7487359 NR Description: hypothetical protein T22J18.18 - Arabidopsis >gi|3287693|gb|AAC25521.1|AAC25521 Similar to LIM17 gene product from the genome of Synechocystis sp. gb|D90916. [Arabidopsis
  misc_feature (1)..(494): Homolog of NCBI NO: 18413234 NR Description: neutral invertase like protein [Arabidopsis
  misc_feature (1)..(494): Homolog of NCBI NO: 25354737 NR Description: neutral invertase like protein [imported] - thaliana >gi|7267646|emb|CAB78074.1| neutral invertase like
  misc_feature (1)..(493): Homolog of NCBI NO: 30693221 NR Description: invertase -related [Arabidopsis thaliana]
  misc_feature (1)..(494): Homolog of NCBI NO: 15218303 NR Description: neutral invertase -related [Arabidopsis thaliana]
  misc_feature (1)..(494): Homolog of NCBI NO: 38344939 NR Description: OSJNBa0084A10.15 [Oryza sativa (japonica
  misc_feature (1)..(12): Homolog of NCBI NO: 38344939 NR Description: OSJNBa0084A10.15 [Oryza sativa (japonica
  misc_feature (1)..(494): Homolog of NCBI NO: 15236209 NR Description: invertase - like protein [Arabidopsis thaliana]
MGIFDNVNSPGGWETPVSSARNSFEPHPMVAEAWDALRRSLVYFRGQPVGTIAAYDHATEEVLNYDQVFVRDFVPSALAFLMNGEPDIVKNFLLKTIQIQGREKRIDRFKLGEGAMPASFKVIHDPIKETDSINADFGESAIGRVAPVDSGFWWIILLRAYTKSTGDTSLAETSECQKGMRLILSLCLSEGFDTFPTLLCADGCSMIDRRMGVYGYPIEIQALFFMALRSAMSMLKHDAEGKEFMERIVKRLHALSFHMRSYFWLDFQQLNDIYRYKTEEYSHTAVNKFNVIPDSIPEWVFDFMPLRGGYFIGNVSPARMDFRWFALGNCVAILASLATPEQSASIMDLIEERWEELVGEMPVKICHPAIESHEWRIVTGCDPKNTRWSYHNGGSWPVLLWLLTAACIKTGRPQIARRAIDLAEARLLKDGWPEYYDGKSGRFIGKQARKFQTWSIAGYLVAKMLLEDPSHLGMISLEEDKQTKPVIKRSYSWT

SEQ ID NO: 103200 - protein, 466 aa, Arabidopsis thaliana
  peptide (1)..(466): Ceres Seq. ID no. 13612191
  misc_feature (1)..(460): Pfam Name: Plant neutral invertase Pfam Description: Plant neutral invertase
  misc_feature (1)..(466): Homolog of NCBI NO: 18395144 NR Description: invertase -related [Arabidopsis thaliana]
  misc_feature (1)..(466): Homolog of NCBI NO: 21594008 NR Description: putative invertase [Arabidopsis thaliana]
  misc_feature (1)..(466): Homolog of NCBI NO: 7487359 NR Description: hypothetical protein T22J18.18 - Arabidopsis >gi|3287693|gb|AAC25521.1|AAC25521 Similar to LIM17 gene product from the genome of Synechocystis sp. gb|D90916. [Arabidopsis
  misc_feature (1)..(466): Homolog of NCBI NO: 18413234 NR Description: neutral invertase like protein [Arabidopsis
  misc_feature (1)..(466): Homolog of NCBI NO: 25354737 NR Description: neutral invertase like protein [imported] - thaliana >gi|7267646|emb|CAB78074.1| neutral invertase like
  misc_feature (1)..(465): Homolog of NCBI NO: 30693221 NR Description: invertase -related [Arabidopsis thaliana]
  misc_feature (1)..(466): Homolog of NCBI NO: 15218303 NR Description: neutral invertase -related [Arabidopsis thaliana]
  misc_feature (1)..(466): Homolog of NCBI NO: 38344939 NR Description: OSJNBa0084A10.15 [Oryza sativa (japonica
  misc_feature (1)..(466): Homolog of NCBI NO: 15236209 NR Description: invertase - like protein [Arabidopsis thaliana]
  misc_feature (1)..(452): Homolog of NCBI NO: 27948558 NR Description: invertase [Oryza sativa (indica cultivar-group)]
MVAEAWDALRRSLVYFRGQPVGTIAAYDHATEEVLNYDQVFVRDFVPSALAFLMNGEPDIVKNFLLKTIQIQGREKRIDRFKLGEGAMPASFKVIHDPIKETDSINADFGESAIGRVAPVDSGFWWIILLRAYTKSTGDTSLAETSECQKGMRLILSLCLSEGFDTFPTLLCADGCSMIDRRMGVYGYPIEIQALFFMALRSAMSMLKHDAEGKEFMERIVKRLHALSFHMRSYFWLDFQQLNDIYRYKTEEYSHTAVNKFNVIPDSIPEWVFDFMPLRGGYFIGNVSPARMDFRWFALGNCVAILASLATPEQSASIMDLIEERWEELVGEMPVKICHPAIESHEWRIVTGCDPKNTRWSYHNGGSWPVLLWLLTAACIKTGRPQIARRAIDLAEARLLKDGWPEYYDGKSGRFIGKQARKFQTWSIAGYLVAKMLLEDPSHLGMISLEEDKQTKPVIKRSYSWT

SEQ ID NO: 103201 - DNA, 1131 bp, Arabidopsis thaliana
  misc_feature (1)..(1131): Ceres Seq. ID no. 13612192
  misc_feature: MA Experiment ID: 108435 Result: Down-regulated in Transcription
  misc_feature: MA Experiment 108435 PARAMETER Experiment Name: At_stm_Mutants_cDNA_P Parameter: Plant Line Value: wt Landsburg vs stm
  misc_feature: MA Experiment 108435 PARAMETER Experiment Name: At_stm_Mutants_cDNA_P Parameter: Tissue Value: Shoot Apical Meristem Region
  misc_feature: MA Experiment ID: 108488 Result: Up-regulated in Transcription
  misc_feature: MA Experiment ID: 108595 Result: Down-regulated in Transcription
  misc_feature: MA Experiment 108595 PARAMETER Experiment Name: At_Ler-pi_Ovule_cDNA_P Parameter: Plant Line Value: null
  misc_feature: MA Experiment ID: 20001905 Result: Down-regulated in Transcription
  misc_feature: MA Experiment 20001905 PARAMETER Experiment Name: At_Drought_Reproduction_P Parameter: Age (day) Value: 40
  misc_feature: MA Experiment 20001905 PARAMETER Experiment Name: At_Drought_Reproduction_P Parameter: Organism Value: A. thaliana
  misc_feature: MA Experiment 20001905 PARAMETER Experiment Name: At_Drought_Reproduction_P Parameter: Plant Line Value: WS
  misc_feature: MA Experiment 20001905 PARAMETER Experiment Name: At_Drought_Reproduction_P Parameter: Timepoint (day) Value: 10
  misc_feature: MA Experiment 20001905 PARAMETER Experiment Name: At_Drought_Reproduction_P Parameter: Tissue Value: Rosettes
  misc_feature: MA Experiment 20001905 PARAMETER Experiment Name: At_Drought_Reproduction_P Parameter: Treatment Value: Drought vs. No Drought
acacatacaagactctcctcacagaacgatttagatttaatcgggaaaaagttcagtcagtgacactaatgttcgaatcgaacatggttcttcaaacactatcttcttcttctcctccaattcaccgtctctatcttcaccattctcagattctcccttcttctgggtcacccagcaagatttctcttcagatacatggaaggactttggccattcgatcttttcatgattatgtctttgcagaaatttctgctagaggtttaccggctttgaacaaagcttccttgaagaagctaccaatcaaaggatctacctttctgctggggcagagcttgttgatggtttctgctcacccacagttggcagcagcagcagaaatcataaagcctgaaccgatttacgaagttggagagttatttgaacttagtattcagctttcttacttgctgttactactggggttgcttggagttggtactttctatgtgatccgtcaagtacttgtacgcagagaactagacctctccgctaaagaattgcaggagcaagtaaggagcggagatgcaagtgcaacagagctctttgagcttggtgcagtgatgttgagaaggaagttttatcctgcagccaacaagtttttgcaacaagctatccagaaatgggacggtgatgatcaagatcttgctcaggtctataacgctcttggagtgagttatgtacgagaggataaacttgacaaaggaattgctcagtttgaaatggcggtgaagctgcaacccggttatgtaacagcttggaacaaccttggggatgcttatgagaagaagaaggagttgcctttggcattgaatgcgtttgaagaagttttgttgtttgatccaaacaataaggtggctcggcctcggcgagatgcgttgaaggatcgcgtgaagctttataaaggtgttgtggctgttaagtctaagaaacggtgacggctcaaacaagatgcaaactctgaaccaagaaccgttggtctctctcccccttgtgtatttttttggtttggtaatatgtatggagattttgtgttaatatgaaaatgaaactttgttgttttttgtaaccaataaaatcagatgtttaaaactt

SEQ ID NO: 103202 - protein, 323 aa, Arabidopsis thaliana
  peptide (1)..(323): Ceres Seq. ID no. 13612193
  misc_feature (262)..(295): Pfam Name: TPR Domain Pfam Description: TPR Domain
  misc_feature (23)..(323): Homolog of NCBI NO: 30687988 NR Description: tetratricopeptide repeat (TPR)-containing protein
  misc_feature (23)..(323): Homolog of NCBI NO: 21537104 NR Description: unknown [Arabidopsis thaliana]
  misc_feature (23)..(323): Homolog of NCBI NO: 22329737 NR Description: tetratricopeptide repeat (TPR)-containing protein thaliana] >gi|15294176|gb|AAK95265.1|AF410279_1 [Arabidopsis thaliana] >gi|24797054|gb|AAN64539.1|
  misc_feature (28)..(323): Homolog of NCBI NO: 7487355 NR Description: hypothetical protein T22J18.13 - Arabidopsis >gi|3287688|gb|AAC25516.1|AAC25516 Contains similarity to ycf37 product gb|1001425 from Synechocystis sp. genome gb|D63999. gene.
  misc_feature (119)..(323): Homolog of NCBI NO: 37535090 NR Description: putative stress inducible protein [Oryza sativa
  misc_feature (119)..(230): Homolog of NCBI NO: 37535100 NR Description: unknown protein [Oryza sativa (japonica
  misc_feature (119)..(230): Homolog of NCBI NO: 38636894 NR Description: stress inducible protein-like [Oryza sativa
  misc_feature (140)..(309): Homolog of NCBI NO: 22299949 NR Description: photosystem I assembly related protein
  misc_feature (142)..(309): Homolog of NCBI NO: 23042213 NR Description: hypothetical protein [Trichodesmium erythraeum
  misc_feature (142)..(306): Homolog of NCBI NO: 23129236 NR Description: hypothetical protein [Nostoc punctiforme]
TYKTLLTERFRFNREKVQSVTLMFESNMVLQTLSSSSPPIHRLYLHHSQILPSSGSPSKISLQIHGRTLAIRSFHDYVFAEISARGLPALNKASLKKLPIKGSTFLLGQSLLMVSAHPQLAAAAEIIKPEPIYEVGELFELSIQLSYLLLLLGLLGVGTFYVIRQVLVRRELDLSAKELQEQVRSGDASATELFELGAVMLRRKFYPAANKFLQQAIQKWDGDDQDLAQVYNALGVSYVREDKLDKGIAQFEMAVKLQPGYVTAWNNLGDAYEKKKELPLALNAFEEVLLFDPNNKVARPRRDALKDRVKLYKGVVAVKSKKR

SEQ ID NO: 103203 - protein, 301 aa, Arabidopsis thaliana
  peptide (1)..(301): Ceres Seq. ID no. 13612194
  misc_feature (240)..(273): Pfam Name: TPR Domain Pfam Description: TPR Domain
  misc_feature (1)..(301): Homolog of NCBI NO: 30687988 NR Description: tetratricopeptide repeat (TPR)-containing protein
  misc_feature (1)..(301): Homolog of NCBI NO: 21537104 NR Description: unknown [Arabidopsis thaliana]
  misc_feature (1)..(301): Homolog of NCBI NO: 22329737 NR Description: tetratricopeptide repeat (TPR)-containing protein thaliana] >gi|15294176|gb|AAK95265.1|AF410279_1 [Arabidopsis thaliana] >gi|24797054|gb|AAN64539.1|
  misc_feature (6)..(301): Homolog of NCBI NO: 7487355 NR Description: hypothetical protein T22J18.13 - Arabidopsis >gi|3287688|gb|AAC25516.1|AAC25516 Contains similarity to ycf37 product gb|1001425 from Synechocystis sp. genome gb|D63999. gene.
  misc_feature (97)..(301): Homolog of NCBI NO: 37535090 NR Description: putative stress inducible protein [Oryza sativa
  misc_feature (97)..(208): Homolog of NCBI NO: 37535100 NR Description: unknown protein [Oryza sativa (japonica
  misc_feature (97)..(208): Homolog of NCBI NO: 38636894 NR Description: stress inducible protein-like [Oryza sativa
  misc_feature (118)..(287): Homolog of NCBI NO: 22299949 NR Description: photosystem I assembly related protein
  misc_feature (120)..(287): Homolog of NCBI NO: 23042213 NR Description: hypothetical protein [Trichodesmium erythraeum
  misc_feature (120)..(284): Homolog of NCBI NO: 23129236 NR Description: hypothetical protein [Nostoc punctiforme]
MFESNMVLQTLSSSSPPIHRLYLHHSQILPSSGSPSKISLQIHGRTLAIRSFHDYVFAEISARGLPALNKASLKKLPIKGSTFLLGQSLLMVSAHPQLAAAAEIIKPEPIYEVGELFELSIQLSYLLLLLGLLGVGTFYVIRQVLVRRELDLSAKELQEQVRSGDASATELFELGAVMLRRKFYPAANKFLQQAIQKWDGDDQDLAQVYNALGVSYVREDKLDKGIAQFEMAVKLQPGYVTAWNNLGDAYEKKKELPLALNAFEEVLLFDPNNKVARPRRDALKDRVKLYKGVVAVKSKKR

SEQ ID NO: 103204 - protein, 296 aa, Arabidopsis thaliana
  peptide (1)..(296): Ceres Seq. ID no. 13612195
  misc_feature (235)..(268): Pfam Name: TPR Domain Pfam Description: TPR Domain
  misc_feature (1)..(296): Homolog of NCBI NO: 30687988 NR Description: tetratricopeptide repeat (TPR)-containing protein
  misc_feature (1)..(296): Homolog of NCBI NO: 21537104 NR Description: unknown [Arabidopsis thaliana]
  misc_feature (1)..(296): Homolog of NCBI NO: 22329737 NR Description: tetratricopeptide repeat (TPR)-containing protein thaliana] >gi|15294176|gb|AAK95265.1|AF410279_1 [Arabidopsis thaliana] >gi|24797054|gb|AAN64539.1|
  misc_feature (1)..(296): Homolog of NCBI NO: 7487355 NR Description: hypothetical protein T22J18.13 - Arabidopsis >gi|3287688|gb|AAC25516.1|AAC25516 Contains similarity to ycf37 product gb|1001425 from Synechocystis sp. genome gb|D63999. gene.
  misc_feature (92)..(296): Homolog of NCBI NO: 37535090 NR Description: putative stress inducible protein [Oryza sativa
  misc_feature (92)..(203): Homolog of NCBI NO: 37535100 NR Description: unknown protein [Oryza sativa (japonica
  misc_feature (92)..(203): Homolog of NCBI NO: 38636894 NR Description: stress inducible protein-like [Oryza sativa
  misc_feature (113)..(282): Homolog of NCBI NO: 22299949 NR Description: photosystem I assembly related protein
  misc_feature (115)..(282): Homolog of NCBI NO: 23042213 NR Description: hypothetical protein [Trichodesmium erythraeum
  misc_feature (115)..(279): Homolog of NCBI NO: 23129236 NR Description: hypothetical protein [Nostoc punctiforme]
MVLQTLSSSSPPIHRLYLHHSQILPSSGSPSKISLQIHGRTLAIRSFHDYVFAEISARGLPALNKASLKKLPIKGSTFLLGQSLLMVSAHPQLAAAAEIIKPEPIYEVGELFELSIQLSYLLLLLGLLGVGTFYVIRQVLVRRELDLSAKELQEQVRSGDASATELFELGAVMLRRKFYPAANKFLQQAIQKWDGDDQDLAQVYNALGVSYVREDKLDKGIAQFEMAVKLQPGYVTAWNNLGDAYEKKKELPLALNAFEEVLLFDPNNKVARPRRDALKDRVKLYKGVVAVKSKKR

SEQ ID NO: 103205 - DNA, 1366 bp, Arabidopsis thaliana
  misc_feature (1)..(1366): Ceres Seq. ID no. 13612200
  misc_feature: MA Experiment ID: 20000495 Result: Up-regulated in Transcription
  misc_feature: MA Experiment 20000495 PARAMETER Experiment Name: At_Guard_Cells_P Parameter: Harvest Date Value: 8/2/2002
  misc_feature: MA Experiment 20000495 PARAMETER Experiment Name: At_Guard_Cells_P Parameter: Organism Value: A. thaliana
  misc_feature: MA Experiment 20000495 PARAMETER Experiment Name: At_Guard_Cells_P Parameter: Tissue Value: Guard Cells vs. Leaves
atggtttcaacctccgtccgaccaattccggtgcagctaagaaccagagatagagagatagagatgcggaggatcaattcactgtacggaagaattggtctcctaaaacgagtacccgagaaatctacgaagcaagctcatacatttctcgcatctctctccttctctacggaaggtgcttatggcggtgacggtgagtttcagcagaacagctccaaagtcaagatctttgaccgagacctcaagcgaatacatcgtgatcgagcggcgtggctttctcgccaaaaaaacgattcttttgttgacgctgttgcagataatctacttgatcgcttagaggattgtaagaagagttttcccactgcattttgtttgggaggatctcttggtgctgttaagagattactacgtggtcgcggtgggattgagaagcttatcatgatggatacttcatatgacatgattaagtcatgtagagatgctcaagacgattcactcgataactccattgaaacctcttactttgttggtgatgaagagtttctgccagtcaaagagagttcggttgatttgatcattagttcgttggggcttcactggacaaatgatcttcctggatccatgatacagtgcaagctagcactgaagccggatggcttatttttagcagcaattcttggtggagaaaccttaaaggagctgagaatagcatgcactttggctcacatggagcgggaaggagggattagtcctcggctatcacctttggcacaggttagggacgcagggaatctgttgaccagggcgggttttagtcttcctggtgttgatgttgatgaatatgtagttaaatacaagagagcgatggatcttatagagcatcttcgtgcgatgggtgaaaccaatgctcttctcgagagaaacaagattttgaatcgtgaaactgctgttgccacggcagccatatatgactccatgtttgccacagaggacggcactatacccgctacttttcaggtgatttacatgacaggatggagagaacattcgtctcacccgcaggccaaacgaagaggttcagccaccgtatccttcacggatctccaaaagcaatttggcggacaatcttgatggaatgattgaagaagagaaacattcaataagcagagactttacaaatgacacttgagagagaaatcagtgacttaagctataaggtacttggaggaactcttgtagatttgtcggagtctttcactgggcgaaagcatcacaattaggacgcctgctttcgcccatgtatttcgtatcgaataatagctgatcagaaacatatttgtattttacaaaaatattacgaatactt

SEQ ID NO: 103206 - protein, 376 aa, Arabidopsis thaliana
  peptide (1)..(376): Ceres Seq. ID no. 13612201
  misc_feature (22)..(376): Homolog of NCBI NO: 15219953 NR Description: expressed protein [Arabidopsis thaliana]
  misc_feature (22)..(339): Homolog of NCBI NO: 6648045 NR Description: Hypothetical protein At1g22800
  misc_feature (71)..(363): Homolog of NCBI NO: 22968351 NR Description: hypothetical protein [Rhodospirillum rubrum]
  misc_feature (74)..(370): Homolog of NCBI NO: 40018642 NR Description: chromosome 20 open reading frame 7 isoform 1
  misc_feature (74)..(370): Homolog of NCBI NO: 34858816 NR Description: similar to dJ842G6.1.1 (novel protein) [Rattus
  misc_feature (76)..(368): Homolog of NCBI NO: 19922210 NR Description: CG8067-PA [Drosophila melanogaster]
  misc_feature (74)..(370): Homolog of NCBI NO: 31201829 NR Description: ENSANGP00000018272 [Anopheles gambiae]
  misc_feature (160)..(370): Homolog of NCBI NO: 13559240 NR Description: dJ842G6.1.1 (novel protein) [Homo sapiens]
  misc_feature (76)..(371): Homolog of NCBI NO: 23502732 NR Description: conserved hypothetical protein [Brucella suis >gi|23348748|gb|AAN30774.1|AE014478_8 conserved hypothetical
  misc_feature (76)..(371): Homolog of NCBI NO: 17986466 NR Description: BIOTIN SYNTHESIS PROTEIN BIOC [Brucella
MVSTSVRPIPVQLRTRDREIEMRRINSLYGRIGLLKRVPEKSTKQAHTFLASLSFSTEGAYGGDGEFQQNSSKVKIFDRDLKRIHRDRAAWLSRQKNDSFVDAVADNLLDRLEDCKKSFPTAFCLGGSLGAVKRLLRGRGGIEKLIMMDTSYDMIKSCRDAQDDSLDNSIETSYFVGDEEFLPVKESSVDLIISSLGLHWTNDLPGSMIQCKLALKPDGLFLAAILGGETLKELRIACTLAHMEREGGISPRLSPLAQVRDAGNLLTRAGFSLPGVDVDEYVVKYKRAMDLIEHLRAMGETNALLERNKILNRETAVATAAIYDSMFATEDGTIPATFQVIYMTGWREHSSHPQAKRRGSATVSFTDLQKQFGGQS

SEQ ID NO: 103207 - protein, 355 aa, Arabidopsis thaliana
  peptide (1)..(355): Ceres Seq. ID no. 13612202
  misc_feature (1)..(355): Homolog of NCBI NO: 15219953 NR Description: expressed protein [Arabidopsis thaliana]
  misc_feature (1)..(318): Homolog of NCBI NO: 6648045 NR Description: Hypothetical protein At1g22800
  misc_feature (50)..(342): Homolog of NCBI NO: 22968351 NR Description: hypothetical protein [Rhodospirillum rubrum]
  misc_feature (53)..(349): Homolog of NCBI NO: 40018642 NR Description: chromosome 20 open reading frame 7 isoform 1
  misc_feature (53)..(349): Homolog of NCBI NO: 34858816 NR Description: similar to dJ842G6.1.1 (novel protein) [Rattus
  misc_feature (55)..(347): Homolog of NCBI NO: 19922210 NR Description: CG8067-PA [Drosophila melanogaster]
  misc_feature (53)..(349): Homolog of NCBI NO: 31201829 NR Description: ENSANGP00000018272 [Anopheles gambiae]
  misc_feature (139)..(349): Homolog of NCBI NO: 13559240 NR Description: dJ842G6.1.1 (novel protein) [Homo sapiens]
  misc_feature (55)..(350): Homolog of NCBI NO: 23502732 NR Description: conserved hypothetical protein [Brucella suis >gi|23348748|gb|AAN30774.1|AE014478_8 conserved hypothetical
  misc_feature (55)..(350): Homolog of NCBI NO: 17986466 NR Description: BIOTIN SYNTHESIS PROTEIN BIOC [Brucella
MRRINSLYGRIGLLKRVPEKSTKQAHTFLASLSFSTEGAYGGDGEFQQNSSKVKIFDRDLKRIHRDRAAWLSRQKNDSFVDAVADNLLDRLEDCKKSFPTAFCLGGSLGAVKRLLRGRGGIEKLIMMDTSYDMIKSCRDAQDDSLDNSIETSYFVGDEEFLPVKESSVDLIISSLGLHWTNDLPGSMIQCKLALKPDGLFLAAILGGETLKELRIACTLAHMEREGGISPRLSPLAQVRDAGNLLTRAGFSLPGVDVDEYVVKYKRAMDLIEHLRAMGETNALLERNKILNRETAVATAAIYDSMFATEDGTIPATFQVIYMTGWREHSSHPQAKRRGSATVSFTDLQKQFGGQS

SEQ ID NO: 103208 - protein, 230 aa, Arabidopsis thaliana
  peptide (1)..(230): Ceres Seq. ID no. 13612203
  misc_feature (1)..(230): Homolog of NCBI NO: 15219953 NR Description: expressed protein [Arabidopsis thaliana]
  misc_feature (1)..(193): Homolog of NCBI NO: 6648045 NR Description: Hypothetical protein At1g22800
  misc_feature (1)..(217): Homolog of NCBI NO: 22968351 NR Description: hypothetical protein [Rhodospirillum rubrum]
  misc_feature (1)..(224): Homolog of NCBI NO: 40018642 NR Description: chromosome 20 open reading frame 7 isoform 1
  misc_feature (1)..(224): Homolog of NCBI NO: 34858816 NR Description: similar to dJ842G6.1.1 (novel protein) [Rattus
  misc_feature (1)..(222): Homolog of NCBI NO: 19922210 NR Description: CG8067-PA [Drosophila melanogaster]
  misc_feature (1)..(224): Homolog of NCBI NO: 31201829 NR Description: ENSANGP00000018272 [Anopheles gambiae]
  misc_feature (14)..(224): Homolog of NCBI NO: 13559240 NR Description: dJ842G6.1.1 (novel protein) [Homo sapiens]
  misc_feature (1)..(225): Homolog of NCBI NO: 23502732 NR Description: conserved hypothetical protein [Brucella suis >gi|23348748|gb|AAN30774.1|AE014478_8 conserved hypothetical
  misc_feature (1)..(225): Homolog of NCBI NO: 17986466 NR Description: BIOTIN SYNTHESIS PROTEIN BIOC [Brucella
MMDTSYDMIKSCRDAQDDSLDNSIETSYFVGDEEFLPVKESSVDLIISSLGLHWTNDLPGSMIQCKLALKPDGLFLAAILGGETLKELRIACTLAHMEREGGISPRLSPLAQVRDAGNLLTRAGFSLPGVDVDEYVVKYKRAMDLIEHLRAMGETNALLERNKILNRETAVATAAIYDSMFATEDGTIPATFQVIYMTGWREHSSHPQAKRRGSATVSFTDLQKQFGGQS

SEQ ID NO: 103209 - DNA, 563 bp, Arabidopsis thaliana
  misc_feature (1)..(563): Ceres Seq. ID no. 13612234
  misc_feature: MA Experiment ID: 20000227 Result: Down-regulated in Transcription
  misc_feature: MA Experiment 20000227 PARAMETER Experiment Name: At_Root-Tips-vs-Tops_P Parameter: Tissue Value: Root Tips vs. Root Tops
  misc_feature: MA Experiment ID: 20000264 Result: Up-regulated in Transcription
  misc_feature: MA Experiment 20000264 PARAMETER Experiment Name: At_Open_Flower_P Parameter: Age (day) Value: 21
  misc_feature: MA Experiment 20000264 PARAMETER Experiment Name: At_Open_Flower_P Parameter: Plant Line Value: WS
  misc_feature: MA Experiment 20000264 PARAMETER Experiment Name: At_Open_Flower_P Parameter: Tissue Value: Open Flower vs. Whole Plant
  misc_feature: MA Experiment ID: 20001451 Result: Up-regulated in Transcription
  misc_feature: MA Experiment 20001451 PARAMETER Experiment Name: At_Far-red-induction_P Parameter: Age (day) Value: 7
  misc_feature: MA Experiment 20001451 PARAMETER Experiment Name: At_Far-red-induction_P Parameter: Light Value: Far-red vs. White
  misc_feature: MA Experiment 20001451 PARAMETER Experiment Name: At_Far-red-induction_P Parameter: Organism Value: A. thaliana
  misc_feature: MA Experiment 20001451 PARAMETER Experiment Name: At_Far-red-induction_P Parameter: Plant Line Value: Columbia
  misc_feature: MA Experiment 20001451 PARAMETER Experiment Name: At_Far-red-induction_P Parameter: Timepoint (hr) Value: 24
  misc_feature: MA Experiment 20001451 PARAMETER Experiment Name: At_Far-red-induction_P Parameter: Tissue Value: Whole Plant
  misc_feature: MA Experiment ID: 20001905 Result: Up-regulated in Transcription
  misc_feature: MA Experiment 20001905 PARAMETER Experiment Name: At_Drought_Reproduction_P Parameter: Age (day) Value: 40
  misc_feature: MA Experiment 20001905 PARAMETER Experiment Name: At_Drought_Reproduction_P Parameter: Organism Value: A. thaliana
  misc_feature: MA Experiment 20001905 PARAMETER Experiment Name: At_Drought_Reproduction_P Parameter: Plant Line Value: WS
  misc_feature: MA Experiment 20001905 PARAMETER Experiment Name: At_Drought_Reproduction_P Parameter: Timepoint (day) Value: 10
  misc_feature: MA Experiment 20001905 PARAMETER Experiment Name: At_Drought_Reproduction_P Parameter: Tissue Value: Rosettes
  misc_feature: MA Experiment 20001905 PARAMETER Experiment Name: At_Drought_Reproduction_P Parameter: Treatment Value: Drought vs. No Drought
  misc_feature: MA Experiment ID: 20001910 Result: Up-regulated in Transcription
  misc_feature: MA Experiment 20001910 PARAMETER Experiment Name: At_Drought_Reproduction_P Parameter: Age (day) Value: 37
  misc_feature: MA Experiment 20001910 PARAMETER Experiment Name: At_Drought_Reproduction_P Parameter: Organism Value: A. thaliana
  misc_feature: MA Experiment 20001910 PARAMETER Experiment Name: At_Drought_Reproduction_P Parameter: Plant Line Value: WS
  misc_feature: MA Experiment 20001910 PARAMETER Experiment Name: At_Drought_Reproduction_P Parameter: Timepoint (day) Value: 7
  misc_feature: MA Experiment 20001910 PARAMETER Experiment Name: At_Drought_Reproduction_P Parameter: Tissue Value: Flowers
  misc_feature: MA Experiment 20001910 PARAMETER Experiment Name: At_Drought_Reproduction_P Parameter: Treatment Value: Drought vs. No Drought
aaagatgttgctttacaagaaaaagaatcagattgttaaaggaaacagaatcttgatcagcgtaacgtttcttggtagtgctggtccgatccggttcgttgctaatgaaggtgatcttgttgcatctgtgattgatactgctttgaaatgttatgctcgtgaaggtcgtcttcctattcttggatctgatttcaacgattttgttttttattgtccaatggttggacctggagctttgagtccatgggaagcaattgggtcggtgggagtgaggaactttatgttgtgtaagaagaaaccagaggagaagaaggttgaggaagataagggaagatcgaattttccgattaatggagctagaaaaggagctggtggaagttttaaggcttggattaataaatctttaagacttaaagtgactacccattagagagactacttatatgttgtcttctctgtttctttgaatgctcatgtttggtttgtgtctttgttcttttgatcttcttattttatgaacttttgatttgttttttttgtttcttatgatggtttcaggaaat

SEQ ID NO: 103210 - protein, 142 aa, Arabidopsis thaliana
  peptide (1)..(142): Ceres Seq. ID no. 13612235
  misc_feature (2)..(142): Homolog of NCBI NO: 15220659 NR Description: expressed protein [Arabidopsis thaliana] unknown protein [Arabidopsis thaliana]
  misc_feature (2)..(142): Homolog of NCBI NO: 25372856 NR Description: T26J12.8 protein - Arabidopsis thaliana
  misc_feature (2)..(142): Homolog of NCBI NO: 18409673 NR Description: expressed protein [Arabidopsis thaliana]
  misc_feature (2)..(122): Homolog of NCBI NO: 16226338 NR Description: At1g70780/F5A18_4 [Arabidopsis thaliana]
  misc_feature (1)..(142): Homolog of NCBI NO: 13359433 NR Description: putative senescence-associated protein [Pisum
  misc_feature (13)..(106): Homolog of NCBI NO: 15240321 NR Description: expressed protein [Arabidopsis thaliana] gb|AAC00605.1~gene_id:K12B20.20~similar to unknown protein
  misc_feature (13)..(106): Homolog of NCBI NO: 21553538 NR Description: unknown [Arabidopsis thaliana]
  misc_feature (13)..(106): Homolog of NCBI NO: 9757983 NR Description: gb|AAC00605.1~gene_id:K12B20.21~similar to
  misc_feature (13)..(99): Homolog of NCBI NO: 10279678 NR Description: hypothetical protein [Catharanthus roseus]
KMLLYKKKNQIVKGNRILISVTFLGSAGPIRFVANEGDLVASVIDTALKCYAREGRLPILGSDFNDFVFYCPMVGPGALSPWEAIGSVGVRNFMLCKKKPEEKKVEEDKGRSNFPINGARKGAGGSFKAWINKSLRLKVTTH

SEQ ID NO: 103211 - protein, 141 aa, Arabidopsis thaliana; identical to SEQ ID NO: 42344
  peptide (1)..(141): Ceres Seq. ID no. 13612236
  misc_feature (1)..(141): Homolog of NCBI NO: 15220659 NR Description: expressed protein [Arabidopsis thaliana] unknown protein [Arabidopsis thaliana]
  misc_feature (1)..(141): Homolog of NCBI NO: 25372856 NR Description: T26J12.8 protein - Arabidopsis thaliana
  misc_feature (1)..(141): Homolog of NCBI NO: 18409673 NR Description: expressed protein [Arabidopsis thaliana]
  misc_feature (1)..(121): Homolog of NCBI NO: 16226338 NR Description: At1g70780/F5A18_4 [Arabidopsis thaliana]
  misc_feature (1)..(141): Homolog of NCBI NO: 13359433 NR Description: putative senescence-associated protein [Pisum
  misc_feature (12)..(105): Homolog of NCBI NO: 15240321 NR Description: expressed protein [Arabidopsis thaliana] gb|AAC00605.1~gene_id:K12B20.20~similar to unknown protein
  misc_feature (12)..(105): Homolog of NCBI NO: 21553538 NR Description: unknown [Arabidopsis thaliana]
  misc_feature (12)..(105): Homolog of NCBI NO: 9757983 NR Description: gb|AAC00605.1~gene_id:K12B20.21~similar to
  misc_feature (12)..(98): Homolog of NCBI NO: 10279678 NR Description: hypothetical protein [Catharanthus roseus]

SEQ ID NO: 103212 - DNA, 817 bp, Arabidopsis thaliana
  misc_feature (1)..(817): Ceres Seq. ID no. 13612237
  misc_feature: MA Experiment ID: 108434 Result: Down-regulated in Transcription
  misc_feature: MA Experiment 108434 PARAMETER Experiment Name: At_Root_Tips_cDNA_P Parameter: Tissue Value: Root Tips
  misc_feature: MA Experiment ID: 108464 Result: Up-regulated in Transcription
  misc_feature: MA Experiment 108464 PARAMETER Experiment Name: At_Germinating_Seeds_cDNA_P Parameter: Age (day) Value: 4 vs. 0
  misc_feature: MA Experiment 108464 PARAMETER Experiment Name: At_Germinating_Seeds_cDNA_P Parameter: Tissue Value: Germinating Seeds
  misc_feature: MA Experiment ID: 108501 Result: Up-regulated in Transcription
  misc_feature: MA Experiment 108501 PARAMETER Experiment Name: At_ap2_floral_buds_cDNA_P Parameter: Plant Line Value: ap2 (Ler.)
  misc_feature: MA Experiment 108501 PARAMETER Experiment Name: At_ap2_floral_buds_cDNA_P Parameter: Tissue Value: Closed Flower
  misc_feature: MA Experiment ID: 108668 Result: Down-regulated in Transcription
  misc_feature: MA Experiment 108668 PARAMETER Experiment Name: At_2mM_SA_cDNA_P Parameter: Plant Line Value: WS
  misc_feature: MA Experiment 108668 PARAMETER Experiment Name: At_2mM_SA_cDNA_P Parameter: Timepoint (hr) Value: 6
  misc_feature: MA Experiment 108668 PARAMETER Experiment Name: At_2mM_SA_cDNA_P Parameter: Treatment Value: 2mM SA vs. No Treatment
  misc_feature: MA Experiment ID: 20000069 Result: Down-regulated in Transcription
  misc_feature: MA Experiment 20000069 PARAMETER Experiment Name: At_100uM_ABA_Mutants_cDNA_P Parameter: Plant Line Value: CS23
  misc_feature: MA Experiment 20000069 PARAMETER Experiment Name: At_100uM_ABA_Mutants_cDNA_P Parameter: Timepoint (hr) Value: 6
  misc_feature: MA Experiment 20000069 PARAMETER Experiment Name: At_100uM_ABA_Mutants_cDNA_P Parameter: Tissue Value: Aerial
  misc_feature: MA Experiment 20000069 PARAMETER Experiment Name: At_100uM_ABA_Mutants_cDNA_P Parameter: Treatment Value: 100uM ABA vs. No Treatment
  misc_feature: MA Experiment ID: 20000070 Result: Down-regulated in Transcription
  misc_feature: MA Experiment 20000070 PARAMETER Experiment Name: At_100uM_ABA_Mutants_cDNA_P Parameter: Plant Line Value: CS24
  misc_feature: MA Experiment 20000070 PARAMETER Experiment Name: At_100uM_ABA_Mutants_cDNA_P Parameter: Timepoint (hr) Value: 6
  misc_feature: MA Experiment 20000070 PARAMETER Experiment Name: At_100uM_ABA_Mutants_cDNA_P Parameter: Tissue Value: Aerial
  misc_feature: MA Experiment 20000070 PARAMETER Experiment Name: At_100uM_ABA_Mutants_cDNA_P Parameter: Treatment Value: 100uM ABA vs. No Treatment
  misc_feature: MA Experiment ID: 20000071 Result: Down-regulated in Transcription
  misc_feature: MA Experiment 20000071 PARAMETER Experiment Name: At_100uM_ABA_Mutants_cDNA_P Parameter: Plant Line Value: CS8104
  misc_feature: MA Experiment 20000071 PARAMETER Experiment Name: At_100uM_ABA_Mutants_cDNA_P Parameter: Timepoint (hr) Value: 6
  misc_feature: MA Experiment 20000071 PARAMETER Experiment Name: At_100uM_ABA_Mutants_cDNA_P Parameter: Tissue Value: Aerial
  misc_feature: MA Experiment 20000071 PARAMETER Experiment Name: At_100uM_ABA_Mutants_cDNA_P Parameter: Treatment Value: 100uM ABA vs. No Treatment
  misc_feature: MA Experiment ID: 20000086 Result: Down-regulated in Transcription
  misc_feature: MA Experiment 20000086 PARAMETER Experiment Name: At_100uM_ABA_Mutants_cDNA_P Parameter: Plant Line Value: CS22
  misc_feature: MA Experiment 20000086 PARAMETER Experiment Name: At_100uM_ABA_Mutants_cDNA_P Parameter: Timepoint (hr) Value: 6
  misc_feature: MA Experiment 20000086 PARAMETER Experiment Name: At_100uM_ABA_Mutants_cDNA_P Parameter: Tissue Value: Aerial
  misc_feature: MA Experiment 20000086 PARAMETER Experiment Name: At_100uM_ABA_Mutants_cDNA_P Parameter: Treatment Value: 100uM ABA vs. No Treatment
  misc_feature: MA Experiment ID: 20000087 Result: Down-regulated in Transcription
  misc_feature: MA Experiment 20000087 PARAMETER Experiment Name: At_100uM_ABA_Mutants_cDNA_P Parameter: Plant Line Value: WS
  misc_feature: MA Experiment 20000087 PARAMETER Experiment Name: At_100uM_ABA_Mutants_cDNA_P Parameter: Timepoint (hr) Value: 6
  misc_feature: MA Experiment 20000087 PARAMETER Experiment Name: At_100uM_ABA_Mutants_cDNA_P Parameter: Tissue Value: Aerial
  misc_feature: MA Experiment 20000087 PARAMETER Experiment Name: At_100uM_ABA_Mutants_cDNA_P Parameter: Treatment Value: 100uM ABA vs. No Treatment
  misc_feature: MA Experiment ID: 20000089 Result: Down-regulated in Transcription
  misc_feature: MA Experiment ID: 20000090 Result: Down-regulated in Transcription
  misc_feature: MA Experiment ID: 20000117 Result: Down-regulated in Transcription
  misc_feature: MA Experiment 20000117 PARAMETER Experiment Name: At_100uM_ABA_Mutants_cDNA_P Parameter: Plant Line Value: Columbia
  misc_feature: MA Experiment 20000117 PARAMETER Experiment Name: At_100uM_ABA_Mutants_cDNA_P Parameter: Timepoint (hr) Value: 6
  misc_feature: MA Experiment 20000117 PARAMETER Experiment Name: At_100uM_ABA_Mutants_cDNA_P Parameter: Tissue Value: Aerial
  misc_feature: MA Experiment 20000117 PARAMETER Experiment Name: At_100uM_ABA_Mutants_cDNA_P Parameter: Treatment Value: 100uM ABA vs. No Treatment
  misc_feature: MA Experiment ID: 20000182 Result: Down-regulated in Transcription
  misc_feature: MA Experiment 20000182 PARAMETER Experiment Name: At_2mM_SA_P Parameter: Age (day) Value: 14
  misc_feature: MA Experiment 20000182 PARAMETER Experiment Name: At_2mM_SA_P Parameter: Organism Value: A. thaliana
  misc_feature: MA Experiment 20000182 PARAMETER Experiment Name: At_2mM_SA_P Parameter: Plant Line Value: WS
  misc_feature: MA Experiment 20000182 PARAMETER Experiment Name: At_2mM_SA_P Parameter: Timepoint (hr) Value: 6
  misc_feature: MA Experiment 20000182 PARAMETER Experiment Name: At_2mM_SA_P Parameter: Tissue Value: Aerial
  misc_feature: MA Experiment 20000182 PARAMETER Experiment Name: At_2mM_SA_P Parameter: Treatment Value: 2mM SA vs. No Treatment
  misc_feature: MA Experiment ID: 20000184 Result: Up-regulated in Transcription
  misc_feature: MA Experiment 20000184 PARAMETER Experiment Name: At_Shoots__P Parameter: Age (day) Value: 7
  misc_feature: MA Experiment 20000184 PARAMETER Experiment Name: At_Shoots__P Parameter: Tissue Value: Shoots vs. Whole Plant
  misc_feature: MA Experiment ID: 20000185 Result: Up-regulated in Transcription
  misc_feature: MA Experiment 20000185 PARAMETER Experiment Name: At_Roots__P Parameter: Age (day) Value: 7 vs. 21
  misc_feature: MA Experiment 20000185 PARAMETER Experiment Name: At_Roots__P Parameter: Organism Value: A. thaliana
  misc_feature: MA Experiment 20000185 PARAMETER Experiment Name: At_Roots__P Parameter: Tissue Value: Roots vs. Whole Plant
  misc_feature: MA Experiment ID: 20000224 Result: Up-regulated in Transcription
  misc_feature: MA Experiment ID: 20000234 Result: Up-regulated in Transcription
  misc_feature: MA Experiment 20000234 PARAMETER Experiment Name: At_Siliques_P Parameter: Age (day) Value: 21
  misc_feature: MA Experiment 20000234 PARAMETER Experiment Name: At_Siliques_P Parameter: Organism Value: A. thaliana
  misc_feature: MA Experiment 20000234 PARAMETER Experiment Name: At_Siliques_P Parameter: Plant Line Value: WS
  misc_feature: MA Experiment 20000234 PARAMETER Experiment Name: At_Siliques_P Parameter: Tissue Value: Less Than 5mm Siliques vs. Whole Plant
  misc_feature: MA Experiment ID: 20000235 Result: Up-regulated in Transcription
  misc_feature: MA Experiment 20000235 PARAMETER Experiment Name: At_Siliques_P Parameter: Age (day) Value: 21
  misc_feature: MA Experiment 20000235 PARAMETER Experiment Name: At_Siliques_P Parameter: Organism Value: A. thaliana
  misc_feature: MA Experiment 20000235 PARAMETER Experiment Name: At_Siliques_P Parameter: Plant Line Value: WS
  misc_feature: MA Experiment 20000235 PARAMETER Experiment Name: At_Siliques_P Parameter: Tissue Value: 5-10mm Siliques vs. Whole Plant
  misc_feature: MA Experiment ID: 20000264 Result: Up-regulated in Transcription
  misc_feature: MA Experiment 20000264 PARAMETER Experiment Name: At_Open_Flower_P Parameter: Age (day) Value: 21
  misc_feature: MA Experiment 20000264 PARAMETER Experiment Name: At_Open_Flower_P Parameter: Plant Line Value: WS
  misc_feature: MA Experiment 20000264 PARAMETER Experiment Name: At_Open_Flower_P Parameter: Tissue Value: Open Flower vs. Whole Plant
  misc_feature: MA Experiment ID: 20000265 Result: Up-regulated in Transcription
  misc_feature: MA Experiment 20000265 PARAMETER Experiment Name: At_Open_Flower_P Parameter: Age (day) Value: 21
  misc_feature: MA Experiment 20000265 PARAMETER Experiment Name: At_Open_Flower_P Parameter: Plant Line Value: WS
  misc_feature: MA Experiment 20000265 PARAMETER Experiment Name: At_Open_Flower_P Parameter: Tissue Value: Closed Flower vs. Whole Plant
  misc_feature: MA Experiment ID: 20000286 Result: Up-regulated in Transcription
  misc_feature: MA Experiment 20000286 PARAMETER Experiment Name: At_Open_Flower_P Parameter: Age (day) Value: 21
  misc_feature: MA Experiment 20000286 PARAMETER Experiment Name: At_Open_Flower_P Parameter: Plant Line Value: WS
  misc_feature: MA Experiment 20000286 PARAMETER Experiment Name: At_Open_Flower_P Parameter: Tissue Value: Half Open vs. Whole Plant
  misc_feature: MA Experiment ID: 20000456 Result: Down-regulated in Transcription
  misc_feature: MA Experiment 20000456 PARAMETER Experiment Name: At_100uM_BA_P Parameter: Age (day) Value: 14
  misc_feature: MA Experiment 20000456 PARAMETER Experiment Name: At_100uM_BA_P Parameter: Organism Value: A. thaliana
  misc_feature: MA Experiment 20000456 PARAMETER Experiment Name: At_100uM_BA_P Parameter: Plant Line Value: WS
  misc_feature: MA Experiment 20000456 PARAMETER Experiment Name: At_100uM_BA_P Parameter: Timepoint (hr) Value: 6
  misc_feature: MA Experiment 20000456 PARAMETER Experiment Name: At_100uM_BA_P Parameter: Tissue Value: Aerial
  misc_feature: MA Experiment 20000456 PARAMETER Experiment Name: At_100uM_BA_P Parameter: Treatment Value: 100uM BA vs. No Treatment
  misc_feature: MA Experiment ID: 20000527 Result: Up-regulated in Transcription
  misc_feature: MA Experiment 20000527 PARAMETER Experiment Name: At_10percent_PEG_P Parameter: Age (day) Value: 20
  misc_feature: MA Experiment 20000527 PARAMETER Experiment Name: At_10percent_PEG_P Parameter: Organism Value: A. thaliana
  misc_feature: MA Experiment 20000527 PARAMETER Experiment Name: At_10percent_PEG_P Parameter: Plant Line Value: WS
  misc_feature: MA Experiment 20000527 PARAMETER Experiment Name: At_10percent_PEG_P Parameter: Timepoint (day) Value: 20
  misc_feature: MA Experiment 20000527 PARAMETER Experiment Name: At_10percent_PEG_P Parameter: Tissue Value: Whole Plant
  misc_feature: MA Experiment 20000527 PARAMETER Experiment Name: At_10percent_PEG_P Parameter: Treatment Value: 10percent PEG vs. No Treatment
  misc_feature: MA Experiment ID: 20000573 Result: Down-regulated in Transcription
  misc_feature: MA Experiment 20000573 PARAMETER Experiment Name: At_100uM_ABA_Mutants__P Parameter: Organism Value: A. thaliana
  misc_feature: MA Experiment 20000573 PARAMETER Experiment Name: At_100uM_ABA_Mutants__P Parameter: Plant Line Value: CS22 vs. Ler wt
  misc_feature: MA Experiment 20000573 PARAMETER Experiment Name: At_100uM_ABA_Mutants__P Parameter: Timepoint (hr) Value: N/A
  misc_feature: MA Experiment 20000573 PARAMETER Experiment Name: At_100uM_ABA_Mutants__P Parameter: Tissue Value: Whole Plant
  misc_feature: MA Experiment 20000573 PARAMETER Experiment Name: At_100uM_ABA_Mutants__P Parameter: Treatment Value: None
  misc_feature: MA Experiment ID: 20000574 Result: Down-regulated in Transcription
  misc_feature: MA Experiment 20000574 PARAMETER Experiment Name: At_100uM_ABA_Mutants__P Parameter: Organism Value: A. thaliana
  misc_feature: MA Experiment 20000574 PARAMETER Experiment Name: At_100uM_ABA_Mutants__P Parameter: Plant Line Value: CS23 vs. Ler wt
  misc_feature: MA Experiment 20000574 PARAMETER Experiment Name: At_100uM_ABA_Mutants__P Parameter: Timepoint (hr) Value: N/A
  misc_feature: MA Experiment 20000574 PARAMETER Experiment Name: At_100uM_ABA_Mutants__P Parameter: Tissue Value: Whole Plant
  misc_feature: MA Experiment 20000574 PARAMETER Experiment Name: At_100uM_ABA_Mutants__P Parameter: Treatment Value: None
  misc_feature: MA Experiment ID: 20000794 Result: Up-regulated in Transcription
  misc_feature: MA Experiment 20000794 PARAMETER Experiment Name: At_Petals_P Parameter: Age (day) Value: 23-25 days
  misc_feature: MA Experiment 20000794 PARAMETER Experiment Name: At_Petals_P Parameter: Plant Line Value: WS
  misc_feature: MA Experiment 20000794 PARAMETER Experiment Name: At_Petals_P Parameter: Tissue Value: Petals vs. Whole plant
  misc_feature: MA Experiment ID: 20001247 Result: Down-regulated in Transcription
  misc_feature: MA Experiment 20001247 PARAMETER Experiment Name: At_Far-red-induction_P Parameter: Age (day) Value: 7
  misc_feature: MA Experiment 20001247 PARAMETER Experiment Name: At_Far-red-induction_P Parameter: Light Value: Far-red vs. White
  misc_feature: MA Experiment 20001247 PARAMETER Experiment Name: At_Far-red-induction_P Parameter: Organism Value: A. thaliana
  misc_feature: MA Experiment 20001247 PARAMETER Experiment Name: At_Far-red-induction_P Parameter: Plant Line Value: Columbia
  misc_feature: MA Experiment 20001247 PARAMETER Experiment Name: At_Far-red-induction_P Parameter: Timepoint (hr) Value: 1
  misc_feature: MA Experiment 20001247 PARAMETER Experiment Name: At_Far-red-induction_P Parameter: Tissue Value: Whole Plant
  misc_feature: MA Experiment ID: 20001248 Result: Down-regulated in Transcription
  misc_feature: MA Experiment 20001248 PARAMETER Experiment Name: At_Far-red-induction_P Parameter: Age (day) Value: 7
  misc_feature: MA Experiment 20001248 PARAMETER Experiment Name: At_Far-red-induction_P Parameter: Light Value: Far-red vs. White
  misc_feature: MA Experiment 20001248 PARAMETER Experiment Name: At_Far-red-induction_P Parameter: Organism Value: A. thaliana
  misc_feature: MA Experiment 20001248 PARAMETER Experiment Name: At_Far-red-induction_P Parameter: Plant Line Value: Columbia
  misc_feature: MA Experiment 20001248 PARAMETER Experiment Name: At_Far-red-induction_P Parameter: Timepoint (hr) Value: 4
  misc_feature: MA Experiment 20001248 PARAMETER Experiment Name: At_Far-red-induction_P Parameter: Tissue Value: Whole Plant
  misc_feature: MA Experiment ID: 20001451 Result: Down-regulated in Transcription
  misc_feature: MA Experiment 20001451 PARAMETER Experiment Name: At_Far-red-induction_P Parameter: Age (day) Value: 7
  misc_feature: MA Experiment 20001451 PARAMETER Experiment Name: At_Far-red-induction_P Parameter: Light Value: Far-red vs. White
  misc_feature: MA Experiment 20001451 PARAMETER Experiment Name: At_Far-red-induction_P Parameter: Organism Value: A. thaliana
  misc_feature: MA Experiment 20001451 PARAMETER Experiment Name: At_Far-red-induction_P Parameter: Plant Line Value: Columbia
  misc_feature: MA Experiment 20001451 PARAMETER Experiment Name: At_Far-red-induction_P Parameter: Timepoint (hr) Value: 24
  misc_feature: MA Experiment 20001451 PARAMETER Experiment Name: At_Far-red-induction_P Parameter: Tissue Value: Whole Plant
  misc_feature: MA Experiment ID: 20001555 Result: Down-regulated in Transcription
  misc_feature: MA Experiment 20001555 PARAMETER Experiment Name: At_Drought_Soil_Dry_P Parameter: Age (day) Value: 24
  misc_feature: MA Experiment 20001555 PARAMETER Experiment Name: At_Drought_Soil_Dry_P Parameter: Organism Value: A. thaliana
  misc_feature: MA Experiment 20001555 PARAMETER Experiment Name: At_Drought_Soil_Dry_P Parameter: Plant Line Value: WS
  misc_feature: MA Experiment 20001555 PARAMETER Experiment Name: At_Drought_Soil_Dry_P Parameter: Post Timepoint (hr) Value: None
  misc_feature: MA Experiment 20001555 PARAMETER Experiment Name: At_Drought_Soil_Dry_P Parameter: Post-Treatment Value: None
  misc_feature: MA Experiment 20001555 PARAMETER Experiment Name: At_Drought_Soil_Dry_P Parameter: Timepoint (day) Value: 10
  misc_feature: MA Experiment 20001555 PARAMETER Experiment Name: At_Drought_Soil_Dry_P Parameter: Treatment Value: Drought vs. No Drought
  misc_feature: MA Experiment ID: 20001556 Result: Down-regulated in Transcription
  misc_feature: MA Experiment 20001556 PARAMETER Experiment Name: At_Drought_Soil_Dry_P Parameter: Age (day) Value: 26
  misc_feature: MA Experiment 20001556 PARAMETER Experiment Name: At_Drought_Soil_Dry_P Parameter: Organism Value: A. thaliana
  misc_feature: MA Experiment 20001556 PARAMETER Experiment Name: At_Drought_Soil_Dry_P Parameter: Plant Line Value: WS
  misc_feature: MA Experiment 20001556 PARAMETER Experiment Name: At_Drought_Soil_Dry_P Parameter: Post Timepoint (hr) Value: None
  misc_feature: MA Experiment 20001556 PARAMETER Experiment Name: At_Drought_Soil_Dry_P Parameter: Post-Treatment Value: None
  misc_feature: MA Experiment 20001556 PARAMETER Experiment Name: At_Drought_Soil_Dry_P Parameter: Timepoint (day) Value: 12
  misc_feature: MA Experiment 20001556 PARAMETER Experiment Name: At_Drought_Soil_Dry_P Parameter: Treatment Value: Drought vs. No Drought
  misc_feature: MA Experiment ID: 20001558 Result: Up-regulated in Transcription
  misc_feature: MA Experiment 20001558 PARAMETER Experiment Name: At_Drought_Soil_Dry_P Parameter: Age (day) Value: 27
  misc_feature: MA Experiment 20001558 PARAMETER Experiment Name: At_Drought_Soil_Dry_P Parameter: Organism Value: A. thaliana
  misc_feature: MA Experiment 20001558 PARAMETER Experiment Name: At_Drought_Soil_Dry_P Parameter: Plant Line Value: WS
  misc_feature: MA Experiment 20001558 PARAMETER Experiment Name: At_Drought_Soil_Dry_P Parameter: Post Timepoint (hr) Value: 6
  misc_feature: MA Experiment 20001558 PARAMETER Experiment Name: At_Drought_Soil_Dry_P Parameter: Post-Treatment Value: Re-Water vs. No Drought
  misc_feature: MA Experiment 20001558 PARAMETER Experiment Name: At_Drought_Soil_Dry_P Parameter: Timepoint (day) Value: 13
  misc_feature: MA Experiment 20001558 PARAMETER Experiment Name: At_Drought_Soil_Dry_P Parameter: Treatment Value: Drought vs. No Drought
  misc_feature: MA Experiment ID: 20001560 Result: Up-regulated in Transcription
  misc_feature: MA Experiment 20001560 PARAMETER Experiment Name: At_Drought_Soil_Dry_P Parameter: Age (day) Value: 28
  misc_feature: MA Experiment 20001560 PARAMETER Experiment Name: At_Drought_Soil_Dry_P Parameter: Organism Value: A. thaliana
  misc_feature: MA Experiment 20001560 PARAMETER Experiment Name: At_Drought_Soil_Dry_P Parameter: Plant Line Value: WS
  misc_feature: MA Experiment 20001560 PARAMETER Experiment Name: At_Drought_Soil_Dry_P Parameter: Post Timepoint (hr) Value: None
  misc_feature: MA Experiment 20001560 PARAMETER Experiment Name: At_Drought_Soil_Dry_P Parameter: Post-Treatment Value: None
  misc_feature: MA Experiment 20001560 PARAMETER Experiment Name: At_Drought_Soil_Dry_P Parameter: Timepoint (day) Value: 14
  misc_feature: MA Experiment 20001560 PARAMETER Experiment Name: At_Drought_Soil_Dry_P Parameter: Treatment Value: Drought vs. No Drought
atccataacccaaaaagagtcacttccgtgtcacaagaaaccatgaaactttctcttcatcaaccacttctcttcttcttcttagccagcgtcctcccattaatcctgaccgtccattctcaatcagacgactcagatttcatccgtactagctgcaacaccacattataccctgacctatgcttctcttctctttcctccttctctagctctgttcacaacgatccagccctcttggctcgagccgccatctccgtcactctcaccaagactctcgacttagcctcatacctcgccaatatcaccactctccagccagagagcaacgaagatggtgctcaccacccaaccgcagccgctgtttttcacgactgcttcgacaatcttaaagacgcggtcgaagaaatgaaaggctcgatgaaacagatgagggagctggtctcgactggctcgctcgagtccttcaggttccaaatgagtaacgtgcagacgtggctcagtgcggctttaactgatgaggagacttgtacggacggatttaaagacattcacgatgagccgaggaaggatgacatatgcgcacgggtcgatgacgttaaaaagatgactagtaatgcgttggctctagttaatcgatgtgttgataaggccatacattgatcattttatcattattcactaaatattcttcttcttttttttcttacttgaaaaagaagttattgtttaaatgtttttggttatcacgcgtgcatgatagagatataataagataagcctgtttgtgattggctgtaatgaaatagtgatattatgt

SEQ ID NO: 103213 - protein, 219 aa, Arabidopsis thaliana
  peptide (1)..(219): Ceres Seq. ID no. 13612238
  misc_feature (15)..(219): Homolog of NCBI NO: 15220674 NR Description: pectinesterase - related [Arabidopsis thaliana]
  misc_feature (15)..(219): Homolog of NCBI NO: 21555465 NR Description: unknown [Arabidopsis thaliana]
  misc_feature (17)..(218): Homolog of NCBI NO: 21554277 NR Description: unknown [Arabidopsis thaliana]
  misc_feature (17)..(218): Homolog of NCBI NO: 18409660 NR Description: pectinesterase - related [Arabidopsis thaliana]
  misc_feature (23)..(218): Homolog of NCBI NO: 25406069 NR Description: hypothetical protein F5A18.10 [imported] -
  misc_feature (9)..(211): Homolog of NCBI NO: 15226321 NR Description: pectinesterase - related [Arabidopsis thaliana]
  misc_feature (42)..(211): Homolog of NCBI NO: 18394174 NR Description: pectinesterase family [Arabidopsis thaliana]
  misc_feature (15)..(219): Homolog of NCBI NO: 112717 NR Description: 21 KD PROTEIN PRECURSOR (1.2 PROTEIN)
  misc_feature (26)..(216): Homolog of NCBI NO: 7488727 NR Description: 21K protein precursor - alfalfa
  misc_feature (44)..(211): Homolog of NCBI NO: 8096279 NR Description: DC1.2 homologue [Nicotiana tabacum]
IHNPKRVTSVSQETMKLSLHQPLLFFFLASVLPLILTVHSQSDDSDFIRTSCNTTLYPDLCFSSLSSFSSSVHNDPALLARAAISVTLTKTLDLASYLANITTLQPESNEDGAHHPTAAAVFHDCFDNLKDAVEEMKGSMKQMRELVSTGSLESFRFQMSNVQTWLSAALTDEETCTDGFKDIHDEPRKDDICARVDDVKKMTSNALALVNRCVDKAIH

SEQ ID NO: 103214 - protein, 205 aa, Arabidopsis thaliana
  peptide (1)..(205): Ceres Seq. ID no. 13612239
  misc_feature (1)..(205): Homolog of NCBI NO: 15220674 NR Description: pectinesterase - related [Arabidopsis thaliana]
  misc_feature (1)..(205): Homolog of NCBI NO: 21555465 NR Description: unknown [Arabidopsis thaliana]
  misc_feature (3)..(204): Homolog of NCBI NO: 21554277 NR Description: unknown [Arabidopsis thaliana]
  misc_feature (3)..(204): Homolog of NCBI NO: 18409660 NR Description: pectinesterase - related [Arabidopsis thaliana]
  misc_feature (9)..(204): Homolog of NCBI NO: 25406069 NR Description: hypothetical protein F5A18.10 [imported] -
  misc_feature (1)..(197): Homolog of NCBI NO: 15226321 NR Description: pectinesterase - related [Arabidopsis thaliana]
  misc_feature (28)..(197): Homolog of NCBI NO: 18394174 NR Description: pectinesterase family [Arabidopsis thaliana]
  misc_feature (1)..(205): Homolog of NCBI NO: 112717 NR Description: 21 KD PROTEIN PRECURSOR (1.2 PROTEIN)
  misc_feature (12)..(202): Homolog of NCBI NO: 7488727 NR Description: 21K protein precursor - alfalfa
  misc_feature (30)..(197): Homolog of NCBI NO: 8096279 NR Description: DC1.2 homologue [Nicotiana tabacum]
MKLSLHQPLLFFFLASVLPLILTVHSQSDDSDFIRTSCNTTLYPDLCFSSLSSFSSSVHNDPALLARAAISVTLTKTLDLASYLANITTLQPESNEDGAHHPTAAAVFHDCFDNLKDAVEEMKGSMKQMRELVSTGSLESFRFQMSNVQTWLSAALTDEETCTDGFKDIHDEPRKDDICARVDDVKKMTSNALALVNRCVDKAIH

SEQ ID NO: 103215 - DNA, 781 bp, Arabidopsis thaliana
  misc_feature (1)..(781): Ceres Seq. ID no. 13612240
  misc_feature: MA Experiment ID: 108474 Result: Down-regulated in Transcription
  misc_feature: MA Experiment 108474 PARAMETER Experiment Name: At_Drought_Flowers_cDNA_P Parameter: Timepoint (hr) Value: null
  misc_feature: MA Experiment 108474 PARAMETER Experiment Name: At_Drought_Flowers_cDNA_P Parameter: Treatment Value: Drought vs. No Drought
  misc_feature: MA Experiment ID: 108501 Result: Down-regulated in Transcription
  misc_feature: MA Experiment 108501 PARAMETER Experiment Name: At_ap2_floral_buds_cDNA_P Parameter: Plant Line Value: ap2 (Ler.)
  misc_feature: MA Experiment 108501 PARAMETER Experiment Name: At_ap2_floral_buds_cDNA_P Parameter: Tissue Value: Closed Flower
  misc_feature: MA Experiment ID: 20000087 Result: Up-regulated in Transcription
  misc_feature: MA Experiment 20000087 PARAMETER Experiment Name: At_100uM_ABA_Mutants_cDNA_P Parameter: Plant Line Value: WS
  misc_feature: MA Experiment 20000087 PARAMETER Experiment Name: At_100uM_ABA_Mutants_cDNA_P Parameter: Timepoint (hr) Value: 6
  misc_feature: MA Experiment 20000087 PARAMETER Experiment Name: At_100uM_ABA_Mutants_cDNA_P Parameter: Tissue Value: Aerial
  misc_feature: MA Experiment 20000087 PARAMETER Experiment Name: At_100uM_ABA_Mutants_cDNA_P Parameter: Treatment Value: 100uM ABA vs. No Treatment
  misc_feature: MA Experiment ID: 20000314 Result: Down-regulated in Transcription
  misc_feature: MA Experiment 20000314 PARAMETER Experiment Name: At_14day_Shoots-Roots_Sub_P Parameter: Age (day) Value: 14
  misc_feature: MA Experiment 20000314 PARAMETER Experiment Name: At_14day_Shoots-Roots_Sub_P Parameter: Organism Value: A. thaliana
  misc_feature: MA Experiment 20000314 PARAMETER Experiment Name: At_14day_Shoots-Roots_Sub_P Parameter: Plant Line Value: WS
  misc_feature: MA Experiment 20000314 PARAMETER Experiment Name: At_14day_Shoots-Roots_Sub_P Parameter: Tissue Value: Roots vs. Whole Plant
  misc_feature: MA Experiment ID: 20000315 Result: Down-regulated in Transcription
  misc_feature: MA Experiment 20000315 PARAMETER Experiment Name: At_14day_Shoots-Roots_Sub_P Parameter: Age (day) Value: 14
  misc_feature: MA Experiment 20000315 PARAMETER Experiment Name: At_14day_Shoots-Roots_Sub_P Parameter: Organism Value: A. thaliana
  misc_feature: MA Experiment 20000315 PARAMETER Experiment Name: At_14day_Shoots-Roots_Sub_P Parameter: Plant Line Value: WS
  misc_feature: MA Experiment 20000315 PARAMETER Experiment Name: At_14day_Shoots-Roots_Sub_P Parameter: Tissue Value: Shoots vs. Whole Plant
  misc_feature: MA Experiment ID: 20000355 Result: Down-regulated in Transcription
  misc_feature: MA Experiment 20000355 PARAMETER Experiment Name: At_Siliques_Sub_P Parameter: Age (day) Value: 21
  misc_feature: MA Experiment 20000355 PARAMETER Experiment Name: At_Siliques_Sub_P Parameter: Organism Value: A. thaliana
  misc_feature: MA Experiment 20000355 PARAMETER Experiment Name: At_Siliques_Sub_P Parameter: Plant Line Value: WS
  misc_feature: MA Experiment 20000355 PARAMETER Experiment Name: At_Siliques_Sub_P Parameter: Tissue Value: Less Than 5mm Siliques vs. Whole Plant
  misc_feature: MA Experiment ID: 20000440 Result: Up-regulated in Transcription
  misc_feature: MA Experiment 20000440 PARAMETER Experiment Name: At_Closed-Flower__Sub_P Parameter: Tissue Value: Closed Flower vs. Whole Plant
ataagatttacgtataggttgaaaaggaggaaagttagataaggaaaaaatgactgcattggagaaacatgtttccttcttcgacaggaacaaagacggcaccgtttatccatgggaaacctaccaaggatttagagcgctcgggacagggcgtcttttggcggcttttgttgctatattcatcaacatgggactcagcaagaaaactcgtccgggaaagggattctcgccgttgtttccaatagacgtgaagaatagtcacctttgcatgcacggtagtgacaccgacgtctatgacgatgacggaagatttgtggaatcaaaattcgaggaaatattcaacaagcatgctcgcacacataaagatgctctcactgcagaggaaattcaaaaaatgcttaagactaacagggatcctttcgatatcacaggatggctttcagattatggagaatggaaaatattacatacgttagctcaagacaaaaatggtttgttatcggaaaagagcgtcagggccatctacgatggtagccttttccaccaactggagaaaaaaagatcttcttcttcttctcgtggcaagaaacaaaaactaccataaatgtttacatgaatcttcttatattattatgtggagatcacataacattcttggtttataattatataattttgtcaaataacttttgtaatgaataattacatagatcaaacactctttaaataattattgtgtatattgaaaaaaaaaaacttatcaaagtatacttcatttaag

SEQ ID NO: 103216 - protein, 184 aa, Arabidopsis thaliana; identical to SEQ ID NO: 30098
  peptide (1)..(184): Ceres Seq. ID no. 13612241
  misc_feature (1)..(169): Pfam Name: Caleosin related protein Pfam Description: Caleosin related protein
  misc_feature (1)..(184): Homolog of NCBI NO: 15220687 NR Description: pollen coat EF-hand protein [Arabidopsis
  misc_feature (1)..(184): Homolog of NCBI NO: 9295714 NR Description: F26F24.9 [Arabidopsis thaliana]
  misc_feature (1)..(177): Homolog of NCBI NO: 18409649 NR Description: Ca2+-binding EF-hand common family protein, [Arabidopsis thaliana] >gi|25406062|pir||A96731 unknown protein
  misc_feature (1)..(177): Homolog of NCBI NO: 21593851 NR Description: unknown [Arabidopsis thaliana]
  misc_feature (1)..(175): Homolog of NCBI NO: 18409651 NR Description: Ca2+-binding EF-hand common family protein, [Arabidopsis thaliana] >gi|25406064|pir||B96731 unknown protein
  misc_feature (1)..(175): Homolog of NCBI NO: 21617961 NR Description: unknown [Arabidopsis thaliana]
  misc_feature (26)..(184): Homolog of NCBI NO: 15220688 NR Description: Ca2+-binding EF-hand common family protein,
  misc_feature (1)..(177): Homolog of NCBI NO: 37652831 NR Description: calcium binding protein [Fagus sylvatica]
  misc_feature (1)..(174): Homolog of NCBI NO: 34902470 NR Description: Putative abscisic acid-induced protein - rice
  misc_feature (1)..(171): Homolog of NCBI NO: 34538473 NR Description: caleosin 1 [Hordeum vulgare]

SEQ ID NO: 103217 - protein, 138 aa, Arabidopsis thaliana; identical to SEQ ID NO: 30099
  peptide (1)..(138): Ceres Seq. ID no. 13612242
  misc_feature (1)..(123): Pfam Name: Caleosin related protein Pfam Description: Caleosin related protein
  misc_feature (1)..(138): Homolog of NCBI NO: 15220687 NR Description: pollen coat EF-hand protein [Arabidopsis
  misc_feature (1)..(138): Homolog of NCBI NO: 9295714 NR Description: F26F24.9 [Arabidopsis thaliana]
  misc_feature (1)..(131): Homolog of NCBI NO: 18409649 NR Description: Ca2+-binding EF-hand common family protein, [Arabidopsis thaliana] >gi|25406062|pir||A96731 unknown protein
  misc_feature (1)..(131): Homolog of NCBI NO: 21593851 NR Description: unknown [Arabidopsis thaliana]
  misc_feature (1)..(129): Homolog of NCBI NO: 18409651 NR Description: Ca2+-binding EF-hand common family protein, [Arabidopsis thaliana] >gi|25406064|pir||B96731 unknown protein
  misc_feature (1)..(129): Homolog of NCBI NO: 21617961 NR Description: unknown [Arabidopsis thaliana]
  misc_feature (1)..(138): Homolog of NCBI NO: 15220688 NR Description: Ca2+-binding EF-hand common family protein,
  misc_feature (1)..(131): Homolog of NCBI NO: 37652831 NR Description: calcium binding protein [Fagus sylvatica]
  misc_feature (1)..(128): Homolog of NCBI NO: 34902470 NR Description: Putative abscisic acid-induced protein - rice
  misc_feature (1)..(125): Homolog of NCBI NO: 34538473 NR Description: caleosin 1 [Hordeum vulgare]

SEQ ID NO: 103218 - protein, 111 aa, Arabidopsis thaliana; identical to SEQ ID NO: 30100
  peptide (1)..(111): Ceres Seq. ID no. 13612243
  misc_feature (1)..(96): Pfam Name: Caleosin related protein Pfam Description: Caleosin related protein
  misc_feature (1)..(111): Homolog of NCBI NO: 15220687 NR Description: pollen coat EF-hand protein [Arabidopsis
  misc_feature (1)..(111): Homolog of NCBI NO: 9295714 NR Description: F26F24.9 [Arabidopsis thaliana]
  misc_feature (1)..(104): Homolog of NCBI NO: 18409649 NR Description: Ca2+-binding EF-hand common family protein, [Arabidopsis thaliana] >gi|25406062|pir||A96731 unknown protein
  misc_feature (1)..(104): Homolog of NCBI NO: 21593851 NR Description: unknown [Arabidopsis thaliana]
  misc_feature (1)..(102): Homolog of NCBI NO: 18409651 NR Description: Ca2+-binding EF-hand common family protein, [Arabidopsis thaliana] >gi|25406064|pir||B96731 unknown protein
  misc_feature (1)..(102): Homolog of NCBI NO: 21617961 NR Description: unknown [Arabidopsis thaliana]
  misc_feature (1)..(111): Homolog of NCBI NO: 15220688 NR Description: Ca2+-binding EF-hand common family protein,
  misc_feature (1)..(104): Homolog of NCBI NO: 37652831 NR Description: calcium binding protein [Fagus sylvatica]
  misc_feature (1)..(101): Homolog of NCBI NO: 34902470 NR Description: Putative abscisic acid-induced protein - rice
  misc_feature (1)..(98): Homolog of NCBI NO: 34538473 NR Description: caleosin 1 [Hordeum vulgare]

SEQ ID NO: 103219 - DNA, 770 bp, Arabidopsis thaliana
  misc_feature (1)..(770): Ceres Seq. ID no. 13612244
  misc_feature: MA Experiment ID: 108434 Result: Down-regulated in Transcription
  misc_feature: MA Experiment 108434 PARAMETER Experiment Name: At_Root_Tips_cDNA_P Parameter: Tissue Value: Root Tips
  misc_feature: MA Experiment ID: 20000214 Result: Up-regulated in Transcription
  misc_feature: MA Experiment 20000214 PARAMETER Experiment Name: At_4deg_Cold_P Parameter: Timepoint (hr) Value: 6
  misc_feature: MA Experiment ID: 20001451 Result: Up-regulated in Transcription
  misc_feature: MA Experiment 20001451 PARAMETER Experiment Name: At_Far-red-induction_P Parameter: Age (day) Value: 7
  misc_feature: MA Experiment 20001451 PARAMETER Experiment Name: At_Far-red-induction_P Parameter: Light Value: Far-red vs. White
  misc_feature: MA Experiment 20001451 PARAMETER Experiment Name: At_Far-red-induction_P Parameter: Organism Value: A. thaliana
  misc_feature: MA Experiment 20001451 PARAMETER Experiment Name: At_Far-red-induction_P Parameter: Plant Line Value: Columbia
  misc_feature: MA Experiment 20001451 PARAMETER Experiment Name: At_Far-red-induction_P Parameter: Timepoint (hr) Value: 24
  misc_feature: MA Experiment 20001451 PARAMETER Experiment Name: At_Far-red-induction_P Parameter: Tissue Value: Whole Plant
agtactttgaacattctctctctctcttttatctctgagattgcttcttcgctattgctcaattctctctctcacctaaccctaattattcattattcctgagattcatcggcgatgagttcggaggaagccaaggtcgttgttccgaggaactttagattgttggaagagcttgaaagaggtgagaaaggtattggagatggtactgttagctatggaatggatgatgctgatgatatttatatgcaatcttggactggcaccattcttggtcctcctaatactgcatatgaagggaaaatctttcagctgaagcttttctgtggtaaggagtaccctgaaagtccaccgactgtgaggttccagacccggataaacatggcttgtgttaacccagaaactggagtggttgaaccgagtctcttccctatgctcactaactggcggcgagaatatacaatggaggacatactggttaagctgaaaaaagaaatgatgacttcgcataaccggaagttagctcaacccccggaaggtaacgaggaagctagggcagatccaaaaggaccagctaaatgttgtgtgatgtgaagagaggttggtgggaatcagctatttgtattaatagaaggaacagtgtatataaaacatcatttgaagctttgaaattccctacaacttcctaatgttatagtcttgtttgagaatatatatatgtccgccaaaaacagttgatgattattttaataaacctcatctctactttctct

SEQ ID NO: 103220 - protein, 158 aa, Arabidopsis thaliana; identical to SEQ ID NO: 25849
  peptide (1)..(158): Ceres Seq. ID no. 13612245
  misc_feature (1)..(158): Homolog of NCBI NO: 18395221 NR Description: ubiquitin-conjugating enzyme family [Arabidopsis >gi|16649053|gb|AAL24378.1| similar to DNA binding protein thaliana] >gi|20259984|gb|AAM13339.1| similar to DNA binding
  misc_feature (1)..(158): Homolog of NCBI NO: 25326240 NR Description: protein F26F24.10 [imported] - Arabidopsis >gi|9295713|gb|AAF87019.1|AC005292_28 F26F24.10 [Arabidopsis
  misc_feature (1)..(158): Homolog of NCBI NO: 21593918 NR Description: E2, ubiquitin-conjugating enzyme, putative
  misc_feature (1)..(158): Homolog of NCBI NO: 18409647 NR Description: ubiquitin-conjugating enzyme family [Arabidopsis
  misc_feature (10)..(158): Homolog of NCBI NO: 13324790 NR Description: putative DNA-binding protein [Oryza sativa]
  misc_feature (1)..(141): Homolog of NCBI NO: 18409633 NR Description: ubiquitin-conjugating enzyme family [Arabidopsis
  misc_feature (1)..(141): Homolog of NCBI NO: 30693656 NR Description: ubiquitin-conjugating enzyme family [Arabidopsis
  misc_feature (6)..(141): Homolog of NCBI NO: 18404032 NR Description: ubiquitin-conjugating enzyme family [Arabidopsis
  misc_feature (6)..(141): Homolog of NCBI NO: 30686662 NR Description: ubiquitin-conjugating enzyme family [Arabidopsis
  misc_feature (6)..(141): Homolog of NCBI NO: 2982253 NR Description: CROC-1-like protein [Picea mariana]

SEQ ID NO: 103221 - protein, 123 aa, Arabidopsis thaliana; identical to SEQ ID NO: 25850
  peptide (1)..(123): Ceres Seq. ID no. 13612246
  misc_feature (1)..(123): Homolog of NCBI NO: 18395221 NR Description: ubiquitin-conjugating enzyme family [Arabidopsis >gi|16649053|gb|AAL24378.1| similar to DNA binding protein thaliana] >gi|20259984|gb|AAM13339.1| similar to DNA binding
  misc_feature (1)..(123): Homolog of NCBI NO: 25326240 NR Description: protein F26F24.10 [imported] - Arabidopsis >gi|9295713|gb|AAF87019.1|AC005292_28 F26F24.10 [Arabidopsis
  misc_feature (1)..(123): Homolog of NCBI NO: 21593918 NR Description: E2, ubiquitin-conjugating enzyme, putative
  misc_feature (1)..(123): Homolog of NCBI NO: 18409647 NR Description: ubiquitin-conjugating enzyme family [Arabidopsis
  misc_feature (1)..(123): Homolog of NCBI NO: 13324790 NR Description: putative DNA-binding protein [Oryza sativa]
  misc_feature (1)..(106): Homolog of NCBI NO: 18409633 NR Description: ubiquitin-conjugating enzyme family [Arabidopsis
  misc_feature (1)..(106): Homolog of NCBI NO: 30693656 NR Description: ubiquitin-conjugating enzyme family [Arabidopsis
  misc_feature (1)..(106): Homolog of NCBI NO: 18404032 NR Description: ubiquitin-conjugating enzyme family [Arabidopsis
  misc_feature (1)..(106): Homolog of NCBI NO: 30686662 NR Description: ubiquitin-conjugating enzyme family [Arabidopsis
  misc_feature (1)..(106): Homolog of NCBI NO: 2982253 NR Description: CROC-1-like protein [Picea mariana]

SEQ ID NO: 103222 - protein, 115 aa, Arabidopsis thaliana; identical to SEQ ID NO: 25851
  peptide (1)..(115): Ceres Seq. ID no. 13612247
  misc_feature (1)..(115): Homolog of NCBI NO: 18395221 NR Description: ubiquitin-conjugating enzyme family [Arabidopsis >gi|16649053|gb|AAL24378.1| similar to DNA binding protein thaliana] >gi|20259984|gb|AAM13339.1| similar to DNA binding
  misc_feature (1)..(115): Homolog of NCBI NO: 25326240 NR Description: protein F26F24.10 [imported] - Arabidopsis >gi|9295713|gb|AAF87019.1|AC005292_28 F26F24.10 [Arabidopsis
  misc_feature (1)..(115): Homolog of NCBI NO: 21593918 NR Description: E2, ubiquitin-conjugating enzyme, putative
  misc_feature (1)..(115): Homolog of NCBI NO: 18409647 NR Description: ubiquitin-conjugating enzyme family [Arabidopsis
  misc_feature (1)..(115): Homolog of NCBI NO: 13324790 NR Description: putative DNA-binding protein [Oryza sativa]
  misc_feature (1)..(98): Homolog of NCBI NO: 18409633 NR Description: ubiquitin-conjugating enzyme family [Arabidopsis
  misc_feature (1)..(98): Homolog of NCBI NO: 30693656 NR Description: ubiquitin-conjugating enzyme family [Arabidopsis
  misc_feature (1)..(98): Homolog of NCBI NO: 18404032 NR Description: ubiquitin-conjugating enzyme family [Arabidopsis
  misc_feature (1)..(98): Homolog of NCBI NO: 30686662 NR Description: ubiquitin-conjugating enzyme family [Arabidopsis
  misc_feature (1)..(98): Homolog of NCBI NO: 2982253 NR Description: CROC-1-like protein [Picea mariana]

SEQ ID NO: 103223 - DNA, 1094 bp, Arabidopsis thaliana
  misc_feature (1)..(1094): Ceres Seq. ID no. 13612256
  misc_feature: MA Experiment ID: 108501 Result: Down-regulated in Transcription
  misc_feature: MA Experiment 108501 PARAMETER Experiment Name: At_ap2_floral_buds_cDNA_P Parameter: Plant Line Value: ap2 (Ler.)
  misc_feature: MA Experiment 108501 PARAMETER Experiment Name: At_ap2_floral_buds_cDNA_P Parameter: Tissue Value: Closed Flower
  misc_feature: MA Experiment ID: 108595 Result: Up-regulated in Transcription
  misc_feature: MA Experiment 108595 PARAMETER Experiment Name: At_Ler-pi_Ovule_cDNA_P Parameter: Plant Line Value: null
  misc_feature: MA Experiment ID: 20000265 Result: Up-regulated in Transcription
  misc_feature: MA Experiment 20000265 PARAMETER Experiment Name: At_Open_Flower_P Parameter: Age (day) Value: 21
  misc_feature: MA Experiment 20000265 PARAMETER Experiment Name: At_Open_Flower_P Parameter: Plant Line Value: WS
  misc_feature: MA Experiment 20000265 PARAMETER Experiment Name: At_Open_Flower_P Parameter: Tissue Value: Closed Flower vs. Whole Plant
  misc_feature: MA Experiment ID: 20000286 Result: Up-regulated in Transcription
  misc_feature: MA Experiment 20000286 PARAMETER Experiment Name: At_Open_Flower_P Parameter: Age (day) Value: 21
  misc_feature: MA Experiment 20000286 PARAMETER Experiment Name: At_Open_Flower_P Parameter: Plant Line Value: WS
  misc_feature: MA Experiment 20000286 PARAMETER Experiment Name: At_Open_Flower_P Parameter: Tissue Value: Half Open vs. Whole Plant
  misc_feature: MA Experiment ID: 20001910 Result: Down-regulated in Transcription
  misc_feature: MA Experiment 20001910 PARAMETER Experiment Name: At_Drought_Reproduction_P Parameter: Age (day) Value: 37
  misc_feature: MA Experiment 20001910 PARAMETER Experiment Name: At_Drought_Reproduction_P Parameter: Organism Value: A. thaliana
  misc_feature: MA Experiment 20001910 PARAMETER Experiment Name: At_Drought_Reproduction_P Parameter: Plant Line Value: WS
  misc_feature: MA Experiment 20001910 PARAMETER Experiment Name: At_Drought_Reproduction_P Parameter: Timepoint (day) Value: 7
  misc_feature: MA Experiment 20001910 PARAMETER Experiment Name: At_Drought_Reproduction_P Parameter: Tissue Value: Flowers
  misc_feature: MA Experiment 20001910 PARAMETER Experiment Name: At_Drought_Reproduction_P Parameter: Treatment Value: Drought vs. No Drought
aatccaacttttatctacggtccctgaaaccatctctttgtcttttggcatatttccctccttaagtcaactatctctttgtctctatatcatctttctctcggacactctctttggatcgtcattttctctctatcgactaaattttaagagtggaatgggtatatttcctggatttggtggcttgatcaaccataacactcaagagcctcctaaggctgagaatgtgaaatctaagtcaaggtcagaaataaaaaatactgatcacgaagagagaaatgagatgaaggagcaactaaaactttggagacatgcagagaagaaagaacaatgggaagatgtccctgctaaggtgaaggtggaaacagaagatggtctttgccatgtggacatggtatttacattaggattgcctcctcaagcagcctacgacgttttgactaatcccgacaaccaatcatactcaagaataattaaccaacgccacgaacttctggataacgtatcaagaaatgtgttgacggataatggatcgagccagacggtggaggcagagaaagctgtggcctggaagtttctttcatggtcgggaactatcccgataagtctagatttcgtcgaaaaccgtaagaatctttctgcagtatatatgaaaaggaaaatgatgttcatgaaaagttttgagggtagttggaaagtggagccaatatacgtagattcaaaacgtttgtgcaagcaaatgaagccaaaaagtcgagaagaataccataaatgtagtggtggacaaggaaagattgcgtcgaaggtgaaaatgaaccagacctttcagccttcttttccttttaatctgccaccgctttcttggtacatccgtgatatcaccatcaagattactaaggctctgatacaagatcttcaagatatgggcgccaagctccgaggcgtttgaaatgccctcaaacattcgataggtttctaaatcactatagtataaatccgaagaggacaaatactaatctttataatcacttcattcatcttaacaagtgtattctttataccgaataaaaaaaatgagtatcgtgttaaatgtt

SEQ ID NO: 103224 - protein, 315 aa, Arabidopsis thaliana
  peptide (1)..(315): Ceres Seq. ID no. 13612257
  misc_feature (195)..(296): Pfam Name: Domain of unknown function DUF220 Pfam Description: Domain of unknown function DUF220
  misc_feature (53)..(315): Homolog of NCBI NO: 15220781 NR Description: OBP32pep protein -related [Arabidopsis thaliana]
  misc_feature (53)..(315): Homolog of NCBI NO: 15220802 NR Description: OBP32pep protein -related [Arabidopsis thaliana]
  misc_feature (53)..(210): Homolog of NCBI NO: 25373400 NR Description: hypothetical protein F5O8.7 [imported] - thaliana >gi|4056434|gb|AAC98007.1| Similar to OBP32pep protein
  misc_feature (231)..(315): Homolog of NCBI NO: 25373400 NR Description: hypothetical protein F5O8.7 [imported] - thaliana >gi|4056434|gb|AAC98007.1| Similar to OBP32pep protein
  misc_feature (5)..(165): Homolog of NCBI NO: 8778583 NR Description: F28C11.19 [Arabidopsis thaliana]
  misc_feature (169)..(313): Homolog of NCBI NO: 8778583 NR Description: F28C11.19 [Arabidopsis thaliana]
  misc_feature (53)..(315): Homolog of NCBI NO: 25373395 NR Description: hypothetical protein F5O8.22 - Arabidopsis >gi|4056449|gb|AAC98022.1| Similar to OBP32pep protein gb|U37698
  misc_feature (53)..(313): Homolog of NCBI NO: 15220799 NR Description: OBP32pep protein -related [Arabidopsis thaliana]
  misc_feature (53)..(313): Homolog of NCBI NO: 15220845 NR Description: OBP32pep protein -related [Arabidopsis thaliana]
  misc_feature (53)..(315): Homolog of NCBI NO: 15220821 NR Description: hypothetical protein [Arabidopsis thaliana]
IQLLSTVPETISLSFGIFPSLSQLSLCLYIIFLSDTLFGSSFSLYRLNFKSGMGIFPGFGGLINHNTQEPPKAENVKSKSRSEIKNTDHEERNEMKEQLKLWRHAEKKEQWEDVPAKVKVETEDGLCHVDMVFTLGLPPQAAYDVLTNPDNQSYSRIINQRHELLDNVSRNVLTDNGSSQTVEAEKAVAWKFLSWSGTIPISLDFVENRKNLSAVYMKRKMMFMKSFEGSWKVEPIYVDSKRLCKQMKPKSREEYHKCSGGQGKIASKVKMNQTFQPSFPFNLPPLSWYIRDITIKITKALIQDLQDMGAKLRGV

SEQ ID NO: 103225 - protein, 263 aa, Arabidopsis thaliana
  peptide (1)..(263): Ceres Seq. ID no. 13612258
  misc_feature (143)..(244): Pfam Name: Domain of unknown function DUF220 Pfam Description: Domain of unknown function DUF220
  misc_feature (1)..(263): Homolog of NCBI NO: 15220781 NR Description: OBP32pep protein -related [Arabidopsis thaliana]
  misc_feature (1)..(263): Homolog of NCBI NO: 15220802 NR Description: OBP32pep protein -related [Arabidopsis thaliana]
  misc_feature (1)..(158): Homolog of NCBI NO: 25373400 NR Description: hypothetical protein F5O8.7 [imported] - thaliana >gi|4056434|gb|AAC98007.1| Similar to OBP32pep protein
  misc_feature (179)..(263): Homolog of NCBI NO: 25373400 NR Description: hypothetical protein F5O8.7 [imported] - thaliana >gi|4056434|gb|AAC98007.1| Similar to OBP32pep protein
  misc_feature (1)..(113): Homolog of NCBI NO: 8778583 NR Description: F28C11.19 [Arabidopsis thaliana]
  misc_feature (117)..(261): Homolog of NCBI NO: 8778583 NR Description: F28C11.19 [Arabidopsis thaliana]
  misc_feature (1)..(263): Homolog of NCBI NO: 25373395 NR Description: hypothetical protein F5O8.22 - Arabidopsis >gi|4056449|gb|AAC98022.1| Similar to OBP32pep protein gb|U37698
  misc_feature (1)..(261): Homolog of NCBI NO: 15220799 NR Description: OBP32pep protein -related [Arabidopsis thaliana]
  misc_feature (1)..(261): Homolog of NCBI NO: 15220845 NR Description: OBP32pep protein -related [Arabidopsis thaliana]
  misc_feature (1)..(263): Homolog of NCBI NO: 15220821 NR Description: hypothetical protein [Arabidopsis thaliana]
MGIFPGFGGLINHNTQEPPKAENVKSKSRSEIKNTDHEERNEMKEQLKLWRHAEKKEQWEDVPAKVKVETEDGLCHVDMVFTLGLPPQAAYDVLTNPDNQSYSRIINQRHELLDNVSRNVLTDNGSSQTVEAEKAVAWKFLSWSGTIPISLDFVENRKNLSAVYMKRKMMFMKSFEGSWKVEPIYVDSKRLCKQMKPKSREEYHKCSGGQGKIASKVKMNQTFQPSFPFNLPPLSWYIRDITIKITKALIQDLQDMGAKLRGV

SEQ ID NO: 103226 - protein, 221 aa, Arabidopsis thaliana
  peptide (1)..(221): Ceres Seq. ID no. 13612259
  misc_feature (101)..(202): Pfam Name: Domain of unknown function DUF220 Pfam Description: Domain of unknown function DUF220
  misc_feature (1)..(221): Homolog of NCBI NO: 15220781 NR Description: OBP32pep protein -related [Arabidopsis thaliana]
  misc_feature (1)..(221): Homolog of NCBI NO: 15220802 NR Description: OBP32pep protein -related [Arabidopsis thaliana]
  misc_feature (1)..(116): Homolog of NCBI NO: 25373400 NR Description: hypothetical protein F5O8.7 [imported] - thaliana >gi|4056434|gb|AAC98007.1| Similar to OBP32pep protein
  misc_feature (137)..(221): Homolog of NCBI NO: 25373400 NR Description: hypothetical protein F5O8.7 [imported] - thaliana >gi|4056434|gb|AAC98007.1| Similar to OBP32pep protein
  misc_feature (1)..(71): Homolog of NCBI NO: 8778583 NR Description: F28C11.19 [Arabidopsis thaliana]
  misc_feature (75)..(219): Homolog of NCBI NO: 8778583 NR Description: F28C11.19 [Arabidopsis thaliana]
  misc_feature (1)..(221): Homolog of NCBI NO: 25373395 NR Description: hypothetical protein F5O8.22 - Arabidopsis >gi|4056449|gb|AAC98022.1| Similar to OBP32pep protein gb|U37698
  misc_feature (1)..(219): Homolog of NCBI NO: 15220799 NR Description: OBP32pep protein -related [Arabidopsis thaliana]
  misc_feature (1)..(219): Homolog of NCBI NO: 15220845 NR Description: OBP32pep protein -related [Arabidopsis thaliana]
  misc_feature (1)..(221): Homolog of NCBI NO: 15220821 NR Description: hypothetical protein [Arabidopsis thaliana]
MKEQLKLWRHAEKKEQWEDVPAKVKVETEDGLCHVDMVFTLGLPPQAAYDVLTNPDNQSYSRIINQRHELLDNVSRNVLTDNGSSQTVEAEKAVAWKFLSWSGTIPISLDFVENRKNLSAVYMKRKMMFMKSFEGSWKVEPIYVDSKRLCKQMKPKSREEYHKCSGGQGKIASKVKMNQTFQPSFPFNLPPLSWYIRDITIKITKALIQDLQDMGAKLRGV

SEQ ID NO: 103227 - DNA, 1303 bp, Arabidopsis thaliana
  misc_feature (1)..(1303): Ceres Seq. ID no. 13612260
  misc_feature: MA Experiment ID: 108434 Result: Down-regulated in Transcription
  misc_feature: MA Experiment 108434 PARAMETER Experiment Name: At_Root_Tips_cDNA_P Parameter: Tissue Value: Root Tips
  misc_feature: MA Experiment ID: 108473 Result: Down-regulated in Transcription
  misc_feature: MA Experiment 108473 PARAMETER Experiment Name: At_Drought_Flowers_cDNA_P Parameter: Timepoint (hr) Value: 7 d
  misc_feature: MA Experiment 108473 PARAMETER Experiment Name: At_Drought_Flowers_cDNA_P Parameter: Tissue Value: Flower
  misc_feature: MA Experiment 108473 PARAMETER Experiment Name: At_Drought_Flowers_cDNA_P Parameter: Treatment Value: Drought vs. No Drought
  misc_feature: MA Experiment ID: 108501 Result: Down-regulated in Transcription
  misc_feature: MA Experiment 108501 PARAMETER Experiment Name: At_ap2_floral_buds_cDNA_P Parameter: Plant Line Value: ap2 (Ler.)
  misc_feature: MA Experiment 108501 PARAMETER Experiment Name: At_ap2_floral_buds_cDNA_P Parameter: Tissue Value: Closed Flower
  misc_feature: MA Experiment ID: 108561 Result: Up-regulated in Transcription
  misc_feature: MA Experiment 108561 PARAMETER Experiment Name: At_100uM_ABA_cDNA_P Parameter: Timepoint (hr) Value: 6
  misc_feature: MA Experiment 108561 PARAMETER Experiment Name: At_100uM_ABA_cDNA_P Parameter: Tissue Value: Aerial
  misc_feature: MA Experiment 108561 PARAMETER Experiment Name: At_100uM_ABA_cDNA_P Parameter: Treatment Value: 100uM ABA vs. No Treatment
  misc_feature: MA Experiment ID: 108576 Result: Up-regulated in Transcription
  misc_feature: MA Experiment 108576 PARAMETER Experiment Name: At_42deg_Heat_cDNA_P Parameter: Temperature (deg C) Value: 42 vs. 22
  misc_feature: MA Experiment 108576 PARAMETER Experiment Name: At_42deg_Heat_cDNA_P Parameter: Timepoint (hr) Value: 1
  misc_feature: MA Experiment 108576 PARAMETER Experiment Name: At_42deg_Heat_cDNA_P Parameter: Tissue Value: Aerial
  misc_feature: MA Experiment ID: 108585 Result: Up-regulated in Transcription
  misc_feature: MA Experiment 108585 PARAMETER Experiment Name: At_5mM_NaNP_cDNA_P Parameter: Timepoint (hr) Value: 6
  misc_feature: MA Experiment 108585 PARAMETER Experiment Name: At_5mM_NaNP_cDNA_P Parameter: Tissue Value: Aerial
  misc_feature: MA Experiment 108585 PARAMETER Experiment Name: At_5mM_NaNP_cDNA_P Parameter: Treatment Value: null
  misc_feature: MA Experiment ID: 108668 Result: Up-regulated in Transcription
  misc_feature: MA Experiment 108668 PARAMETER Experiment Name: At_2mM_SA_cDNA_P Parameter: Plant Line Value: WS
  misc_feature: MA Experiment 108668 PARAMETER Experiment Name: At_2mM_SA_cDNA_P Parameter: Timepoint (hr) Value: 6
  misc_feature: MA Experiment 108668 PARAMETER Experiment Name: At_2mM_SA_cDNA_P Parameter: Treatment Value: 2mM SA vs. No Treatment
  misc_feature: MA Experiment ID: 20000087 Result: Up-regulated in Transcription
  misc_feature: MA Experiment 20000087 PARAMETER Experiment Name: At_100uM_ABA_Mutants_cDNA_P Parameter: Plant Line Value: WS
  misc_feature: MA Experiment 20000087 PARAMETER Experiment Name: At_100uM_ABA_Mutants_cDNA_P Parameter: Timepoint (hr) Value: 6
  misc_feature: MA Experiment 20000087 PARAMETER Experiment Name: At_100uM_ABA_Mutants_cDNA_P Parameter: Tissue Value: Aerial
  misc_feature: MA Experiment 20000087 PARAMETER Experiment Name: At_100uM_ABA_Mutants_cDNA_P Parameter: Treatment Value: 100uM ABA vs. No Treatment
  misc_feature: MA Experiment ID: 20000111 Result: Up-regulated in Transcription
  misc_feature: MA Experiment 20000111 PARAMETER Experiment Name: At_42deg_Heat_cDNA_P Parameter: Temperature (deg C) Value: 42 vs. 22
  misc_feature: MA Experiment 20000111 PARAMETER Experiment Name: At_42deg_Heat_cDNA_P Parameter: Timepoint (hr) Value: 6
  misc_feature: MA Experiment 20000111 PARAMETER Experiment Name: At_42deg_Heat_cDNA_P Parameter: Tissue Value: Aerial
  misc_feature: MA Experiment ID: 20000113 Result: Up-regulated in Transcription
  misc_feature: MA Experiment 20000113 PARAMETER Experiment Name: At_42deg_Heat_cDNA_P Parameter: Temperature (deg C) Value: 42 vs. 22
  misc_feature: MA Experiment 20000113 PARAMETER Experiment Name: At_42deg_Heat_cDNA_P Parameter: Timepoint (hr) Value: 8
  misc_feature: MA Experiment 20000113 PARAMETER Experiment Name: At_42deg_Heat_cDNA_P Parameter: Tissue Value: Aerial
  misc_feature: MA Experiment ID: 20000144 Result: Up-regulated in Transcription
  misc_feature: MA Experiment 20000144 PARAMETER Experiment Name: At_42deg_Heat_cDNA_P Parameter: Temperature (deg C) Value: 42 vs. 22
  misc_feature: MA Experiment 20000144 PARAMETER Experiment Name: At_42deg_Heat_cDNA_P Parameter: Timepoint (hr) Value: 1
  misc_feature: MA Experiment 20000144 PARAMETER Experiment Name: At_42deg_Heat_cDNA_P Parameter: Tissue Value: Aerial
  misc_feature: MA Experiment ID: 20000184 Result: Down-regulated in Transcription
  misc_feature: MA Experiment 20000184 PARAMETER Experiment Name: At_Shoots__P Parameter: Age (day) Value: 7
  misc_feature: MA Experiment 20000184 PARAMETER Experiment Name: At_Shoots__P Parameter: Tissue Value: Shoots vs. Whole Plant
  misc_feature: MA Experiment ID: 20000265 Result: Up-regulated in Transcription
  misc_feature: MA Experiment 20000265 PARAMETER Experiment Name: At_Open_Flower_P Parameter: Age (day) Value: 21
  misc_feature: MA Experiment 20000265 PARAMETER Experiment Name: At_Open_Flower_P Parameter: Plant Line Value: WS
  misc_feature: MA Experiment 20000265 PARAMETER Experiment Name: At_Open_Flower_P Parameter: Tissue Value: Closed Flower vs. Whole Plant
  misc_feature: MA Experiment ID: 20000286 Result: Up-regulated in Transcription
  misc_feature: MA Experiment 20000286 PARAMETER Experiment Name: At_Open_Flower_P Parameter: Age (day) Value: 21
  misc_feature: MA Experiment 20000286 PARAMETER Experiment Name: At_Open_Flower_P Parameter: Plant Line Value: WS
  misc_feature: MA Experiment 20000286 PARAMETER Experiment Name: At_Open_Flower_P Parameter: Tissue Value: Half Open vs. Whole Plant
  misc_feature: MA Experiment ID: 20000439 Result: Up-regulated in Transcription
  misc_feature: MA Experiment 20000439 PARAMETER Experiment Name: At_Roots__P Parameter: Age (day) Value: 14 vs. 21
  misc_feature: MA Experiment 20000439 PARAMETER Experiment Name: At_Roots__P Parameter: Organism Value: A. thaliana
  misc_feature: MA Experiment 20000439 PARAMETER Experiment Name: At_Roots__P Parameter: Tissue Value: Roots vs. Whole Plant
  misc_feature: MA Experiment ID: 20000794 Result: Up-regulated in Transcription
  misc_feature: MA Experiment 20000794 PARAMETER Experiment Name: At_Petals_P Parameter: Age (day) Value: 23-25 days
  misc_feature: MA Experiment 20000794 PARAMETER Experiment Name: At_Petals_P Parameter: Plant Line Value: WS
  misc_feature: MA Experiment 20000794 PARAMETER Experiment Name: At_Petals_P Parameter: Tissue Value: Petals vs. Whole plant
  misc_feature: MA Experiment ID: 20001451 Result: Up-regulated in Transcription
  misc_feature: MA Experiment 20001451 PARAMETER Experiment Name: At_Far-red-induction_P Parameter: Age (day) Value: 7
  misc_feature: MA Experiment 20001451 PARAMETER Experiment Name: At_Far-red-induction_P Parameter: Light Value: Far-red vs. White
  misc_feature: MA Experiment 20001451 PARAMETER Experiment Name: At_Far-red-induction_P Parameter: Organism Value: A. thaliana
  misc_feature: MA Experiment 20001451 PARAMETER Experiment Name: At_Far-red-induction_P Parameter: Plant Line Value: Columbia
  misc_feature: MA Experiment 20001451 PARAMETER Experiment Name: At_Far-red-induction_P Parameter: Timepoint (hr) Value: 24
  misc_feature: MA Experiment 20001451 PARAMETER Experiment Name: At_Far-red-induction_P Parameter: Tissue Value: Whole Plant
  misc_feature: MA Experiment ID: 20001904 Result: Up-regulated in Transcription
  misc_feature: MA Experiment 20001904 PARAMETER Experiment Name: At_Drought_Reproduction_P Parameter: Age (day) Value: 37
  misc_feature: MA Experiment 20001904 PARAMETER Experiment Name: At_Drought_Reproduction_P Parameter: Organism Value: A. thaliana
  misc_feature: MA Experiment 20001904 PARAMETER Experiment Name: At_Drought_Reproduction_P Parameter: Plant Line Value: WS
  misc_feature: MA Experiment 20001904 PARAMETER Experiment Name: At_Drought_Reproduction_P Parameter: Timepoint (day) Value: 7
  misc_feature: MA Experiment 20001904 PARAMETER Experiment Name: At_Drought_Reproduction_P Parameter: Tissue Value: Rosettes
  misc_feature: MA Experiment 20001904 PARAMETER Experiment Name: At_Drought_Reproduction_P Parameter: Treatment Value: Drought vs. No Drought
ataacctttgattaatcaaacctttctctatgtgtttttccctcaaaccacatcgttgacttggatctctcattgtcatcttgttctgtttttgtgacctaattttacagaaacaaaatgggtgtatctgaaatttcaagatcagaggagaagagcggtataggtttcgttaaattgtttgaaaataacgttgtgtttcctggatttttggtatggatgaatcaaacaattcaagagcctcttaaggctgagttcaaaagattaaggaatgtgaaagagctaagtttgaagtcagtgtcaaagatagagactgcttatgaggagcatagagatgaagagaagttagagaagcaattacaagcttggagagataatccctcatggatagatcagcctcctaaagtggtggtgaaatcacaaaatggtttgttttgccatttaaacattgaagcagacgtaggattgcctcctgaattagtatacaacattttcactcatccagacaacaaaagatacttcaaaaacatcaaggaaaacatatcaagaaaagttttgatcgacgaagggccaaagcagaccgtggaagtgaagcaagccgcggcctggaagttcctttggtgggatggaacttgtcctatacatctcattgtcgaagaaaaccggaaaaatctcacttcaaaatataagcaagagacaacaatgttcatgaaagtgtttgagggttgttggaaagtggagccattgtttatagacgaacatttgtgtgaccgctcaaagccaaaatctcaaaaagattaccatagctgtagcaacggacgaggaaggatcggatcaaaggtgacaatggatcaaatgtttcagccttcagctcttcttactcccccgccactttcttggtacatacgtgggatcaccattaaaaccacagagagtatgatcgaagatcttttcgctgaagctactagacttcggggaggaaaaggaggaggctatattgatgatcaaggagaaaacaatgtggtaaccgaaaagagcaaagctgatgacattaaggaaagatggagatcacataggagaagtaaacggaggagatttacaactgctaggtcaatgtaattgaagagactgtgattctagaatttcttgattattctggagatttgtaatgttcaagctctttacaagtttcccaaaagggatcctctgtttttaccactaacggaaactacaccttccaatagaaaaaaaaaatgcatcaaatctctcatatagttccttccacgttttgattgaagcttgtcct

SEQ ID NO: 103228 - protein, 332 aa, Arabidopsis thaliana; identical to SEQ ID NO: 36239
  peptide (1)..(332): Ceres Seq. ID no. 13612261
  misc_feature (168)..(268): Pfam Name: Domain of unknown function DUF220 Pfam Description: Domain of unknown function DUF220
  misc_feature (1)..(332): Homolog of NCBI NO: 18395257 NR Description: expressed protein [Arabidopsis thaliana]
  misc_feature (1)..(332): Homolog of NCBI NO: 8778583 NR Description: F28C11.19 [Arabidopsis thaliana]
  misc_feature (1)..(332): Homolog of NCBI NO: 21554971 NR Description: unknown [Arabidopsis thaliana]
  misc_feature (32)..(325): Homolog of NCBI NO: 18409585 NR Description: expressed protein [Arabidopsis thaliana]
  misc_feature (32)..(325): Homolog of NCBI NO: 21592433 NR Description: unknown [Arabidopsis thaliana]
  misc_feature (32)..(283): Homolog of NCBI NO: 2129655 NR Description: hypothetical protein OBP32 - Arabidopsis thaliana
  misc_feature (26)..(285): Homolog of NCBI NO: 15220802 NR Description: OBP32pep protein -related [Arabidopsis thaliana]
  misc_feature (137)..(310): Homolog of NCBI NO: 8778583 NR Description: F28C11.19 [Arabidopsis thaliana]
  misc_feature (26)..(139): Homolog of NCBI NO: 8778583 NR Description: F28C11.19 [Arabidopsis thaliana]
  misc_feature (26)..(286): Homolog of NCBI NO: 15220781 NR Description: OBP32pep protein -related [Arabidopsis thaliana]

SEQ ID NO: 103229 - protein, 299 aa, Arabidopsis thaliana; identical to SEQ ID NO: 36240
  peptide (1)..(299): Ceres Seq. ID no. 13612262
  misc_feature (135)..(235): Pfam Name: Domain of unknown function DUF220 Pfam Description: Domain of unknown function DUF220
  misc_feature (1)..(299): Homolog of NCBI NO: 18395257 NR Description: expressed protein [Arabidopsis thaliana]
  misc_feature (1)..(299): Homolog of NCBI NO: 8778583 NR Description: F28C11.19 [Arabidopsis thaliana]
  misc_feature (1)..(299): Homolog of NCBI NO: 21554971 NR Description: unknown [Arabidopsis thaliana]
  misc_feature (1)..(292): Homolog of NCBI NO: 18409585 NR Description: expressed protein [Arabidopsis thaliana]
  misc_feature (1)..(292): Homolog of NCBI NO: 21592433 NR Description: unknown [Arabidopsis thaliana]
  misc_feature (1)..(250): Homolog of NCBI NO: 2129655 NR Description: hypothetical protein OBP32 - Arabidopsis thaliana
  misc_feature (1)..(252): Homolog of NCBI NO: 15220802 NR Description: OBP32pep protein -related [Arabidopsis thaliana]
  misc_feature (104)..(277): Homolog of NCBI NO: 8778583 NR Description: F28C11.19 [Arabidopsis thaliana]
  misc_feature (1)..(106): Homolog of NCBI NO: 8778583 NR Description: F28C11.19 [Arabidopsis thaliana]
  misc_feature (1)..(253): Homolog of NCBI NO: 15220781 NR Description: OBP32pep protein -related [Arabidopsis thaliana]

SEQ ID NO: 103230 - DNA, 858 bp, Arabidopsis thaliana
  misc_feature (1)..(858): Ceres Seq. ID no. 13612276
  misc_feature: MA Experiment ID: 20000349 Result: Up-regulated in Transcription
  misc_feature: MA Experiment 20000349 PARAMETER Experiment Name: At_100uM_ABA_Sub_P Parameter: Age (day) Value: 14
  misc_feature: MA Experiment 20000349 PARAMETER Experiment Name: At_100uM_ABA_Sub_P Parameter: Organism Value: A. thaliana
  misc_feature: MA Experiment 20000349 PARAMETER Experiment Name: At_100uM_ABA_Sub_P Parameter: Plant Line Value: WS
  misc_feature: MA Experiment 20000349 PARAMETER Experiment Name: At_100uM_ABA_Sub_P Parameter: Timepoint (hr) Value: 6
  misc_feature: MA Experiment 20000349 PARAMETER Experiment Name: At_100uM_ABA_Sub_P Parameter: Tissue Value: Aerial
  misc_feature: MA Experiment 20000349 PARAMETER Experiment Name: At_100uM_ABA_Sub_P Parameter: Treatment Value: 100uM ABA vs. No Treatment
actcatcatcattcacagcttcaaattttcaatactcaaattaacaatggcgattttctccacatcacatcttctcttcatctccttcatcatagccacatgtacaatttctgtctccggtacaaccttcaccttaacaaaccattgcggctccacaatctggcctggaatcctcaccgcaaacggcgcacaactcggcgacggcggatttgccttagcttcaggatcttccgtaaccttcaccgtttctccaggttggtccggtcgattttgggctcgaacgtattgtaacttcgacgcctcaggctcaggtaaatgcggtaccggggactgcggcagcaagttaaaatgcgccggcgcaggaggagctccaccagccacactcgccgaattcacaatcggctcctccggaaagaaaaacgccgtgcaagatttttacgacgtgagcctcgtagatggttataacgttcagatgaaaatcacaccgcaaggtggctcaggggattgtaaaaccgcgggatgcgtttcggacgtgaacgcgatttgtccaaaagagctacaagttacgggcccatcgggtgttgcagcgtgtaagagtgcttgtgaggcttttaacaagccggagtattgttgcaccggcgcgtatagtacaccggcgacttgtccgcccacgaattactcgaagatatttaaacaagcttgtccgagtgcgtatagctatgcatacgatgatgcttccagtacttttacttgtactaatgctaattatgagatcagtttctgttcttaggcaaaaatcgcctttattattcattaattattattatttatcaatgaataaaaagattgatcattttt

SEQ ID NO: 103231 - protein, 262 aa, Arabidopsis thaliana
  peptide (1)..(262): Ceres Seq. ID no. 13612277
  misc_feature (47)..(262): Pfam Name: Thaumatin family Pfam Description: Thaumatin family
  misc_feature (16)..(262): Homolog of NCBI NO: 30686314 NR Description: thaumatin family [Arabidopsis thaliana]
  misc_feature (16)..(262): Homolog of NCBI NO: 28973703 NR Description: putative pathogenesis-related protein 5 precursor
  misc_feature (16)..(261): Homolog of NCBI NO: 15222088 NR Description: thaumatin-like protein [Arabidopsis thaliana]
  misc_feature (16)..(261): Homolog of NCBI NO: 2435406 NR Description: thaumatin-like protein [Arabidopsis thaliana]
  misc_feature (16)..(261): Homolog of NCBI NO: 15222090 NR Description: thaumatin-like protein (pathogenesis-related
  misc_feature (16)..(261): Homolog of NCBI NO: 15222089 NR Description: pathogenesis-related protein 5 (PR-5)
  misc_feature (37)..(261): Homolog of NCBI NO: 6273385 NR Description: SCUTL2 [Vitis vinifera]
  misc_feature (38)..(261): Homolog of NCBI NO: 25091401 NR Description: Thaumatin-like protein 1 precursor
  misc_feature (38)..(261): Homolog of NCBI NO: 32140539 NR Description: thaumatin/PR5-like protein [Pyrus pyrifolia]
  misc_feature (22)..(261): Homolog of NCBI NO: 15233738 NR Description: thaumatin family [Arabidopsis thaliana]
LIIIHSFKFSILKLTMAIFSTSHLLFISFIIATCTISVSGTTFTLTNHCGSTIWPGILTANGAQLGDGGFALASGSSVTFTVSPGWSGRFWARTYCNFDASGSGKCGTGDCGSKLKCAGAGGAPPATLAEFTIGSSGKKNAVQDFYDVSLVDGYNVQMKITPQGGSGDCKTAGCVSDVNAICPKELQVTGPSGVAACKSACEAFNKPEYCCTGAYSTPATCPPTNYSKIFKQACPSAYSYAYDDASSTFTCTNANYEISFCS

SEQ ID NO: 103232 - protein, 247 aa, Arabidopsis thaliana
  peptide (1)..(247): Ceres Seq. ID no. 13612278
  misc_feature (32)..(247): Pfam Name: Thaumatin family Pfam Description: Thaumatin family
  misc_feature (1)..(247): Homolog of NCBI NO: 30686314 NR Description: thaumatin family [Arabidopsis thaliana]
  misc_feature (1)..(247): Homolog of NCBI NO: 28973703 NR Description: putative pathogenesis-related protein 5 precursor
  misc_feature (1)..(246): Homolog of NCBI NO: 15222088 NR Description: thaumatin-like protein [Arabidopsis thaliana]
  misc_feature (1)..(246): Homolog of NCBI NO: 2435406 NR Description: thaumatin-like protein [Arabidopsis thaliana]
  misc_feature (1)..(246): Homolog of NCBI NO: 15222090 NR Description: thaumatin-like protein (pathogenesis-related
  misc_feature (1)..(246): Homolog of NCBI NO: 15222089 NR Description: pathogenesis-related protein 5 (PR-5)
  misc_feature (22)..(246): Homolog of NCBI NO: 6273385 NR Description: SCUTL2 [Vitis vinifera]
  misc_feature (23)..(246): Homolog of NCBI NO: 25091401 NR Description: Thaumatin-like protein 1 precursor
  misc_feature (23)..(246): Homolog of NCBI NO: 32140539 NR Description: thaumatin/PR5-like protein [Pyrus pyrifolia]
  misc_feature (7)..(246): Homolog of NCBI NO: 15233738 NR Description: thaumatin family [Arabidopsis thaliana]
MAIFSTSHLLFISFIIATCTISVSGTTFTLTNHCGSTIWPGILTANGAQLGDGGFALASGSSVTFTVSPGWSGRFWARTYCNFDASGSGKCGTGDCGSKLKCAGAGGAPPATLAEFTIGSSGKKNAVQDFYDVSLVDGYNVQMKITPQGGSGDCKTAGCVSDVNAICPKELQVTGPSGVAACKSACEAFNKPEYCCTGAYSTPATCPPTNYSKIFKQACPSAYSYAYDDASSTFTCTNANYEISFCS

SEQ ID NO: 103233 - DNA, 692 bp, Arabidopsis thaliana
  misc_feature (1)..(692): Ceres Seq. ID no. 13612286
  misc_feature: MA Experiment ID: 20000171 Result: Down-regulated in Transcription
  misc_feature: MA Experiment 20000171 PARAMETER Experiment Name: At_42deg_Heat_P Parameter: Age (day) Value: 14
  misc_feature: MA Experiment 20000171 PARAMETER Experiment Name: At_42deg_Heat_P Parameter: Organism Value: A. thaliana
  misc_feature: MA Experiment 20000171 PARAMETER Experiment Name: At_42deg_Heat_P Parameter: Plant Line Value: WS
  misc_feature: MA Experiment 20000171 PARAMETER Experiment Name: At_42deg_Heat_P Parameter: Temperature (deg C) Value: 42 vs. 22
  misc_feature: MA Experiment 20000171 PARAMETER Experiment Name: At_42deg_Heat_P Parameter: Timepoint (hr) Value: 1
  misc_feature: MA Experiment 20000171 PARAMETER Experiment Name: At_42deg_Heat_P Parameter: Tissue Value: Aerial
  misc_feature: MA Experiment ID: 20000179 Result: Up-regulated in Transcription
  misc_feature: MA Experiment 20000179 PARAMETER Experiment Name: At_Germinating_Seeds_P Parameter: Age (hr) Value: 6 vs. 0
  misc_feature: MA Experiment 20000179 PARAMETER Experiment Name: At_Germinating_Seeds_P Parameter: Tissue Value: Germinating Seeds
  misc_feature: MA Experiment ID: 20000182 Result: Down-regulated in Transcription
  misc_feature: MA Experiment 20000182 PARAMETER Experiment Name: At_2mM_SA_P Parameter: Age (day) Value: 14
  misc_feature: MA Experiment 20000182 PARAMETER Experiment Name: At_2mM_SA_P Parameter: Organism Value: A. thaliana
  misc_feature: MA Experiment 20000182 PARAMETER Experiment Name: At_2mM_SA_P Parameter: Plant Line Value: WS
  misc_feature: MA Experiment 20000182 PARAMETER Experiment Name: At_2mM_SA_P Parameter: Timepoint (hr) Value: 6
  misc_feature: MA Experiment 20000182 PARAMETER Experiment Name: At_2mM_SA_P Parameter: Tissue Value: Aerial
  misc_feature: MA Experiment 20000182 PARAMETER Experiment Name: At_2mM_SA_P Parameter: Treatment Value: 2mM SA vs. No Treatment
  misc_feature: MA Experiment ID: 20000184 Result: Up-regulated in Transcription
  misc_feature: MA Experiment 20000184 PARAMETER Experiment Name: At_Shoots__P Parameter: Age (day) Value: 7
  misc_feature: MA Experiment 20000184 PARAMETER Experiment Name: At_Shoots__P Parameter: Tissue Value: Shoots vs. Whole Plant
  misc_feature: MA Experiment ID: 20000227 Result: Up-regulated in Transcription
  misc_feature: MA Experiment 20000227 PARAMETER Experiment Name: At_Root-Tips-vs-Tops_P Parameter: Tissue Value: Root Tips vs. Root Tops
  misc_feature: MA Experiment ID: 20000234 Result: Up-regulated in Transcription
  misc_feature: MA Experiment 20000234 PARAMETER Experiment Name: At_Siliques_P Parameter: Age (day) Value: 21
  misc_feature: MA Experiment 20000234 PARAMETER Experiment Name: At_Siliques_P Parameter: Organism Value: A. thaliana
  misc_feature: MA Experiment 20000234 PARAMETER Experiment Name: At_Siliques_P Parameter: Plant Line Value: WS
  misc_feature: MA Experiment 20000234 PARAMETER Experiment Name: At_Siliques_P Parameter: Tissue Value: Less Than 5mm Siliques vs. Whole Plant
  misc_feature: MA Experiment ID: 20000264 Result: Up-regulated in Transcription
  misc_feature: MA Experiment 20000264 PARAMETER Experiment Name: At_Open_Flower_P Parameter: Age (day) Value: 21
  misc_feature: MA Experiment 20000264 PARAMETER Experiment Name: At_Open_Flower_P Parameter: Plant Line Value: WS
  misc_feature: MA Experiment 20000264 PARAMETER Experiment Name: At_Open_Flower_P Parameter: Tissue Value: Open Flower vs. Whole Plant
  misc_feature: MA Experiment ID: 20000265 Result: Up-regulated in Transcription
  misc_feature: MA Experiment 20000265 PARAMETER Experiment Name: At_Open_Flower_P Parameter: Age (day) Value: 21
  misc_feature: MA Experiment 20000265 PARAMETER Experiment Name: At_Open_Flower_P Parameter: Plant Line Value: WS
  misc_feature: MA Experiment 20000265 PARAMETER Experiment Name: At_Open_Flower_P Parameter: Tissue Value: Closed Flower vs. Whole Plant
  misc_feature: MA Experiment ID: 20000286 Result: Up-regulated in Transcription
  misc_feature: MA Experiment 20000286 PARAMETER Experiment Name: At_Open_Flower_P Parameter: Age (day) Value: 21
  misc_feature: MA Experiment 20000286 PARAMETER Experiment Name: At_Open_Flower_P Parameter: Plant Line Value: WS
  misc_feature: MA Experiment 20000286 PARAMETER Experiment Name: At_Open_Flower_P Parameter: Tissue Value: Half Open vs. Whole Plant
  misc_feature: MA Experiment ID: 20000438 Result: Up-regulated in Transcription
  misc_feature: MA Experiment 20000438 PARAMETER Experiment Name: At_Shoots__P Parameter: Age (day) Value: 14
  misc_feature: MA Experiment 20000438 PARAMETER Experiment Name: At_Shoots__P Parameter: Tissue Value: Shoots vs. Whole Plant
  misc_feature: MA Experiment ID: 20000495 Result: Up-regulated in Transcription
  misc_feature: MA Experiment 20000495 PARAMETER Experiment Name: At_Guard_Cells_P Parameter: Harvest Date Value: 8/2/2002
  misc_feature: MA Experiment 20000495 PARAMETER Experiment Name: At_Guard_Cells_P Parameter: Organism Value: A. thaliana
  misc_feature: MA Experiment 20000495 PARAMETER Experiment Name: At_Guard_Cells_P Parameter: Tissue Value: Guard Cells vs. Leaves
  misc_feature: MA Experiment ID: 20000794 Result: Down-regulated in Transcription
  misc_feature: MA Experiment 20000794 PARAMETER Experiment Name: At_Petals_P Parameter: Age (day) Value: 23-25 days
  misc_feature: MA Experiment 20000794 PARAMETER Experiment Name: At_Petals_P Parameter: Plant Line Value: WS
  misc_feature: MA Experiment 20000794 PARAMETER Experiment Name: At_Petals_P Parameter: Tissue Value: Petals vs. Whole plant
  misc_feature: MA Experiment ID: 20001248 Result: Down-regulated in Transcription
  misc_feature: MA Experiment 20001248 PARAMETER Experiment Name: At_Far-red-induction_P Parameter: Age (day) Value: 7
  misc_feature: MA Experiment 20001248 PARAMETER Experiment Name: At_Far-red-induction_P Parameter: Light Value: Far-red vs. White
  misc_feature: MA Experiment 20001248 PARAMETER Experiment Name: At_Far-red-induction_P Parameter: Organism Value: A. thaliana
  misc_feature: MA Experiment 20001248 PARAMETER Experiment Name: At_Far-red-induction_P Parameter: Plant Line Value: Columbia
  misc_feature: MA Experiment 20001248 PARAMETER Experiment Name: At_Far-red-induction_P Parameter: Timepoint (hr) Value: 4
  misc_feature: MA Experiment 20001248 PARAMETER Experiment Name: At_Far-red-induction_P Parameter: Tissue Value: Whole Plant
  misc_feature: MA Experiment ID: 20001558 Result: Up-regulated in Transcription
  misc_feature: MA Experiment 20001558 PARAMETER Experiment Name: At_Drought_Soil_Dry_P Parameter: Age (day) Value: 27
  misc_feature: MA Experiment 20001558 PARAMETER Experiment Name: At_Drought_Soil_Dry_P Parameter: Organism Value: A. thaliana
  misc_feature: MA Experiment 20001558 PARAMETER Experiment Name: At_Drought_Soil_Dry_P Parameter: Plant Line Value: WS
  misc_feature: MA Experiment 20001558 PARAMETER Experiment Name: At_Drought_Soil_Dry_P Parameter: Post Timepoint (hr) Value: 6
  misc_feature: MA Experiment 20001558 PARAMETER Experiment Name: At_Drought_Soil_Dry_P Parameter: Post-Treatment Value: Re-Water vs. No Drought
  misc_feature: MA Experiment 20001558 PARAMETER Experiment Name: At_Drought_Soil_Dry_P Parameter: Timepoint (day) Value: 13
  misc_feature: MA Experiment 20001558 PARAMETER Experiment Name: At_Drought_Soil_Dry_P Parameter: Treatment Value: Drought vs. No Drought
  misc_feature: MA Experiment ID: 20001560 Result: Up-regulated in Transcription
  misc_feature: MA Experiment 20001560 PARAMETER Experiment Name: At_Drought_Soil_Dry_P Parameter: Age (day) Value: 28
  misc_feature: MA Experiment 20001560 PARAMETER Experiment Name: At_Drought_Soil_Dry_P Parameter: Organism Value: A. thaliana
  misc_feature: MA Experiment 20001560 PARAMETER Experiment Name: At_Drought_Soil_Dry_P Parameter: Plant Line Value: WS
  misc_feature: MA Experiment 20001560 PARAMETER Experiment Name: At_Drought_Soil_Dry_P Parameter: Post Timepoint (hr) Value: None
  misc_feature: MA Experiment 20001560 PARAMETER Experiment Name: At_Drought_Soil_Dry_P Parameter: Post-Treatment Value: None
  misc_feature: MA Experiment 20001560 PARAMETER Experiment Name: At_Drought_Soil_Dry_P Parameter: Timepoint (day) Value: 14
  misc_feature: MA Experiment 20001560 PARAMETER Experiment Name: At_Drought_Soil_Dry_P Parameter: Treatment Value: Drought vs. No Drought
  misc_feature: MA Experiment ID: 20001905 Result: Up-regulated in Transcription
  misc_feature: MA Experiment 20001905 PARAMETER Experiment Name: At_Drought_Reproduction_P Parameter: Age (day) Value: 40
  misc_feature: MA Experiment 20001905 PARAMETER Experiment Name: At_Drought_Reproduction_P Parameter: Organism Value: A. thaliana
  misc_feature: MA Experiment 20001905 PARAMETER Experiment Name: At_Drought_Reproduction_P Parameter: Plant Line Value: WS
  misc_feature: MA Experiment 20001905 PARAMETER Experiment Name: At_Drought_Reproduction_P Parameter: Timepoint (day) Value: 10
  misc_feature: MA Experiment 20001905 PARAMETER Experiment Name: At_Drought_Reproduction_P Parameter: Tissue Value: Rosettes
  misc_feature: MA Experiment 20001905 PARAMETER Experiment Name: At_Drought_Reproduction_P Parameter: Treatment Value: Drought vs. No Drought
  misc_feature: MA Experiment ID: 20001906 Result: Down-regulated in Transcription
  misc_feature: MA Experiment 20001906 PARAMETER Experiment Name: At_Drought_Reproduction_P Parameter: Age (day) Value: 35
  misc_feature: MA Experiment 20001906 PARAMETER Experiment Name: At_Drought_Reproduction_P Parameter: Organism Value: A. thaliana
  misc_feature: MA Experiment 20001906 PARAMETER Experiment Name: At_Drought_Reproduction_P Parameter: Plant Line Value: WS
  misc_feature: MA Experiment 20001906 PARAMETER Experiment Name: At_Drought_Reproduction_P Parameter: Timepoint (day) Value: 5
  misc_feature: MA Experiment 20001906 PARAMETER Experiment Name: At_Drought_Reproduction_P Parameter: Tissue Value: Siliques
  misc_feature: MA Experiment 20001906 PARAMETER Experiment Name: At_Drought_Reproduction_P Parameter: Treatment Value: Drought vs. No Drought
ataaatggcgcatttaattagaacccccaaaatctcttcacaactgtaaaaccccaatcacctctttacatgtgacttccttattactctcttcttcttattttcctcctcttcttcttcgctctagtttcccccaacaatcgccatggcagcttcgtctctcaatctcctcctcattctctctcttctcactttcatttctctccagagatctgaatctctttccgataatccatctctcactcttctacccgacggattcgactggccgatctctcactccgatgaattcgatatcatcgacggtgaagaaagcttcgaagttacggaggaagacgacggcgtaacagatcgacggtcattgtactggcggaggacgaagtattacatatcgtacggtgcattgtcggcgaatagagtgccatgtcctcccagatctggaagatcgtactacactcataactgcttcagagctagaggtcccgttcatccgtatagccgaggctgctcgtcgatcactcgatgccggagatagatgaagaaagcttaaaactccatgggcattttcgtaattttgccaaccatggtttattattatgatgtttgtatttgtaatgttcgatgtttgtttgtaaaccgtgattagttacgttcgttaaacggtaaacccggtgattataatttcgagttct

SEQ ID NO: 103234 - protein, 129 aa, Arabidopsis thaliana; identical to SEQ ID NO: 30885
  peptide (1)..(129): Ceres Seq. ID no. 13612287
  misc_feature (57)..(129): Pfam Name: Rapid ALkalinization Factor (RALF) Pfam Description: Rapid ALkalinization Factor (RALF)
  misc_feature (1)..(129): Homolog of NCBI NO: 15240191 NR Description: expressed protein [Arabidopsis thaliana] gb|AAF64534.1~gene_id:K21H1.3~similar to unknown protein thaliana] >gi|13877899|gb|AAK44027.1|AF370212_1 unknown protein
  misc_feature (1)..(129): Homolog of NCBI NO: 21593826 NR Description: unknown [Arabidopsis thaliana]
  misc_feature (2)..(129): Homolog of NCBI NO: 18401177 NR Description: expressed protein [Arabidopsis thaliana] gb|AAF02876.1~gene_id:MGL6.3~similar to unknown protein thaliana] >gi|15081817|gb|AAK82563.1| AT3g16570/MGL6_2
  misc_feature (48)..(129): Homolog of NCBI NO: 18414528 NR Description: expressed protein [Arabidopsis thaliana]
  misc_feature (50)..(128): Homolog of NCBI NO: 16566316 NR Description: RALF precursor [Nicotiana tabacum]
  misc_feature (70)..(129): Homolog of NCBI NO: 34903676 NR Description: B1015E06.23 [Oryza sativa (japonica
  misc_feature (63)..(129): Homolog of NCBI NO: 18397246 NR Description: expressed protein [Arabidopsis thaliana] unknown protein [Arabidopsis thaliana] RALF precursor [Arabidopsis thaliana] >gi|27754284|gb|AAO22595.1|
  misc_feature (55)..(128): Homolog of NCBI NO: 34915062 NR Description: P0025H06.15 [Oryza sativa (japonica

SEQ ID NO: 103235 - DNA, 1484 bp, Arabidopsis thaliana
  misc_feature (1)..(1484): Ceres Seq. ID no. 13612292
  misc_feature: MA Experiment ID: 20000180 Result: Up-regulated in Transcription
  misc_feature: MA Experiment 20000180 PARAMETER Experiment Name: At_Germinating_Seeds_P Parameter: Age (hr) Value: 24 vs. 0
  misc_feature: MA Experiment 20000180 PARAMETER Experiment Name: At_Germinating_Seeds_P Parameter: Tissue Value: Germinating Seeds
  misc_feature: MA Experiment ID: 20000224 Result: Up-regulated in Transcription
atatagggttacatcttccttagcttgaatacaaaagaaaagctcaagtttgtttctcgtttctatggatattcttcttccttatgctagcctctctggtcttcttcttcttcgttcgtttcagcgaatcacatttgatctatgacacatctatacaaggaattagctttcatcatcaagtctctctctcgaaaactctcctttggtttcgtttgatctgagaaaagaagaaattcaaatattgataactgtggatgggtgcaccaaagcagaagtggacaccggaagaagaagcagctcttaaagctggagttcttaagcatgggactgggaagtggcgtaccatactctcggatactgagtttagtttaatccttaagtctcgctctaatgttgatcttaaggacaaatggagaaatataagcgtgacagctttatggggttcaaggaagaaggctaaacttgcgcttaagaggactccaccaggtactaaacaggatgataacaacacagctcttaccattgtggctttgactaatgatgatgaacgtgcaaaaccaacttcccccggaggttctggtggtggatcaccacgcacttgtgcttctaagagatcaattacaagtttggataagatcatctttgaggcaattaccaacttgagggaactacgcggttctgacagaacatcaatctttctgtatatagaggagaatttcaagactccaccgaatatgaaaaggcatgtcgcagtacgattaaagcatttatcatcgaatggaacattagttaagataaagcacaagtacaggttttcttctaattttattcccgcaggtgcaagacagaaggctcctcaactctttctggaaggaaacaacaagaaagacccaacaaaacccgaggagaacggtgccaacagtctcactaaattccgagtagacggtgaattatatatgataaaaggcatgacagctcaagaagctgcagaggctgcagcaagagcagttgcagaggcagaatttgctatcacagaggctgaacaagcagcaaaagaggcagaaagagcagaagcagaagctgaagctgctcagatatttgcaaaggcagccatgaaagctttgaagttcaggatccgtaatcatccttggtgaaacagaaagaaatagccatcatggggaagttctgtaacaaagcaagccataaaatatatatacttagtgggtttactggtttcttaagagtgccgatcttgaatcaggcgatatctcatcacctgcagagttttttaagtttccaaacctatctgctctctttttttggttagtaacagtgtaaatccgcagtttgatcatatgtatgttctttctccgaatctgagattctgtataactgatcttttattgtatgtggatgatctgtttagtaaccttgaaactattttgaagtgagatgagtaagcaaaaaaattgagattttgttct

SEQ ID NO: 103236 - protein, 299 aa, Arabidopsis thaliana; identical to SEQ ID NO: 35840
  peptide (1)..(299): Ceres Seq. ID no. 13612293
  misc_feature (121)..(189): Pfam Name: linker histone H1 and H5 family Pfam Description: linker histone H1 and H5 family
  misc_feature (1)..(299): Homolog of NCBI NO: 15240783 NR Description: telomere repeat binding factor 2 (TRB2) thaliana] >gi|30698320|ref|NP_851286.1| telomere repeat binding
  misc_feature (1)..(299): Homolog of NCBI NO: 18481426 NR Description: telomere repeat binding factor 2 [Arabidopsis
  misc_feature (1)..(296): Homolog of NCBI NO: 15229625 NR Description: MYB -related protein [Arabidopsis thaliana]
  misc_feature (1)..(293): Homolog of NCBI NO: 18402853 NR Description: DNA-binding protein PcMYB1 -related [Arabidopsis
  misc_feature (1)..(293): Homolog of NCBI NO: 25405344 NR Description: hypothetical protein F2J10.16 [imported] -
  misc_feature (1)..(293): Homolog of NCBI NO: 21593573 NR Description: DNA-binding protein PcMYB1, putative [Arabidopsis
  misc_feature (1)..(293): Homolog of NCBI NO: 18481420 NR Description: telomere repeat binding factor 1 [Arabidopsis
  misc_feature (1)..(293): Homolog of NCBI NO: 34105723 NR Description: Single myb histone 6 [Zea mays subsp. mays]
  misc_feature (1)..(297): Homolog of NCBI NO: 34912214 NR Description: putative telomere repeat binding factor [Oryza
  misc_feature (1)..(296): Homolog of NCBI NO: 33286863 NR Description: Single myb histone 1 [Zea mays subsp. mays]

SEQ ID NO: 103237 - DNA, 1049 bp, Arabidopsis thaliana
  misc_feature (1)..(1049): Ceres Seq. ID no. 13612294
  misc_feature: MA Experiment ID: 108434 Result: Up-regulated in Transcription
  misc_feature: MA Experiment 108434 PARAMETER Experiment Name: At_Root_Tips_cDNA_P Parameter: Tissue Value: Root Tips
  misc_feature: MA Experiment ID: 108569 Result: Down-regulated in Transcription
  misc_feature: MA Experiment 108569 PARAMETER Experiment Name: At_0.001%_MeJA__cDNA_P Parameter: Timepoint (hr) Value: 6
  misc_feature: MA Experiment 108569 PARAMETER Experiment Name: At_0.001%_MeJA__cDNA_P Parameter: Tissue Value: Aerial
  misc_feature: MA Experiment 108569 PARAMETER Experiment Name: At_0.001%_MeJA__cDNA_P Parameter: Treatment Value: 0.001% MeJA vs. No Treatment
aactttaattcgccggctctcttgccgtgttttcgattttgacaaacgaaaaaaaaatcttcaatgagataacaataatatcagcagcggaacaaggattgagaaaaggaacctttcccttttaataagccgatatagatccttggaggagaatttgtagcagaccgatctctgtctgttgtctctgtttctacgaatctctgtgtttgtcggaaatcgtaaattatgggtttgtgggatgctcttctcaattggcttcgcagcctcttcttcaagcaagaaatggagctttcattgataggacttcaaaatgcaggaaagacatcacttgttaacgttgttgcaaccggtggatacagtgaagacatgatccctacggttggtttcaacatgaggaaagtgacaaaaggaagtgtcacgatcaagctttgggatctcggtggtcaacctaggttccgcagcatgtgggaacgttactgccgttctgtttccgcgattgtgtatgtagttgatgctgctgatcctgataacctcagtgtctcgaagagtgaactccatgatttgttgagcaagacgtcgcttaatggtatccctctcctagtccttgggaacaaaatcgacaagcctggagctttgtccaaagaagccctaaccgatgaaatgggtctcaagtcactgacagatagagaagtctgttgcttcatgatatcttgcaagaactctaccaacatcgatcaagtcattgattggcttgtaaagcactccaaatcatcgaattaaactttaccccaaaaggagagaagtcaactctctgcagttgtcgatctttcttgtgtttttggtcatttgatgatgatgatggtgattgtggaagaagacacagcttttttcttttatcctgtgaaaaacaagatttgtctatgttctctgtctgattctttatctgtctttcttctgcgtatgtggctgtgttctctgtatattagatttgattggtgttccctcttcttaaagccatgatgagatcacttccttcggggtcagctttt

SEQ ID NO: 103238 - protein, 184 aa, Arabidopsis thaliana; identical to SEQ ID NO: 23240
  peptide (1)..(184): Ceres Seq. ID no. 13612295
  misc_feature (6)..(180): Pfam Name: ADP-ribosylation factor family Pfam Description: ADP-ribosylation factor family
  misc_feature (1)..(184): Homolog of NCBI NO: 18425204 NR Description: ADP-ribosylation factor, putative [Arabidopsis
  misc_feature (1)..(184): Homolog of NCBI NO: 22331720 NR Description: ADP-ribosylation factor, putative [Arabidopsis
  misc_feature (20)..(184): Homolog of NCBI NO: 9757877 NR Description: ADP-ribosylation factor-like protein [Arabidopsis
  misc_feature (1)..(183): Homolog of NCBI NO: 18421676 NR Description: ADP-ribosylation factor, putative [Arabidopsis
  misc_feature (20)..(146): Homolog of NCBI NO: 11274625 NR Description: ADP-ribosylation factor-like protein T16K5.220 -
  misc_feature (147)..(184): Homolog of NCBI NO: 11274625 NR Description: ADP-ribosylation factor-like protein T16K5.220 -
  misc_feature (20)..(183): Homolog of NCBI NO: 9757978 NR Description: ADP-ribosylation factor-like protein [Arabidopsis
  misc_feature (20)..(184): Homolog of NCBI NO: 15229626 NR Description: ADP-ribosylation factor, putative [Arabidopsis
  misc_feature (1)..(182): Homolog of NCBI NO: 38174393 NR Description: Unknown (protein for MGC:75773) [Silurana
  misc_feature (1)..(182): Homolog of NCBI NO: 20270343 NR Description: hypothetical protein BC015408 [Homo sapiens]

SEQ ID NO: 103239 - protein, 165 aa, Arabidopsis thaliana; identical to SEQ ID NO: 23241
  peptide (1)..(165): Ceres Seq. ID no. 13612296
  misc_feature (1)..(161): Pfam Name: ADP-ribosylation factor family Pfam Description: ADP-ribosylation factor family
  misc_feature (1)..(165): Homolog of NCBI NO: 18425204 NR Description: ADP-ribosylation factor, putative [Arabidopsis
  misc_feature (1)..(165): Homolog of NCBI NO: 22331720 NR Description: ADP-ribosylation factor, putative [Arabidopsis
  misc_feature (1)..(165): Homolog of NCBI NO: 9757877 NR Description: ADP-ribosylation factor-like protein [Arabidopsis
  misc_feature (1)..(164): Homolog of NCBI NO: 18421676 NR Description: ADP-ribosylation factor, putative [Arabidopsis
  misc_feature (1)..(127): Homolog of NCBI NO: 11274625 NR Description: ADP-ribosylation factor-like protein T16K5.220 -
  misc_feature (128)..(165): Homolog of NCBI NO: 11274625 NR Description: ADP-ribosylation factor-like protein T16K5.220 -
  misc_feature (1)..(164): Homolog of NCBI NO: 9757978 NR Description: ADP-ribosylation factor-like protein [Arabidopsis
  misc_feature (1)..(165): Homolog of NCBI NO: 15229626 NR Description: ADP-ribosylation factor, putative [Arabidopsis
  misc_feature (1)..(163): Homolog of NCBI NO: 38174393 NR Description: Unknown (protein for MGC:75773) [Silurana
  misc_feature (1)..(163): Homolog of NCBI NO: 20270343 NR Description: hypothetical protein BC015408 [Homo sapiens]

SEQ ID NO: 103240 - protein, 137 aa, Arabidopsis thaliana; identical to SEQ ID NO: 23242
  peptide (1)..(137): Ceres Seq. ID no. 13612297
  misc_feature (1)..(133): Pfam Name: ADP-ribosylation factor family Pfam Description: ADP-ribosylation factor family
  misc_feature (1)..(137): Homolog of NCBI NO: 18425204 NR Description: ADP-ribosylation factor, putative [Arabidopsis
  misc_feature (1)..(137): Homolog of NCBI NO: 22331720 NR Description: ADP-ribosylation factor, putative [Arabidopsis
  misc_feature (1)..(137): Homolog of NCBI NO: 9757877 NR Description: ADP-ribosylation factor-like protein [Arabidopsis
  misc_feature (1)..(136): Homolog of NCBI NO: 18421676 NR Description: ADP-ribosylation factor, putative [Arabidopsis
  misc_feature (1)..(99): Homolog of NCBI NO: 11274625 NR Description: ADP-ribosylation factor-like protein T16K5.220 -
  misc_feature (100)..(137): Homolog of NCBI NO: 11274625 NR Description: ADP-ribosylation factor-like protein T16K5.220 -
  misc_feature (1)..(136): Homolog of NCBI NO: 9757978 NR Description: ADP-ribosylation factor-like protein [Arabidopsis
  misc_feature (1)..(137): Homolog of NCBI NO: 15229626 NR Description: ADP-ribosylation factor, putative [Arabidopsis
  misc_feature (1)..(135): Homolog of NCBI NO: 38174393 NR Description: Unknown (protein for MGC:75773) [Silurana
  misc_feature (1)..(135): Homolog of NCBI NO: 20270343 NR Description: hypothetical protein BC015408 [Homo sapiens]

SEQ ID NO: 103241 - DNA, 1310 bp, Arabidopsis thaliana
  misc_feature (1)..(1310): Ceres Seq. ID no. 13612298
  misc_feature: MA Experiment ID: 108435 Result: Up-regulated in Transcription
  misc_feature: MA Experiment 108435 PARAMETER Experiment Name: At_stm_Mutants_cDNA_P Parameter: Plant Line Value: wt Landsburg vs stm
  misc_feature: MA Experiment 108435 PARAMETER Experiment Name: At_stm_Mutants_cDNA_P Parameter: Tissue Value: Shoot Apical Meristem Region
  misc_feature: MA Experiment ID: 108474 Result: Down-regulated in Transcription
  misc_feature: MA Experiment 108474 PARAMETER Experiment Name: At_Drought_Flowers_cDNA_P Parameter: Timepoint (hr) Value: null
  misc_feature: MA Experiment 108474 PARAMETER Experiment Name: At_Drought_Flowers_cDNA_P Parameter: Treatment Value: Drought vs. No Drought
  misc_feature: MA Experiment ID: 108574 Result: Down-regulated in Transcription
  misc_feature: MA Experiment 108574 PARAMETER Experiment Name: At_Wounding__cDNA_P Parameter: Timepoint (hr) Value: 1
  misc_feature: MA Experiment 108574 PARAMETER Experiment Name: At_Wounding__cDNA_P Parameter: Tissue Value: Aerial
  misc_feature: MA Experiment 108574 PARAMETER Experiment Name: At_Wounding__cDNA_P Parameter: Treatment Value: Wounding vs. No Wounding
  misc_feature: MA Experiment ID: 108594 Result: Down-regulated in Transcription
  misc_feature: MA Experiment 108594 PARAMETER Experiment Name: At_Ler-rhl_Root_cDNA_P Parameter: Plant Line Value: null
  misc_feature: MA Experiment ID: 20000173 Result: Down-regulated in Transcription
  misc_feature: MA Experiment 20000173 PARAMETER Experiment Name: At_42deg_Heat_P Parameter: Age (day) Value: 14
  misc_feature: MA Experiment 20000173 PARAMETER Experiment Name: At_42deg_Heat_P Parameter: Organism Value: A. thaliana
  misc_feature: MA Experiment 20000173 PARAMETER Experiment Name: At_42deg_Heat_P Parameter: Plant Line Value: WS
  misc_feature: MA Experiment 20000173 PARAMETER Experiment Name: At_42deg_Heat_P Parameter: Temperature (deg C) Value: 42 vs. 22
  misc_feature: MA Experiment 20000173 PARAMETER Experiment Name: At_42deg_Heat_P Parameter: Timepoint (hr) Value: 6
  misc_feature: MA Experiment 20000173 PARAMETER Experiment Name: At_42deg_Heat_P Parameter: Tissue Value: Aerial
  misc_feature: MA Experiment ID: 20000179 Result: Up-regulated in Transcription
  misc_feature: MA Experiment 20000179 PARAMETER Experiment Name: At_Germinating_Seeds_P Parameter: Age (hr) Value: 6 vs. 0
  misc_feature: MA Experiment 20000179 PARAMETER Experiment Name: At_Germinating_Seeds_P Parameter: Tissue Value: Germinating Seeds
  misc_feature: MA Experiment ID: 20000180 Result: Up-regulated in Transcription
  misc_feature: MA Experiment 20000180 PARAMETER Experiment Name: At_Germinating_Seeds_P Parameter: Age (hr) Value: 24 vs. 0
  misc_feature: MA Experiment 20000180 PARAMETER Experiment Name: At_Germinating_Seeds_P Parameter: Tissue Value: Germinating Seeds
  misc_feature: MA Experiment ID: 20000185 Result: Up-regulated in Transcription
  misc_feature: MA Experiment 20000185 PARAMETER Experiment Name: At_Roots__P Parameter: Age (day) Value: 7 vs. 21
  misc_feature: MA Experiment 20000185 PARAMETER Experiment Name: At_Roots__P Parameter: Organism Value: A. thaliana
  misc_feature: MA Experiment 20000185 PARAMETER Experiment Name: At_Roots__P Parameter: Tissue Value: Roots vs. Whole Plant
  misc_feature: MA Experiment ID: 20000227 Result: Down-regulated in Transcription
  misc_feature: MA Experiment 20000227 PARAMETER Experiment Name: At_Root-Tips-vs-Tops_P Parameter: Tissue Value: Root Tips vs. Root Tops
  misc_feature: MA Experiment ID: 20000234 Result: Down-regulated in Transcription
  misc_feature: MA Experiment 20000234 PARAMETER Experiment Name: At_Siliques_P Parameter: Age (day) Value: 21
  misc_feature: MA Experiment 20000234 PARAMETER Experiment Name: At_Siliques_P Parameter: Organism Value: A. thaliana
  misc_feature: MA Experiment 20000234 PARAMETER Experiment Name: At_Siliques_P Parameter: Plant Line Value: WS
  misc_feature: MA Experiment 20000234 PARAMETER Experiment Name: At_Siliques_P Parameter: Tissue Value: Less Than 5mm Siliques vs. Whole Plant
  misc_feature: MA Experiment ID: 20000264 Result: Up-regulated in Transcription
  misc_feature: MA Experiment 20000264 PARAMETER Experiment Name: At_Open_Flower_P Parameter: Age (day) Value: 21
  misc_feature: MA Experiment 20000264 PARAMETER Experiment Name: At_Open_Flower_P Parameter: Plant Line Value: WS
  misc_feature: MA Experiment 20000264 PARAMETER Experiment Name: At_Open_Flower_P Parameter: Tissue Value: Open Flower vs. Whole Plant
  misc_feature: MA Experiment ID: 20000306 Result: Up-regulated in Transcription
  misc_feature: MA Experiment 20000306 PARAMETER Experiment Name: At_Germinating_Seeds_Sub_P Parameter: Age (hr) Value: 6 vs. 0
  misc_feature: MA Experiment 20000306 PARAMETER Experiment Name: At_Germinating_Seeds_Sub_P Parameter: Organism Value: A. thaliana
  misc_feature: MA Experiment 20000306 PARAMETER Experiment Name: At_Germinating_Seeds_Sub_P Parameter: Plant Line Value: WS
  misc_feature: MA Experiment 20000306 PARAMETER Experiment Name: At_Germinating_Seeds_Sub_P Parameter: Tissue Value: Germinating Seeds
  misc_feature: MA Experiment ID: 20000307 Result: Up-regulated in Transcription
  misc_feature: MA Experiment 20000307 PARAMETER Experiment Name: At_Germinating_Seeds_Sub_P Parameter: Age (hr) Value: 24 vs. 0
  misc_feature: MA Experiment 20000307 PARAMETER Experiment Name: At_Germinating_Seeds_Sub_P Parameter: Organism Value: A. thaliana
  misc_feature: MA Experiment 20000307 PARAMETER Experiment Name: At_Germinating_Seeds_Sub_P Parameter: Plant Line Value: WS
  misc_feature: MA Experiment 20000307 PARAMETER Experiment Name: At_Germinating_Seeds_Sub_P Parameter: Tissue Value: Germinating Seeds
  misc_feature: MA Experiment ID: 20000314 Result: Up-regulated in Transcription
  misc_feature: MA Experiment 20000314 PARAMETER Experiment Name: At_14day_Shoots-Roots_Sub_P Parameter: Age (day) Value: 14
  misc_feature: MA Experiment 20000314 PARAMETER Experiment Name: At_14day_Shoots-Roots_Sub_P Parameter: Organism Value: A. thaliana
  misc_feature: MA Experiment 20000314 PARAMETER Experiment Name: At_14day_Shoots-Roots_Sub_P Parameter: Plant Line Value: WS
  misc_feature: MA Experiment 20000314 PARAMETER Experiment Name: At_14day_Shoots-Roots_Sub_P Parameter: Tissue Value: Roots vs. Whole Plant
  misc_feature: MA Experiment ID: 20000327 Result: Down-regulated in Transcription
  misc_feature: MA Experiment 20000327 PARAMETER Experiment Name: At_42deg_Heat_Sub_P Parameter: Age (day) Value: 14
  misc_feature: MA Experiment 20000327 PARAMETER Experiment Name: At_42deg_Heat_Sub_P Parameter: Organism Value: A. thaliana
  misc_feature: MA Experiment 20000327 PARAMETER Experiment Name: At_42deg_Heat_Sub_P Parameter: Plant Line Value: WS
  misc_feature: MA Experiment 20000327 PARAMETER Experiment Name: At_42deg_Heat_Sub_P Parameter: Temperature (deg C) Value: 42 vs. 22
  misc_feature: MA Experiment 20000327 PARAMETER Experiment Name: At_42deg_Heat_Sub_P Parameter: Timepoint (hr) Value: 1
  misc_feature: MA Experiment 20000327 PARAMETER Experiment Name: At_42deg_Heat_Sub_P Parameter: Tissue Value: Aerial
  misc_feature: MA Experiment ID: 20000355 Result: Down-regulated in Transcription
  misc_feature: MA Experiment 20000355 PARAMETER Experiment Name: At_Siliques_Sub_P Parameter: Age (day) Value: 21
  misc_feature: MA Experiment 20000355 PARAMETER Experiment Name: At_Siliques_Sub_P Parameter: Organism Value: A. thaliana
  misc_feature: MA Experiment 20000355 PARAMETER Experiment Name: At_Siliques_Sub_P Parameter: Plant Line Value: WS
  misc_feature: MA Experiment 20000355 PARAMETER Experiment Name: At_Siliques_Sub_P Parameter: Tissue Value: Less Than 5mm Siliques vs. Whole Plant
  misc_feature: MA Experiment ID: 20000495 Result: Up-regulated in Transcription
  misc_feature: MA Experiment 20000495 PARAMETER Experiment Name: At_Guard_Cells_P Parameter: Harvest Date Value: 8/2/2002
  misc_feature: MA Experiment 20000495 PARAMETER Experiment Name: At_Guard_Cells_P Parameter: Organism Value: A. thaliana
  misc_feature: MA Experiment 20000495 PARAMETER Experiment Name: At_Guard_Cells_P Parameter: Tissue Value: Guard Cells vs. Leaves
  misc_feature: MA Experiment ID: 20000709 Result: Down-regulated in Transcription
  misc_feature: MA Experiment 20000709 PARAMETER Experiment Name: At_15mM_NH4NO3_L-to-H_P Parameter: Age (hr) Value: 14
  misc_feature: MA Experiment 20000709 PARAMETER Experiment Name: At_15mM_NH4NO3_L-to-H_P Parameter: Organism Value: A. thaliana
  misc_feature: MA Experiment 20000709 PARAMETER Experiment Name: At_15mM_NH4NO3_L-to-H_P Parameter: Plant Line Value: WS
  misc_feature: MA Experiment 20000709 PARAMETER Experiment Name: At_15mM_NH4NO3_L-to-H_P Parameter: Timepoint (hr) Value: 4
  misc_feature: MA Experiment 20000709 PARAMETER Experiment Name: At_15mM_NH4NO3_L-to-H_P Parameter: Tissue Value: Aerial
  misc_feature: MA Experiment 20000709 PARAMETER Experiment Name: At_15mM_NH4NO3_L-to-H_P Parameter: Treatment Value: 15mM NH4NO3 vs. 30mM Mannitol
  misc_feature: MA Experiment ID: 20000794 Result: Up-regulated in Transcription
  misc_feature: MA Experiment 20000794 PARAMETER Experiment Name: At_Petals_P Parameter: Age (day) Value: 23-25 days
  misc_feature: MA Experiment 20000794 PARAMETER Experiment Name: At_Petals_P Parameter: Plant Line Value: WS
  misc_feature: MA Experiment 20000794 PARAMETER Experiment Name: At_Petals_P Parameter: Tissue Value: Petals vs. Whole plant
  misc_feature: MA Experiment ID: 20001248 Result: Down-regulated in Transcription
  misc_feature: MA Experiment 20001248 PARAMETER Experiment Name: At_Far-red-induction_P Parameter: Age (day) Value: 7
  misc_feature: MA Experiment 20001248 PARAMETER Experiment Name: At_Far-red-induction_P Parameter: Light Value: Far-red vs. White
  misc_feature: MA Experiment 20001248 PARAMETER Experiment Name: At_Far-red-induction_P Parameter: Organism Value: A. thaliana
  misc_feature: MA Experiment 20001248 PARAMETER Experiment Name: At_Far-red-induction_P Parameter: Plant Line Value: Columbia
  misc_feature: MA Experiment 20001248 PARAMETER Experiment Name: At_Far-red-induction_P Parameter: Timepoint (hr) Value: 4
  misc_feature: MA Experiment 20001248 PARAMETER Experiment Name: At_Far-red-induction_P Parameter: Tissue Value: Whole Plant
  misc_feature: MA Experiment ID: 20001555 Result: Up-regulated in Transcription
  misc_feature: MA Experiment 20001555 PARAMETER Experiment Name: At_Drought_Soil_Dry_P Parameter: Age (day) Value: 24
  misc_feature: MA Experiment 20001555 PARAMETER Experiment Name: At_Drought_Soil_Dry_P Parameter: Organism Value: A. thaliana
  misc_feature: MA Experiment 20001555 PARAMETER Experiment Name: At_Drought_Soil_Dry_P Parameter: Plant Line Value: WS
  misc_feature: MA Experiment 20001555 PARAMETER Experiment Name: At_Drought_Soil_Dry_P Parameter: Post Timepoint (hr) Value: None
  misc_feature: MA Experiment 20001555 PARAMETER Experiment Name: At_Drought_Soil_Dry_P Parameter: Post-Treatment Value: None
  misc_feature: MA Experiment 20001555 PARAMETER Experiment Name: At_Drought_Soil_Dry_P Parameter: Timepoint (day) Value: 10
  misc_feature: MA Experiment 20001555 PARAMETER Experiment Name: At_Drought_Soil_Dry_P Parameter: Treatment Value: Drought vs. No Drought
  misc_feature: MA Experiment ID: 20001757 Result: Down-regulated in Transcription
  misc_feature: MA Experiment 20001757 PARAMETER Experiment Name: At_50mM_NH4NO3_L-to-H_P Parameter: Timepoint (hr) Value: 6
  misc_feature: MA Experiment 20001757 PARAMETER Experiment Name: At_50mM_NH4NO3_L-to-H_P Parameter: Tissue Value: Leaf
  misc_feature: MA Experiment 20001757 PARAMETER Experiment Name: At_50mM_NH4NO3_L-to-H_P Parameter: Treatment Value: 50mM NH4NO3 vs 100mM Mannitol
  misc_feature: MA Experiment ID: 20001807 Result: Down-regulated in Transcription
  misc_feature: MA Experiment 20001807 PARAMETER Experiment Name: At_50mM_NH4NO3_L-to-H_Sub_P Parameter: Timepoint (hr) Value: 6
  misc_feature: MA Experiment 20001807 PARAMETER Experiment Name: At_50mM_NH4NO3_L-to-H_Sub_P Parameter: Tissue Value: Leaf
  misc_feature: MA Experiment 20001807 PARAMETER Experiment Name: At_50mM_NH4NO3_L-to-H_Sub_P Parameter: Treatment Value: 50mM NH4NO3 vs 100mM Mannitol
  misc_feature: MA Experiment ID: 20001904 Result: Up-regulated in Transcription
  misc_feature: MA Experiment 20001904 PARAMETER Experiment Name: At_Drought_Reproduction_P Parameter: Age (day) Value: 37
  misc_feature: MA Experiment 20001904 PARAMETER Experiment Name: At_Drought_Reproduction_P Parameter: Organism Value: A. thaliana
  misc_feature: MA Experiment 20001904 PARAMETER Experiment Name: At_Drought_Reproduction_P Parameter: Plant Line Value: WS
  misc_feature: MA Experiment 20001904 PARAMETER Experiment Name: At_Drought_Reproduction_P Parameter: Timepoint (day) Value: 7
  misc_feature: MA Experiment 20001904 PARAMETER Experiment Name: At_Drought_Reproduction_P Parameter: Tissue Value: Rosettes
  misc_feature: MA Experiment 20001904 PARAMETER Experiment Name: At_Drought_Reproduction_P Parameter: Treatment Value: Drought vs. No Drought
  misc_feature: MA Experiment ID: 20001905 Result: Up-regulated in Transcription
  misc_feature: MA Experiment 20001905 PARAMETER Experiment Name: At_Drought_Reproduction_P Parameter: Age (day) Value: 40
  misc_feature: MA Experiment 20001905 PARAMETER Experiment Name: At_Drought_Reproduction_P Parameter: Organism Value: A. thaliana
  misc_feature: MA Experiment 20001905 PARAMETER Experiment Name: At_Drought_Reproduction_P Parameter: Plant Line Value: WS
  misc_feature: MA Experiment 20001905 PARAMETER Experiment Name: At_Drought_Reproduction_P Parameter: Timepoint (day) Value: 10
  misc_feature: MA Experiment 20001905 PARAMETER Experiment Name: At_Drought_Reproduction_P Parameter: Tissue Value: Rosettes
  misc_feature: MA Experiment 20001905 PARAMETER Experiment Name: At_Drought_Reproduction_P Parameter: Treatment Value: Drought vs. No Drought
aaagcacattggggcttatctctctctaagtaatacacacaaaaataactcacatatagagagagatatggctggagatatgcaaggagtgagagtagtagaaaaatattcaccggtcatagtgatggtgatgtcaaatgtagcgatgggttcggtgaatgcacttgtgaagaaagctcttgatgttggtgtgaaccatatggtcattggtgcttatcgaatggctatttccgctttaattttggttccctttgcctatgtcttggaaaggaaaacaagaccacaaataacgtttaggctaatggtcgatcatttcgtcagtggccttctcggggcgagtttgatgcagtttttctttttgcttggtctgtcgtacacgtcagcaactgtttcgtgtgctttggtaagcatgttgcctgcaatcaccttcgctttggcccttattttcaggactgaaaatgtgaagattctaaagaccaaagcaggaatgttgaaggtgattggaactttgatctgtataagtggagctttgttcttaacattttacaaaggcccacaaatatcaaactctcactctcactctcacggtggggcttcccacaacaacaacgatcaagacaaggccaataattggcttcttggatgtctttatttaaccataggaacagtgttgctatctctatggatgttgtttcaagggactttaagtattaagtacccttgcaaatactcgagcacttgtcttatgtcaattttcgcggcatttcaatgtgctctcttgagcctttacaagagcagagacgttaatgattggatcatagatgatagattcgttatcaccgtcatcatatacgctggagtggtaggacaagcaatgacgacggttgcaacaacatgggggattaaaaaattaggagctgtgttcgcatcggcgtttttcccacttactctcatttcggctactctatttgatttcctcattttacacactcctttataccttggaagtgtgattggatcactagtgaccataacgggtctctacatgttcttgtgggggaagaacaaagaaacggaatcatcaactgcattgtcttcaggaatggataacgaagctcaatatactactcctaataaggataacgactctaagtcgcccgtttaatttaattatattgttgttaatgtatgtttcaaataactgttatgtcctagttaatgtttaaggagaggtaatgagagataaaattttataattccaaacatcaacgtagagatttgtgaaatatttaaatccggtttgtttggtt

SEQ ID NO: 103242 - protein, 387 aa, Arabidopsis thaliana
  peptide (1)..(387): Ceres Seq. ID no. 13612299
  misc_feature (223)..(352): Pfam Name: Integral membrane protein DUF6 Pfam Description: Integral membrane protein DUF6
  misc_feature (23)..(387): Homolog of NCBI NO: 18378792 NR Description: nodulin MtN21 family protein [Arabidopsis
  misc_feature (64)..(387): Homolog of NCBI NO: 25406714 NR Description: protein T25K16.7 [imported] - Arabidopsis >gi|6715646|gb|AAF26473.1|AC007323_14 T25K16.7 [Arabidopsis
  misc_feature (23)..(360): Homolog of NCBI NO: 15220389 NR Description: nodulin MtN21 family protein [Arabidopsis
  misc_feature (34)..(382): Homolog of NCBI NO: 15234179 NR Description: nodulin MtN21 family protein [Arabidopsis
  misc_feature (115)..(373): Homolog of NCBI NO: 30682241 NR Description: nodulin MtN21 family protein [Arabidopsis
  misc_feature (112)..(382): Homolog of NCBI NO: 7486354 NR Description: hypothetical protein F3D13.4 - Arabidopsis >gi|3193309|gb|AAC19292.1| F3D13.4 gene product [Arabidopsis
  misc_feature (35)..(354): Homolog of NCBI NO: 15234182 NR Description: nodulin N21 family protein [Arabidopsis thaliana]
  misc_feature (35)..(357): Homolog of NCBI NO: 15234185 NR Description: nodulin MtN21 family protein [Arabidopsis
  misc_feature (112)..(357): Homolog of NCBI NO: 7485384 NR Description: hypothetical protein F11O4.14 - Arabidopsis >gi|3695385|gb|AAC62788.1| similar to Medicago truncatula MtN21
  misc_feature (35)..(113): Homolog of NCBI NO: 7485384 NR Description: hypothetical protein F11O4.14 - Arabidopsis >gi|3695385|gb|AAC62788.1| similar to Medicago truncatula MtN21
KHIGAYLSLSNTHKNNSHIERDMAGDMQGVRVVEKYSPVIVMVMSNVAMGSVNALVKKALDVGVNHMVIGAYRMAISALILVPFAYVLERKTRPQITFRLMVDHFVSGLLGASLMQFFFLLGLSYTSATVSCALVSMLPAITFALALIFRTENVKILKTKAGMLKVIGTLICISGALFLTFYKGPQISNSHSHSHGGASHNNNDQDKANNWLLGCLYLTIGTVLLSLWMLFQGTLSIKYPCKYSSTCLMSIFAAFQCALLSLYKSRDVNDWIIDDRFVITVIIYAGVVGQAMTTVATTWGIKKLGAVFASAFFPLTLISATLFDFLILHTPLYLGSVIGSLVTITGLYMFLWGKNKETESSTALSSGMDNEAQYTTPNKDNDSKSPV

SEQ ID NO: 103243 - protein, 365 aa, Arabidopsis thaliana
  peptide (1)..(365): Ceres Seq. ID no. 13612300
  misc_feature (201)..(330): Pfam Name: Integral membrane protein DUF6 Pfam Description: Integral membrane protein DUF6
  misc_feature (1)..(365): Homolog of NCBI NO: 18378792 NR Description: nodulin MtN21 family protein [Arabidopsis
  misc_feature (42)..(365): Homolog of NCBI NO: 25406714 NR Description: protein T25K16.7 [imported] - Arabidopsis >gi|6715646|gb|AAF26473.1|AC007323_14 T25K16.7 [Arabidopsis
  misc_feature (1)..(338): Homolog of NCBI NO: 15220389 NR Description: nodulin MtN21 family protein [Arabidopsis
  misc_feature (12)..(360): Homolog of NCBI NO: 15234179 NR Description: nodulin MtN21 family protein [Arabidopsis
  misc_feature (93)..(351): Homolog of NCBI NO: 30682241 NR Description: nodulin MtN21 family protein [Arabidopsis
  misc_feature (90)..(360): Homolog of NCBI NO: 7486354 NR Description: hypothetical protein F3D13.4 - Arabidopsis >gi|3193309|gb|AAC19292.1| F3D13.4 gene product [Arabidopsis
  misc_feature (13)..(332): Homolog of NCBI NO: 15234182 NR Description: nodulin N21 family protein [Arabidopsis thaliana]
  misc_feature (13)..(335): Homolog of NCBI NO: 15234185 NR Description: nodulin MtN21 family protein [Arabidopsis
  misc_feature (90)..(335): Homolog of NCBI NO: 7485384 NR Description: hypothetical protein F11O4.14 - Arabidopsis >gi|3695385|gb|AAC62788.1| similar to Medicago truncatula MtN21
  misc_feature (13)..(91): Homolog of NCBI NO: 7485384 NR Description: hypothetical protein F11O4.14 - Arabidopsis >gi|3695385|gb|AAC62788.1| similar to Medicago truncatula MtN21
MAGDMQGVRVVEKYSPVIVMVMSNVAMGSVNALVKKALDVGVNHMVIGAYRMAISALILVPFAYVLERKTRPQITFRLMVDHFVSGLLGASLMQFFFLLGLSYTSATVSCALVSMLPAITFALALIFRTENVKILKTKAGMLKVIGTLICISGALFLTFYKGPQISNSHSHSHGGASHNNNDQDKANNWLLGCLYLTIGTVLLSLWMLFQGTLSIKYPCKYSSTCLMSIFAAFQCALLSLYKSRDVNDWIIDDRFVITVIIYAGVVGQAMTTVATTWGIKKLGAVFASAFFPLTLISATLFDFLILHTPLYLGSVIGSLVTITGLYMFLWGKNKETESSTALSSGMDNEAQYTTPNKDNDSKSPV

SEQ ID NO: 103244 - protein, 361 aa, Arabidopsis thaliana
  peptide (1)..(361): Ceres Seq. ID no. 13612301
  misc_feature (197)..(326): Pfam Name: Integral membrane protein DUF6 Pfam Description: Integral membrane protein DUF6
  misc_feature (1)..(361): Homolog of NCBI NO: 18378792 NR Description: nodulin MtN21 family protein [Arabidopsis
  misc_feature (38)..(361): Homolog of NCBI NO: 25406714 NR Description: protein T25K16.7 [imported] - Arabidopsis >gi|6715646|gb|AAF26473.1|AC007323_14 T25K16.7 [Arabidopsis
  misc_feature (1)..(334): Homolog of NCBI NO: 15220389 NR Description: nodulin MtN21 family protein [Arabidopsis
  misc_feature (8)..(356): Homolog of NCBI NO: 15234179 NR Description: nodulin MtN21 family protein [Arabidopsis
  misc_feature (89)..(347): Homolog of NCBI NO: 30682241 NR Description: nodulin MtN21 family protein [Arabidopsis
  misc_feature (86)..(356): Homolog of NCBI NO: 7486354 NR Description: hypothetical protein F3D13.4 - Arabidopsis >gi|3193309|gb|AAC19292.1| F3D13.4 gene product [Arabidopsis
  misc_feature (9)..(328): Homolog of NCBI NO: 15234182 NR Description: nodulin N21 family protein [Arabidopsis thaliana]
  misc_feature (9)..(331): Homolog of NCBI NO: 15234185 NR Description: nodulin MtN21 family protein [Arabidopsis
  misc_feature (86)..(331): Homolog of NCBI NO: 7485384 NR Description: hypothetical protein F11O4.14 - Arabidopsis >gi|3695385|gb|AAC62788.1| similar to Medicago truncatula MtN21
  misc_feature (9)..(87): Homolog of NCBI NO: 7485384 NR Description: hypothetical protein F11O4.14 - Arabidopsis >gi|3695385|gb|AAC62788.1| similar to Medicago truncatula MtN21
MQGVRVVEKYSPVIVMVMSNVAMGSVNALVKKALDVGVNHMVIGAYRMAISALILVPFAYVLERKTRPQITFRLMVDHFVSGLLGASLMQFFFLLGLSYTSATVSCALVSMLPAITFALALIFRTENVKILKTKAGMLKVIGTLICISGALFLTFYKGPQISNSHSHSHGGASHNNNDQDKANNWLLGCLYLTIGTVLLSLWMLFQGTLSIKYPCKYSSTCLMSIFAAFQCALLSLYKSRDVNDWIIDDRFVITVIIYAGVVGQAMTTVATTWGIKKLGAVFASAFFPLTLISATLFDFLILHTPLYLGSVIGSLVTITGLYMFLWGKNKETESSTALSSGMDNEAQYTTPNKDNDSKSPV

SEQ ID NO: 103245 - DNA, 1627 bp, Arabidopsis thaliana
  misc_feature (1)..(1627): Ceres Seq. ID no. 13612306
  misc_feature: MA Experiment ID: 20000179 Result: Up-regulated in Transcription
  misc_feature: MA Experiment 20000179 PARAMETER Experiment Name: At_Germinating_Seeds_P Parameter: Age (hr) Value: 6 vs. 0
  misc_feature: MA Experiment 20000179 PARAMETER Experiment Name: At_Germinating_Seeds_P Parameter: Tissue Value: Germinating Seeds
  misc_feature: MA Experiment ID: 20000180 Result: Up-regulated in Transcription
  misc_feature: MA Experiment 20000180 PARAMETER Experiment Name: At_Germinating_Seeds_P Parameter: Age (hr) Value: 24 vs. 0
  misc_feature: MA Experiment 20000180 PARAMETER Experiment Name: At_Germinating_Seeds_P Parameter: Tissue Value: Germinating Seeds
  misc_feature: MA Experiment ID: 20000184 Result: Up-regulated in Transcription
  misc_feature: MA Experiment 20000184 PARAMETER Experiment Name: At_Shoots__P Parameter: Age (day) Value: 7
  misc_feature: MA Experiment 20000184 PARAMETER Experiment Name: At_Shoots__P Parameter: Tissue Value: Shoots vs. Whole Plant
  misc_feature: MA Experiment ID: 20000185 Result: Up-regulated in Transcription
  misc_feature: MA Experiment 20000185 PARAMETER Experiment Name: At_Roots__P Parameter: Age (day) Value: 7 vs. 21
  misc_feature: MA Experiment 20000185 PARAMETER Experiment Name: At_Roots__P Parameter: Organism Value: A. thaliana
  misc_feature: MA Experiment 20000185 PARAMETER Experiment Name: At_Roots__P Parameter: Tissue Value: Roots vs. Whole Plant
  misc_feature: MA Experiment ID: 20001450 Result: Up-regulated in Transcription
  misc_feature: MA Experiment 20001450 PARAMETER Experiment Name: At_Far-red-induction_P Parameter: Age (day) Value: 7
  misc_feature: MA Experiment 20001450 PARAMETER Experiment Name: At_Far-red-induction_P Parameter: Light Value: Far-red vs. White
  misc_feature: MA Experiment 20001450 PARAMETER Experiment Name: At_Far-red-induction_P Parameter: Organism Value: A. thaliana
  misc_feature: MA Experiment 20001450 PARAMETER Experiment Name: At_Far-red-induction_P Parameter: Plant Line Value: Columbia
  misc_feature: MA Experiment 20001450 PARAMETER Experiment Name: At_Far-red-induction_P Parameter: Timepoint (hr) Value: 8
  misc_feature: MA Experiment 20001450 PARAMETER Experiment Name: At_Far-red-induction_P Parameter: Tissue Value: Whole Plant
ctcctctgcctctcatctcttgttctctccgcccatctctgctctcttttattttcccagaaagttttttttttttttttccgaattccgttaatctcattggggtttccattgatagcaatggcgacggctttcgctcccactaagctcactgccacggttcctctgcatggatcccatgagaatcgtctcttgctcccgatccgattggctcctccttcttctttcctcggatccacccgttccctctcccttcgcagactcaatcactccaacgccacccgtcgatctcccgtcgtctctgtccaggaagttgtcaaggagaagcaatccaccaataataccagcctgttgataaccaaagaggaaggattggagttgtatgaagatatgatactaggtagatctttcgaagacatgtgtgctcaaatgtattaccgaggcaagatgtttggttttgttcacttgtacaatggccaagaggctgtttctactggctttatcaagctccttaccaagtctgactctgtcgttagtacctaccgtgaccatgtccatgccctcagcaaaggtgtctctgctcgtgctgttatgagcgagctcttcggcaaggttactggatgctgcagaggccaaggtggatccatgcacatgttctccaaagaacacaacatgcttggtggctttgcttttattggtgaaggcattcctgtcgccactggtgctgcctttagctccaagtacaggagggaagtcttgaaacaggattgtgatgatgtcactgtcgcctttttcggagatggaacttgtaacaacggacagttcttcgagtgtctcaacatggctgctctctataaactgcctattatctttgttgtcgagaataacttgtgggccattgggatgtctcacttgagagccacttctgaccccgagatttggaagaaaggtcctgcatttgggatgcctggtgttcatgttgacggtatggatgtcttgaaggtcagggaagtcgctaaagaagctgtcactagagctagaagaggagaaggtccaaccttggttgaatgtgagacttatagattcagaggacactccttggctgatcccgatgagctccgtgatgctgctgagaaagccaaatacgcggctagagacccaatcgcagcattgaagaagtatttgatagagaacaagcttgcaaaggaagcagagctaaagtcaatagagaaaaagatagacgagttggtggaggaagcggttgagtttgcagacgctagtccacagcccggtcgcagtcagttgctagagaatgtgtttgctgatccaaaaggatttggaattggacctgatggacggtacagatgtgaggaccccaagtttaccgaaggcacagctcaagtctgagaagacaagtttaaccataagctgtctactgtctcttcgatgtttctatatatcttattaagttaaatgctacagagaatcagtttgaatcatttgcactttttgctttttgtttggtgttactaaactatcacaaggttcttcttgtagttcgttgggttttcattggttaccacttaccagagaattgtatttttttttttaaagataattattttgc

SEQ ID NO: 103246 - protein, 468 aa, Arabidopsis thaliana
  peptide (1)..(468): Ceres Seq. ID no. 13612307
  misc_feature (129)..(433): Pfam Name: Dehydrogenase E1 component Pfam Description: Dehydrogenase E1 component
  misc_feature (41)..(468): Homolog of NCBI NO: 15223294 NR Description: pyruvate dehydrogenase E1 alpha subunit thaliana] >gi|2454182|gb|AAB86803.1| pyruvate dehydrogenase E1 subunit [Arabidopsis thaliana] >gi|15450707|gb|AAK96625.1|
  misc_feature (41)..(457): Homolog of NCBI NO: 6715645 NR Description: T25K16.8 [Arabidopsis thaliana]
  misc_feature (119)..(468): Homolog of NCBI NO: 38344868 NR Description: OSJNBa0020P07.11 [Oryza sativa (japonica
  misc_feature (102)..(442): Homolog of NCBI NO: 23041416 NR Description: hypothetical protein [Trichodesmium erythraeum
  misc_feature (102)..(442): Homolog of NCBI NO: 17230200 NR Description: pyruvate dehydrogenase E1 component, alpha [Nostoc sp. PCC 7120] >gi|25284425|pir||AE2144 pyruvate
  misc_feature (113)..(442): Homolog of NCBI NO: 23128827 NR Description: hypothetical protein [Nostoc punctiforme]
  misc_feature (113)..(442): Homolog of NCBI NO: 16331186 NR Description: pyruvate dehydrogenase E1 component, alpha subunit
  misc_feature (112)..(442): Homolog of NCBI NO: 11465733 NR Description: pyruvate dehydrogenase E1 component alpha subunit purpurea] >gi|1709450|sp|P51267|ODPA_PORPU PYRUVATE DEHYDROGENASE COMPONENT ALPHA SUBUNIT >gi|2147992|pir||S73188 pyruvate
  misc_feature (119)..(442): Homolog of NCBI NO: 22298712 NR Description: pyruvate dehydrogenase E1 component, alpha subunit
  misc_feature (259)..(444): Homolog of NCBI NO: 23508447 NR Description: pyruvate dehydrogenase E1 component, alpha putative [Plasmodium falciparum 3D7] pyruvate dehydrogenase E1 component, alpha subunit, putative
LLCLSSLVLSAHLCSLLFSQKVFFFFFRIPLISLGFPLIAMATAFAPTKLTATVPLHGSHENRLLLPIRLAPPSSFLGSTRSLSLRRLNHSNATRRSPVVSVQEVVKEKQSTNNTSLLITKEEGLELYEDMILGRSFEDMCAQMYYRGKMFGFVHLYNGQEAVSTGFIKLLTKSDSVVSTYRDHVHALSKGVSARAVMSELFGKVTGCCRGQGGSMHMFSKEHNMLGGFAFIGEGIPVATGAAFSSKYRREVLKQDCDDVTVAFFGDGTCNNGQFFECLNMAALYKLPIIFVVENNLWAIGMSHLRATSDPEIWKKGPAFGMPGVHVDGMDVLKVREVAKEAVTRARRGEGPTLVECETYRFRGHSLADPDELRDAAEKAKYAARDPIAALKKYLIENKLAKEAELKSIEKKIDELVEEAVEFADASPQPGRSQLLENVFADPKGFGIGPDGRYRCEDPKFTEGTAQV

SEQ ID NO: 103247 - protein, 428 aa, Arabidopsis thaliana; identical to SEQ ID NO: 36448
  peptide (1)..(428): Ceres Seq. ID no. 13612308
  misc_feature (89)..(393): Pfam Name: Dehydrogenase E1 component Pfam Description: Dehydrogenase E1 component
  misc_feature (1)..(428): Homolog of NCBI NO: 15223294 NR Description: pyruvate dehydrogenase E1 alpha subunit thaliana] >gi|2454182|gb|AAB86803.1| pyruvate dehydrogenase E1 subunit [Arabidopsis thaliana] >gi|15450707|gb|AAK96625.1|
  misc_feature (1)..(417): Homolog of NCBI NO: 6715645 NR Description: T25K16.8 [Arabidopsis thaliana]
  misc_feature (79)..(428): Homolog of NCBI NO: 38344868 NR Description: OSJNBa0020P07.11 [Oryza sativa (japonica
  misc_feature (62)..(402): Homolog of NCBI NO: 23041416 NR Description: hypothetical protein [Trichodesmium erythraeum
  misc_feature (62)..(402): Homolog of NCBI NO: 17230200 NR Description: pyruvate dehydrogenase E1 component, alpha [Nostoc sp. PCC 7120] >gi|25284425|pir||AE2144 pyruvate
  misc_feature (73)..(402): Homolog of NCBI NO: 23128827 NR Description: hypothetical protein [Nostoc punctiforme]
  misc_feature (73)..(402): Homolog of NCBI NO: 16331186 NR Description: pyruvate dehydrogenase E1 component, alpha subunit
  misc_feature (72)..(402): Homolog of NCBI NO: 11465733 NR Description: pyruvate dehydrogenase E1 component alpha subunit purpurea] >gi|1709450|sp|P51267|ODPA_PORPU PYRUVATE DEHYDROGENASE COMPONENT ALPHA SUBUNIT >gi|2147992|pir||S73188 pyruvate
  misc_feature (79)..(402): Homolog of NCBI NO: 22298712 NR Description: pyruvate dehydrogenase E1 component, alpha subunit
  misc_feature (219)..(404): Homolog of NCBI NO: 23508447 NR Description: pyruvate dehydrogenase E1 component, alpha putative [Plasmodium falciparum 3D7] pyruvate dehydrogenase E1 component, alpha subunit, putative

SEQ ID NO: 103248 - protein, 338 aa, Arabidopsis thaliana; identical to SEQ ID NO: 24106
  peptide (1)..(338): Ceres Seq. ID no. 13612309
  misc_feature (1)..(303): Pfam Name: Dehydrogenase E1 component Pfam Description: Dehydrogenase E1 component
  misc_feature (1)..(338): Homolog of NCBI NO: 15223294 NR Description: pyruvate dehydrogenase E1 alpha subunit thaliana] >gi|2454182|gb|AAB86803.1| pyruvate dehydrogenase E1 subunit [Arabidopsis thaliana] >gi|15450707|gb|AAK96625.1|
  misc_feature (1)..(327): Homolog of NCBI NO: 6715645 NR Description: T25K16.8 [Arabidopsis thaliana]
  misc_feature (1)..(338): Homolog of NCBI NO: 38344868 NR Description: OSJNBa0020P07.11 [Oryza sativa (japonica
  misc_feature (1)..(312): Homolog of NCBI NO: 23041416 NR Description: hypothetical protein [Trichodesmium erythraeum
  misc_feature (1)..(312): Homolog of NCBI NO: 17230200 NR Description: pyruvate dehydrogenase E1 component, alpha [Nostoc sp. PCC 7120] >gi|25284425|pir||AE2144 pyruvate
  misc_feature (1)..(312): Homolog of NCBI NO: 23128827 NR Description: hypothetical protein [Nostoc punctiforme]
  misc_feature (1)..(312): Homolog of NCBI NO: 16331186 NR Description: pyruvate dehydrogenase E1 component, alpha subunit
  misc_feature (1)..(312): Homolog of NCBI NO: 11465733 NR Description: pyruvate dehydrogenase E1 component alpha subunit purpurea] >gi|1709450|sp|P51267|ODPA_PORPU PYRUVATE DEHYDROGENASE COMPONENT ALPHA SUBUNIT >gi|2147992|pir||S73188 pyruvate
  misc_feature (1)..(312): Homolog of NCBI NO: 22298712 NR Description: pyruvate dehydrogenase E1 component, alpha subunit
  misc_feature (129)..(314): Homolog of NCBI NO: 23508447 NR Description: pyruvate dehydrogenase E1 component, alpha putative [Plasmodium falciparum 3D7] pyruvate dehydrogenase E1 component, alpha subunit, putative

SEQ ID NO: 103249 - DNA, 982 bp, Arabidopsis thaliana
  misc_feature (1)..(982): Ceres Seq. ID no. 13612316
  misc_feature: MA Experiment ID: 20000184 Result: Up-regulated in Transcription
  misc_feature: MA Experiment 20000184 PARAMETER Experiment Name: At_Shoots__P Parameter: Age (day) Value: 7
  misc_feature: MA Experiment 20000184 PARAMETER Experiment Name: At_Shoots__P Parameter: Tissue Value: Shoots vs. Whole Plant
  misc_feature: MA Experiment ID: 20000185 Result: Up-regulated in Transcription
  misc_feature: MA Experiment 20000185 PARAMETER Experiment Name: At_Roots__P Parameter: Age (day) Value: 7 vs. 21
  misc_feature: MA Experiment 20000185 PARAMETER Experiment Name: At_Roots__P Parameter: Organism Value: A. thaliana
  misc_feature: MA Experiment 20000185 PARAMETER Experiment Name: At_Roots__P Parameter: Tissue Value: Roots vs. Whole Plant
  misc_feature: MA Experiment ID: 20000314 Result: Up-regulated in Transcription
  misc_feature: MA Experiment 20000314 PARAMETER Experiment Name: At_14day_Shoots-Roots_Sub_P Parameter: Age (day) Value: 14
  misc_feature: MA Experiment 20000314 PARAMETER Experiment Name: At_14day_Shoots-Roots_Sub_P Parameter: Organism Value: A. thaliana
  misc_feature: MA Experiment 20000314 PARAMETER Experiment Name: At_14day_Shoots-Roots_Sub_P Parameter: Plant Line Value: WS
  misc_feature: MA Experiment 20000314 PARAMETER Experiment Name: At_14day_Shoots-Roots_Sub_P Parameter: Tissue Value: Roots vs. Whole Plant
  misc_feature: MA Experiment ID: 20000355 Result: Up-regulated in Transcription
  misc_feature: MA Experiment 20000355 PARAMETER Experiment Name: At_Siliques_Sub_P Parameter: Age (day) Value: 21
  misc_feature: MA Experiment 20000355 PARAMETER Experiment Name: At_Siliques_Sub_P Parameter: Organism Value: A. thaliana
  misc_feature: MA Experiment 20000355 PARAMETER Experiment Name: At_Siliques_Sub_P Parameter: Plant Line Value: WS
  misc_feature: MA Experiment 20000355 PARAMETER Experiment Name: At_Siliques_Sub_P Parameter: Tissue Value: Less Than 5mm Siliques vs. Whole Plant
  misc_feature: MA Experiment ID: 20000440 Result: Up-regulated in Transcription
  misc_feature: MA Experiment 20000440 PARAMETER Experiment Name: At_Closed-Flower__Sub_P Parameter: Tissue Value: Closed Flower vs. Whole Plant
aaggtaaaaaaaagctttgtgcagagagagagagaagaagaaaaatgggtttgcttacgaacaagattgagagagaagagctaaagccaggagatcacatctatacttacagagcaatcttcgcttattctcaccacggaatctttgtcggtgggtccaaagttgttcatttcagacctgaacacaaccccatggattcatcaacatcatcaatatcatcatcttcctctgaagatatctgttccatatttcctgattgcggtttcagacaaccggacagtggagtagtcctttcttgcttagactgtttcctcaagaacggctcactctactgcttcgaatatggagtcagtccatcggttttcctaaccaaagtccgcggagggacttgcacaaccgcgcaatctgatacaactgattcagtcatccacagggcaatgtaccttctccaaaacggatttggcaactacgacattttcaagaacaactgtgaggatttcgcgctctattgcaagaccggtttgcttataatggataagctcggtgtagggagaagcggtcaagcttcttcaattgttggtgctcctttggctgcactcctctcttctcctttcaaattgcttattccaagtcccattggtgtggcaacagttactgctggtatgtactgtatgagtcgctatgctaccgatattggtgttagaagcgacgtcattaaggtctcagttgaggatttggctctcaaccttgacgtaaagaccattgagcaaggtgaagaagaagaagaagacgaagaagaagattctgataccgactatgttaggtgacaaacagatacctatcacctttgttcacgaatttcgatatacataagaaaacatttcagttagaatcctcatgttggttttatgttccctttattgcatttgttggcctattttctgtctgtacaaaatgaaaacgcagacgttttggtttgggt

SEQ ID NO: 103250 - protein, 274 aa, Arabidopsis thaliana
  peptide (1)..(274): Ceres Seq. ID no. 13612317
  misc_feature (110)..(191): Pfam Name: NC domain Pfam Description: NC domain
  misc_feature (15)..(274): Homolog of NCBI NO: 18378812 NR Description: expressed protein [Arabidopsis thaliana]
  misc_feature (15)..(274): Homolog of NCBI NO: 21592684 NR Description: unknown [Arabidopsis thaliana]
  misc_feature (15)..(256): Homolog of NCBI NO: 22328196 NR Description: expressed protein [Arabidopsis thaliana]
  misc_feature (15)..(249): Homolog of NCBI NO: 18415178 NR Description: expressed protein [Arabidopsis thaliana] AT5g06370/MHF15_11 [Arabidopsis thaliana]
  misc_feature (15)..(265): Homolog of NCBI NO: 18396282 NR Description: expressed protein [Arabidopsis thaliana] unknown protein [Arabidopsis thaliana] unknown protein [Arabidopsis thaliana]
  misc_feature (15)..(265): Homolog of NCBI NO: 21594170 NR Description: unknown [Arabidopsis thaliana]
  misc_feature (15)..(194): Homolog of NCBI NO: 15237330 NR Description: expressed protein [Arabidopsis thaliana] gb|AAF32477.1~gene_id:MQK4.8~similar to unknown protein thaliana] >gi|27754415|gb|AAO22656.1| unknown protein
  misc_feature (175)..(259): Homolog of NCBI NO: 15237330 NR Description: expressed protein [Arabidopsis thaliana] gb|AAF32477.1~gene_id:MQK4.8~similar to unknown protein thaliana] >gi|27754415|gb|AAO22656.1| unknown protein
  misc_feature (46)..(249): Homolog of NCBI NO: 9758417 NR Description: gb|AAF32477.1~gene_id:MHF15.11~similar to unknown
  misc_feature (14)..(245): Homolog of NCBI NO: 15237327 NR Description: hypothetical protein [Arabidopsis thaliana] gb|AAF32477.1~gene_id:MQK4.5~similar to unknown protein
GKKKLCAERERRRKMGLLTNKIEREELKPGDHIYTYRAIFAYSHHGIFVGGSKVVHFRPEHNPMDSSTSSISSSSSEDICSIFPDCGFRQPDSGVVLSCLDCFLKNGSLYCFEYGVSPSVFLTKVRGGTCTTAQSDTTDSVIHRAMYLLQNGFGNYDIFKNNCEDFALYCKTGLLIMDKLGVGRSGQASSIVGAPLAALLSSPFKLLIPSPIGVATVTAGMYCMSRYATDIGVRSDVIKVSVEDLALNLDVKTIEQGEEEEEDEEEDSDTDYVR

SEQ ID NO: 103251 - protein, 260 aa, Arabidopsis thaliana
  peptide (1)..(260): Ceres Seq. ID no. 13612318
  misc_feature (96)..(177): Pfam Name: NC domain Pfam Description: NC domain
  misc_feature (1)..(260): Homolog of NCBI NO: 18378812 NR Description: expressed protein [Arabidopsis thaliana]
  misc_feature (1)..(260): Homolog of NCBI NO: 21592684 NR Description: unknown [Arabidopsis thaliana]
  misc_feature (1)..(242): Homolog of NCBI NO: 22328196 NR Description: expressed protein [Arabidopsis thaliana]
  misc_feature (1)..(235): Homolog of NCBI NO: 18415178 NR Description: expressed protein [Arabidopsis thaliana] AT5g06370/MHF15_11 [Arabidopsis thaliana]
  misc_feature (1)..(251): Homolog of NCBI NO: 18396282 NR Description: expressed protein [Arabidopsis thaliana] unknown protein [Arabidopsis thaliana] unknown protein [Arabidopsis thaliana]
  misc_feature (1)..(251): Homolog of NCBI NO: 21594170 NR Description: unknown [Arabidopsis thaliana]
  misc_feature (1)..(180): Homolog of NCBI NO: 15237330 NR Description: expressed protein [Arabidopsis thaliana] gb|AAF32477.1~gene_id:MQK4.8~similar to unknown protein thaliana] >gi|27754415|gb|AAO22656.1| unknown protein
  misc_feature (161)..(245): Homolog of NCBI NO: 15237330 NR Description: expressed protein [Arabidopsis thaliana] gb|AAF32477.1~gene_id:MQK4.8~similar to unknown protein thaliana] >gi|27754415|gb|AAO22656.1| unknown protein
  misc_feature (32)..(235): Homolog of NCBI NO: 9758417 NR Description: gb|AAF32477.1~gene_id:MHF15.11~similar to unknown
  misc_feature (1)..(231): Homolog of NCBI NO: 15237327 NR Description: hypothetical protein [Arabidopsis thaliana] gb|AAF32477.1~gene_id:MQK4.5~similar to unknown protein
MGLLTNKIEREELKPGDHIYTYRAIFAYSHHGIFVGGSKVVHFRPEHNPMDSSTSSISSSSSEDICSIFPDCGFRQPDSGVVLSCLDCFLKNGSLYCFEYGVSPSVFLTKVRGGTCTTAQSDTTDSVIHRAMYLLQNGFGNYDIFKNNCEDFALYCKTGLLIMDKLGVGRSGQASSIVGAPLAALLSSPFKLLIPSPIGVATVTAGMYCMSRYATDIGVRSDVIKVSVEDLALNLDVKTIEQGEEEEEDEEEDSDTDYVR

SEQ ID NO: 103252 - protein, 211 aa, Arabidopsis thaliana
  peptide (1)..(211): Ceres Seq. ID no. 13612319
  misc_feature (47)..(128): Pfam Name: NC domain Pfam Description: NC domain
  misc_feature (1)..(211): Homolog of NCBI NO: 18378812 NR Description: expressed protein [Arabidopsis thaliana]
  misc_feature (1)..(211): Homolog of NCBI NO: 21592684 NR Description: unknown [Arabidopsis thaliana]
  misc_feature (1)..(193): Homolog of NCBI NO: 22328196 NR Description: expressed protein [Arabidopsis thaliana]
  misc_feature (1)..(186): Homolog of NCBI NO: 18415178 NR Description: expressed protein [Arabidopsis thaliana] AT5g06370/MHF15_11 [Arabidopsis thaliana]
  misc_feature (1)..(202): Homolog of NCBI NO: 18396282 NR Description: expressed protein [Arabidopsis thaliana] unknown protein [Arabidopsis thaliana] unknown protein [Arabidopsis thaliana]
  misc_feature (1)..(202): Homolog of NCBI NO: 21594170 NR Description: unknown [Arabidopsis thaliana]
  misc_feature (1)..(131): Homolog of NCBI NO: 15237330 NR Description: expressed protein [Arabidopsis thaliana] gb|AAF32477.1~gene_id:MQK4.8~similar to unknown protein thaliana] >gi|27754415|gb|AAO22656.1| unknown protein
  misc_feature (112)..(196): Homolog of NCBI NO: 15237330 NR Description: expressed protein [Arabidopsis thaliana] gb|AAF32477.1~gene_id:MQK4.8~similar to unknown protein thaliana] >gi|27754415|gb|AAO22656.1| unknown protein
  misc_feature (1)..(186): Homolog of NCBI NO: 9758417 NR Description: gb|AAF32477.1~gene_id:MHF15.11~similar to unknown
  misc_feature (1)..(182): Homolog of NCBI NO: 15237327 NR Description: hypothetical protein [Arabidopsis thaliana] gb|AAF32477.1~gene_id:MQK4.5~similar to unknown protein
MDSSTSSISSSSSEDICSIFPDCGFRQPDSGVVLSCLDCFLKNGSLYCFEYGVSPSVFLTKVRGGTCTTAQSDTTDSVIHRAMYLLQNGFGNYDIFKNNCEDFALYCKTGLLIMDKLGVGRSGQASSIVGAPLAALLSSPFKLLIPSPIGVATVTAGMYCMSRYATDIGVRSDVIKVSVEDLALNLDVKTIEQGEEEEEDEEEDSDTDYVR

SEQ ID NO: 103253 - DNA, 678 bp, Arabidopsis thaliana
  misc_feature (1)..(678): Ceres Seq. ID no. 13612328
  misc_feature: MA Experiment ID: 108462 Result: Up-regulated in Transcription
  misc_feature: MA Experiment 108462 PARAMETER Experiment Name: At_Germinating_Seeds_cDNA_P Parameter: Age (day) Value: 2 vs. 0
  misc_feature: MA Experiment 108462 PARAMETER Experiment Name: At_Germinating_Seeds_cDNA_P Parameter: Tissue Value: Germinating Seeds
  misc_feature: MA Experiment ID: 108463 Result: Up-regulated in Transcription
  misc_feature: MA Experiment 108463 PARAMETER Experiment Name: At_Germinating_Seeds_cDNA_P Parameter: Age (day) Value: 3 vs. 0
  misc_feature: MA Experiment 108463 PARAMETER Experiment Name: At_Germinating_Seeds_cDNA_P Parameter: Tissue Value: Germinating Seeds
  misc_feature: MA Experiment ID: 108473 Result: Up-regulated in Transcription
  misc_feature: MA Experiment 108473 PARAMETER Experiment Name: At_Drought_Flowers_cDNA_P Parameter: Timepoint (hr) Value: 7 d
  misc_feature: MA Experiment 108473 PARAMETER Experiment Name: At_Drought_Flowers_cDNA_P Parameter: Tissue Value: Flower
  misc_feature: MA Experiment 108473 PARAMETER Experiment Name: At_Drought_Flowers_cDNA_P Parameter: Treatment Value: Drought vs. No Drought
  misc_feature: MA Experiment ID: 108561 Result: Up-regulated in Transcription
  misc_feature: MA Experiment 108561 PARAMETER Experiment Name: At_100uM_ABA_cDNA_P Parameter: Timepoint (hr) Value: 6
  misc_feature: MA Experiment 108561 PARAMETER Experiment Name: At_100uM_ABA_cDNA_P Parameter: Tissue Value: Aerial
  misc_feature: MA Experiment 108561 PARAMETER Experiment Name: At_100uM_ABA_cDNA_P Parameter: Treatment Value: 100uM ABA vs. No Treatment
  misc_feature: MA Experiment ID: 108572 Result: Up-regulated in Transcription
  misc_feature: MA Experiment 108572 PARAMETER Experiment Name: At_Drought_cDNA_P Parameter: Timepoint (hr) Value: 1
  misc_feature: MA Experiment 108572 PARAMETER Experiment Name: At_Drought_cDNA_P Parameter: Tissue Value: Aerial
  misc_feature: MA Experiment 108572 PARAMETER Experiment Name: At_Drought_cDNA_P Parameter: Treatment Value: Drought vs. No Drought
  misc_feature: MA Experiment ID: 108573 Result: Up-regulated in Transcription
  misc_feature: MA Experiment 108573 PARAMETER Experiment Name: At_Drought_cDNA_P Parameter: Timepoint (hr) Value: 6
  misc_feature: MA Experiment 108573 PARAMETER Experiment Name: At_Drought_cDNA_P Parameter: Tissue Value: Aerial
  misc_feature: MA Experiment 108573 PARAMETER Experiment Name: At_Drought_cDNA_P Parameter: Treatment Value: Drought vs. No Drought
  misc_feature: MA Experiment ID: 108574 Result: Up-regulated in Transcription
  misc_feature: MA Experiment 108574 PARAMETER Experiment Name: At_Wounding__cDNA_P Parameter: Timepoint (hr) Value: 1
  misc_feature: MA Experiment 108574 PARAMETER Experiment Name: At_Wounding__cDNA_P Parameter: Tissue Value: Aerial
  misc_feature: MA Experiment 108574 PARAMETER Experiment Name: At_Wounding__cDNA_P Parameter: Treatment Value: Wounding vs. No Wounding
  misc_feature: MA Experiment ID: 108579 Result: Up-regulated in Transcription
  misc_feature: MA Experiment 108579 PARAMETER Experiment Name: At_4deg_Cold_cDNA_P Parameter: Temperature (deg C) Value: 4 vs. 22
  misc_feature: MA Experiment 108579 PARAMETER Experiment Name: At_4deg_Cold_cDNA_P Parameter: Timepoint (hr) Value: 6
  misc_feature: MA Experiment 108579 PARAMETER Experiment Name: At_4deg_Cold_cDNA_P Parameter: Tissue Value: Aerial
  misc_feature: MA Experiment ID: 108585 Result: Up-regulated in Transcription
  misc_feature: MA Experiment 108585 PARAMETER Experiment Name: At_5mM_NaNP_cDNA_P Parameter: Timepoint (hr) Value: 6
  misc_feature: MA Experiment 108585 PARAMETER Experiment Name: At_5mM_NaNP_cDNA_P Parameter: Tissue Value: Aerial
  misc_feature: MA Experiment 108585 PARAMETER Experiment Name: At_5mM_NaNP_cDNA_P Parameter: Treatment Value: null
  misc_feature: MA Experiment ID: 108595 Result: Up-regulated in Transcription
  misc_feature: MA Experiment 108595 PARAMETER Experiment Name: At_Ler-pi_Ovule_cDNA_P Parameter: Plant Line Value: null
  misc_feature: MA Experiment ID: 108605 Result: Up-regulated in Transcription
  misc_feature: MA Experiment 108605 PARAMETER Experiment Name: At_100uM_ABA_cDNA_P Parameter: Timepoint (hr) Value: 6
  misc_feature: MA Experiment 108605 PARAMETER Experiment Name: At_100uM_ABA_cDNA_P Parameter: Tissue Value: Aerial
  misc_feature: MA Experiment 108605 PARAMETER Experiment Name: At_100uM_ABA_cDNA_P Parameter: Treatment Value: 100uM ABA vs. No Treatment
  misc_feature: MA Experiment ID: 108607 Result: Up-regulated in Transcription
  misc_feature: MA Experiment 108607 PARAMETER Experiment Name: At_100uM_ABA_cDNA_P Parameter: Timepoint (hr) Value: 4
  misc_feature: MA Experiment 108607 PARAMETER Experiment Name: At_100uM_ABA_cDNA_P Parameter: Tissue Value: Aerial
  misc_feature: MA Experiment 108607 PARAMETER Experiment Name: At_100uM_ABA_cDNA_P Parameter: Treatment Value: 100uM ABA vs. No Treatment
  misc_feature: MA Experiment ID: 108608 Result: Up-regulated in Transcription
  misc_feature: MA Experiment 108608 PARAMETER Experiment Name: At_100uM_ABA_cDNA_P Parameter: Timepoint (hr) Value: 1
  misc_feature: MA Experiment 108608 PARAMETER Experiment Name: At_100uM_ABA_cDNA_P Parameter: Tissue Value: Aerial
  misc_feature: MA Experiment 108608 PARAMETER Experiment Name: At_100uM_ABA_cDNA_P Parameter: Treatment Value: 100uM ABA vs. No Treatment
  misc_feature: MA Experiment ID: 108668 Result: Up-regulated in Transcription
  misc_feature: MA Experiment 108668 PARAMETER Experiment Name: At_2mM_SA_cDNA_P Parameter: Plant Line Value: WS
  misc_feature: MA Experiment 108668 PARAMETER Experiment Name: At_2mM_SA_cDNA_P Parameter: Timepoint (hr) Value: 6
  misc_feature: MA Experiment 108668 PARAMETER Experiment Name: At_2mM_SA_cDNA_P Parameter: Treatment Value: 2mM SA vs. No Treatment
  misc_feature: MA Experiment ID: 20000069 Result: Up-regulated in Transcription
  misc_feature: MA Experiment 20000069 PARAMETER Experiment Name: At_100uM_ABA_Mutants_cDNA_P Parameter: Plant Line Value: CS23
  misc_feature: MA Experiment 20000069 PARAMETER Experiment Name: At_100uM_ABA_Mutants_cDNA_P Parameter: Timepoint (hr) Value: 6
  misc_feature: MA Experiment 20000069 PARAMETER Experiment Name: At_100uM_ABA_Mutants_cDNA_P Parameter: Tissue Value: Aerial
  misc_feature: MA Experiment 20000069 PARAMETER Experiment Name: At_100uM_ABA_Mutants_cDNA_P Parameter: Treatment Value: 100uM ABA vs. No Treatment
  misc_feature: MA Experiment ID: 20000070 Result: Up-regulated in Transcription
  misc_feature: MA Experiment 20000070 PARAMETER Experiment Name: At_100uM_ABA_Mutants_cDNA_P Parameter: Plant Line Value: CS24
  misc_feature: MA Experiment 20000070 PARAMETER Experiment Name: At_100uM_ABA_Mutants_cDNA_P Parameter: Timepoint (hr) Value: 6
  misc_feature: MA Experiment 20000070 PARAMETER Experiment Name: At_100uM_ABA_Mutants_cDNA_P Parameter: Tissue Value: Aerial
  misc_feature: MA Experiment 20000070 PARAMETER Experiment Name: At_100uM_ABA_Mutants_cDNA_P Parameter: Treatment Value: 100uM ABA vs. No Treatment
  misc_feature: MA Experiment ID: 20000071 Result: Up-regulated in Transcription
  misc_feature: MA Experiment 20000071 PARAMETER Experiment Name: At_100uM_ABA_Mutants_cDNA_P Parameter: Plant Line Value: CS8104
  misc_feature: MA Experiment 20000071 PARAMETER Experiment Name: At_100uM_ABA_Mutants_cDNA_P Parameter: Timepoint (hr) Value: 6
  misc_feature: MA Experiment 20000071 PARAMETER Experiment Name: At_100uM_ABA_Mutants_cDNA_P Parameter: Tissue Value: Aerial
  misc_feature: MA Experiment 20000071 PARAMETER Experiment Name: At_100uM_ABA_Mutants_cDNA_P Parameter: Treatment Value: 100uM ABA vs. No Treatment
  misc_feature: MA Experiment ID: 20000072 Result: Up-regulated in Transcription
  misc_feature: MA Experiment 20000072 PARAMETER Experiment Name: At_100uM_ABA_Mutants_cDNA_P Parameter: Plant Line Value: CS8105
  misc_feature: MA Experiment 20000072 PARAMETER Experiment Name: At_100uM_ABA_Mutants_cDNA_P Parameter: Timepoint (hr) Value: 6
  misc_feature: MA Experiment 20000072 PARAMETER Experiment Name: At_100uM_ABA_Mutants_cDNA_P Parameter: Tissue Value: Aerial
  misc_feature: MA Experiment 20000072 PARAMETER Experiment Name: At_100uM_ABA_Mutants_cDNA_P Parameter: Treatment Value: 100uM ABA vs. No Treatment
  misc_feature: MA Experiment ID: 20000086 Result: Up-regulated in Transcription
  misc_feature: MA Experiment 20000086 PARAMETER Experiment Name: At_100uM_ABA_Mutants_cDNA_P Parameter: Plant Line Value: CS22
  misc_feature: MA Experiment 20000086 PARAMETER Experiment Name: At_100uM_ABA_Mutants_cDNA_P Parameter: Timepoint (hr) Value: 6
  misc_feature: MA Experiment 20000086 PARAMETER Experiment Name: At_100uM_ABA_Mutants_cDNA_P Parameter: Tissue Value: Aerial
  misc_feature: MA Experiment 20000086 PARAMETER Experiment Name: At_100uM_ABA_Mutants_cDNA_P Parameter: Treatment Value: 100uM ABA vs. No Treatment
  misc_feature: MA Experiment ID: 20000087 Result: Up-regulated in Transcription
  misc_feature: MA Experiment 20000087 PARAMETER Experiment Name: At_100uM_ABA_Mutants_cDNA_P Parameter: Plant Line Value: WS
  misc_feature: MA Experiment 20000087 PARAMETER Experiment Name: At_100uM_ABA_Mutants_cDNA_P Parameter: Timepoint (hr) Value: 6
  misc_feature: MA Experiment 20000087 PARAMETER Experiment Name: At_100uM_ABA_Mutants_cDNA_P Parameter: Tissue Value: Aerial
  misc_feature: MA Experiment 20000087 PARAMETER Experiment Name: At_100uM_ABA_Mutants_cDNA_P Parameter: Treatment Value: 100uM ABA vs. No Treatment
  misc_feature: MA Experiment ID: 20000088 Result: Up-regulated in Transcription
  misc_feature: MA Experiment 20000088 PARAMETER Experiment Name: At_100uM_ABA_Mutants_cDNA_P Parameter: Plant Line Value: Landsberg
  misc_feature: MA Experiment 20000088 PARAMETER Experiment Name: At_100uM_ABA_Mutants_cDNA_P Parameter: Timepoint (hr) Value: 6
  misc_feature: MA Experiment 20000088 PARAMETER Experiment Name: At_100uM_ABA_Mutants_cDNA_P Parameter: Tissue Value: Aerial
  misc_feature: MA Experiment 20000088 PARAMETER Experiment Name: At_100uM_ABA_Mutants_cDNA_P Parameter: Treatment Value: 100uM ABA vs. No Treatment
  misc_feature: MA Experiment ID: 20000089 Result: Up-regulated in Transcription
  misc_feature: MA Experiment ID: 20000117 Result: Up-regulated in Transcription
  misc_feature: MA Experiment 20000117 PARAMETER Experiment Name: At_100uM_ABA_Mutants_cDNA_P Parameter: Plant Line Value: Columbia
  misc_feature: MA Experiment 20000117 PARAMETER Experiment Name: At_100uM_ABA_Mutants_cDNA_P Parameter: Timepoint (hr) Value: 6
  misc_feature: MA Experiment 20000117 PARAMETER Experiment Name: At_100uM_ABA_Mutants_cDNA_P Parameter: Tissue Value: Aerial
  misc_feature: MA Experiment 20000117 PARAMETER Experiment Name: At_100uM_ABA_Mutants_cDNA_P Parameter: Treatment Value: 100uM ABA vs. No Treatment
  misc_feature: MA Experiment ID: 20000166 Result: Up-regulated in Transcription
  misc_feature: MA Experiment 20000166 PARAMETER Experiment Name: At_100uM_ABA_P Parameter: Age (day) Value: 14
  misc_feature: MA Experiment 20000166 PARAMETER Experiment Name: At_100uM_ABA_P Parameter: Organism Value: A. thaliana
  misc_feature: MA Experiment 20000166 PARAMETER Experiment Name: At_100uM_ABA_P Parameter: Plant Line Value: WS
  misc_feature: MA Experiment 20000166 PARAMETER Experiment Name: At_100uM_ABA_P Parameter: Timepoint (hr) Value: 1
  misc_feature: MA Experiment 20000166 PARAMETER Experiment Name: At_100uM_ABA_P Parameter: Tissue Value: Aerial
  misc_feature: MA Experiment 20000166 PARAMETER Experiment Name: At_100uM_ABA_P Parameter: Treatment Value: 100uM ABA vs. No Treatment
  misc_feature: MA Experiment ID: 20000169 Result: Up-regulated in Transcription
  misc_feature: MA Experiment 20000169 PARAMETER Experiment Name: At_100uM_ABA_P Parameter: Age (day) Value: 14
  misc_feature: MA Experiment 20000169 PARAMETER Experiment Name: At_100uM_ABA_P Parameter: Organism Value: A. thaliana
  misc_feature: MA Experiment 20000169 PARAMETER Experiment Name: At_100uM_ABA_P Parameter: Plant Line Value: WS
  misc_feature: MA Experiment 20000169 PARAMETER Experiment Name: At_100uM_ABA_P Parameter: Timepoint (hr) Value: 6
  misc_feature: MA Experiment 20000169 PARAMETER Experiment Name: At_100uM_ABA_P Parameter: Tissue Value: Aerial
  misc_feature: MA Experiment 20000169 PARAMETER Experiment Name: At_100uM_ABA_P Parameter: Treatment Value: 100uM ABA vs. No Treatment
  misc_feature: MA Experiment ID: 20000182 Result: Up-regulated in Transcription
  misc_feature: MA Experiment 20000182 PARAMETER Experiment Name: At_2mM_SA_P Parameter: Age (day) Value: 14
  misc_feature: MA Experiment 20000182 PARAMETER Experiment Name: At_2mM_SA_P Parameter: Organism Value: A. thaliana
  misc_feature: MA Experiment 20000182 PARAMETER Experiment Name: At_2mM_SA_P Parameter: Plant Line Value: WS
  misc_feature: MA Experiment 20000182 PARAMETER Experiment Name: At_2mM_SA_P Parameter: Timepoint (hr) Value: 6
  misc_feature: MA Experiment 20000182 PARAMETER Experiment Name: At_2mM_SA_P Parameter: Tissue Value: Aerial
  misc_feature: MA Experiment 20000182 PARAMETER Experiment Name: At_2mM_SA_P Parameter: Treatment Value: 2mM SA vs. No Treatment
  misc_feature: MA Experiment ID: 20000184 Result: Down-regulated in Transcription
  misc_feature: MA Experiment 20000184 PARAMETER Experiment Name: At_Shoots__P Parameter: Age (day) Value: 7
  misc_feature: MA Experiment 20000184 PARAMETER Experiment Name: At_Shoots__P Parameter: Tissue Value: Shoots vs. Whole Plant
  misc_feature: MA Experiment ID: 20000227 Result: Down-regulated in Transcription
  misc_feature: MA Experiment 20000227 PARAMETER Experiment Name: At_Root-Tips-vs-Tops_P Parameter: Tissue Value: Root Tips vs. Root Tops
  misc_feature: MA Experiment ID: 20000234 Result: Down-regulated in Transcription
  misc_feature: MA Experiment 20000234 PARAMETER Experiment Name: At_Siliques_P Parameter: Age (day) Value: 21
  misc_feature: MA Experiment 20000234 PARAMETER Experiment Name: At_Siliques_P Parameter: Organism Value: A. thaliana
  misc_feature: MA Experiment 20000234 PARAMETER Experiment Name: At_Siliques_P Parameter: Plant Line Value: WS
  misc_feature: MA Experiment 20000234 PARAMETER Experiment Name: At_Siliques_P Parameter: Tissue Value: Less Than 5mm Siliques vs. Whole Plant
  misc_feature: MA Experiment ID: 20000235 Result: Down-regulated in Transcription
  misc_feature: MA Experiment 20000235 PARAMETER Experiment Name: At_Siliques_P Parameter: Age (day) Value: 21
  misc_feature: MA Experiment 20000235 PARAMETER Experiment Name: At_Siliques_P Parameter: Organism Value: A. thaliana
  misc_feature: MA Experiment 20000235 PARAMETER Experiment Name: At_Siliques_P Parameter: Plant Line Value: WS
  misc_feature: MA Experiment 20000235 PARAMETER Experiment Name: At_Siliques_P Parameter: Tissue Value: 5-10mm Siliques vs. Whole Plant
  misc_feature: MA Experiment ID: 20000264 Result: Down-regulated in Transcription
  misc_feature: MA Experiment 20000264 PARAMETER Experiment Name: At_Open_Flower_P Parameter: Age (day) Value: 21
  misc_feature: MA Experiment 20000264 PARAMETER Experiment Name: At_Open_Flower_P Parameter: Plant Line Value: WS
  misc_feature: MA Experiment 20000264 PARAMETER Experiment Name: At_Open_Flower_P Parameter: Tissue Value: Open Flower vs. Whole Plant
  misc_feature: MA Experiment ID: 20000265 Result: Down-regulated in Transcription
  misc_feature: MA Experiment 20000265 PARAMETER Experiment Name: At_Open_Flower_P Parameter: Age (day) Value: 21
  misc_feature: MA Experiment 20000265 PARAMETER Experiment Name: At_Open_Flower_P Parameter: Plant Line Value: WS
  misc_feature: MA Experiment 20000265 PARAMETER Experiment Name: At_Open_Flower_P Parameter: Tissue Value: Closed Flower vs. Whole Plant
  misc_feature: MA Experiment ID: 20000267 Result: Up-regulated in Transcription
  misc_feature: MA Experiment 20000267 PARAMETER Experiment Name: At_Drought_P Parameter: Age (day) Value: 7
  misc_feature: MA Experiment 20000267 PARAMETER Experiment Name: At_Drought_P Parameter: Organism Value: A. thaliana
  misc_feature: MA Experiment 20000267 PARAMETER Experiment Name: At_Drought_P Parameter: Plant Line Value: WS
  misc_feature: MA Experiment 20000267 PARAMETER Experiment Name: At_Drought_P Parameter: Timepoint (hr) Value: 6
  misc_feature: MA Experiment 20000267 PARAMETER Experiment Name: At_Drought_P Parameter: Tissue Value: Whole Plant
  misc_feature: MA Experiment 20000267 PARAMETER Experiment Name: At_Drought_P Parameter: Treatment Value: Drought vs. No Drought
  misc_feature: MA Experiment ID: 20000268 Result: Up-regulated in Transcription
  misc_feature: MA Experiment 20000268 PARAMETER Experiment Name: At_100mM_NaCl__P Parameter: Age (day) Value: 14
  misc_feature: MA Experiment 20000268 PARAMETER Experiment Name: At_100mM_NaCl__P Parameter: Organism Value: A. thaliana
  misc_feature: MA Experiment 20000268 PARAMETER Experiment Name: At_100mM_NaCl__P Parameter: Plant Line Value: WS
  misc_feature: MA Experiment 20000268 PARAMETER Experiment Name: At_100mM_NaCl__P Parameter: Timepoint (hr) Value: 6
  misc_feature: MA Experiment 20000268 PARAMETER Experiment Name: At_100mM_NaCl__P Parameter: Tissue Value: Whole Plant
  misc_feature: MA Experiment 20000268 PARAMETER Experiment Name: At_100mM_NaCl__P Parameter: Treatment Value: 100mM NaCl vs. No Treatment
  misc_feature: MA Experiment ID: 20000315 Result: Down-regulated in Transcription
  misc_feature: MA Experiment 20000315 PARAMETER Experiment Name: At_14day_Shoots-Roots_Sub_P Parameter: Age (day) Value: 14
  misc_feature: MA Experiment 20000315 PARAMETER Experiment Name: At_14day_Shoots-Roots_Sub_P Parameter: Organism Value: A. thaliana
  misc_feature: MA Experiment 20000315 PARAMETER Experiment Name: At_14day_Shoots-Roots_Sub_P Parameter: Plant Line Value: WS
  misc_feature: MA Experiment 20000315 PARAMETER Experiment Name: At_14day_Shoots-Roots_Sub_P Parameter: Tissue Value: Shoots vs. Whole Plant
  misc_feature: MA Experiment ID: 20000329 Result: Up-regulated in Transcription
  misc_feature: MA Experiment 20000329 PARAMETER Experiment Name: At_4deg_Cold_Sub_P Parameter: Age (day) Value: 14
  misc_feature: MA Experiment 20000329 PARAMETER Experiment Name: At_4deg_Cold_Sub_P Parameter: Organism Value: A. thaliana
  misc_feature: MA Experiment 20000329 PARAMETER Experiment Name: At_4deg_Cold_Sub_P Parameter: Plant Line Value: WS
  misc_feature: MA Experiment 20000329 PARAMETER Experiment Name: At_4deg_Cold_Sub_P Parameter: Temperature (deg C) Value: 4 vs. 22
  misc_feature: MA Experiment 20000329 PARAMETER Experiment Name: At_4deg_Cold_Sub_P Parameter: Timepoint (hr) Value: 6
  misc_feature: MA Experiment 20000329 PARAMETER Experiment Name: At_4deg_Cold_Sub_P Parameter: Tissue Value: Aerial
  misc_feature: MA Experiment ID: 20000347 Result: Up-regulated in Transcription
  misc_feature: MA Experiment 20000347 PARAMETER Experiment Name: At_2mM_SA_Sub_P Parameter: Age (day) Value: 14
  misc_feature: MA Experiment 20000347 PARAMETER Experiment Name: At_2mM_SA_Sub_P Parameter: Organism Value: A. thaliana
  misc_feature: MA Experiment 20000347 PARAMETER Experiment Name: At_2mM_SA_Sub_P Parameter: Plant Line Value: WS
  misc_feature: MA Experiment 20000347 PARAMETER Experiment Name: At_2mM_SA_Sub_P Parameter: Timepoint (hr) Value: 6
  misc_feature: MA Experiment 20000347 PARAMETER Experiment Name: At_2mM_SA_Sub_P Parameter: Tissue Value: Aerial
  misc_feature: MA Experiment 20000347 PARAMETER Experiment Name: At_2mM_SA_Sub_P Parameter: Treatment Value: 2mM SA vs. No Treatment
  misc_feature: MA Experiment ID: 20000348 Result: Up-regulated in Transcription
  misc_feature: MA Experiment 20000348 PARAMETER Experiment Name: At_100uM_ABA_Sub_P Parameter: Age (day) Value: 14
  misc_feature: MA Experiment 20000348 PARAMETER Experiment Name: At_100uM_ABA_Sub_P Parameter: Organism Value: A. thaliana
  misc_feature: MA Experiment 20000348 PARAMETER Experiment Name: At_100uM_ABA_Sub_P Parameter: Plant Line Value: WS
  misc_feature: MA Experiment 20000348 PARAMETER Experiment Name: At_100uM_ABA_Sub_P Parameter: Timepoint (hr) Value: 1
  misc_feature: MA Experiment 20000348 PARAMETER Experiment Name: At_100uM_ABA_Sub_P Parameter: Tissue Value: Aerial
  misc_feature: MA Experiment 20000348 PARAMETER Experiment Name: At_100uM_ABA_Sub_P Parameter: Treatment Value: 100uM ABA vs. No Treatment
  misc_feature: MA Experiment ID: 20000352 Result: Up-regulated in Transcription
  misc_feature: MA Experiment 20000352 PARAMETER Experiment Name: At_Drought_Sub_P Parameter: Age (day) Value: 7
  misc_feature: MA Experiment 20000352 PARAMETER Experiment Name: At_Drought_Sub_P Parameter: Organism Value: A. thaliana
  misc_feature: MA Experiment 20000352 PARAMETER Experiment Name: At_Drought_Sub_P Parameter: Plant Line Value: WS
  misc_feature: MA Experiment 20000352 PARAMETER Experiment Name: At_Drought_Sub_P Parameter: Timepoint (hr) Value: 6
  misc_feature: MA Experiment 20000352 PARAMETER Experiment Name: At_Drought_Sub_P Parameter: Tissue Value: Whole Plant
  misc_feature: MA Experiment 20000352 PARAMETER Experiment Name: At_Drought_Sub_P Parameter: Treatment Value: Drought vs. No Drought
  misc_feature: MA Experiment ID: 20000355 Result: Down-regulated in Transcription
  misc_feature: MA Experiment 20000355 PARAMETER Experiment Name: At_Siliques_Sub_P Parameter: Age (day) Value: 21
  misc_feature: MA Experiment 20000355 PARAMETER Experiment Name: At_Siliques_Sub_P Parameter: Organism Value: A. thaliana
  misc_feature: MA Experiment 20000355 PARAMETER Experiment Name: At_Siliques_Sub_P Parameter: Plant Line Value: WS
  misc_feature: MA Experiment 20000355 PARAMETER Experiment Name: At_Siliques_Sub_P Parameter: Tissue Value: Less Than 5mm Siliques vs. Whole Plant
  misc_feature: MA Experiment ID: 20000436 Result: Up-regulated in Transcription
  misc_feature: MA Experiment 20000436 PARAMETER Experiment Name: At_Drought_P Parameter: Age (day) Value: 7
  misc_feature: MA Experiment 20000436 PARAMETER Experiment Name: At_Drought_P Parameter: Organism Value: A. thaliana
  misc_feature: MA Experiment 20000436 PARAMETER Experiment Name: At_Drought_P Parameter: Plant Line Value: WS
  misc_feature: MA Experiment 20000436 PARAMETER Experiment Name: At_Drought_P Parameter: Timepoint (hr) Value: 12
  misc_feature: MA Experiment 20000436 PARAMETER Experiment Name: At_Drought_P Parameter: Tissue Value: Whole Plant
  misc_feature: MA Experiment 20000436 PARAMETER Experiment Name: At_Drought_P Parameter: Treatment Value: Drought vs. No Drought
  misc_feature: MA Experiment ID: 20000437 Result: Up-regulated in Transcription
  misc_feature: MA Experiment 20000437 PARAMETER Experiment Name: At_Drought_P Parameter: Age (day) Value: 8
  misc_feature: MA Experiment 20000437 PARAMETER Experiment Name: At_Drought_P Parameter: Organism Value: A. thaliana
  misc_feature: MA Experiment 20000437 PARAMETER Experiment Name: At_Drought_P Parameter: Plant Line Value: WS
  misc_feature: MA Experiment 20000437 PARAMETER Experiment Name: At_Drought_P Parameter: Timepoint (hr) Value: 24
  misc_feature: MA Experiment 20000437 PARAMETER Experiment Name: At_Drought_P Parameter: Tissue Value: Whole Plant
  misc_feature: MA Experiment 20000437 PARAMETER Experiment Name: At_Drought_P Parameter: Treatment Value: Drought vs. No Drought
  misc_feature: MA Experiment ID: 20000438 Result: Down-regulated in Transcription
  misc_feature: MA Experiment 20000438 PARAMETER Experiment Name: At_Shoots__P Parameter: Age (day) Value: 14
  misc_feature: MA Experiment 20000438 PARAMETER Experiment Name: At_Shoots__P Parameter: Tissue Value: Shoots vs. Whole Plant
  misc_feature: MA Experiment ID: 20000440 Result: Down-regulated in Transcription
  misc_feature: MA Experiment 20000440 PARAMETER Experiment Name: At_Closed-Flower__Sub_P Parameter: Tissue Value: Closed Flower vs. Whole Plant
  misc_feature: MA Experiment ID: 20000453 Result: Up-regulated in Transcription
  misc_feature: MA Experiment 20000453 PARAMETER Experiment Name: At_100uM_ABA_P Parameter: Age (day) Value: 15
  misc_feature: MA Experiment 20000453 PARAMETER Experiment Name: At_100uM_ABA_P Parameter: Organism Value: A. thaliana
  misc_feature: MA Experiment 20000453 PARAMETER Experiment Name: At_100uM_ABA_P Parameter: Plant Line Value: WS
  misc_feature: MA Experiment 20000453 PARAMETER Experiment Name: At_100uM_ABA_P Parameter: Timepoint (hr) Value: 24
  misc_feature: MA Experiment 20000453 PARAMETER Experiment Name: At_100uM_ABA_P Parameter: Tissue Value: Aerial
  misc_feature: MA Experiment 20000453 PARAMETER Experiment Name: At_100uM_ABA_P Parameter: Treatment Value: 100uM ABA vs. No Treatment
  misc_feature: MA Experiment ID: 20000495 Result: Down-regulated in Transcription
  misc_feature: MA Experiment 20000495 PARAMETER Experiment Name: At_Guard_Cells_P Parameter: Harvest Date Value: 8/2/2002
  misc_feature: MA Experiment 20000495 PARAMETER Experiment Name: At_Guard_Cells_P Parameter: Organism Value: A. thaliana
  misc_feature: MA Experiment 20000495 PARAMETER Experiment Name: At_Guard_Cells_P Parameter: Tissue Value: Guard Cells vs. Leaves
  misc_feature: MA Experiment ID: 20000576 Result: Up-regulated in Transcription
  misc_feature: MA Experiment 20000576 PARAMETER Experiment Name: At_100uM_ABA_Mutants__P Parameter: Organism Value: A. thaliana
  misc_feature: MA Experiment 20000576 PARAMETER Experiment Name: At_100uM_ABA_Mutants__P Parameter: Plant Line Value: CS23
  misc_feature: MA Experiment 20000576 PARAMETER Experiment Name: At_100uM_ABA_Mutants__P Parameter: Timepoint (hr) Value: 6
  misc_feature: MA Experiment 20000576 PARAMETER Experiment Name: At_100uM_ABA_Mutants__P Parameter: Tissue Value: Whole Plant
  misc_feature: MA Experiment 20000576 PARAMETER Experiment Name: At_100uM_ABA_Mutants__P Parameter: Treatment Value: 1uM ABA vs. No Treatment
  misc_feature: MA Experiment ID: 20000794 Result: Down-regulated in Transcription
  misc_feature: MA Experiment 20000794 PARAMETER Experiment Name: At_Petals_P Parameter: Age (day) Value: 23-25 days
  misc_feature: MA Experiment 20000794 PARAMETER Experiment Name: At_Petals_P Parameter: Plant Line Value: WS
  misc_feature: MA Experiment 20000794 PARAMETER Experiment Name: At_Petals_P Parameter: Tissue Value: Petals vs. Whole plant
  misc_feature: MA Experiment ID: 20001451 Result: Down-regulated in Transcription
  misc_feature: MA Experiment 20001451 PARAMETER Experiment Name: At_Far-red-induction_P Parameter: Age (day) Value: 7
  misc_feature: MA Experiment 20001451 PARAMETER Experiment Name: At_Far-red-induction_P Parameter: Light Value: Far-red vs. White
  misc_feature: MA Experiment 20001451 PARAMETER Experiment Name: At_Far-red-induction_P Parameter: Organism Value: A. thaliana
  misc_feature: MA Experiment 20001451 PARAMETER Experiment Name: At_Far-red-induction_P Parameter: Plant Line Value: Columbia
  misc_feature: MA Experiment 20001451 PARAMETER Experiment Name: At_Far-red-induction_P Parameter: Timepoint (hr) Value: 24
  misc_feature: MA Experiment 20001451 PARAMETER Experiment Name: At_Far-red-induction_P Parameter: Tissue Value: Whole Plant
  misc_feature: MA Experiment ID: 20001554 Result: Up-regulated in Transcription
  misc_feature: MA Experiment 20001554 PARAMETER Experiment Name: At_Drought_Soil_Dry_P Parameter: Age (day) Value: 21
  misc_feature: MA Experiment 20001554 PARAMETER Experiment Name: At_Drought_Soil_Dry_P Parameter: Organism Value: A. thaliana
  misc_feature: MA Experiment 20001554 PARAMETER Experiment Name: At_Drought_Soil_Dry_P Parameter: Plant Line Value: WS
  misc_feature: MA Experiment 20001554 PARAMETER Experiment Name: At_Drought_Soil_Dry_P Parameter: Post Timepoint (hr) Value: None
  misc_feature: MA Experiment 20001554 PARAMETER Experiment Name: At_Drought_Soil_Dry_P Parameter: Post-Treatment Value: None
  misc_feature: MA Experiment 20001554 PARAMETER Experiment Name: At_Drought_Soil_Dry_P Parameter: Timepoint (day) Value: 7
  misc_feature: MA Experiment 20001554 PARAMETER Experiment Name: At_Drought_Soil_Dry_P Parameter: Treatment Value: Drought vs. No Drought
  misc_feature: MA Experiment ID: 20001555 Result: Up-regulated in Transcription
  misc_feature: MA Experiment 20001555 PARAMETER Experiment Name: At_Drought_Soil_Dry_P Parameter: Age (day) Value: 24
  misc_feature: MA Experiment 20001555 PARAMETER Experiment Name: At_Drought_Soil_Dry_P Parameter: Organism Value: A. thaliana
  misc_feature: MA Experiment 20001555 PARAMETER Experiment Name: At_Drought_Soil_Dry_P Parameter: Plant Line Value: WS
  misc_feature: MA Experiment 20001555 PARAMETER Experiment Name: At_Drought_Soil_Dry_P Parameter: Post Timepoint (hr) Value: None
  misc_feature: MA Experiment 20001555 PARAMETER Experiment Name: At_Drought_Soil_Dry_P Parameter: Post-Treatment Value: None
  misc_feature: MA Experiment 20001555 PARAMETER Experiment Name: At_Drought_Soil_Dry_P Parameter: Timepoint (day) Value: 10
  misc_feature: MA Experiment 20001555 PARAMETER Experiment Name: At_Drought_Soil_Dry_P Parameter: Treatment Value: Drought vs. No Drought
  misc_feature: MA Experiment ID: 20001558 Result: Down-regulated in Transcription
  misc_feature: MA Experiment 20001558 PARAMETER Experiment Name: At_Drought_Soil_Dry_P Parameter: Age (day) Value: 27
  misc_feature: MA Experiment 20001558 PARAMETER Experiment Name: At_Drought_Soil_Dry_P Parameter: Organism Value: A. thaliana
  misc_feature: MA Experiment 20001558 PARAMETER Experiment Name: At_Drought_Soil_Dry_P Parameter: Plant Line Value: WS
  misc_feature: MA Experiment 20001558 PARAMETER Experiment Name: At_Drought_Soil_Dry_P Parameter: Post Timepoint (hr) Value: 6
  misc_feature: MA Experiment 20001558 PARAMETER Experiment Name: At_Drought_Soil_Dry_P Parameter: Post-Treatment Value: Re-Water vs. No Drought
  misc_feature: MA Experiment 20001558 PARAMETER Experiment Name: At_Drought_Soil_Dry_P Parameter: Timepoint (day) Value: 13
  misc_feature: MA Experiment 20001558 PARAMETER Experiment Name: At_Drought_Soil_Dry_P Parameter: Treatment Value: Drought vs. No Drought
  misc_feature: MA Experiment ID: 20001560 Result: Down-regulated in Transcription
  misc_feature: MA Experiment 20001560 PARAMETER Experiment Name: At_Drought_Soil_Dry_P Parameter: Age (day) Value: 28
  misc_feature: MA Experiment 20001560 PARAMETER Experiment Name: At_Drought_Soil_Dry_P Parameter: Organism Value: A. thaliana
  misc_feature: MA Experiment 20001560 PARAMETER Experiment Name: At_Drought_Soil_Dry_P Parameter: Plant Line Value: WS
  misc_feature: MA Experiment 20001560 PARAMETER Experiment Name: At_Drought_Soil_Dry_P Parameter: Post Timepoint (hr) Value: None
  misc_feature: MA Experiment 20001560 PARAMETER Experiment Name: At_Drought_Soil_Dry_P Parameter: Post-Treatment Value: None
  misc_feature: MA Experiment 20001560 PARAMETER Experiment Name: At_Drought_Soil_Dry_P Parameter: Timepoint (day) Value: 14
  misc_feature: MA Experiment 20001560 PARAMETER Experiment Name: At_Drought_Soil_Dry_P Parameter: Treatment Value: Drought vs. No Drought
  misc_feature: MA Experiment ID: 20001905 Result: Up-regulated in Transcription
  misc_feature: MA Experiment 20001905 PARAMETER Experiment Name: At_Drought_Reproduction_P Parameter: Age (day) Value: 40
  misc_feature: MA Experiment 20001905 PARAMETER Experiment Name: At_Drought_Reproduction_P Parameter: Organism Value: A. thaliana
  misc_feature: MA Experiment 20001905 PARAMETER Experiment Name: At_Drought_Reproduction_P Parameter: Plant Line Value: WS
  misc_feature: MA Experiment 20001905 PARAMETER Experiment Name: At_Drought_Reproduction_P Parameter: Timepoint (day) Value: 10
  misc_feature: MA Experiment 20001905 PARAMETER Experiment Name: At_Drought_Reproduction_P Parameter: Tissue Value: Rosettes
  misc_feature: MA Experiment 20001905 PARAMETER Experiment Name: At_Drought_Reproduction_P Parameter: Treatment Value: Drought vs. No Drought
  misc_feature: MA Experiment ID: 20001906 Result: Up-regulated in Transcription
  misc_feature: MA Experiment 20001906 PARAMETER Experiment Name: At_Drought_Reproduction_P Parameter: Age (day) Value: 35
  misc_feature: MA Experiment 20001906 PARAMETER Experiment Name: At_Drought_Reproduction_P Parameter: Organism Value: A. thaliana
  misc_feature: MA Experiment 20001906 PARAMETER Experiment Name: At_Drought_Reproduction_P Parameter: Plant Line Value: WS
  misc_feature: MA Experiment 20001906 PARAMETER Experiment Name: At_Drought_Reproduction_P Parameter: Timepoint (day) Value: 5
  misc_feature: MA Experiment 20001906 PARAMETER Experiment Name: At_Drought_Reproduction_P Parameter: Tissue Value: Siliques
  misc_feature: MA Experiment 20001906 PARAMETER Experiment Name: At_Drought_Reproduction_P Parameter: Treatment Value: Drought vs. No Drought
  misc_feature: MA Experiment ID: 20001910 Result: Up-regulated in Transcription
  misc_feature: MA Experiment 20001910 PARAMETER Experiment Name: At_Drought_Reproduction_P Parameter: Age (day) Value: 37
  misc_feature: MA Experiment 20001910 PARAMETER Experiment Name: At_Drought_Reproduction_P Parameter: Organism Value: A. thaliana
  misc_feature: MA Experiment 20001910 PARAMETER Experiment Name: At_Drought_Reproduction_P Parameter: Plant Line Value: WS
  misc_feature: MA Experiment 20001910 PARAMETER Experiment Name: At_Drought_Reproduction_P Parameter: Timepoint (day) Value: 7
  misc_feature: MA Experiment 20001910 PARAMETER Experiment Name: At_Drought_Reproduction_P Parameter: Tissue Value: Flowers
  misc_feature: MA Experiment 20001910 PARAMETER Experiment Name: At_Drought_Reproduction_P Parameter: Treatment Value: Drought vs. No Drought
  misc_feature: MA Experiment ID: 20001911 Result: Up-regulated in Transcription
  misc_feature: MA Experiment 20001911 PARAMETER Experiment Name: At_Drought_Reproduction_P Parameter: Age (day) Value: 40
  misc_feature: MA Experiment 20001911 PARAMETER Experiment Name: At_Drought_Reproduction_P Parameter: Organism Value: A. thaliana
  misc_feature: MA Experiment 20001911 PARAMETER Experiment Name: At_Drought_Reproduction_P Parameter: Plant Line Value: WS
  misc_feature: MA Experiment 20001911 PARAMETER Experiment Name: At_Drought_Reproduction_P Parameter: Timepoint (day) Value: 10
  misc_feature: MA Experiment 20001911 PARAMETER Experiment Name: At_Drought_Reproduction_P Parameter: Tissue Value: Flowers
  misc_feature: MA Experiment 20001911 PARAMETER Experiment Name: At_Drought_Reproduction_P Parameter: Treatment Value: Drought vs. No Drought
cataagaacatcgtaatcccatccgtttatatatatattccaagttaaacttcatatcatacacacaaacctaaaacaccgaaacaaaaacaaagagatttaaacaagaagagttattatggcgagcttgctagataaagccaaggacttcgtggcggataaactcaccgcgatccctaaaccggagggttcagttacggacgttgacctcaaagacgtgaaccgtgactcagttgagtacttggccaaagtctctgtcaccaatccttacagtcattcgattccgatctgtgagatcagtttcactttccacagcgccggcagggagattggaaaggggaagataccggacccgggttctctgaaagctaaggacatgacggctcttgatattcccgtggtggtgccgtatagtatactgtttaacctggctcgagacgttggtgtggactgggacattgactacgagctccaaatcggtctaaccatcgaccttcctgttgtaggggaatttactatccctatctctagtaagggagaaatcaaacttcctacttttaaagatttcttctgatcgacaaaacctatatataagaccacacatcgttatgatggtgaatggtgatgatcgtaatgtaataagttgggtttgctataactaataaaatgttattttgc

SEQ ID NO: 103254 - protein, 151 aa, Arabidopsis thaliana; identical to SEQ ID NO: 23597
  peptide (1)..(151): Ceres Seq. ID no. 13612329
  misc_feature (2)..(151): Pfam Name: Late embryogenesis abundant protein Pfam Description: Late embryogenesis abundant protein
  misc_feature (1)..(151): Homolog of NCBI NO: 15223413 NR Description: expressed protein [Arabidopsis thaliana]
  misc_feature (1)..(151): Homolog of NCBI NO: 1170745 NR Description: Late embryogenesis abundant protein Lea14-A
  misc_feature (1)..(151): Homolog of NCBI NO: 1170746 NR Description: Desiccation protectant protein Lea14 homolog

SEQ ID NO: 103255 - DNA, 1105 bp, Arabidopsis thaliana
  misc_feature (1)..(1105): Ceres Seq. ID no. 13612330
  misc_feature: MA Experiment ID: 108434 Result: Up-regulated in Transcription
  misc_feature: MA Experiment 108434 PARAMETER Experiment Name: At_Root_Tips_cDNA_P Parameter: Tissue Value: Root Tips
  misc_feature: MA Experiment ID: 108462 Result: Down-regulated in Transcription
  misc_feature: MA Experiment 108462 PARAMETER Experiment Name: At_Germinating_Seeds_cDNA_P Parameter: Age (day) Value: 2 vs. 0
  misc_feature: MA Experiment 108462 PARAMETER Experiment Name: At_Germinating_Seeds_cDNA_P Parameter: Tissue Value: Germinating Seeds
  misc_feature: MA Experiment ID: 108463 Result: Down-regulated in Transcription
  misc_feature: MA Experiment 108463 PARAMETER Experiment Name: At_Germinating_Seeds_cDNA_P Parameter: Age (day) Value: 3 vs. 0
  misc_feature: MA Experiment 108463 PARAMETER Experiment Name: At_Germinating_Seeds_cDNA_P Parameter: Tissue Value: Germinating Seeds
  misc_feature: MA Experiment ID: 108464 Result: Down-regulated in Transcription
  misc_feature: MA Experiment 108464 PARAMETER Experiment Name: At_Germinating_Seeds_cDNA_P Parameter: Age (day) Value: 4 vs. 0
  misc_feature: MA Experiment 108464 PARAMETER Experiment Name: At_Germinating_Seeds_cDNA_P Parameter: Tissue Value: Germinating Seeds
  misc_feature: MA Experiment ID: 20000089 Result: Up-regulated in Transcription
  misc_feature: MA Experiment ID: 20000111 Result: Up-regulated in Transcription
  misc_feature: MA Experiment 20000111 PARAMETER Experiment Name: At_42deg_Heat_cDNA_P Parameter: Temperature (deg C) Value: 42 vs. 22
  misc_feature: MA Experiment 20000111 PARAMETER Experiment Name: At_42deg_Heat_cDNA_P Parameter: Timepoint (hr) Value: 6
  misc_feature: MA Experiment 20000111 PARAMETER Experiment Name: At_42deg_Heat_cDNA_P Parameter: Tissue Value: Aerial
  misc_feature: MA Experiment ID: 20000113 Result: Up-regulated in Transcription
  misc_feature: MA Experiment 20000113 PARAMETER Experiment Name: At_42deg_Heat_cDNA_P Parameter: Temperature (deg C) Value: 42 vs. 22
  misc_feature: MA Experiment 20000113 PARAMETER Experiment Name: At_42deg_Heat_cDNA_P Parameter: Timepoint (hr) Value: 8
  misc_feature: MA Experiment 20000113 PARAMETER Experiment Name: At_42deg_Heat_cDNA_P Parameter: Tissue Value: Aerial
  misc_feature: MA Experiment ID: 20000173 Result: Up-regulated in Transcription
  misc_feature: MA Experiment 20000173 PARAMETER Experiment Name: At_42deg_Heat_P Parameter: Age (day) Value: 14
  misc_feature: MA Experiment 20000173 PARAMETER Experiment Name: At_42deg_Heat_P Parameter: Organism Value: A. thaliana
  misc_feature: MA Experiment 20000173 PARAMETER Experiment Name: At_42deg_Heat_P Parameter: Plant Line Value: WS
  misc_feature: MA Experiment 20000173 PARAMETER Experiment Name: At_42deg_Heat_P Parameter: Temperature (deg C) Value: 42 vs. 22
  misc_feature: MA Experiment 20000173 PARAMETER Experiment Name: At_42deg_Heat_P Parameter: Timepoint (hr) Value: 6
  misc_feature: MA Experiment 20000173 PARAMETER Experiment Name: At_42deg_Heat_P Parameter: Tissue Value: Aerial
  misc_feature: MA Experiment ID: 20000234 Result: Down-regulated in Transcription
  misc_feature: MA Experiment 20000234 PARAMETER Experiment Name: At_Siliques_P Parameter: Age (day) Value: 21
  misc_feature: MA Experiment 20000234 PARAMETER Experiment Name: At_Siliques_P Parameter: Organism Value: A. thaliana
  misc_feature: MA Experiment 20000234 PARAMETER Experiment Name: At_Siliques_P Parameter: Plant Line Value: WS
  misc_feature: MA Experiment 20000234 PARAMETER Experiment Name: At_Siliques_P Parameter: Tissue Value: Less Than 5mm Siliques vs. Whole Plant
  misc_feature: MA Experiment ID: 20000235 Result: Down-regulated in Transcription
  misc_feature: MA Experiment 20000235 PARAMETER Experiment Name: At_Siliques_P Parameter: Age (day) Value: 21
  misc_feature: MA Experiment 20000235 PARAMETER Experiment Name: At_Siliques_P Parameter: Organism Value: A. thaliana
  misc_feature: MA Experiment 20000235 PARAMETER Experiment Name: At_Siliques_P Parameter: Plant Line Value: WS
  misc_feature: MA Experiment 20000235 PARAMETER Experiment Name: At_Siliques_P Parameter: Tissue Value: 5-10mm Siliques vs. Whole Plant
  misc_feature: MA Experiment ID: 20000264 Result: Down-regulated in Transcription
  misc_feature: MA Experiment 20000264 PARAMETER Experiment Name: At_Open_Flower_P Parameter: Age (day) Value: 21
  misc_feature: MA Experiment 20000264 PARAMETER Experiment Name: At_Open_Flower_P Parameter: Plant Line Value: WS
  misc_feature: MA Experiment 20000264 PARAMETER Experiment Name: At_Open_Flower_P Parameter: Tissue Value: Open Flower vs. Whole Plant
  misc_feature: MA Experiment ID: 20000265 Result: Down-regulated in Transcription
  misc_feature: MA Experiment 20000265 PARAMETER Experiment Name: At_Open_Flower_P Parameter: Age (day) Value: 21
  misc_feature: MA Experiment 20000265 PARAMETER Experiment Name: At_Open_Flower_P Parameter: Plant Line Value: WS
  misc_feature: MA Experiment 20000265 PARAMETER Experiment Name: At_Open_Flower_P Parameter: Tissue Value: Closed Flower vs. Whole Plant
  misc_feature: MA Experiment ID: 20000794 Result: Down-regulated in Transcription
  misc_feature: MA Experiment 20000794 PARAMETER Experiment Name: At_Petals_P Parameter: Age (day) Value: 23-25 days
  misc_feature: MA Experiment 20000794 PARAMETER Experiment Name: At_Petals_P Parameter: Plant Line Value: WS
  misc_feature: MA Experiment 20000794 PARAMETER Experiment Name: At_Petals_P Parameter: Tissue Value: Petals vs. Whole plant
  misc_feature: MA Experiment ID: 20001451 Result: Up-regulated in Transcription
  misc_feature: MA Experiment 20001451 PARAMETER Experiment Name: At_Far-red-induction_P Parameter: Age (day) Value: 7
  misc_feature: MA Experiment 20001451 PARAMETER Experiment Name: At_Far-red-induction_P Parameter: Light Value: Far-red vs. White
  misc_feature: MA Experiment 20001451 PARAMETER Experiment Name: At_Far-red-induction_P Parameter: Organism Value: A. thaliana
  misc_feature: MA Experiment 20001451 PARAMETER Experiment Name: At_Far-red-induction_P Parameter: Plant Line Value: Columbia
  misc_feature: MA Experiment 20001451 PARAMETER Experiment Name: At_Far-red-induction_P Parameter: Timepoint (hr) Value: 24
  misc_feature: MA Experiment 20001451 PARAMETER Experiment Name: At_Far-red-induction_P Parameter: Tissue Value: Whole Plant
tctttttgtcgactgcttcttcacgccgtcgaggaattcttctccaccaacgaatccggcgacgtcttatcaccaccttgtcgaatctttagttgatgttgtttaaaggttttagctaataagggcatgaaacggatctgctcggtttcaagtgttcaacttttttccagaagtttcagagctttagcatcgccacgttccttgaactatcccctgcagtgtatcaagcgttcatcagttcggatggagagtagcaacttttcttctggtgtcagaaccgagagtagtgtgaagccaagaggagcattgatagttctagaaggtcttgatcgcagcgggaaatcaacacagtgtgctaagctactctctttcttgaatggtttaggacatccgaccgagctctggagattccccgatagagagacgagtgtcggtcagatgatatccgcgtatctttctaataagtcgcagttagatgatcacacaattcatctccttttcagcgccaatcgttgggagaaaaggtcgttgatggaggaaaagctaaaaacaggaactacgcttatcgtggatcgttattcgtattctggtgttgcattctcatcagctaaaggtctcgatatcgaatggtgcaaggctcccgaaatcgggttactggctccagattctgtactttacctggacatttcacctgaaagagctgctgagagaggtggatatggagatgagaggtatgagcgagtggagtttcagaagaaagttgcagacttttatcaaacccttggcgattcttcatggaagataatcaatgccagtgatgccatggaggaagtagagaagaagattcaacaagtggtattagatcaagtcaaagaatgtactgaaggaaagcctctgtctctcctatggtcgtcatagaacgttttcgagtcatagcacttgcaagtttagtgattttgaaggaacttttgttgaagtttatactatgttgtgccatctaagcccattaacaggcccaaaagtttagtttatgtcgtcactcatgacatcttaatcgattattttggtgtaaactaattgagcgtcattaagtaaaggacaaatc

SEQ ID NO: 103256 - protein, 263 aa, Arabidopsis thaliana
  peptide (1)..(263): Ceres Seq. ID no. 13612331
  misc_feature (66)..(222): Pfam Name: Thymidylate kinase Pfam Description: Thymidylate kinase
  misc_feature (1)..(263): Homolog of NCBI NO: 30697225 NR Description: thymidylate kinase - like protein [Arabidopsis
  misc_feature (1)..(263): Homolog of NCBI NO: 21553651 NR Description: thymidylate kinase-like protein [Arabidopsis
  misc_feature (40)..(263): Homolog of NCBI NO: 30697228 NR Description: thymidylate kinase - like protein [Arabidopsis
  misc_feature (40)..(263): Homolog of NCBI NO: 15912289 NR Description: AT5g59440/f2o15_100 [Arabidopsis thaliana]
  misc_feature (65)..(222): Homolog of NCBI NO: 25288285 NR Description: dTMP kinase (EC 2.7.4.9) [imported] - Arabidopsis (fragment) >gi|3493131|gb|AAC33288.1| thymidylate kinase
  misc_feature (53)..(261): Homolog of NCBI NO: 27261100 NR Description: putative thymidylate kinase [Oryza sativa
  misc_feature (58)..(261): Homolog of NCBI NO: 291900 NR Description: thymidylate kinase
  misc_feature (58)..(261): Homolog of NCBI NO: 12804775 NR Description: Similar to deoxythymidylate kinase (thymidylate
  misc_feature (58)..(261): Homolog of NCBI NO: 16975360 NR Description: Chain A, Wild Type Human Thymidylate Kinase
  misc_feature (58)..(261): Homolog of NCBI NO: 33303857 NR Description: deoxythymidylate kinase [synthetic construct]
MKRICSVSSVQLFSRSFRALASPRSLNYPLQCIKRSSVRMESSNFSSGVRTESSVKPRGALIVLEGLDRSGKSTQCAKLLSFLNGLGHPTELWRFPDRETSVGQMISAYLSNKSQLDDHTIHLLFSANRWEKRSLMEEKLKTGTTLIVDRYSYSGVAFSSAKGLDIEWCKAPEIGLLAPDSVLYLDISPERAAERGGYGDERYERVEFQKKVADFYQTLGDSSWKIINASDAMEEVEKKIQQVVLDQVKECTEGKPLSLLWSS

SEQ ID NO: 103257 - protein, 224 aa, Arabidopsis thaliana; identical to SEQ ID NO: 77543
  peptide (1)..(224): Ceres Seq. ID no. 13612332
  misc_feature (27)..(183): Pfam Name: Thymidylate kinase Pfam Description: Thymidylate kinase
  misc_feature (1)..(224): Homolog of NCBI NO: 30697225 NR Description: thymidylate kinase - like protein [Arabidopsis
  misc_feature (1)..(224): Homolog of NCBI NO: 21553651 NR Description: thymidylate kinase-like protein [Arabidopsis
  misc_feature (1)..(224): Homolog of NCBI NO: 30697228 NR Description: thymidylate kinase - like protein [Arabidopsis
  misc_feature (1)..(224): Homolog of NCBI NO: 15912289 NR Description: AT5g59440/f2o15_100 [Arabidopsis thaliana]
  misc_feature (26)..(183): Homolog of NCBI NO: 25288285 NR Description: dTMP kinase (EC 2.7.4.9) [imported] - Arabidopsis (fragment) >gi|3493131|gb|AAC33288.1| thymidylate kinase
  misc_feature (14)..(222): Homolog of NCBI NO: 27261100 NR Description: putative thymidylate kinase [Oryza sativa
  misc_feature (19)..(222): Homolog of NCBI NO: 291900 NR Description: thymidylate kinase
  misc_feature (19)..(222): Homolog of NCBI NO: 16975360 NR Description: Chain A, Wild Type Human Thymidylate Kinase
  misc_feature (19)..(222): Homolog of NCBI NO: 23831251 NR Description: Thymidylate kinase (dTMP kinase)
  misc_feature (19)..(222): Homolog of NCBI NO: 33303857 NR Description: deoxythymidylate kinase [synthetic construct]

SEQ ID NO: 103258 - protein, 159 aa, Arabidopsis thaliana; identical to SEQ ID NO: 77544
  peptide (1)..(159): Ceres Seq. ID no. 13612333
  misc_feature (1)..(118): Pfam Name: Thymidylate kinase Pfam Description: Thymidylate kinase
  misc_feature (1)..(159): Homolog of NCBI NO: 30697225 NR Description: thymidylate kinase - like protein [Arabidopsis
  misc_feature (1)..(159): Homolog of NCBI NO: 21553651 NR Description: thymidylate kinase-like protein [Arabidopsis
  misc_feature (1)..(159): Homolog of NCBI NO: 30697228 NR Description: thymidylate kinase - like protein [Arabidopsis
  misc_feature (1)..(159): Homolog of NCBI NO: 15912289 NR Description: AT5g59440/f2o15_100 [Arabidopsis thaliana]
  misc_feature (1)..(118): Homolog of NCBI NO: 25288285 NR Description: dTMP kinase (EC 2.7.4.9) [imported] - Arabidopsis (fragment) >gi|3493131|gb|AAC33288.1| thymidylate kinase
  misc_feature (1)..(157): Homolog of NCBI NO: 27261100 NR Description: putative thymidylate kinase [Oryza sativa
  misc_feature (1)..(157): Homolog of NCBI NO: 291900 NR Description: thymidylate kinase
  misc_feature (1)..(157): Homolog of NCBI NO: 16975360 NR Description: Chain A, Wild Type Human Thymidylate Kinase
  misc_feature (1)..(157): Homolog of NCBI NO: 33303857 NR Description: deoxythymidylate kinase [synthetic construct]
  misc_feature (1)..(157): Homolog of NCBI NO: 23831251 NR Description: Thymidylate kinase (dTMP kinase)

SEQ ID NO: 103259 - DNA, 840 bp, Arabidopsis thaliana
  misc_feature (1)..(840): Ceres Seq. ID no. 13612334
  misc_feature: MA Experiment ID: 108462 Result: Up-regulated in Transcription
  misc_feature: MA Experiment 108462 PARAMETER Experiment Name: At_Germinating_Seeds_cDNA_P Parameter: Age (day) Value: 2 vs. 0
  misc_feature: MA Experiment 108462 PARAMETER Experiment Name: At_Germinating_Seeds_cDNA_P Parameter: Tissue Value: Germinating Seeds
  misc_feature: MA Experiment ID: 108464 Result: Up-regulated in Transcription
  misc_feature: MA Experiment 108464 PARAMETER Experiment Name: At_Germinating_Seeds_cDNA_P Parameter: Age (day) Value: 4 vs. 0
  misc_feature: MA Experiment 108464 PARAMETER Experiment Name: At_Germinating_Seeds_cDNA_P Parameter: Tissue Value: Germinating Seeds
  misc_feature: MA Experiment ID: 108488 Result: Down-regulated in Transcription
  misc_feature: MA Experiment ID: 20000113 Result: Down-regulated in Transcription
  misc_feature: MA Experiment 20000113 PARAMETER Experiment Name: At_42deg_Heat_cDNA_P Parameter: Temperature (deg C) Value: 42 vs. 22
  misc_feature: MA Experiment 20000113 PARAMETER Experiment Name: At_42deg_Heat_cDNA_P Parameter: Timepoint (hr) Value: 8
  misc_feature: MA Experiment 20000113 PARAMETER Experiment Name: At_42deg_Heat_cDNA_P Parameter: Tissue Value: Aerial
  misc_feature: MA Experiment ID: 20001904 Result: Up-regulated in Transcription
  misc_feature: MA Experiment 20001904 PARAMETER Experiment Name: At_Drought_Reproduction_P Parameter: Age (day) Value: 37
  misc_feature: MA Experiment 20001904 PARAMETER Experiment Name: At_Drought_Reproduction_P Parameter: Organism Value: A. thaliana
  misc_feature: MA Experiment 20001904 PARAMETER Experiment Name: At_Drought_Reproduction_P Parameter: Plant Line Value: WS
  misc_feature: MA Experiment 20001904 PARAMETER Experiment Name: At_Drought_Reproduction_P Parameter: Timepoint (day) Value: 7
  misc_feature: MA Experiment 20001904 PARAMETER Experiment Name: At_Drought_Reproduction_P Parameter: Tissue Value: Rosettes
  misc_feature: MA Experiment 20001904 PARAMETER Experiment Name: At_Drought_Reproduction_P Parameter: Treatment Value: Drought vs. No Drought
  misc_feature: MA Experiment ID: 20001905 Result: Up-regulated in Transcription
  misc_feature: MA Experiment 20001905 PARAMETER Experiment Name: At_Drought_Reproduction_P Parameter: Age (day) Value: 40
  misc_feature: MA Experiment 20001905 PARAMETER Experiment Name: At_Drought_Reproduction_P Parameter: Organism Value: A. thaliana
  misc_feature: MA Experiment 20001905 PARAMETER Experiment Name: At_Drought_Reproduction_P Parameter: Plant Line Value: WS
  misc_feature: MA Experiment 20001905 PARAMETER Experiment Name: At_Drought_Reproduction_P Parameter: Timepoint (day) Value: 10
  misc_feature: MA Experiment 20001905 PARAMETER Experiment Name: At_Drought_Reproduction_P Parameter: Tissue Value: Rosettes
  misc_feature: MA Experiment 20001905 PARAMETER Experiment Name: At_Drought_Reproduction_P Parameter: Treatment Value: Drought vs. No Drought
  misc_feature: MA Experiment ID: 20001906 Result: Down-regulated in Transcription
  misc_feature: MA Experiment 20001906 PARAMETER Experiment Name: At_Drought_Reproduction_P Parameter: Age (day) Value: 35
  misc_feature: MA Experiment 20001906 PARAMETER Experiment Name: At_Drought_Reproduction_P Parameter: Organism Value: A. thaliana
  misc_feature: MA Experiment 20001906 PARAMETER Experiment Name: At_Drought_Reproduction_P Parameter: Plant Line Value: WS
  misc_feature: MA Experiment 20001906 PARAMETER Experiment Name: At_Drought_Reproduction_P Parameter: Timepoint (day) Value: 5
  misc_feature: MA Experiment 20001906 PARAMETER Experiment Name: At_Drought_Reproduction_P Parameter: Tissue Value: Siliques
  misc_feature: MA Experiment 20001906 PARAMETER Experiment Name: At_Drought_Reproduction_P Parameter: Treatment Value: Drought vs. No Drought
  misc_feature: MA Experiment ID: 20001911 Result: Down-regulated in Transcription
  misc_feature: MA Experiment 20001911 PARAMETER Experiment Name: At_Drought_Reproduction_P Parameter: Age (day) Value: 40
  misc_feature: MA Experiment 20001911 PARAMETER Experiment Name: At_Drought_Reproduction_P Parameter: Organism Value: A. thaliana
  misc_feature: MA Experiment 20001911 PARAMETER Experiment Name: At_Drought_Reproduction_P Parameter: Plant Line Value: WS
  misc_feature: MA Experiment 20001911 PARAMETER Experiment Name: At_Drought_Reproduction_P Parameter: Timepoint (day) Value: 10
  misc_feature: MA Experiment 20001911 PARAMETER Experiment Name: At_Drought_Reproduction_P Parameter: Tissue Value: Flowers
  misc_feature: MA Experiment 20001911 PARAMETER Experiment Name: At_Drought_Reproduction_P Parameter: Treatment Value: Drought vs. No Drought
agaagaaagtaaagagagaagaagcaaaaagagtcatattcgttgaaaacatcattcactcttctctgcgtctccttctttcacccgaaattgtctctgacaccgttttgattcagccatggctaatgctgcgtcaggaatggcagtccatgatgactgcaagctaagatttctggaactgaaggcgaaaaggacacaccgtttcattgtctacaagattgaggagaagcagaagcaagtgattgttgagaaagttggtgaacctattctaacttacgaggactttgcagcaagtcttccagctgacgaatgccgatacgccatttatgatttcgactttgtcactgcagagaattgccagaagagcaagattttcttcattgcatggtgtcccgacgtagcaaaggtgagaagcaagatgatctatgcgagctctaaggacaggttcaagcgtgaacttgatggaattcaagtggagcttcaagcaactgatccaactgagatggatcttgatgttttgaaaagccgcgtcaactaaaagaaactctctttgaataagcttccgattatattcgactattatgaaatggtgttttctattctcttacagtctcttgtgactgttagatacacttgacacccttcattctatctgtctggtctgttctctgtgtctatgttaccttacagtgtctcatctatattcaaaattatcacaaggtttgtgctgtgtttgcttcctttgtttcaactctaccaaagcttaagattaagatttgggtaagatgattcttttaagcttccctttgttctctttgttacagagggtataaaaaatgc

SEQ ID NO: 103260 - protein, 139 aa, Arabidopsis thaliana; identical to SEQ ID NO: 28739
  peptide (1)..(139): Ceres Seq. ID no. 13612335
  misc_feature (12)..(139): Pfam Name: Cofilin/tropomyosin-type actin-binding protein Pfam Description: Cofilin/tropomyosin-type actin-binding protein
  misc_feature (1)..(139): Homolog of NCBI NO: 30697300 NR Description: actin depolymerizing factor 4 - like protein
  misc_feature (1)..(139): Homolog of NCBI NO: 4185511 NR Description: actin depolymerizing factor 4 [Arabidopsis
  misc_feature (1)..(139): Homolog of NCBI NO: 15231309 NR Description: actin depolymerizing factor 1 (ADF1) [Arabidopsis
  misc_feature (8)..(139): Homolog of NCBI NO: 30697303 NR Description: actin depolymerizing factor 4 - like protein thaliana] >gi|15215859|gb|AAK91473.1| AT5g59890/mmn10_110 thaliana] >gi|19699262|gb|AAL90997.1| At1g05180/YUP8H12_21
  misc_feature (1)..(139): Homolog of NCBI NO: 17366768 NR Description: Actin-depolymerizing factor 1 (ADF 1)
  misc_feature (1)..(137): Homolog of NCBI NO: 17366765 NR Description: Actin-depolymerizing factor 2 (ADF 2)
  misc_feature (1)..(139): Homolog of NCBI NO: 30697295 NR Description: actin depolymerizing factor 3 - like protein
  misc_feature (1)..(139): Homolog of NCBI NO: 18408116 NR Description: actin depolymerizing factor 2 (ADF2) [Arabidopsis
  misc_feature (1)..(139): Homolog of NCBI NO: 38564721 NR Description: putative actin-depolymerizing factor 2
  misc_feature (8)..(139): Homolog of NCBI NO: 11276987 NR Description: actin depolymerizing factor 2 - Arabidopsis >gi|7339501|emb|CAB82824.1| actin depolymerizing factor 2 (ADF2)

SEQ ID NO: 103261 - protein, 132 aa, Arabidopsis thaliana; identical to SEQ ID NO: 28740
  peptide (1)..(132): Ceres Seq. ID no. 13612336
  misc_feature (5)..(132): Pfam Name: Cofilin/tropomyosin-type actin-binding protein Pfam Description: Cofilin/tropomyosin-type actin-binding protein
  misc_feature (1)..(132): Homolog of NCBI NO: 30697300 NR Description: actin depolymerizing factor 4 - like protein
  misc_feature (1)..(132): Homolog of NCBI NO: 4185511 NR Description: actin depolymerizing factor 4 [Arabidopsis
  misc_feature (1)..(132): Homolog of NCBI NO: 15231309 NR Description: actin depolymerizing factor 1 (ADF1) [Arabidopsis
  misc_feature (1)..(132): Homolog of NCBI NO: 30697303 NR Description: actin depolymerizing factor 4 - like protein thaliana] >gi|15215859|gb|AAK91473.1| AT5g59890/mmn10_110 thaliana] >gi|19699262|gb|AAL90997.1| At1g05180/YUP8H12_21
  misc_feature (1)..(132): Homolog of NCBI NO: 17366768 NR Description: Actin-depolymerizing factor 1 (ADF 1)
  misc_feature (1)..(130): Homolog of NCBI NO: 17366765 NR Description: Actin-depolymerizing factor 2 (ADF 2)
  misc_feature (1)..(132): Homolog of NCBI NO: 30697295 NR Description: actin depolymerizing factor 3 - like protein
  misc_feature (1)..(132): Homolog of NCBI NO: 18408116 NR Description: actin depolymerizing factor 2 (ADF2) [Arabidopsis
  misc_feature (1)..(132): Homolog of NCBI NO: 38564721 NR Description: putative actin-depolymerizing factor 2
  misc_feature (1)..(132): Homolog of NCBI NO: 11276987 NR Description: actin depolymerizing factor 2 - Arabidopsis >gi|7339501|emb|CAB82824.1| actin depolymerizing factor 2 (ADF2)

SEQ ID NO: 103262 - DNA, 696 bp, Arabidopsis thaliana
  misc_feature (1)..(696): Ceres Seq. ID no. 13612345
  misc_feature: MA Experiment ID: 20000180 Result: Up-regulated in Transcription
  misc_feature: MA Experiment 20000180 PARAMETER Experiment Name: At_Germinating_Seeds_P Parameter: Age (hr) Value: 24 vs. 0
  misc_feature: MA Experiment 20000180 PARAMETER Experiment Name: At_Germinating_Seeds_P Parameter: Tissue Value: Germinating Seeds
  misc_feature: MA Experiment ID: 20000184 Result: Down-regulated in Transcription
  misc_feature: MA Experiment 20000184 PARAMETER Experiment Name: At_Shoots__P Parameter: Age (day) Value: 7
  misc_feature: MA Experiment 20000184 PARAMETER Experiment Name: At_Shoots__P Parameter: Tissue Value: Shoots vs. Whole Plant
agagaaaggttttggagatcgagaccaaactccgattgaaagaggatgcattcttttggttacagagcgaatgctctactcacattcgccgtcacgattctagctttcatttgcgcgattgcttccttctctgataacttcagtaaccaaaatccctctgctcagatccagatattgaatatcaattggtttcagaagcaacctcatggaaatgatgaggtcagcttgacactgaacataacagctgacttgcagtcactatttacttggaacacaaagcaggtatttgcttttgtagcagcagagtatgaaacctccaagaacgccctgaatcaggtttcactatgggatgccataataccagagaaagagcatgccaaattctggatacaaatctcaaacaagtaccgtttcatagatcagggacataacctccgagggaaggactttaacttgacattgcactggcatgtcatgcccaagacaggcaagatgtttgctgacaaaatagttatgtctggttatcgtttacctaatgcatacagatgaagatgaagagcctcctcctgcatcatctaaggttaacaaaaaatctcttaaattaggaaagaagagagttatatttcaggtgttaagttagacttgctgatctgtatactggcatgaagttaaaaacattgttttggaatgaattat

SEQ ID NO: 103263 - protein, 167 aa, Arabidopsis thaliana
  peptide (1)..(167): Ceres Seq. ID no. 13612346
  misc_feature (1)..(167): Pfam Name: Signal peptidase subunit Pfam Description: Signal peptidase subunit
  misc_feature (1)..(167): Homolog of NCBI NO: 15240934 NR Description: signal peptidase [Arabidopsis thaliana]
  misc_feature (1)..(167): Homolog of NCBI NO: 18397160 NR Description: expressed protein [Arabidopsis thaliana] Probable microsomal signal peptidase 22 kDa subunit (SPase 22 kDa (SPC22) >gi|6729033|gb|AAF27029.1|AC009177_19 unknown protein
  misc_feature (1)..(167): Homolog of NCBI NO: 28558783 NR Description: signal peptidase protein-like protein [Cucumis
  misc_feature (1)..(166): Homolog of NCBI NO: 34895578 NR Description: unnamed protein product [Oryza sativa (japonica group)] >gi|17369173|sp|Q9LGB4|SP22_ORYSA Probable microsomal peptidase 22 kDa subunit (SPase 22 kDa subunit) (SPC22)
  misc_feature (1)..(166): Homolog of NCBI NO: 31200695 NR Description: ENSANGP00000018480 [Anopheles gambiae]
  misc_feature (7)..(148): Homolog of NCBI NO: 134791 NR Description: Microsomal signal peptidase 23 kDa subunit (SPase
  misc_feature (7)..(148): Homolog of NCBI NO: 11345462 NR Description: hypothetical protein FLJ22649 similar to signal SPC22/23 [Homo sapiens] >gi|20863506|ref|XP_134164.1| RIKEN cDNA
  misc_feature (7)..(148): Homolog of NCBI NO: 26390287 NR Description: unnamed protein product [Mus musculus]
  misc_feature (1)..(148): Homolog of NCBI NO: 26346292 NR Description: unnamed protein product [Mus musculus]
  misc_feature (1)..(148): Homolog of NCBI NO: 39587410 NR Description: Hypothetical protein CBG22979 [Caenorhabditis
MHSFGYRANALLTFAVTILAFICAIASFSDNFSNQNPSAQIQILNINWFQKQPHGNDEVSLTLNITADLQSLFTWNTKQVFAFVAAEYETSKNALNQVSLWDAIIPEKEHAKFWIQISNKYRFIDQGHNLRGKDFNLTLHWHVMPKTGKMFADKIVMSGYRLPNAYR

SEQ ID NO: 103264 - DNA, 1453 bp, Arabidopsis thaliana
  misc_feature (1)..(1453): Ceres Seq. ID no. 13612347
  misc_feature: MA Experiment ID: 108434 Result: Up-regulated in Transcription
  misc_feature: MA Experiment 108434 PARAMETER Experiment Name: At_Root_Tips_cDNA_P Parameter: Tissue Value: Root Tips
  misc_feature: MA Experiment ID: 108461 Result: Up-regulated in Transcription
  misc_feature: MA Experiment 108461 PARAMETER Experiment Name: At_Germinating_Seeds_cDNA_P Parameter: Age (day) Value: 1 vs. 0
  misc_feature: MA Experiment 108461 PARAMETER Experiment Name: At_Germinating_Seeds_cDNA_P Parameter: Tissue Value: Germinating Seeds
  misc_feature: MA Experiment ID: 108462 Result: Up-regulated in Transcription
  misc_feature: MA Experiment 108462 PARAMETER Experiment Name: At_Germinating_Seeds_cDNA_P Parameter: Age (day) Value: 2 vs. 0
  misc_feature: MA Experiment 108462 PARAMETER Experiment Name: At_Germinating_Seeds_cDNA_P Parameter: Tissue Value: Germinating Seeds
  misc_feature: MA Experiment ID: 20000179 Result: Up-regulated in Transcription
  misc_feature: MA Experiment 20000179 PARAMETER Experiment Name: At_Germinating_Seeds_P Parameter: Age (hr) Value: 6 vs. 0
  misc_feature: MA Experiment 20000179 PARAMETER Experiment Name: At_Germinating_Seeds_P Parameter: Tissue Value: Germinating Seeds
  misc_feature: MA Experiment ID: 20000180 Result: Up-regulated in Transcription
  misc_feature: MA Experiment 20000180 PARAMETER Experiment Name: At_Germinating_Seeds_P Parameter: Age (hr) Value: 24 vs. 0
  misc_feature: MA Experiment 20000180 PARAMETER Experiment Name: At_Germinating_Seeds_P Parameter: Tissue Value: Germinating Seeds
  misc_feature: MA Experiment ID: 20000185 Result: Up-regulated in Transcription
  misc_feature: MA Experiment 20000185 PARAMETER Experiment Name: At_Roots__P Parameter: Age (day) Value: 7 vs. 21
  misc_feature: MA Experiment 20000185 PARAMETER Experiment Name: At_Roots__P Parameter: Organism Value: A. thaliana
  misc_feature: MA Experiment 20000185 PARAMETER Experiment Name: At_Roots__P Parameter: Tissue Value: Roots vs. Whole Plant
  misc_feature: MA Experiment ID: 20000234 Result: Up-regulated in Transcription
  misc_feature: MA Experiment 20000234 PARAMETER Experiment Name: At_Siliques_P Parameter: Age (day) Value: 21
  misc_feature: MA Experiment 20000234 PARAMETER Experiment Name: At_Siliques_P Parameter: Organism Value: A. thaliana
  misc_feature: MA Experiment 20000234 PARAMETER Experiment Name: At_Siliques_P Parameter: Plant Line Value: WS
  misc_feature: MA Experiment 20000234 PARAMETER Experiment Name: At_Siliques_P Parameter: Tissue Value: Less Than 5mm Siliques vs. Whole Plant
  misc_feature: MA Experiment ID: 20000265 Result: Up-regulated in Transcription
  misc_feature: MA Experiment 20000265 PARAMETER Experiment Name: At_Open_Flower_P Parameter: Age (day) Value: 21
  misc_feature: MA Experiment 20000265 PARAMETER Experiment Name: At_Open_Flower_P Parameter: Plant Line Value: WS
  misc_feature: MA Experiment 20000265 PARAMETER Experiment Name: At_Open_Flower_P Parameter: Tissue Value: Closed Flower vs. Whole Plant
  misc_feature: MA Experiment ID: 20000439 Result: Up-regulated in Transcription
  misc_feature: MA Experiment 20000439 PARAMETER Experiment Name: At_Roots__P Parameter: Age (day) Value: 14 vs. 21
  misc_feature: MA Experiment 20000439 PARAMETER Experiment Name: At_Roots__P Parameter: Organism Value: A. thaliana
  misc_feature: MA Experiment 20000439 PARAMETER Experiment Name: At_Roots__P Parameter: Tissue Value: Roots vs. Whole Plant
  misc_feature: MA Experiment ID: 20000794 Result: Up-regulated in Transcription
  misc_feature: MA Experiment 20000794 PARAMETER Experiment Name: At_Petals_P Parameter: Age (day) Value: 23-25 days
  misc_feature: MA Experiment 20000794 PARAMETER Experiment Name: At_Petals_P Parameter: Plant Line Value: WS
  misc_feature: MA Experiment 20000794 PARAMETER Experiment Name: At_Petals_P Parameter: Tissue Value: Petals vs. Whole plant
  misc_feature: MA Experiment ID: 20001558 Result: Up-regulated in Transcription
  misc_feature: MA Experiment 20001558 PARAMETER Experiment Name: At_Drought_Soil_Dry_P Parameter: Age (day) Value: 27
  misc_feature: MA Experiment 20001558 PARAMETER Experiment Name: At_Drought_Soil_Dry_P Parameter: Organism Value: A. thaliana
  misc_feature: MA Experiment 20001558 PARAMETER Experiment Name: At_Drought_Soil_Dry_P Parameter: Plant Line Value: WS
  misc_feature: MA Experiment 20001558 PARAMETER Experiment Name: At_Drought_Soil_Dry_P Parameter: Post Timepoint (hr) Value: 6
  misc_feature: MA Experiment 20001558 PARAMETER Experiment Name: At_Drought_Soil_Dry_P Parameter: Post-Treatment Value: Re-Water vs. No Drought
  misc_feature: MA Experiment 20001558 PARAMETER Experiment Name: At_Drought_Soil_Dry_P Parameter: Timepoint (day) Value: 13
  misc_feature: MA Experiment 20001558 PARAMETER Experiment Name: At_Drought_Soil_Dry_P Parameter: Treatment Value: Drought vs. No Drought
  misc_feature: MA Experiment ID: 20001560 Result: Up-regulated in Transcription
  misc_feature: MA Experiment 20001560 PARAMETER Experiment Name: At_Drought_Soil_Dry_P Parameter: Age (day) Value: 28
  misc_feature: MA Experiment 20001560 PARAMETER Experiment Name: At_Drought_Soil_Dry_P Parameter: Organism Value: A. thaliana
  misc_feature: MA Experiment 20001560 PARAMETER Experiment Name: At_Drought_Soil_Dry_P Parameter: Plant Line Value: WS
  misc_feature: MA Experiment 20001560 PARAMETER Experiment Name: At_Drought_Soil_Dry_P Parameter: Post Timepoint (hr) Value: None
  misc_feature: MA Experiment 20001560 PARAMETER Experiment Name: At_Drought_Soil_Dry_P Parameter: Post-Treatment Value: None
  misc_feature: MA Experiment 20001560 PARAMETER Experiment Name: At_Drought_Soil_Dry_P Parameter: Timepoint (day) Value: 14
  misc_feature: MA Experiment 20001560 PARAMETER Experiment Name: At_Drought_Soil_Dry_P Parameter: Treatment Value: Drought vs. No Drought
  misc_feature: MA Experiment ID: 20001911 Result: Down-regulated in Transcription
  misc_feature: MA Experiment 20001911 PARAMETER Experiment Name: At_Drought_Reproduction_P Parameter: Age (day) Value: 40
  misc_feature: MA Experiment 20001911 PARAMETER Experiment Name: At_Drought_Reproduction_P Parameter: Organism Value: A. thaliana
  misc_feature: MA Experiment 20001911 PARAMETER Experiment Name: At_Drought_Reproduction_P Parameter: Plant Line Value: WS
  misc_feature: MA Experiment 20001911 PARAMETER Experiment Name: At_Drought_Reproduction_P Parameter: Timepoint (day) Value: 10
  misc_feature: MA Experiment 20001911 PARAMETER Experiment Name: At_Drought_Reproduction_P Parameter: Tissue Value: Flowers
  misc_feature: MA Experiment 20001911 PARAMETER Experiment Name: At_Drought_Reproduction_P Parameter: Treatment Value: Drought vs. No Drought
gattctcgttggcttcagacattttccatcttctaggtttctttctttctcagcaatttccaggaaaatggaagtgaaagctagagctcctgggaagatcatacttgcaggggaacacgctgttgttcatggatccaccgctgtagctgccgccattgatctctacacttacgttactctccgctttcctcttccatcagctgagaacaatgataggcttacacttcagctcaaggacatttccttggagttttcatggtccttagccagaatcaaagaagcgattccttatgattcaagcactctctgccgttctacgccggcttcatgttcagaggagacccttaaatcaattgcagttttggttgaagagcaaaatcttccaaaggaaaagatgtggctctcctctgggatctccacgtttctctggttatacaccagaattatagggttcaatccggctacagtagtcattaactctgagcttccatacgggtctggcctcggttcatcagcagctttatgtgtagctctcacagctgctctccttgcttcttctatttcagagaaaacccgtggtaacggttggtcatctctcgatgaaaccaatcttgagttgctaaataaatgggctttcgaaggcgaaaagatcatccatgggaaaccttctgggatagacaacaccgtcagtgcatacggcaacatgatcaagttctgctcaggcgagataactcggttacaatccaacatgcctctgagaatgctaattaccaacactagagttgggcgaaacacaaaagctctggtctctggtgtgtcacagagagcggtaagacatcctgatgcgatgaagtcagtgttcaacgccgtggattctataagcaaagagctcgctgcgatcattcagtctaaagacgagacctcagttacagaaaaagaagagagaataaaagaactcatggagatgaaccaaggtctgctcctgtcaatgggggttagccacagctcaatcgaggctgtgattctaaccacggtcaagcacaagcttgtctccaaacttacaggagctggtggcggcggctgcgtcctcactctattaccaaccgggacggtggtggacaaagtggtggaggagctcgagtccagcggttttcagtgtttcacggcattgattggtggtaacggagctcagatttgctattgatcaggtcggaaaaatcatatttggcctctcaccattcttaaacttgctgacgtgtacgtcaagaaggctgcaattagaaattcaaagagtcgattttttcttataaatgatgtgttgaatgtaaaattgctttattattataccatgtgacaaataattgaaaaaagcaaagattgtttagtttttttttttgtattttgaaattgttatgtttcatgatgggaaatataaaatgacaaagtttttact

SEQ ID NO: 103265 - protein, 400 aa, Arabidopsis thaliana
  peptide (1)..(400): Ceres Seq. ID no. 13612348
  misc_feature (23)..(400): Homolog of NCBI NO: 15240936 NR Description: mevalonate kinase [Arabidopsis thaliana] mevalonate kinase [Arabidopsis thaliana]
  misc_feature (23)..(400): Homolog of NCBI NO: 5578718 NR Description: mevalonate kinase [Arabidopsis thaliana]
  misc_feature (23)..(400): Homolog of NCBI NO: 16417946 NR Description: mevalonate kinase [Hevea brasiliensis]
  misc_feature (23)..(368): Homolog of NCBI NO: 37532842 NR Description: putative mevalonate kinase [Oryza sativa cultivar- group)] >gi|16905216|gb|AAL31086.1| putative mevalonate [Oryza sativa] >gi|31431195|gb|AAP53010.1| putative mevalonate
  misc_feature (29)..(398): Homolog of NCBI NO: 450346 NR Description: ORF for viral-cellular fusion transcript
  misc_feature (29)..(398): Homolog of NCBI NO: 4557769 NR Description: mevalonate kinase [Homo sapiens]
  misc_feature (29)..(398): Homolog of NCBI NO: 33303805 NR Description: mevalonate kinase [synthetic construct]
  misc_feature (29)..(395): Homolog of NCBI NO: 12963731 NR Description: mevalonate kinase [Mus musculus] Mevalonate kinase (MK) >gi|6006984|gb|AAF00700.1|AF137598_1 kinase [Mus musculus] >gi|13542811|gb|AAH05606.1| mevalonate
  misc_feature (29)..(398): Homolog of NCBI NO: 13592007 NR Description: mevalonate kinase [Rattus norvegicus]
  misc_feature (25)..(398): Homolog of NCBI NO: 28828936 NR Description: similar to Rattus norvegicus (Rat). Mevalonate
ILVGFRHFPSSRFLSFSAISRKMEVKARAPGKIILAGEHAVVHGSTAVAAAIDLYTYVTLRFPLPSAENNDRLTLQLKDISLEFSWSLARIKEAIPYDSSTLCRSTPASCSEETLKSIAVLVEEQNLPKEKMWLSSGISTFLWLYTRIIGFNPATVVINSELPYGSGLGSSAALCVALTAALLASSISEKTRGNGWSSLDETNLELLNKWAFEGEKIIHGKPSGIDNTVSAYGNMIKFCSGEITRLQSNMPLRMLITNTRVGRNTKALVSGVSQRAVRHPDAMKSVFNAVDSISKELAAIIQSKDETSVTEKEERIKELMEMNQGLLLSMGVSHSSIEAVILTTVKHKLVSKLTGAGGGGCVLTLLPTGTVVDKVVEELESSGFQCFTALIGGNGAQICY

SEQ ID NO: 103266 - protein, 378 aa, Arabidopsis thaliana; identical to SEQ ID NO: 25905
  peptide (1)..(378): Ceres Seq. ID no. 13612349
  misc_feature (1)..(378): Homolog of NCBI NO: 15240936 NR Description: mevalonate kinase [Arabidopsis thaliana] mevalonate kinase [Arabidopsis thaliana]
  misc_feature (1)..(378): Homolog of NCBI NO: 5578718 NR Description: mevalonate kinase [Arabidopsis thaliana]
  misc_feature (1)..(378): Homolog of NCBI NO: 16417946 NR Description: mevalonate kinase [Hevea brasiliensis]
  misc_feature (1)..(346): Homolog of NCBI NO: 37532842 NR Description: putative mevalonate kinase [Oryza sativa cultivar- group)] >gi|16905216|gb|AAL31086.1| putative mevalonate [Oryza sativa] >gi|31431195|gb|AAP53010.1| putative mevalonate
  misc_feature (7)..(376): Homolog of NCBI NO: 450346 NR Description: ORF for viral-cellular fusion transcript
  misc_feature (7)..(376): Homolog of NCBI NO: 4557769 NR Description: mevalonate kinase [Homo sapiens]
  misc_feature (7)..(376): Homolog of NCBI NO: 33303805 NR Description: mevalonate kinase [synthetic construct]
  misc_feature (7)..(373): Homolog of NCBI NO: 12963731 NR Description: mevalonate kinase [Mus musculus] Mevalonate kinase (MK) >gi|6006984|gb|AAF00700.1|AF137598_1 kinase [Mus musculus] >gi|13542811|gb|AAH05606.1| mevalonate
  misc_feature (7)..(376): Homolog of NCBI NO: 13592007 NR Description: mevalonate kinase [Rattus norvegicus]
  misc_feature (3)..(376): Homolog of NCBI NO: 28828936 NR Description: similar to Rattus norvegicus (Rat). Mevalonate

SEQ ID NO: 103267 - protein, 269 aa, Arabidopsis thaliana; identical to SEQ ID NO: 25906
  peptide (1)..(269): Ceres Seq. ID no. 13612350
  misc_feature (1)..(269): Homolog of NCBI NO: 15240936 NR Description: mevalonate kinase [Arabidopsis thaliana] mevalonate kinase [Arabidopsis thaliana]
  misc_feature (1)..(269): Homolog of NCBI NO: 5578718 NR Description: mevalonate kinase [Arabidopsis thaliana]
  misc_feature (1)..(269): Homolog of NCBI NO: 16417946 NR Description: mevalonate kinase [Hevea brasiliensis]
  misc_feature (1)..(237): Homolog of NCBI NO: 37532842 NR Description: putative mevalonate kinase [Oryza sativa cultivar- group)] >gi|16905216|gb|AAL31086.1| putative mevalonate [Oryza sativa] >gi|31431195|gb|AAP53010.1| putative mevalonate
  misc_feature (1)..(267): Homolog of NCBI NO: 450346 NR Description: ORF for viral-cellular fusion transcript
  misc_feature (1)..(267): Homolog of NCBI NO: 4557769 NR Description: mevalonate kinase [Homo sapiens]
  misc_feature (1)..(267): Homolog of NCBI NO: 33303805 NR Description: mevalonate kinase [synthetic construct]
  misc_feature (1)..(264): Homolog of NCBI NO: 12963731 NR Description: mevalonate kinase [Mus musculus] Mevalonate kinase (MK) >gi|6006984|gb|AAF00700.1|AF137598_1 kinase [Mus musculus] >gi|13542811|gb|AAH05606.1| mevalonate
  misc_feature (1)..(267): Homolog of NCBI NO: 13592007 NR Description: mevalonate kinase [Rattus norvegicus]
  misc_feature (1)..(267): Homolog of NCBI NO: 28828936 NR Description: similar to Rattus norvegicus (Rat). Mevalonate

SEQ ID NO: 103268 - DNA, 1390 bp, Arabidopsis thaliana
  misc_feature (1)..(1390): Ceres Seq. ID no. 13612369
  misc_feature: MA Experiment ID: 108462 Result: Up-regulated in Transcription
  misc_feature: MA Experiment 108462 PARAMETER Experiment Name: At_Germinating_Seeds_cDNA_P Parameter: Age (day) Value: 2 vs. 0
  misc_feature: MA Experiment 108462 PARAMETER Experiment Name: At_Germinating_Seeds_cDNA_P Parameter: Tissue Value: Germinating Seeds
  misc_feature: MA Experiment ID: 108463 Result: Up-regulated in Transcription
  misc_feature: MA Experiment 108463 PARAMETER Experiment Name: At_Germinating_Seeds_cDNA_P Parameter: Age (day) Value: 3 vs. 0
  misc_feature: MA Experiment 108463 PARAMETER Experiment Name: At_Germinating_Seeds_cDNA_P Parameter: Tissue Value: Germinating Seeds
  misc_feature: MA Experiment ID: 108464 Result: Up-regulated in Transcription
  misc_feature: MA Experiment 108464 PARAMETER Experiment Name: At_Germinating_Seeds_cDNA_P Parameter: Age (day) Value: 4 vs. 0
  misc_feature: MA Experiment 108464 PARAMETER Experiment Name: At_Germinating_Seeds_cDNA_P Parameter: Tissue Value: Germinating Seeds
  misc_feature: MA Experiment ID: 20000234 Result: Up-regulated in Transcription
  misc_feature: MA Experiment 20000234 PARAMETER Experiment Name: At_Siliques_P Parameter: Age (day) Value: 21
  misc_feature: MA Experiment 20000234 PARAMETER Experiment Name: At_Siliques_P Parameter: Organism Value: A. thaliana
  misc_feature: MA Experiment 20000234 PARAMETER Experiment Name: At_Siliques_P Parameter: Plant Line Value: WS
  misc_feature: MA Experiment 20000234 PARAMETER Experiment Name: At_Siliques_P Parameter: Tissue Value: Less Than 5mm Siliques vs. Whole Plant
  misc_feature: MA Experiment ID: 20000235 Result: Up-regulated in Transcription
  misc_feature: MA Experiment 20000235 PARAMETER Experiment Name: At_Siliques_P Parameter: Age (day) Value: 21
  misc_feature: MA Experiment 20000235 PARAMETER Experiment Name: At_Siliques_P Parameter: Organism Value: A. thaliana
  misc_feature: MA Experiment 20000235 PARAMETER Experiment Name: At_Siliques_P Parameter: Plant Line Value: WS
  misc_feature: MA Experiment 20000235 PARAMETER Experiment Name: At_Siliques_P Parameter: Tissue Value: 5-10mm Siliques vs. Whole Plant
  misc_feature: MA Experiment ID: 20000264 Result: Up-regulated in Transcription
  misc_feature: MA Experiment 20000264 PARAMETER Experiment Name: At_Open_Flower_P Parameter: Age (day) Value: 21
  misc_feature: MA Experiment 20000264 PARAMETER Experiment Name: At_Open_Flower_P Parameter: Plant Line Value: WS
  misc_feature: MA Experiment 20000264 PARAMETER Experiment Name: At_Open_Flower_P Parameter: Tissue Value: Open Flower vs. Whole Plant
  misc_feature: MA Experiment ID: 20000265 Result: Up-regulated in Transcription
  misc_feature: MA Experiment 20000265 PARAMETER Experiment Name: At_Open_Flower_P Parameter: Age (day) Value: 21
  misc_feature: MA Experiment 20000265 PARAMETER Experiment Name: At_Open_Flower_P Parameter: Plant Line Value: WS
  misc_feature: MA Experiment 20000265 PARAMETER Experiment Name: At_Open_Flower_P Parameter: Tissue Value: Closed Flower vs. Whole Plant
  misc_feature: MA Experiment ID: 20000286 Result: Up-regulated in Transcription
  misc_feature: MA Experiment 20000286 PARAMETER Experiment Name: At_Open_Flower_P Parameter: Age (day) Value: 21
  misc_feature: MA Experiment 20000286 PARAMETER Experiment Name: At_Open_Flower_P Parameter: Plant Line Value: WS
  misc_feature: MA Experiment 20000286 PARAMETER Experiment Name: At_Open_Flower_P Parameter: Tissue Value: Half Open vs. Whole Plant
  misc_feature: MA Experiment ID: 20000794 Result: Up-regulated in Transcription
  misc_feature: MA Experiment 20000794 PARAMETER Experiment Name: At_Petals_P Parameter: Age (day) Value: 23-25 days
  misc_feature: MA Experiment 20000794 PARAMETER Experiment Name: At_Petals_P Parameter: Plant Line Value: WS
  misc_feature: MA Experiment 20000794 PARAMETER Experiment Name: At_Petals_P Parameter: Tissue Value: Petals vs. Whole plant
  misc_feature: MA Experiment ID: 20001757 Result: Down-regulated in Transcription
  misc_feature: MA Experiment 20001757 PARAMETER Experiment Name: At_50mM_NH4NO3_L-to-H_P Parameter: Timepoint (hr) Value: 6
  misc_feature: MA Experiment 20001757 PARAMETER Experiment Name: At_50mM_NH4NO3_L-to-H_P Parameter: Tissue Value: Leaf
  misc_feature: MA Experiment 20001757 PARAMETER Experiment Name: At_50mM_NH4NO3_L-to-H_P Parameter: Treatment Value: 50mM NH4NO3 vs 100mM Mannitol
  misc_feature: MA Experiment ID: 20001905 Result: Up-regulated in Transcription
  misc_feature: MA Experiment 20001905 PARAMETER Experiment Name: At_Drought_Reproduction_P Parameter: Age (day) Value: 40
  misc_feature: MA Experiment 20001905 PARAMETER Experiment Name: At_Drought_Reproduction_P Parameter: Organism Value: A. thaliana
  misc_feature: MA Experiment 20001905 PARAMETER Experiment Name: At_Drought_Reproduction_P Parameter: Plant Line Value: WS
  misc_feature: MA Experiment 20001905 PARAMETER Experiment Name: At_Drought_Reproduction_P Parameter: Timepoint (day) Value: 10
  misc_feature: MA Experiment 20001905 PARAMETER Experiment Name: At_Drought_Reproduction_P Parameter: Tissue Value: Rosettes
  misc_feature: MA Experiment 20001905 PARAMETER Experiment Name: At_Drought_Reproduction_P Parameter: Treatment Value: Drought vs. No Drought
  misc_feature: MA Experiment ID: 20001910 Result: Up-regulated in Transcription
  misc_feature: MA Experiment 20001910 PARAMETER Experiment Name: At_Drought_Reproduction_P Parameter: Age (day) Value: 37
  misc_feature: MA Experiment 20001910 PARAMETER Experiment Name: At_Drought_Reproduction_P Parameter: Organism Value: A. thaliana
  misc_feature: MA Experiment 20001910 PARAMETER Experiment Name: At_Drought_Reproduction_P Parameter: Plant Line Value: WS
  misc_feature: MA Experiment 20001910 PARAMETER Experiment Name: At_Drought_Reproduction_P Parameter: Timepoint (day) Value: 7
  misc_feature: MA Experiment 20001910 PARAMETER Experiment Name: At_Drought_Reproduction_P Parameter: Tissue Value: Flowers
  misc_feature: MA Experiment 20001910 PARAMETER Experiment Name: At_Drought_Reproduction_P Parameter: Treatment Value: Drought vs. No Drought
ctcttcttagtaacctcctaagccatgaaatagtcgcaaaggccctttcttcgtcttcgtttctaattgctttcgacgacaatcgatcgtagagaagtctacctcgtagacatctctctcacaaatccaattcaattaccattgtttgttattatctgatgtcgaatatgcaattctctcgtggttttaatccctttgttatcctcttctgtctcgccgtggttgcaccaattatatcggctgatgtcgctatcttgagaacggactattaccaaaaaacatgtcctgatttccacaaaattgtgcgtgaagccgttacaaccaaacaagtccaacaaccaacaactgcggccgggaccctccgtctctttttccatgattgtttccttgaaggttgtgatgcatctgtcttgatcgcgaccaactcgttcaacaaagcggaacgcgatgatgatctcaatgattccctcccgggagatgcttttgacatcgtcacccgcatcaagacagctctcgagttgtcttgtcctggtgtagtatcatgcgcggatattctagcgcaggctacacgtgaccttgtcacaatggtaggaggaccttactttgacgtaaagcttggtcgtaaagacggattcgaatccaaagctcataaagtcagaggaaatgtcccaatggcaaaccagactgttcctgacatccacgggatattcaagaaaaacggttttagtcttcgcgagatggtagcattaagcggggctcacaccattggattctctcactgcaaagagttttccgacagactctacggatcccgtgctgataaagaaatcaacccgcgattcgcagccgctctcaaagatctttgcaaaaaccacaccgtggatgatacaatcgccgcgtttaacgacgtgatgactccaggaaagttcgacaacatgtacttcaagaacctaaagcgagggctagggcttttagcgtctgaccacatccttattaaagacaacagcaccaagccgtttgtggatctatacgcaactaacgagacagcattctttgaggatttcgctcgtgcgatggagaaacttggcacggtcggcgtcaagggcgataaagatggagaagtgagacgtaggtgcgaccacttcaacaatctcaacgtttaagaagaaaaagaaaacacaaaaccatataaatataatattatttctgttttatttgcggaggagttgaggagaagaaaggtttggttggtatatatgtttaataactacctattataagcaagatcttgtaacaattcaagttgggatgtttaatttttccatgaaaattcaaactgttgtattgaaagtatatagataaaataacatattatatatcgaacaattgt

SEQ ID NO: 103269 - protein, 334 aa, Arabidopsis thaliana; identical to SEQ ID NO: 37496
  peptide (1)..(334): Ceres Seq. ID no. 13612370
  misc_feature (1)..(334): Homolog of NCBI NO: 18422742 NR Description: peroxidase, putative [Arabidopsis thaliana] Peroxidase 65 precursor (Atperox P65) (ATP43)
  misc_feature (1)..(334): Homolog of NCBI NO: 21593687 NR Description: peroxidase [Arabidopsis thaliana]
  misc_feature (4)..(334): Homolog of NCBI NO: 9759442 NR Description: peroxidase [Arabidopsis thaliana]
  misc_feature (15)..(334): Homolog of NCBI NO: 15236620 NR Description: peroxidase, putative [Arabidopsis thaliana]
  misc_feature (18)..(331): Homolog of NCBI NO: 15221670 NR Description: peroxidase, putative [Arabidopsis thaliana]
  misc_feature (14)..(330): Homolog of NCBI NO: 15242580 NR Description: peroxidase, putative [Arabidopsis thaliana] Peroxidase 63 precursor (Atperox P63) (ATP26a) peroxidase ATP26a homolog [Arabidopsis thaliana]
  misc_feature (33)..(330): Homolog of NCBI NO: 15232929 NR Description: peroxidase, putative [Arabidopsis thaliana] Peroxidase 31 precursor (Atperox P31) (ATP41) peroxidase [Arabidopsis thaliana] >gi|23297263|gb|AAN12927.1|
  misc_feature (33)..(330): Homolog of NCBI NO: 14334600 NR Description: putative peroxidase [Arabidopsis thaliana]
  misc_feature (33)..(327): Homolog of NCBI NO: 32489883 NR Description: OSJNBa0060P14.16 [Oryza sativa (japonica
  misc_feature (54)..(330): Homolog of NCBI NO: 1890317 NR Description: peroxidase ATP26a [Arabidopsis thaliana]

SEQ ID NO: 103270 - protein, 331 aa, Arabidopsis thaliana; identical to SEQ ID NO: 37497
  peptide (1)..(331): Ceres Seq. ID no. 13612371
  misc_feature (1)..(331): Homolog of NCBI NO: 18422742 NR Description: peroxidase, putative [Arabidopsis thaliana] Peroxidase 65 precursor (Atperox P65) (ATP43)
  misc_feature (1)..(331): Homolog of NCBI NO: 21593687 NR Description: peroxidase [Arabidopsis thaliana]
  misc_feature (1)..(331): Homolog of NCBI NO: 9759442 NR Description: peroxidase [Arabidopsis thaliana]
  misc_feature (12)..(331): Homolog of NCBI NO: 15236620 NR Description: peroxidase, putative [Arabidopsis thaliana]
  misc_feature (15)..(328): Homolog of NCBI NO: 15221670 NR Description: peroxidase, putative [Arabidopsis thaliana]
  misc_feature (11)..(327): Homolog of NCBI NO: 15242580 NR Description: peroxidase, putative [Arabidopsis thaliana] Peroxidase 63 precursor (Atperox P63) (ATP26a) peroxidase ATP26a homolog [Arabidopsis thaliana]
  misc_feature (30)..(327): Homolog of NCBI NO: 15232929 NR Description: peroxidase, putative [Arabidopsis thaliana] Peroxidase 31 precursor (Atperox P31) (ATP41) peroxidase [Arabidopsis thaliana] >gi|23297263|gb|AAN12927.1|
  misc_feature (30)..(327): Homolog of NCBI NO: 14334600 NR Description: putative peroxidase [Arabidopsis thaliana]
  misc_feature (30)..(324): Homolog of NCBI NO: 32489883 NR Description: OSJNBa0060P14.16 [Oryza sativa (japonica
  misc_feature (51)..(327): Homolog of NCBI NO: 1890317 NR Description: peroxidase ATP26a [Arabidopsis thaliana]

SEQ ID NO: 103271 - protein, 192 aa, Arabidopsis thaliana; identical to SEQ ID NO: 37498
  peptide (1)..(192): Ceres Seq. ID no. 13612372
  misc_feature (1)..(192): Homolog of NCBI NO: 18422742 NR Description: peroxidase, putative [Arabidopsis thaliana] Peroxidase 65 precursor (Atperox P65) (ATP43)
  misc_feature (1)..(192): Homolog of NCBI NO: 21593687 NR Description: peroxidase [Arabidopsis thaliana]
  misc_feature (1)..(192): Homolog of NCBI NO: 9759442 NR Description: peroxidase [Arabidopsis thaliana]
  misc_feature (1)..(192): Homolog of NCBI NO: 15236620 NR Description: peroxidase, putative [Arabidopsis thaliana]
  misc_feature (1)..(189): Homolog of NCBI NO: 15221670 NR Description: peroxidase, putative [Arabidopsis thaliana]
  misc_feature (1)..(188): Homolog of NCBI NO: 15242580 NR Description: peroxidase, putative [Arabidopsis thaliana] Peroxidase 63 precursor (Atperox P63) (ATP26a) peroxidase ATP26a homolog [Arabidopsis thaliana]
  misc_feature (1)..(188): Homolog of NCBI NO: 15232929 NR Description: peroxidase, putative [Arabidopsis thaliana] Peroxidase 31 precursor (Atperox P31) (ATP41) peroxidase [Arabidopsis thaliana] >gi|23297263|gb|AAN12927.1|
  misc_feature (1)..(188): Homolog of NCBI NO: 14334600 NR Description: putative peroxidase [Arabidopsis thaliana]
  misc_feature (1)..(185): Homolog of NCBI NO: 32489883 NR Description: OSJNBa0060P14.16 [Oryza sativa (japonica
  misc_feature (1)..(188): Homolog of NCBI NO: 1890317 NR Description: peroxidase ATP26a [Arabidopsis thaliana]

SEQ ID NO: 103272 - DNA, 965 bp, Arabidopsis thaliana
  misc_feature (1)..(965): Ceres Seq. ID no. 13612373
  misc_feature: MA Experiment ID: 108433 Result: Down-regulated in Transcription
  misc_feature: MA Experiment 108433 PARAMETER Experiment Name: At_rhl_Mutant2_cDNA_P Parameter: Age (day) Value: 7
  misc_feature: MA Experiment 108433 PARAMETER Experiment Name: At_rhl_Mutant2_cDNA_P Parameter: Organism Value: A. thaliana
  misc_feature: MA Experiment 108433 PARAMETER Experiment Name: At_rhl_Mutant2_cDNA_P Parameter: Plant Line Value: rhl Mutant vs. wt landsburg
  misc_feature: MA Experiment 108433 PARAMETER Experiment Name: At_rhl_Mutant2_cDNA_P Parameter: Tissue Value: Roots
  misc_feature: MA Experiment ID: 108462 Result: Down-regulated in Transcription
  misc_feature: MA Experiment 108462 PARAMETER Experiment Name: At_Germinating_Seeds_cDNA_P Parameter: Age (day) Value: 2 vs. 0
  misc_feature: MA Experiment 108462 PARAMETER Experiment Name: At_Germinating_Seeds_cDNA_P Parameter: Tissue Value: Germinating Seeds
  misc_feature: MA Experiment ID: 108463 Result: Down-regulated in Transcription
  misc_feature: MA Experiment 108463 PARAMETER Experiment Name: At_Germinating_Seeds_cDNA_P Parameter: Age (day) Value: 3 vs. 0
  misc_feature: MA Experiment 108463 PARAMETER Experiment Name: At_Germinating_Seeds_cDNA_P Parameter: Tissue Value: Germinating Seeds
  misc_feature: MA Experiment ID: 108464 Result: Down-regulated in Transcription
  misc_feature: MA Experiment 108464 PARAMETER Experiment Name: At_Germinating_Seeds_cDNA_P Parameter: Age (day) Value: 4 vs. 0
  misc_feature: MA Experiment 108464 PARAMETER Experiment Name: At_Germinating_Seeds_cDNA_P Parameter: Tissue Value: Germinating Seeds
  misc_feature: MA Experiment ID: 108488 Result: Down-regulated in Transcription
  misc_feature: MA Experiment ID: 108579 Result: Up-regulated in Transcription
  misc_feature: MA Experiment 108579 PARAMETER Experiment Name: At_4deg_Cold_cDNA_P Parameter: Temperature (deg C) Value: 4 vs. 22
  misc_feature: MA Experiment 108579 PARAMETER Experiment Name: At_4deg_Cold_cDNA_P Parameter: Timepoint (hr) Value: 6
  misc_feature: MA Experiment 108579 PARAMETER Experiment Name: At_4deg_Cold_cDNA_P Parameter: Tissue Value: Aerial
  misc_feature: MA Experiment ID: 108594 Result: Down-regulated in Transcription
  misc_feature: MA Experiment 108594 PARAMETER Experiment Name: At_Ler-rhl_Root_cDNA_P Parameter: Plant Line Value: null
  misc_feature: MA Experiment ID: 108595 Result: Up-regulated in Transcription
  misc_feature: MA Experiment 108595 PARAMETER Experiment Name: At_Ler-pi_Ovule_cDNA_P Parameter: Plant Line Value: null
  misc_feature: MA Experiment ID: 108668 Result: Up-regulated in Transcription
  misc_feature: MA Experiment 108668 PARAMETER Experiment Name: At_2mM_SA_cDNA_P Parameter: Plant Line Value: WS
  misc_feature: MA Experiment 108668 PARAMETER Experiment Name: At_2mM_SA_cDNA_P Parameter: Timepoint (hr) Value: 6
  misc_feature: MA Experiment 108668 PARAMETER Experiment Name: At_2mM_SA_cDNA_P Parameter: Treatment Value: 2mM SA vs. No Treatment
  misc_feature: MA Experiment ID: 20000069 Result: Up-regulated in Transcription
  misc_feature: MA Experiment 20000069 PARAMETER Experiment Name: At_100uM_ABA_Mutants_cDNA_P Parameter: Plant Line Value: CS23
  misc_feature: MA Experiment 20000069 PARAMETER Experiment Name: At_100uM_ABA_Mutants_cDNA_P Parameter: Timepoint (hr) Value: 6
  misc_feature: MA Experiment 20000069 PARAMETER Experiment Name: At_100uM_ABA_Mutants_cDNA_P Parameter: Tissue Value: Aerial
  misc_feature: MA Experiment 20000069 PARAMETER Experiment Name: At_100uM_ABA_Mutants_cDNA_P Parameter: Treatment Value: 100uM ABA vs. No Treatment
  misc_feature: MA Experiment ID: 20000070 Result: Up-regulated in Transcription
  misc_feature: MA Experiment 20000070 PARAMETER Experiment Name: At_100uM_ABA_Mutants_cDNA_P Parameter: Plant Line Value: CS24
  misc_feature: MA Experiment 20000070 PARAMETER Experiment Name: At_100uM_ABA_Mutants_cDNA_P Parameter: Timepoint (hr) Value: 6
  misc_feature: MA Experiment 20000070 PARAMETER Experiment Name: At_100uM_ABA_Mutants_cDNA_P Parameter: Tissue Value: Aerial
  misc_feature: MA Experiment 20000070 PARAMETER Experiment Name: At_100uM_ABA_Mutants_cDNA_P Parameter: Treatment Value: 100uM ABA vs. No Treatment
  misc_feature: MA Experiment ID: 20000071 Result: Up-regulated in Transcription
  misc_feature: MA Experiment 20000071 PARAMETER Experiment Name: At_100uM_ABA_Mutants_cDNA_P Parameter: Plant Line Value: CS8104
  misc_feature: MA Experiment 20000071 PARAMETER Experiment Name: At_100uM_ABA_Mutants_cDNA_P Parameter: Timepoint (hr) Value: 6
  misc_feature: MA Experiment 20000071 PARAMETER Experiment Name: At_100uM_ABA_Mutants_cDNA_P Parameter: Tissue Value: Aerial
  misc_feature: MA Experiment 20000071 PARAMETER Experiment Name: At_100uM_ABA_Mutants_cDNA_P Parameter: Treatment Value: 100uM ABA vs. No Treatment
  misc_feature: MA Experiment ID: 20000072 Result: Up-regulated in Transcription
  misc_feature: MA Experiment 20000072 PARAMETER Experiment Name: At_100uM_ABA_Mutants_cDNA_P Parameter: Plant Line Value: CS8105
  misc_feature: MA Experiment 20000072 PARAMETER Experiment Name: At_100uM_ABA_Mutants_cDNA_P Parameter: Timepoint (hr) Value: 6
  misc_feature: MA Experiment 20000072 PARAMETER Experiment Name: At_100uM_ABA_Mutants_cDNA_P Parameter: Tissue Value: Aerial
  misc_feature: MA Experiment 20000072 PARAMETER Experiment Name: At_100uM_ABA_Mutants_cDNA_P Parameter: Treatment Value: 100uM ABA vs. No Treatment
  misc_feature: MA Experiment ID: 20000086 Result: Up-regulated in Transcription
  misc_feature: MA Experiment 20000086 PARAMETER Experiment Name: At_100uM_ABA_Mutants_cDNA_P Parameter: Plant Line Value: CS22
  misc_feature: MA Experiment 20000086 PARAMETER Experiment Name: At_100uM_ABA_Mutants_cDNA_P Parameter: Timepoint (hr) Value: 6
  misc_feature: MA Experiment 20000086 PARAMETER Experiment Name: At_100uM_ABA_Mutants_cDNA_P Parameter: Tissue Value: Aerial
  misc_feature: MA Experiment 20000086 PARAMETER Experiment Name: At_100uM_ABA_Mutants_cDNA_P Parameter: Treatment Value: 100uM ABA vs. No Treatment
  misc_feature: MA Experiment ID: 20000087 Result: Up-regulated in Transcription
  misc_feature: MA Experiment 20000087 PARAMETER Experiment Name: At_100uM_ABA_Mutants_cDNA_P Parameter: Plant Line Value: WS
  misc_feature: MA Experiment 20000087 PARAMETER Experiment Name: At_100uM_ABA_Mutants_cDNA_P Parameter: Timepoint (hr) Value: 6
  misc_feature: MA Experiment 20000087 PARAMETER Experiment Name: At_100uM_ABA_Mutants_cDNA_P Parameter: Tissue Value: Aerial
  misc_feature: MA Experiment 20000087 PARAMETER Experiment Name: At_100uM_ABA_Mutants_cDNA_P Parameter: Treatment Value: 100uM ABA vs. No Treatment
  misc_feature: MA Experiment ID: 20000088 Result: Up-regulated in Transcription
  misc_feature: MA Experiment 20000088 PARAMETER Experiment Name: At_100uM_ABA_Mutants_cDNA_P Parameter: Plant Line Value: Landsberg
  misc_feature: MA Experiment 20000088 PARAMETER Experiment Name: At_100uM_ABA_Mutants_cDNA_P Parameter: Timepoint (hr) Value: 6
  misc_feature: MA Experiment 20000088 PARAMETER Experiment Name: At_100uM_ABA_Mutants_cDNA_P Parameter: Tissue Value: Aerial
  misc_feature: MA Experiment 20000088 PARAMETER Experiment Name: At_100uM_ABA_Mutants_cDNA_P Parameter: Treatment Value: 100uM ABA vs. No Treatment
  misc_feature: MA Experiment ID: 20000089 Result: Up-regulated in Transcription
  misc_feature: MA Experiment ID: 20000090 Result: Up-regulated in Transcription
  misc_feature: MA Experiment ID: 20000111 Result: Up-regulated in Transcription
  misc_feature: MA Experiment 20000111 PARAMETER Experiment Name: At_42deg_Heat_cDNA_P Parameter: Temperature (deg C) Value: 42 vs. 22
  misc_feature: MA Experiment 20000111 PARAMETER Experiment Name: At_42deg_Heat_cDNA_P Parameter: Timepoint (hr) Value: 6
  misc_feature: MA Experiment 20000111 PARAMETER Experiment Name: At_42deg_Heat_cDNA_P Parameter: Tissue Value: Aerial
  misc_feature: MA Experiment ID: 20000112 Result: Up-regulated in Transcription
  misc_feature: MA Experiment 20000112 PARAMETER Experiment Name: At_42deg_Heat_cDNA_P Parameter: Temperature (deg C) Value: 42 vs. 22
  misc_feature: MA Experiment 20000112 PARAMETER Experiment Name: At_42deg_Heat_cDNA_P Parameter: Timepoint (hr) Value: 2
  misc_feature: MA Experiment 20000112 PARAMETER Experiment Name: At_42deg_Heat_cDNA_P Parameter: Tissue Value: Aerial
  misc_feature: MA Experiment ID: 20000117 Result: Up-regulated in Transcription
  misc_feature: MA Experiment 20000117 PARAMETER Experiment Name: At_100uM_ABA_Mutants_cDNA_P Parameter: Plant Line Value: Columbia
  misc_feature: MA Experiment 20000117 PARAMETER Experiment Name: At_100uM_ABA_Mutants_cDNA_P Parameter: Timepoint (hr) Value: 6
  misc_feature: MA Experiment 20000117 PARAMETER Experiment Name: At_100uM_ABA_Mutants_cDNA_P Parameter: Tissue Value: Aerial
  misc_feature: MA Experiment 20000117 PARAMETER Experiment Name: At_100uM_ABA_Mutants_cDNA_P Parameter: Treatment Value: 100uM ABA vs. No Treatment
  misc_feature: MA Experiment ID: 20000314 Result: Up-regulated in Transcription
  misc_feature: MA Experiment 20000314 PARAMETER Experiment Name: At_14day_Shoots-Roots_Sub_P Parameter: Age (day) Value: 14
  misc_feature: MA Experiment 20000314 PARAMETER Experiment Name: At_14day_Shoots-Roots_Sub_P Parameter: Organism Value: A. thaliana
  misc_feature: MA Experiment 20000314 PARAMETER Experiment Name: At_14day_Shoots-Roots_Sub_P Parameter: Plant Line Value: WS
  misc_feature: MA Experiment 20000314 PARAMETER Experiment Name: At_14day_Shoots-Roots_Sub_P Parameter: Tissue Value: Roots vs. Whole Plant
  misc_feature: MA Experiment ID: 20000315 Result: Down-regulated in Transcription
  misc_feature: MA Experiment 20000315 PARAMETER Experiment Name: At_14day_Shoots-Roots_Sub_P Parameter: Age (day) Value: 14
  misc_feature: MA Experiment 20000315 PARAMETER Experiment Name: At_14day_Shoots-Roots_Sub_P Parameter: Organism Value: A. thaliana
  misc_feature: MA Experiment 20000315 PARAMETER Experiment Name: At_14day_Shoots-Roots_Sub_P Parameter: Plant Line Value: WS
  misc_feature: MA Experiment 20000315 PARAMETER Experiment Name: At_14day_Shoots-Roots_Sub_P Parameter: Tissue Value: Shoots vs. Whole Plant
  misc_feature: MA Experiment ID: 20000328 Result: Up-regulated in Transcription
  misc_feature: MA Experiment 20000328 PARAMETER Experiment Name: At_42deg_Heat_Sub_P Parameter: Age (day) Value: 14
  misc_feature: MA Experiment 20000328 PARAMETER Experiment Name: At_42deg_Heat_Sub_P Parameter: Organism Value: A. thaliana
  misc_feature: MA Experiment 20000328 PARAMETER Experiment Name: At_42deg_Heat_Sub_P Parameter: Plant Line Value: WS
  misc_feature: MA Experiment 20000328 PARAMETER Experiment Name: At_42deg_Heat_Sub_P Parameter: Temperature (deg C) Value: 42 vs. 22
  misc_feature: MA Experiment 20000328 PARAMETER Experiment Name: At_42deg_Heat_Sub_P Parameter: Timepoint (hr) Value: 6
  misc_feature: MA Experiment 20000328 PARAMETER Experiment Name: At_42deg_Heat_Sub_P Parameter: Tissue Value: Aerial
  misc_feature: MA Experiment ID: 20000329 Result: Up-regulated in Transcription
  misc_feature: MA Experiment 20000329 PARAMETER Experiment Name: At_4deg_Cold_Sub_P Parameter: Age (day) Value: 14
  misc_feature: MA Experiment 20000329 PARAMETER Experiment Name: At_4deg_Cold_Sub_P Parameter: Organism Value: A. thaliana
  misc_feature: MA Experiment 20000329 PARAMETER Experiment Name: At_4deg_Cold_Sub_P Parameter: Plant Line Value: WS
  misc_feature: MA Experiment 20000329 PARAMETER Experiment Name: At_4deg_Cold_Sub_P Parameter: Temperature (deg C) Value: 4 vs. 22
  misc_feature: MA Experiment 20000329 PARAMETER Experiment Name: At_4deg_Cold_Sub_P Parameter: Timepoint (hr) Value: 6
  misc_feature: MA Experiment 20000329 PARAMETER Experiment Name: At_4deg_Cold_Sub_P Parameter: Tissue Value: Aerial
  misc_feature: MA Experiment ID: 20000332 Result: Up-regulated in Transcription
  misc_feature: MA Experiment 20000332 PARAMETER Experiment Name: At_4deg_Cold_Sub_P Parameter: Age (day) Value: 14
  misc_feature: MA Experiment 20000332 PARAMETER Experiment Name: At_4deg_Cold_Sub_P Parameter: Organism Value: A. thaliana
  misc_feature: MA Experiment 20000332 PARAMETER Experiment Name: At_4deg_Cold_Sub_P Parameter: Plant Line Value: WS
  misc_feature: MA Experiment 20000332 PARAMETER Experiment Name: At_4deg_Cold_Sub_P Parameter: Temperature (deg C) Value: 4 vs. 22
  misc_feature: MA Experiment 20000332 PARAMETER Experiment Name: At_4deg_Cold_Sub_P Parameter: Timepoint (hr) Value: 2
  misc_feature: MA Experiment 20000332 PARAMETER Experiment Name: At_4deg_Cold_Sub_P Parameter: Tissue Value: Aerial
  misc_feature: MA Experiment ID: 20000355 Result: Up-regulated in Transcription
  misc_feature: MA Experiment 20000355 PARAMETER Experiment Name: At_Siliques_Sub_P Parameter: Age (day) Value: 21
  misc_feature: MA Experiment 20000355 PARAMETER Experiment Name: At_Siliques_Sub_P Parameter: Organism Value: A. thaliana
  misc_feature: MA Experiment 20000355 PARAMETER Experiment Name: At_Siliques_Sub_P Parameter: Plant Line Value: WS
  misc_feature: MA Experiment 20000355 PARAMETER Experiment Name: At_Siliques_Sub_P Parameter: Tissue Value: Less Than 5mm Siliques vs. Whole Plant
  misc_feature: MA Experiment ID: 20000440 Result: Up-regulated in Transcription
  misc_feature: MA Experiment 20000440 PARAMETER Experiment Name: At_Closed-Flower__Sub_P Parameter: Tissue Value: Closed Flower vs. Whole Plant
  misc_feature: MA Experiment ID: 20001807 Result: Down-regulated in Transcription
  misc_feature: MA Experiment 20001807 PARAMETER Experiment Name: At_50mM_NH4NO3_L-to-H_Sub_P Parameter: Timepoint (hr) Value: 6
  misc_feature: MA Experiment 20001807 PARAMETER Experiment Name: At_50mM_NH4NO3_L-to-H_Sub_P Parameter: Tissue Value: Leaf
  misc_feature: MA Experiment 20001807 PARAMETER Experiment Name: At_50mM_NH4NO3_L-to-H_Sub_P Parameter: Treatment Value: 50mM NH4NO3 vs 100mM Mannitol
aacaacaaaacctctctctctttcactttctctctaaaaaccagaaaaaaaaaaaatggagctttcatcgagaaagccttatttcattgaggaagaagaagaagagaatttggcttcttctttatcagaaatggaagctgggttttctggtaacaataataatagtaataaccatggaaatccccaaaacggtgtcgtttcttcaagccgtttctcttacggtagattaaacagtcttaggaacagtcagagttattattacaatcaatactctgtttcgtctccgagatctgttgtgtctggaagatttcatgatttcagattcgatattcaacaacctcatttcttggactcgtgtttcctctgtaagaaacctcttggtgataacagagacatctacatgtacagaggagatacaccgttttgcagtgaagagtgtagacaagaacagatagagagagatgaagcaaaagagaagaaacagaatctgtctcattcggtgaaatcagctatgcggaggaaagaacaatcttcaccaactagatctcgtgattatgcttttcacaatggaactgttgctgctgcttaattaaaaatatctgggaactttgagaattattataattaattaggttaagaaaaaaataagctatattgtatctaacgctatgaagctggttttggatcctctctctttctctcgagatcttaaggatcttttaaaactttagcttcaagtcttgggaaaaagatgaagaagctaaagatcctttaattttcttttctttttttgtaagaaaaaaatagtttcttgacatgaaattttgggagtatgagaagagaaaatgtaaatgcctatgtgaattataatagtccatggcatgtttgagttatattttttcttttgtttttagatttcggtatcaatgtctttcgagggatatacagatgttaaatcaaatttt

SEQ ID NO: 103273 - protein, 177 aa, Arabidopsis thaliana
  peptide (1)..(177): Ceres Seq. ID no. 13612374
  misc_feature (81)..(140): Pfam Name: Protein of unknown function (DUF581) Pfam Description: Protein of unknown function (DUF581)
  misc_feature (1)..(177): Homolog of NCBI NO: 15238001 NR Description: senescence-associated protein -related
  misc_feature (45)..(177): Homolog of NCBI NO: 21594214 NR Description: unknown [Arabidopsis thaliana]
  misc_feature (45)..(177): Homolog of NCBI NO: 18414940 NR Description: senescence-associated protein -related thaliana] >gi|17381090|gb|AAL36357.1| unknown protein thaliana] >gi|21436245|gb|AAM51261.1| unknown protein
  misc_feature (45)..(177): Homolog of NCBI NO: 7485163 NR Description: hypothetical protein - Arabidopsis thaliana hypothetical protein [Arabidopsis thaliana]
  misc_feature (96)..(161): Homolog of NCBI NO: 38344280 NR Description: OSJNBa0013K16.12 [Oryza sativa (japonica
  misc_feature (96)..(163): Homolog of NCBI NO: 38344283 NR Description: OSJNBa0013K16.15 [Oryza sativa (japonica
  misc_feature (93)..(160): Homolog of NCBI NO: 18406598 NR Description: senescence-associated protein -related
  misc_feature (18)..(165): Homolog of NCBI NO: 21593931 NR Description: unknown [Arabidopsis thaliana]
  misc_feature (18)..(165): Homolog of NCBI NO: 18411783 NR Description: senescence-associated protein -related
  misc_feature (82)..(159): Homolog of NCBI NO: 38344282 NR Description: OSJNBa0013K16.14 [Oryza sativa (japonica
MELSSRKPYFIEEEEEENLASSLSEMEAGFSGNNNNSNNHGNPQNGVVSSSRFSYGRLNSLRNSQSYYYNQYSVSSPRSVVSGRFHDFRFDIQQPHFLDSCFLCKKPLGDNRDIYMYRGDTPFCSEECRQEQIERDEAKEKKQNLSHSVKSAMRRKEQSSPTRSRDYAFHNGTVAAA

SEQ ID NO: 103274 - protein, 152 aa, Arabidopsis thaliana
  peptide (1)..(152): Ceres Seq. ID no. 13612375
  misc_feature (56)..(115): Pfam Name: Protein of unknown function (DUF581) Pfam Description: Protein of unknown function (DUF581)
  misc_feature (1)..(152): Homolog of NCBI NO: 15238001 NR Description: senescence-associated protein -related
  misc_feature (20)..(152): Homolog of NCBI NO: 21594214 NR Description: unknown [Arabidopsis thaliana]
  misc_feature (20)..(152): Homolog of NCBI NO: 18414940 NR Description: senescence-associated protein -related thaliana] >gi|17381090|gb|AAL36357.1| unknown protein thaliana] >gi|21436245|gb|AAM51261.1| unknown protein
  misc_feature (20)..(152): Homolog of NCBI NO: 7485163 NR Description: hypothetical protein - Arabidopsis thaliana hypothetical protein [Arabidopsis thaliana]
  misc_feature (71)..(136): Homolog of NCBI NO: 38344280 NR Description: OSJNBa0013K16.12 [Oryza sativa (japonica
  misc_feature (71)..(138): Homolog of NCBI NO: 38344283 NR Description: OSJNBa0013K16.15 [Oryza sativa (japonica
  misc_feature (68)..(135): Homolog of NCBI NO: 18406598 NR Description: senescence-associated protein -related
  misc_feature (1)..(140): Homolog of NCBI NO: 21593931 NR Description: unknown [Arabidopsis thaliana]
  misc_feature (1)..(140): Homolog of NCBI NO: 18411783 NR Description: senescence-associated protein -related
  misc_feature (57)..(134): Homolog of NCBI NO: 38344282 NR Description: OSJNBa0013K16.14 [Oryza sativa (japonica
MEAGFSGNNNNSNNHGNPQNGVVSSSRFSYGRLNSLRNSQSYYYNQYSVSSPRSVVSGRFHDFRFDIQQPHFLDSCFLCKKPLGDNRDIYMYRGDTPFCSEECRQEQIERDEAKEKKQNLSHSVKSAMRRKEQSSPTRSRDYAFHNGTVAAA

SEQ ID NO: 103275 - DNA, 1083 bp, Arabidopsis thaliana
  misc_feature (1)..(1083): Ceres Seq. ID no. 13612376
  misc_feature: MA Experiment ID: 108461 Result: Up-regulated in Transcription
  misc_feature: MA Experiment 108461 PARAMETER Experiment Name: At_Germinating_Seeds_cDNA_P Parameter: Age (day) Value: 1 vs. 0
  misc_feature: MA Experiment 108461 PARAMETER Experiment Name: At_Germinating_Seeds_cDNA_P Parameter: Tissue Value: Germinating Seeds
  misc_feature: MA Experiment ID: 108462 Result: Up-regulated in Transcription
  misc_feature: MA Experiment 108462 PARAMETER Experiment Name: At_Germinating_Seeds_cDNA_P Parameter: Age (day) Value: 2 vs. 0
  misc_feature: MA Experiment 108462 PARAMETER Experiment Name: At_Germinating_Seeds_cDNA_P Parameter: Tissue Value: Germinating Seeds
  misc_feature: MA Experiment ID: 20000171 Result: Up-regulated in Transcription
  misc_feature: MA Experiment 20000171 PARAMETER Experiment Name: At_42deg_Heat_P Parameter: Age (day) Value: 14
  misc_feature: MA Experiment 20000171 PARAMETER Experiment Name: At_42deg_Heat_P Parameter: Organism Value: A. thaliana
  misc_feature: MA Experiment 20000171 PARAMETER Experiment Name: At_42deg_Heat_P Parameter: Plant Line Value: WS
  misc_feature: MA Experiment 20000171 PARAMETER Experiment Name: At_42deg_Heat_P Parameter: Temperature (deg C) Value: 42 vs. 22
  misc_feature: MA Experiment 20000171 PARAMETER Experiment Name: At_42deg_Heat_P Parameter: Timepoint (hr) Value: 1
  misc_feature: MA Experiment 20000171 PARAMETER Experiment Name: At_42deg_Heat_P Parameter: Tissue Value: Aerial
  misc_feature: MA Experiment ID: 20000173 Result: Up-regulated in Transcription
  misc_feature: MA Experiment 20000173 PARAMETER Experiment Name: At_42deg_Heat_P Parameter: Age (day) Value: 14
  misc_feature: MA Experiment 20000173 PARAMETER Experiment Name: At_42deg_Heat_P Parameter: Organism Value: A. thaliana
  misc_feature: MA Experiment 20000173 PARAMETER Experiment Name: At_42deg_Heat_P Parameter: Plant Line Value: WS
  misc_feature: MA Experiment 20000173 PARAMETER Experiment Name: At_42deg_Heat_P Parameter: Temperature (deg C) Value: 42 vs. 22
  misc_feature: MA Experiment 20000173 PARAMETER Experiment Name: At_42deg_Heat_P Parameter: Timepoint (hr) Value: 6
  misc_feature: MA Experiment 20000173 PARAMETER Experiment Name: At_42deg_Heat_P Parameter: Tissue Value: Aerial
  misc_feature: MA Experiment ID: 20000182 Result: Up-regulated in Transcription
  misc_feature: MA Experiment 20000182 PARAMETER Experiment Name: At_2mM_SA_P Parameter: Age (day) Value: 14
  misc_feature: MA Experiment 20000182 PARAMETER Experiment Name: At_2mM_SA_P Parameter: Organism Value: A. thaliana
  misc_feature: MA Experiment 20000182 PARAMETER Experiment Name: At_2mM_SA_P Parameter: Plant Line Value: WS
  misc_feature: MA Experiment 20000182 PARAMETER Experiment Name: At_2mM_SA_P Parameter: Timepoint (hr) Value: 6
  misc_feature: MA Experiment 20000182 PARAMETER Experiment Name: At_2mM_SA_P Parameter: Tissue Value: Aerial
  misc_feature: MA Experiment 20000182 PARAMETER Experiment Name: At_2mM_SA_P Parameter: Treatment Value: 2mM SA vs. No Treatment
  misc_feature: MA Experiment ID: 20000227 Result: Down-regulated in Transcription
  misc_feature: MA Experiment 20000227 PARAMETER Experiment Name: At_Root-Tips-vs-Tops_P Parameter: Tissue Value: Root Tips vs. Root Tops
  misc_feature: MA Experiment ID: 20000234 Result: Down-regulated in Transcription
  misc_feature: MA Experiment 20000234 PARAMETER Experiment Name: At_Siliques_P Parameter: Age (day) Value: 21
  misc_feature: MA Experiment 20000234 PARAMETER Experiment Name: At_Siliques_P Parameter: Organism Value: A. thaliana
  misc_feature: MA Experiment 20000234 PARAMETER Experiment Name: At_Siliques_P Parameter: Plant Line Value: WS
  misc_feature: MA Experiment 20000234 PARAMETER Experiment Name: At_Siliques_P Parameter: Tissue Value: Less Than 5mm Siliques vs. Whole Plant
  misc_feature: MA Experiment ID: 20000286 Result: Down-regulated in Transcription
  misc_feature: MA Experiment 20000286 PARAMETER Experiment Name: At_Open_Flower_P Parameter: Age (day) Value: 21
  misc_feature: MA Experiment 20000286 PARAMETER Experiment Name: At_Open_Flower_P Parameter: Plant Line Value: WS
  misc_feature: MA Experiment 20000286 PARAMETER Experiment Name: At_Open_Flower_P Parameter: Tissue Value: Half Open vs. Whole Plant
  misc_feature: MA Experiment ID: 20000495 Result: Down-regulated in Transcription
  misc_feature: MA Experiment 20000495 PARAMETER Experiment Name: At_Guard_Cells_P Parameter: Harvest Date Value: 8/2/2002
  misc_feature: MA Experiment 20000495 PARAMETER Experiment Name: At_Guard_Cells_P Parameter: Organism Value: A. thaliana
  misc_feature: MA Experiment 20000495 PARAMETER Experiment Name: At_Guard_Cells_P Parameter: Tissue Value: Guard Cells vs. Leaves
  misc_feature: MA Experiment ID: 20001558 Result: Down-regulated in Transcription
  misc_feature: MA Experiment 20001558 PARAMETER Experiment Name: At_Drought_Soil_Dry_P Parameter: Age (day) Value: 27
  misc_feature: MA Experiment 20001558 PARAMETER Experiment Name: At_Drought_Soil_Dry_P Parameter: Organism Value: A. thaliana
  misc_feature: MA Experiment 20001558 PARAMETER Experiment Name: At_Drought_Soil_Dry_P Parameter: Plant Line Value: WS
  misc_feature: MA Experiment 20001558 PARAMETER Experiment Name: At_Drought_Soil_Dry_P Parameter: Post Timepoint (hr) Value: 6
  misc_feature: MA Experiment 20001558 PARAMETER Experiment Name: At_Drought_Soil_Dry_P Parameter: Post-Treatment Value: Re-Water vs. No Drought
  misc_feature: MA Experiment 20001558 PARAMETER Experiment Name: At_Drought_Soil_Dry_P Parameter: Timepoint (day) Value: 13
  misc_feature: MA Experiment 20001558 PARAMETER Experiment Name: At_Drought_Soil_Dry_P Parameter: Treatment Value: Drought vs. No Drought
aatattttcattaatcgattctcaaagtcaagcaaaaaaaacgaaacaatggatgcgttctcttccttcttcgattctcaacctggtagcagaagctggagctatgattctcttaaaaacttccgtcagatttctccagccgttcagaatcatcttaaacgggtttatttgaccttatgttgtgctcttgtggcgtctgcctttggagcttacctccatgtgctctggaatatcggcggtattcttacaacgattggatgtattggaactatgatttggctcctttcatgtcctccttatgaacaccaaaaaaggctttctcttctgtttgtgtctgctgttcttgaaggtgcttctgttggccccttgatcaaagtggcaattgatgttgacccaagcatccttatcactgcatttgttggaactgcgatagcgtttgtctgtttctcagcagcagcaatgttagcaagacgcagggagtatctctaccttggaggactgctttcatctggcttgtctatgctaatgtggctccagtttgcctcttcaatctttggtggctctgcatctatctttaagtttgagttgtactttggacttttgatctttgtgggatacatggtggtggacacacaagagattatagaaaaggcacacctcggtgacatggactatgtaaaacattcgttgacccttttcactgactttgtagctgtgtttgttcggattctcatcataatgttgaagaactcagcagataaagaagagaagaagaagaaaaggagaaactgaggggatgtaaagtaaatttaactttatggttgttatcgtgtgtggccactttgaagatattacttgttagcactctctattggtgaccagacatgtttccactaaaaaggatctgcttgtttcacttctgcacaagtaccatcttcagattgtaaatgactcgagtgttgttcttcttttcataaacttttgttctttaagagtttggttctactgattgcatcttaccaagctaagaataatgtaggaaaatgataatcctgtttaaattttctaaaatgtgtgcatttc

SEQ ID NO: 103276 - protein, 263 aa, Arabidopsis thaliana; identical to SEQ ID NO: 23440
  peptide (1)..(263): Ceres Seq. ID no. 13612377
  misc_feature (42)..(251): Pfam Name: Uncharacterised protein family UPF0005 Pfam Description: Uncharacterised protein family UPF0005
  misc_feature (17)..(263): Homolog of NCBI NO: 15238017 NR Description: Bax inhibitor-1 (BI-1), putative [Arabidopsis
  misc_feature (17)..(263): Homolog of NCBI NO: 21593125 NR Description: Bax inhibitor-1 like [Arabidopsis thaliana]
  misc_feature (17)..(263): Homolog of NCBI NO: 14719274 NR Description: Bax inhibitor 1 [Brassica napus]
  misc_feature (17)..(261): Homolog of NCBI NO: 17981376 NR Description: bax inhibitor-like protein [Brassica oleracea]
  misc_feature (17)..(263): Homolog of NCBI NO: 14719276 NR Description: Bax inhibitor 1 [Nicotiana tabacum]
  misc_feature (17)..(263): Homolog of NCBI NO: 12229685 NR Description: Bax inhibitor-1 (BI-1) (OsBI-1)
  misc_feature (17)..(262): Homolog of NCBI NO: 13940165 NR Description: BAX inhibitor 1 [Hordeum vulgare subsp. vulgare]
  misc_feature (33)..(263): Homolog of NCBI NO: 15236582 NR Description: Bax inhibitor-1 (BI1) family [Arabidopsis
  misc_feature (77)..(254): Homolog of NCBI NO: 15238018 NR Description: hypothetical protein [Arabidopsis thaliana]
  misc_feature (26)..(170): Homolog of NCBI NO: 27526517 NR Description: putative BAX inhibitor 1 [Hordeum vulgare subsp.

SEQ ID NO: 103277 - protein, 247 aa, Arabidopsis thaliana; identical to SEQ ID NO: 23441
  peptide (1)..(247): Ceres Seq. ID no. 13612378
  misc_feature (26)..(235): Pfam Name: Uncharacterised protein family UPF0005 Pfam Description: Uncharacterised protein family UPF0005
  misc_feature (1)..(247): Homolog of NCBI NO: 15238017 NR Description: Bax inhibitor-1 (BI-1), putative [Arabidopsis
  misc_feature (1)..(247): Homolog of NCBI NO: 21593125 NR Description: Bax inhibitor-1 like [Arabidopsis thaliana]
  misc_feature (1)..(247): Homolog of NCBI NO: 14719274 NR Description: Bax inhibitor 1 [Brassica napus]
  misc_feature (1)..(245): Homolog of NCBI NO: 17981376 NR Description: bax inhibitor-like protein [Brassica oleracea]
  misc_feature (1)..(247): Homolog of NCBI NO: 14719276 NR Description: Bax inhibitor 1 [Nicotiana tabacum]
  misc_feature (1)..(247): Homolog of NCBI NO: 12229685 NR Description: Bax inhibitor-1 (BI-1) (OsBI-1)
  misc_feature (1)..(246): Homolog of NCBI NO: 13940165 NR Description: BAX inhibitor 1 [Hordeum vulgare subsp. vulgare]
  misc_feature (17)..(247): Homolog of NCBI NO: 15236582 NR Description: Bax inhibitor-1 (BI1) family [Arabidopsis
  misc_feature (61)..(238): Homolog of NCBI NO: 15238018 NR Description: hypothetical protein [Arabidopsis thaliana]
  misc_feature (10)..(154): Homolog of NCBI NO: 27526517 NR Description: putative BAX inhibitor 1 [Hordeum vulgare subsp.

SEQ ID NO: 103278 - protein, 173 aa, Arabidopsis thaliana; identical to SEQ ID NO: 23442
  peptide (1)..(173): Ceres Seq. ID no. 13612379
  misc_feature (1)..(161): Pfam Name: Uncharacterised protein family UPF0005 Pfam Description: Uncharacterised protein family UPF0005
  misc_feature (1)..(173): Homolog of NCBI NO: 15238017 NR Description: Bax inhibitor-1 (BI-1), putative [Arabidopsis
  misc_feature (1)..(173): Homolog of NCBI NO: 21593125 NR Description: Bax inhibitor-1 like [Arabidopsis thaliana]
  misc_feature (1)..(173): Homolog of NCBI NO: 14719274 NR Description: Bax inhibitor 1 [Brassica napus]
  misc_feature (1)..(171): Homolog of NCBI NO: 17981376 NR Description: bax inhibitor-like protein [Brassica oleracea]
  misc_feature (1)..(173): Homolog of NCBI NO: 14719276 NR Description: Bax inhibitor 1 [Nicotiana tabacum]
  misc_feature (1)..(173): Homolog of NCBI NO: 12229685 NR Description: Bax inhibitor-1 (BI-1) (OsBI-1)
  misc_feature (1)..(172): Homolog of NCBI NO: 13940165 NR Description: BAX inhibitor 1 [Hordeum vulgare subsp. vulgare]
  misc_feature (1)..(173): Homolog of NCBI NO: 15236582 NR Description: Bax inhibitor-1 (BI1) family [Arabidopsis
  misc_feature (1)..(164): Homolog of NCBI NO: 15238018 NR Description: hypothetical protein [Arabidopsis thaliana]
  misc_feature (1)..(80): Homolog of NCBI NO: 27526517 NR Description: putative BAX inhibitor 1 [Hordeum vulgare subsp.

SEQ ID NO: 103279 - DNA, 962 bp, Arabidopsis thaliana
  misc_feature (1)..(962): Ceres Seq. ID no. 13612380
  misc_feature: MA Experiment ID: 108434 Result: Down-regulated in Transcription
  misc_feature: MA Experiment 108434 PARAMETER Experiment Name: At_Root_Tips_cDNA_P Parameter: Tissue Value: Root Tips
  misc_feature: MA Experiment ID: 108435 Result: Up-regulated in Transcription
  misc_feature: MA Experiment 108435 PARAMETER Experiment Name: At_stm_Mutants_cDNA_P Parameter: Plant Line Value: wt Landsburg vs stm
  misc_feature: MA Experiment 108435 PARAMETER Experiment Name: At_stm_Mutants_cDNA_P Parameter: Tissue Value: Shoot Apical Meristem Region
  misc_feature: MA Experiment ID: 108464 Result: Up-regulated in Transcription
  misc_feature: MA Experiment 108464 PARAMETER Experiment Name: At_Germinating_Seeds_cDNA_P Parameter: Age (day) Value: 4 vs. 0
  misc_feature: MA Experiment 108464 PARAMETER Experiment Name: At_Germinating_Seeds_cDNA_P Parameter: Tissue Value: Germinating Seeds
  misc_feature: MA Experiment ID: 108561 Result: Down-regulated in Transcription
  misc_feature: MA Experiment 108561 PARAMETER Experiment Name: At_100uM_ABA_cDNA_P Parameter: Timepoint (hr) Value: 6
  misc_feature: MA Experiment 108561 PARAMETER Experiment Name: At_100uM_ABA_cDNA_P Parameter: Tissue Value: Aerial
  misc_feature: MA Experiment 108561 PARAMETER Experiment Name: At_100uM_ABA_cDNA_P Parameter: Treatment Value: 100uM ABA vs. No Treatment
  misc_feature: MA Experiment ID: 108574 Result: Up-regulated in Transcription
  misc_feature: MA Experiment 108574 PARAMETER Experiment Name: At_Wounding__cDNA_P Parameter: Timepoint (hr) Value: 1
  misc_feature: MA Experiment 108574 PARAMETER Experiment Name: At_Wounding__cDNA_P Parameter: Tissue Value: Aerial
  misc_feature: MA Experiment 108574 PARAMETER Experiment Name: At_Wounding__cDNA_P Parameter: Treatment Value: Wounding vs. No Wounding
  misc_feature: MA Experiment ID: 108577 Result: Down-regulated in Transcription
  misc_feature: MA Experiment 108577 PARAMETER Experiment Name: At_42deg_Heat_cDNA_P Parameter: Temperature (deg C) Value: 42 vs. 22
  misc_feature: MA Experiment 108577 PARAMETER Experiment Name: At_42deg_Heat_cDNA_P Parameter: Timepoint (hr) Value: 6
  misc_feature: MA Experiment 108577 PARAMETER Experiment Name: At_42deg_Heat_cDNA_P Parameter: Tissue Value: Aerial
  misc_feature: MA Experiment ID: 108579 Result: Up-regulated in Transcription
  misc_feature: MA Experiment 108579 PARAMETER Experiment Name: At_4deg_Cold_cDNA_P Parameter: Temperature (deg C) Value: 4 vs. 22
  misc_feature: MA Experiment 108579 PARAMETER Experiment Name: At_4deg_Cold_cDNA_P Parameter: Timepoint (hr) Value: 6
  misc_feature: MA Experiment 108579 PARAMETER Experiment Name: At_4deg_Cold_cDNA_P Parameter: Tissue Value: Aerial
  misc_feature: MA Experiment ID: 108585 Result: Up-regulated in Transcription
  misc_feature: MA Experiment 108585 PARAMETER Experiment Name: At_5mM_NaNP_cDNA_P Parameter: Timepoint (hr) Value: 6
  misc_feature: MA Experiment 108585 PARAMETER Experiment Name: At_5mM_NaNP_cDNA_P Parameter: Tissue Value: Aerial
  misc_feature: MA Experiment 108585 PARAMETER Experiment Name: At_5mM_NaNP_cDNA_P Parameter: Treatment Value: null
  misc_feature: MA Experiment ID: 108594 Result: Up-regulated in Transcription
  misc_feature: MA Experiment 108594 PARAMETER Experiment Name: At_Ler-rhl_Root_cDNA_P Parameter: Plant Line Value: null
  misc_feature: MA Experiment ID: 108595 Result: Up-regulated in Transcription
  misc_feature: MA Experiment 108595 PARAMETER Experiment Name: At_Ler-pi_Ovule_cDNA_P Parameter: Plant Line Value: null
  misc_feature: MA Experiment ID: 108605 Result: Down-regulated in Transcription
  misc_feature: MA Experiment 108605 PARAMETER Experiment Name: At_100uM_ABA_cDNA_P Parameter: Timepoint (hr) Value: 6
  misc_feature: MA Experiment 108605 PARAMETER Experiment Name: At_100uM_ABA_cDNA_P Parameter: Tissue Value: Aerial
  misc_feature: MA Experiment 108605 PARAMETER Experiment Name: At_100uM_ABA_cDNA_P Parameter: Treatment Value: 100uM ABA vs. No Treatment
  misc_feature: MA Experiment ID: 108667 Result: Up-regulated in Transcription
  misc_feature: MA Experiment 108667 PARAMETER Experiment Name: At_2mM_SA_cDNA_P Parameter: Plant Line Value: WS
  misc_feature: MA Experiment 108667 PARAMETER Experiment Name: At_2mM_SA_cDNA_P Parameter: Timepoint (hr) Value: 1
  misc_feature: MA Experiment 108667 PARAMETER Experiment Name: At_2mM_SA_cDNA_P Parameter: Treatment Value: 2mM SA vs. No Treatment
  misc_feature: MA Experiment ID: 20000069 Result: Up-regulated in Transcription
  misc_feature: MA Experiment 20000069 PARAMETER Experiment Name: At_100uM_ABA_Mutants_cDNA_P Parameter: Plant Line Value: CS23
  misc_feature: MA Experiment 20000069 PARAMETER Experiment Name: At_100uM_ABA_Mutants_cDNA_P Parameter: Timepoint (hr) Value: 6
  misc_feature: MA Experiment 20000069 PARAMETER Experiment Name: At_100uM_ABA_Mutants_cDNA_P Parameter: Tissue Value: Aerial
  misc_feature: MA Experiment 20000069 PARAMETER Experiment Name: At_100uM_ABA_Mutants_cDNA_P Parameter: Treatment Value: 100uM ABA vs. No Treatment
  misc_feature: MA Experiment ID: 20000072 Result: Up-regulated in Transcription
  misc_feature: MA Experiment 20000072 PARAMETER Experiment Name: At_100uM_ABA_Mutants_cDNA_P Parameter: Plant Line Value: CS8105
  misc_feature: MA Experiment 20000072 PARAMETER Experiment Name: At_100uM_ABA_Mutants_cDNA_P Parameter: Timepoint (hr) Value: 6
  misc_feature: MA Experiment 20000072 PARAMETER Experiment Name: At_100uM_ABA_Mutants_cDNA_P Parameter: Tissue Value: Aerial
  misc_feature: MA Experiment 20000072 PARAMETER Experiment Name: At_100uM_ABA_Mutants_cDNA_P Parameter: Treatment Value: 100uM ABA vs. No Treatment
  misc_feature: MA Experiment ID: 20000086 Result: Up-regulated in Transcription
  misc_feature: MA Experiment 20000086 PARAMETER Experiment Name: At_100uM_ABA_Mutants_cDNA_P Parameter: Plant Line Value: CS22
  misc_feature: MA Experiment 20000086 PARAMETER Experiment Name: At_100uM_ABA_Mutants_cDNA_P Parameter: Timepoint (hr) Value: 6
  misc_feature: MA Experiment 20000086 PARAMETER Experiment Name: At_100uM_ABA_Mutants_cDNA_P Parameter: Tissue Value: Aerial
  misc_feature: MA Experiment 20000086 PARAMETER Experiment Name: At_100uM_ABA_Mutants_cDNA_P Parameter: Treatment Value: 100uM ABA vs. No Treatment
  misc_feature: MA Experiment ID: 20000088 Result: Up-regulated in Transcription
  misc_feature: MA Experiment 20000088 PARAMETER Experiment Name: At_100uM_ABA_Mutants_cDNA_P Parameter: Plant Line Value: Landsberg
  misc_feature: MA Experiment 20000088 PARAMETER Experiment Name: At_100uM_ABA_Mutants_cDNA_P Parameter: Timepoint (hr) Value: 6
  misc_feature: MA Experiment 20000088 PARAMETER Experiment Name: At_100uM_ABA_Mutants_cDNA_P Parameter: Tissue Value: Aerial
  misc_feature: MA Experiment 20000088 PARAMETER Experiment Name: At_100uM_ABA_Mutants_cDNA_P Parameter: Treatment Value: 100uM ABA vs. No Treatment
  misc_feature: MA Experiment ID: 20000090 Result: Up-regulated in Transcription
  misc_feature: MA Experiment ID: 20000111 Result: Down-regulated in Transcription
  misc_feature: MA Experiment 20000111 PARAMETER Experiment Name: At_42deg_Heat_cDNA_P Parameter: Temperature (deg C) Value: 42 vs. 22
  misc_feature: MA Experiment 20000111 PARAMETER Experiment Name: At_42deg_Heat_cDNA_P Parameter: Timepoint (hr) Value: 6
  misc_feature: MA Experiment 20000111 PARAMETER Experiment Name: At_42deg_Heat_cDNA_P Parameter: Tissue Value: Aerial
  misc_feature: MA Experiment ID: 20000113 Result: Down-regulated in Transcription
  misc_feature: MA Experiment 20000113 PARAMETER Experiment Name: At_42deg_Heat_cDNA_P Parameter: Temperature (deg C) Value: 42 vs. 22
  misc_feature: MA Experiment 20000113 PARAMETER Experiment Name: At_42deg_Heat_cDNA_P Parameter: Timepoint (hr) Value: 8
  misc_feature: MA Experiment 20000113 PARAMETER Experiment Name: At_42deg_Heat_cDNA_P Parameter: Tissue Value: Aerial
  misc_feature: MA Experiment ID: 20000144 Result: Down-regulated in Transcription
  misc_feature: MA Experiment 20000144 PARAMETER Experiment Name: At_42deg_Heat_cDNA_P Parameter: Temperature (deg C) Value: 42 vs. 22
  misc_feature: MA Experiment 20000144 PARAMETER Experiment Name: At_42deg_Heat_cDNA_P Parameter: Timepoint (hr) Value: 1
  misc_feature: MA Experiment 20000144 PARAMETER Experiment Name: At_42deg_Heat_cDNA_P Parameter: Tissue Value: Aerial
  misc_feature: MA Experiment ID: 20000166 Result: Down-regulated in Transcription
  misc_feature: MA Experiment 20000166 PARAMETER Experiment Name: At_100uM_ABA_P Parameter: Age (day) Value: 14
  misc_feature: MA Experiment 20000166 PARAMETER Experiment Name: At_100uM_ABA_P Parameter: Organism Value: A. thaliana
  misc_feature: MA Experiment 20000166 PARAMETER Experiment Name: At_100uM_ABA_P Parameter: Plant Line Value: WS
  misc_feature: MA Experiment 20000166 PARAMETER Experiment Name: At_100uM_ABA_P Parameter: Timepoint (hr) Value: 1
  misc_feature: MA Experiment 20000166 PARAMETER Experiment Name: At_100uM_ABA_P Parameter: Tissue Value: Aerial
  misc_feature: MA Experiment 20000166 PARAMETER Experiment Name: At_100uM_ABA_P Parameter: Treatment Value: 100uM ABA vs. No Treatment
  misc_feature: MA Experiment ID: 20000169 Result: Down-regulated in Transcription
  misc_feature: MA Experiment 20000169 PARAMETER Experiment Name: At_100uM_ABA_P Parameter: Age (day) Value: 14
  misc_feature: MA Experiment 20000169 PARAMETER Experiment Name: At_100uM_ABA_P Parameter: Organism Value: A. thaliana
  misc_feature: MA Experiment 20000169 PARAMETER Experiment Name: At_100uM_ABA_P Parameter: Plant Line Value: WS
  misc_feature: MA Experiment 20000169 PARAMETER Experiment Name: At_100uM_ABA_P Parameter: Timepoint (hr) Value: 6
  misc_feature: MA Experiment 20000169 PARAMETER Experiment Name: At_100uM_ABA_P Parameter: Tissue Value: Aerial
  misc_feature: MA Experiment 20000169 PARAMETER Experiment Name: At_100uM_ABA_P Parameter: Treatment Value: 100uM ABA vs. No Treatment
  misc_feature: MA Experiment ID: 20000171 Result: Down-regulated in Transcription
  misc_feature: MA Experiment 20000171 PARAMETER Experiment Name: At_42deg_Heat_P Parameter: Age (day) Value: 14
  misc_feature: MA Experiment 20000171 PARAMETER Experiment Name: At_42deg_Heat_P Parameter: Organism Value: A. thaliana
  misc_feature: MA Experiment 20000171 PARAMETER Experiment Name: At_42deg_Heat_P Parameter: Plant Line Value: WS
  misc_feature: MA Experiment 20000171 PARAMETER Experiment Name: At_42deg_Heat_P Parameter: Temperature (deg C) Value: 42 vs. 22
  misc_feature: MA Experiment 20000171 PARAMETER Experiment Name: At_42deg_Heat_P Parameter: Timepoint (hr) Value: 1
  misc_feature: MA Experiment 20000171 PARAMETER Experiment Name: At_42deg_Heat_P Parameter: Tissue Value: Aerial
  misc_feature: MA Experiment ID: 20000173 Result: Down-regulated in Transcription
  misc_feature: MA Experiment 20000173 PARAMETER Experiment Name: At_42deg_Heat_P Parameter: Age (day) Value: 14
  misc_feature: MA Experiment 20000173 PARAMETER Experiment Name: At_42deg_Heat_P Parameter: Organism Value: A. thaliana
  misc_feature: MA Experiment 20000173 PARAMETER Experiment Name: At_42deg_Heat_P Parameter: Plant Line Value: WS
  misc_feature: MA Experiment 20000173 PARAMETER Experiment Name: At_42deg_Heat_P Parameter: Temperature (deg C) Value: 42 vs. 22
  misc_feature: MA Experiment 20000173 PARAMETER Experiment Name: At_42deg_Heat_P Parameter: Timepoint (hr) Value: 6
  misc_feature: MA Experiment 20000173 PARAMETER Experiment Name: At_42deg_Heat_P Parameter: Tissue Value: Aerial
  misc_feature: MA Experiment ID: 20000179 Result: Down-regulated in Transcription
  misc_feature: MA Experiment 20000179 PARAMETER Experiment Name: At_Germinating_Seeds_P Parameter: Age (hr) Value: 6 vs. 0
  misc_feature: MA Experiment 20000179 PARAMETER Experiment Name: At_Germinating_Seeds_P Parameter: Tissue Value: Germinating Seeds
  misc_feature: MA Experiment ID: 20000180 Result: Down-regulated in Transcription
  misc_feature: MA Experiment 20000180 PARAMETER Experiment Name: At_Germinating_Seeds_P Parameter: Age (hr) Value: 24 vs. 0
  misc_feature: MA Experiment 20000180 PARAMETER Experiment Name: At_Germinating_Seeds_P Parameter: Tissue Value: Germinating Seeds
  misc_feature: MA Experiment ID: 20000184 Result: Down-regulated in Transcription
  misc_feature: MA Experiment 20000184 PARAMETER Experiment Name: At_Shoots__P Parameter: Age (day) Value: 7
  misc_feature: MA Experiment 20000184 PARAMETER Experiment Name: At_Shoots__P Parameter: Tissue Value: Shoots vs. Whole Plant
  misc_feature: MA Experiment ID: 20000185 Result: Down-regulated in Transcription
  misc_feature: MA Experiment 20000185 PARAMETER Experiment Name: At_Roots__P Parameter: Age (day) Value: 7 vs. 21
  misc_feature: MA Experiment 20000185 PARAMETER Experiment Name: At_Roots__P Parameter: Organism Value: A. thaliana
  misc_feature: MA Experiment 20000185 PARAMETER Experiment Name: At_Roots__P Parameter: Tissue Value: Roots vs. Whole Plant
  misc_feature: MA Experiment ID: 20000213 Result: Up-regulated in Transcription
  misc_feature: MA Experiment 20000213 PARAMETER Experiment Name: At_4deg_Cold_P Parameter: Timepoint (hr) Value: 2
  misc_feature: MA Experiment ID: 20000234 Result: Down-regulated in Transcription
  misc_feature: MA Experiment 20000234 PARAMETER Experiment Name: At_Siliques_P Parameter: Age (day) Value: 21
  misc_feature: MA Experiment 20000234 PARAMETER Experiment Name: At_Siliques_P Parameter: Organism Value: A. thaliana
  misc_feature: MA Experiment 20000234 PARAMETER Experiment Name: At_Siliques_P Parameter: Plant Line Value: WS
  misc_feature: MA Experiment 20000234 PARAMETER Experiment Name: At_Siliques_P Parameter: Tissue Value: Less Than 5mm Siliques vs. Whole Plant
  misc_feature: MA Experiment ID: 20000264 Result: Down-regulated in Transcription
  misc_feature: MA Experiment 20000264 PARAMETER Experiment Name: At_Open_Flower_P Parameter: Age (day) Value: 21
  misc_feature: MA Experiment 20000264 PARAMETER Experiment Name: At_Open_Flower_P Parameter: Plant Line Value: WS
  misc_feature: MA Experiment 20000264 PARAMETER Experiment Name: At_Open_Flower_P Parameter: Tissue Value: Open Flower vs. Whole Plant
  misc_feature: MA Experiment ID: 20000265 Result: Down-regulated in Transcription
  misc_feature: MA Experiment 20000265 PARAMETER Experiment Name: At_Open_Flower_P Parameter: Age (day) Value: 21
  misc_feature: MA Experiment 20000265 PARAMETER Experiment Name: At_Open_Flower_P Parameter: Plant Line Value: WS
  misc_feature: MA Experiment 20000265 PARAMETER Experiment Name: At_Open_Flower_P Parameter: Tissue Value: Closed Flower vs. Whole Plant
  misc_feature: MA Experiment ID: 20000286 Result: Down-regulated in Transcription
  misc_feature: MA Experiment 20000286 PARAMETER Experiment Name: At_Open_Flower_P Parameter: Age (day) Value: 21
  misc_feature: MA Experiment 20000286 PARAMETER Experiment Name: At_Open_Flower_P Parameter: Plant Line Value: WS
  misc_feature: MA Experiment 20000286 PARAMETER Experiment Name: At_Open_Flower_P Parameter: Tissue Value: Half Open vs. Whole Plant
  misc_feature: MA Experiment ID: 20000436 Result: Down-regulated in Transcription
  misc_feature: MA Experiment 20000436 PARAMETER Experiment Name: At_Drought_P Parameter: Age (day) Value: 7
  misc_feature: MA Experiment 20000436 PARAMETER Experiment Name: At_Drought_P Parameter: Organism Value: A. thaliana
  misc_feature: MA Experiment 20000436 PARAMETER Experiment Name: At_Drought_P Parameter: Plant Line Value: WS
  misc_feature: MA Experiment 20000436 PARAMETER Experiment Name: At_Drought_P Parameter: Timepoint (hr) Value: 12
  misc_feature: MA Experiment 20000436 PARAMETER Experiment Name: At_Drought_P Parameter: Tissue Value: Whole Plant
  misc_feature: MA Experiment 20000436 PARAMETER Experiment Name: At_Drought_P Parameter: Treatment Value: Drought vs. No Drought
  misc_feature: MA Experiment ID: 20000437 Result: Down-regulated in Transcription
  misc_feature: MA Experiment 20000437 PARAMETER Experiment Name: At_Drought_P Parameter: Age (day) Value: 8
  misc_feature: MA Experiment 20000437 PARAMETER Experiment Name: At_Drought_P Parameter: Organism Value: A. thaliana
  misc_feature: MA Experiment 20000437 PARAMETER Experiment Name: At_Drought_P Parameter: Plant Line Value: WS
  misc_feature: MA Experiment 20000437 PARAMETER Experiment Name: At_Drought_P Parameter: Timepoint (hr) Value: 24
  misc_feature: MA Experiment 20000437 PARAMETER Experiment Name: At_Drought_P Parameter: Tissue Value: Whole Plant
  misc_feature: MA Experiment 20000437 PARAMETER Experiment Name: At_Drought_P Parameter: Treatment Value: Drought vs. No Drought
  misc_feature: MA Experiment ID: 20000438 Result: Down-regulated in Transcription
  misc_feature: MA Experiment 20000438 PARAMETER Experiment Name: At_Shoots__P Parameter: Age (day) Value: 14
  misc_feature: MA Experiment 20000438 PARAMETER Experiment Name: At_Shoots__P Parameter: Tissue Value: Shoots vs. Whole Plant
  misc_feature: MA Experiment ID: 20000439 Result: Down-regulated in Transcription
  misc_feature: MA Experiment 20000439 PARAMETER Experiment Name: At_Roots__P Parameter: Age (day) Value: 14 vs. 21
  misc_feature: MA Experiment 20000439 PARAMETER Experiment Name: At_Roots__P Parameter: Organism Value: A. thaliana
  misc_feature: MA Experiment 20000439 PARAMETER Experiment Name: At_Roots__P Parameter: Tissue Value: Roots vs. Whole Plant
  misc_feature: MA Experiment ID: 20000441 Result: Up-regulated in Transcription
  misc_feature: MA Experiment 20000441 PARAMETER Experiment Name: At_1uM_BR-BRZ__P Parameter: Tissue Value: Shoot Apices
  misc_feature: MA Experiment 20000441 PARAMETER Experiment Name: At_1uM_BR-BRZ__P Parameter: Treatment Value: 1uM BR vs. No Treatment
  misc_feature: MA Experiment ID: 20000443 Result: Up-regulated in Transcription
  misc_feature: MA Experiment 20000443 PARAMETER Experiment Name: At_1uM_BR-BRZ__P Parameter: Tissue Value: Shoot Apices
  misc_feature: MA Experiment 20000443 PARAMETER Experiment Name: At_1uM_BR-BRZ__P Parameter: Treatment Value: 1uM BRZ vs. No Treatment
  misc_feature: MA Experiment ID: 20000452 Result: Up-regulated in Transcription
  misc_feature: MA Experiment 20000452 PARAMETER Experiment Name: At_CS6879_Shoots-Roots_P Parameter: Age (day) Value: 14
  misc_feature: MA Experiment 20000452 PARAMETER Experiment Name: At_CS6879_Shoots-Roots_P Parameter: Organism Value: A. thaliana
  misc_feature: MA Experiment 20000452 PARAMETER Experiment Name: At_CS6879_Shoots-Roots_P Parameter: Plant Line Value: CS6879 vs. WS
  misc_feature: MA Experiment 20000452 PARAMETER Experiment Name: At_CS6879_Shoots-Roots_P Parameter: Tissue Value: Shoots
  misc_feature: MA Experiment ID: 20000460 Result: Up-regulated in Transcription
  misc_feature: MA Experiment 20000460 PARAMETER Experiment Name: At_10percent_PEG_P Parameter: Age (day) Value: 12
  misc_feature: MA Experiment 20000460 PARAMETER Experiment Name: At_10percent_PEG_P Parameter: Organism Value: A. thaliana
  misc_feature: MA Experiment 20000460 PARAMETER Experiment Name: At_10percent_PEG_P Parameter: Plant Line Value: WS
  misc_feature: MA Experiment 20000460 PARAMETER Experiment Name: At_10percent_PEG_P Parameter: Timepoint (day) Value: 12
  misc_feature: MA Experiment 20000460 PARAMETER Experiment Name: At_10percent_PEG_P Parameter: Tissue Value: Whole Plant
  misc_feature: MA Experiment 20000460 PARAMETER Experiment Name: At_10percent_PEG_P Parameter: Treatment Value: 10percent PEG vs. No Treatment
  misc_feature: MA Experiment ID: 20000495 Result: Down-regulated in Transcription
  misc_feature: MA Experiment 20000495 PARAMETER Experiment Name: At_Guard_Cells_P Parameter: Harvest Date Value: 8/2/2002
  misc_feature: MA Experiment 20000495 PARAMETER Experiment Name: At_Guard_Cells_P Parameter: Organism Value: A. thaliana
  misc_feature: MA Experiment 20000495 PARAMETER Experiment Name: At_Guard_Cells_P Parameter: Tissue Value: Guard Cells vs. Leaves
  misc_feature: MA Experiment ID: 20000573 Result: Down-regulated in Transcription
  misc_feature: MA Experiment 20000573 PARAMETER Experiment Name: At_100uM_ABA_Mutants__P Parameter: Organism Value: A. thaliana
  misc_feature: MA Experiment 20000573 PARAMETER Experiment Name: At_100uM_ABA_Mutants__P Parameter: Plant Line Value: CS22 vs. Ler wt
  misc_feature: MA Experiment 20000573 PARAMETER Experiment Name: At_100uM_ABA_Mutants__P Parameter: Timepoint (hr) Value: N/A
  misc_feature: MA Experiment 20000573 PARAMETER Experiment Name: At_100uM_ABA_Mutants__P Parameter: Tissue Value: Whole Plant
  misc_feature: MA Experiment 20000573 PARAMETER Experiment Name: At_100uM_ABA_Mutants__P Parameter: Treatment Value: None
  misc_feature: MA Experiment ID: 20000574 Result: Down-regulated in Transcription
  misc_feature: MA Experiment 20000574 PARAMETER Experiment Name: At_100uM_ABA_Mutants__P Parameter: Organism Value: A. thaliana
  misc_feature: MA Experiment 20000574 PARAMETER Experiment Name: At_100uM_ABA_Mutants__P Parameter: Plant Line Value: CS23 vs. Ler wt
  misc_feature: MA Experiment 20000574 PARAMETER Experiment Name: At_100uM_ABA_Mutants__P Parameter: Timepoint (hr) Value: N/A
  misc_feature: MA Experiment 20000574 PARAMETER Experiment Name: At_100uM_ABA_Mutants__P Parameter: Tissue Value: Whole Plant
  misc_feature: MA Experiment 20000574 PARAMETER Experiment Name: At_100uM_ABA_Mutants__P Parameter: Treatment Value: None
  misc_feature: MA Experiment ID: 20000794 Result: Down-regulated in Transcription
  misc_feature: MA Experiment 20000794 PARAMETER Experiment Name: At_Petals_P Parameter: Age (day) Value: 23-25 days
  misc_feature: MA Experiment 20000794 PARAMETER Experiment Name: At_Petals_P Parameter: Plant Line Value: WS
  misc_feature: MA Experiment 20000794 PARAMETER Experiment Name: At_Petals_P Parameter: Tissue Value: Petals vs. Whole plant
  misc_feature: MA Experiment ID: 20001248 Result: Up-regulated in Transcription
  misc_feature: MA Experiment 20001248 PARAMETER Experiment Name: At_Far-red-induction_P Parameter: Age (day) Value: 7
  misc_feature: MA Experiment 20001248 PARAMETER Experiment Name: At_Far-red-induction_P Parameter: Light Value: Far-red vs. White
  misc_feature: MA Experiment 20001248 PARAMETER Experiment Name: At_Far-red-induction_P Parameter: Organism Value: A. thaliana
  misc_feature: MA Experiment 20001248 PARAMETER Experiment Name: At_Far-red-induction_P Parameter: Plant Line Value: Columbia
  misc_feature: MA Experiment 20001248 PARAMETER Experiment Name: At_Far-red-induction_P Parameter: Timepoint (hr) Value: 4
  misc_feature: MA Experiment 20001248 PARAMETER Experiment Name: At_Far-red-induction_P Parameter: Tissue Value: Whole Plant
  misc_feature: MA Experiment ID: 20001451 Result: Down-regulated in Transcription
  misc_feature: MA Experiment 20001451 PARAMETER Experiment Name: At_Far-red-induction_P Parameter: Age (day) Value: 7
  misc_feature: MA Experiment 20001451 PARAMETER Experiment Name: At_Far-red-induction_P Parameter: Light Value: Far-red vs. White
  misc_feature: MA Experiment 20001451 PARAMETER Experiment Name: At_Far-red-induction_P Parameter: Organism Value: A. thaliana
  misc_feature: MA Experiment 20001451 PARAMETER Experiment Name: At_Far-red-induction_P Parameter: Plant Line Value: Columbia
  misc_feature: MA Experiment 20001451 PARAMETER Experiment Name: At_Far-red-induction_P Parameter: Timepoint (hr) Value: 24
  misc_feature: MA Experiment 20001451 PARAMETER Experiment Name: At_Far-red-induction_P Parameter: Tissue Value: Whole Plant
  misc_feature: MA Experiment ID: 20001554 Result: Down-regulated in Transcription
  misc_feature: MA Experiment 20001554 PARAMETER Experiment Name: At_Drought_Soil_Dry_P Parameter: Age (day) Value: 21
  misc_feature: MA Experiment 20001554 PARAMETER Experiment Name: At_Drought_Soil_Dry_P Parameter: Organism Value: A. thaliana
  misc_feature: MA Experiment 20001554 PARAMETER Experiment Name: At_Drought_Soil_Dry_P Parameter: Plant Line Value: WS
  misc_feature: MA Experiment 20001554 PARAMETER Experiment Name: At_Drought_Soil_Dry_P Parameter: Post Timepoint (hr) Value: None
  misc_feature: MA Experiment 20001554 PARAMETER Experiment Name: At_Drought_Soil_Dry_P Parameter: Post-Treatment Value: None
  misc_feature: MA Experiment 20001554 PARAMETER Experiment Name: At_Drought_Soil_Dry_P Parameter: Timepoint (day) Value: 7
  misc_feature: MA Experiment 20001554 PARAMETER Experiment Name: At_Drought_Soil_Dry_P Parameter: Treatment Value: Drought vs. No Drought
  misc_feature: MA Experiment ID: 20001555 Result: Down-regulated in Transcription
  misc_feature: MA Experiment 20001555 PARAMETER Experiment Name: At_Drought_Soil_Dry_P Parameter: Age (day) Value: 24
  misc_feature: MA Experiment 20001555 PARAMETER Experiment Name: At_Drought_Soil_Dry_P Parameter: Organism Value: A. thaliana
  misc_feature: MA Experiment 20001555 PARAMETER Experiment Name: At_Drought_Soil_Dry_P Parameter: Plant Line Value: WS
  misc_feature: MA Experiment 20001555 PARAMETER Experiment Name: At_Drought_Soil_Dry_P Parameter: Post Timepoint (hr) Value: None
  misc_feature: MA Experiment 20001555 PARAMETER Experiment Name: At_Drought_Soil_Dry_P Parameter: Post-Treatment Value: None
  misc_feature: MA Experiment 20001555 PARAMETER Experiment Name: At_Drought_Soil_Dry_P Parameter: Timepoint (day) Value: 10
  misc_feature: MA Experiment 20001555 PARAMETER Experiment Name: At_Drought_Soil_Dry_P Parameter: Treatment Value: Drought vs. No Drought
  misc_feature: MA Experiment ID: 20001556 Result: Down-regulated in Transcription
  misc_feature: MA Experiment 20001556 PARAMETER Experiment Name: At_Drought_Soil_Dry_P Parameter: Age (day) Value: 26
  misc_feature: MA Experiment 20001556 PARAMETER Experiment Name: At_Drought_Soil_Dry_P Parameter: Organism Value: A. thaliana
  misc_feature: MA Experiment 20001556 PARAMETER Experiment Name: At_Drought_Soil_Dry_P Parameter: Plant Line Value: WS
  misc_feature: MA Experiment 20001556 PARAMETER Experiment Name: At_Drought_Soil_Dry_P Parameter: Post Timepoint (hr) Value: None
  misc_feature: MA Experiment 20001556 PARAMETER Experiment Name: At_Drought_Soil_Dry_P Parameter: Post-Treatment Value: None
  misc_feature: MA Experiment 20001556 PARAMETER Experiment Name: At_Drought_Soil_Dry_P Parameter: Timepoint (day) Value: 12
  misc_feature: MA Experiment 20001556 PARAMETER Experiment Name: At_Drought_Soil_Dry_P Parameter: Treatment Value: Drought vs. No Drought
  misc_feature: MA Experiment ID: 20001558 Result: Down-regulated in Transcription
  misc_feature: MA Experiment 20001558 PARAMETER Experiment Name: At_Drought_Soil_Dry_P Parameter: Age (day) Value: 27
  misc_feature: MA Experiment 20001558 PARAMETER Experiment Name: At_Drought_Soil_Dry_P Parameter: Organism Value: A. thaliana
  misc_feature: MA Experiment 20001558 PARAMETER Experiment Name: At_Drought_Soil_Dry_P Parameter: Plant Line Value: WS
  misc_feature: MA Experiment 20001558 PARAMETER Experiment Name: At_Drought_Soil_Dry_P Parameter: Post Timepoint (hr) Value: 6
  misc_feature: MA Experiment 20001558 PARAMETER Experiment Name: At_Drought_Soil_Dry_P Parameter: Post-Treatment Value: Re-Water vs. No Drought
  misc_feature: MA Experiment 20001558 PARAMETER Experiment Name: At_Drought_Soil_Dry_P Parameter: Timepoint (day) Value: 13
  misc_feature: MA Experiment 20001558 PARAMETER Experiment Name: At_Drought_Soil_Dry_P Parameter: Treatment Value: Drought vs. No Drought
  misc_feature: MA Experiment ID: 20001904 Result: Down-regulated in Transcription
  misc_feature: MA Experiment 20001904 PARAMETER Experiment Name: At_Drought_Reproduction_P Parameter: Age (day) Value: 37
  misc_feature: MA Experiment 20001904 PARAMETER Experiment Name: At_Drought_Reproduction_P Parameter: Organism Value: A. thaliana
  misc_feature: MA Experiment 20001904 PARAMETER Experiment Name: At_Drought_Reproduction_P Parameter: Plant Line Value: WS
  misc_feature: MA Experiment 20001904 PARAMETER Experiment Name: At_Drought_Reproduction_P Parameter: Timepoint (day) Value: 7
  misc_feature: MA Experiment 20001904 PARAMETER Experiment Name: At_Drought_Reproduction_P Parameter: Tissue Value: Rosettes
  misc_feature: MA Experiment 20001904 PARAMETER Experiment Name: At_Drought_Reproduction_P Parameter: Treatment Value: Drought vs. No Drought
  misc_feature: MA Experiment ID: 20001905 Result: Down-regulated in Transcription
  misc_feature: MA Experiment 20001905 PARAMETER Experiment Name: At_Drought_Reproduction_P Parameter: Age (day) Value: 40
  misc_feature: MA Experiment 20001905 PARAMETER Experiment Name: At_Drought_Reproduction_P Parameter: Organism Value: A. thaliana
  misc_feature: MA Experiment 20001905 PARAMETER Experiment Name: At_Drought_Reproduction_P Parameter: Plant Line Value: WS
  misc_feature: MA Experiment 20001905 PARAMETER Experiment Name: At_Drought_Reproduction_P Parameter: Timepoint (day) Value: 10
  misc_feature: MA Experiment 20001905 PARAMETER Experiment Name: At_Drought_Reproduction_P Parameter: Tissue Value: Rosettes
  misc_feature: MA Experiment 20001905 PARAMETER Experiment Name: At_Drought_Reproduction_P Parameter: Treatment Value: Drought vs. No Drought
aaaaaagttcagatatttgataaatcaatcaacaaaacaaaaaaaactctatagttagtttctctgaaaatgtacggacagtgcaatatagaatccgactacgctttgttggagtcgataacacgtcacttgctaggaggaggaggagagaacgagctgcgactcaatgagtcaacaccgagttcgtgtttcacagagagttggggaggtttgccattgaaagagaatgattcagaggacatgttggtgtacggactcctcaaagatgccttccattttgacacgtcatcatcggacttgagctgtctttttgattttccggcggttaaagtcgagccaactgagaactttacggcgatggaggagaaaccaaagaaagcgataccggttacggagacggcagtgaaggcgaagcattacagaggagtgaggcagagaccgtgggggaaattcgcggcggagatacgtgatccggcgaagaatggagctagggtttggttagggacgtttgagacggcggaagatgcggctttagcttacgatatagctgcttttaggatgcgtggttcccgcgctttattgaattttccgttgagggttaattccggtgaacctgacccggttcggatcacgtctaagagatcttcttcgtcgtcgtcgtcgtcgtcctcttctacgtcgtcgtctgaaaacgggaagttgaaacgaaggagaaaagcagagaatctgacgtcggaggtggtgcaggtgaagtgtgaggttggtgatgagacacgtgttgatgagttattggtttcataagtttgatcttgtgtgttttgtagttgaatagttttgctataaatgttgaggcaccaagtaaaagtgttcccgtgatgtaaattagttactaaacagagccatatatcttcaatccataaacaaaatagacactttaataaagccgtgagtgttaatttttc

SEQ ID NO: 103280 - protein, 243 aa, Arabidopsis thaliana; identical to SEQ ID NO: 26540
  peptide (1)..(243): Ceres Seq. ID no. 13612381
  misc_feature (114)..(179): Pfam Name: AP2 domain Pfam Description: AP2 domain
  misc_feature (1)..(243): Homolog of NCBI NO: 15238041 NR Description: ethylene responsive element binding factor 2 [Arabidopsis thaliana] >gi|7531108|sp|O80338|ERF2_ARATH Ethylene element binding factor 2 (AtERF2) >gi|25350259|pir||T51989
  misc_feature (1)..(243): Homolog of NCBI NO: 21592595 NR Description: ethylene responsive element binding factor 2
  misc_feature (40)..(242): Homolog of NCBI NO: 21264420 NR Description: Ethylene responsive element binding factor 1
  misc_feature (40)..(242): Homolog of NCBI NO: 25350258 NR Description: ethylene responsive element binding factor 1 - Arabidopsis thaliana >gi|3434967|dbj|BAA32418.1| ethylene
  misc_feature (40)..(242): Homolog of NCBI NO: 25350257 NR Description: EREBP-2 protein [imported] - Arabidopsis thaliana
  misc_feature (40)..(224): Homolog of NCBI NO: 7528276 NR Description: AP2-related transcription factor
  misc_feature (58)..(242): Homolog of NCBI NO: 18414897 NR Description: ethylene responsive element binding factor 1
  misc_feature (40)..(242): Homolog of NCBI NO: 7489077 NR Description: transcription factor Pti4 - tomato (fragment)
  misc_feature (40)..(216): Homolog of NCBI NO: 28274828 NR Description: ethylene response factor 1 [Lycopersicon
  misc_feature (40)..(243): Homolog of NCBI NO: 7489113 NR Description: DNA binding protein EREBP-2 - common tobacco

SEQ ID NO: 103281 - protein, 186 aa, Arabidopsis thaliana; identical to SEQ ID NO: 26541
  peptide (1)..(186): Ceres Seq. ID no. 13612382
  misc_feature (57)..(122): Pfam Name: AP2 domain Pfam Description: AP2 domain
  misc_feature (1)..(186): Homolog of NCBI NO: 15238041 NR Description: ethylene responsive element binding factor 2 [Arabidopsis thaliana] >gi|7531108|sp|O80338|ERF2_ARATH Ethylene element binding factor 2 (AtERF2) >gi|25350259|pir||T51989
  misc_feature (1)..(186): Homolog of NCBI NO: 21592595 NR Description: ethylene responsive element binding factor 2
  misc_feature (1)..(185): Homolog of NCBI NO: 21264420 NR Description: Ethylene responsive element binding factor 1
  misc_feature (1)..(185): Homolog of NCBI NO: 25350257 NR Description: EREBP-2 protein [imported] - Arabidopsis thaliana
  misc_feature (1)..(185): Homolog of NCBI NO: 25350258 NR Description: ethylene responsive element binding factor 1 - Arabidopsis thaliana >gi|3434967|dbj|BAA32418.1| ethylene
  misc_feature (1)..(167): Homolog of NCBI NO: 7528276 NR Description: AP2-related transcription factor
  misc_feature (1)..(185): Homolog of NCBI NO: 18414897 NR Description: ethylene responsive element binding factor 1
  misc_feature (1)..(185): Homolog of NCBI NO: 7489077 NR Description: transcription factor Pti4 - tomato (fragment)
  misc_feature (1)..(159): Homolog of NCBI NO: 28274828 NR Description: ethylene response factor 1 [Lycopersicon
  misc_feature (1)..(186): Homolog of NCBI NO: 7489113 NR Description: DNA binding protein EREBP-2 - common tobacco

SEQ ID NO: 103282 - protein, 147 aa, Arabidopsis thaliana; identical to SEQ ID NO: 26542
  peptide (1)..(147): Ceres Seq. ID no. 13612383
  misc_feature (18)..(83): Pfam Name: AP2 domain Pfam Description: AP2 domain
  misc_feature (1)..(147): Homolog of NCBI NO: 15238041 NR Description: ethylene responsive element binding factor 2 [Arabidopsis thaliana] >gi|7531108|sp|O80338|ERF2_ARATH Ethylene element binding factor 2 (AtERF2) >gi|25350259|pir||T51989
  misc_feature (1)..(147): Homolog of NCBI NO: 21592595 NR Description: ethylene responsive element binding factor 2
  misc_feature (1)..(146): Homolog of NCBI NO: 21264420 NR Description: Ethylene responsive element binding factor 1
  misc_feature (1)..(146): Homolog of NCBI NO: 25350257 NR Description: EREBP-2 protein [imported] - Arabidopsis thaliana
  misc_feature (1)..(146): Homolog of NCBI NO: 25350258 NR Description: ethylene responsive element binding factor 1 - Arabidopsis thaliana >gi|3434967|dbj|BAA32418.1| ethylene
  misc_feature (1)..(128): Homolog of NCBI NO: 7528276 NR Description: AP2-related transcription factor
  misc_feature (1)..(146): Homolog of NCBI NO: 18414897 NR Description: ethylene responsive element binding factor 1
  misc_feature (1)..(146): Homolog of NCBI NO: 7489077 NR Description: transcription factor Pti4 - tomato (fragment)
  misc_feature (1)..(120): Homolog of NCBI NO: 28274828 NR Description: ethylene response factor 1 [Lycopersicon
  misc_feature (1)..(147): Homolog of NCBI NO: 7489113 NR Description: DNA binding protein EREBP-2 - common tobacco

SEQ ID NO: 103283 - DNA, 1208 bp, Arabidopsis thaliana
  misc_feature (1)..(1208): Ceres Seq. ID no. 13612392
  misc_feature: MA Experiment ID: 108434 Result: Up-regulated in Transcription
  misc_feature: MA Experiment 108434 PARAMETER Experiment Name: At_Root_Tips_cDNA_P Parameter: Tissue Value: Root Tips
  misc_feature: MA Experiment ID: 108461 Result: Up-regulated in Transcription
  misc_feature: MA Experiment 108461 PARAMETER Experiment Name: At_Germinating_Seeds_cDNA_P Parameter: Age (day) Value: 1 vs. 0
  misc_feature: MA Experiment 108461 PARAMETER Experiment Name: At_Germinating_Seeds_cDNA_P Parameter: Tissue Value: Germinating Seeds
  misc_feature: MA Experiment ID: 108462 Result: Up-regulated in Transcription
  misc_feature: MA Experiment 108462 PARAMETER Experiment Name: At_Germinating_Seeds_cDNA_P Parameter: Age (day) Value: 2 vs. 0
  misc_feature: MA Experiment 108462 PARAMETER Experiment Name: At_Germinating_Seeds_cDNA_P Parameter: Tissue Value: Germinating Seeds
  misc_feature: MA Experiment ID: 108579 Result: Down-regulated in Transcription
  misc_feature: MA Experiment 108579 PARAMETER Experiment Name: At_4deg_Cold_cDNA_P Parameter: Temperature (deg C) Value: 4 vs. 22
  misc_feature: MA Experiment 108579 PARAMETER Experiment Name: At_4deg_Cold_cDNA_P Parameter: Timepoint (hr) Value: 6
  misc_feature: MA Experiment 108579 PARAMETER Experiment Name: At_4deg_Cold_cDNA_P Parameter: Tissue Value: Aerial
  misc_feature: MA Experiment ID: 20000224 Result: Down-regulated in Transcription
agaaggcgttgaatcctttcgttttccgattccatttttgggatctcttgtttcgttttcttctctttggatccattccattcccatgttccccaatttctttaatcggtgttgcttccacaaggcttcatgagcttgtataacaagtttctctaggaggtgttaaagagccagatcaagctttcagaagagattttcttagggtggttgagagctgaaagttttgatatttagtcaactttgttccactgaaccttctaggaagctacctcaagtagacagctttgttgacgggcttcaagccagtggtaaagatatgcttctgtagaagggttaatcttgagcattaaaggacatggctttctactctgaagacgacaagagcgaagactacctctttaagattgttctaatcggtgattctgctgtcgggaaatcaaatttacttgccagatttgcgagggatgagttctatcccaattcaaagtcgacgattggagtggagtttcagacacagaagatggatataaacgggaaggagatcaaagcacagatatgggacacagcaggtcaagaacgttttagagcagtcacttctgcatattaccgaggtgcagttggagctcttctggtttacgatatcagcagacggcagacttttcacagcattggtagatggctcaacgagctacacacacactctgatatgaatgttgtgacgatcctggtgggcaacaagtcggatctgaaggacttgagagaagtgtcaacagcggaagggaaggcattggctgaagcacaaggtcttttcttcatggagacatcggctttggactcatcaaacgtggcagctgcatttgagacggttgtgaaggagatatacaacatactgagcaggaaagtgatgagctcacaggagctaaacaagcaagaccctgcttcactgagcaatggcaagaaagttgtgataccatcagacgggcagggcgagttcaagaaaggtggatgttgttcttcttgatagaaaactgaaattgtagagagcttaaaaaggaagactattgatcatctgtttgattgtttatgttgtccacgttgccatgaacgttgaaatttgagatgggcttgtgttgtggtgtggaagtgtttaggtgtagtagcaatctgtaaattttctattgcagaagcttttatgagactcacactac

SEQ ID NO: 103284 - protein, 221 aa, Arabidopsis thaliana
  peptide (1)..(221): Ceres Seq. ID no. 13612393
  misc_feature (16)..(177): Pfam Name: Ras family Pfam Description: Ras family
  misc_feature (1)..(221): Homolog of NCBI NO: 15238115 NR Description: GTP-binding protein, putative [Arabidopsis
  misc_feature (1)..(221): Homolog of NCBI NO: 1370160 NR Description: RAB11J [Lotus japonicus]
  misc_feature (1)..(221): Homolog of NCBI NO: 560504 NR Description: guanine nucleotide regulatory protein [Vicia faba]
  misc_feature (1)..(221): Homolog of NCBI NO: 541980 NR Description: GTP-binding protein, ras-like (clone vfa-yptx) -
  misc_feature (1)..(221): Homolog of NCBI NO: 5714658 NR Description: Rab GTP-binding protein Rab11a [Gossypium
  misc_feature (1)..(221): Homolog of NCBI NO: 5714660 NR Description: Rab GTP-binding protein Rab11b [Gossypium
  misc_feature (1)..(221): Homolog of NCBI NO: 34913324 NR Description: putative Rab GTP-binding protein Rab11a [Oryza
  misc_feature (7)..(219): Homolog of NCBI NO: 29647488 NR Description: putative GTP-binding protein Rab11e [Oryza sativa
  misc_feature (5)..(221): Homolog of NCBI NO: 15225121 NR Description: GTP-binding protein, putative [Arabidopsis
  misc_feature (6)..(220): Homolog of NCBI NO: 15224226 NR Description: Ras-related GTP-binding protein (ARA-4)
MAFYSEDDKSEDYLFKIVLIGDSAVGKSNLLARFARDEFYPNSKSTIGVEFQTQKMDINGKEIKAQIWDTAGQERFRAVTSAYYRGAVGALLVYDISRRQTFHSIGRWLNELHTHSDMNVVTILVGNKSDLKDLREVSTAEGKALAEAQGLFFMETSALDSSNVAAAFETVVKEIYNILSRKVMSSQELNKQDPASLSNGKKVVIPSDGQGEFKKGGCCSS

SEQ ID NO: 103285 - protein, 166 aa, Arabidopsis thaliana
  peptide (1)..(166): Ceres Seq. ID no. 13612394
  misc_feature (1)..(122): Pfam Name: Ras family Pfam Description: Ras family
  misc_feature (1)..(166): Homolog of NCBI NO: 15238115 NR Description: GTP-binding protein, putative [Arabidopsis
  misc_feature (1)..(166): Homolog of NCBI NO: 1370160 NR Description: RAB11J [Lotus japonicus]
  misc_feature (1)..(166): Homolog of NCBI NO: 560504 NR Description: guanine nucleotide regulatory protein [Vicia faba]
  misc_feature (1)..(166): Homolog of NCBI NO: 541980 NR Description: GTP-binding protein, ras-like (clone vfa-yptx) -
  misc_feature (1)..(166): Homolog of NCBI NO: 5714658 NR Description: Rab GTP-binding protein Rab11a [Gossypium
  misc_feature (1)..(166): Homolog of NCBI NO: 5714660 NR Description: Rab GTP-binding protein Rab11b [Gossypium
  misc_feature (1)..(166): Homolog of NCBI NO: 34913324 NR Description: putative Rab GTP-binding protein Rab11a [Oryza
  misc_feature (1)..(164): Homolog of NCBI NO: 29647488 NR Description: putative GTP-binding protein Rab11e [Oryza sativa
  misc_feature (1)..(166): Homolog of NCBI NO: 15225121 NR Description: GTP-binding protein, putative [Arabidopsis
  misc_feature (1)..(165): Homolog of NCBI NO: 15224226 NR Description: Ras-related GTP-binding protein (ARA-4)
MDINGKEIKAQIWDTAGQERFRAVTSAYYRGAVGALLVYDISRRQTFHSIGRWLNELHTHSDMNVVTILVGNKSDLKDLREVSTAEGKALAEAQGLFFMETSALDSSNVAAAFETVVKEIYNILSRKVMSSQELNKQDPASLSNGKKVVIPSDGQGEFKKGGCCSS

SEQ ID NO: 103286 - DNA, 1645 bp, Arabidopsis thaliana
  misc_feature (1)..(1645): Ceres Seq. ID no. 13612425
  misc_feature: MA Experiment ID: 20000264 Result: Up-regulated in Transcription
  misc_feature: MA Experiment 20000264 PARAMETER Experiment Name: At_Open_Flower_P Parameter: Age (day) Value: 21
  misc_feature: MA Experiment 20000264 PARAMETER Experiment Name: At_Open_Flower_P Parameter: Plant Line Value: WS
  misc_feature: MA Experiment 20000264 PARAMETER Experiment Name: At_Open_Flower_P Parameter: Tissue Value: Open Flower vs. Whole Plant
gaaaagaaaagtaaggaattttccattactctctctcacttctctctctctaattctcaccaagaacccagaattgagaataagaatctatagatcattatgctcacctctctgctcttgtttaagtgatgagctgaatctaacaaacgttcacacgtgttaacacccacacgtgcgacttcttctttattctcttcaaagcctcttcttgaactagaagtttcttttgaacatgtatagtccaaatactctagttgctttagagtcattgccaaacttgaacttgttttatccttcttctctttcattagcttgagcaagctgaagcttctttgtgctttctccaagctccactttaaagttgaatcatactcaaacatttactgacagaggactgattcatagaatatttaacatcataagatgatcttctcaataataatggcggttcttttggcccaagcttcaagtttgccaaagaagactgtccagagttcggatggggatattgtagactgcttcgacgtgagagatcagccttcattggatcacccactattgcagaatcatgaaattcagggcgcacccgccacaggattaccatatatgatcaacaaagcgggaaaaagaagagtttggcaggtttggaaccaaaacggcaccagctgtcctgacgaaactatacccataagacgtagcgtggtcggggctaaaagatttaagaaaaaacattggacagatgttcgagtcaatcgccgaacagttccatacgccgctgaggagggacacgagtacgcgattggagaggtggtatatctgcggggaatatatggaacagtggcaactatgaacgtttggaatccatctgtagaacatggaacaaacgaatttagtttgtcccaaatttggctcgtcgctggacattacaacgattccgacctcaacacagtcgaggctggttggcaggttttcccggatcattatcatgacagccagccacgacttttcgtctattggacgaaggacacatatcagaagacagggtgtctcaacctcgagtgccctggttttgttcaagtcactagcgagtttgccattggcagtgcattctctcctacatcttcttacggcggcagccagtacgacatcacgatgtacatatggaaggatactaaagatggcaactggtggctgagcattgactcctcagtgattgggtattggccggcgaggcttttcacgcatttagctcacgggccggcgacgttggtacagtggggaggcgagattgtaaactctcgcagctatggccagcacactaccacacagatgggctcgggacattttgcagaggaaggcttcggcaaagcaggtagcttccgaaacctgaaaattattgactacctctcgtacatgcaaccagtccaagagttcatcctgcaaacgaagaaccccacatgttatactgccataaagggatacagcgaggagtgggggagtcatttctactacggcggaccgggatataacgccctgtgtccatagtgtttggacattaggataaacttatttctttatgatatatgataaaactagagtttggagtgtttaatgacgttaaataaaaaactagagtttggatttc

SEQ ID NO: 103287 - protein, 373 aa, Arabidopsis thaliana; identical to SEQ ID NO: 40819
  peptide (1)..(373): Ceres Seq. ID no. 13612426
  misc_feature (135)..(331): Pfam Name: Arabidopsis proteins of unknown function Pfam Description: Arabidopsis proteins of unknown function
  misc_feature (1)..(373): Homolog of NCBI NO: 30693008 NR Description: expressed protein [Arabidopsis thaliana] unknown protein [Arabidopsis thaliana]
  misc_feature (7)..(373): Homolog of NCBI NO: 7487383 NR Description: hypothetical protein T24C20.110 - Arabidopsis >gi|5541729|emb|CAB51070.1| putative protein [Arabidopsis
  misc_feature (11)..(372): Homolog of NCBI NO: 15238835 NR Description: expressed protein [Arabidopsis thaliana]
  misc_feature (10)..(373): Homolog of NCBI NO: 21389708 NR Description: putative carboxyl-terminal proteinase [Gossypium
  misc_feature (11)..(373): Homolog of NCBI NO: 34393554 NR Description: putative carboxyl-terminal proteinase [Oryza
  misc_feature (20)..(373): Homolog of NCBI NO: 25345697 NR Description: unknown protein F5A18.27 [imported] - Arabidopsis
  misc_feature (20)..(373): Homolog of NCBI NO: 30698726 NR Description: expressed protein [Arabidopsis thaliana]
  misc_feature (20)..(373): Homolog of NCBI NO: 15220207 NR Description: expressed protein [Arabidopsis thaliana]
  misc_feature (20)..(373): Homolog of NCBI NO: 28416687 NR Description: At1g70550 [Arabidopsis thaliana]
  misc_feature (18)..(373): Homolog of NCBI NO: 18400044 NR Description: expressed protein [Arabidopsis thaliana] gb|AAC16072.1~gene_id:MRP15.17~strong similarity to unknown [Arabidopsis thaliana] >gi|18700165|gb|AAL77694.1|

SEQ ID NO: 103288 - protein, 367 aa, Arabidopsis thaliana; identical to SEQ ID NO: 40820
  peptide (1)..(367): Ceres Seq. ID no. 13612427
  misc_feature (129)..(325): Pfam Name: Arabidopsis proteins of unknown function Pfam Description: Arabidopsis proteins of unknown function
  misc_feature (1)..(367): Homolog of NCBI NO: 30693008 NR Description: expressed protein [Arabidopsis thaliana] unknown protein [Arabidopsis thaliana]
  misc_feature (1)..(367): Homolog of NCBI NO: 7487383 NR Description: hypothetical protein T24C20.110 - Arabidopsis >gi|5541729|emb|CAB51070.1| putative protein [Arabidopsis
  misc_feature (5)..(366): Homolog of NCBI NO: 15238835 NR Description: expressed protein [Arabidopsis thaliana]
  misc_feature (4)..(367): Homolog of NCBI NO: 21389708 NR Description: putative carboxyl-terminal proteinase [Gossypium
  misc_feature (5)..(367): Homolog of NCBI NO: 34393554 NR Description: putative carboxyl-terminal proteinase [Oryza
  misc_feature (14)..(367): Homolog of NCBI NO: 25345697 NR Description: unknown protein F5A18.27 [imported] - Arabidopsis
  misc_feature (14)..(367): Homolog of NCBI NO: 30698726 NR Description: expressed protein [Arabidopsis thaliana]
  misc_feature (14)..(367): Homolog of NCBI NO: 15220207 NR Description: expressed protein [Arabidopsis thaliana]
  misc_feature (14)..(367): Homolog of NCBI NO: 28416687 NR Description: At1g70550 [Arabidopsis thaliana]
  misc_feature (12)..(367): Homolog of NCBI NO: 18400044 NR Description: expressed protein [Arabidopsis thaliana] gb|AAC16072.1~gene_id:MRP15.17~strong similarity to unknown [Arabidopsis thaliana] >gi|18700165|gb|AAL77694.1|

SEQ ID NO: 103289 - protein, 312 aa, Arabidopsis thaliana; identical to SEQ ID NO: 40821
  peptide (1)..(312): Ceres Seq. ID no. 13612428
  misc_feature (74)..(270): Pfam Name: Arabidopsis proteins of unknown function Pfam Description: Arabidopsis proteins of unknown function
  misc_feature (1)..(312): Homolog of NCBI NO: 30693008 NR Description: expressed protein [Arabidopsis thaliana] unknown protein [Arabidopsis thaliana]
  misc_feature (1)..(312): Homolog of NCBI NO: 7487383 NR Description: hypothetical protein T24C20.110 - Arabidopsis >gi|5541729|emb|CAB51070.1| putative protein [Arabidopsis
  misc_feature (1)..(311): Homolog of NCBI NO: 15238835 NR Description: expressed protein [Arabidopsis thaliana]
  misc_feature (1)..(312): Homolog of NCBI NO: 21389708 NR Description: putative carboxyl-terminal proteinase [Gossypium
  misc_feature (1)..(312): Homolog of NCBI NO: 34393554 NR Description: putative carboxyl-terminal proteinase [Oryza
  misc_feature (1)..(312): Homolog of NCBI NO: 25345697 NR Description: unknown protein F5A18.27 [imported] - Arabidopsis
  misc_feature (1)..(312): Homolog of NCBI NO: 30698726 NR Description: expressed protein [Arabidopsis thaliana]
  misc_feature (1)..(312): Homolog of NCBI NO: 15220207 NR Description: expressed protein [Arabidopsis thaliana]
  misc_feature (1)..(312): Homolog of NCBI NO: 28416687 NR Description: At1g70550 [Arabidopsis thaliana]
  misc_feature (1)..(312): Homolog of NCBI NO: 18400044 NR Description: expressed protein [Arabidopsis thaliana] gb|AAC16072.1~gene_id:MRP15.17~strong similarity to unknown [Arabidopsis thaliana] >gi|18700165|gb|AAL77694.1|

SEQ ID NO: 103290 - DNA, 1303 bp, Arabidopsis thaliana
  misc_feature (1)..(1303): Ceres Seq. ID no. 13612429
  misc_feature: MA Experiment ID: 108461 Result: Up-regulated in Transcription
  misc_feature: MA Experiment 108461 PARAMETER Experiment Name: At_Germinating_Seeds_cDNA_P Parameter: Age (day) Value: 1 vs. 0
  misc_feature: MA Experiment 108461 PARAMETER Experiment Name: At_Germinating_Seeds_cDNA_P Parameter: Tissue Value: Germinating Seeds
  misc_feature: MA Experiment ID: 108462 Result: Up-regulated in Transcription
  misc_feature: MA Experiment 108462 PARAMETER Experiment Name: At_Germinating_Seeds_cDNA_P Parameter: Age (day) Value: 2 vs. 0
  misc_feature: MA Experiment 108462 PARAMETER Experiment Name: At_Germinating_Seeds_cDNA_P Parameter: Tissue Value: Germinating Seeds
  misc_feature: MA Experiment ID: 108463 Result: Up-regulated in Transcription
  misc_feature: MA Experiment 108463 PARAMETER Experiment Name: At_Germinating_Seeds_cDNA_P Parameter: Age (day) Value: 3 vs. 0
  misc_feature: MA Experiment 108463 PARAMETER Experiment Name: At_Germinating_Seeds_cDNA_P Parameter: Tissue Value: Germinating Seeds
  misc_feature: MA Experiment ID: 108464 Result: Up-regulated in Transcription
  misc_feature: MA Experiment 108464 PARAMETER Experiment Name: At_Germinating_Seeds_cDNA_P Parameter: Age (day) Value: 4 vs. 0
  misc_feature: MA Experiment 108464 PARAMETER Experiment Name: At_Germinating_Seeds_cDNA_P Parameter: Tissue Value: Germinating Seeds
  misc_feature: MA Experiment ID: 108561 Result: Up-regulated in Transcription
  misc_feature: MA Experiment 108561 PARAMETER Experiment Name: At_100uM_ABA_cDNA_P Parameter: Timepoint (hr) Value: 6
  misc_feature: MA Experiment 108561 PARAMETER Experiment Name: At_100uM_ABA_cDNA_P Parameter: Tissue Value: Aerial
  misc_feature: MA Experiment 108561 PARAMETER Experiment Name: At_100uM_ABA_cDNA_P Parameter: Treatment Value: 100uM ABA vs. No Treatment
  misc_feature: MA Experiment ID: 108569 Result: Up-regulated in Transcription
  misc_feature: MA Experiment 108569 PARAMETER Experiment Name: At_0.001%_MeJA__cDNA_P Parameter: Timepoint (hr) Value: 6
  misc_feature: MA Experiment 108569 PARAMETER Experiment Name: At_0.001%_MeJA__cDNA_P Parameter: Tissue Value: Aerial
  misc_feature: MA Experiment 108569 PARAMETER Experiment Name: At_0.001%_MeJA__cDNA_P Parameter: Treatment Value: 0.001% MeJA vs. No Treatment
  misc_feature: MA Experiment ID: 108572 Result: Up-regulated in Transcription
  misc_feature: MA Experiment 108572 PARAMETER Experiment Name: At_Drought_cDNA_P Parameter: Timepoint (hr) Value: 1
  misc_feature: MA Experiment 108572 PARAMETER Experiment Name: At_Drought_cDNA_P Parameter: Tissue Value: Aerial
  misc_feature: MA Experiment 108572 PARAMETER Experiment Name: At_Drought_cDNA_P Parameter: Treatment Value: Drought vs. No Drought
  misc_feature: MA Experiment ID: 108573 Result: Up-regulated in Transcription
  misc_feature: MA Experiment 108573 PARAMETER Experiment Name: At_Drought_cDNA_P Parameter: Timepoint (hr) Value: 6
  misc_feature: MA Experiment 108573 PARAMETER Experiment Name: At_Drought_cDNA_P Parameter: Tissue Value: Aerial
  misc_feature: MA Experiment 108573 PARAMETER Experiment Name: At_Drought_cDNA_P Parameter: Treatment Value: Drought vs. No Drought
  misc_feature: MA Experiment ID: 108594 Result: Down-regulated in Transcription
  misc_feature: MA Experiment 108594 PARAMETER Experiment Name: At_Ler-rhl_Root_cDNA_P Parameter: Plant Line Value: null
  misc_feature: MA Experiment ID: 108595 Result: Down-regulated in Transcription
  misc_feature: MA Experiment 108595 PARAMETER Experiment Name: At_Ler-pi_Ovule_cDNA_P Parameter: Plant Line Value: null
  misc_feature: MA Experiment ID: 108605 Result: Up-regulated in Transcription
  misc_feature: MA Experiment 108605 PARAMETER Experiment Name: At_100uM_ABA_cDNA_P Parameter: Timepoint (hr) Value: 6
  misc_feature: MA Experiment 108605 PARAMETER Experiment Name: At_100uM_ABA_cDNA_P Parameter: Tissue Value: Aerial
  misc_feature: MA Experiment 108605 PARAMETER Experiment Name: At_100uM_ABA_cDNA_P Parameter: Treatment Value: 100uM ABA vs. No Treatment
  misc_feature: MA Experiment ID: 108607 Result: Up-regulated in Transcription
  misc_feature: MA Experiment 108607 PARAMETER Experiment Name: At_100uM_ABA_cDNA_P Parameter: Timepoint (hr) Value: 4
  misc_feature: MA Experiment 108607 PARAMETER Experiment Name: At_100uM_ABA_cDNA_P Parameter: Tissue Value: Aerial
  misc_feature: MA Experiment 108607 PARAMETER Experiment Name: At_100uM_ABA_cDNA_P Parameter: Treatment Value: 100uM ABA vs. No Treatment
  misc_feature: MA Experiment ID: 20000069 Result: Up-regulated in Transcription
  misc_feature: MA Experiment 20000069 PARAMETER Experiment Name: At_100uM_ABA_Mutants_cDNA_P Parameter: Plant Line Value: CS23
  misc_feature: MA Experiment 20000069 PARAMETER Experiment Name: At_100uM_ABA_Mutants_cDNA_P Parameter: Timepoint (hr) Value: 6
  misc_feature: MA Experiment 20000069 PARAMETER Experiment Name: At_100uM_ABA_Mutants_cDNA_P Parameter: Tissue Value: Aerial
  misc_feature: MA Experiment 20000069 PARAMETER Experiment Name: At_100uM_ABA_Mutants_cDNA_P Parameter: Treatment Value: 100uM ABA vs. No Treatment
  misc_feature: MA Experiment ID: 20000070 Result: Up-regulated in Transcription
  misc_feature: MA Experiment 20000070 PARAMETER Experiment Name: At_100uM_ABA_Mutants_cDNA_P Parameter: Plant Line Value: CS24
  misc_feature: MA Experiment 20000070 PARAMETER Experiment Name: At_100uM_ABA_Mutants_cDNA_P Parameter: Timepoint (hr) Value: 6
  misc_feature: MA Experiment 20000070 PARAMETER Experiment Name: At_100uM_ABA_Mutants_cDNA_P Parameter: Tissue Value: Aerial
  misc_feature: MA Experiment 20000070 PARAMETER Experiment Name: At_100uM_ABA_Mutants_cDNA_P Parameter: Treatment Value: 100uM ABA vs. No Treatment
  misc_feature: MA Experiment ID: 20000071 Result: Up-regulated in Transcription
  misc_feature: MA Experiment 20000071 PARAMETER Experiment Name: At_100uM_ABA_Mutants_cDNA_P Parameter: Plant Line Value: CS8104
  misc_feature: MA Experiment 20000071 PARAMETER Experiment Name: At_100uM_ABA_Mutants_cDNA_P Parameter: Timepoint (hr) Value: 6
  misc_feature: MA Experiment 20000071 PARAMETER Experiment Name: At_100uM_ABA_Mutants_cDNA_P Parameter: Tissue Value: Aerial
  misc_feature: MA Experiment 20000071 PARAMETER Experiment Name: At_100uM_ABA_Mutants_cDNA_P Parameter: Treatment Value: 100uM ABA vs. No Treatment
  misc_feature: MA Experiment ID: 20000072 Result: Up-regulated in Transcription
  misc_feature: MA Experiment 20000072 PARAMETER Experiment Name: At_100uM_ABA_Mutants_cDNA_P Parameter: Plant Line Value: CS8105
  misc_feature: MA Experiment 20000072 PARAMETER Experiment Name: At_100uM_ABA_Mutants_cDNA_P Parameter: Timepoint (hr) Value: 6
  misc_feature: MA Experiment 20000072 PARAMETER Experiment Name: At_100uM_ABA_Mutants_cDNA_P Parameter: Tissue Value: Aerial
  misc_feature: MA Experiment 20000072 PARAMETER Experiment Name: At_100uM_ABA_Mutants_cDNA_P Parameter: Treatment Value: 100uM ABA vs. No Treatment
  misc_feature: MA Experiment ID: 20000086 Result: Up-regulated in Transcription
  misc_feature: MA Experiment 20000086 PARAMETER Experiment Name: At_100uM_ABA_Mutants_cDNA_P Parameter: Plant Line Value: CS22
  misc_feature: MA Experiment 20000086 PARAMETER Experiment Name: At_100uM_ABA_Mutants_cDNA_P Parameter: Timepoint (hr) Value: 6
  misc_feature: MA Experiment 20000086 PARAMETER Experiment Name: At_100uM_ABA_Mutants_cDNA_P Parameter: Tissue Value: Aerial
  misc_feature: MA Experiment 20000086 PARAMETER Experiment Name: At_100uM_ABA_Mutants_cDNA_P Parameter: Treatment Value: 100uM ABA vs. No Treatment
  misc_feature: MA Experiment ID: 20000087 Result: Up-regulated in Transcription
  misc_feature: MA Experiment 20000087 PARAMETER Experiment Name: At_100uM_ABA_Mutants_cDNA_P Parameter: Plant Line Value: WS
  misc_feature: MA Experiment 20000087 PARAMETER Experiment Name: At_100uM_ABA_Mutants_cDNA_P Parameter: Timepoint (hr) Value: 6
  misc_feature: MA Experiment 20000087 PARAMETER Experiment Name: At_100uM_ABA_Mutants_cDNA_P Parameter: Tissue Value: Aerial
  misc_feature: MA Experiment 20000087 PARAMETER Experiment Name: At_100uM_ABA_Mutants_cDNA_P Parameter: Treatment Value: 100uM ABA vs. No Treatment
  misc_feature: MA Experiment ID: 20000088 Result: Up-regulated in Transcription
  misc_feature: MA Experiment 20000088 PARAMETER Experiment Name: At_100uM_ABA_Mutants_cDNA_P Parameter: Plant Line Value: Landsberg
  misc_feature: MA Experiment 20000088 PARAMETER Experiment Name: At_100uM_ABA_Mutants_cDNA_P Parameter: Timepoint (hr) Value: 6
  misc_feature: MA Experiment 20000088 PARAMETER Experiment Name: At_100uM_ABA_Mutants_cDNA_P Parameter: Tissue Value: Aerial
  misc_feature: MA Experiment 20000088 PARAMETER Experiment Name: At_100uM_ABA_Mutants_cDNA_P Parameter: Treatment Value: 100uM ABA vs. No Treatment
  misc_feature: MA Experiment ID: 20000089 Result: Up-regulated in Transcription
  misc_feature: MA Experiment ID: 20000117 Result: Up-regulated in Transcription
  misc_feature: MA Experiment 20000117 PARAMETER Experiment Name: At_100uM_ABA_Mutants_cDNA_P Parameter: Plant Line Value: Columbia
  misc_feature: MA Experiment 20000117 PARAMETER Experiment Name: At_100uM_ABA_Mutants_cDNA_P Parameter: Timepoint (hr) Value: 6
  misc_feature: MA Experiment 20000117 PARAMETER Experiment Name: At_100uM_ABA_Mutants_cDNA_P Parameter: Tissue Value: Aerial
  misc_feature: MA Experiment 20000117 PARAMETER Experiment Name: At_100uM_ABA_Mutants_cDNA_P Parameter: Treatment Value: 100uM ABA vs. No Treatment
  misc_feature: MA Experiment ID: 20000169 Result: Up-regulated in Transcription
  misc_feature: MA Experiment 20000169 PARAMETER Experiment Name: At_100uM_ABA_P Parameter: Age (day) Value: 14
  misc_feature: MA Experiment 20000169 PARAMETER Experiment Name: At_100uM_ABA_P Parameter: Organism Value: A. thaliana
  misc_feature: MA Experiment 20000169 PARAMETER Experiment Name: At_100uM_ABA_P Parameter: Plant Line Value: WS
  misc_feature: MA Experiment 20000169 PARAMETER Experiment Name: At_100uM_ABA_P Parameter: Timepoint (hr) Value: 6
  misc_feature: MA Experiment 20000169 PARAMETER Experiment Name: At_100uM_ABA_P Parameter: Tissue Value: Aerial
  misc_feature: MA Experiment 20000169 PARAMETER Experiment Name: At_100uM_ABA_P Parameter: Treatment Value: 100uM ABA vs. No Treatment
  misc_feature: MA Experiment ID: 20000180 Result: Up-regulated in Transcription
  misc_feature: MA Experiment 20000180 PARAMETER Experiment Name: At_Germinating_Seeds_P Parameter: Age (hr) Value: 24 vs. 0
  misc_feature: MA Experiment 20000180 PARAMETER Experiment Name: At_Germinating_Seeds_P Parameter: Tissue Value: Germinating Seeds
  misc_feature: MA Experiment ID: 20000184 Result: Up-regulated in Transcription
  misc_feature: MA Experiment 20000184 PARAMETER Experiment Name: At_Shoots__P Parameter: Age (day) Value: 7
  misc_feature: MA Experiment 20000184 PARAMETER Experiment Name: At_Shoots__P Parameter: Tissue Value: Shoots vs. Whole Plant
  misc_feature: MA Experiment ID: 20000185 Result: Up-regulated in Transcription
  misc_feature: MA Experiment 20000185 PARAMETER Experiment Name: At_Roots__P Parameter: Age (day) Value: 7 vs. 21
  misc_feature: MA Experiment 20000185 PARAMETER Experiment Name: At_Roots__P Parameter: Organism Value: A. thaliana
  misc_feature: MA Experiment 20000185 PARAMETER Experiment Name: At_Roots__P Parameter: Tissue Value: Roots vs. Whole Plant
  misc_feature: MA Experiment ID: 20000227 Result: Down-regulated in Transcription
  misc_feature: MA Experiment 20000227 PARAMETER Experiment Name: At_Root-Tips-vs-Tops_P Parameter: Tissue Value: Root Tips vs. Root Tops
  misc_feature: MA Experiment ID: 20000269 Result: Down-regulated in Transcription
  misc_feature: MA Experiment 20000269 PARAMETER Experiment Name: At_1mM_KNO3_L-vs-H_Roots_P Parameter: Age (day) Value: 7,10,12
  misc_feature: MA Experiment 20000269 PARAMETER Experiment Name: At_1mM_KNO3_L-vs-H_Roots_P Parameter: Organism Value: A. thaliana
  misc_feature: MA Experiment 20000269 PARAMETER Experiment Name: At_1mM_KNO3_L-vs-H_Roots_P Parameter: Plant Line Value: WS
  misc_feature: MA Experiment 20000269 PARAMETER Experiment Name: At_1mM_KNO3_L-vs-H_Roots_P Parameter: Timepoint (day) Value: 7,10,12
  misc_feature: MA Experiment 20000269 PARAMETER Experiment Name: At_1mM_KNO3_L-vs-H_Roots_P Parameter: Tissue Value: Roots
  misc_feature: MA Experiment 20000269 PARAMETER Experiment Name: At_1mM_KNO3_L-vs-H_Roots_P Parameter: Treatment Value: 1mM KNO3 vs. 50mM KNO3
  misc_feature: MA Experiment ID: 20000438 Result: Up-regulated in Transcription
  misc_feature: MA Experiment 20000438 PARAMETER Experiment Name: At_Shoots__P Parameter: Age (day) Value: 14
  misc_feature: MA Experiment 20000438 PARAMETER Experiment Name: At_Shoots__P Parameter: Tissue Value: Shoots vs. Whole Plant
  misc_feature: MA Experiment ID: 20000439 Result: Up-regulated in Transcription
  misc_feature: MA Experiment 20000439 PARAMETER Experiment Name: At_Roots__P Parameter: Age (day) Value: 14 vs. 21
  misc_feature: MA Experiment 20000439 PARAMETER Experiment Name: At_Roots__P Parameter: Organism Value: A. thaliana
  misc_feature: MA Experiment 20000439 PARAMETER Experiment Name: At_Roots__P Parameter: Tissue Value: Roots vs. Whole Plant
  misc_feature: MA Experiment ID: 20000453 Result: Up-regulated in Transcription
  misc_feature: MA Experiment 20000453 PARAMETER Experiment Name: At_100uM_ABA_P Parameter: Age (day) Value: 15
  misc_feature: MA Experiment 20000453 PARAMETER Experiment Name: At_100uM_ABA_P Parameter: Organism Value: A. thaliana
  misc_feature: MA Experiment 20000453 PARAMETER Experiment Name: At_100uM_ABA_P Parameter: Plant Line Value: WS
  misc_feature: MA Experiment 20000453 PARAMETER Experiment Name: At_100uM_ABA_P Parameter: Timepoint (hr) Value: 24
  misc_feature: MA Experiment 20000453 PARAMETER Experiment Name: At_100uM_ABA_P Parameter: Tissue Value: Aerial
  misc_feature: MA Experiment 20000453 PARAMETER Experiment Name: At_100uM_ABA_P Parameter: Treatment Value: 100uM ABA vs. No Treatment
  misc_feature: MA Experiment ID: 20000794 Result: Up-regulated in Transcription
  misc_feature: MA Experiment 20000794 PARAMETER Experiment Name: At_Petals_P Parameter: Age (day) Value: 23-25 days
  misc_feature: MA Experiment 20000794 PARAMETER Experiment Name: At_Petals_P Parameter: Plant Line Value: WS
  misc_feature: MA Experiment 20000794 PARAMETER Experiment Name: At_Petals_P Parameter: Tissue Value: Petals vs. Whole plant
  misc_feature: MA Experiment ID: 20001248 Result: Down-regulated in Transcription
  misc_feature: MA Experiment 20001248 PARAMETER Experiment Name: At_Far-red-induction_P Parameter: Age (day) Value: 7
  misc_feature: MA Experiment 20001248 PARAMETER Experiment Name: At_Far-red-induction_P Parameter: Light Value: Far-red vs. White
  misc_feature: MA Experiment 20001248 PARAMETER Experiment Name: At_Far-red-induction_P Parameter: Organism Value: A. thaliana
  misc_feature: MA Experiment 20001248 PARAMETER Experiment Name: At_Far-red-induction_P Parameter: Plant Line Value: Columbia
  misc_feature: MA Experiment 20001248 PARAMETER Experiment Name: At_Far-red-induction_P Parameter: Timepoint (hr) Value: 4
  misc_feature: MA Experiment 20001248 PARAMETER Experiment Name: At_Far-red-induction_P Parameter: Tissue Value: Whole Plant
  misc_feature: MA Experiment ID: 20001450 Result: Down-regulated in Transcription
  misc_feature: MA Experiment 20001450 PARAMETER Experiment Name: At_Far-red-induction_P Parameter: Age (day) Value: 7
  misc_feature: MA Experiment 20001450 PARAMETER Experiment Name: At_Far-red-induction_P Parameter: Light Value: Far-red vs. White
  misc_feature: MA Experiment 20001450 PARAMETER Experiment Name: At_Far-red-induction_P Parameter: Organism Value: A. thaliana
  misc_feature: MA Experiment 20001450 PARAMETER Experiment Name: At_Far-red-induction_P Parameter: Plant Line Value: Columbia
  misc_feature: MA Experiment 20001450 PARAMETER Experiment Name: At_Far-red-induction_P Parameter: Timepoint (hr) Value: 8
  misc_feature: MA Experiment 20001450 PARAMETER Experiment Name: At_Far-red-induction_P Parameter: Tissue Value: Whole Plant
  misc_feature: MA Experiment ID: 20001451 Result: Down-regulated in Transcription
  misc_feature: MA Experiment 20001451 PARAMETER Experiment Name: At_Far-red-induction_P Parameter: Age (day) Value: 7
  misc_feature: MA Experiment 20001451 PARAMETER Experiment Name: At_Far-red-induction_P Parameter: Light Value: Far-red vs. White
  misc_feature: MA Experiment 20001451 PARAMETER Experiment Name: At_Far-red-induction_P Parameter: Organism Value: A. thaliana
  misc_feature: MA Experiment 20001451 PARAMETER Experiment Name: At_Far-red-induction_P Parameter: Plant Line Value: Columbia
  misc_feature: MA Experiment 20001451 PARAMETER Experiment Name: At_Far-red-induction_P Parameter: Timepoint (hr) Value: 24
  misc_feature: MA Experiment 20001451 PARAMETER Experiment Name: At_Far-red-induction_P Parameter: Tissue Value: Whole Plant
  misc_feature: MA Experiment ID: 20001554 Result: Up-regulated in Transcription
  misc_feature: MA Experiment 20001554 PARAMETER Experiment Name: At_Drought_Soil_Dry_P Parameter: Age (day) Value: 21
  misc_feature: MA Experiment 20001554 PARAMETER Experiment Name: At_Drought_Soil_Dry_P Parameter: Organism Value: A. thaliana
  misc_feature: MA Experiment 20001554 PARAMETER Experiment Name: At_Drought_Soil_Dry_P Parameter: Plant Line Value: WS
  misc_feature: MA Experiment 20001554 PARAMETER Experiment Name: At_Drought_Soil_Dry_P Parameter: Post Timepoint (hr) Value: None
  misc_feature: MA Experiment 20001554 PARAMETER Experiment Name: At_Drought_Soil_Dry_P Parameter: Post-Treatment Value: None
  misc_feature: MA Experiment 20001554 PARAMETER Experiment Name: At_Drought_Soil_Dry_P Parameter: Timepoint (day) Value: 7
  misc_feature: MA Experiment 20001554 PARAMETER Experiment Name: At_Drought_Soil_Dry_P Parameter: Treatment Value: Drought vs. No Drought
  misc_feature: MA Experiment ID: 20001555 Result: Up-regulated in Transcription
  misc_feature: MA Experiment 20001555 PARAMETER Experiment Name: At_Drought_Soil_Dry_P Parameter: Age (day) Value: 24
  misc_feature: MA Experiment 20001555 PARAMETER Experiment Name: At_Drought_Soil_Dry_P Parameter: Organism Value: A. thaliana
  misc_feature: MA Experiment 20001555 PARAMETER Experiment Name: At_Drought_Soil_Dry_P Parameter: Plant Line Value: WS
  misc_feature: MA Experiment 20001555 PARAMETER Experiment Name: At_Drought_Soil_Dry_P Parameter: Post Timepoint (hr) Value: None
  misc_feature: MA Experiment 20001555 PARAMETER Experiment Name: At_Drought_Soil_Dry_P Parameter: Post-Treatment Value: None
  misc_feature: MA Experiment 20001555 PARAMETER Experiment Name: At_Drought_Soil_Dry_P Parameter: Timepoint (day) Value: 10
  misc_feature: MA Experiment 20001555 PARAMETER Experiment Name: At_Drought_Soil_Dry_P Parameter: Treatment Value: Drought vs. No Drought
  misc_feature: MA Experiment ID: 20001556 Result: Up-regulated in Transcription
  misc_feature: MA Experiment 20001556 PARAMETER Experiment Name: At_Drought_Soil_Dry_P Parameter: Age (day) Value: 26
  misc_feature: MA Experiment 20001556 PARAMETER Experiment Name: At_Drought_Soil_Dry_P Parameter: Organism Value: A. thaliana
  misc_feature: MA Experiment 20001556 PARAMETER Experiment Name: At_Drought_Soil_Dry_P Parameter: Plant Line Value: WS
  misc_feature: MA Experiment 20001556 PARAMETER Experiment Name: At_Drought_Soil_Dry_P Parameter: Post Timepoint (hr) Value: None
  misc_feature: MA Experiment 20001556 PARAMETER Experiment Name: At_Drought_Soil_Dry_P Parameter: Post-Treatment Value: None
  misc_feature: MA Experiment 20001556 PARAMETER Experiment Name: At_Drought_Soil_Dry_P Parameter: Timepoint (day) Value: 12
  misc_feature: MA Experiment 20001556 PARAMETER Experiment Name: At_Drought_Soil_Dry_P Parameter: Treatment Value: Drought vs. No Drought
  misc_feature: MA Experiment ID: 20001559 Result: Up-regulated in Transcription
  misc_feature: MA Experiment 20001559 PARAMETER Experiment Name: At_Drought_Soil_Dry_P Parameter: Age (day) Value: 28
  misc_feature: MA Experiment 20001559 PARAMETER Experiment Name: At_Drought_Soil_Dry_P Parameter: Organism Value: A. thaliana
  misc_feature: MA Experiment 20001559 PARAMETER Experiment Name: At_Drought_Soil_Dry_P Parameter: Plant Line Value: WS
  misc_feature: MA Experiment 20001559 PARAMETER Experiment Name: At_Drought_Soil_Dry_P Parameter: Post Timepoint (hr) Value: 29
  misc_feature: MA Experiment 20001559 PARAMETER Experiment Name: At_Drought_Soil_Dry_P Parameter: Post-Treatment Value: Re-Water vs. No Drought
  misc_feature: MA Experiment 20001559 PARAMETER Experiment Name: At_Drought_Soil_Dry_P Parameter: Timepoint (day) Value: 14
  misc_feature: MA Experiment 20001559 PARAMETER Experiment Name: At_Drought_Soil_Dry_P Parameter: Treatment Value: Drought vs. No Drought
  misc_feature: MA Experiment ID: 20001904 Result: Up-regulated in Transcription
  misc_feature: MA Experiment 20001904 PARAMETER Experiment Name: At_Drought_Reproduction_P Parameter: Age (day) Value: 37
  misc_feature: MA Experiment 20001904 PARAMETER Experiment Name: At_Drought_Reproduction_P Parameter: Organism Value: A. thaliana
  misc_feature: MA Experiment 20001904 PARAMETER Experiment Name: At_Drought_Reproduction_P Parameter: Plant Line Value: WS
  misc_feature: MA Experiment 20001904 PARAMETER Experiment Name: At_Drought_Reproduction_P Parameter: Timepoint (day) Value: 7
  misc_feature: MA Experiment 20001904 PARAMETER Experiment Name: At_Drought_Reproduction_P Parameter: Tissue Value: Rosettes
  misc_feature: MA Experiment 20001904 PARAMETER Experiment Name: At_Drought_Reproduction_P Parameter: Treatment Value: Drought vs. No Drought
  misc_feature: MA Experiment ID: 20001906 Result: Up-regulated in Transcription
  misc_feature: MA Experiment 20001906 PARAMETER Experiment Name: At_Drought_Reproduction_P Parameter: Age (day) Value: 35
  misc_feature: MA Experiment 20001906 PARAMETER Experiment Name: At_Drought_Reproduction_P Parameter: Organism Value: A. thaliana
  misc_feature: MA Experiment 20001906 PARAMETER Experiment Name: At_Drought_Reproduction_P Parameter: Plant Line Value: WS
  misc_feature: MA Experiment 20001906 PARAMETER Experiment Name: At_Drought_Reproduction_P Parameter: Timepoint (day) Value: 5
  misc_feature: MA Experiment 20001906 PARAMETER Experiment Name: At_Drought_Reproduction_P Parameter: Tissue Value: Siliques
  misc_feature: MA Experiment 20001906 PARAMETER Experiment Name: At_Drought_Reproduction_P Parameter: Treatment Value: Drought vs. No Drought
caagaagaagaatccaaagacatgaaacttttctttattgttctcatctcttttctttccctcctccaagcatcaaaaggattcgatttcgacgaaaaagaattagaaaccgaagagaacgtatggaagctctatgagaggtggagaggccaccactctgtatccagagcctcccacgaggcaataaagcggttcaacgtttttagacacaatgtccttcatgtccacaggactaacaaaaagaacaagccttacaaactcaagatcaatagattcgccgacataacgcaccacgagtttagaagctcctacgctggctctaatgttaagcatcaccgaatgcttcgtggaccgaagcgcggatctggtggtttcatgtatgagaatgtgaccagagttccgagttctgttgattggcgagagaaaggagctgtcactgaggtcaagaatcaacaagattgtggaagttgctgggcgttttcgacggttgcagcagtggaagggataaacaagatcagaacaaacaaactggtttcattgtctgaacaagagcttgtggattgtgacactgaagagaatcaaggttgtgcaggaggtctcatggaacctgcgtttgaatttataaagaacaatggtggcatcaaaaccgaagagacttatccttacgattccagtgacgttcaattctgtagagctaatagtattggtggagaaactgtaaccatcgatggacacgaacacgtccctgagaatgatgaggaagaacttctcaaagctgttgctcaccagcctgtctctgtagctattgatgctgggagctcagatttccagctttactctgagggtgtgtttatcggagaatgcgggactcagttgaaccacggggtggtgattgttgggtatggagagaccaaaaatggaacaaaatattggatagtaaggaactcatggggacctgaatggggagaaggaggctatgttcggatagaaagaggaatatcggagaatgaaggacgttgcggtatagccatggaggcttcttatcccaccaagctctcttcgactccttctactcatgagtcagtagttcgtgatgatgttaaagacgagctctagagactttaagtcattgaaaactgaatttcgaaccattcttctagtgagcttacactgagtttattattttatggattgaggttcatgggtttcagtttacacatttatcgtgtattcatcttaaattgagacgatttttatctccttgtaatattggccagcatttgctttgcggaaaaatggcgtt

SEQ ID NO: 103291 - protein, 371 aa, Arabidopsis thaliana
  peptide (1)..(371): Ceres Seq. ID no. 13612430
  misc_feature (133)..(350): Pfam Name: Papain family cysteine protease Pfam Description: Papain family cysteine protease
  misc_feature (8)..(371): Homolog of NCBI NO: 18408616 NR Description: cysteine proteinase, putative [Arabidopsis
  misc_feature (9)..(371): Homolog of NCBI NO: 7435811 NR Description: cysteine proteinase (EC 3.4.22.-) T29H11.140 -
  misc_feature (8)..(371): Homolog of NCBI NO: 7435817 NR Description: cysteine endopeptidase (EC 3.4.22.-) precursor - bean >gi|2944446|gb|AAC62396.1| cysteine endopeptidase precursor
  misc_feature (9)..(367): Homolog of NCBI NO: 118158 NR Description: Vignain precursor (Bean endopeptidase) (Cysteine
  misc_feature (9)..(367): Homolog of NCBI NO: 445927 NR Description: Cys endopeptidase
  misc_feature (8)..(371): Homolog of NCBI NO: 18423124 NR Description: cysteine proteinase [Arabidopsis thaliana] cysteine endopeptidase [Arabidopsis thaliana]
  misc_feature (9)..(371): Homolog of NCBI NO: 22331686 NR Description: cysteine proteinase, putative [Arabidopsis
QEEESKDMKLFFIVLISFLSLLQASKGFDFDEKELETEENVWKLYERWRGHHSVSRASHEAIKRFNVFRHNVLHVHRTNKKNKPYKLKINRFADITHHEFRSSYAGSNVKHHRMLRGPKRGSGGFMYENVTRVPSSVDWREKGAVTEVKNQQDCGSCWAFSTVAAVEGINKIRTNKLVSLSEQELVDCDTEENQGCAGGLMEPAFEFIKNNGGIKTEETYPYDSSDVQFCRANSIGGETVTIDGHEHVPENDEEELLKAVAHQPVSVAIDAGSSDFQLYSEGVFIGECGTQLNHGVVIVGYGETKNGTKYWIVRNSWGPEWGEGGYVRIERGISENEGRCGIAMEASYPTKLSSTPSTHESVVRDDVKDEL

SEQ ID NO: 103292 - protein, 364 aa, Arabidopsis thaliana; identical to SEQ ID NO: 42787
  peptide (1)..(364): Ceres Seq. ID no. 13612431
  misc_feature (126)..(343): Pfam Name: Papain family cysteine protease Pfam Description: Papain family cysteine protease
  misc_feature (1)..(364): Homolog of NCBI NO: 18408616 NR Description: cysteine proteinase, putative [Arabidopsis
  misc_feature (2)..(364): Homolog of NCBI NO: 7435811 NR Description: cysteine proteinase (EC 3.4.22.-) T29H11.140 -
  misc_feature (1)..(364): Homolog of NCBI NO: 7435817 NR Description: cysteine endopeptidase (EC 3.4.22.-) precursor - bean >gi|2944446|gb|AAC62396.1| cysteine endopeptidase precursor
  misc_feature (2)..(360): Homolog of NCBI NO: 118158 NR Description: Vignain precursor (Bean endopeptidase) (Cysteine
  misc_feature (2)..(360): Homolog of NCBI NO: 445927 NR Description: Cys endopeptidase
  misc_feature (1)..(364): Homolog of NCBI NO: 18423124 NR Description: cysteine proteinase [Arabidopsis thaliana] cysteine endopeptidase [Arabidopsis thaliana]
  misc_feature (2)..(364): Homolog of NCBI NO: 22331686 NR Description: cysteine proteinase, putative [Arabidopsis

SEQ ID NO: 103293 - protein, 258 aa, Arabidopsis thaliana; identical to SEQ ID NO: 42788
  peptide (1)..(258): Ceres Seq. ID no. 13612432
  misc_feature (20)..(237): Pfam Name: Papain family cysteine protease Pfam Description: Papain family cysteine protease
  misc_feature (1)..(258): Homolog of NCBI NO: 18408616 NR Description: cysteine proteinase, putative [Arabidopsis
  misc_feature (1)..(258): Homolog of NCBI NO: 7435811 NR Description: cysteine proteinase (EC 3.4.22.-) T29H11.140 -
  misc_feature (1)..(258): Homolog of NCBI NO: 7435817 NR Description: cysteine endopeptidase (EC 3.4.22.-) precursor - bean >gi|2944446|gb|AAC62396.1| cysteine endopeptidase precursor
  misc_feature (1)..(254): Homolog of NCBI NO: 118158 NR Description: Vignain precursor (Bean endopeptidase) (Cysteine
  misc_feature (1)..(254): Homolog of NCBI NO: 445927 NR Description: Cys endopeptidase
  misc_feature (1)..(258): Homolog of NCBI NO: 18423124 NR Description: cysteine proteinase [Arabidopsis thaliana] cysteine endopeptidase [Arabidopsis thaliana]
  misc_feature (1)..(258): Homolog of NCBI NO: 22331686 NR Description: cysteine proteinase, putative [Arabidopsis

SEQ ID NO: 103294 - DNA, 1089 bp, Arabidopsis thaliana
  misc_feature (1)..(1089): Ceres Seq. ID no. 13612439
  misc_feature: MA Experiment ID: 108434 Result: Up-regulated in Transcription
  misc_feature: MA Experiment 108434 PARAMETER Experiment Name: At_Root_Tips_cDNA_P Parameter: Tissue Value: Root Tips
  misc_feature: MA Experiment ID: 108473 Result: Up-regulated in Transcription
  misc_feature: MA Experiment 108473 PARAMETER Experiment Name: At_Drought_Flowers_cDNA_P Parameter: Timepoint (hr) Value: 7 d
  misc_feature: MA Experiment 108473 PARAMETER Experiment Name: At_Drought_Flowers_cDNA_P Parameter: Tissue Value: Flower
  misc_feature: MA Experiment 108473 PARAMETER Experiment Name: At_Drought_Flowers_cDNA_P Parameter: Treatment Value: Drought vs. No Drought
  misc_feature: MA Experiment ID: 108501 Result: Up-regulated in Transcription
  misc_feature: MA Experiment 108501 PARAMETER Experiment Name: At_ap2_floral_buds_cDNA_P Parameter: Plant Line Value: ap2 (Ler.)
  misc_feature: MA Experiment 108501 PARAMETER Experiment Name: At_ap2_floral_buds_cDNA_P Parameter: Tissue Value: Closed Flower
  misc_feature: MA Experiment ID: 108573 Result: Up-regulated in Transcription
  misc_feature: MA Experiment 108573 PARAMETER Experiment Name: At_Drought_cDNA_P Parameter: Timepoint (hr) Value: 6
  misc_feature: MA Experiment 108573 PARAMETER Experiment Name: At_Drought_cDNA_P Parameter: Tissue Value: Aerial
  misc_feature: MA Experiment 108573 PARAMETER Experiment Name: At_Drought_cDNA_P Parameter: Treatment Value: Drought vs. No Drought
  misc_feature: MA Experiment ID: 108607 Result: Up-regulated in Transcription
  misc_feature: MA Experiment 108607 PARAMETER Experiment Name: At_100uM_ABA_cDNA_P Parameter: Timepoint (hr) Value: 4
  misc_feature: MA Experiment 108607 PARAMETER Experiment Name: At_100uM_ABA_cDNA_P Parameter: Tissue Value: Aerial
  misc_feature: MA Experiment 108607 PARAMETER Experiment Name: At_100uM_ABA_cDNA_P Parameter: Treatment Value: 100uM ABA vs. No Treatment
  misc_feature: MA Experiment ID: 108608 Result: Up-regulated in Transcription
  misc_feature: MA Experiment 108608 PARAMETER Experiment Name: At_100uM_ABA_cDNA_P Parameter: Timepoint (hr) Value: 1
  misc_feature: MA Experiment 108608 PARAMETER Experiment Name: At_100uM_ABA_cDNA_P Parameter: Tissue Value: Aerial
  misc_feature: MA Experiment 108608 PARAMETER Experiment Name: At_100uM_ABA_cDNA_P Parameter: Treatment Value: 100uM ABA vs. No Treatment
  misc_feature: MA Experiment ID: 20000267 Result: Up-regulated in Transcription
  misc_feature: MA Experiment 20000267 PARAMETER Experiment Name: At_Drought_P Parameter: Age (day) Value: 7
  misc_feature: MA Experiment 20000267 PARAMETER Experiment Name: At_Drought_P Parameter: Organism Value: A. thaliana
  misc_feature: MA Experiment 20000267 PARAMETER Experiment Name: At_Drought_P Parameter: Plant Line Value: WS
  misc_feature: MA Experiment 20000267 PARAMETER Experiment Name: At_Drought_P Parameter: Timepoint (hr) Value: 6
  misc_feature: MA Experiment 20000267 PARAMETER Experiment Name: At_Drought_P Parameter: Tissue Value: Whole Plant
  misc_feature: MA Experiment 20000267 PARAMETER Experiment Name: At_Drought_P Parameter: Treatment Value: Drought vs. No Drought
  misc_feature: MA Experiment ID: 20000436 Result: Up-regulated in Transcription
  misc_feature: MA Experiment 20000436 PARAMETER Experiment Name: At_Drought_P Parameter: Age (day) Value: 7
  misc_feature: MA Experiment 20000436 PARAMETER Experiment Name: At_Drought_P Parameter: Organism Value: A. thaliana
  misc_feature: MA Experiment 20000436 PARAMETER Experiment Name: At_Drought_P Parameter: Plant Line Value: WS
  misc_feature: MA Experiment 20000436 PARAMETER Experiment Name: At_Drought_P Parameter: Timepoint (hr) Value: 12
  misc_feature: MA Experiment 20000436 PARAMETER Experiment Name: At_Drought_P Parameter: Tissue Value: Whole Plant
  misc_feature: MA Experiment 20000436 PARAMETER Experiment Name: At_Drought_P Parameter: Treatment Value: Drought vs. No Drought
  misc_feature: MA Experiment ID: 20000437 Result: Up-regulated in Transcription
  misc_feature: MA Experiment 20000437 PARAMETER Experiment Name: At_Drought_P Parameter: Age (day) Value: 8
  misc_feature: MA Experiment 20000437 PARAMETER Experiment Name: At_Drought_P Parameter: Organism Value: A. thaliana
  misc_feature: MA Experiment 20000437 PARAMETER Experiment Name: At_Drought_P Parameter: Plant Line Value: WS
  misc_feature: MA Experiment 20000437 PARAMETER Experiment Name: At_Drought_P Parameter: Timepoint (hr) Value: 24
  misc_feature: MA Experiment 20000437 PARAMETER Experiment Name: At_Drought_P Parameter: Tissue Value: Whole Plant
  misc_feature: MA Experiment 20000437 PARAMETER Experiment Name: At_Drought_P Parameter: Treatment Value: Drought vs. No Drought
  misc_feature: MA Experiment ID: 20000451 Result: Up-regulated in Transcription
  misc_feature: MA Experiment 20000451 PARAMETER Experiment Name: At_CS6879_Shoots-Roots_P Parameter: Age (day) Value: 14
  misc_feature: MA Experiment 20000451 PARAMETER Experiment Name: At_CS6879_Shoots-Roots_P Parameter: Organism Value: A. thaliana
  misc_feature: MA Experiment 20000451 PARAMETER Experiment Name: At_CS6879_Shoots-Roots_P Parameter: Plant Line Value: CS6879 vs. WS
  misc_feature: MA Experiment 20000451 PARAMETER Experiment Name: At_CS6879_Shoots-Roots_P Parameter: Tissue Value: Roots
  misc_feature: MA Experiment ID: 20001556 Result: Up-regulated in Transcription
  misc_feature: MA Experiment 20001556 PARAMETER Experiment Name: At_Drought_Soil_Dry_P Parameter: Age (day) Value: 26
  misc_feature: MA Experiment 20001556 PARAMETER Experiment Name: At_Drought_Soil_Dry_P Parameter: Organism Value: A. thaliana
  misc_feature: MA Experiment 20001556 PARAMETER Experiment Name: At_Drought_Soil_Dry_P Parameter: Plant Line Value: WS
  misc_feature: MA Experiment 20001556 PARAMETER Experiment Name: At_Drought_Soil_Dry_P Parameter: Post Timepoint (hr) Value: None
  misc_feature: MA Experiment 20001556 PARAMETER Experiment Name: At_Drought_Soil_Dry_P Parameter: Post-Treatment Value: None
  misc_feature: MA Experiment 20001556 PARAMETER Experiment Name: At_Drought_Soil_Dry_P Parameter: Timepoint (day) Value: 12
  misc_feature: MA Experiment 20001556 PARAMETER Experiment Name: At_Drought_Soil_Dry_P Parameter: Treatment Value: Drought vs. No Drought
  misc_feature: MA Experiment ID: 20001910 Result: Up-regulated in Transcription
  misc_feature: MA Experiment 20001910 PARAMETER Experiment Name: At_Drought_Reproduction_P Parameter: Age (day) Value: 37
  misc_feature: MA Experiment 20001910 PARAMETER Experiment Name: At_Drought_Reproduction_P Parameter: Organism Value: A. thaliana
  misc_feature: MA Experiment 20001910 PARAMETER Experiment Name: At_Drought_Reproduction_P Parameter: Plant Line Value: WS
  misc_feature: MA Experiment 20001910 PARAMETER Experiment Name: At_Drought_Reproduction_P Parameter: Timepoint (day) Value: 7
  misc_feature: MA Experiment 20001910 PARAMETER Experiment Name: At_Drought_Reproduction_P Parameter: Tissue Value: Flowers
  misc_feature: MA Experiment 20001910 PARAMETER Experiment Name: At_Drought_Reproduction_P Parameter: Treatment Value: Drought vs. No Drought
aagtaaagcttttacctaattctcaaacattctttacacaaaaatatcaagagtgatatagatagcgagaaaaaatggacggtaggggagggtgttgcatagctaggtacgccattggctctggaccgtacgatctttccaaagcagatcgcatcatgcttcgatttcgtcccattgctcctaaaccggccagccccggcggagtaaatcccgtatccagcggagatagcggcggcggaagctccgacgtttcctttagatcagctagtagaagaaagaggaaatgtcatcagctgaaggagaatggtggtaacgccaagaggtgcacccggcggaagacgtcggataaacccgtcgttcacggcagtgctaatgcggtgactctttctctattaccggagaaacctatagatcttaaggcggcggtggagaagcagaagcggcagggtccgttatggttgagtttcaaagacggcggagggatgctcacaccggcttatcagacaccggagattgtgcagaggacggtggtgatttcgtcgtgtatgacggtggagcgtgtaacggacgcttggattgacggttacggtttagggaggtcagatgaagaaaggaagatgaatcttgtgagagacacgtgtcctggtttcatatccgacggttcagggagagtcacgtggactaatgacgcgtatcggaagatggctagggatattattcccgtggaagaaggtgcaccggagataactagcggcgatagttttcacgtgatcgtacggttggtgatgagggagaggccgatgctaacgtcccctggattcacatgcagaatgaaactccagtacacgtgtcaaaatcgtgagagaggctcagtcacggtgccttgcgacgtgtggagaatggacgtcggtggtggttttgcttggaggctcgacgttaaggccgctttgtgcctttgacaccgttagatcaactttagtcactatgggcacgaacattacacatgatatgtcctccaatgataaaatatggattcagaactaattagatttctaatggtttaacatatatttatgtcgtttttgttct

SEQ ID NO: 103295 - protein, 294 aa, Arabidopsis thaliana
  peptide (1)..(294): Ceres Seq. ID no. 13612440
  misc_feature (1)..(294): Homolog of NCBI NO: 18408645 NR Description: expressed protein [Arabidopsis thaliana]
  misc_feature (1)..(294): Homolog of NCBI NO: 21537225 NR Description: unknown [Arabidopsis thaliana]
  misc_feature (1)..(294): Homolog of NCBI NO: 15242729 NR Description: expressed protein [Arabidopsis thaliana] emb|CAB62340.1~gene_id:K9H21.5~similar to unknown protein thaliana] >gi|27754383|gb|AAO22640.1| unknown protein
  misc_feature (1)..(294): Homolog of NCBI NO: 15240662 NR Description: expressed protein [Arabidopsis thaliana] emb|CAB62340.1~gene_id:MXI22.7~similar to unknown protein thaliana] >gi|13878117|gb|AAK44136.1|AF370321_1 unknown protein
  misc_feature (11)..(294): Homolog of NCBI NO: 15232126 NR Description: expressed protein [Arabidopsis thaliana] emb|CAB62340.1~gene_id:K17E12.7~similar to unknown protein
  misc_feature (20)..(294): Homolog of NCBI NO: 15237495 NR Description: hypothetical protein [Arabidopsis thaliana] emb|CAB62340.1~gene_id:MHK7.3~similar to unknown protein
  misc_feature (1)..(294): Homolog of NCBI NO: 15237494 NR Description: hypothetical protein [Arabidopsis thaliana] emb|CAB62340.1~gene_id:MHK7.2~similar to unknown protein
  misc_feature (137)..(294): Homolog of NCBI NO: 34901112 NR Description: hypothetical protein~predicted by FGENESH etc.
  misc_feature (18)..(75): Homolog of NCBI NO: 34901112 NR Description: hypothetical protein~predicted by FGENESH etc.
MDGRGGCCIARYAIGSGPYDLSKADRIMLRFRPIAPKPASPGGVNPVSSGDSGGGSSDVSFRSASRRKRKCHQLKENGGNAKRCTRRKTSDKPVVHGSANAVTLSLLPEKPIDLKAAVEKQKRQGPLWLSFKDGGGMLTPAYQTPEIVQRTVVISSCMTVERVTDAWIDGYGLGRSDEERKMNLVRDTCPGFISDGSGRVTWTNDAYRKMARDIIPVEEGAPEITSGDSFHVIVRLVMRERPMLTSPGFTCRMKLQYTCQNRERGSVTVPCDVWRMDVGGGFAWRLDVKAALCL

SEQ ID NO: 103296 - protein, 267 aa, Arabidopsis thaliana
  peptide (1)..(267): Ceres Seq. ID no. 13612441
  misc_feature (1)..(267): Homolog of NCBI NO: 18408645 NR Description: expressed protein [Arabidopsis thaliana]
  misc_feature (1)..(267): Homolog of NCBI NO: 21537225 NR Description: unknown [Arabidopsis thaliana]
  misc_feature (1)..(267): Homolog of NCBI NO: 15242729 NR Description: expressed protein [Arabidopsis thaliana] emb|CAB62340.1~gene_id:K9H21.5~similar to unknown protein thaliana] >gi|27754383|gb|AAO22640.1| unknown protein
  misc_feature (1)..(267): Homolog of NCBI NO: 15240662 NR Description: expressed protein [Arabidopsis thaliana] emb|CAB62340.1~gene_id:MXI22.7~similar to unknown protein thaliana] >gi|13878117|gb|AAK44136.1|AF370321_1 unknown protein
  misc_feature (1)..(267): Homolog of NCBI NO: 15232126 NR Description: expressed protein [Arabidopsis thaliana] emb|CAB62340.1~gene_id:K17E12.7~similar to unknown protein
  misc_feature (1)..(267): Homolog of NCBI NO: 15237495 NR Description: hypothetical protein [Arabidopsis thaliana] emb|CAB62340.1~gene_id:MHK7.3~similar to unknown protein
  misc_feature (1)..(267): Homolog of NCBI NO: 15237494 NR Description: hypothetical protein [Arabidopsis thaliana] emb|CAB62340.1~gene_id:MHK7.2~similar to unknown protein
  misc_feature (110)..(267): Homolog of NCBI NO: 34901112 NR Description: hypothetical protein~predicted by FGENESH etc.
  misc_feature (1)..(48): Homolog of NCBI NO: 34901112 NR Description: hypothetical protein~predicted by FGENESH etc.
MLRFRPIAPKPASPGGVNPVSSGDSGGGSSDVSFRSASRRKRKCHQLKENGGNAKRCTRRKTSDKPVVHGSANAVTLSLLPEKPIDLKAAVEKQKRQGPLWLSFKDGGGMLTPAYQTPEIVQRTVVISSCMTVERVTDAWIDGYGLGRSDEERKMNLVRDTCPGFISDGSGRVTWTNDAYRKMARDIIPVEEGAPEITSGDSFHVIVRLVMRERPMLTSPGFTCRMKLQYTCQNRERGSVTVPCDVWRMDVGGGFAWRLDVKAALCL

SEQ ID NO: 103297 - protein, 158 aa, Arabidopsis thaliana; identical to SEQ ID NO: 41862
  peptide (1)..(158): Ceres Seq. ID no. 13612442
  misc_feature (1)..(158): Homolog of NCBI NO: 18408645 NR Description: expressed protein [Arabidopsis thaliana]
  misc_feature (1)..(158): Homolog of NCBI NO: 21537225 NR Description: unknown [Arabidopsis thaliana]
  misc_feature (1)..(158): Homolog of NCBI NO: 15242729 NR Description: expressed protein [Arabidopsis thaliana] emb|CAB62340.1~gene_id:K9H21.5~similar to unknown protein thaliana] >gi|27754383|gb|AAO22640.1| unknown protein
  misc_feature (1)..(158): Homolog of NCBI NO: 15240662 NR Description: expressed protein [Arabidopsis thaliana] emb|CAB62340.1~gene_id:MXI22.7~similar to unknown protein thaliana] >gi|13878117|gb|AAK44136.1|AF370321_1 unknown protein
  misc_feature (1)..(158): Homolog of NCBI NO: 15232126 NR Description: expressed protein [Arabidopsis thaliana] emb|CAB62340.1~gene_id:K17E12.7~similar to unknown protein
  misc_feature (1)..(158): Homolog of NCBI NO: 15237495 NR Description: hypothetical protein [Arabidopsis thaliana] emb|CAB62340.1~gene_id:MHK7.3~similar to unknown protein
  misc_feature (1)..(158): Homolog of NCBI NO: 15237494 NR Description: hypothetical protein [Arabidopsis thaliana] emb|CAB62340.1~gene_id:MHK7.2~similar to unknown protein
  misc_feature (1)..(158): Homolog of NCBI NO: 34901112 NR Description: hypothetical protein~predicted by FGENESH etc.

SEQ ID NO: 103298 - DNA, 1573 bp, Arabidopsis thaliana
  misc_feature (1)..(1573): Ceres Seq. ID no. 13612443
  misc_feature: MA Experiment ID: 108463 Result: Up-regulated in Transcription
  misc_feature: MA Experiment 108463 PARAMETER Experiment Name: At_Germinating_Seeds_cDNA_P Parameter: Age (day) Value: 3 vs. 0
  misc_feature: MA Experiment 108463 PARAMETER Experiment Name: At_Germinating_Seeds_cDNA_P Parameter: Tissue Value: Germinating Seeds
  misc_feature: MA Experiment ID: 108464 Result: Up-regulated in Transcription
  misc_feature: MA Experiment 108464 PARAMETER Experiment Name: At_Germinating_Seeds_cDNA_P Parameter: Age (day) Value: 4 vs. 0
  misc_feature: MA Experiment 108464 PARAMETER Experiment Name: At_Germinating_Seeds_cDNA_P Parameter: Tissue Value: Germinating Seeds
  misc_feature: MA Experiment ID: 108572 Result: Up-regulated in Transcription
  misc_feature: MA Experiment 108572 PARAMETER Experiment Name: At_Drought_cDNA_P Parameter: Timepoint (hr) Value: 1
  misc_feature: MA Experiment 108572 PARAMETER Experiment Name: At_Drought_cDNA_P Parameter: Tissue Value: Aerial
  misc_feature: MA Experiment 108572 PARAMETER Experiment Name: At_Drought_cDNA_P Parameter: Treatment Value: Drought vs. No Drought
  misc_feature: MA Experiment ID: 108573 Result: Up-regulated in Transcription
  misc_feature: MA Experiment 108573 PARAMETER Experiment Name: At_Drought_cDNA_P Parameter: Timepoint (hr) Value: 6
  misc_feature: MA Experiment 108573 PARAMETER Experiment Name: At_Drought_cDNA_P Parameter: Tissue Value: Aerial
  misc_feature: MA Experiment 108573 PARAMETER Experiment Name: At_Drought_cDNA_P Parameter: Treatment Value: Drought vs. No Drought
  misc_feature: MA Experiment ID: 108576 Result: Up-regulated in Transcription
  misc_feature: MA Experiment 108576 PARAMETER Experiment Name: At_42deg_Heat_cDNA_P Parameter: Temperature (deg C) Value: 42 vs. 22
  misc_feature: MA Experiment 108576 PARAMETER Experiment Name: At_42deg_Heat_cDNA_P Parameter: Timepoint (hr) Value: 1
  misc_feature: MA Experiment 108576 PARAMETER Experiment Name: At_42deg_Heat_cDNA_P Parameter: Tissue Value: Aerial
  misc_feature: MA Experiment ID: 108579 Result: Down-regulated in Transcription
  misc_feature: MA Experiment 108579 PARAMETER Experiment Name: At_4deg_Cold_cDNA_P Parameter: Temperature (deg C) Value: 4 vs. 22
  misc_feature: MA Experiment 108579 PARAMETER Experiment Name: At_4deg_Cold_cDNA_P Parameter: Timepoint (hr) Value: 6
  misc_feature: MA Experiment 108579 PARAMETER Experiment Name: At_4deg_Cold_cDNA_P Parameter: Tissue Value: Aerial
  misc_feature: MA Experiment ID: 108595 Result: Down-regulated in Transcription
  misc_feature: MA Experiment 108595 PARAMETER Experiment Name: At_Ler-pi_Ovule_cDNA_P Parameter: Plant Line Value: null
  misc_feature: MA Experiment ID: 20000069 Result: Up-regulated in Transcription
  misc_feature: MA Experiment 20000069 PARAMETER Experiment Name: At_100uM_ABA_Mutants_cDNA_P Parameter: Plant Line Value: CS23
  misc_feature: MA Experiment 20000069 PARAMETER Experiment Name: At_100uM_ABA_Mutants_cDNA_P Parameter: Timepoint (hr) Value: 6
  misc_feature: MA Experiment 20000069 PARAMETER Experiment Name: At_100uM_ABA_Mutants_cDNA_P Parameter: Tissue Value: Aerial
  misc_feature: MA Experiment 20000069 PARAMETER Experiment Name: At_100uM_ABA_Mutants_cDNA_P Parameter: Treatment Value: 100uM ABA vs. No Treatment
  misc_feature: MA Experiment ID: 20000070 Result: Up-regulated in Transcription
  misc_feature: MA Experiment 20000070 PARAMETER Experiment Name: At_100uM_ABA_Mutants_cDNA_P Parameter: Plant Line Value: CS24
  misc_feature: MA Experiment 20000070 PARAMETER Experiment Name: At_100uM_ABA_Mutants_cDNA_P Parameter: Timepoint (hr) Value: 6
  misc_feature: MA Experiment 20000070 PARAMETER Experiment Name: At_100uM_ABA_Mutants_cDNA_P Parameter: Tissue Value: Aerial
  misc_feature: MA Experiment 20000070 PARAMETER Experiment Name: At_100uM_ABA_Mutants_cDNA_P Parameter: Treatment Value: 100uM ABA vs. No Treatment
  misc_feature: MA Experiment ID: 20000071 Result: Up-regulated in Transcription
  misc_feature: MA Experiment 20000071 PARAMETER Experiment Name: At_100uM_ABA_Mutants_cDNA_P Parameter: Plant Line Value: CS8104
  misc_feature: MA Experiment 20000071 PARAMETER Experiment Name: At_100uM_ABA_Mutants_cDNA_P Parameter: Timepoint (hr) Value: 6
  misc_feature: MA Experiment 20000071 PARAMETER Experiment Name: At_100uM_ABA_Mutants_cDNA_P Parameter: Tissue Value: Aerial
  misc_feature: MA Experiment 20000071 PARAMETER Experiment Name: At_100uM_ABA_Mutants_cDNA_P Parameter: Treatment Value: 100uM ABA vs. No Treatment
  misc_feature: MA Experiment ID: 20000086 Result: Up-regulated in Transcription
  misc_feature: MA Experiment 20000086 PARAMETER Experiment Name: At_100uM_ABA_Mutants_cDNA_P Parameter: Plant Line Value: CS22
  misc_feature: MA Experiment 20000086 PARAMETER Experiment Name: At_100uM_ABA_Mutants_cDNA_P Parameter: Timepoint (hr) Value: 6
  misc_feature: MA Experiment 20000086 PARAMETER Experiment Name: At_100uM_ABA_Mutants_cDNA_P Parameter: Tissue Value: Aerial
  misc_feature: MA Experiment 20000086 PARAMETER Experiment Name: At_100uM_ABA_Mutants_cDNA_P Parameter: Treatment Value: 100uM ABA vs. No Treatment
  misc_feature: MA Experiment ID: 20000117 Result: Up-regulated in Transcription
  misc_feature: MA Experiment 20000117 PARAMETER Experiment Name: At_100uM_ABA_Mutants_cDNA_P Parameter: Plant Line Value: Columbia
  misc_feature: MA Experiment 20000117 PARAMETER Experiment Name: At_100uM_ABA_Mutants_cDNA_P Parameter: Timepoint (hr) Value: 6
  misc_feature: MA Experiment 20000117 PARAMETER Experiment Name: At_100uM_ABA_Mutants_cDNA_P Parameter: Tissue Value: Aerial
  misc_feature: MA Experiment 20000117 PARAMETER Experiment Name: At_100uM_ABA_Mutants_cDNA_P Parameter: Treatment Value: 100uM ABA vs. No Treatment
  misc_feature: MA Experiment ID: 20000224 Result: Down-regulated in Transcription
  misc_feature: MA Experiment ID: 20000234 Result: Down-regulated in Transcription
  misc_feature: MA Experiment 20000234 PARAMETER Experiment Name: At_Siliques_P Parameter: Age (day) Value: 21
  misc_feature: MA Experiment 20000234 PARAMETER Experiment Name: At_Siliques_P Parameter: Organism Value: A. thaliana
  misc_feature: MA Experiment 20000234 PARAMETER Experiment Name: At_Siliques_P Parameter: Plant Line Value: WS
  misc_feature: MA Experiment 20000234 PARAMETER Experiment Name: At_Siliques_P Parameter: Tissue Value: Less Than 5mm Siliques vs. Whole Plant
  misc_feature: MA Experiment ID: 20000286 Result: Down-regulated in Transcription
  misc_feature: MA Experiment 20000286 PARAMETER Experiment Name: At_Open_Flower_P Parameter: Age (day) Value: 21
  misc_feature: MA Experiment 20000286 PARAMETER Experiment Name: At_Open_Flower_P Parameter: Plant Line Value: WS
  misc_feature: MA Experiment 20000286 PARAMETER Experiment Name: At_Open_Flower_P Parameter: Tissue Value: Half Open vs. Whole Plant
  misc_feature: MA Experiment ID: 20001248 Result: Up-regulated in Transcription
  misc_feature: MA Experiment 20001248 PARAMETER Experiment Name: At_Far-red-induction_P Parameter: Age (day) Value: 7
  misc_feature: MA Experiment 20001248 PARAMETER Experiment Name: At_Far-red-induction_P Parameter: Light Value: Far-red vs. White
  misc_feature: MA Experiment 20001248 PARAMETER Experiment Name: At_Far-red-induction_P Parameter: Organism Value: A. thaliana
  misc_feature: MA Experiment 20001248 PARAMETER Experiment Name: At_Far-red-induction_P Parameter: Plant Line Value: Columbia
  misc_feature: MA Experiment 20001248 PARAMETER Experiment Name: At_Far-red-induction_P Parameter: Timepoint (hr) Value: 4
  misc_feature: MA Experiment 20001248 PARAMETER Experiment Name: At_Far-red-induction_P Parameter: Tissue Value: Whole Plant
  misc_feature: MA Experiment ID: 20001450 Result: Up-regulated in Transcription
  misc_feature: MA Experiment 20001450 PARAMETER Experiment Name: At_Far-red-induction_P Parameter: Age (day) Value: 7
  misc_feature: MA Experiment 20001450 PARAMETER Experiment Name: At_Far-red-induction_P Parameter: Light Value: Far-red vs. White
  misc_feature: MA Experiment 20001450 PARAMETER Experiment Name: At_Far-red-induction_P Parameter: Organism Value: A. thaliana
  misc_feature: MA Experiment 20001450 PARAMETER Experiment Name: At_Far-red-induction_P Parameter: Plant Line Value: Columbia
  misc_feature: MA Experiment 20001450 PARAMETER Experiment Name: At_Far-red-induction_P Parameter: Timepoint (hr) Value: 8
  misc_feature: MA Experiment 20001450 PARAMETER Experiment Name: At_Far-red-induction_P Parameter: Tissue Value: Whole Plant
  misc_feature: MA Experiment ID: 20001451 Result: Up-regulated in Transcription
  misc_feature: MA Experiment 20001451 PARAMETER Experiment Name: At_Far-red-induction_P Parameter: Age (day) Value: 7
  misc_feature: MA Experiment 20001451 PARAMETER Experiment Name: At_Far-red-induction_P Parameter: Light Value: Far-red vs. White
  misc_feature: MA Experiment 20001451 PARAMETER Experiment Name: At_Far-red-induction_P Parameter: Organism Value: A. thaliana
  misc_feature: MA Experiment 20001451 PARAMETER Experiment Name: At_Far-red-induction_P Parameter: Plant Line Value: Columbia
  misc_feature: MA Experiment 20001451 PARAMETER Experiment Name: At_Far-red-induction_P Parameter: Timepoint (hr) Value: 24
  misc_feature: MA Experiment 20001451 PARAMETER Experiment Name: At_Far-red-induction_P Parameter: Tissue Value: Whole Plant
  misc_feature: MA Experiment ID: 20001556 Result: Down-regulated in Transcription
  misc_feature: MA Experiment 20001556 PARAMETER Experiment Name: At_Drought_Soil_Dry_P Parameter: Age (day) Value: 26
  misc_feature: MA Experiment 20001556 PARAMETER Experiment Name: At_Drought_Soil_Dry_P Parameter: Organism Value: A. thaliana
  misc_feature: MA Experiment 20001556 PARAMETER Experiment Name: At_Drought_Soil_Dry_P Parameter: Plant Line Value: WS
  misc_feature: MA Experiment 20001556 PARAMETER Experiment Name: At_Drought_Soil_Dry_P Parameter: Post Timepoint (hr) Value: None
  misc_feature: MA Experiment 20001556 PARAMETER Experiment Name: At_Drought_Soil_Dry_P Parameter: Post-Treatment Value: None
  misc_feature: MA Experiment 20001556 PARAMETER Experiment Name: At_Drought_Soil_Dry_P Parameter: Timepoint (day) Value: 12
  misc_feature: MA Experiment 20001556 PARAMETER Experiment Name: At_Drought_Soil_Dry_P Parameter: Treatment Value: Drought vs. No Drought
  misc_feature: MA Experiment ID: 20001560 Result: Down-regulated in Transcription
  misc_feature: MA Experiment 20001560 PARAMETER Experiment Name: At_Drought_Soil_Dry_P Parameter: Age (day) Value: 28
  misc_feature: MA Experiment 20001560 PARAMETER Experiment Name: At_Drought_Soil_Dry_P Parameter: Organism Value: A. thaliana
  misc_feature: MA Experiment 20001560 PARAMETER Experiment Name: At_Drought_Soil_Dry_P Parameter: Plant Line Value: WS
  misc_feature: MA Experiment 20001560 PARAMETER Experiment Name: At_Drought_Soil_Dry_P Parameter: Post Timepoint (hr) Value: None
  misc_feature: MA Experiment 20001560 PARAMETER Experiment Name: At_Drought_Soil_Dry_P Parameter: Post-Treatment Value: None
  misc_feature: MA Experiment 20001560 PARAMETER Experiment Name: At_Drought_Soil_Dry_P Parameter: Timepoint (day) Value: 14
  misc_feature: MA Experiment 20001560 PARAMETER Experiment Name: At_Drought_Soil_Dry_P Parameter: Treatment Value: Drought vs. No Drought
acaaagatcatcacagccaattttagaaaacttctgacggaaaataaaaagagaggatttatttttatctttctgtgttaccggagaataaagacggtaccttttcactgttgacttaacggagaagatggcgactgttccggagataaagataatgagaagcgagagcttaggtcatcggagtgacgtgtcgagcccggaagctaagctagggatgcgtgtggaagatctctgggatgagcagaaaccacagctcagtcctaacgagaagctcaacgcttgctttgagagcatccctgtctctgctttccctctctcttctgattcacaagatattgagataagatcagacacaagtttggctgaagctgttcagacactatcgaaattcaaggtcttgagcgcgcctgttgtagatgttgatgcgcctgaagatgccagttggattgatcgctacatcggtattgtggaatttccaggcattgttgtctggcttttgcatcagttggagccaccatctccaaggagccctgctgttgcagcttcaaatggattttctcatgatttcaccaccgatgttctggataacggagattcagcagtaacttctggaaacttctttgaggtccttacttcttcagagctatacaagaacaccaaggttcgagatatctctggaacattccgctgggcaccgttcctggctctgcagaaagagaactcctttttgaccatgctgttacttctttctaaatacaaaatgaagagcatcccggtggttgatttaggtgtagcaaagatcgagaacattatcacacaatcaggagttatacatatgctggcagaatgcgcggggcttctctggtttgaggattggggaatcaaaactctctctgaagtcggtcttcccattatgtcaaaggaccatatcataaagatctatgaggatgaaccagttcttcaggcattcaagctgatgaggagaaagagaatcggaggcatacctgtcattgaaaggaatagcgagaagccagtaggcaacataagccttagagatgttcaatttctcctcactgcacctgagatctaccatgactacaggtcaatcacaacgaagaacttcttagtatctgttagagagcatcttgagaagtgcggggatacatcagctcctatcatgagtggtgtgattgcttgcacgaagaaccatacactaaaggaactgatcttgatgttagacgcggagaagatccataggatatatgttgtggatgattttggtaaccttgaaggactcatcactcttagagacatcattgcaagacttgtccatgagccatccggctattttggagatttctttgatggtgttatgcctcttcccgaaaactaccgagtctgagagaaaaatggtatctttcttctgtaaattgtcttttgtttggtgataatgcttctgtctgtttgtgcttaagttctcgaaattgtgttattaacgtttaacagaaataagaaaagaagaaagagcctgtctttgagtgaatatgtctgaaatacaataactcttaagatt

SEQ ID NO: 103299 - protein, 424 aa, Arabidopsis thaliana
  peptide (1)..(424): Ceres Seq. ID no. 13612444
  misc_feature (63)..(124): Pfam Name: CBS domain Pfam Description: CBS domain
  misc_feature (1)..(424): Homolog of NCBI NO: 15228397 NR Description: CBS domain containing protein [Arabidopsis
  misc_feature (1)..(424): Homolog of NCBI NO: 21592917 NR Description: unknown [Arabidopsis thaliana]
  misc_feature (23)..(424): Homolog of NCBI NO: 32364482 NR Description: AKIN gamma [Medicago truncatula]
  misc_feature (148)..(424): Homolog of NCBI NO: 38346640 NR Description: OSJNBa0072D21.10 [Oryza sativa (japonica
  misc_feature (23)..(128): Homolog of NCBI NO: 38346640 NR Description: OSJNBa0072D21.10 [Oryza sativa (japonica
  misc_feature (23)..(424): Homolog of NCBI NO: 19386799 NR Description: OJ1485_B09.7 [Oryza sativa (japonica
  misc_feature (137)..(408): Homolog of NCBI NO: 25404839 NR Description: hypothetical protein T17F3.17 [imported] -
  misc_feature (18)..(128): Homolog of NCBI NO: 25404839 NR Description: hypothetical protein T17F3.17 [imported] -
  misc_feature (163)..(416): Homolog of NCBI NO: 34912162 NR Description: P0712E02.24 [Oryza sativa (japonica
  misc_feature (33)..(128): Homolog of NCBI NO: 34912162 NR Description: P0712E02.24 [Oryza sativa (japonica
MATVPEIKIMRSESLGHRSDVSSPEAKLGMRVEDLWDEQKPQLSPNEKLNACFESIPVSAFPLSSDSQDIEIRSDTSLAEAVQTLSKFKVLSAPVVDVDAPEDASWIDRYIGIVEFPGIVVWLLHQLEPPSPRSPAVAASNGFSHDFTTDVLDNGDSAVTSGNFFEVLTSSELYKNTKVRDISGTFRWAPFLALQKENSFLTMLLLLSKYKMKSIPVVDLGVAKIENIITQSGVIHMLAECAGLLWFEDWGIKTLSEVGLPIMSKDHIIKIYEDEPVLQAFKLMRRKRIGGIPVIERNSEKPVGNISLRDVQFLLTAPEIYHDYRSITTKNFLVSVREHLEKCGDTSAPIMSGVIACTKNHTLKELILMLDAEKIHRIYVVDDFGNLEGLITLRDIIARLVHEPSGYFGDFFDGVMPLPENYRV

SEQ ID NO: 103300 - protein, 415 aa, Arabidopsis thaliana
  peptide (1)..(415): Ceres Seq. ID no. 13612445
  misc_feature (54)..(115): Pfam Name: CBS domain Pfam Description: CBS domain
  misc_feature (1)..(415): Homolog of NCBI NO: 15228397 NR Description: CBS domain containing protein [Arabidopsis
  misc_feature (1)..(415): Homolog of NCBI NO: 21592917 NR Description: unknown [Arabidopsis thaliana]
  misc_feature (14)..(415): Homolog of NCBI NO: 32364482 NR Description: AKIN gamma [Medicago truncatula]
  misc_feature (139)..(415): Homolog of NCBI NO: 38346640 NR Description: OSJNBa0072D21.10 [Oryza sativa (japonica
  misc_feature (14)..(119): Homolog of NCBI NO: 38346640 NR Description: OSJNBa0072D21.10 [Oryza sativa (japonica
  misc_feature (14)..(415): Homolog of NCBI NO: 19386799 NR Description: OJ1485_B09.7 [Oryza sativa (japonica
  misc_feature (128)..(399): Homolog of NCBI NO: 25404839 NR Description: hypothetical protein T17F3.17 [imported] -
  misc_feature (9)..(119): Homolog of NCBI NO: 25404839 NR Description: hypothetical protein T17F3.17 [imported] -
  misc_feature (154)..(407): Homolog of NCBI NO: 34912162 NR Description: P0712E02.24 [Oryza sativa (japonica
  misc_feature (24)..(119): Homolog of NCBI NO: 34912162 NR Description: P0712E02.24 [Oryza sativa (japonica
MRSESLGHRSDVSSPEAKLGMRVEDLWDEQKPQLSPNEKLNACFESIPVSAFPLSSDSQDIEIRSDTSLAEAVQTLSKFKVLSAPVVDVDAPEDASWIDRYIGIVEFPGIVVWLLHQLEPPSPRSPAVAASNGFSHDFTTDVLDNGDSAVTSGNFFEVLTSSELYKNTKVRDISGTFRWAPFLALQKENSFLTMLLLLSKYKMKSIPVVDLGVAKIENIITQSGVIHMLAECAGLLWFEDWGIKTLSEVGLPIMSKDHIIKIYEDEPVLQAFKLMRRKRIGGIPVIERNSEKPVGNISLRDVQFLLTAPEIYHDYRSITTKNFLVSVREHLEKCGDTSAPIMSGVIACTKNHTLKELILMLDAEKIHRIYVVDDFGNLEGLITLRDIIARLVHEPSGYFGDFFDGVMPLPENYRV

SEQ ID NO: 103301 - protein, 395 aa, Arabidopsis thaliana
  peptide (1)..(395): Ceres Seq. ID no. 13612446
  misc_feature (34)..(95): Pfam Name: CBS domain Pfam Description: CBS domain
  misc_feature (1)..(395): Homolog of NCBI NO: 15228397 NR Description: CBS domain containing protein [Arabidopsis
  misc_feature (1)..(395): Homolog of NCBI NO: 21592917 NR Description: unknown [Arabidopsis thaliana]
  misc_feature (1)..(395): Homolog of NCBI NO: 32364482 NR Description: AKIN gamma [Medicago truncatula]
  misc_feature (119)..(395): Homolog of NCBI NO: 38346640 NR Description: OSJNBa0072D21.10 [Oryza sativa (japonica
  misc_feature (1)..(99): Homolog of NCBI NO: 38346640 NR Description: OSJNBa0072D21.10 [Oryza sativa (japonica
  misc_feature (1)..(395): Homolog of NCBI NO: 19386799 NR Description: OJ1485_B09.7 [Oryza sativa (japonica
  misc_feature (108)..(379): Homolog of NCBI NO: 25404839 NR Description: hypothetical protein T17F3.17 [imported] -
  misc_feature (1)..(99): Homolog of NCBI NO: 25404839 NR Description: hypothetical protein T17F3.17 [imported] -
  misc_feature (134)..(387): Homolog of NCBI NO: 34912162 NR Description: P0712E02.24 [Oryza sativa (japonica
  misc_feature (4)..(99): Homolog of NCBI NO: 34912162 NR Description: P0712E02.24 [Oryza sativa (japonica
MRVEDLWDEQKPQLSPNEKLNACFESIPVSAFPLSSDSQDIEIRSDTSLAEAVQTLSKFKVLSAPVVDVDAPEDASWIDRYIGIVEFPGIVVWLLHQLEPPSPRSPAVAASNGFSHDFTTDVLDNGDSAVTSGNFFEVLTSSELYKNTKVRDISGTFRWAPFLALQKENSFLTMLLLLSKYKMKSIPVVDLGVAKIENIITQSGVIHMLAECAGLLWFEDWGIKTLSEVGLPIMSKDHIIKIYEDEPVLQAFKLMRRKRIGGIPVIERNSEKPVGNISLRDVQFLLTAPEIYHDYRSITTKNFLVSVREHLEKCGDTSAPIMSGVIACTKNHTLKELILMLDAEKIHRIYVVDDFGNLEGLITLRDIIARLVHEPSGYFGDFFDGVMPLPENYRV

SEQ ID NO: 103302 - DNA, 1140 bp, Arabidopsis thaliana
  misc_feature (1)..(1140): Ceres Seq. ID no. 13612453
  misc_feature: MA Experiment ID: 20000088 Result: Down-regulated in Transcription
  misc_feature: MA Experiment 20000088 PARAMETER Experiment Name: At_100uM_ABA_Mutants_cDNA_P Parameter: Plant Line Value: Landsberg
  misc_feature: MA Experiment 20000088 PARAMETER Experiment Name: At_100uM_ABA_Mutants_cDNA_P Parameter: Timepoint (hr) Value: 6
  misc_feature: MA Experiment 20000088 PARAMETER Experiment Name: At_100uM_ABA_Mutants_cDNA_P Parameter: Tissue Value: Aerial
  misc_feature: MA Experiment 20000088 PARAMETER Experiment Name: At_100uM_ABA_Mutants_cDNA_P Parameter: Treatment Value: 100uM ABA vs. No Treatment
acacacaccaatcttatcataactcaccaaccaatcaactaaccatggattccgagatcgccgtcgactgctctccattgctcaaaatctacaagagtggccgcatcgagcgactcatgggtgaagccaccgtcccaccttcttccgaaccacaaaacggagtcgtttccaaggacgttgtttattctgccgacaacaacctatccgtccgtatttacctcccggagaaagccgccgccgagaccgactcgaaactccctctcctcgtttacttccacggtggaggattcatcattgagacagctttctctccaacttaccacactttcctcacgacgtctgtctctgcgtcgaactgtgtagcggtctctgttgattaccgtcgtgcaccggagcatccgatctccgtcccgttcgatgattcttggacagctctcaaatgggtattcacccatatcactggatctggtcaagaagattggttaaacaaacatgctgacttcagcagagtgttcctctccggagacagtgcaggagcaaacatcgtgcatcacatggcgatgagagctgcgaaagagaaactcagtcctggtttgaacgatacaggaatctctggaatcatcttgcttcatccttacttctggtcgaaaacaccaatcgacgagaaggatacgaaagatgaaacgttgaggatgaagatagaggcgttttggatgatggcaagtcctaatagcaaagatggaacagatgatccgttgctcaacgtggtgcaatcagagtcggtggatttgtctgggttgggttgtggtaaggttttggtaatggtggctgagaaagatgcgttggtgaggcagggttggggttacgcggctaagcttgagaagtctggttggaaaggagaggttgaagtggtggagagtgaaggagaagatcatgtttttcatttgttgaaacctgaatgtgataatgctattgaagtcatgcataaattctcagggtttattaagggagggaactagctttgtgctctctagagatattggaataatttggtactacatattttagttgcgtctctcagtttctgtaatgtttcagtgattggcttttcgcccaaagcaacacaataaaaattgaaga

SEQ ID NO: 103303 - protein, 338 aa, Arabidopsis thaliana
  peptide (1)..(338): Ceres Seq. ID no. 13612454
  misc_feature (71)..(127): Pfam Name: Carboxylesterase Pfam Description: Carboxylesterase
  misc_feature (15)..(338): Homolog of NCBI NO: 15228425 NR Description: expressed protein [Arabidopsis thaliana]
  misc_feature (15)..(338): Homolog of NCBI NO: 18086341 NR Description: AT3g48690/T8P19_200 [Arabidopsis thaliana]
  misc_feature (15)..(336): Homolog of NCBI NO: 15228426 NR Description: expressed protein [Arabidopsis thaliana]
  misc_feature (15)..(334): Homolog of NCBI NO: 15227669 NR Description: expressed protein [Arabidopsis thaliana]
  misc_feature (19)..(334): Homolog of NCBI NO: 28393060 NR Description: putative esterase [Arabidopsis thaliana]
  misc_feature (15)..(335): Homolog of NCBI NO: 15221975 NR Description: expressed protein [Arabidopsis thaliana]
  misc_feature (15)..(336): Homolog of NCBI NO: 15222795 NR Description: expressed protein [Arabidopsis thaliana]
  misc_feature (17)..(336): Homolog of NCBI NO: 18402731 NR Description: expressed protein [Arabidopsis thaliana]
  misc_feature (17)..(336): Homolog of NCBI NO: 21537287 NR Description: putative esterase [Arabidopsis thaliana]
  misc_feature (15)..(334): Homolog of NCBI NO: 15222791 NR Description: hypothetical protein [Arabidopsis thaliana]
THQSYHNSPTNQLTMDSEIAVDCSPLLKIYKSGRIERLMGEATVPPSSEPQNGVVSKDVVYSADNNLSVRIYLPEKAAAETDSKLPLLVYFHGGGFIIETAFSPTYHTFLTTSVSASNCVAVSVDYRRAPEHPISVPFDDSWTALKWVFTHITGSGQEDWLNKHADFSRVFLSGDSAGANIVHHMAMRAAKEKLSPGLNDTGISGIILLHPYFWSKTPIDEKDTKDETLRMKIEAFWMMASPNSKDGTDDPLLNVVQSESVDLSGLGCGKVLVMVAEKDALVRQGWGYAAKLEKSGWKGEVEVVESEGEDHVFHLLKPECDNAIEVMHKFSGFIKGGN

SEQ ID NO: 103304 - protein, 324 aa, Arabidopsis thaliana
  peptide (1)..(324): Ceres Seq. ID no. 13612455
  misc_feature (57)..(113): Pfam Name: Carboxylesterase Pfam Description: Carboxylesterase
  misc_feature (1)..(324): Homolog of NCBI NO: 15228425 NR Description: expressed protein [Arabidopsis thaliana]
  misc_feature (1)..(324): Homolog of NCBI NO: 18086341 NR Description: AT3g48690/T8P19_200 [Arabidopsis thaliana]
  misc_feature (1)..(322): Homolog of NCBI NO: 15228426 NR Description: expressed protein [Arabidopsis thaliana]
  misc_feature (1)..(320): Homolog of NCBI NO: 15227669 NR Description: expressed protein [Arabidopsis thaliana]
  misc_feature (5)..(320): Homolog of NCBI NO: 28393060 NR Description: putative esterase [Arabidopsis thaliana]
  misc_feature (1)..(321): Homolog of NCBI NO: 15221975 NR Description: expressed protein [Arabidopsis thaliana]
  misc_feature (1)..(322): Homolog of NCBI NO: 15222795 NR Description: expressed protein [Arabidopsis thaliana]
  misc_feature (3)..(322): Homolog of NCBI NO: 18402731 NR Description: expressed protein [Arabidopsis thaliana]
  misc_feature (3)..(322): Homolog of NCBI NO: 21537287 NR Description: putative esterase [Arabidopsis thaliana]
  misc_feature (1)..(320): Homolog of NCBI NO: 15222791 NR Description: hypothetical protein [Arabidopsis thaliana]
MDSEIAVDCSPLLKIYKSGRIERLMGEATVPPSSEPQNGVVSKDVVYSADNNLSVRIYLPEKAAAETDSKLPLLVYFHGGGFIIETAFSPTYHTFLTTSVSASNCVAVSVDYRRAPEHPISVPFDDSWTALKWVFTHITGSGQEDWLNKHADFSRVFLSGDSAGANIVHHMAMRAAKEKLSPGLNDTGISGIILLHPYFWSKTPIDEKDTKDETLRMKIEAFWMMASPNSKDGTDDPLLNVVQSESVDLSGLGCGKVLVMVAEKDALVRQGWGYAAKLEKSGWKGEVEVVESEGEDHVFHLLKPECDNAIEVMHKFSGFIKGGN

SEQ ID NO: 103305 - protein, 300 aa, Arabidopsis thaliana
  peptide (1)..(300): Ceres Seq. ID no. 13612456
  misc_feature (33)..(89): Pfam Name: Carboxylesterase Pfam Description: Carboxylesterase
  misc_feature (1)..(300): Homolog of NCBI NO: 15228425 NR Description: expressed protein [Arabidopsis thaliana]
  misc_feature (1)..(300): Homolog of NCBI NO: 18086341 NR Description: AT3g48690/T8P19_200 [Arabidopsis thaliana]
  misc_feature (1)..(298): Homolog of NCBI NO: 15228426 NR Description: expressed protein [Arabidopsis thaliana]
  misc_feature (1)..(296): Homolog of NCBI NO: 15227669 NR Description: expressed protein [Arabidopsis thaliana]
  misc_feature (1)..(296): Homolog of NCBI NO: 28393060 NR Description: putative esterase [Arabidopsis thaliana]
  misc_feature (1)..(297): Homolog of NCBI NO: 15221975 NR Description: expressed protein [Arabidopsis thaliana]
  misc_feature (1)..(298): Homolog of NCBI NO: 15222795 NR Description: expressed protein [Arabidopsis thaliana]
  misc_feature (1)..(298): Homolog of NCBI NO: 18402731 NR Description: expressed protein [Arabidopsis thaliana]
  misc_feature (1)..(298): Homolog of NCBI NO: 21537287 NR Description: putative esterase [Arabidopsis thaliana]
  misc_feature (1)..(296): Homolog of NCBI NO: 15222791 NR Description: hypothetical protein [Arabidopsis thaliana]
MGEATVPPSSEPQNGVVSKDVVYSADNNLSVRIYLPEKAAAETDSKLPLLVYFHGGGFIIETAFSPTYHTFLTTSVSASNCVAVSVDYRRAPEHPISVPFDDSWTALKWVFTHITGSGQEDWLNKHADFSRVFLSGDSAGANIVHHMAMRAAKEKLSPGLNDTGISGIILLHPYFWSKTPIDEKDTKDETLRMKIEAFWMMASPNSKDGTDDPLLNVVQSESVDLSGLGCGKVLVMVAEKDALVRQGWGYAAKLEKSGWKGEVEVVESEGEDHVFHLLKPECDNAIEVMHKFSGFIKGGN

SEQ ID NO: 103306 - DNA, 1405 bp, Arabidopsis thaliana
  misc_feature (1)..(1405): Ceres Seq. ID no. 13612461
  misc_feature: MA Experiment ID: 108577 Result: Down-regulated in Transcription
  misc_feature: MA Experiment 108577 PARAMETER Experiment Name: At_42deg_Heat_cDNA_P Parameter: Temperature (deg C) Value: 42 vs. 22
  misc_feature: MA Experiment 108577 PARAMETER Experiment Name: At_42deg_Heat_cDNA_P Parameter: Timepoint (hr) Value: 6
  misc_feature: MA Experiment 108577 PARAMETER Experiment Name: At_42deg_Heat_cDNA_P Parameter: Tissue Value: Aerial
  misc_feature: MA Experiment ID: 108595 Result: Down-regulated in Transcription
  misc_feature: MA Experiment 108595 PARAMETER Experiment Name: At_Ler-pi_Ovule_cDNA_P Parameter: Plant Line Value: null
  misc_feature: MA Experiment ID: 20000224 Result: Down-regulated in Transcription
  misc_feature: MA Experiment ID: 20000794 Result: Down-regulated in Transcription
  misc_feature: MA Experiment 20000794 PARAMETER Experiment Name: At_Petals_P Parameter: Age (day) Value: 23-25 days
  misc_feature: MA Experiment 20000794 PARAMETER Experiment Name: At_Petals_P Parameter: Plant Line Value: WS
  misc_feature: MA Experiment 20000794 PARAMETER Experiment Name: At_Petals_P Parameter: Tissue Value: Petals vs. Whole plant
ctcctctcttcaagcttttcacagaaaaccaccacccttctctctctactgcctttttaccacagagaagagagaggatccgtcggtgtgctagtctcactgacactacatccgatcgtcgccggtgacattttataagtgtggagtttacttcagctttattattcaggaattgatggatcagtacgagaaagttgagaagattggtgaaggaacttacggtgtggtttataaggcacgtgacaaagtgactaatgagacaattgctttgaagaagatcaggctagagcaggaggatgaaggtgttcctagcacagcaatcagagaaatctccctcttgaaagaaatgcagcacagcaacattgtcaaattgcaggatgtggtgcacagcgagaaacgtttgtatctggtttttgagtatcttgacttggatctcaaaaagcacatggattctactcctgatttctccaaggatctacatatgatcaaaacatatctttaccagattctccgtggaattgcgtattgccactctcatagggttctccatcgtgatctgaagccacagaatttgttgattgatcgccgcacaaactcactgaagcttgctgattttggactggccagagcattcggtatccctgtcaggacatttactcatgaggttgttactctctggtaccgagcaccagagatactcctaggatctcatcattactctacacctgttgatatttggtctgtggggtgcatatttgctgagatgatcagccaaaagcccttatttcctggagactccgagattgatcaactcttcaagattttcagaatcatgggaactccgtacgaggatacatggcgtggggtaacttctctaccggattataaatctgctttccctaaatggaaaccaacggacctagaaacttttgtccccaatctagatcccgatggagtcgatctcctttctaaaatgctgttaatggatccgaccaaaagaatcaacgcaagagccgccctggagcatgaatacttcaaggatcttggaggcatgccttagaaaggcataaaaccagtaatctccttcattctatatataattatcaatcctaagaaaatgaagaacaatattaatgggttttgtttattctttttctgagttcgtttcctacttatattctattacgaaaaaaaagaaagaagaagatttcgagtgtgtttttttttacttctaagcttttgagatcagtttcttgtatcttattttacccagaatatagtatttccctatatgaaatatggtttttgttttgcaaaatgaccatattatgcaacttctcagcttcttgattgtgccttgatagtgatcttttgaaatatatcccaaaaaacatcacttttttcg

SEQ ID NO: 103307 - protein, 294 aa, Arabidopsis thaliana [sequence omitted]

SEQ ID NO: 103308 - protein, 237 aa, Arabidopsis thaliana; identical to SEQ ID NO: 29230
  peptide (1)..(237): Ceres Seq. ID no. 13612463
  misc_feature (1)..(230): Pfam Name: Protein kinase domain Pfam Description: Protein kinase domain
  misc_feature (1)..(237): Homolog of NCBI NO: 18408696 NR Description: cell division control protein 2 homolog A (CDC2A) thaliana] >gi|115916|sp|P24100|CC2A_ARATH Cell division control
  misc_feature (1)..(237): Homolog of NCBI NO: 11259538 NR Description: CELL DIVISION CONTROL PROTEIN 2 HOMOLOG A - thaliana >gi|7576213|emb|CAB87903.1| CELL DIVISION CONTROL
  misc_feature (1)..(237): Homolog of NCBI NO: 1236190 NR Description: cyclin dependent protein kinase homolog; similar
  misc_feature (1)..(228): Homolog of NCBI NO: 19699294 NR Description: AT3g48750/T21J18_20 [Arabidopsis thaliana]
  misc_feature (1)..(237): Homolog of NCBI NO: 13249052 NR Description: CDC2 homolog [Populus tremula x Populus
  misc_feature (1)..(237): Homolog of NCBI NO: 9885803 NR Description: cyclin-dependent kinase A:4 [Nicotiana tabacum]
  misc_feature (1)..(237): Homolog of NCBI NO: 17224978 NR Description: cyclin dependent kinase [Helianthus annuus]
  misc_feature (1)..(237): Homolog of NCBI NO: 24636265 NR Description: Cell division control protein 2 homolog (p34cdc2)
  misc_feature (1)..(237): Homolog of NCBI NO: 3123614 NR Description: cyclin-dependent protein kinase p34cdc2
  misc_feature (1)..(237): Homolog of NCBI NO: 25989351 NR Description: cyclin-dependent kinase [Helianthus tuberosus]

SEQ ID NO: 103309 - protein, 204 aa, Arabidopsis thaliana; identical to SEQ ID NO: 29231
  peptide (1)..(204): Ceres Seq. ID no. 13612464
  misc_feature (1)..(197): Pfam Name: Protein kinase domain Pfam Description: Protein kinase domain
  misc_feature (1)..(204): Homolog of NCBI NO: 18408696 NR Description: cell division control protein 2 homolog A (CDC2A) thaliana] >gi|115916|sp|P24100|CC2A_ARATH Cell division control
  misc_feature (1)..(204): Homolog of NCBI NO: 11259538 NR Description: CELL DIVISION CONTROL PROTEIN 2 HOMOLOG A - thaliana >gi|7576213|emb|CAB87903.1| CELL DIVISION CONTROL
  misc_feature (1)..(204): Homolog of NCBI NO: 1236190 NR Description: cyclin dependent protein kinase homolog; similar
  misc_feature (1)..(195): Homolog of NCBI NO: 19699294 NR Description: AT3g48750/T21J18_20 [Arabidopsis thaliana]
  misc_feature (1)..(204): Homolog of NCBI NO: 13249052 NR Description: CDC2 homolog [Populus tremula x Populus
  misc_feature (1)..(204): Homolog of NCBI NO: 9885803 NR Description: cyclin-dependent kinase A:4 [Nicotiana tabacum]
  misc_feature (1)..(204): Homolog of NCBI NO: 17224978 NR Description: cyclin dependent kinase [Helianthus annuus]
  misc_feature (1)..(204): Homolog of NCBI NO: 24636265 NR Description: Cell division control protein 2 homolog (p34cdc2)
  misc_feature (1)..(204): Homolog of NCBI NO: 3123614 NR Description: cyclin-dependent protein kinase p34cdc2
  misc_feature (1)..(204): Homolog of NCBI NO: 25989351 NR Description: cyclin-dependent kinase [Helianthus tuberosus]

SEQ ID NO: 103310 - DNA, 1318 bp, Arabidopsis thaliana
  misc_feature (1)..(1318): Ceres Seq. ID no. 13612465
  misc_feature: MA Experiment ID: 108434 Result: Down-regulated in Transcription
  misc_feature: MA Experiment 108434 PARAMETER Experiment Name: At_Root_Tips_cDNA_P Parameter: Tissue Value: Root Tips
  misc_feature: MA Experiment ID: 108576 Result: Up-regulated in Transcription
  misc_feature: MA Experiment 108576 PARAMETER Experiment Name: At_42deg_Heat_cDNA_P Parameter: Temperature (deg C) Value: 42 vs. 22
  misc_feature: MA Experiment 108576 PARAMETER Experiment Name: At_42deg_Heat_cDNA_P Parameter: Timepoint (hr) Value: 1
  misc_feature: MA Experiment 108576 PARAMETER Experiment Name: At_42deg_Heat_cDNA_P Parameter: Tissue Value: Aerial
  misc_feature: MA Experiment ID: 108577 Result: Up-regulated in Transcription
  misc_feature: MA Experiment 108577 PARAMETER Experiment Name: At_42deg_Heat_cDNA_P Parameter: Temperature (deg C) Value: 42 vs. 22
  misc_feature: MA Experiment 108577 PARAMETER Experiment Name: At_42deg_Heat_cDNA_P Parameter: Timepoint (hr) Value: 6
  misc_feature: MA Experiment 108577 PARAMETER Experiment Name: At_42deg_Heat_cDNA_P Parameter: Tissue Value: Aerial
  misc_feature: MA Experiment ID: 108595 Result: Down-regulated in Transcription
  misc_feature: MA Experiment 108595 PARAMETER Experiment Name: At_Ler-pi_Ovule_cDNA_P Parameter: Plant Line Value: null
  misc_feature: MA Experiment ID: 20000112 Result: Up-regulated in Transcription
  misc_feature: MA Experiment 20000112 PARAMETER Experiment Name: At_42deg_Heat_cDNA_P Parameter: Temperature (deg C) Value: 42 vs. 22
  misc_feature: MA Experiment 20000112 PARAMETER Experiment Name: At_42deg_Heat_cDNA_P Parameter: Timepoint (hr) Value: 2
  misc_feature: MA Experiment 20000112 PARAMETER Experiment Name: At_42deg_Heat_cDNA_P Parameter: Tissue Value: Aerial
  misc_feature: MA Experiment ID: 20000113 Result: Up-regulated in Transcription
  misc_feature: MA Experiment 20000113 PARAMETER Experiment Name: At_42deg_Heat_cDNA_P Parameter: Temperature (deg C) Value: 42 vs. 22
  misc_feature: MA Experiment 20000113 PARAMETER Experiment Name: At_42deg_Heat_cDNA_P Parameter: Timepoint (hr) Value: 8
  misc_feature: MA Experiment 20000113 PARAMETER Experiment Name: At_42deg_Heat_cDNA_P Parameter: Tissue Value: Aerial
  misc_feature: MA Experiment ID: 20000171 Result: Up-regulated in Transcription
  misc_feature: MA Experiment 20000171 PARAMETER Experiment Name: At_42deg_Heat_P Parameter: Age (day) Value: 14
  misc_feature: MA Experiment 20000171 PARAMETER Experiment Name: At_42deg_Heat_P Parameter: Organism Value: A. thaliana
  misc_feature: MA Experiment 20000171 PARAMETER Experiment Name: At_42deg_Heat_P Parameter: Plant Line Value: WS
  misc_feature: MA Experiment 20000171 PARAMETER Experiment Name: At_42deg_Heat_P Parameter: Temperature (deg C) Value: 42 vs. 22
  misc_feature: MA Experiment 20000171 PARAMETER Experiment Name: At_42deg_Heat_P Parameter: Timepoint (hr) Value: 1
  misc_feature: MA Experiment 20000171 PARAMETER Experiment Name: At_42deg_Heat_P Parameter: Tissue Value: Aerial
  misc_feature: MA Experiment ID: 20000173 Result: Up-regulated in Transcription
  misc_feature: MA Experiment 20000173 PARAMETER Experiment Name: At_42deg_Heat_P Parameter: Age (day) Value: 14
  misc_feature: MA Experiment 20000173 PARAMETER Experiment Name: At_42deg_Heat_P Parameter: Organism Value: A. thaliana
  misc_feature: MA Experiment 20000173 PARAMETER Experiment Name: At_42deg_Heat_P Parameter: Plant Line Value: WS
  misc_feature: MA Experiment 20000173 PARAMETER Experiment Name: At_42deg_Heat_P Parameter: Temperature (deg C) Value: 42 vs. 22
  misc_feature: MA Experiment 20000173 PARAMETER Experiment Name: At_42deg_Heat_P Parameter: Timepoint (hr) Value: 6
  misc_feature: MA Experiment 20000173 PARAMETER Experiment Name: At_42deg_Heat_P Parameter: Tissue Value: Aerial
  misc_feature: MA Experiment ID: 20000224 Result: Down-regulated in Transcription
  misc_feature: MA Experiment ID: 20000234 Result: Down-regulated in Transcription
  misc_feature: MA Experiment 20000234 PARAMETER Experiment Name: At_Siliques_P Parameter: Age (day) Value: 21
  misc_feature: MA Experiment 20000234 PARAMETER Experiment Name: At_Siliques_P Parameter: Organism Value: A. thaliana
  misc_feature: MA Experiment 20000234 PARAMETER Experiment Name: At_Siliques_P Parameter: Plant Line Value: WS
  misc_feature: MA Experiment 20000234 PARAMETER Experiment Name: At_Siliques_P Parameter: Tissue Value: Less Than 5mm Siliques vs. Whole Plant
gattctttgttcaattctgaattgagaaaatggcgattcgagatctgtctcttcggttttttagttcgactgatttgggaatgtgaagagatcagattgatttgttgacagagtcttgggggttttcaatcttattcctctagattttcgaaattcgattcctttacatcagatttcgcttaattctctgtcctaggtacaacaagaatggaagaagagtatgagagtcgtcgattgaggagatgggaagagttggacactgacatcttagtaagaattttccagaagtttagcgtctttgagttgacttcgggattagctcatgtttgtagaggatggagagctgcttgttgcgatccgattctttggaagacggtggatttgtcaaacatgagatctagtttcatcaagatcccattagagccttatgtctatgtggaacgccgatctgatgaggccctaacccgcatcctgaaactctccatgaaccttagcggaggaagcacgaggaccttgatttttcatttcaacttgttcttgagtgatgatcagcttacttacaccgcagaaaggtgtccagggttgagacgggtcgtcctaccggcttggaacagaataaagaagactggtatatgcaaagcgataagaatctggaaagatctagagtcactaacaatgccaagcatcgcaaacccgccttatctcttaacagaaattgccaagaactgcaagaattttaaagagctgaagatcatgggtccattcgaggtcttctttgcaaacacgctcatcacttgcctcccaaacatcaaaacactcagcatcagatgctcggcgataaagcgggaagcactgatgaaaatccttgacggattaccaagccttgaagtgctcaacatatcacactctcacctagtggagtacagcggttggcagcctcagcagaaggtgattgttagagagctcgataagacgataatggagaaaacagcaaggctaaagaaattcttgacttgcatggatcacaagacgtgtgtgatgtgtcagaggactgaaaacgatgaagggattgtgagatggtacaagtatgaggaaggagactggaaggttgatgaagtgagttctcttcatctttgatgtttctgctgtgatcattctctgtgaaggacttaacttgttattgttctcatctttgactgttgaattgtttatttctttgtgttgtttgttttgatttgaatcgtattatgtgtatatatctgtaggctatgccaatgaatgtctgtagtgatcaacttttgatcaccaccaaccttgc

SEQ ID NO: 103311 - protein, 309 aa, Arabidopsis thaliana; identical to SEQ ID NO: 37206
  peptide (1)..(309): Ceres Seq. ID no. 13612466
  misc_feature (1)..(309): Homolog of NCBI NO: 15229043 NR Description: F-box protein family [Arabidopsis thaliana]
  misc_feature (1)..(309): Homolog of NCBI NO: 21618163 NR Description: unknown [Arabidopsis thaliana]
  misc_feature (111)..(309): Homolog of NCBI NO: 37535806 NR Description: putative Rhizobium-induced nodule development
  misc_feature (59)..(307): Homolog of NCBI NO: 15234238 NR Description: F-box protein family [Arabidopsis thaliana]
  misc_feature (4)..(63): Homolog of NCBI NO: 15234238 NR Description: F-box protein family [Arabidopsis thaliana]
  misc_feature (1)..(231): Homolog of NCBI NO: 18412953 NR Description: F-box protein family, AtFBL9/AtFBL23 [Arabidopsis
  misc_feature (12)..(222): Homolog of NCBI NO: 37718854 NR Description: hypothetical protein [Oryza sativa (japonica
  misc_feature (1)..(231): Homolog of NCBI NO: 18412951 NR Description: F-box protein family, AtFBL22 [Arabidopsis
  misc_feature (11)..(231): Homolog of NCBI NO: 30692594 NR Description: predicted protein [Arabidopsis thaliana] contains similarity to Medicago truncatula N7 protein (GB:Y17613)
  misc_feature (13)..(231): Homolog of NCBI NO: 18424042 NR Description: SKP1 interacting partner 1 (SKIP1) [Arabidopsis

SEQ ID NO: 103312 - protein, 248 aa, Arabidopsis thaliana; identical to SEQ ID NO: 37207
  peptide (1)..(248): Ceres Seq. ID no. 13612467
  misc_feature (1)..(248): Homolog of NCBI NO: 15229043 NR Description: F-box protein family [Arabidopsis thaliana]
  misc_feature (1)..(248): Homolog of NCBI NO: 21618163 NR Description: unknown [Arabidopsis thaliana]
  misc_feature (50)..(248): Homolog of NCBI NO: 37535806 NR Description: putative Rhizobium-induced nodule development
  misc_feature (1)..(246): Homolog of NCBI NO: 15234238 NR Description: F-box protein family [Arabidopsis thaliana]
  misc_feature (1)..(170): Homolog of NCBI NO: 18412953 NR Description: F-box protein family, AtFBL9/AtFBL23 [Arabidopsis
  misc_feature (1)..(161): Homolog of NCBI NO: 37718854 NR Description: hypothetical protein [Oryza sativa (japonica
  misc_feature (1)..(170): Homolog of NCBI NO: 18412951 NR Description: F-box protein family, AtFBL22 [Arabidopsis
  misc_feature (1)..(170): Homolog of NCBI NO: 30692594 NR Description: predicted protein [Arabidopsis thaliana] contains similarity to Medicago truncatula N7 protein (GB:Y17613)
  misc_feature (1)..(170): Homolog of NCBI NO: 18424042 NR Description: SKP1 interacting partner 1 (SKIP1) [Arabidopsis
  misc_feature (1)..(170): Homolog of NCBI NO: 18413178 NR Description: F-box protein family, AtFBW2 [Arabidopsis

SEQ ID NO: 103313 - protein, 217 aa, Arabidopsis thaliana; identical to SEQ ID NO: 37208
  peptide (1)..(217): Ceres Seq. ID no. 13612468
  misc_feature (1)..(217): Homolog of NCBI NO: 15229043 NR Description: F-box protein family [Arabidopsis thaliana]
  misc_feature (1)..(217): Homolog of NCBI NO: 21618163 NR Description: unknown [Arabidopsis thaliana]
  misc_feature (19)..(217): Homolog of NCBI NO: 37535806 NR Description: putative Rhizobium-induced nodule development
  misc_feature (1)..(215): Homolog of NCBI NO: 15234238 NR Description: F-box protein family [Arabidopsis thaliana]
  misc_feature (1)..(139): Homolog of NCBI NO: 18412953 NR Description: F-box protein family, AtFBL9/AtFBL23 [Arabidopsis
  misc_feature (1)..(130): Homolog of NCBI NO: 37718854 NR Description: hypothetical protein [Oryza sativa (japonica
  misc_feature (1)..(139): Homolog of NCBI NO: 18412951 NR Description: F-box protein family, AtFBL22 [Arabidopsis
  misc_feature (1)..(139): Homolog of NCBI NO: 30692594 NR Description: predicted protein [Arabidopsis thaliana] contains similarity to Medicago truncatula N7 protein (GB:Y17613)
  misc_feature (1)..(139): Homolog of NCBI NO: 18424042 NR Description: SKP1 interacting partner 1 (SKIP1) [Arabidopsis
  misc_feature (1)..(139): Homolog of NCBI NO: 18413178 NR Description: F-box protein family, AtFBW2 [Arabidopsis

SEQ ID NO: 103314 - DNA, 1317 bp, Arabidopsis thaliana
  misc_feature (1)..(1317): Ceres Seq. ID no. 13612480
  misc_feature: MA Experiment ID: 108434 Result: Down-regulated in Transcription
  misc_feature: MA Experiment 108434 PARAMETER Experiment Name: At_Root_Tips_cDNA_P Parameter: Tissue Value: Root Tips
  misc_feature: MA Experiment ID: 108462 Result: Up-regulated in Transcription
  misc_feature: MA Experiment 108462 PARAMETER Experiment Name: At_Germinating_Seeds_cDNA_P Parameter: Age (day) Value: 2 vs. 0
  misc_feature: MA Experiment 108462 PARAMETER Experiment Name: At_Germinating_Seeds_cDNA_P Parameter: Tissue Value: Germinating Seeds
  misc_feature: MA Experiment ID: 108463 Result: Up-regulated in Transcription
  misc_feature: MA Experiment 108463 PARAMETER Experiment Name: At_Germinating_Seeds_cDNA_P Parameter: Age (day) Value: 3 vs. 0
  misc_feature: MA Experiment 108463 PARAMETER Experiment Name: At_Germinating_Seeds_cDNA_P Parameter: Tissue Value: Germinating Seeds
  misc_feature: MA Experiment ID: 108488 Result: Down-regulated in Transcription
  misc_feature: MA Experiment ID: 108561 Result: Up-regulated in Transcription
  misc_feature: MA Experiment 108561 PARAMETER Experiment Name: At_100uM_ABA_cDNA_P Parameter: Timepoint (hr) Value: 6
  misc_feature: MA Experiment 108561 PARAMETER Experiment Name: At_100uM_ABA_cDNA_P Parameter: Tissue Value: Aerial
  misc_feature: MA Experiment 108561 PARAMETER Experiment Name: At_100uM_ABA_cDNA_P Parameter: Treatment Value: 100uM ABA vs. No Treatment
  misc_feature: MA Experiment ID: 108569 Result: Up-regulated in Transcription
  misc_feature: MA Experiment 108569 PARAMETER Experiment Name: At_0.001%_MeJA__cDNA_P Parameter: Timepoint (hr) Value: 6
  misc_feature: MA Experiment 108569 PARAMETER Experiment Name: At_0.001%_MeJA__cDNA_P Parameter: Tissue Value: Aerial
  misc_feature: MA Experiment 108569 PARAMETER Experiment Name: At_0.001%_MeJA__cDNA_P Parameter: Treatment Value: 0.001% MeJA vs. No Treatment
  misc_feature: MA Experiment ID: 108572 Result: Up-regulated in Transcription
  misc_feature: MA Experiment 108572 PARAMETER Experiment Name: At_Drought_cDNA_P Parameter: Timepoint (hr) Value: 1
  misc_feature: MA Experiment 108572 PARAMETER Experiment Name: At_Drought_cDNA_P Parameter: Tissue Value: Aerial
  misc_feature: MA Experiment 108572 PARAMETER Experiment Name: At_Drought_cDNA_P Parameter: Treatment Value: Drought vs. No Drought
  misc_feature: MA Experiment ID: 108573 Result: Up-regulated in Transcription
  misc_feature: MA Experiment 108573 PARAMETER Experiment Name: At_Drought_cDNA_P Parameter: Timepoint (hr) Value: 6
  misc_feature: MA Experiment 108573 PARAMETER Experiment Name: At_Drought_cDNA_P Parameter: Tissue Value: Aerial
  misc_feature: MA Experiment 108573 PARAMETER Experiment Name: At_Drought_cDNA_P Parameter: Treatment Value: Drought vs. No Drought
  misc_feature: MA Experiment ID: 108577 Result: Down-regulated in Transcription
  misc_feature: MA Experiment 108577 PARAMETER Experiment Name: At_42deg_Heat_cDNA_P Parameter: Temperature (deg C) Value: 42 vs. 22
  misc_feature: MA Experiment 108577 PARAMETER Experiment Name: At_42deg_Heat_cDNA_P Parameter: Timepoint (hr) Value: 6
  misc_feature: MA Experiment 108577 PARAMETER Experiment Name: At_42deg_Heat_cDNA_P Parameter: Tissue Value: Aerial
  misc_feature: MA Experiment ID: 108585 Result: Up-regulated in Transcription
  misc_feature: MA Experiment 108585 PARAMETER Experiment Name: At_5mM_NaNP_cDNA_P Parameter: Timepoint (hr) Value: 6
  misc_feature: MA Experiment 108585 PARAMETER Experiment Name: At_5mM_NaNP_cDNA_P Parameter: Tissue Value: Aerial
  misc_feature: MA Experiment 108585 PARAMETER Experiment Name: At_5mM_NaNP_cDNA_P Parameter: Treatment Value: null
  misc_feature: MA Experiment ID: 108594 Result: Down-regulated in Transcription
  misc_feature: MA Experiment 108594 PARAMETER Experiment Name: At_Ler-rhl_Root_cDNA_P Parameter: Plant Line Value: null
  misc_feature: MA Experiment ID: 108595 Result: Up-regulated in Transcription
  misc_feature: MA Experiment 108595 PARAMETER Experiment Name: At_Ler-pi_Ovule_cDNA_P Parameter: Plant Line Value: null
  misc_feature: MA Experiment ID: 108605 Result: Up-regulated in Transcription
  misc_feature: MA Experiment 108605 PARAMETER Experiment Name: At_100uM_ABA_cDNA_P Parameter: Timepoint (hr) Value: 6
  misc_feature: MA Experiment 108605 PARAMETER Experiment Name: At_100uM_ABA_cDNA_P Parameter: Tissue Value: Aerial
  misc_feature: MA Experiment 108605 PARAMETER Experiment Name: At_100uM_ABA_cDNA_P Parameter: Treatment Value: 100uM ABA vs. No Treatment
  misc_feature: MA Experiment ID: 108607 Result: Up-regulated in Transcription
  misc_feature: MA Experiment 108607 PARAMETER Experiment Name: At_100uM_ABA_cDNA_P Parameter: Timepoint (hr) Value: 4
  misc_feature: MA Experiment 108607 PARAMETER Experiment Name: At_100uM_ABA_cDNA_P Parameter: Tissue Value: Aerial
  misc_feature: MA Experiment 108607 PARAMETER Experiment Name: At_100uM_ABA_cDNA_P Parameter: Treatment Value: 100uM ABA vs. No Treatment
  misc_feature: MA Experiment ID: 108609 Result: Up-regulated in Transcription
  misc_feature: MA Experiment 108609 PARAMETER Experiment Name: At_100uM_ABA_cDNA_P Parameter: Timepoint (hr) Value: 24
  misc_feature: MA Experiment 108609 PARAMETER Experiment Name: At_100uM_ABA_cDNA_P Parameter: Tissue Value: Aerial
  misc_feature: MA Experiment 108609 PARAMETER Experiment Name: At_100uM_ABA_cDNA_P Parameter: Treatment Value: 100uM ABA vs. No Treatment
  misc_feature: MA Experiment ID: 108668 Result: Up-regulated in Transcription
  misc_feature: MA Experiment 108668 PARAMETER Experiment Name: At_2mM_SA_cDNA_P Parameter: Plant Line Value: WS
  misc_feature: MA Experiment 108668 PARAMETER Experiment Name: At_2mM_SA_cDNA_P Parameter: Timepoint (hr) Value: 6
  misc_feature: MA Experiment 108668 PARAMETER Experiment Name: At_2mM_SA_cDNA_P Parameter: Treatment Value: 2mM SA vs. No Treatment
  misc_feature: MA Experiment ID: 20000069 Result: Up-regulated in Transcription
  misc_feature: MA Experiment 20000069 PARAMETER Experiment Name: At_100uM_ABA_Mutants_cDNA_P Parameter: Plant Line Value: CS23
  misc_feature: MA Experiment 20000069 PARAMETER Experiment Name: At_100uM_ABA_Mutants_cDNA_P Parameter: Timepoint (hr) Value: 6
  misc_feature: MA Experiment 20000069 PARAMETER Experiment Name: At_100uM_ABA_Mutants_cDNA_P Parameter: Tissue Value: Aerial
  misc_feature: MA Experiment 20000069 PARAMETER Experiment Name: At_100uM_ABA_Mutants_cDNA_P Parameter: Treatment Value: 100uM ABA vs. No Treatment
  misc_feature: MA Experiment ID: 20000070 Result: Up-regulated in Transcription
  misc_feature: MA Experiment 20000070 PARAMETER Experiment Name: At_100uM_ABA_Mutants_cDNA_P Parameter: Plant Line Value: CS24
  misc_feature: MA Experiment 20000070 PARAMETER Experiment Name: At_100uM_ABA_Mutants_cDNA_P Parameter: Timepoint (hr) Value: 6
  misc_feature: MA Experiment 20000070 PARAMETER Experiment Name: At_100uM_ABA_Mutants_cDNA_P Parameter: Tissue Value: Aerial
  misc_feature: MA Experiment 20000070 PARAMETER Experiment Name: At_100uM_ABA_Mutants_cDNA_P Parameter: Treatment Value: 100uM ABA vs. No Treatment
  misc_feature: MA Experiment ID: 20000072 Result: Up-regulated in Transcription
  misc_feature: MA Experiment 20000072 PARAMETER Experiment Name: At_100uM_ABA_Mutants_cDNA_P Parameter: Plant Line Value: CS8105
  misc_feature: MA Experiment 20000072 PARAMETER Experiment Name: At_100uM_ABA_Mutants_cDNA_P Parameter: Timepoint (hr) Value: 6
  misc_feature: MA Experiment 20000072 PARAMETER Experiment Name: At_100uM_ABA_Mutants_cDNA_P Parameter: Tissue Value: Aerial
  misc_feature: MA Experiment 20000072 PARAMETER Experiment Name: At_100uM_ABA_Mutants_cDNA_P Parameter: Treatment Value: 100uM ABA vs. No Treatment
  misc_feature: MA Experiment ID: 20000086 Result: Up-regulated in Transcription
  misc_feature: MA Experiment 20000086 PARAMETER Experiment Name: At_100uM_ABA_Mutants_cDNA_P Parameter: Plant Line Value: CS22
  misc_feature: MA Experiment 20000086 PARAMETER Experiment Name: At_100uM_ABA_Mutants_cDNA_P Parameter: Timepoint (hr) Value: 6
  misc_feature: MA Experiment 20000086 PARAMETER Experiment Name: At_100uM_ABA_Mutants_cDNA_P Parameter: Tissue Value: Aerial
  misc_feature: MA Experiment 20000086 PARAMETER Experiment Name: At_100uM_ABA_Mutants_cDNA_P Parameter: Treatment Value: 100uM ABA vs. No Treatment
  misc_feature: MA Experiment ID: 20000087 Result: Up-regulated in Transcription
  misc_feature: MA Experiment 20000087 PARAMETER Experiment Name: At_100uM_ABA_Mutants_cDNA_P Parameter: Plant Line Value: WS
  misc_feature: MA Experiment 20000087 PARAMETER Experiment Name: At_100uM_ABA_Mutants_cDNA_P Parameter: Timepoint (hr) Value: 6
  misc_feature: MA Experiment 20000087 PARAMETER Experiment Name: At_100uM_ABA_Mutants_cDNA_P Parameter: Tissue Value: Aerial
  misc_feature: MA Experiment 20000087 PARAMETER Experiment Name: At_100uM_ABA_Mutants_cDNA_P Parameter: Treatment Value: 100uM ABA vs. No Treatment
  misc_feature: MA Experiment ID: 20000088 Result: Up-regulated in Transcription
  misc_feature: MA Experiment 20000088 PARAMETER Experiment Name: At_100uM_ABA_Mutants_cDNA_P Parameter: Plant Line Value: Landsberg
  misc_feature: MA Experiment 20000088 PARAMETER Experiment Name: At_100uM_ABA_Mutants_cDNA_P Parameter: Timepoint (hr) Value: 6
  misc_feature: MA Experiment 20000088 PARAMETER Experiment Name: At_100uM_ABA_Mutants_cDNA_P Parameter: Tissue Value: Aerial
  misc_feature: MA Experiment 20000088 PARAMETER Experiment Name: At_100uM_ABA_Mutants_cDNA_P Parameter: Treatment Value: 100uM ABA vs. No Treatment
  misc_feature: MA Experiment ID: 20000090 Result: Up-regulated in Transcription
  misc_feature: MA Experiment ID: 20000111 Result: Down-regulated in Transcription
  misc_feature: MA Experiment 20000111 PARAMETER Experiment Name: At_42deg_Heat_cDNA_P Parameter: Temperature (deg C) Value: 42 vs. 22
  misc_feature: MA Experiment 20000111 PARAMETER Experiment Name: At_42deg_Heat_cDNA_P Parameter: Timepoint (hr) Value: 6
  misc_feature: MA Experiment 20000111 PARAMETER Experiment Name: At_42deg_Heat_cDNA_P Parameter: Tissue Value: Aerial
  misc_feature: MA Experiment ID: 20000117 Result: Up-regulated in Transcription
  misc_feature: MA Experiment 20000117 PARAMETER Experiment Name: At_100uM_ABA_Mutants_cDNA_P Parameter: Plant Line Value: Columbia
  misc_feature: MA Experiment 20000117 PARAMETER Experiment Name: At_100uM_ABA_Mutants_cDNA_P Parameter: Timepoint (hr) Value: 6
  misc_feature: MA Experiment 20000117 PARAMETER Experiment Name: At_100uM_ABA_Mutants_cDNA_P Parameter: Tissue Value: Aerial
  misc_feature: MA Experiment 20000117 PARAMETER Experiment Name: At_100uM_ABA_Mutants_cDNA_P Parameter: Treatment Value: 100uM ABA vs. No Treatment
  misc_feature: MA Experiment ID: 20000169 Result: Up-regulated in Transcription
  misc_feature: MA Experiment 20000169 PARAMETER Experiment Name: At_100uM_ABA_P Parameter: Age (day) Value: 14
  misc_feature: MA Experiment 20000169 PARAMETER Experiment Name: At_100uM_ABA_P Parameter: Organism Value: A. thaliana
  misc_feature: MA Experiment 20000169 PARAMETER Experiment Name: At_100uM_ABA_P Parameter: Plant Line Value: WS
  misc_feature: MA Experiment 20000169 PARAMETER Experiment Name: At_100uM_ABA_P Parameter: Timepoint (hr) Value: 6
  misc_feature: MA Experiment 20000169 PARAMETER Experiment Name: At_100uM_ABA_P Parameter: Tissue Value: Aerial
  misc_feature: MA Experiment 20000169 PARAMETER Experiment Name: At_100uM_ABA_P Parameter: Treatment Value: 100uM ABA vs. No Treatment
  misc_feature: MA Experiment ID: 20000173 Result: Down-regulated in Transcription
  misc_feature: MA Experiment 20000173 PARAMETER Experiment Name: At_42deg_Heat_P Parameter: Age (day) Value: 14
  misc_feature: MA Experiment 20000173 PARAMETER Experiment Name: At_42deg_Heat_P Parameter: Organism Value: A. thaliana
  misc_feature: MA Experiment 20000173 PARAMETER Experiment Name: At_42deg_Heat_P Parameter: Plant Line Value: WS
  misc_feature: MA Experiment 20000173 PARAMETER Experiment Name: At_42deg_Heat_P Parameter: Temperature (deg C) Value: 42 vs. 22
  misc_feature: MA Experiment 20000173 PARAMETER Experiment Name: At_42deg_Heat_P Parameter: Timepoint (hr) Value: 6
  misc_feature: MA Experiment 20000173 PARAMETER Experiment Name: At_42deg_Heat_P Parameter: Tissue Value: Aerial
  misc_feature: MA Experiment ID: 20000182 Result: Up-regulated in Transcription
  misc_feature: MA Experiment 20000182 PARAMETER Experiment Name: At_2mM_SA_P Parameter: Age (day) Value: 14
  misc_feature: MA Experiment 20000182 PARAMETER Experiment Name: At_2mM_SA_P Parameter: Organism Value: A. thaliana
  misc_feature: MA Experiment 20000182 PARAMETER Experiment Name: At_2mM_SA_P Parameter: Plant Line Value: WS
  misc_feature: MA Experiment 20000182 PARAMETER Experiment Name: At_2mM_SA_P Parameter: Timepoint (hr) Value: 6
  misc_feature: MA Experiment 20000182 PARAMETER Experiment Name: At_2mM_SA_P Parameter: Tissue Value: Aerial
  misc_feature: MA Experiment 20000182 PARAMETER Experiment Name: At_2mM_SA_P Parameter: Treatment Value: 2mM SA vs. No Treatment
  misc_feature: MA Experiment ID: 20000224 Result: Up-regulated in Transcription
  misc_feature: MA Experiment ID: 20000227 Result: Down-regulated in Transcription
  misc_feature: MA Experiment 20000227 PARAMETER Experiment Name: At_Root-Tips-vs-Tops_P Parameter: Tissue Value: Root Tips vs. Root Tops
  misc_feature: MA Experiment ID: 20000234 Result: Down-regulated in Transcription
  misc_feature: MA Experiment 20000234 PARAMETER Experiment Name: At_Siliques_P Parameter: Age (day) Value: 21
  misc_feature: MA Experiment 20000234 PARAMETER Experiment Name: At_Siliques_P Parameter: Organism Value: A. thaliana
  misc_feature: MA Experiment 20000234 PARAMETER Experiment Name: At_Siliques_P Parameter: Plant Line Value: WS
  misc_feature: MA Experiment 20000234 PARAMETER Experiment Name: At_Siliques_P Parameter: Tissue Value: Less Than 5mm Siliques vs. Whole Plant
  misc_feature: MA Experiment ID: 20000264 Result: Down-regulated in Transcription
  misc_feature: MA Experiment 20000264 PARAMETER Experiment Name: At_Open_Flower_P Parameter: Age (day) Value: 21
  misc_feature: MA Experiment 20000264 PARAMETER Experiment Name: At_Open_Flower_P Parameter: Plant Line Value: WS
  misc_feature: MA Experiment 20000264 PARAMETER Experiment Name: At_Open_Flower_P Parameter: Tissue Value: Open Flower vs. Whole Plant
  misc_feature: MA Experiment ID: 20000265 Result: Down-regulated in Transcription
  misc_feature: MA Experiment 20000265 PARAMETER Experiment Name: At_Open_Flower_P Parameter: Age (day) Value: 21
  misc_feature: MA Experiment 20000265 PARAMETER Experiment Name: At_Open_Flower_P Parameter: Plant Line Value: WS
  misc_feature: MA Experiment 20000265 PARAMETER Experiment Name: At_Open_Flower_P Parameter: Tissue Value: Closed Flower vs. Whole Plant
  misc_feature: MA Experiment ID: 20000286 Result: Down-regulated in Transcription
  misc_feature: MA Experiment 20000286 PARAMETER Experiment Name: At_Open_Flower_P Parameter: Age (day) Value: 21
  misc_feature: MA Experiment 20000286 PARAMETER Experiment Name: At_Open_Flower_P Parameter: Plant Line Value: WS
  misc_feature: MA Experiment 20000286 PARAMETER Experiment Name: At_Open_Flower_P Parameter: Tissue Value: Half Open vs. Whole Plant
  misc_feature: MA Experiment ID: 20000436 Result: Up-regulated in Transcription
  misc_feature: MA Experiment 20000436 PARAMETER Experiment Name: At_Drought_P Parameter: Age (day) Value: 7
  misc_feature: MA Experiment 20000436 PARAMETER Experiment Name: At_Drought_P Parameter: Organism Value: A. thaliana
  misc_feature: MA Experiment 20000436 PARAMETER Experiment Name: At_Drought_P Parameter: Plant Line Value: WS
  misc_feature: MA Experiment 20000436 PARAMETER Experiment Name: At_Drought_P Parameter: Timepoint (hr) Value: 12
  misc_feature: MA Experiment 20000436 PARAMETER Experiment Name: At_Drought_P Parameter: Tissue Value: Whole Plant
  misc_feature: MA Experiment 20000436 PARAMETER Experiment Name: At_Drought_P Parameter: Treatment Value: Drought vs. No Drought
  misc_feature: MA Experiment ID: 20000437 Result: Up-regulated in Transcription
  misc_feature: MA Experiment 20000437 PARAMETER Experiment Name: At_Drought_P Parameter: Age (day) Value: 8
  misc_feature: MA Experiment 20000437 PARAMETER Experiment Name: At_Drought_P Parameter: Organism Value: A. thaliana
  misc_feature: MA Experiment 20000437 PARAMETER Experiment Name: At_Drought_P Parameter: Plant Line Value: WS
  misc_feature: MA Experiment 20000437 PARAMETER Experiment Name: At_Drought_P Parameter: Timepoint (hr) Value: 24
  misc_feature: MA Experiment 20000437 PARAMETER Experiment Name: At_Drought_P Parameter: Tissue Value: Whole Plant
  misc_feature: MA Experiment 20000437 PARAMETER Experiment Name: At_Drought_P Parameter: Treatment Value: Drought vs. No Drought
  misc_feature: MA Experiment ID: 20000438 Result: Down-regulated in Transcription
  misc_feature: MA Experiment 20000438 PARAMETER Experiment Name: At_Shoots__P Parameter: Age (day) Value: 14
  misc_feature: MA Experiment 20000438 PARAMETER Experiment Name: At_Shoots__P Parameter: Tissue Value: Shoots vs. Whole Plant
  misc_feature: MA Experiment ID: 20000453 Result: Up-regulated in Transcription
  misc_feature: MA Experiment 20000453 PARAMETER Experiment Name: At_100uM_ABA_P Parameter: Age (day) Value: 15
  misc_feature: MA Experiment 20000453 PARAMETER Experiment Name: At_100uM_ABA_P Parameter: Organism Value: A. thaliana
  misc_feature: MA Experiment 20000453 PARAMETER Experiment Name: At_100uM_ABA_P Parameter: Plant Line Value: WS
  misc_feature: MA Experiment 20000453 PARAMETER Experiment Name: At_100uM_ABA_P Parameter: Timepoint (hr) Value: 24
  misc_feature: MA Experiment 20000453 PARAMETER Experiment Name: At_100uM_ABA_P Parameter: Tissue Value: Aerial
  misc_feature: MA Experiment 20000453 PARAMETER Experiment Name: At_100uM_ABA_P Parameter: Treatment Value: 100uM ABA vs. No Treatment
  misc_feature: MA Experiment ID: 20000496 Result: Up-regulated in Transcription
  misc_feature: MA Experiment 20000496 PARAMETER Experiment Name: At_Guard_Cells_P Parameter: Harvest Date Value: 7/19/2002
  misc_feature: MA Experiment 20000496 PARAMETER Experiment Name: At_Guard_Cells_P Parameter: Organism Value: Canola
  misc_feature: MA Experiment 20000496 PARAMETER Experiment Name: At_Guard_Cells_P Parameter: Tissue Value: Guard Cells vs. Leaves
  misc_feature: MA Experiment ID: 20000527 Result: Down-regulated in Transcription
  misc_feature: MA Experiment 20000527 PARAMETER Experiment Name: At_10percent_PEG_P Parameter: Age (day) Value: 20
  misc_feature: MA Experiment 20000527 PARAMETER Experiment Name: At_10percent_PEG_P Parameter: Organism Value: A. thaliana
  misc_feature: MA Experiment 20000527 PARAMETER Experiment Name: At_10percent_PEG_P Parameter: Plant Line Value: WS
  misc_feature: MA Experiment 20000527 PARAMETER Experiment Name: At_10percent_PEG_P Parameter: Timepoint (day) Value: 20
  misc_feature: MA Experiment 20000527 PARAMETER Experiment Name: At_10percent_PEG_P Parameter: Tissue Value: Whole Plant
  misc_feature: MA Experiment 20000527 PARAMETER Experiment Name: At_10percent_PEG_P Parameter: Treatment Value: 10percent PEG vs. No Treatment
  misc_feature: MA Experiment ID: 20000794 Result: Down-regulated in Transcription
  misc_feature: MA Experiment 20000794 PARAMETER Experiment Name: At_Petals_P Parameter: Age (day) Value: 23-25 days
  misc_feature: MA Experiment 20000794 PARAMETER Experiment Name: At_Petals_P Parameter: Plant Line Value: WS
  misc_feature: MA Experiment 20000794 PARAMETER Experiment Name: At_Petals_P Parameter: Tissue Value: Petals vs. Whole plant
  misc_feature: MA Experiment ID: 20001559 Result: Up-regulated in Transcription
  misc_feature: MA Experiment 20001559 PARAMETER Experiment Name: At_Drought_Soil_Dry_P Parameter: Age (day) Value: 28
  misc_feature: MA Experiment 20001559 PARAMETER Experiment Name: At_Drought_Soil_Dry_P Parameter: Organism Value: A. thaliana
  misc_feature: MA Experiment 20001559 PARAMETER Experiment Name: At_Drought_Soil_Dry_P Parameter: Plant Line Value: WS
  misc_feature: MA Experiment 20001559 PARAMETER Experiment Name: At_Drought_Soil_Dry_P Parameter: Post Timepoint (hr) Value: 29
  misc_feature: MA Experiment 20001559 PARAMETER Experiment Name: At_Drought_Soil_Dry_P Parameter: Post-Treatment Value: Re-Water vs. No Drought
  misc_feature: MA Experiment 20001559 PARAMETER Experiment Name: At_Drought_Soil_Dry_P Parameter: Timepoint (day) Value: 14
  misc_feature: MA Experiment 20001559 PARAMETER Experiment Name: At_Drought_Soil_Dry_P Parameter: Treatment Value: Drought vs. No Drought
  misc_feature: MA Experiment ID: 20001560 Result: Down-regulated in Transcription
  misc_feature: MA Experiment 20001560 PARAMETER Experiment Name: At_Drought_Soil_Dry_P Parameter: Age (day) Value: 28
  misc_feature: MA Experiment 20001560 PARAMETER Experiment Name: At_Drought_Soil_Dry_P Parameter: Organism Value: A. thaliana
  misc_feature: MA Experiment 20001560 PARAMETER Experiment Name: At_Drought_Soil_Dry_P Parameter: Plant Line Value: WS
  misc_feature: MA Experiment 20001560 PARAMETER Experiment Name: At_Drought_Soil_Dry_P Parameter: Post Timepoint (hr) Value: None
  misc_feature: MA Experiment 20001560 PARAMETER Experiment Name: At_Drought_Soil_Dry_P Parameter: Post-Treatment Value: None
  misc_feature: MA Experiment 20001560 PARAMETER Experiment Name: At_Drought_Soil_Dry_P Parameter: Timepoint (day) Value: 14
  misc_feature: MA Experiment 20001560 PARAMETER Experiment Name: At_Drought_Soil_Dry_P Parameter: Treatment Value: Drought vs. No Drought
  misc_feature: MA Experiment ID: 20001904 Result: Up-regulated in Transcription
  misc_feature: MA Experiment 20001904 PARAMETER Experiment Name: At_Drought_Reproduction_P Parameter: Age (day) Value: 37
  misc_feature: MA Experiment 20001904 PARAMETER Experiment Name: At_Drought_Reproduction_P Parameter: Organism Value: A. thaliana
  misc_feature: MA Experiment 20001904 PARAMETER Experiment Name: At_Drought_Reproduction_P Parameter: Plant Line Value: WS
  misc_feature: MA Experiment 20001904 PARAMETER Experiment Name: At_Drought_Reproduction_P Parameter: Timepoint (day) Value: 7
  misc_feature: MA Experiment 20001904 PARAMETER Experiment Name: At_Drought_Reproduction_P Parameter: Tissue Value: Rosettes
  misc_feature: MA Experiment 20001904 PARAMETER Experiment Name: At_Drought_Reproduction_P Parameter: Treatment Value: Drought vs. No Drought
aaaaggaaactattcgtttgctgttctagataaaagcctttaattgagaaaaagaaaatgcctccagctttgacccgttttgcctataaaaggattctctaagatatggactttcctcatcttctcgggtaaacagaatcaactagttttgtttttcctctttcaaaaatgcatttctcttcgtcttcaacatcgtccacttggacaatcttaatcacattgggatgtcttatgcttcatgcatctttgtccgctgctcaactcacccctaccttctacgataggtcatgtcctaatgtcactaacatcgtacgagaaaccattgtaaatgagttaaggtcggaccctcgtatcgctgcgagcatccttcgtcttcacttccacgactgctttgttaatggttgtgacgcatccatcttgttagacaacacgacatcatttcgaacagagaaagatgcgtttggaaacgcaaattcggctcggggatttccagtgattgatagaatgaaagctgcggtggagagggcatgcccaagaaccgtttcatgcgcagatatgctcaccattgcagctcaacaatctgtcactttggcaggaggtccttcttggagggttcctttgggaaggagagacagtttacaagcattcctggaactcgctaatgcaaatcttccagctccattctttacacttccacaacttaaagccagcttcagaaatgttggtctcgatcgtccttctgatctcgttgctctctccggtggtcacacatttggtaaaaatcaatgtcagtttattcttgacagattatacaatttcagcaacacaggtttacccgaccctacactcaacactacttacctccaaactcttcgtggactatgcccccttaatggcaatcgaagtgccttggtagattttgatctacgtacgcctacggttttcgacaacaaatactacgtgaatctcaaagagcgaaaaggtcttatccagagcgaccaagagttgttctctagccccaatgccactgacacaatccccttggtgagagcatatgctgatggcacacaaacattcttcaatgcatttgtggaggcaatgaataggatgggaaacattacaccaactacaggaactcaaggacaaatcagattgaactgtagagttgtgaactccaactctctgctccatgatgtggtggatatcgttgactttgttagctctatgtgagaattgtttacccaatatgtggctacaagaatacatatatattaatgaataaaactctcaagacgtttacttgagaacatttatttt

SEQ ID NO: 103315 - protein, 353 aa, Arabidopsis thaliana; identical to SEQ ID NO: 25028
  peptide (1)..(353): Ceres Seq. ID no. 13612481
  misc_feature (48)..(299): Pfam Name: Peroxidase Pfam Description: Peroxidase
  misc_feature (1)..(353): Homolog of NCBI NO: 15229095 NR Description: peroxidase, putative [Arabidopsis thaliana]
  misc_feature (1)..(353): Homolog of NCBI NO: 480907 NR Description: peroxidase (EC 1.11.1.7) Cb - Arabidopsis
  misc_feature (1)..(353): Homolog of NCBI NO: 15229084 NR Description: peroxidase [Arabidopsis thaliana]
  misc_feature (1)..(353): Homolog of NCBI NO: 129813 NR Description: PEROXIDASE C1A PRECURSOR >gi|2144377|pir||OPRHC
  misc_feature (1)..(353): Homolog of NCBI NO: 168241 NR Description: HRPC1
  misc_feature (1)..(353): Homolog of NCBI NO: 30690396 NR Description: peroxidase, putative [Arabidopsis thaliana] peroxidase [Arabidopsis thaliana] >gi|19347733|gb|AAL86292.1| protein [Arabidopsis thaliana] >gi|22136690|gb|AAM91664.1|
  misc_feature (1)..(353): Homolog of NCBI NO: 25453209 NR Description: Peroxidase 32 precursor (Atperox P32) (PRXR3) >gi|1402908|emb|CAA66959.1| peroxidase [Arabidopsis thaliana] peroxidase ATP16a [Arabidopsis thaliana]
  misc_feature (1)..(353): Homolog of NCBI NO: 129814 NR Description: Peroxidase C1B precursor >gi|81666|pir||S00626
  misc_feature (1)..(353): Homolog of NCBI NO: 21592888 NR Description: peroxidase [Arabidopsis thaliana]
  misc_feature (22)..(353): Homolog of NCBI NO: 129816 NR Description: Peroxidase C1C precursor >gi|81668|pir||S00627

SEQ ID NO: 103316 - protein, 332 aa, Arabidopsis thaliana; identical to SEQ ID NO: 25029
  peptide (1)..(332): Ceres Seq. ID no. 13612482
  misc_feature (27)..(278): Pfam Name: Peroxidase Pfam Description: Peroxidase
  misc_feature (1)..(332): Homolog of NCBI NO: 15229095 NR Description: peroxidase, putative [Arabidopsis thaliana]
  misc_feature (1)..(332): Homolog of NCBI NO: 480907 NR Description: peroxidase (EC 1.11.1.7) Cb - Arabidopsis
  misc_feature (1)..(332): Homolog of NCBI NO: 15229084 NR Description: peroxidase [Arabidopsis thaliana]
  misc_feature (1)..(332): Homolog of NCBI NO: 129813 NR Description: PEROXIDASE C1A PRECURSOR >gi|2144377|pir||OPRHC
  misc_feature (1)..(332): Homolog of NCBI NO: 168241 NR Description: HRPC1
  misc_feature (1)..(332): Homolog of NCBI NO: 30690396 NR Description: peroxidase, putative [Arabidopsis thaliana] peroxidase [Arabidopsis thaliana] >gi|19347733|gb|AAL86292.1| protein [Arabidopsis thaliana] >gi|22136690|gb|AAM91664.1|
  misc_feature (1)..(332): Homolog of NCBI NO: 25453209 NR Description: Peroxidase 32 precursor (Atperox P32) (PRXR3) >gi|1402908|emb|CAA66959.1| peroxidase [Arabidopsis thaliana] peroxidase ATP16a [Arabidopsis thaliana]
  misc_feature (1)..(332): Homolog of NCBI NO: 129814 NR Description: Peroxidase C1B precursor >gi|81666|pir||S00626
  misc_feature (1)..(332): Homolog of NCBI NO: 21592888 NR Description: peroxidase [Arabidopsis thaliana]
  misc_feature (1)..(332): Homolog of NCBI NO: 129816 NR Description: Peroxidase C1C precursor >gi|81668|pir||S00627

SEQ ID NO: 103317 - protein, 241 aa, Arabidopsis thaliana; identical to SEQ ID NO: 25030
  peptide (1)..(241): Ceres Seq. ID no. 13612483
  misc_feature (1)..(187): Pfam Name: Peroxidase Pfam Description: Peroxidase
  misc_feature (1)..(241): Homolog of NCBI NO: 15229095 NR Description: peroxidase, putative [Arabidopsis thaliana]
  misc_feature (1)..(241): Homolog of NCBI NO: 480907 NR Description: peroxidase (EC 1.11.1.7) Cb - Arabidopsis
  misc_feature (1)..(241): Homolog of NCBI NO: 15229084 NR Description: peroxidase [Arabidopsis thaliana]
  misc_feature (1)..(241): Homolog of NCBI NO: 129813 NR Description: PEROXIDASE C1A PRECURSOR >gi|2144377|pir||OPRHC
  misc_feature (1)..(241): Homolog of NCBI NO: 168241 NR Description: HRPC1
  misc_feature (1)..(241): Homolog of NCBI NO: 30690396 NR Description: peroxidase, putative [Arabidopsis thaliana] peroxidase [Arabidopsis thaliana] >gi|19347733|gb|AAL86292.1| protein [Arabidopsis thaliana] >gi|22136690|gb|AAM91664.1|
  misc_feature (1)..(241): Homolog of NCBI NO: 25453209 NR Description: Peroxidase 32 precursor (Atperox P32) (PRXR3) >gi|1402908|emb|CAA66959.1| peroxidase [Arabidopsis thaliana] peroxidase ATP16a [Arabidopsis thaliana]
  misc_feature (1)..(241): Homolog of NCBI NO: 129814 NR Description: Peroxidase C1B precursor >gi|81666|pir||S00626
  misc_feature (1)..(241): Homolog of NCBI NO: 21592888 NR Description: peroxidase [Arabidopsis thaliana]
  misc_feature (1)..(241): Homolog of NCBI NO: 129816 NR Description: Peroxidase C1C precursor >gi|81668|pir||S00627

SEQ ID NO: 103318 - DNA, 2020 bp, Arabidopsis thaliana
  misc_feature (1)..(2020): Ceres Seq. ID no. 13612484
  misc_feature: MA Experiment ID: 108573 Result: Up-regulated in Transcription
  misc_feature: MA Experiment 108573 PARAMETER Experiment Name: At_Drought_cDNA_P Parameter: Timepoint (hr) Value: 6
  misc_feature: MA Experiment 108573 PARAMETER Experiment Name: At_Drought_cDNA_P Parameter: Tissue Value: Aerial
  misc_feature: MA Experiment 108573 PARAMETER Experiment Name: At_Drought_cDNA_P Parameter: Treatment Value: Drought vs. No Drought
  misc_feature: MA Experiment ID: 108574 Result: Up-regulated in Transcription
  misc_feature: MA Experiment 108574 PARAMETER Experiment Name: At_Wounding__cDNA_P Parameter: Timepoint (hr) Value: 1
  misc_feature: MA Experiment 108574 PARAMETER Experiment Name: At_Wounding__cDNA_P Parameter: Tissue Value: Aerial
  misc_feature: MA Experiment 108574 PARAMETER Experiment Name: At_Wounding__cDNA_P Parameter: Treatment Value: Wounding vs. No Wounding
  misc_feature: MA Experiment ID: 108576 Result: Down-regulated in Transcription
  misc_feature: MA Experiment 108576 PARAMETER Experiment Name: At_42deg_Heat_cDNA_P Parameter: Temperature (deg C) Value: 42 vs. 22
  misc_feature: MA Experiment 108576 PARAMETER Experiment Name: At_42deg_Heat_cDNA_P Parameter: Timepoint (hr) Value: 1
  misc_feature: MA Experiment 108576 PARAMETER Experiment Name: At_42deg_Heat_cDNA_P Parameter: Tissue Value: Aerial
  misc_feature: MA Experiment ID: 108577 Result: Down-regulated in Transcription
  misc_feature: MA Experiment 108577 PARAMETER Experiment Name: At_42deg_Heat_cDNA_P Parameter: Temperature (deg C) Value: 42 vs. 22
  misc_feature: MA Experiment 108577 PARAMETER Experiment Name: At_42deg_Heat_cDNA_P Parameter: Timepoint (hr) Value: 6
  misc_feature: MA Experiment 108577 PARAMETER Experiment Name: At_42deg_Heat_cDNA_P Parameter: Tissue Value: Aerial
  misc_feature: MA Experiment ID: 108579 Result: Up-regulated in Transcription
  misc_feature: MA Experiment 108579 PARAMETER Experiment Name: At_4deg_Cold_cDNA_P Parameter: Temperature (deg C) Value: 4 vs. 22
  misc_feature: MA Experiment 108579 PARAMETER Experiment Name: At_4deg_Cold_cDNA_P Parameter: Timepoint (hr) Value: 6
  misc_feature: MA Experiment 108579 PARAMETER Experiment Name: At_4deg_Cold_cDNA_P Parameter: Tissue Value: Aerial
  misc_feature: MA Experiment ID: 20000171 Result: Down-regulated in Transcription
  misc_feature: MA Experiment 20000171 PARAMETER Experiment Name: At_42deg_Heat_P Parameter: Age (day) Value: 14
  misc_feature: MA Experiment 20000171 PARAMETER Experiment Name: At_42deg_Heat_P Parameter: Organism Value: A. thaliana
  misc_feature: MA Experiment 20000171 PARAMETER Experiment Name: At_42deg_Heat_P Parameter: Plant Line Value: WS
  misc_feature: MA Experiment 20000171 PARAMETER Experiment Name: At_42deg_Heat_P Parameter: Temperature (deg C) Value: 42 vs. 22
  misc_feature: MA Experiment 20000171 PARAMETER Experiment Name: At_42deg_Heat_P Parameter: Timepoint (hr) Value: 1
  misc_feature: MA Experiment 20000171 PARAMETER Experiment Name: At_42deg_Heat_P Parameter: Tissue Value: Aerial
  misc_feature: MA Experiment ID: 20000173 Result: Down-regulated in Transcription
  misc_feature: MA Experiment 20000173 PARAMETER Experiment Name: At_42deg_Heat_P Parameter: Age (day) Value: 14
  misc_feature: MA Experiment 20000173 PARAMETER Experiment Name: At_42deg_Heat_P Parameter: Organism Value: A. thaliana
  misc_feature: MA Experiment 20000173 PARAMETER Experiment Name: At_42deg_Heat_P Parameter: Plant Line Value: WS
  misc_feature: MA Experiment 20000173 PARAMETER Experiment Name: At_42deg_Heat_P Parameter: Temperature (deg C) Value: 42 vs. 22
  misc_feature: MA Experiment 20000173 PARAMETER Experiment Name: At_42deg_Heat_P Parameter: Timepoint (hr) Value: 6
  misc_feature: MA Experiment 20000173 PARAMETER Experiment Name: At_42deg_Heat_P Parameter: Tissue Value: Aerial
  misc_feature: MA Experiment ID: 20000180 Result: Up-regulated in Transcription
  misc_feature: MA Experiment 20000180 PARAMETER Experiment Name: At_Germinating_Seeds_P Parameter: Age (hr) Value: 24 vs. 0
  misc_feature: MA Experiment 20000180 PARAMETER Experiment Name: At_Germinating_Seeds_P Parameter: Tissue Value: Germinating Seeds
  misc_feature: MA Experiment ID: 20000184 Result: Up-regulated in Transcription
  misc_feature: MA Experiment 20000184 PARAMETER Experiment Name: At_Shoots__P Parameter: Age (day) Value: 7
  misc_feature: MA Experiment 20000184 PARAMETER Experiment Name: At_Shoots__P Parameter: Tissue Value: Shoots vs. Whole Plant
  misc_feature: MA Experiment ID: 20000234 Result: Up-regulated in Transcription
  misc_feature: MA Experiment 20000234 PARAMETER Experiment Name: At_Siliques_P Parameter: Age (day) Value: 21
  misc_feature: MA Experiment 20000234 PARAMETER Experiment Name: At_Siliques_P Parameter: Organism Value: A. thaliana
  misc_feature: MA Experiment 20000234 PARAMETER Experiment Name: At_Siliques_P Parameter: Plant Line Value: WS
  misc_feature: MA Experiment 20000234 PARAMETER Experiment Name: At_Siliques_P Parameter: Tissue Value: Less Than 5mm Siliques vs. Whole Plant
  misc_feature: MA Experiment ID: 20000264 Result: Up-regulated in Transcription
  misc_feature: MA Experiment 20000264 PARAMETER Experiment Name: At_Open_Flower_P Parameter: Age (day) Value: 21
  misc_feature: MA Experiment 20000264 PARAMETER Experiment Name: At_Open_Flower_P Parameter: Plant Line Value: WS
  misc_feature: MA Experiment 20000264 PARAMETER Experiment Name: At_Open_Flower_P Parameter: Tissue Value: Open Flower vs. Whole Plant
  misc_feature: MA Experiment ID: 20000286 Result: Up-regulated in Transcription
  misc_feature: MA Experiment 20000286 PARAMETER Experiment Name: At_Open_Flower_P Parameter: Age (day) Value: 21
  misc_feature: MA Experiment 20000286 PARAMETER Experiment Name: At_Open_Flower_P Parameter: Plant Line Value: WS
  misc_feature: MA Experiment 20000286 PARAMETER Experiment Name: At_Open_Flower_P Parameter: Tissue Value: Half Open vs. Whole Plant
  misc_feature: MA Experiment ID: 20000436 Result: Up-regulated in Transcription
  misc_feature: MA Experiment 20000436 PARAMETER Experiment Name: At_Drought_P Parameter: Age (day) Value: 7
  misc_feature: MA Experiment 20000436 PARAMETER Experiment Name: At_Drought_P Parameter: Organism Value: A. thaliana
  misc_feature: MA Experiment 20000436 PARAMETER Experiment Name: At_Drought_P Parameter: Plant Line Value: WS
  misc_feature: MA Experiment 20000436 PARAMETER Experiment Name: At_Drought_P Parameter: Timepoint (hr) Value: 12
  misc_feature: MA Experiment 20000436 PARAMETER Experiment Name: At_Drought_P Parameter: Tissue Value: Whole Plant
  misc_feature: MA Experiment 20000436 PARAMETER Experiment Name: At_Drought_P Parameter: Treatment Value: Drought vs. No Drought
  misc_feature: MA Experiment ID: 20000437 Result: Up-regulated in Transcription
  misc_feature: MA Experiment 20000437 PARAMETER Experiment Name: At_Drought_P Parameter: Age (day) Value: 8
  misc_feature: MA Experiment 20000437 PARAMETER Experiment Name: At_Drought_P Parameter: Organism Value: A. thaliana
  misc_feature: MA Experiment 20000437 PARAMETER Experiment Name: At_Drought_P Parameter: Plant Line Value: WS
  misc_feature: MA Experiment 20000437 PARAMETER Experiment Name: At_Drought_P Parameter: Timepoint (hr) Value: 24
  misc_feature: MA Experiment 20000437 PARAMETER Experiment Name: At_Drought_P Parameter: Tissue Value: Whole Plant
  misc_feature: MA Experiment 20000437 PARAMETER Experiment Name: At_Drought_P Parameter: Treatment Value: Drought vs. No Drought
  misc_feature: MA Experiment ID: 20001557 Result: Up-regulated in Transcription
  misc_feature: MA Experiment 20001557 PARAMETER Experiment Name: At_Drought_Soil_Dry_P Parameter: Age (day) Value: 27
  misc_feature: MA Experiment 20001557 PARAMETER Experiment Name: At_Drought_Soil_Dry_P Parameter: Organism Value: A. thaliana
  misc_feature: MA Experiment 20001557 PARAMETER Experiment Name: At_Drought_Soil_Dry_P Parameter: Plant Line Value: WS
  misc_feature: MA Experiment 20001557 PARAMETER Experiment Name: At_Drought_Soil_Dry_P Parameter: Post Timepoint (hr) Value: 3
  misc_feature: MA Experiment 20001557 PARAMETER Experiment Name: At_Drought_Soil_Dry_P Parameter: Post-Treatment Value: Re-Water vs. No Drought
  misc_feature: MA Experiment 20001557 PARAMETER Experiment Name: At_Drought_Soil_Dry_P Parameter: Timepoint (day) Value: 13
  misc_feature: MA Experiment 20001557 PARAMETER Experiment Name: At_Drought_Soil_Dry_P Parameter: Treatment Value: Drought vs. No Drought
  misc_feature: MA Experiment ID: 20001558 Result: Up-regulated in Transcription
  misc_feature: MA Experiment 20001558 PARAMETER Experiment Name: At_Drought_Soil_Dry_P Parameter: Age (day) Value: 27
  misc_feature: MA Experiment 20001558 PARAMETER Experiment Name: At_Drought_Soil_Dry_P Parameter: Organism Value: A. thaliana
  misc_feature: MA Experiment 20001558 PARAMETER Experiment Name: At_Drought_Soil_Dry_P Parameter: Plant Line Value: WS
  misc_feature: MA Experiment 20001558 PARAMETER Experiment Name: At_Drought_Soil_Dry_P Parameter: Post Timepoint (hr) Value: 6
  misc_feature: MA Experiment 20001558 PARAMETER Experiment Name: At_Drought_Soil_Dry_P Parameter: Post-Treatment Value: Re-Water vs. No Drought
  misc_feature: MA Experiment 20001558 PARAMETER Experiment Name: At_Drought_Soil_Dry_P Parameter: Timepoint (day) Value: 13
  misc_feature: MA Experiment 20001558 PARAMETER Experiment Name: At_Drought_Soil_Dry_P Parameter: Treatment Value: Drought vs. No Drought
  misc_feature: MA Experiment ID: 20001906 Result: Down-regulated in Transcription
  misc_feature: MA Experiment 20001906 PARAMETER Experiment Name: At_Drought_Reproduction_P Parameter: Age (day) Value: 35
  misc_feature: MA Experiment 20001906 PARAMETER Experiment Name: At_Drought_Reproduction_P Parameter: Organism Value: A. thaliana
  misc_feature: MA Experiment 20001906 PARAMETER Experiment Name: At_Drought_Reproduction_P Parameter: Plant Line Value: WS
  misc_feature: MA Experiment 20001906 PARAMETER Experiment Name: At_Drought_Reproduction_P Parameter: Timepoint (day) Value: 5
  misc_feature: MA Experiment 20001906 PARAMETER Experiment Name: At_Drought_Reproduction_P Parameter: Tissue Value: Siliques
  misc_feature: MA Experiment 20001906 PARAMETER Experiment Name: At_Drought_Reproduction_P Parameter: Treatment Value: Drought vs. No Drought
  misc_feature: MA Experiment ID: 20001908 Result: Down-regulated in Transcription
  misc_feature: MA Experiment 20001908 PARAMETER Experiment Name: At_Drought_Reproduction_P Parameter: Age (day) Value: 40
  misc_feature: MA Experiment 20001908 PARAMETER Experiment Name: At_Drought_Reproduction_P Parameter: Organism Value: A. thaliana
  misc_feature: MA Experiment 20001908 PARAMETER Experiment Name: At_Drought_Reproduction_P Parameter: Plant Line Value: WS
  misc_feature: MA Experiment 20001908 PARAMETER Experiment Name: At_Drought_Reproduction_P Parameter: Timepoint (day) Value: 10
  misc_feature: MA Experiment 20001908 PARAMETER Experiment Name: At_Drought_Reproduction_P Parameter: Tissue Value: Siliques
  misc_feature: MA Experiment 20001908 PARAMETER Experiment Name: At_Drought_Reproduction_P Parameter: Treatment Value: Drought vs. No Drought
  misc_feature: MA Experiment ID: 20001911 Result: Down-regulated in Transcription
  misc_feature: MA Experiment 20001911 PARAMETER Experiment Name: At_Drought_Reproduction_P Parameter: Age (day) Value: 40
  misc_feature: MA Experiment 20001911 PARAMETER Experiment Name: At_Drought_Reproduction_P Parameter: Organism Value: A. thaliana
  misc_feature: MA Experiment 20001911 PARAMETER Experiment Name: At_Drought_Reproduction_P Parameter: Plant Line Value: WS
  misc_feature: MA Experiment 20001911 PARAMETER Experiment Name: At_Drought_Reproduction_P Parameter: Timepoint (day) Value: 10
  misc_feature: MA Experiment 20001911 PARAMETER Experiment Name: At_Drought_Reproduction_P Parameter: Tissue Value: Flowers
  misc_feature: MA Experiment 20001911 PARAMETER Experiment Name: At_Drought_Reproduction_P Parameter: Treatment Value: Drought vs. No Drought
gtaaatcaaaagagaactaaaccaagaaacaaaatgggatacgaaaggctcggaccatccggagcaactggttcggtcaccacctccactactacagctccaatccttaaccaagtctccacgtcagagcaaccggagaacaacaaccgaagaagcaaaaagaagcttgtcgtatcatcaatcgtcttagccatctcacttatcctcgccgccgcgatcttcgccggagtcagatcacgtctcaagttaaaccaatcagtcccaggcctagctcgtaaaccgagtcaagcaatctctaaagcttgtgagttaactcgtttccccgagttatgcgttgactcactcatggactttcccggctcactcgccgcttcctcctctaaagatctcatccacgtgactgtgaacatgacgctccaccacttcagccacgctctctactcctctgcttccctctccttcgtcgacatgccgccacgtgctcgctcagcttacgactcttgcgtcgagctacttgacgattccgttgacgcgctatcacgcgctctttcctccgtcgtatcctcctccgctaagccgcaagatgttacaacgtggcttagcgcggctttaacaaaccatgacacgtgtactgaaggattcgacggcgtcgacgacggtggagtgaaggatcatatgacggcggcgttacagaatctttctgagcttgttagtaactgtcttgctatattctcggcgagtcacgacggtgacgatttcgccggagttccaatacagaacaggaggctgctgggagtggaggaacgagaagagaaattcccgagatggatgagaccaaaagaacgcgagatactggaaatgccggtatctcagatacaagctgatattatcgtatcgaaagacggtaacggcacgtgcaaaactatatcggaagctatcaagaaagctcctcagaacagtactcgccggataattatctacgtcaaggccggaagatatgaagagaacaacctcaaggtcggtaggaaaaaaattaatttgatgttcgttggagatggcaagggtaaaactgttatttcgggaggcaaaagtatatttgacaacatcactactttccacacggcgtcatttgctgcgaccggagctggatttattgcaagggacatcacattcgaaaactgggccggtccagcgaagcaccaagccgtggctctccgcatcggagctgaccacgcagtgatctaccgatgcaatataatcggttaccaagacacactctacgtccattcaaaccgccaattctttcgtgaatgcgatatctacggtacagtcgattttatctttggtaacgcagccgtcgtactacaaaactgtagcatctacgcacggaagccaatggattttcagaaaaatacaatcacggctcaaaacagaaaagatccgaaccaaaacaccggaatatcaatacatgcgtctagggttcttgcagcatccgatctccaagcgacaaacggtagtacacagacgtatctaggccgaccttggaagctattctctaggacagtgtatatgatgtcgtatatcggtggtcatgtacacacgagaggttggctcgagtggaacacaacatttgctttagatactttgtattatggagagtatttgaacagtggacctgggtcgggtctcgggcaacgtgtgagctggccgggttatcgggtcatcaattcgacggccgaggcaaaccggttcactgtggcagaatttatatacggttcctcgtggttgccatcgaccggagtttcgttcttggccggattaagcatataggtagagaaaaaattgaaatgcttatttttccgatgaattgtttcattcttacggtccttatattaatggacatatcagtattccaatatatatgagtatattttaacttttaattgtaatgtctccactctccagaggtattatttaataatagatgaacactcgaggataattttcccttgttttcttg

SEQ ID NO: 103319 - protein, 609 aa, Arabidopsis thaliana; identical to SEQ ID NO: 38612
  peptide (1)..(609): Ceres Seq. ID no. 13612485
  misc_feature (295)..(594): Pfam Name: Pectinesterase Pfam Description: Pectinesterase
  misc_feature (12)..(608): Homolog of NCBI NO: 15238729 NR Description: pectinesterase family [Arabidopsis thaliana] pectinesterase [Arabidopsis thaliana] putative pectinesterase [Arabidopsis thaliana]
  misc_feature (195)..(609): Homolog of NCBI NO: 34904380 NR Description: unnamed protein product [Oryza sativa (japonica group)] >gi|8467996|dbj|BAA96597.1| unnamed protein product
  misc_feature (48)..(221): Homolog of NCBI NO: 34904380 NR Description: unnamed protein product [Oryza sativa (japonica group)] >gi|8467996|dbj|BAA96597.1| unnamed protein product
  misc_feature (40)..(607): Homolog of NCBI NO: 2098711 NR Description: pectinesterase [Citrus sinensis]
  misc_feature (40)..(607): Homolog of NCBI NO: 6174912 NR Description: Pectinesterase 1.1 precursor (Pectin
  misc_feature (48)..(607): Homolog of NCBI NO: 8671350 NR Description: pectin methylesterase [Nicotiana tabacum]
  misc_feature (48)..(607): Homolog of NCBI NO: 29602797 NR Description: pectin methyl-esterase [Nicotiana benthamiana]
  misc_feature (97)..(608): Homolog of NCBI NO: 34393863 NR Description: putative pectinesterase [Oryza sativa (japonica
  misc_feature (356)..(608): Homolog of NCBI NO: 38566730 NR Description: pectin methylesterase [Cicer arietinum]
  misc_feature (53)..(607): Homolog of NCBI NO: 6689892 NR Description: pectin methyl esterase [Solanum tuberosum]

SEQ ID NO: 103320 - protein, 598 aa, Arabidopsis thaliana; identical to SEQ ID NO: 27422
  peptide (1)..(598): Ceres Seq. ID no. 13612486
  misc_feature (284)..(583): Pfam Name: Pectinesterase Pfam Description: Pectinesterase
  misc_feature (1)..(597): Homolog of NCBI NO: 15238729 NR Description: pectinesterase family [Arabidopsis thaliana] pectinesterase [Arabidopsis thaliana] putative pectinesterase [Arabidopsis thaliana]
  misc_feature (184)..(598): Homolog of NCBI NO: 34904380 NR Description: unnamed protein product [Oryza sativa (japonica group)] >gi|8467996|dbj|BAA96597.1| unnamed protein product
  misc_feature (37)..(210): Homolog of NCBI NO: 34904380 NR Description: unnamed protein product [Oryza sativa (japonica group)] >gi|8467996|dbj|BAA96597.1| unnamed protein product
  misc_feature (29)..(596): Homolog of NCBI NO: 2098711 NR Description: pectinesterase [Citrus sinensis]
  misc_feature (29)..(596): Homolog of NCBI NO: 6174912 NR Description: Pectinesterase 1.1 precursor (Pectin
  misc_feature (37)..(596): Homolog of NCBI NO: 8671350 NR Description: pectin methylesterase [Nicotiana tabacum]
  misc_feature (37)..(596): Homolog of NCBI NO: 29602797 NR Description: pectin methyl-esterase [Nicotiana benthamiana]
  misc_feature (86)..(597): Homolog of NCBI NO: 34393863 NR Description: putative pectinesterase [Oryza sativa (japonica
  misc_feature (345)..(597): Homolog of NCBI NO: 38566730 NR Description: pectin methylesterase [Cicer arietinum]
  misc_feature (42)..(596): Homolog of NCBI NO: 6689892 NR Description: pectin methyl esterase [Solanum tuberosum]

SEQ ID NO: 103321 - protein, 494 aa, Arabidopsis thaliana; identical to SEQ ID NO: 27423
  peptide (1)..(494): Ceres Seq. ID no. 13612487
  misc_feature (180)..(479): Pfam Name: Pectinesterase Pfam Description: Pectinesterase
  misc_feature (1)..(493): Homolog of NCBI NO: 15238729 NR Description: pectinesterase family [Arabidopsis thaliana] pectinesterase [Arabidopsis thaliana] putative pectinesterase [Arabidopsis thaliana]
  misc_feature (80)..(494): Homolog of NCBI NO: 34904380 NR Description: unnamed protein product [Oryza sativa (japonica group)] >gi|8467996|dbj|BAA96597.1| unnamed protein product
  misc_feature (1)..(106): Homolog of NCBI NO: 34904380 NR Description: unnamed protein product [Oryza sativa (japonica group)] >gi|8467996|dbj|BAA96597.1| unnamed protein product
  misc_feature (1)..(492): Homolog of NCBI NO: 2098711 NR Description: pectinesterase [Citrus sinensis]
  misc_feature (1)..(492): Homolog of NCBI NO: 6174912 NR Description: Pectinesterase 1.1 precursor (Pectin
  misc_feature (1)..(492): Homolog of NCBI NO: 8671350 NR Description: pectin methylesterase [Nicotiana tabacum]
  misc_feature (1)..(492): Homolog of NCBI NO: 29602797 NR Description: pectin methyl-esterase [Nicotiana benthamiana]
  misc_feature (1)..(493): Homolog of NCBI NO: 34393863 NR Description: putative pectinesterase [Oryza sativa (japonica
  misc_feature (241)..(493): Homolog of NCBI NO: 38566730 NR Description: pectin methylesterase [Cicer arietinum]
  misc_feature (1)..(492): Homolog of NCBI NO: 6689892 NR Description: pectin methyl esterase [Solanum tuberosum]

SEQ ID NO: 103322 - DNA, 1024 bp, Arabidopsis thaliana
  misc_feature (1)..(1024): Ceres Seq. ID no. 13612499
  misc_feature: MA Experiment ID: 108434 Result: Down-regulated in Transcription
  misc_feature: MA Experiment 108434 PARAMETER Experiment Name: At_Root_Tips_cDNA_P Parameter: Tissue Value: Root Tips
  misc_feature: MA Experiment ID: 108461 Result: Up-regulated in Transcription
  misc_feature: MA Experiment 108461 PARAMETER Experiment Name: At_Germinating_Seeds_cDNA_P Parameter: Age (day) Value: 1 vs. 0
  misc_feature: MA Experiment 108461 PARAMETER Experiment Name: At_Germinating_Seeds_cDNA_P Parameter: Tissue Value: Germinating Seeds
  misc_feature: MA Experiment ID: 108462 Result: Up-regulated in Transcription
  misc_feature: MA Experiment 108462 PARAMETER Experiment Name: At_Germinating_Seeds_cDNA_P Parameter: Age (day) Value: 2 vs. 0
  misc_feature: MA Experiment 108462 PARAMETER Experiment Name: At_Germinating_Seeds_cDNA_P Parameter: Tissue Value: Germinating Seeds
  misc_feature: MA Experiment ID: 108463 Result: Up-regulated in Transcription
  misc_feature: MA Experiment 108463 PARAMETER Experiment Name: At_Germinating_Seeds_cDNA_P Parameter: Age (day) Value: 3 vs. 0
  misc_feature: MA Experiment 108463 PARAMETER Experiment Name: At_Germinating_Seeds_cDNA_P Parameter: Tissue Value: Germinating Seeds
  misc_feature: MA Experiment ID: 108464 Result: Up-regulated in Transcription
  misc_feature: MA Experiment 108464 PARAMETER Experiment Name: At_Germinating_Seeds_cDNA_P Parameter: Age (day) Value: 4 vs. 0
  misc_feature: MA Experiment 108464 PARAMETER Experiment Name: At_Germinating_Seeds_cDNA_P Parameter: Tissue Value: Germinating Seeds
  misc_feature: MA Experiment ID: 108577 Result: Down-regulated in Transcription
  misc_feature: MA Experiment 108577 PARAMETER Experiment Name: At_42deg_Heat_cDNA_P Parameter: Temperature (deg C) Value: 42 vs. 22
  misc_feature: MA Experiment 108577 PARAMETER Experiment Name: At_42deg_Heat_cDNA_P Parameter: Timepoint (hr) Value: 6
  misc_feature: MA Experiment 108577 PARAMETER Experiment Name: At_42deg_Heat_cDNA_P Parameter: Tissue Value: Aerial
  misc_feature: MA Experiment ID: 20000171 Result: Up-regulated in Transcription
  misc_feature: MA Experiment 20000171 PARAMETER Experiment Name: At_42deg_Heat_P Parameter: Age (day) Value: 14
  misc_feature: MA Experiment 20000171 PARAMETER Experiment Name: At_42deg_Heat_P Parameter: Organism Value: A. thaliana
  misc_feature: MA Experiment 20000171 PARAMETER Experiment Name: At_42deg_Heat_P Parameter: Plant Line Value: WS
  misc_feature: MA Experiment 20000171 PARAMETER Experiment Name: At_42deg_Heat_P Parameter: Temperature (deg C) Value: 42 vs. 22
  misc_feature: MA Experiment 20000171 PARAMETER Experiment Name: At_42deg_Heat_P Parameter: Timepoint (hr) Value: 1
  misc_feature: MA Experiment 20000171 PARAMETER Experiment Name: At_42deg_Heat_P Parameter: Tissue Value: Aerial
  misc_feature: MA Experiment ID: 20000185 Result: Down-regulated in Transcription
  misc_feature: MA Experiment 20000185 PARAMETER Experiment Name: At_Roots__P Parameter: Age (day) Value: 7 vs. 21
  misc_feature: MA Experiment 20000185 PARAMETER Experiment Name: At_Roots__P Parameter: Organism Value: A. thaliana
  misc_feature: MA Experiment 20000185 PARAMETER Experiment Name: At_Roots__P Parameter: Tissue Value: Roots vs. Whole Plant
  misc_feature: MA Experiment ID: 20000452 Result: Up-regulated in Transcription
  misc_feature: MA Experiment 20000452 PARAMETER Experiment Name: At_CS6879_Shoots-Roots_P Parameter: Age (day) Value: 14
  misc_feature: MA Experiment 20000452 PARAMETER Experiment Name: At_CS6879_Shoots-Roots_P Parameter: Organism Value: A. thaliana
  misc_feature: MA Experiment 20000452 PARAMETER Experiment Name: At_CS6879_Shoots-Roots_P Parameter: Plant Line Value: CS6879 vs. WS
  misc_feature: MA Experiment 20000452 PARAMETER Experiment Name: At_CS6879_Shoots-Roots_P Parameter: Tissue Value: Shoots
cacttggaaagaatccttcactcactttccctttaagaagcaagtctcctccacttgtacgataccaacatcatcagcatcacaaaaagtatcattatcatcttcatcgaattagatggcaccggtgaagaggagggtgttcaagacaaataatgaaatggcagtggagctggccaaatacacggctgatctttcctccaaattttgcaaagaaagaggagttttcaccgttgttctctccggcggcgacctcatagcctggctctggaaattgttagaagctccttatattgattcaattgagtggtctaagtggcacatcttttgggtcgacgagagggtttgtgcttgggatcatgcggatagcaactataaactcgcttacgatggttttctctccaaggttccagttccagctgaaaacatctacgctatcgataacggactcggggcagaaggcaacgccgagctagcagctgaaaggtacgaggagtgcctcaaacaaaaagtgaaccaaaacataatccgaacgtacaaatcttctggttttccacagttcgatcttcagcttctaggtatgggaccggacggtcacatggcgtctctattccctggacatgctcagatcaatgagaaggtgaaatgggtcacatctataaccgattcacctaagccaccgtcaaaaaggatcacattgactttaccggttatcaattgtgcttcctataatgttatggccgtatgtgataaagagcaggctgattcggttgcggctgctcttaatcataccaaagacttaccagctggtagactaaccgcggatgttgaagtggtttggttccttgaccaagctgctgcgtctaaactccctcatggctggtgctccatcctttgatttaaacgtttatgtttttgtctcactaagtcgtatggtttggtgttttgtaaaccgtgtattgcttaattacttgttatgttgtgtagcaacaccatattgtgatattgatcttggtgactttggttt

SEQ ID NO: 103323 - protein, 259 aa, Arabidopsis thaliana; identical to SEQ ID NO: 39589
  peptide (1)..(259): Ceres Seq. ID no. 13612500
  misc_feature (19)..(254): Pfam Name: Glucosamine-6-phosphate Pfam Description: Glucosamine-6-phosphate
  misc_feature (1)..(259): Homolog of NCBI NO: 15229127 NR Description: 6-phosphogluconolactonase - like protein
  misc_feature (1)..(259): Homolog of NCBI NO: 21536675 NR Description: 6-phosphogluconolactonase-like protein
  misc_feature (5)..(254): Homolog of NCBI NO: 15238523 NR Description: 6-phosphogluconolactonase-related protein
  misc_feature (1)..(251): Homolog of NCBI NO: 21537412 NR Description: 6-phosphogluconolactonase-like protein
  misc_feature (1)..(251): Homolog of NCBI NO: 15238526 NR Description: 6-phosphogluconolactonase-related protein
  misc_feature (5)..(251): Homolog of NCBI NO: 14009294 NR Description: putative 6-phosphogluconolactonase [Brassica
  misc_feature (1)..(251): Homolog of NCBI NO: 21554291 NR Description: 6-phosphogluconolactonase-like protein
  misc_feature (1)..(251): Homolog of NCBI NO: 18420789 NR Description: 6-phosphogluconolactonase-related protein
  misc_feature (5)..(251): Homolog of NCBI NO: 10177901 NR Description: 6-phosphogluconolactonase-like protein
  misc_feature (8)..(251): Homolog of NCBI NO: 28140256 NR Description: putative 6-phosphogluconolactonase [Elaeis

SEQ ID NO: 103324 - protein, 245 aa, Arabidopsis thaliana; identical to SEQ ID NO: 39590
  peptide (1)..(245): Ceres Seq. ID no. 13612501
  misc_feature (5)..(240): Pfam Name: Glucosamine-6-phosphate Pfam Description: Glucosamine-6-phosphate
  misc_feature (1)..(245): Homolog of NCBI NO: 15229127 NR Description: 6-phosphogluconolactonase - like protein
  misc_feature (1)..(245): Homolog of NCBI NO: 21536675 NR Description: 6-phosphogluconolactonase-like protein
  misc_feature (1)..(240): Homolog of NCBI NO: 15238523 NR Description: 6-phosphogluconolactonase-related protein
  misc_feature (1)..(237): Homolog of NCBI NO: 21537412 NR Description: 6-phosphogluconolactonase-like protein
  misc_feature (1)..(237): Homolog of NCBI NO: 15238526 NR Description: 6-phosphogluconolactonase-related protein
  misc_feature (1)..(237): Homolog of NCBI NO: 14009294 NR Description: putative 6-phosphogluconolactonase [Brassica
  misc_feature (1)..(237): Homolog of NCBI NO: 21554291 NR Description: 6-phosphogluconolactonase-like protein
  misc_feature (1)..(237): Homolog of NCBI NO: 18420789 NR Description: 6-phosphogluconolactonase-related protein
  misc_feature (1)..(237): Homolog of NCBI NO: 10177901 NR Description: 6-phosphogluconolactonase-like protein
  misc_feature (1)..(237): Homolog of NCBI NO: 28140256 NR Description: putative 6-phosphogluconolactonase [Elaeis

SEQ ID NO: 103325 - DNA, 1334 bp, Arabidopsis thaliana
  misc_feature (1)..(1334): Ceres Seq. ID no. 13612510
  misc_feature: MA Experiment ID: 108569 Result: Up-regulated in Transcription
  misc_feature: MA Experiment 108569 PARAMETER Experiment Name: At_0.001%_MeJA__cDNA_P Parameter: Timepoint (hr) Value: 6
  misc_feature: MA Experiment 108569 PARAMETER Experiment Name: At_0.001%_MeJA__cDNA_P Parameter: Tissue Value: Aerial
  misc_feature: MA Experiment 108569 PARAMETER Experiment Name: At_0.001%_MeJA__cDNA_P Parameter: Treatment Value: 0.001% MeJA vs. No Treatment
atattaaaccactgtaactgtaatttattgtttcgccgtcccggaatgttcctgttgaaatccattttcgctgattttttttcttccgtctcttcttcagcttcgaccattttcgtcttcttcattcagtgttgagtcctcgtttacctgtgagctcgaagaaagtgacgatcaatgggaaccctaggcagagcattttactcggtcggtttttggatccgtgagactggtcaagctcttgatcgcctcggttgtcgccttcaaggcaaaaattacttccgagaacaactgtcaaggcatcggacactgatgaatgtatttgataaggctccgattgtggacaaggaagcttttgtggcaccaagcgcctcagttattggggacgttcacattggaagaggatcgtccatttggtatggatgcgtattacgaggcgatgtgaacaccgtaagtgttgggtcaggaactaatattcaggacaactcacttgtgcatgtggcaaaatcaaacttaagcgggaaggtgcacccaaccataattggagacaatgtaaccattggtcatagtgctgttttacatggatgtactgttgaggatgagacctttattgggatgggtgcgacacttcttgatggggtcgttgttgaaaagcatgggatggttgctgctggtgcacttgtacgacaaaacaccagaattccttctggagaggtatggggaggaaacccagcaaggttcctcaggaagctcactgatgaggaaattgcttttatctctcagtcagcaacaaactactcaaacctcgcacaggctcacgctgcagagaatgcaaagccattaaatgtgattgagttcgagaaggttctacgcaagaagcatgctctaaaggacgaggagtatgactcaatgctcggaatagtgagagaaactccaccagagcttaacctccctaacaacatactgcctgataaagaaaccaagcgtccttctaatgtgaactgatttttcaggggtatgttttctggccgaagccctacagggtgagatactcaaggggattatgtttcggtctctggtttgaatatggcaggtagagtacattagggtagacggatttacagcttttgaagaagctatgttcaacattttttcatggtttcttagggagtattattgtctaatcaaactttgtatgttatcacttcggtcttttgaacgtaagaatcaagttcatgaaacatgagtgaatattagtctgatgcatgtgcgtatgcaaaaatccatgtgcgcctatgttgctaggcaagcatgaagaataaagatccaaactggat

SEQ ID NO: 103326 - protein, 275 aa, Arabidopsis thaliana
  peptide (1)..(275): Ceres Seq. ID no. 13612511
  misc_feature (70)..(87): Pfam Name: Bacterial transferase hexapeptide (three repeats) Pfam Description: Bacterial transferase hexapeptide (three
  misc_feature (1)..(275): Homolog of NCBI NO: 18394761 NR Description: transferase hexapeptide repeat family
  misc_feature (1)..(275): Homolog of NCBI NO: 21537242 NR Description: unknown [Arabidopsis thaliana]
  misc_feature (39)..(275): Homolog of NCBI NO: 8778427 NR Description: F18O14.34 [Arabidopsis thaliana]
  misc_feature (1)..(264): Homolog of NCBI NO: 15220153 NR Description: transferase hexapeptide repeat family
  misc_feature (1)..(264): Homolog of NCBI NO: 13507025 NR Description: transcription factor APFI [Arabidopsis thaliana]
  misc_feature (1)..(259): Homolog of NCBI NO: 18425082 NR Description: transferase hexapeptide repeat family
  misc_feature (1)..(269): Homolog of NCBI NO: 34904754 NR Description: putative transcription factor APFI [Oryza sativa
  misc_feature (1)..(256): Homolog of NCBI NO: 34902506 NR Description: P0581F09.11 [Oryza sativa (japonica >gi|13486719|dbj|BAB39954.1| contains ESTs to Arabidopsis thaliana chromosome 1, F14P1.8~unknown protein
  misc_feature (46)..(259): Homolog of NCBI NO: 10177532 NR Description: ferripyochelin-binding protein-like [Arabidopsis
  misc_feature (59)..(249): Homolog of NCBI NO: 40218049 NR Description: putative gamma carbonic anhydrase [Chlamydomonas >gi|40218051|gb|AAR82950.1| putative gamma carbonic anhydrase
MGTLGRAFYSVGFWIRETGQALDRLGCRLQGKNYFREQLSRHRTLMNVFDKAPIVDKEAFVAPSASVIGDVHIGRGSSIWYGCVLRGDVNTVSVGSGTNIQDNSLVHVAKSNLSGKVHPTIIGDNVTIGHSAVLHGCTVEDETFIGMGATLLDGVVVEKHGMVAAGALVRQNTRIPSGEVWGGNPARFLRKLTDEEIAFISQSATNYSNLAQAHAAENAKPLNVIEFEKVLRKKHALKDEEYDSMLGIVRETPPELNLPNNILPDKETKRPSNVN

SEQ ID NO: 103327 - protein, 230 aa, Arabidopsis thaliana
  peptide (1)..(230): Ceres Seq. ID no. 13612512
  misc_feature (25)..(42): Pfam Name: Bacterial transferase hexapeptide (three repeats) Pfam Description: Bacterial transferase hexapeptide (three
  misc_feature (1)..(230): Homolog of NCBI NO: 18394761 NR Description: transferase hexapeptide repeat family
  misc_feature (1)..(230): Homolog of NCBI NO: 21537242 NR Description: unknown [Arabidopsis thaliana]
  misc_feature (1)..(230): Homolog of NCBI NO: 8778427 NR Description: F18O14.34 [Arabidopsis thaliana]
  misc_feature (1)..(219): Homolog of NCBI NO: 15220153 NR Description: transferase hexapeptide repeat family
  misc_feature (1)..(219): Homolog of NCBI NO: 13507025 NR Description: transcription factor APFI [Arabidopsis thaliana]
  misc_feature (1)..(214): Homolog of NCBI NO: 18425082 NR Description: transferase hexapeptide repeat family
  misc_feature (1)..(224): Homolog of NCBI NO: 34904754 NR Description: putative transcription factor APFI [Oryza sativa
  misc_feature (1)..(211): Homolog of NCBI NO: 34902506 NR Description: P0581F09.11 [Oryza sativa (japonica >gi|13486719|dbj|BAB39954.1| contains ESTs to Arabidopsis thaliana chromosome 1, F14P1.8~unknown protein
  misc_feature (1)..(214): Homolog of NCBI NO: 10177532 NR Description: ferripyochelin-binding protein-like [Arabidopsis
  misc_feature (14)..(204): Homolog of NCBI NO: 40218049 NR Description: putative gamma carbonic anhydrase [Chlamydomonas >gi|40218051|gb|AAR82950.1| putative gamma carbonic anhydrase
MNVFDKAPIVDKEAFVAPSASVIGDVHIGRGSSIWYGCVLRGDVNTVSVGSGTNIQDNSLVHVAKSNLSGKVHPTIIGDNVTIGHSAVLHGCTVEDETFIGMGATLLDGVVVEKHGMVAAGALVRQNTRIPSGEVWGGNPARFLRKLTDEEIAFISQSATNYSNLAQAHAAENAKPLNVIEFEKVLRKKHALKDEEYDSMLGIVRETPPELNLPNNILPDKETKRPSNVN

SEQ ID NO: 103328 - DNA, 1463 bp, Arabidopsis thaliana
  misc_feature (1)..(1463): Ceres Seq. ID no. 13612517
  misc_feature: MA Experiment ID: 108573 Result: Up-regulated in Transcription
  misc_feature: MA Experiment 108573 PARAMETER Experiment Name: At_Drought_cDNA_P Parameter: Timepoint (hr) Value: 6
  misc_feature: MA Experiment 108573 PARAMETER Experiment Name: At_Drought_cDNA_P Parameter: Tissue Value: Aerial
  misc_feature: MA Experiment 108573 PARAMETER Experiment Name: At_Drought_cDNA_P Parameter: Treatment Value: Drought vs. No Drought
  misc_feature: MA Experiment ID: 108574 Result: Up-regulated in Transcription
  misc_feature: MA Experiment 108574 PARAMETER Experiment Name: At_Wounding__cDNA_P Parameter: Timepoint (hr) Value: 1
  misc_feature: MA Experiment 108574 PARAMETER Experiment Name: At_Wounding__cDNA_P Parameter: Tissue Value: Aerial
  misc_feature: MA Experiment 108574 PARAMETER Experiment Name: At_Wounding__cDNA_P Parameter: Treatment Value: Wounding vs. No Wounding
  misc_feature: MA Experiment ID: 108579 Result: Up-regulated in Transcription
  misc_feature: MA Experiment 108579 PARAMETER Experiment Name: At_4deg_Cold_cDNA_P Parameter: Temperature (deg C) Value: 4 vs. 22
  misc_feature: MA Experiment 108579 PARAMETER Experiment Name: At_4deg_Cold_cDNA_P Parameter: Timepoint (hr) Value: 6
  misc_feature: MA Experiment 108579 PARAMETER Experiment Name: At_4deg_Cold_cDNA_P Parameter: Tissue Value: Aerial
  misc_feature: MA Experiment ID: 20000069 Result: Down-regulated in Transcription
  misc_feature: MA Experiment 20000069 PARAMETER Experiment Name: At_100uM_ABA_Mutants_cDNA_P Parameter: Plant Line Value: CS23
  misc_feature: MA Experiment 20000069 PARAMETER Experiment Name: At_100uM_ABA_Mutants_cDNA_P Parameter: Timepoint (hr) Value: 6
  misc_feature: MA Experiment 20000069 PARAMETER Experiment Name: At_100uM_ABA_Mutants_cDNA_P Parameter: Tissue Value: Aerial
  misc_feature: MA Experiment 20000069 PARAMETER Experiment Name: At_100uM_ABA_Mutants_cDNA_P Parameter: Treatment Value: 100uM ABA vs. No Treatment
  misc_feature: MA Experiment ID: 20000070 Result: Down-regulated in Transcription
  misc_feature: MA Experiment 20000070 PARAMETER Experiment Name: At_100uM_ABA_Mutants_cDNA_P Parameter: Plant Line Value: CS24
  misc_feature: MA Experiment 20000070 PARAMETER Experiment Name: At_100uM_ABA_Mutants_cDNA_P Parameter: Timepoint (hr) Value: 6
  misc_feature: MA Experiment 20000070 PARAMETER Experiment Name: At_100uM_ABA_Mutants_cDNA_P Parameter: Tissue Value: Aerial
  misc_feature: MA Experiment 20000070 PARAMETER Experiment Name: At_100uM_ABA_Mutants_cDNA_P Parameter: Treatment Value: 100uM ABA vs. No Treatment
  misc_feature: MA Experiment ID: 20000071 Result: Down-regulated in Transcription
  misc_feature: MA Experiment 20000071 PARAMETER Experiment Name: At_100uM_ABA_Mutants_cDNA_P Parameter: Plant Line Value: CS8104
  misc_feature: MA Experiment 20000071 PARAMETER Experiment Name: At_100uM_ABA_Mutants_cDNA_P Parameter: Timepoint (hr) Value: 6
  misc_feature: MA Experiment 20000071 PARAMETER Experiment Name: At_100uM_ABA_Mutants_cDNA_P Parameter: Tissue Value: Aerial
  misc_feature: MA Experiment 20000071 PARAMETER Experiment Name: At_100uM_ABA_Mutants_cDNA_P Parameter: Treatment Value: 100uM ABA vs. No Treatment
  misc_feature: MA Experiment ID: 20000086 Result: Down-regulated in Transcription
  misc_feature: MA Experiment 20000086 PARAMETER Experiment Name: At_100uM_ABA_Mutants_cDNA_P Parameter: Plant Line Value: CS22
  misc_feature: MA Experiment 20000086 PARAMETER Experiment Name: At_100uM_ABA_Mutants_cDNA_P Parameter: Timepoint (hr) Value: 6
  misc_feature: MA Experiment 20000086 PARAMETER Experiment Name: At_100uM_ABA_Mutants_cDNA_P Parameter: Tissue Value: Aerial
  misc_feature: MA Experiment 20000086 PARAMETER Experiment Name: At_100uM_ABA_Mutants_cDNA_P Parameter: Treatment Value: 100uM ABA vs. No Treatment
  misc_feature: MA Experiment ID: 20000088 Result: Down-regulated in Transcription
  misc_feature: MA Experiment 20000088 PARAMETER Experiment Name: At_100uM_ABA_Mutants_cDNA_P Parameter: Plant Line Value: Landsberg
  misc_feature: MA Experiment 20000088 PARAMETER Experiment Name: At_100uM_ABA_Mutants_cDNA_P Parameter: Timepoint (hr) Value: 6
  misc_feature: MA Experiment 20000088 PARAMETER Experiment Name: At_100uM_ABA_Mutants_cDNA_P Parameter: Tissue Value: Aerial
  misc_feature: MA Experiment 20000088 PARAMETER Experiment Name: At_100uM_ABA_Mutants_cDNA_P Parameter: Treatment Value: 100uM ABA vs. No Treatment
  misc_feature: MA Experiment ID: 20000089 Result: Down-regulated in Transcription
  misc_feature: MA Experiment ID: 20000090 Result: Down-regulated in Transcription
  misc_feature: MA Experiment ID: 20000111 Result: Up-regulated in Transcription
  misc_feature: MA Experiment 20000111 PARAMETER Experiment Name: At_42deg_Heat_cDNA_P Parameter: Temperature (deg C) Value: 42 vs. 22
  misc_feature: MA Experiment 20000111 PARAMETER Experiment Name: At_42deg_Heat_cDNA_P Parameter: Timepoint (hr) Value: 6
  misc_feature: MA Experiment 20000111 PARAMETER Experiment Name: At_42deg_Heat_cDNA_P Parameter: Tissue Value: Aerial
  misc_feature: MA Experiment ID: 20000211 Result: Up-regulated in Transcription
  misc_feature: MA Experiment 20000211 PARAMETER Experiment Name: At_0.001percent_MeJA__P Parameter: Age (day) Value: 14
  misc_feature: MA Experiment 20000211 PARAMETER Experiment Name: At_0.001percent_MeJA__P Parameter: Organism Value: A. thaliana
  misc_feature: MA Experiment 20000211 PARAMETER Experiment Name: At_0.001percent_MeJA__P Parameter: Plant Line Value: WS
  misc_feature: MA Experiment 20000211 PARAMETER Experiment Name: At_0.001percent_MeJA__P Parameter: Timepoint (hr) Value: 1
  misc_feature: MA Experiment 20000211 PARAMETER Experiment Name: At_0.001percent_MeJA__P Parameter: Tissue Value: Aerial
  misc_feature: MA Experiment 20000211 PARAMETER Experiment Name: At_0.001percent_MeJA__P Parameter: Treatment Value: 0.001percent MeJA vs. No Treatment
  misc_feature: MA Experiment ID: 20000264 Result: Up-regulated in Transcription
  misc_feature: MA Experiment 20000264 PARAMETER Experiment Name: At_Open_Flower_P Parameter: Age (day) Value: 21
  misc_feature: MA Experiment 20000264 PARAMETER Experiment Name: At_Open_Flower_P Parameter: Plant Line Value: WS
  misc_feature: MA Experiment 20000264 PARAMETER Experiment Name: At_Open_Flower_P Parameter: Tissue Value: Open Flower vs. Whole Plant
  misc_feature: MA Experiment ID: 20000265 Result: Up-regulated in Transcription
  misc_feature: MA Experiment 20000265 PARAMETER Experiment Name: At_Open_Flower_P Parameter: Age (day) Value: 21
  misc_feature: MA Experiment 20000265 PARAMETER Experiment Name: At_Open_Flower_P Parameter: Plant Line Value: WS
  misc_feature: MA Experiment 20000265 PARAMETER Experiment Name: At_Open_Flower_P Parameter: Tissue Value: Closed Flower vs. Whole Plant
  misc_feature: MA Experiment ID: 20000286 Result: Up-regulated in Transcription
  misc_feature: MA Experiment 20000286 PARAMETER Experiment Name: At_Open_Flower_P Parameter: Age (day) Value: 21
  misc_feature: MA Experiment 20000286 PARAMETER Experiment Name: At_Open_Flower_P Parameter: Plant Line Value: WS
  misc_feature: MA Experiment 20000286 PARAMETER Experiment Name: At_Open_Flower_P Parameter: Tissue Value: Half Open vs. Whole Plant
  misc_feature: MA Experiment ID: 20000453 Result: Down-regulated in Transcription
  misc_feature: MA Experiment 20000453 PARAMETER Experiment Name: At_100uM_ABA_P Parameter: Age (day) Value: 15
  misc_feature: MA Experiment 20000453 PARAMETER Experiment Name: At_100uM_ABA_P Parameter: Organism Value: A. thaliana
  misc_feature: MA Experiment 20000453 PARAMETER Experiment Name: At_100uM_ABA_P Parameter: Plant Line Value: WS
  misc_feature: MA Experiment 20000453 PARAMETER Experiment Name: At_100uM_ABA_P Parameter: Timepoint (hr) Value: 24
  misc_feature: MA Experiment 20000453 PARAMETER Experiment Name: At_100uM_ABA_P Parameter: Tissue Value: Aerial
  misc_feature: MA Experiment 20000453 PARAMETER Experiment Name: At_100uM_ABA_P Parameter: Treatment Value: 100uM ABA vs. No Treatment
  misc_feature: MA Experiment ID: 20000794 Result: Up-regulated in Transcription
  misc_feature: MA Experiment 20000794 PARAMETER Experiment Name: At_Petals_P Parameter: Age (day) Value: 23-25 days
  misc_feature: MA Experiment 20000794 PARAMETER Experiment Name: At_Petals_P Parameter: Plant Line Value: WS
  misc_feature: MA Experiment 20000794 PARAMETER Experiment Name: At_Petals_P Parameter: Tissue Value: Petals vs. Whole plant
  misc_feature: MA Experiment ID: 20001757 Result: Down-regulated in Transcription
  misc_feature: MA Experiment 20001757 PARAMETER Experiment Name: At_50mM_NH4NO3_L-to-H_P Parameter: Timepoint (hr) Value: 6
  misc_feature: MA Experiment 20001757 PARAMETER Experiment Name: At_50mM_NH4NO3_L-to-H_P Parameter: Tissue Value: Leaf
  misc_feature: MA Experiment 20001757 PARAMETER Experiment Name: At_50mM_NH4NO3_L-to-H_P Parameter: Treatment Value: 50mM NH4NO3 vs 100mM Mannitol
  misc_feature: MA Experiment ID: 20001911 Result: Down-regulated in Transcription
  misc_feature: MA Experiment 20001911 PARAMETER Experiment Name: At_Drought_Reproduction_P Parameter: Age (day) Value: 40
  misc_feature: MA Experiment 20001911 PARAMETER Experiment Name: At_Drought_Reproduction_P Parameter: Organism Value: A. thaliana
  misc_feature: MA Experiment 20001911 PARAMETER Experiment Name: At_Drought_Reproduction_P Parameter: Plant Line Value: WS
  misc_feature: MA Experiment 20001911 PARAMETER Experiment Name: At_Drought_Reproduction_P Parameter: Timepoint (day) Value: 10
  misc_feature: MA Experiment 20001911 PARAMETER Experiment Name: At_Drought_Reproduction_P Parameter: Tissue Value: Flowers
  misc_feature: MA Experiment 20001911 PARAMETER Experiment Name: At_Drought_Reproduction_P Parameter: Treatment Value: Drought vs. No Drought
agagggagagagatggaggtaatgcgagttcttcacatgaacaaaggaaacggtgaaacgagttatgccaagaactccaccgctcagagtaacataatatctctaggcagaagagtaatggacgaggccttgaagaagttaatgatgagcaattcagagatttcgagcattggaatcgccgacttaggctgctcctccggtccgaacagtctcttgtccatctccaacatagttgacacgatccacaacttgtgtcctgacctcgaccgtcctgtccctgagctcagagtctctctgaacgacctccctagcaatgacttcaactacatatgtgcttctttgccagagttttacgaccgggttaataataacaaggagggtttagggttcggtcgtggaggaggagaatcgtgttttgtgtcggccgtcccaggttcgttctacggacgtttgtttcctcgccggagccttcactttgtgcattcttcttctagtttacattggttatctcaggttccatgtcgtgaggcggagaaggaagacaggacaataacagctgatttagaaaacatggggaaaatatacatatcaaagacaagtcctaagagtgcacataaagcttatgctcttcaattccaaactgatttctgggtttttttgagatcgcgatctgaggagttggtcccgggaggccgaatggttttatcgttccttggtagaagatcactggatcccacaaccgaagagagttgctatcaatgggaactcctagctcaagctcttatgtccatggccaaagagggtatcatcgaggaagagaagatcgatgctttcaacgctccttactatgctgcgagctccgaagagttgaaaatggtgatagagaaagaagggtcattttcgatcgataggcttgagataagtccgattgattgggaaggtgggagtatcagtgaggagagttatgaccttgtaataaggtccaaacccgaagccctagctagtggccgaagagtgtctaataccataagagctgtggtcgagccgatgctagaacctactttcggtgaaaatgtgatggacgagctttttgaaaggtatgcaaagatcgtgggagagtacttctatgtaagctcgccacgatacgctattgttattctttcgctcgttagagccggttgatcgtgttataacatatgccaatatacatgtctttgggcctacaatgacatgatttggtagttttctaatcaagcatatgtaatataatttgcttcgagaataaaataataaaataaagtctgatgttacggtagacccttttttttttttttttttcatttacggtagacctatagtattaaaacaaatagaatcagctggttcggaccttgaaatgagagagcttggatgcatgtagacgcattagtcgtgaattattcaaatagaactaccttttgggc

SEQ ID NO: 103329 - protein, 393 aa, Arabidopsis thaliana
  peptide (1)..(393): Ceres Seq. ID no. 13612518
  misc_feature (40)..(391): Pfam Name: SAM dependent carboxyl methyltransferase Pfam Description: SAM dependent carboxyl methyltransferase
  misc_feature (5)..(393): Homolog of NCBI NO: 15223601 NR Description: S-adenosyl-L-methionine:jasmonic acid carboxyl
  misc_feature (5)..(393): Homolog of NCBI NO: 13676829 NR Description: S-adenosyl-L-methionine:jasmonic acid carboxyl
  misc_feature (5)..(393): Homolog of NCBI NO: 6651395 NR Description: floral nectary-specific protein [Brassica rapa
  misc_feature (5)..(171): Homolog of NCBI NO: 25518363 NR Description: hypothetical protein F14P1.3 - Arabidopsis >gi|9795588|gb|AAF98406.1|AC024609_7 Hypothetical protein
  misc_feature (268)..(393): Homolog of NCBI NO: 25518363 NR Description: hypothetical protein F14P1.3 - Arabidopsis >gi|9795588|gb|AAF98406.1|AC024609_7 Hypothetical protein
  misc_feature (138)..(375): Homolog of NCBI NO: 15240823 NR Description: S-adenosyl-L-methionine:carboxyl family [Arabidopsis thaliana] >gi|30102648|gb|AAP21242.1|
  misc_feature (8)..(173): Homolog of NCBI NO: 15240823 NR Description: S-adenosyl-L-methionine:carboxyl family [Arabidopsis thaliana] >gi|30102648|gb|AAP21242.1|
  misc_feature (138)..(375): Homolog of NCBI NO: 8885604 NR Description: S-adenosyl-L-methionine:salicylic acid carboxyl
  misc_feature (13)..(173): Homolog of NCBI NO: 8885604 NR Description: S-adenosyl-L-methionine:salicylic acid carboxyl
  misc_feature (1)..(391): Homolog of NCBI NO: 23957318 NR Description: S-adenosyl-L-methionine:salicylic acid
RGREMEVMRVLHMNKGNGETSYAKNSTAQSNIISLGRRVMDEALKKLMMSNSEISSIGIADLGCSSGPNSLLSISNIVDTIHNLCPDLDRPVPELRVSLNDLPSNDFNYICASLPEFYDRVNNNKEGLGFGRGGGESCFVSAVPGSFYGRLFPRRSLHFVHSSSSLHWLSQVPCREAEKEDRTITADLENMGKIYISKTSPKSAHKAYALQFQTDFWVFLRSRSEELVPGGRMVLSFLGRRSLDPTTEESCYQWELLAQALMSMAKEGIIEEEKIDAFNAPYYAASSEELKMVIEKEGSFSIDRLEISPIDWEGGSISEESYDLVIRSKPEALASGRRVSNTIRAVVEPMLEPTFGENVMDELFERYAKIVGEYFYVSSPRYAIVILSLVRAG

SEQ ID NO: 103330 - protein, 389 aa, Arabidopsis thaliana; identical to SEQ ID NO: 74636
  peptide (1)..(389): Ceres Seq. ID no. 13612519
  misc_feature (36)..(387): Pfam Name: SAM dependent carboxyl methyltransferase Pfam Description: SAM dependent carboxyl methyltransferase
  misc_feature (1)..(389): Homolog of NCBI NO: 15223601 NR Description: S-adenosyl-L-methionine:jasmonic acid carboxyl
  misc_feature (1)..(389): Homolog of NCBI NO: 13676829 NR Description: S-adenosyl-L-methionine:jasmonic acid carboxyl
  misc_feature (1)..(389): Homolog of NCBI NO: 6651395 NR Description: floral nectary-specific protein [Brassica rapa
  misc_feature (1)..(167): Homolog of NCBI NO: 25518363 NR Description: hypothetical protein F14P1.3 - Arabidopsis >gi|9795588|gb|AAF98406.1|AC024609_7 Hypothetical protein
  misc_feature (264)..(389): Homolog of NCBI NO: 25518363 NR Description: hypothetical protein F14P1.3 - Arabidopsis >gi|9795588|gb|AAF98406.1|AC024609_7 Hypothetical protein
  misc_feature (134)..(371): Homolog of NCBI NO: 15240823 NR Description: S-adenosyl-L-methionine:carboxyl family [Arabidopsis thaliana] >gi|30102648|gb|AAP21242.1|
  misc_feature (4)..(169): Homolog of NCBI NO: 15240823 NR Description: S-adenosyl-L-methionine:carboxyl family [Arabidopsis thaliana] >gi|30102648|gb|AAP21242.1|
  misc_feature (134)..(371): Homolog of NCBI NO: 8885604 NR Description: S-adenosyl-L-methionine:salicylic acid carboxyl
  misc_feature (9)..(169): Homolog of NCBI NO: 8885604 NR Description: S-adenosyl-L-methionine:salicylic acid carboxyl
  misc_feature (1)..(387): Homolog of NCBI NO: 23957318 NR Description: S-adenosyl-L-methionine:salicylic acid

SEQ ID NO: 103331 - protein, 386 aa, Arabidopsis thaliana; identical to SEQ ID NO: 74637
  peptide (1)..(386): Ceres Seq. ID no. 13612520
  misc_feature (33)..(384): Pfam Name: SAM dependent carboxyl methyltransferase Pfam Description: SAM dependent carboxyl methyltransferase
  misc_feature (1)..(386): Homolog of NCBI NO: 15223601 NR Description: S-adenosyl-L-methionine:jasmonic acid carboxyl
  misc_feature (1)..(386): Homolog of NCBI NO: 13676829 NR Description: S-adenosyl-L-methionine:jasmonic acid carboxyl
  misc_feature (1)..(386): Homolog of NCBI NO: 6651395 NR Description: floral nectary-specific protein [Brassica rapa
  misc_feature (1)..(164): Homolog of NCBI NO: 25518363 NR Description: hypothetical protein F14P1.3 - Arabidopsis >gi|9795588|gb|AAF98406.1|AC024609_7 Hypothetical protein
  misc_feature (261)..(386): Homolog of NCBI NO: 25518363 NR Description: hypothetical protein F14P1.3 - Arabidopsis >gi|9795588|gb|AAF98406.1|AC024609_7 Hypothetical protein
  misc_feature (131)..(368): Homolog of NCBI NO: 15240823 NR Description: S-adenosyl-L-methionine:carboxyl family [Arabidopsis thaliana] >gi|30102648|gb|AAP21242.1|
  misc_feature (1)..(166): Homolog of NCBI NO: 15240823 NR Description: S-adenosyl-L-methionine:carboxyl family [Arabidopsis thaliana] >gi|30102648|gb|AAP21242.1|
  misc_feature (131)..(368): Homolog of NCBI NO: 8885604 NR Description: S-adenosyl-L-methionine:salicylic acid carboxyl
  misc_feature (6)..(166): Homolog of NCBI NO: 8885604 NR Description: S-adenosyl-L-methionine:salicylic acid carboxyl
  misc_feature (1)..(384): Homolog of NCBI NO: 23957318 NR Description: S-adenosyl-L-methionine:salicylic acid

SEQ ID NO: 103332 - DNA, 1055 bp, Arabidopsis thaliana
  misc_feature (1)..(1055): Ceres Seq. ID no. 13612541
  misc_feature: MA Experiment ID: 108434 Result: Up-regulated in Transcription
  misc_feature: MA Experiment 108434 PARAMETER Experiment Name: At_Root_Tips_cDNA_P Parameter: Tissue Value: Root Tips
  misc_feature: MA Experiment ID: 108462 Result: Up-regulated in Transcription
  misc_feature: MA Experiment 108462 PARAMETER Experiment Name: At_Germinating_Seeds_cDNA_P Parameter: Age (day) Value: 2 vs. 0
  misc_feature: MA Experiment 108462 PARAMETER Experiment Name: At_Germinating_Seeds_cDNA_P Parameter: Tissue Value: Germinating Seeds
  misc_feature: MA Experiment ID: 108463 Result: Up-regulated in Transcription
  misc_feature: MA Experiment 108463 PARAMETER Experiment Name: At_Germinating_Seeds_cDNA_P Parameter: Age (day) Value: 3 vs. 0
  misc_feature: MA Experiment 108463 PARAMETER Experiment Name: At_Germinating_Seeds_cDNA_P Parameter: Tissue Value: Germinating Seeds
  misc_feature: MA Experiment ID: 108464 Result: Up-regulated in Transcription
  misc_feature: MA Experiment 108464 PARAMETER Experiment Name: At_Germinating_Seeds_cDNA_P Parameter: Age (day) Value: 4 vs. 0
  misc_feature: MA Experiment 108464 PARAMETER Experiment Name: At_Germinating_Seeds_cDNA_P Parameter: Tissue Value: Germinating Seeds
  misc_feature: MA Experiment ID: 108561 Result: Up-regulated in Transcription
  misc_feature: MA Experiment 108561 PARAMETER Experiment Name: At_100uM_ABA_cDNA_P Parameter: Timepoint (hr) Value: 6
  misc_feature: MA Experiment 108561 PARAMETER Experiment Name: At_100uM_ABA_cDNA_P Parameter: Tissue Value: Aerial
  misc_feature: MA Experiment 108561 PARAMETER Experiment Name: At_100uM_ABA_cDNA_P Parameter: Treatment Value: 100uM ABA vs. No Treatment
  misc_feature: MA Experiment ID: 108572 Result: Up-regulated in Transcription
  misc_feature: MA Experiment 108572 PARAMETER Experiment Name: At_Drought_cDNA_P Parameter: Timepoint (hr) Value: 1
  misc_feature: MA Experiment 108572 PARAMETER Experiment Name: At_Drought_cDNA_P Parameter: Tissue Value: Aerial
  misc_feature: MA Experiment 108572 PARAMETER Experiment Name: At_Drought_cDNA_P Parameter: Treatment Value: Drought vs. No Drought
  misc_feature: MA Experiment ID: 108573 Result: Up-regulated in Transcription
  misc_feature: MA Experiment 108573 PARAMETER Experiment Name: At_Drought_cDNA_P Parameter: Timepoint (hr) Value: 6
  misc_feature: MA Experiment 108573 PARAMETER Experiment Name: At_Drought_cDNA_P Parameter: Tissue Value: Aerial
  misc_feature: MA Experiment 108573 PARAMETER Experiment Name: At_Drought_cDNA_P Parameter: Treatment Value: Drought vs. No Drought
  misc_feature: MA Experiment ID: 108605 Result: Up-regulated in Transcription
  misc_feature: MA Experiment 108605 PARAMETER Experiment Name: At_100uM_ABA_cDNA_P Parameter: Timepoint (hr) Value: 6
  misc_feature: MA Experiment 108605 PARAMETER Experiment Name: At_100uM_ABA_cDNA_P Parameter: Tissue Value: Aerial
  misc_feature: MA Experiment 108605 PARAMETER Experiment Name: At_100uM_ABA_cDNA_P Parameter: Treatment Value: 100uM ABA vs. No Treatment
  misc_feature: MA Experiment ID: 108607 Result: Up-regulated in Transcription
  misc_feature: MA Experiment 108607 PARAMETER Experiment Name: At_100uM_ABA_cDNA_P Parameter: Timepoint (hr) Value: 4
  misc_feature: MA Experiment 108607 PARAMETER Experiment Name: At_100uM_ABA_cDNA_P Parameter: Tissue Value: Aerial
  misc_feature: MA Experiment 108607 PARAMETER Experiment Name: At_100uM_ABA_cDNA_P Parameter: Treatment Value: 100uM ABA vs. No Treatment
  misc_feature: MA Experiment ID: 108608 Result: Up-regulated in Transcription
  misc_feature: MA Experiment 108608 PARAMETER Experiment Name: At_100uM_ABA_cDNA_P Parameter: Timepoint (hr) Value: 1
  misc_feature: MA Experiment 108608 PARAMETER Experiment Name: At_100uM_ABA_cDNA_P Parameter: Tissue Value: Aerial
  misc_feature: MA Experiment 108608 PARAMETER Experiment Name: At_100uM_ABA_cDNA_P Parameter: Treatment Value: 100uM ABA vs. No Treatment
  misc_feature: MA Experiment ID: 108609 Result: Up-regulated in Transcription
  misc_feature: MA Experiment 108609 PARAMETER Experiment Name: At_100uM_ABA_cDNA_P Parameter: Timepoint (hr) Value: 24
  misc_feature: MA Experiment 108609 PARAMETER Experiment Name: At_100uM_ABA_cDNA_P Parameter: Tissue Value: Aerial
  misc_feature: MA Experiment 108609 PARAMETER Experiment Name: At_100uM_ABA_cDNA_P Parameter: Treatment Value: 100uM ABA vs. No Treatment
  misc_feature: MA Experiment ID: 20000069 Result: Up-regulated in Transcription
  misc_feature: MA Experiment 20000069 PARAMETER Experiment Name: At_100uM_ABA_Mutants_cDNA_P Parameter: Plant Line Value: CS23
  misc_feature: MA Experiment 20000069 PARAMETER Experiment Name: At_100uM_ABA_Mutants_cDNA_P Parameter: Timepoint (hr) Value: 6
  misc_feature: MA Experiment 20000069 PARAMETER Experiment Name: At_100uM_ABA_Mutants_cDNA_P Parameter: Tissue Value: Aerial
  misc_feature: MA Experiment 20000069 PARAMETER Experiment Name: At_100uM_ABA_Mutants_cDNA_P Parameter: Treatment Value: 100uM ABA vs. No Treatment
  misc_feature: MA Experiment ID: 20000070 Result: Up-regulated in Transcription
  misc_feature: MA Experiment 20000070 PARAMETER Experiment Name: At_100uM_ABA_Mutants_cDNA_P Parameter: Plant Line Value: CS24
  misc_feature: MA Experiment 20000070 PARAMETER Experiment Name: At_100uM_ABA_Mutants_cDNA_P Parameter: Timepoint (hr) Value: 6
  misc_feature: MA Experiment 20000070 PARAMETER Experiment Name: At_100uM_ABA_Mutants_cDNA_P Parameter: Tissue Value: Aerial
  misc_feature: MA Experiment 20000070 PARAMETER Experiment Name: At_100uM_ABA_Mutants_cDNA_P Parameter: Treatment Value: 100uM ABA vs. No Treatment
  misc_feature: MA Experiment ID: 20000071 Result: Up-regulated in Transcription
  misc_feature: MA Experiment 20000071 PARAMETER Experiment Name: At_100uM_ABA_Mutants_cDNA_P Parameter: Plant Line Value: CS8104
  misc_feature: MA Experiment 20000071 PARAMETER Experiment Name: At_100uM_ABA_Mutants_cDNA_P Parameter: Timepoint (hr) Value: 6
  misc_feature: MA Experiment 20000071 PARAMETER Experiment Name: At_100uM_ABA_Mutants_cDNA_P Parameter: Tissue Value: Aerial
  misc_feature: MA Experiment 20000071 PARAMETER Experiment Name: At_100uM_ABA_Mutants_cDNA_P Parameter: Treatment Value: 100uM ABA vs. No Treatment
  misc_feature: MA Experiment ID: 20000072 Result: Up-regulated in Transcription
  misc_feature: MA Experiment 20000072 PARAMETER Experiment Name: At_100uM_ABA_Mutants_cDNA_P Parameter: Plant Line Value: CS8105
  misc_feature: MA Experiment 20000072 PARAMETER Experiment Name: At_100uM_ABA_Mutants_cDNA_P Parameter: Timepoint (hr) Value: 6
  misc_feature: MA Experiment 20000072 PARAMETER Experiment Name: At_100uM_ABA_Mutants_cDNA_P Parameter: Tissue Value: Aerial
  misc_feature: MA Experiment 20000072 PARAMETER Experiment Name: At_100uM_ABA_Mutants_cDNA_P Parameter: Treatment Value: 100uM ABA vs. No Treatment
  misc_feature: MA Experiment ID: 20000087 Result: Up-regulated in Transcription
  misc_feature: MA Experiment 20000087 PARAMETER Experiment Name: At_100uM_ABA_Mutants_cDNA_P Parameter: Plant Line Value: WS
  misc_feature: MA Experiment 20000087 PARAMETER Experiment Name: At_100uM_ABA_Mutants_cDNA_P Parameter: Timepoint (hr) Value: 6
  misc_feature: MA Experiment 20000087 PARAMETER Experiment Name: At_100uM_ABA_Mutants_cDNA_P Parameter: Tissue Value: Aerial
  misc_feature: MA Experiment 20000087 PARAMETER Experiment Name: At_100uM_ABA_Mutants_cDNA_P Parameter: Treatment Value: 100uM ABA vs. No Treatment
  misc_feature: MA Experiment ID: 20000117 Result: Up-regulated in Transcription
  misc_feature: MA Experiment 20000117 PARAMETER Experiment Name: At_100uM_ABA_Mutants_cDNA_P Parameter: Plant Line Value: Columbia
  misc_feature: MA Experiment 20000117 PARAMETER Experiment Name: At_100uM_ABA_Mutants_cDNA_P Parameter: Timepoint (hr) Value: 6
  misc_feature: MA Experiment 20000117 PARAMETER Experiment Name: At_100uM_ABA_Mutants_cDNA_P Parameter: Tissue Value: Aerial
  misc_feature: MA Experiment 20000117 PARAMETER Experiment Name: At_100uM_ABA_Mutants_cDNA_P Parameter: Treatment Value: 100uM ABA vs. No Treatment
  misc_feature: MA Experiment ID: 20000166 Result: Up-regulated in Transcription
  misc_feature: MA Experiment 20000166 PARAMETER Experiment Name: At_100uM_ABA_P Parameter: Age (day) Value: 14
  misc_feature: MA Experiment 20000166 PARAMETER Experiment Name: At_100uM_ABA_P Parameter: Organism Value: A. thaliana
  misc_feature: MA Experiment 20000166 PARAMETER Experiment Name: At_100uM_ABA_P Parameter: Plant Line Value: WS
  misc_feature: MA Experiment 20000166 PARAMETER Experiment Name: At_100uM_ABA_P Parameter: Timepoint (hr) Value: 1
  misc_feature: MA Experiment 20000166 PARAMETER Experiment Name: At_100uM_ABA_P Parameter: Tissue Value: Aerial
  misc_feature: MA Experiment 20000166 PARAMETER Experiment Name: At_100uM_ABA_P Parameter: Treatment Value: 100uM ABA vs. No Treatment
  misc_feature: MA Experiment ID: 20000169 Result: Up-regulated in Transcription
  misc_feature: MA Experiment 20000169 PARAMETER Experiment Name: At_100uM_ABA_P Parameter: Age (day) Value: 14
  misc_feature: MA Experiment 20000169 PARAMETER Experiment Name: At_100uM_ABA_P Parameter: Organism Value: A. thaliana
  misc_feature: MA Experiment 20000169 PARAMETER Experiment Name: At_100uM_ABA_P Parameter: Plant Line Value: WS
  misc_feature: MA Experiment 20000169 PARAMETER Experiment Name: At_100uM_ABA_P Parameter: Timepoint (hr) Value: 6
  misc_feature: MA Experiment 20000169 PARAMETER Experiment Name: At_100uM_ABA_P Parameter: Tissue Value: Aerial
  misc_feature: MA Experiment 20000169 PARAMETER Experiment Name: At_100uM_ABA_P Parameter: Treatment Value: 100uM ABA vs. No Treatment
  misc_feature: MA Experiment ID: 20000234 Result: Up-regulated in Transcription
  misc_feature: MA Experiment 20000234 PARAMETER Experiment Name: At_Siliques_P Parameter: Age (day) Value: 21
  misc_feature: MA Experiment 20000234 PARAMETER Experiment Name: At_Siliques_P Parameter: Organism Value: A. thaliana
  misc_feature: MA Experiment 20000234 PARAMETER Experiment Name: At_Siliques_P Parameter: Plant Line Value: WS
  misc_feature: MA Experiment 20000234 PARAMETER Experiment Name: At_Siliques_P Parameter: Tissue Value: Less Than 5mm Siliques vs. Whole Plant
  misc_feature: MA Experiment ID: 20000265 Result: Up-regulated in Transcription
  misc_feature: MA Experiment 20000265 PARAMETER Experiment Name: At_Open_Flower_P Parameter: Age (day) Value: 21
  misc_feature: MA Experiment 20000265 PARAMETER Experiment Name: At_Open_Flower_P Parameter: Plant Line Value: WS
  misc_feature: MA Experiment 20000265 PARAMETER Experiment Name: At_Open_Flower_P Parameter: Tissue Value: Closed Flower vs. Whole Plant
  misc_feature: MA Experiment ID: 20000267 Result: Up-regulated in Transcription
  misc_feature: MA Experiment 20000267 PARAMETER Experiment Name: At_Drought_P Parameter: Age (day) Value: 7
  misc_feature: MA Experiment 20000267 PARAMETER Experiment Name: At_Drought_P Parameter: Organism Value: A. thaliana
  misc_feature: MA Experiment 20000267 PARAMETER Experiment Name: At_Drought_P Parameter: Plant Line Value: WS
  misc_feature: MA Experiment 20000267 PARAMETER Experiment Name: At_Drought_P Parameter: Timepoint (hr) Value: 6
  misc_feature: MA Experiment 20000267 PARAMETER Experiment Name: At_Drought_P Parameter: Tissue Value: Whole Plant
  misc_feature: MA Experiment 20000267 PARAMETER Experiment Name: At_Drought_P Parameter: Treatment Value: Drought vs. No Drought
  misc_feature: MA Experiment ID: 20000268 Result: Up-regulated in Transcription
  misc_feature: MA Experiment 20000268 PARAMETER Experiment Name: At_100mM_NaCl__P Parameter: Age (day) Value: 14
  misc_feature: MA Experiment 20000268 PARAMETER Experiment Name: At_100mM_NaCl__P Parameter: Organism Value: A. thaliana
  misc_feature: MA Experiment 20000268 PARAMETER Experiment Name: At_100mM_NaCl__P Parameter: Plant Line Value: WS
  misc_feature: MA Experiment 20000268 PARAMETER Experiment Name: At_100mM_NaCl__P Parameter: Timepoint (hr) Value: 6
  misc_feature: MA Experiment 20000268 PARAMETER Experiment Name: At_100mM_NaCl__P Parameter: Tissue Value: Whole Plant
  misc_feature: MA Experiment 20000268 PARAMETER Experiment Name: At_100mM_NaCl__P Parameter: Treatment Value: 100mM NaCl vs. No Treatment
  misc_feature: MA Experiment ID: 20000436 Result: Up-regulated in Transcription
  misc_feature: MA Experiment 20000436 PARAMETER Experiment Name: At_Drought_P Parameter: Age (day) Value: 7
  misc_feature: MA Experiment 20000436 PARAMETER Experiment Name: At_Drought_P Parameter: Organism Value: A. thaliana
  misc_feature: MA Experiment 20000436 PARAMETER Experiment Name: At_Drought_P Parameter: Plant Line Value: WS
  misc_feature: MA Experiment 20000436 PARAMETER Experiment Name: At_Drought_P Parameter: Timepoint (hr) Value: 12
  misc_feature: MA Experiment 20000436 PARAMETER Experiment Name: At_Drought_P Parameter: Tissue Value: Whole Plant
  misc_feature: MA Experiment 20000436 PARAMETER Experiment Name: At_Drought_P Parameter: Treatment Value: Drought vs. No Drought
  misc_feature: MA Experiment ID: 20000437 Result: Up-regulated in Transcription
  misc_feature: MA Experiment 20000437 PARAMETER Experiment Name: At_Drought_P Parameter: Age (day) Value: 8
  misc_feature: MA Experiment 20000437 PARAMETER Experiment Name: At_Drought_P Parameter: Organism Value: A. thaliana
  misc_feature: MA Experiment 20000437 PARAMETER Experiment Name: At_Drought_P Parameter: Plant Line Value: WS
  misc_feature: MA Experiment 20000437 PARAMETER Experiment Name: At_Drought_P Parameter: Timepoint (hr) Value: 24
  misc_feature: MA Experiment 20000437 PARAMETER Experiment Name: At_Drought_P Parameter: Tissue Value: Whole Plant
  misc_feature: MA Experiment 20000437 PARAMETER Experiment Name: At_Drought_P Parameter: Treatment Value: Drought vs. No Drought
  misc_feature: MA Experiment ID: 20000453 Result: Up-regulated in Transcription
  misc_feature: MA Experiment 20000453 PARAMETER Experiment Name: At_100uM_ABA_P Parameter: Age (day) Value: 15
  misc_feature: MA Experiment 20000453 PARAMETER Experiment Name: At_100uM_ABA_P Parameter: Organism Value: A. thaliana
  misc_feature: MA Experiment 20000453 PARAMETER Experiment Name: At_100uM_ABA_P Parameter: Plant Line Value: WS
  misc_feature: MA Experiment 20000453 PARAMETER Experiment Name: At_100uM_ABA_P Parameter: Timepoint (hr) Value: 24
  misc_feature: MA Experiment 20000453 PARAMETER Experiment Name: At_100uM_ABA_P Parameter: Tissue Value: Aerial
  misc_feature: MA Experiment 20000453 PARAMETER Experiment Name: At_100uM_ABA_P Parameter: Treatment Value: 100uM ABA vs. No Treatment
  misc_feature: MA Experiment ID: 20000573 Result: Down-regulated in Transcription
  misc_feature: MA Experiment 20000573 PARAMETER Experiment Name: At_100uM_ABA_Mutants__P Parameter: Organism Value: A. thaliana
  misc_feature: MA Experiment 20000573 PARAMETER Experiment Name: At_100uM_ABA_Mutants__P Parameter: Plant Line Value: CS22 vs. Ler wt
  misc_feature: MA Experiment 20000573 PARAMETER Experiment Name: At_100uM_ABA_Mutants__P Parameter: Timepoint (hr) Value: N/A
  misc_feature: MA Experiment 20000573 PARAMETER Experiment Name: At_100uM_ABA_Mutants__P Parameter: Tissue Value: Whole Plant
  misc_feature: MA Experiment 20000573 PARAMETER Experiment Name: At_100uM_ABA_Mutants__P Parameter: Treatment Value: None
  misc_feature: MA Experiment ID: 20000574 Result: Down-regulated in Transcription
  misc_feature: MA Experiment 20000574 PARAMETER Experiment Name: At_100uM_ABA_Mutants__P Parameter: Organism Value: A. thaliana
  misc_feature: MA Experiment 20000574 PARAMETER Experiment Name: At_100uM_ABA_Mutants__P Parameter: Plant Line Value: CS23 vs. Ler wt
  misc_feature: MA Experiment 20000574 PARAMETER Experiment Name: At_100uM_ABA_Mutants__P Parameter: Timepoint (hr) Value: N/A
  misc_feature: MA Experiment 20000574 PARAMETER Experiment Name: At_100uM_ABA_Mutants__P Parameter: Tissue Value: Whole Plant
  misc_feature: MA Experiment 20000574 PARAMETER Experiment Name: At_100uM_ABA_Mutants__P Parameter: Treatment Value: None
  misc_feature: MA Experiment ID: 20000794 Result: Up-regulated in Transcription
  misc_feature: MA Experiment 20000794 PARAMETER Experiment Name: At_Petals_P Parameter: Age (day) Value: 23-25 days
  misc_feature: MA Experiment 20000794 PARAMETER Experiment Name: At_Petals_P Parameter: Plant Line Value: WS
  misc_feature: MA Experiment 20000794 PARAMETER Experiment Name: At_Petals_P Parameter: Tissue Value: Petals vs. Whole plant
  misc_feature: MA Experiment ID: 20001555 Result: Up-regulated in Transcription
  misc_feature: MA Experiment 20001555 PARAMETER Experiment Name: At_Drought_Soil_Dry_P Parameter: Age (day) Value: 24
  misc_feature: MA Experiment 20001555 PARAMETER Experiment Name: At_Drought_Soil_Dry_P Parameter: Organism Value: A. thaliana
  misc_feature: MA Experiment 20001555 PARAMETER Experiment Name: At_Drought_Soil_Dry_P Parameter: Plant Line Value: WS
  misc_feature: MA Experiment 20001555 PARAMETER Experiment Name: At_Drought_Soil_Dry_P Parameter: Post Timepoint (hr) Value: None
  misc_feature: MA Experiment 20001555 PARAMETER Experiment Name: At_Drought_Soil_Dry_P Parameter: Post-Treatment Value: None
  misc_feature: MA Experiment 20001555 PARAMETER Experiment Name: At_Drought_Soil_Dry_P Parameter: Timepoint (day) Value: 10
  misc_feature: MA Experiment 20001555 PARAMETER Experiment Name: At_Drought_Soil_Dry_P Parameter: Treatment Value: Drought vs. No Drought
  misc_feature: MA Experiment ID: 20001556 Result: Up-regulated in Transcription
  misc_feature: MA Experiment 20001556 PARAMETER Experiment Name: At_Drought_Soil_Dry_P Parameter: Age (day) Value: 26
  misc_feature: MA Experiment 20001556 PARAMETER Experiment Name: At_Drought_Soil_Dry_P Parameter: Organism Value: A. thaliana
  misc_feature: MA Experiment 20001556 PARAMETER Experiment Name: At_Drought_Soil_Dry_P Parameter: Plant Line Value: WS
  misc_feature: MA Experiment 20001556 PARAMETER Experiment Name: At_Drought_Soil_Dry_P Parameter: Post Timepoint (hr) Value: None
  misc_feature: MA Experiment 20001556 PARAMETER Experiment Name: At_Drought_Soil_Dry_P Parameter: Post-Treatment Value: None
  misc_feature: MA Experiment 20001556 PARAMETER Experiment Name: At_Drought_Soil_Dry_P Parameter: Timepoint (day) Value: 12
  misc_feature: MA Experiment 20001556 PARAMETER Experiment Name: At_Drought_Soil_Dry_P Parameter: Treatment Value: Drought vs. No Drought
  misc_feature: MA Experiment ID: 20001559 Result: Up-regulated in Transcription
  misc_feature: MA Experiment 20001559 PARAMETER Experiment Name: At_Drought_Soil_Dry_P Parameter: Age (day) Value: 28
  misc_feature: MA Experiment 20001559 PARAMETER Experiment Name: At_Drought_Soil_Dry_P Parameter: Organism Value: A. thaliana
  misc_feature: MA Experiment 20001559 PARAMETER Experiment Name: At_Drought_Soil_Dry_P Parameter: Plant Line Value: WS
  misc_feature: MA Experiment 20001559 PARAMETER Experiment Name: At_Drought_Soil_Dry_P Parameter: Post Timepoint (hr) Value: 29
  misc_feature: MA Experiment 20001559 PARAMETER Experiment Name: At_Drought_Soil_Dry_P Parameter: Post-Treatment Value: Re-Water vs. No Drought
  misc_feature: MA Experiment 20001559 PARAMETER Experiment Name: At_Drought_Soil_Dry_P Parameter: Timepoint (day) Value: 14
  misc_feature: MA Experiment 20001559 PARAMETER Experiment Name: At_Drought_Soil_Dry_P Parameter: Treatment Value: Drought vs. No Drought
  misc_feature: MA Experiment ID: 20001757 Result: Down-regulated in Transcription
  misc_feature: MA Experiment 20001757 PARAMETER Experiment Name: At_50mM_NH4NO3_L-to-H_P Parameter: Timepoint (hr) Value: 6
  misc_feature: MA Experiment 20001757 PARAMETER Experiment Name: At_50mM_NH4NO3_L-to-H_P Parameter: Tissue Value: Leaf
  misc_feature: MA Experiment 20001757 PARAMETER Experiment Name: At_50mM_NH4NO3_L-to-H_P Parameter: Treatment Value: 50mM NH4NO3 vs 100mM Mannitol
  misc_feature: MA Experiment ID: 20001904 Result: Up-regulated in Transcription
  misc_feature: MA Experiment 20001904 PARAMETER Experiment Name: At_Drought_Reproduction_P Parameter: Age (day) Value: 37
  misc_feature: MA Experiment 20001904 PARAMETER Experiment Name: At_Drought_Reproduction_P Parameter: Organism Value: A. thaliana
  misc_feature: MA Experiment 20001904 PARAMETER Experiment Name: At_Drought_Reproduction_P Parameter: Plant Line Value: WS
  misc_feature: MA Experiment 20001904 PARAMETER Experiment Name: At_Drought_Reproduction_P Parameter: Timepoint (day) Value: 7
  misc_feature: MA Experiment 20001904 PARAMETER Experiment Name: At_Drought_Reproduction_P Parameter: Tissue Value: Rosettes
  misc_feature: MA Experiment 20001904 PARAMETER Experiment Name: At_Drought_Reproduction_P Parameter: Treatment Value: Drought vs. No Drought
  misc_feature: MA Experiment ID: 20001905 Result: Up-regulated in Transcription
  misc_feature: MA Experiment 20001905 PARAMETER Experiment Name: At_Drought_Reproduction_P Parameter: Age (day) Value: 40
  misc_feature: MA Experiment 20001905 PARAMETER Experiment Name: At_Drought_Reproduction_P Parameter: Organism Value: A. thaliana
  misc_feature: MA Experiment 20001905 PARAMETER Experiment Name: At_Drought_Reproduction_P Parameter: Plant Line Value: WS
  misc_feature: MA Experiment 20001905 PARAMETER Experiment Name: At_Drought_Reproduction_P Parameter: Timepoint (day) Value: 10
  misc_feature: MA Experiment 20001905 PARAMETER Experiment Name: At_Drought_Reproduction_P Parameter: Tissue Value: Rosettes
  misc_feature: MA Experiment 20001905 PARAMETER Experiment Name: At_Drought_Reproduction_P Parameter: Treatment Value: Drought vs. No Drought
ttaatcacacatttgatctgagcgagggagagagagaaagagatcttgtccgaacgatgaaggcggagaagaatccgattcagtccgtaatggcgtggattcgccggcaaccgccaaaagtaaaggcttttcttggcgtggtaacggcaatgacggtgcttgttctcctcagggtgattgttcatgaacacgacaatcttttcgtcgcttctgaggctgtacatgccgttggtatcgctgttcttatctataagctcacaaaggagaagacttgtgctgggatatctctcaagacacaggagctaacggctttgtttctggctgtgagattgtattgtagctttgtaatggagtttgatcttcatacatttcttgattcagctactttggtgaccactctttgggtcgtttatatgatccgtttcaagcttagacctacttatatggaagataaagacaattttgctatctatttcgtcgtaatcccatgtgctgttctgtctttcttcattcatccatcaacacgtcaccacatcataaacaggatttcttgggcattctgtgtttatcttgaagctgtttcagttcttcctcaattaagagtcatgcagaacactaagattgtggaaccattcactgcacattacgtatttgctttgggaattgctaggttcttgagttgtgcacactggatccttcaggtgttggatacgcgagggcggttactgactgcattagggtctggactgtggcctgtaatggtcctcatctctgaaatagtccaaaccttcattcttgcagatttctgctattactatgttcagagtttaatgggtggacagctcgttcttcgactcccgtctggtgtggtgtaaaaagctctgcgaaaatggagtgcttgagcttgtggagaggtttaatgattagggattttgagacactcgtatgatttaaaagtttttgatagcaaagaagcattaatgttaattcagattttagttgtgatgacgttttgactccacgatcatatgatttgatacacaacgcttacagtt

SEQ ID NO: 103333 - protein, 290 aa, Arabidopsis thaliana
  peptide (1)..(290): Ceres Seq. ID no. 13612542
  misc_feature (65)..(275): Pfam Name: ER lumen protein retaining receptor Pfam Description: ER lumen protein retaining receptor
  misc_feature (19)..(275): Homolog of NCBI NO: 25518365 NR Description: hypothetical protein T20H2.24 - Arabidopsis >gi|8779000|gb|AAF79915.1|AC022472_24 Contains similarity to ER protein retaining receptor from Caenorhabditis elegans gi|6686285
  misc_feature (19)..(290): Homolog of NCBI NO: 15223724 NR Description: ER lumen protein-retaining receptor [Arabidopsis
  misc_feature (19)..(290): Homolog of NCBI NO: 15222871 NR Description: ER lumen protein retaining receptor -related thaliana] >gi|28950707|gb|AAO63277.1| At1g75760 [Arabidopsis
  misc_feature (19)..(290): Homolog of NCBI NO: 9369358 NR Description: F10A5.5 [Arabidopsis thaliana]
  misc_feature (19)..(290): Homolog of NCBI NO: 18420309 NR Description: expressed protein [Arabidopsis thaliana] putative ER lumen protein retaining receptor [Arabidopsis
  misc_feature (23)..(290): Homolog of NCBI NO: 18399619 NR Description: ER lumen protein retaining receptor -related thaliana] >gi|20197720|gb|AAD29797.2| putative ER lumen protein
  misc_feature (23)..(290): Homolog of NCBI NO: 13430654 NR Description: putative ER lumen protein retaining receptor
  misc_feature (23)..(290): Homolog of NCBI NO: 21537286 NR Description: putative ER lumen protein retaining receptor
  misc_feature (23)..(274): Homolog of NCBI NO: 25412019 NR Description: probable ER lumen protein retaining receptor
  misc_feature (26)..(286): Homolog of NCBI NO: 15230808 NR Description: ER lumen protein retaining receptor -related
NHTFDLSEGERERDLVRTMKAEKNPIQSVMAWIRRQPPKVKAFLGVVTAMTVLVLLRVIVHEHDNLFVASEAVHAVGIAVLIYKLTKEKTCAGISLKTQELTALFLAVRLYCSFVMEFDLHTFLDSATLVTTLWVVYMIRFKLRPTYMEDKDNFAIYFVVIPCAVLSFFIHPSTRHHIINRISWAFCVYLEAVSVLPQLRVMQNTKIVEPFTAHYVFALGIARFLSCAHWILQVLDTRGRLLTALGSGLWPVMVLISEIVQTFILADFCYYYVQSLMGGQLVLRLPSGVV

SEQ ID NO: 103334 - protein, 272 aa, Arabidopsis thaliana
  peptide (1)..(272): Ceres Seq. ID no. 13612543
  misc_feature (47)..(257): Pfam Name: ER lumen protein retaining receptor Pfam Description: ER lumen protein retaining receptor
  misc_feature (1)..(257): Homolog of NCBI NO: 25518365 NR Description: hypothetical protein T20H2.24 - Arabidopsis >gi|8779000|gb|AAF79915.1|AC022472_24 Contains similarity to ER protein retaining receptor from Caenorhabditis elegans gi|6686285
  misc_feature (1)..(272): Homolog of NCBI NO: 15223724 NR Description: ER lumen protein-retaining receptor [Arabidopsis
  misc_feature (1)..(272): Homolog of NCBI NO: 15222871 NR Description: ER lumen protein retaining receptor -related thaliana] >gi|28950707|gb|AAO63277.1| At1g75760 [Arabidopsis
  misc_feature (1)..(272): Homolog of NCBI NO: 9369358 NR Description: F10A5.5 [Arabidopsis thaliana]
  misc_feature (1)..(272): Homolog of NCBI NO: 18420309 NR Description: expressed protein [Arabidopsis thaliana] putative ER lumen protein retaining receptor [Arabidopsis
  misc_feature (5)..(272): Homolog of NCBI NO: 18399619 NR Description: ER lumen protein retaining receptor -related thaliana] >gi|20197720|gb|AAD29797.2| putative ER lumen protein
  misc_feature (5)..(272): Homolog of NCBI NO: 13430654 NR Description: putative ER lumen protein retaining receptor
  misc_feature (5)..(272): Homolog of NCBI NO: 21537286 NR Description: putative ER lumen protein retaining receptor
  misc_feature (5)..(256): Homolog of NCBI NO: 25412019 NR Description: probable ER lumen protein retaining receptor
  misc_feature (8)..(268): Homolog of NCBI NO: 15230808 NR Description: ER lumen protein retaining receptor -related
MKAEKNPIQSVMAWIRRQPPKVKAFLGVVTAMTVLVLLRVIVHEHDNLFVASEAVHAVGIAVLIYKLTKEKTCAGISLKTQELTALFLAVRLYCSFVMEFDLHTFLDSATLVTTLWVVYMIRFKLRPTYMEDKDNFAIYFVVIPCAVLSFFIHPSTRHHIINRISWAFCVYLEAVSVLPQLRVMQNTKIVEPFTAHYVFALGIARFLSCAHWILQVLDTRGRLLTALGSGLWPVMVLISEIVQTFILADFCYYYVQSLMGGQLVLRLPSGVV

SEQ ID NO: 103335 - protein, 261 aa, Arabidopsis thaliana
  peptide (1)..(261): Ceres Seq. ID no. 13612544
  misc_feature (36)..(246): Pfam Name: ER lumen protein retaining receptor Pfam Description: ER lumen protein retaining receptor
  misc_feature (1)..(246): Homolog of NCBI NO: 25518365 NR Description: hypothetical protein T20H2.24 - Arabidopsis >gi|8779000|gb|AAF79915.1|AC022472_24 Contains similarity to ER protein retaining receptor from Caenorhabditis elegans gi|6686285
  misc_feature (1)..(261): Homolog of NCBI NO: 15223724 NR Description: ER lumen protein-retaining receptor [Arabidopsis
  misc_feature (1)..(261): Homolog of NCBI NO: 15222871 NR Description: ER lumen protein retaining receptor -related thaliana] >gi|28950707|gb|AAO63277.1| At1g75760 [Arabidopsis
  misc_feature (1)..(261): Homolog of NCBI NO: 9369358 NR Description: F10A5.5 [Arabidopsis thaliana]
  misc_feature (1)..(261): Homolog of NCBI NO: 18420309 NR Description: expressed protein [Arabidopsis thaliana] putative ER lumen protein retaining receptor [Arabidopsis
  misc_feature (1)..(261): Homolog of NCBI NO: 18399619 NR Description: ER lumen protein retaining receptor -related thaliana] >gi|20197720|gb|AAD29797.2| putative ER lumen protein
  misc_feature (1)..(261): Homolog of NCBI NO: 13430654 NR Description: putative ER lumen protein retaining receptor
  misc_feature (1)..(261): Homolog of NCBI NO: 21537286 NR Description: putative ER lumen protein retaining receptor
  misc_feature (1)..(245): Homolog of NCBI NO: 25412019 NR Description: probable ER lumen protein retaining receptor
  misc_feature (1)..(257): Homolog of NCBI NO: 15230808 NR Description: ER lumen protein retaining receptor -related
MAWIRRQPPKVKAFLGVVTAMTVLVLLRVIVHEHDNLFVASEAVHAVGIAVLIYKLTKEKTCAGISLKTQELTALFLAVRLYCSFVMEFDLHTFLDSATLVTTLWVVYMIRFKLRPTYMEDKDNFAIYFVVIPCAVLSFFIHPSTRHHIINRISWAFCVYLEAVSVLPQLRVMQNTKIVEPFTAHYVFALGIARFLSCAHWILQVLDTRGRLLTALGSGLWPVMVLISEIVQTFILADFCYYYVQSLMGGQLVLRLPSGVV

SEQ ID NO: 103336 - DNA, 1391 bp, Arabidopsis thaliana
  misc_feature (1)..(1391): Ceres Seq. ID no. 13612549
  misc_feature: MA Experiment ID: 20000179 Result: Up-regulated in Transcription
  misc_feature: MA Experiment 20000179 PARAMETER Experiment Name: At_Germinating_Seeds_P Parameter: Age (hr) Value: 6 vs. 0
  misc_feature: MA Experiment 20000179 PARAMETER Experiment Name: At_Germinating_Seeds_P Parameter: Tissue Value: Germinating Seeds
  misc_feature: MA Experiment ID: 20000180 Result: Up-regulated in Transcription
  misc_feature: MA Experiment 20000180 PARAMETER Experiment Name: At_Germinating_Seeds_P Parameter: Age (hr) Value: 24 vs. 0
  misc_feature: MA Experiment 20000180 PARAMETER Experiment Name: At_Germinating_Seeds_P Parameter: Tissue Value: Germinating Seeds
  misc_feature: MA Experiment ID: 20000185 Result: Down-regulated in Transcription
  misc_feature: MA Experiment 20000185 PARAMETER Experiment Name: At_Roots__P Parameter: Age (day) Value: 7 vs. 21
  misc_feature: MA Experiment 20000185 PARAMETER Experiment Name: At_Roots__P Parameter: Organism Value: A. thaliana
  misc_feature: MA Experiment 20000185 PARAMETER Experiment Name: At_Roots__P Parameter: Tissue Value: Roots vs. Whole Plant
  misc_feature: MA Experiment ID: 20000439 Result: Down-regulated in Transcription
  misc_feature: MA Experiment 20000439 PARAMETER Experiment Name: At_Roots__P Parameter: Age (day) Value: 14 vs. 21
  misc_feature: MA Experiment 20000439 PARAMETER Experiment Name: At_Roots__P Parameter: Organism Value: A. thaliana
  misc_feature: MA Experiment 20000439 PARAMETER Experiment Name: At_Roots__P Parameter: Tissue Value: Roots vs. Whole Plant
  misc_feature: MA Experiment ID: 20000794 Result: Down-regulated in Transcription
  misc_feature: MA Experiment 20000794 PARAMETER Experiment Name: At_Petals_P Parameter: Age (day) Value: 23-25 days
  misc_feature: MA Experiment 20000794 PARAMETER Experiment Name: At_Petals_P Parameter: Plant Line Value: WS
  misc_feature: MA Experiment 20000794 PARAMETER Experiment Name: At_Petals_P Parameter: Tissue Value: Petals vs. Whole plant
  misc_feature: MA Experiment ID: 20001247 Result: Down-regulated in Transcription
  misc_feature: MA Experiment 20001247 PARAMETER Experiment Name: At_Far-red-induction_P Parameter: Age (day) Value: 7
  misc_feature: MA Experiment 20001247 PARAMETER Experiment Name: At_Far-red-induction_P Parameter: Light Value: Far-red vs. White
  misc_feature: MA Experiment 20001247 PARAMETER Experiment Name: At_Far-red-induction_P Parameter: Organism Value: A. thaliana
  misc_feature: MA Experiment 20001247 PARAMETER Experiment Name: At_Far-red-induction_P Parameter: Plant Line Value: Columbia
  misc_feature: MA Experiment 20001247 PARAMETER Experiment Name: At_Far-red-induction_P Parameter: Timepoint (hr) Value: 1
  misc_feature: MA Experiment 20001247 PARAMETER Experiment Name: At_Far-red-induction_P Parameter: Tissue Value: Whole Plant
  misc_feature: MA Experiment ID: 20001450 Result: Down-regulated in Transcription
  misc_feature: MA Experiment 20001450 PARAMETER Experiment Name: At_Far-red-induction_P Parameter: Age (day) Value: 7
  misc_feature: MA Experiment 20001450 PARAMETER Experiment Name: At_Far-red-induction_P Parameter: Light Value: Far-red vs. White
  misc_feature: MA Experiment 20001450 PARAMETER Experiment Name: At_Far-red-induction_P Parameter: Organism Value: A. thaliana
  misc_feature: MA Experiment 20001450 PARAMETER Experiment Name: At_Far-red-induction_P Parameter: Plant Line Value: Columbia
  misc_feature: MA Experiment 20001450 PARAMETER Experiment Name: At_Far-red-induction_P Parameter: Timepoint (hr) Value: 8
  misc_feature: MA Experiment 20001450 PARAMETER Experiment Name: At_Far-red-induction_P Parameter: Tissue Value: Whole Plant
  misc_feature: MA Experiment ID: 20001451 Result: Down-regulated in Transcription
  misc_feature: MA Experiment 20001451 PARAMETER Experiment Name: At_Far-red-induction_P Parameter: Age (day) Value: 7
  misc_feature: MA Experiment 20001451 PARAMETER Experiment Name: At_Far-red-induction_P Parameter: Light Value: Far-red vs. White
  misc_feature: MA Experiment 20001451 PARAMETER Experiment Name: At_Far-red-induction_P Parameter: Organism Value: A. thaliana
  misc_feature: MA Experiment 20001451 PARAMETER Experiment Name: At_Far-red-induction_P Parameter: Plant Line Value: Columbia
  misc_feature: MA Experiment 20001451 PARAMETER Experiment Name: At_Far-red-induction_P Parameter: Timepoint (hr) Value: 24
  misc_feature: MA Experiment 20001451 PARAMETER Experiment Name: At_Far-red-induction_P Parameter: Tissue Value: Whole Plant
  misc_feature: MA Experiment ID: 20001557 Result: Down-regulated in Transcription
  misc_feature: MA Experiment 20001557 PARAMETER Experiment Name: At_Drought_Soil_Dry_P Parameter: Age (day) Value: 27
  misc_feature: MA Experiment 20001557 PARAMETER Experiment Name: At_Drought_Soil_Dry_P Parameter: Organism Value: A. thaliana
  misc_feature: MA Experiment 20001557 PARAMETER Experiment Name: At_Drought_Soil_Dry_P Parameter: Plant Line Value: WS
  misc_feature: MA Experiment 20001557 PARAMETER Experiment Name: At_Drought_Soil_Dry_P Parameter: Post Timepoint (hr) Value: 3
  misc_feature: MA Experiment 20001557 PARAMETER Experiment Name: At_Drought_Soil_Dry_P Parameter: Post-Treatment Value: Re-Water vs. No Drought
  misc_feature: MA Experiment 20001557 PARAMETER Experiment Name: At_Drought_Soil_Dry_P Parameter: Timepoint (day) Value: 13
  misc_feature: MA Experiment 20001557 PARAMETER Experiment Name: At_Drought_Soil_Dry_P Parameter: Treatment Value: Drought vs. No Drought
  misc_feature: MA Experiment ID: 20001906 Result: Down-regulated in Transcription
  misc_feature: MA Experiment 20001906 PARAMETER Experiment Name: At_Drought_Reproduction_P Parameter: Age (day) Value: 35
  misc_feature: MA Experiment 20001906 PARAMETER Experiment Name: At_Drought_Reproduction_P Parameter: Organism Value: A. thaliana
  misc_feature: MA Experiment 20001906 PARAMETER Experiment Name: At_Drought_Reproduction_P Parameter: Plant Line Value: WS
  misc_feature: MA Experiment 20001906 PARAMETER Experiment Name: At_Drought_Reproduction_P Parameter: Timepoint (day) Value: 5
  misc_feature: MA Experiment 20001906 PARAMETER Experiment Name: At_Drought_Reproduction_P Parameter: Tissue Value: Siliques
  misc_feature: MA Experiment 20001906 PARAMETER Experiment Name: At_Drought_Reproduction_P Parameter: Treatment Value: Drought vs. No Drought
  misc_feature: MA Experiment ID: 20001908 Result: Down-regulated in Transcription
  misc_feature: MA Experiment 20001908 PARAMETER Experiment Name: At_Drought_Reproduction_P Parameter: Age (day) Value: 40
  misc_feature: MA Experiment 20001908 PARAMETER Experiment Name: At_Drought_Reproduction_P Parameter: Organism Value: A. thaliana
  misc_feature: MA Experiment 20001908 PARAMETER Experiment Name: At_Drought_Reproduction_P Parameter: Plant Line Value: WS
  misc_feature: MA Experiment 20001908 PARAMETER Experiment Name: At_Drought_Reproduction_P Parameter: Timepoint (day) Value: 10
  misc_feature: MA Experiment 20001908 PARAMETER Experiment Name: At_Drought_Reproduction_P Parameter: Tissue Value: Siliques
  misc_feature: MA Experiment 20001908 PARAMETER Experiment Name: At_Drought_Reproduction_P Parameter: Treatment Value: Drought vs. No Drought
acgagatactctcttcttaaaacctcatccacccaaacacaaatgtcttgtaatccttctcttatctttctccttgtgattcctttttatattcctctgatattttctctcagtttgatctcatttgctctgcaatggcgactaccatgaatgctgctgtttctctcacatcttcaaactcttcttcttttcccgctacaagttgtgccattgctcctgaaaggatcaggtttactaagggtgctttttactacaaaagcaacaatgtagtgacaggtaaaagagtgttttccataaaagcacaaatcacaacagaaacagatactcctactcctgcaaagaaagtagagaaagtgtcaaagaagaacgaggaaggtgtgattgttaacaggtacagaccaaaagagccttacactggaaaatgccttctcaacaccaaaatcacagctgatgatgctcctggagagacctggcacatggttttcagccatcaaggagaaatcccgtacagagaaggacaatctgttggtgtgattgcagatggaattgacaagaatggaaagcctcacaaggtcagactttactccattgcaagcagcgctcttggagatctcggcaattctgaaaccgtttctttgtgtgttaaaagacttgtttatactaatgaccaaggagagactgttaaaggagtttgctcaaatttcttgtgtgatttggcacccggaagtgatgttaagctgactggtcctgtaggcaaagaaatgcttatgccaaaggatccaaacgccaccgttattatgcttgccacagggacaggaattgctcctttcaggtctttcttatggaagatgttctttgagaaacatgatgactacaagttcaatggcttagcttggttgttcttgggtgtaccaaccactagctctttgctctaccaagaggagtttgataagatgaaagcaaaggcccccgagaacttcagggtggattacgcgataagcagagaacaagcgaacgataaaggagagaaaatgtatatccagactcggatggcgcaatacgcagctgagttatgggagttgttgaagaaagacaacacttttgtttacatgtgtggactcaagggaatggagaaaggaattgatgacattatggtctcattggctgcaaatgacggtattgactggtttgattacaagaagcagttgaagaaggcagagcaatggaacgttgaagtctactgatcaaaaagcctttgacatttctgtagcaaagtatagctgaacaaaactgtaattttcgcttctgaatttctgtattttgaagataagttttttagatatgttatactaaaaaaagagttctttaatcattatcatttacttcttccc

SEQ ID NO: 103337 - protein, 369 aa, Arabidopsis thaliana; identical to SEQ ID NO: 31087
  peptide (1)..(369): Ceres Seq. ID no. 13612550
  misc_feature (217)..(339): Pfam Name: Oxidoreductase NAD-binding domain Pfam Description: Oxidoreductase NAD-binding domain
  misc_feature (1)..(369): Homolog of NCBI NO: 15223753 NR Description: ferredoxin--NADP(+) reductase (adrenodoxin putative [Arabidopsis thaliana] >gi|17065326|gb|AAL32817.1| protein [Arabidopsis thaliana] >gi|21387157|gb|AAM47982.1|
  misc_feature (1)..(248): Homolog of NCBI NO: 25285862 NR Description: hypothetical protein T20H2.20 - Arabidopsis
  misc_feature (269)..(369): Homolog of NCBI NO: 25285862 NR Description: hypothetical protein T20H2.20 - Arabidopsis
  misc_feature (1)..(369): Homolog of NCBI NO: 6899972 NR Description: chloroplast ferredoxin-NADP+ oxidoreductase
  misc_feature (1)..(369): Homolog of NCBI NO: 729477 NR Description: Ferredoxin--NADP reductase, chloroplast precursor
  misc_feature (1)..(369): Homolog of NCBI NO: 3913651 NR Description: Ferredoxin--NADP reductase, leaf-type isozyme,
  misc_feature (1)..(369): Homolog of NCBI NO: 729479 NR Description: Ferredoxin--NADP reductase, chloroplast precursor
  misc_feature (1)..(369): Homolog of NCBI NO: 170111 NR Description: ferredoxin-NADP oxidoreductase
  misc_feature (1)..(369): Homolog of NCBI NO: 119905 NR Description: Ferredoxin--NADP reductase, leaf isozyme,
  misc_feature (1)..(369): Homolog of NCBI NO: 119906 NR Description: Ferredoxin--NADP reductase, chloroplast precursor

SEQ ID NO: 103338 - protein, 365 aa, Arabidopsis thaliana; identical to SEQ ID NO: 31088
  peptide (1)..(365): Ceres Seq. ID no. 13612551
  misc_feature (213)..(335): Pfam Name: Oxidoreductase NAD-binding domain Pfam Description: Oxidoreductase NAD-binding domain
  misc_feature (1)..(365): Homolog of NCBI NO: 15223753 NR Description: ferredoxin--NADP(+) reductase (adrenodoxin putative [Arabidopsis thaliana] >gi|17065326|gb|AAL32817.1| protein [Arabidopsis thaliana] >gi|21387157|gb|AAM47982.1|
  misc_feature (1)..(244): Homolog of NCBI NO: 25285862 NR Description: hypothetical protein T20H2.20 - Arabidopsis
  misc_feature (265)..(365): Homolog of NCBI NO: 25285862 NR Description: hypothetical protein T20H2.20 - Arabidopsis
  misc_feature (1)..(365): Homolog of NCBI NO: 6899972 NR Description: chloroplast ferredoxin-NADP+ oxidoreductase
  misc_feature (1)..(365): Homolog of NCBI NO: 729477 NR Description: Ferredoxin--NADP reductase, chloroplast precursor
  misc_feature (1)..(365): Homolog of NCBI NO: 3913651 NR Description: Ferredoxin--NADP reductase, leaf-type isozyme,
  misc_feature (1)..(365): Homolog of NCBI NO: 729479 NR Description: Ferredoxin--NADP reductase, chloroplast precursor
  misc_feature (1)..(365): Homolog of NCBI NO: 170111 NR Description: ferredoxin-NADP oxidoreductase
  misc_feature (1)..(365): Homolog of NCBI NO: 119905 NR Description: Ferredoxin--NADP reductase, leaf isozyme,
  misc_feature (1)..(365): Homolog of NCBI NO: 119906 NR Description: Ferredoxin--NADP reductase, chloroplast precursor

SEQ ID NO: 103339 - protein, 255 aa, Arabidopsis thaliana; identical to SEQ ID NO: 31089
  peptide (1)..(255): Ceres Seq. ID no. 13612552
  misc_feature (103)..(225): Pfam Name: Oxidoreductase NAD-binding domain Pfam Description: Oxidoreductase NAD-binding domain
  misc_feature (1)..(255): Homolog of NCBI NO: 15223753 NR Description: ferredoxin--NADP(+) reductase (adrenodoxin putative [Arabidopsis thaliana] >gi|17065326|gb|AAL32817.1| protein [Arabidopsis thaliana] >gi|21387157|gb|AAM47982.1|
  misc_feature (1)..(134): Homolog of NCBI NO: 25285862 NR Description: hypothetical protein T20H2.20 - Arabidopsis
  misc_feature (155)..(255): Homolog of NCBI NO: 25285862 NR Description: hypothetical protein T20H2.20 - Arabidopsis
  misc_feature (1)..(255): Homolog of NCBI NO: 6899972 NR Description: chloroplast ferredoxin-NADP+ oxidoreductase
  misc_feature (1)..(255): Homolog of NCBI NO: 729477 NR Description: Ferredoxin--NADP reductase, chloroplast precursor
  misc_feature (1)..(255): Homolog of NCBI NO: 3913651 NR Description: Ferredoxin--NADP reductase, leaf-type isozyme,
  misc_feature (1)..(255): Homolog of NCBI NO: 729479 NR Description: Ferredoxin--NADP reductase, chloroplast precursor
  misc_feature (1)..(255): Homolog of NCBI NO: 170111 NR Description: ferredoxin-NADP oxidoreductase
  misc_feature (1)..(255): Homolog of NCBI NO: 119905 NR Description: Ferredoxin--NADP reductase, leaf isozyme,
  misc_feature (1)..(255): Homolog of NCBI NO: 119906 NR Description: Ferredoxin--NADP reductase, chloroplast precursor

SEQ ID NO: 103340 - DNA, 1334 bp, Arabidopsis thaliana
  misc_feature (1)..(1334): Ceres Seq. ID no. 13612560
  misc_feature: MA Experiment ID: 108434 Result: Down-regulated in Transcription
  misc_feature: MA Experiment 108434 PARAMETER Experiment Name: At_Root_Tips_cDNA_P Parameter: Tissue Value: Root Tips
  misc_feature: MA Experiment ID: 108462 Result: Down-regulated in Transcription
  misc_feature: MA Experiment 108462 PARAMETER Experiment Name: At_Germinating_Seeds_cDNA_P Parameter: Age (day) Value: 2 vs. 0
  misc_feature: MA Experiment 108462 PARAMETER Experiment Name: At_Germinating_Seeds_cDNA_P Parameter: Tissue Value: Germinating Seeds
  misc_feature: MA Experiment ID: 20001451 Result: Down-regulated in Transcription
  misc_feature: MA Experiment 20001451 PARAMETER Experiment Name: At_Far-red-induction_P Parameter: Age (day) Value: 7
  misc_feature: MA Experiment 20001451 PARAMETER Experiment Name: At_Far-red-induction_P Parameter: Light Value: Far-red vs. White
  misc_feature: MA Experiment 20001451 PARAMETER Experiment Name: At_Far-red-induction_P Parameter: Organism Value: A. thaliana
  misc_feature: MA Experiment 20001451 PARAMETER Experiment Name: At_Far-red-induction_P Parameter: Plant Line Value: Columbia
  misc_feature: MA Experiment 20001451 PARAMETER Experiment Name: At_Far-red-induction_P Parameter: Timepoint (hr) Value: 24
  misc_feature: MA Experiment 20001451 PARAMETER Experiment Name: At_Far-red-induction_P Parameter: Tissue Value: Whole Plant
attagaaggaaaaatcatttatgagtgaaatagaaatttgatatctctttattagtttctgcatctcgaggggtttttgggattctctgattcgatcgagttctatttgtcgttgtgtacaacatctcgggtggatctttgttgatggcgaaactgagacactcgcgatttcaagcgaggaaatggtcgacattgatgctggttctgtttatgttgtttatgttaacgattgttctcttaatgcttttggctttcggagttttctctcttcctattaacaacgatgaatcctctcctatcgatctctcttatttccgacgagctgccactgagagaagtgaaggacttgggaagagaggagaccagtggactgaagtgctttcttgggaacctagagcttttgtctaccacaatttcttgtcgaaggaagaatgtgaatatttaatcagtcttgcaaaaccacatatggtgaagtcaactgttgtagatagcgaaaccggcaagagcaaagatagcagggtgcgaacaagctcagggactttccttaggagaggaagggacaaaatcattaagaccattgagaaaagaatagcagattacacctttattcctgcagatcatggtgaaggacttcaagttcttcactacgaagcagggcaaaagtatgaaccacactatgattattttgttgatgagttcaacactaaaaatggaggtcaacggatggctacaatgcttatgtatctgtcggatgttgaggaaggcggtgaaacagtgtttcctgctgccaatatgaattttagttctgtaccatggtataatgagctctctgagtgtgggaaaaagggactttccgtaaagccgagaatgggtgatgcattgcttttctggagcatgaggcctgatgctacactagatcctacaagtttgcatggtggatgtcctgtgattagagggaacaagtggtcatctaccaaatggatgcatgttggcgagtacaaaatctagcgtgtttggtttctggacagtaaactgtttcctttcatggtggatgggatgcaaagttggaactagaaattacagagagttgatgtttgttttttccctgcggctcggtgcattccttgctttgatgggattcaaggtttatcattagagaataccaaaagatagagattttgttagagtaaattaggatggcttagagtgactcttactcattggtatacccataaaggtcttgtgtctttgaacaagagttgtgaattacatagttttgtggtattcttttgttttgtttgtgattagaaacataatcaaattaaaaattgtta

SEQ ID NO: 103341 - protein, 287 aa, Arabidopsis thaliana
  peptide (1)..(287): Ceres Seq. ID no. 13612561
  misc_feature (159)..(282): Pfam Name: 2OG-Fe(II) oxygenase superfamily Pfam Description: 2OG-Fe(II) oxygenase superfamily
  misc_feature (1)..(287): Homolog of NCBI NO: 18394842 NR Description: oxidoreductase, 2OG-Fe(II) oxygenase family
  misc_feature (1)..(287): Homolog of NCBI NO: 21537370 NR Description: putative prolyl 4-hydroxylase, alpha subunit
  misc_feature (5)..(287): Homolog of NCBI NO: 15227885 NR Description: oxidoreductase, 2OG-Fe(II) oxygenase family
  misc_feature (5)..(287): Homolog of NCBI NO: 21593091 NR Description: putative prolyl 4-hydroxylase, alpha subunit
  misc_feature (1)..(264): Homolog of NCBI NO: 15239240 NR Description: oxidoreductase, 2OG-Fe(II) oxygenase family
  misc_feature (16)..(269): Homolog of NCBI NO: 37535718 NR Description: putative prolyl 4-hydroxylase, alpha subunit
  misc_feature (5)..(264): Homolog of NCBI NO: 7488226 NR Description: procollagen-proline dioxygenase alpha chain
  misc_feature (125)..(264): Homolog of NCBI NO: 15233341 NR Description: oxidoreductase, 2OG-Fe(II) oxygenase family
  misc_feature (3)..(128): Homolog of NCBI NO: 15233341 NR Description: oxidoreductase, 2OG-Fe(II) oxygenase family
  misc_feature (79)..(285): Homolog of NCBI NO: 29150365 NR Description: putative oxidoreductase [Oryza sativa (japonica
MAKLRHSRFQARKWSTLMLVLFMLFMLTIVLLMLLAFGVFSLPINNDESSPIDLSYFRRAATERSEGLGKRGDQWTEVLSWEPRAFVYHNFLSKEECEYLISLAKPHMVKSTVVDSETGKSKDSRVRTSSGTFLRRGRDKIIKTIEKRIADYTFIPADHGEGLQVLHYEAGQKYEPHYDYFVDEFNTKNGGQRMATMLMYLSDVEEGGETVFPAANMNFSSVPWYNELSECGKKGLSVKPRMGDALLFWSMRPDATLDPTSLHGGCPVIRGNKWSSTKWMHVGEYKI

SEQ ID NO: 103342 - protein, 270 aa, Arabidopsis thaliana
  peptide (1)..(270): Ceres Seq. ID no. 13612562
  misc_feature (142)..(265): Pfam Name: 2OG-Fe(II) oxygenase superfamily Pfam Description: 2OG-Fe(II) oxygenase superfamily
  misc_feature (1)..(270): Homolog of NCBI NO: 18394842 NR Description: oxidoreductase, 2OG-Fe(II) oxygenase family
  misc_feature (1)..(270): Homolog of NCBI NO: 21537370 NR Description: putative prolyl 4-hydroxylase, alpha subunit
  misc_feature (1)..(270): Homolog of NCBI NO: 15227885 NR Description: oxidoreductase, 2OG-Fe(II) oxygenase family
  misc_feature (1)..(270): Homolog of NCBI NO: 21593091 NR Description: putative prolyl 4-hydroxylase, alpha subunit
  misc_feature (1)..(247): Homolog of NCBI NO: 15239240 NR Description: oxidoreductase, 2OG-Fe(II) oxygenase family
  misc_feature (1)..(252): Homolog of NCBI NO: 37535718 NR Description: putative prolyl 4-hydroxylase, alpha subunit
  misc_feature (1)..(247): Homolog of NCBI NO: 7488226 NR Description: procollagen-proline dioxygenase alpha chain
  misc_feature (108)..(247): Homolog of NCBI NO: 15233341 NR Description: oxidoreductase, 2OG-Fe(II) oxygenase family
  misc_feature (1)..(111): Homolog of NCBI NO: 15233341 NR Description: oxidoreductase, 2OG-Fe(II) oxygenase family
  misc_feature (62)..(268): Homolog of NCBI NO: 29150365 NR Description: putative oxidoreductase [Oryza sativa (japonica
MLVLFMLFMLTIVLLMLLAFGVFSLPINNDESSPIDLSYFRRAATERSEGLGKRGDQWTEVLSWEPRAFVYHNFLSKEECEYLISLAKPHMVKSTVVDSETGKSKDSRVRTSSGTFLRRGRDKIIKTIEKRIADYTFIPADHGEGLQVLHYEAGQKYEPHYDYFVDEFNTKNGGQRMATMLMYLSDVEEGGETVFPAANMNFSSVPWYNELSECGKKGLSVKPRMGDALLFWSMRPDATLDPTSLHGGCPVIRGNKWSSTKWMHVGEYKI

SEQ ID NO: 103343 - protein, 265 aa, Arabidopsis thaliana
  peptide (1)..(265): Ceres Seq. ID no. 13612563
  misc_feature (137)..(260): Pfam Name: 2OG-Fe(II) oxygenase superfamily Pfam Description: 2OG-Fe(II) oxygenase superfamily
  misc_feature (1)..(265): Homolog of NCBI NO: 18394842 NR Description: oxidoreductase, 2OG-Fe(II) oxygenase family
  misc_feature (1)..(265): Homolog of NCBI NO: 21537370 NR Description: putative prolyl 4-hydroxylase, alpha subunit
  misc_feature (1)..(265): Homolog of NCBI NO: 15227885 NR Description: oxidoreductase, 2OG-Fe(II) oxygenase family
  misc_feature (1)..(265): Homolog of NCBI NO: 21593091 NR Description: putative prolyl 4-hydroxylase, alpha subunit
  misc_feature (1)..(242): Homolog of NCBI NO: 15239240 NR Description: oxidoreductase, 2OG-Fe(II) oxygenase family
  misc_feature (1)..(247): Homolog of NCBI NO: 37535718 NR Description: putative prolyl 4-hydroxylase, alpha subunit
  misc_feature (1)..(242): Homolog of NCBI NO: 7488226 NR Description: procollagen-proline dioxygenase alpha chain
  misc_feature (103)..(242): Homolog of NCBI NO: 15233341 NR Description: oxidoreductase, 2OG-Fe(II) oxygenase family
  misc_feature (1)..(106): Homolog of NCBI NO: 15233341 NR Description: oxidoreductase, 2OG-Fe(II) oxygenase family
  misc_feature (57)..(263): Homolog of NCBI NO: 29150365 NR Description: putative oxidoreductase [Oryza sativa (japonica
MLFMLTIVLLMLLAFGVFSLPINNDESSPIDLSYFRRAATERSEGLGKRGDQWTEVLSWEPRAFVYHNFLSKEECEYLISLAKPHMVKSTVVDSETGKSKDSRVRTSSGTFLRRGRDKIIKTIEKRIADYTFIPADHGEGLQVLHYEAGQKYEPHYDYFVDEFNTKNGGQRMATMLMYLSDVEEGGETVFPAANMNFSSVPWYNELSECGKKGLSVKPRMGDALLFWSMRPDATLDPTSLHGGCPVIRGNKWSSTKWMHVGEYKI

SEQ ID NO: 103344 - DNA, 1469 bp, Arabidopsis thaliana
  misc_feature (1)..(1469): Ceres Seq. ID no. 13612564
  misc_feature: MA Experiment ID: 108434 Result: Up-regulated in Transcription
  misc_feature: MA Experiment 108434 PARAMETER Experiment Name: At_Root_Tips_cDNA_P Parameter: Tissue Value: Root Tips
  misc_feature: MA Experiment ID: 20000112 Result: Down-regulated in Transcription
  misc_feature: MA Experiment 20000112 PARAMETER Experiment Name: At_42deg_Heat_cDNA_P Parameter: Temperature (deg C) Value: 42 vs. 22
  misc_feature: MA Experiment 20000112 PARAMETER Experiment Name: At_42deg_Heat_cDNA_P Parameter: Timepoint (hr) Value: 2
  misc_feature: MA Experiment 20000112 PARAMETER Experiment Name: At_42deg_Heat_cDNA_P Parameter: Tissue Value: Aerial
  misc_feature: MA Experiment ID: 20000144 Result: Down-regulated in Transcription
  misc_feature: MA Experiment 20000144 PARAMETER Experiment Name: At_42deg_Heat_cDNA_P Parameter: Temperature (deg C) Value: 42 vs. 22
  misc_feature: MA Experiment 20000144 PARAMETER Experiment Name: At_42deg_Heat_cDNA_P Parameter: Timepoint (hr) Value: 1
  misc_feature: MA Experiment 20000144 PARAMETER Experiment Name: At_42deg_Heat_cDNA_P Parameter: Tissue Value: Aerial
  misc_feature: MA Experiment ID: 20000171 Result: Down-regulated in Transcription
  misc_feature: MA Experiment 20000171 PARAMETER Experiment Name: At_42deg_Heat_P Parameter: Age (day) Value: 14
  misc_feature: MA Experiment 20000171 PARAMETER Experiment Name: At_42deg_Heat_P Parameter: Organism Value: A. thaliana
  misc_feature: MA Experiment 20000171 PARAMETER Experiment Name: At_42deg_Heat_P Parameter: Plant Line Value: WS
  misc_feature: MA Experiment 20000171 PARAMETER Experiment Name: At_42deg_Heat_P Parameter: Temperature (deg C) Value: 42 vs. 22
  misc_feature: MA Experiment 20000171 PARAMETER Experiment Name: At_42deg_Heat_P Parameter: Timepoint (hr) Value: 1
  misc_feature: MA Experiment 20000171 PARAMETER Experiment Name: At_42deg_Heat_P Parameter: Tissue Value: Aerial
  misc_feature: MA Experiment ID: 20000173 Result: Down-regulated in Transcription
  misc_feature: MA Experiment 20000173 PARAMETER Experiment Name: At_42deg_Heat_P Parameter: Age (day) Value: 14
  misc_feature: MA Experiment 20000173 PARAMETER Experiment Name: At_42deg_Heat_P Parameter: Organism Value: A. thaliana
  misc_feature: MA Experiment 20000173 PARAMETER Experiment Name: At_42deg_Heat_P Parameter: Plant Line Value: WS
  misc_feature: MA Experiment 20000173 PARAMETER Experiment Name: At_42deg_Heat_P Parameter: Temperature (deg C) Value: 42 vs. 22
  misc_feature: MA Experiment 20000173 PARAMETER Experiment Name: At_42deg_Heat_P Parameter: Timepoint (hr) Value: 6
  misc_feature: MA Experiment 20000173 PARAMETER Experiment Name: At_42deg_Heat_P Parameter: Tissue Value: Aerial
  misc_feature: MA Experiment ID: 20000184 Result: Up-regulated in Transcription
  misc_feature: MA Experiment 20000184 PARAMETER Experiment Name: At_Shoots__P Parameter: Age (day) Value: 7
  misc_feature: MA Experiment 20000184 PARAMETER Experiment Name: At_Shoots__P Parameter: Tissue Value: Shoots vs. Whole Plant
  misc_feature: MA Experiment ID: 20000185 Result: Down-regulated in Transcription
  misc_feature: MA Experiment 20000185 PARAMETER Experiment Name: At_Roots__P Parameter: Age (day) Value: 7 vs. 21
  misc_feature: MA Experiment 20000185 PARAMETER Experiment Name: At_Roots__P Parameter: Organism Value: A. thaliana
  misc_feature: MA Experiment 20000185 PARAMETER Experiment Name: At_Roots__P Parameter: Tissue Value: Roots vs. Whole Plant
  misc_feature: MA Experiment ID: 20000224 Result: Down-regulated in Transcription
  misc_feature: MA Experiment ID: 20000227 Result: Up-regulated in Transcription
  misc_feature: MA Experiment 20000227 PARAMETER Experiment Name: At_Root-Tips-vs-Tops_P Parameter: Tissue Value: Root Tips vs. Root Tops
  misc_feature: MA Experiment ID: 20000437 Result: Down-regulated in Transcription
  misc_feature: MA Experiment 20000437 PARAMETER Experiment Name: At_Drought_P Parameter: Age (day) Value: 8
  misc_feature: MA Experiment 20000437 PARAMETER Experiment Name: At_Drought_P Parameter: Organism Value: A. thaliana
  misc_feature: MA Experiment 20000437 PARAMETER Experiment Name: At_Drought_P Parameter: Plant Line Value: WS
  misc_feature: MA Experiment 20000437 PARAMETER Experiment Name: At_Drought_P Parameter: Timepoint (hr) Value: 24
  misc_feature: MA Experiment 20000437 PARAMETER Experiment Name: At_Drought_P Parameter: Tissue Value: Whole Plant
  misc_feature: MA Experiment 20000437 PARAMETER Experiment Name: At_Drought_P Parameter: Treatment Value: Drought vs. No Drought
  misc_feature: MA Experiment ID: 20000439 Result: Down-regulated in Transcription
  misc_feature: MA Experiment 20000439 PARAMETER Experiment Name: At_Roots__P Parameter: Age (day) Value: 14 vs. 21
  misc_feature: MA Experiment 20000439 PARAMETER Experiment Name: At_Roots__P Parameter: Organism Value: A. thaliana
  misc_feature: MA Experiment 20000439 PARAMETER Experiment Name: At_Roots__P Parameter: Tissue Value: Roots vs. Whole Plant
  misc_feature: MA Experiment ID: 20000452 Result: Down-regulated in Transcription
  misc_feature: MA Experiment 20000452 PARAMETER Experiment Name: At_CS6879_Shoots-Roots_P Parameter: Age (day) Value: 14
  misc_feature: MA Experiment 20000452 PARAMETER Experiment Name: At_CS6879_Shoots-Roots_P Parameter: Organism Value: A. thaliana
  misc_feature: MA Experiment 20000452 PARAMETER Experiment Name: At_CS6879_Shoots-Roots_P Parameter: Plant Line Value: CS6879 vs. WS
  misc_feature: MA Experiment 20000452 PARAMETER Experiment Name: At_CS6879_Shoots-Roots_P Parameter: Tissue Value: Shoots
  misc_feature: MA Experiment ID: 20000794 Result: Down-regulated in Transcription
  misc_feature: MA Experiment 20000794 PARAMETER Experiment Name: At_Petals_P Parameter: Age (day) Value: 23-25 days
  misc_feature: MA Experiment 20000794 PARAMETER Experiment Name: At_Petals_P Parameter: Plant Line Value: WS
  misc_feature: MA Experiment 20000794 PARAMETER Experiment Name: At_Petals_P Parameter: Tissue Value: Petals vs. Whole plant
  misc_feature: MA Experiment ID: 20001247 Result: Up-regulated in Transcription
  misc_feature: MA Experiment 20001247 PARAMETER Experiment Name: At_Far-red-induction_P Parameter: Age (day) Value: 7
  misc_feature: MA Experiment 20001247 PARAMETER Experiment Name: At_Far-red-induction_P Parameter: Light Value: Far-red vs. White
  misc_feature: MA Experiment 20001247 PARAMETER Experiment Name: At_Far-red-induction_P Parameter: Organism Value: A. thaliana
  misc_feature: MA Experiment 20001247 PARAMETER Experiment Name: At_Far-red-induction_P Parameter: Plant Line Value: Columbia
  misc_feature: MA Experiment 20001247 PARAMETER Experiment Name: At_Far-red-induction_P Parameter: Timepoint (hr) Value: 1
  misc_feature: MA Experiment 20001247 PARAMETER Experiment Name: At_Far-red-induction_P Parameter: Tissue Value: Whole Plant
  misc_feature: MA Experiment ID: 20001450 Result: Up-regulated in Transcription
  misc_feature: MA Experiment 20001450 PARAMETER Experiment Name: At_Far-red-induction_P Parameter: Age (day) Value: 7
  misc_feature: MA Experiment 20001450 PARAMETER Experiment Name: At_Far-red-induction_P Parameter: Light Value: Far-red vs. White
  misc_feature: MA Experiment 20001450 PARAMETER Experiment Name: At_Far-red-induction_P Parameter: Organism Value: A. thaliana
  misc_feature: MA Experiment 20001450 PARAMETER Experiment Name: At_Far-red-induction_P Parameter: Plant Line Value: Columbia
  misc_feature: MA Experiment 20001450 PARAMETER Experiment Name: At_Far-red-induction_P Parameter: Timepoint (hr) Value: 8
  misc_feature: MA Experiment 20001450 PARAMETER Experiment Name: At_Far-red-induction_P Parameter: Tissue Value: Whole Plant
  misc_feature: MA Experiment ID: 20001451 Result: Up-regulated in Transcription
  misc_feature: MA Experiment 20001451 PARAMETER Experiment Name: At_Far-red-induction_P Parameter: Age (day) Value: 7
  misc_feature: MA Experiment 20001451 PARAMETER Experiment Name: At_Far-red-induction_P Parameter: Light Value: Far-red vs. White
  misc_feature: MA Experiment 20001451 PARAMETER Experiment Name: At_Far-red-induction_P Parameter: Organism Value: A. thaliana
  misc_feature: MA Experiment 20001451 PARAMETER Experiment Name: At_Far-red-induction_P Parameter: Plant Line Value: Columbia
  misc_feature: MA Experiment 20001451 PARAMETER Experiment Name: At_Far-red-induction_P Parameter: Timepoint (hr) Value: 24
  misc_feature: MA Experiment 20001451 PARAMETER Experiment Name: At_Far-red-induction_P Parameter: Tissue Value: Whole Plant
  misc_feature: MA Experiment ID: 20001554 Result: Down-regulated in Transcription
  misc_feature: MA Experiment 20001554 PARAMETER Experiment Name: At_Drought_Soil_Dry_P Parameter: Age (day) Value: 21
  misc_feature: MA Experiment 20001554 PARAMETER Experiment Name: At_Drought_Soil_Dry_P Parameter: Organism Value: A. thaliana
  misc_feature: MA Experiment 20001554 PARAMETER Experiment Name: At_Drought_Soil_Dry_P Parameter: Plant Line Value: WS
  misc_feature: MA Experiment 20001554 PARAMETER Experiment Name: At_Drought_Soil_Dry_P Parameter: Post Timepoint (hr) Value: None
  misc_feature: MA Experiment 20001554 PARAMETER Experiment Name: At_Drought_Soil_Dry_P Parameter: Post-Treatment Value: None
  misc_feature: MA Experiment 20001554 PARAMETER Experiment Name: At_Drought_Soil_Dry_P Parameter: Timepoint (day) Value: 7
  misc_feature: MA Experiment 20001554 PARAMETER Experiment Name: At_Drought_Soil_Dry_P Parameter: Treatment Value: Drought vs. No Drought
  misc_feature: MA Experiment ID: 20001555 Result: Down-regulated in Transcription
  misc_feature: MA Experiment 20001555 PARAMETER Experiment Name: At_Drought_Soil_Dry_P Parameter: Age (day) Value: 24
  misc_feature: MA Experiment 20001555 PARAMETER Experiment Name: At_Drought_Soil_Dry_P Parameter: Organism Value: A. thaliana
  misc_feature: MA Experiment 20001555 PARAMETER Experiment Name: At_Drought_Soil_Dry_P Parameter: Plant Line Value: WS
  misc_feature: MA Experiment 20001555 PARAMETER Experiment Name: At_Drought_Soil_Dry_P Parameter: Post Timepoint (hr) Value: None
  misc_feature: MA Experiment 20001555 PARAMETER Experiment Name: At_Drought_Soil_Dry_P Parameter: Post-Treatment Value: None
  misc_feature: MA Experiment 20001555 PARAMETER Experiment Name: At_Drought_Soil_Dry_P Parameter: Timepoint (day) Value: 10
  misc_feature: MA Experiment 20001555 PARAMETER Experiment Name: At_Drought_Soil_Dry_P Parameter: Treatment Value: Drought vs. No Drought
  misc_feature: MA Experiment ID: 20001556 Result: Down-regulated in Transcription
  misc_feature: MA Experiment 20001556 PARAMETER Experiment Name: At_Drought_Soil_Dry_P Parameter: Age (day) Value: 26
  misc_feature: MA Experiment 20001556 PARAMETER Experiment Name: At_Drought_Soil_Dry_P Parameter: Organism Value: A. thaliana
  misc_feature: MA Experiment 20001556 PARAMETER Experiment Name: At_Drought_Soil_Dry_P Parameter: Plant Line Value: WS
  misc_feature: MA Experiment 20001556 PARAMETER Experiment Name: At_Drought_Soil_Dry_P Parameter: Post Timepoint (hr) Value: None
  misc_feature: MA Experiment 20001556 PARAMETER Experiment Name: At_Drought_Soil_Dry_P Parameter: Post-Treatment Value: None
  misc_feature: MA Experiment 20001556 PARAMETER Experiment Name: At_Drought_Soil_Dry_P Parameter: Timepoint (day) Value: 12
  misc_feature: MA Experiment 20001556 PARAMETER Experiment Name: At_Drought_Soil_Dry_P Parameter: Treatment Value: Drought vs. No Drought
  misc_feature: MA Experiment ID: 20001557 Result: Up-regulated in Transcription
  misc_feature: MA Experiment 20001557 PARAMETER Experiment Name: At_Drought_Soil_Dry_P Parameter: Age (day) Value: 27
  misc_feature: MA Experiment 20001557 PARAMETER Experiment Name: At_Drought_Soil_Dry_P Parameter: Organism Value: A. thaliana
  misc_feature: MA Experiment 20001557 PARAMETER Experiment Name: At_Drought_Soil_Dry_P Parameter: Plant Line Value: WS
  misc_feature: MA Experiment 20001557 PARAMETER Experiment Name: At_Drought_Soil_Dry_P Parameter: Post Timepoint (hr) Value: 3
  misc_feature: MA Experiment 20001557 PARAMETER Experiment Name: At_Drought_Soil_Dry_P Parameter: Post-Treatment Value: Re-Water vs. No Drought
  misc_feature: MA Experiment 20001557 PARAMETER Experiment Name: At_Drought_Soil_Dry_P Parameter: Timepoint (day) Value: 13
  misc_feature: MA Experiment 20001557 PARAMETER Experiment Name: At_Drought_Soil_Dry_P Parameter: Treatment Value: Drought vs. No Drought
  misc_feature: MA Experiment ID: 20001558 Result: Up-regulated in Transcription
  misc_feature: MA Experiment 20001558 PARAMETER Experiment Name: At_Drought_Soil_Dry_P Parameter: Age (day) Value: 27
  misc_feature: MA Experiment 20001558 PARAMETER Experiment Name: At_Drought_Soil_Dry_P Parameter: Organism Value: A. thaliana
  misc_feature: MA Experiment 20001558 PARAMETER Experiment Name: At_Drought_Soil_Dry_P Parameter: Plant Line Value: WS
  misc_feature: MA Experiment 20001558 PARAMETER Experiment Name: At_Drought_Soil_Dry_P Parameter: Post Timepoint (hr) Value: 6
  misc_feature: MA Experiment 20001558 PARAMETER Experiment Name: At_Drought_Soil_Dry_P Parameter: Post-Treatment Value: Re-Water vs. No Drought
  misc_feature: MA Experiment 20001558 PARAMETER Experiment Name: At_Drought_Soil_Dry_P Parameter: Timepoint (day) Value: 13
  misc_feature: MA Experiment 20001558 PARAMETER Experiment Name: At_Drought_Soil_Dry_P Parameter: Treatment Value: Drought vs. No Drought
  misc_feature: MA Experiment ID: 20001560 Result: Up-regulated in Transcription
  misc_feature: MA Experiment 20001560 PARAMETER Experiment Name: At_Drought_Soil_Dry_P Parameter: Age (day) Value: 28
  misc_feature: MA Experiment 20001560 PARAMETER Experiment Name: At_Drought_Soil_Dry_P Parameter: Organism Value: A. thaliana
  misc_feature: MA Experiment 20001560 PARAMETER Experiment Name: At_Drought_Soil_Dry_P Parameter: Plant Line Value: WS
  misc_feature: MA Experiment 20001560 PARAMETER Experiment Name: At_Drought_Soil_Dry_P Parameter: Post Timepoint (hr) Value: None
  misc_feature: MA Experiment 20001560 PARAMETER Experiment Name: At_Drought_Soil_Dry_P Parameter: Post-Treatment Value: None
  misc_feature: MA Experiment 20001560 PARAMETER Experiment Name: At_Drought_Soil_Dry_P Parameter: Timepoint (day) Value: 14
  misc_feature: MA Experiment 20001560 PARAMETER Experiment Name: At_Drought_Soil_Dry_P Parameter: Treatment Value: Drought vs. No Drought
  misc_feature: MA Experiment ID: 20001757 Result: Up-regulated in Transcription
  misc_feature: MA Experiment 20001757 PARAMETER Experiment Name: At_50mM_NH4NO3_L-to-H_P Parameter: Timepoint (hr) Value: 6
  misc_feature: MA Experiment 20001757 PARAMETER Experiment Name: At_50mM_NH4NO3_L-to-H_P Parameter: Tissue Value: Leaf
  misc_feature: MA Experiment 20001757 PARAMETER Experiment Name: At_50mM_NH4NO3_L-to-H_P Parameter: Treatment Value: 50mM NH4NO3 vs 100mM Mannitol
  misc_feature: MA Experiment ID: 20001904 Result: Down-regulated in Transcription
  misc_feature: MA Experiment 20001904 PARAMETER Experiment Name: At_Drought_Reproduction_P Parameter: Age (day) Value: 37
  misc_feature: MA Experiment 20001904 PARAMETER Experiment Name: At_Drought_Reproduction_P Parameter: Organism Value: A. thaliana
  misc_feature: MA Experiment 20001904 PARAMETER Experiment Name: At_Drought_Reproduction_P Parameter: Plant Line Value: WS
  misc_feature: MA Experiment 20001904 PARAMETER Experiment Name: At_Drought_Reproduction_P Parameter: Timepoint (day) Value: 7
  misc_feature: MA Experiment 20001904 PARAMETER Experiment Name: At_Drought_Reproduction_P Parameter: Tissue Value: Rosettes
  misc_feature: MA Experiment 20001904 PARAMETER Experiment Name: At_Drought_Reproduction_P Parameter: Treatment Value: Drought vs. No Drought
  misc_feature: MA Experiment ID: 20001905 Result: Down-regulated in Transcription
  misc_feature: MA Experiment 20001905 PARAMETER Experiment Name: At_Drought_Reproduction_P Parameter: Age (day) Value: 40
  misc_feature: MA Experiment 20001905 PARAMETER Experiment Name: At_Drought_Reproduction_P Parameter: Organism Value: A. thaliana
  misc_feature: MA Experiment 20001905 PARAMETER Experiment Name: At_Drought_Reproduction_P Parameter: Plant Line Value: WS
  misc_feature: MA Experiment 20001905 PARAMETER Experiment Name: At_Drought_Reproduction_P Parameter: Timepoint (day) Value: 10
  misc_feature: MA Experiment 20001905 PARAMETER Experiment Name: At_Drought_Reproduction_P Parameter: Tissue Value: Rosettes
  misc_feature: MA Experiment 20001905 PARAMETER Experiment Name: At_Drought_Reproduction_P Parameter: Treatment Value: Drought vs. No Drought
  misc_feature: MA Experiment ID: 20001906 Result: Down-regulated in Transcription
  misc_feature: MA Experiment 20001906 PARAMETER Experiment Name: At_Drought_Reproduction_P Parameter: Age (day) Value: 35
  misc_feature: MA Experiment 20001906 PARAMETER Experiment Name: At_Drought_Reproduction_P Parameter: Organism Value: A. thaliana
  misc_feature: MA Experiment 20001906 PARAMETER Experiment Name: At_Drought_Reproduction_P Parameter: Plant Line Value: WS
  misc_feature: MA Experiment 20001906 PARAMETER Experiment Name: At_Drought_Reproduction_P Parameter: Timepoint (day) Value: 5
  misc_feature: MA Experiment 20001906 PARAMETER Experiment Name: At_Drought_Reproduction_P Parameter: Tissue Value: Siliques
  misc_feature: MA Experiment 20001906 PARAMETER Experiment Name: At_Drought_Reproduction_P Parameter: Treatment Value: Drought vs. No Drought
  misc_feature: MA Experiment ID: 20001911 Result: Down-regulated in Transcription
  misc_feature: MA Experiment 20001911 PARAMETER Experiment Name: At_Drought_Reproduction_P Parameter: Age (day) Value: 40
  misc_feature: MA Experiment 20001911 PARAMETER Experiment Name: At_Drought_Reproduction_P Parameter: Organism Value: A. thaliana
  misc_feature: MA Experiment 20001911 PARAMETER Experiment Name: At_Drought_Reproduction_P Parameter: Plant Line Value: WS
  misc_feature: MA Experiment 20001911 PARAMETER Experiment Name: At_Drought_Reproduction_P Parameter: Timepoint (day) Value: 10
  misc_feature: MA Experiment 20001911 PARAMETER Experiment Name: At_Drought_Reproduction_P Parameter: Tissue Value: Flowers
  misc_feature: MA Experiment 20001911 PARAMETER Experiment Name: At_Drought_Reproduction_P Parameter: Treatment Value: Drought vs. No Drought
agattaaaaactctttaaaaactttttgtcataaatcaggcaaagaagtaaaagagacttaaaactctctctctctctctcttggtcttcctcactcttaacgaaaatggactctttaacactcttcttcaccggtgcactcgtcgccgtcggtatctactggttcctctgcgttctcggtccagcagagcgtaaaggcaaacgagccgtagatctctctggtggctcaatctccgccgagaaagtccaagacaactacaaacagtactggtctttcttccgccgtccaaaagaaatcgaaaccgccgagaaagttccagacttcgtcgacacattctacaatctcgtcaccgacatatacgagtggggatggggacaatccttccacttctcaccatcaatccccggaaaatctcacaaagacgccacgcgcctccacgaagagatggccgtagatctgatccaagtcaaacctggtcaaaagatcctagacgtcggatgcggtgtcggcggtccgatgcgagcgattgcatctcactcgcgagctaacgtagtcgggattacaataaacgagtatcaggtgaacagagctcgtctccacaataagaaagctggtctcgacgcgctttgcgaggtcgtgtgtggtaacttcctccagatgccgttcgatgacaacagtttcgacggtgcttattccatcgaagccacgtgtcacgcgccgaagctggaagaagtgtacgcagagatctacagggtgttgaaacccggatctatgtatgtgtcgtacgagtgggttacgacggagaaatttaaggcggaggatgacgaacacgtggaggtaatccaagggattgagagaggcgatgcgttaccagggcttagggcttacgtggatatagctgagacggctaaaaaggttgggtttgagatagtgaaggagaaggatctggcgagtccaccggctgagccgtggtggactaggcttaagatgggtaggcttgcttattggaggaatcacattgtggttcagattttgtcagcggttggagttgctcctaaaggaactgttgatgttcatgagatgttgtttaagactgctgattatttgaccagaggaggtgaaaccggaatattctctccgatgcatatgattctctgcagaaaaccggagtcaccggaggagagttcttgagaaaggtagaaaggaaacatcaccggaaaaagtatggagaattttctcaatttgtttttatttttaagttaaatcaacttggttattgtactatttttgtgttttaatttggtttgtgtttcaagaattattagtttttttttgttttgttgcatatgagaatcttactcttgatttctccgccgtagtgccggcgagacataggggattattagtatttttaagtgtgtttaagattgattaacaagttagtaaaataaaatgtacttaggtgtcg

SEQ ID NO: 103345 - protein, 361 aa, Arabidopsis thaliana
  peptide (1)..(361): Ceres Seq. ID no. 13612565
  misc_feature (82)..(281): Pfam Name: ubiE/COQ5 methyltransferase family Pfam Description: ubiE/COQ5 methyltransferase family
  misc_feature (1)..(361): Homolog of NCBI NO: 15217917 NR Description: sterol-C-methyltransferase [Arabidopsis thaliana]
  misc_feature (1)..(361): Homolog of NCBI NO: 22136020 NR Description: 24-sterol C-methyltransferase [Arabidopsis
  misc_feature (1)..(361): Homolog of NCBI NO: 23397216 NR Description: putative sterol-C-methyltransferase [Arabidopsis
  misc_feature (1)..(361): Homolog of NCBI NO: 1061040 NR Description: sterol-C-methyltransferase [Arabidopsis thaliana]
  misc_feature (1)..(361): Homolog of NCBI NO: 21555010 NR Description: sterol-C-methyltransferase [Arabidopsis thaliana]
  misc_feature (1)..(359): Homolog of NCBI NO: 15222955 NR Description: S-adenosyl-methionine-sterol-C-methyltransferase [Arabidopsis thaliana] >gi|14030613|gb|AAK52981.1|AF375397_1 [Arabidopsis thaliana] >gi|21360447|gb|AAM47339.1|
  misc_feature (1)..(359): Homolog of NCBI NO: 2246456 NR Description: S-adenosyl-methionine-sterol-C-methyltransferase
  misc_feature (1)..(355): Homolog of NCBI NO: 7443718 NR Description: probable sterol 24-C-methyltransferase (EC
  misc_feature (9)..(355): Homolog of NCBI NO: 7443717 NR Description: probable sterol 24-C-methyltransferase (EC
  misc_feature (1)..(354): Homolog of NCBI NO: 3560533 NR Description: 24-methylene lophenol C24(1)methyltransferase
MDSLTLFFTGALVAVGIYWFLCVLGPAERKGKRAVDLSGGSISAEKVQDNYKQYWSFFRRPKEIETAEKVPDFVDTFYNLVTDIYEWGWGQSFHFSPSIPGKSHKDATRLHEEMAVDLIQVKPGQKILDVGCGVGGPMRAIASHSRANVVGITINEYQVNRARLHNKKAGLDALCEVVCGNFLQMPFDDNSFDGAYSIEATCHAPKLEEVYAEIYRVLKPGSMYVSYEWVTTEKFKAEDDEHVEVIQGIERGDALPGLRAYVDIAETAKKVGFEIVKEKDLASPPAEPWWTRLKMGRLAYWRNHIVVQILSAVGVAPKGTVDVHEMLFKTADYLTRGGETGIFSPMHMILCRKPESPEESS

SEQ ID NO: 103346 - protein, 248 aa, Arabidopsis thaliana
  peptide (1)..(248): Ceres Seq. ID no. 13612566
  misc_feature (1)..(168): Pfam Name: ubiE/COQ5 methyltransferase family Pfam Description: ubiE/COQ5 methyltransferase family
  misc_feature (1)..(248): Homolog of NCBI NO: 15217917 NR Description: sterol-C-methyltransferase [Arabidopsis thaliana]
  misc_feature (1)..(248): Homolog of NCBI NO: 22136020 NR Description: 24-sterol C-methyltransferase [Arabidopsis
  misc_feature (1)..(248): Homolog of NCBI NO: 23397216 NR Description: putative sterol-C-methyltransferase [Arabidopsis
  misc_feature (1)..(248): Homolog of NCBI NO: 1061040 NR Description: sterol-C-methyltransferase [Arabidopsis thaliana]
  misc_feature (1)..(248): Homolog of NCBI NO: 21555010 NR Description: sterol-C-methyltransferase [Arabidopsis thaliana]
  misc_feature (1)..(246): Homolog of NCBI NO: 15222955 NR Description: S-adenosyl-methionine-sterol-C-methyltransferase [Arabidopsis thaliana] >gi|14030613|gb|AAK52981.1|AF375397_1 [Arabidopsis thaliana] >gi|21360447|gb|AAM47339.1|
  misc_feature (1)..(246): Homolog of NCBI NO: 2246456 NR Description: S-adenosyl-methionine-sterol-C-methyltransferase
  misc_feature (1)..(242): Homolog of NCBI NO: 7443718 NR Description: probable sterol 24-C-methyltransferase (EC
  misc_feature (1)..(242): Homolog of NCBI NO: 7443717 NR Description: probable sterol 24-C-methyltransferase (EC
  misc_feature (1)..(241): Homolog of NCBI NO: 3560533 NR Description: 24-methylene lophenol C24(1)methyltransferase
MAVDLIQVKPGQKILDVGCGVGGPMRAIASHSRANVVGITINEYQVNRARLHNKKAGLDALCEVVCGNFLQMPFDDNSFDGAYSIEATCHAPKLEEVYAEIYRVLKPGSMYVSYEWVTTEKFKAEDDEHVEVIQGIERGDALPGLRAYVDIAETAKKVGFEIVKEKDLASPPAEPWWTRLKMGRLAYWRNHIVVQILSAVGVAPKGTVDVHEMLFKTADYLTRGGETGIFSPMHMILCRKPESPEESS

SEQ ID NO: 103347 - protein, 224 aa, Arabidopsis thaliana
  peptide (1)..(224): Ceres Seq. ID no. 13612567
  misc_feature (1)..(144): Pfam Name: ubiE/COQ5 methyltransferase family Pfam Description: ubiE/COQ5 methyltransferase family
  misc_feature (1)..(224): Homolog of NCBI NO: 15217917 NR Description: sterol-C-methyltransferase [Arabidopsis thaliana]
  misc_feature (1)..(224): Homolog of NCBI NO: 22136020 NR Description: 24-sterol C-methyltransferase [Arabidopsis
  misc_feature (1)..(224): Homolog of NCBI NO: 23397216 NR Description: putative sterol-C-methyltransferase [Arabidopsis
  misc_feature (1)..(224): Homolog of NCBI NO: 1061040 NR Description: sterol-C-methyltransferase [Arabidopsis thaliana]
  misc_feature (1)..(224): Homolog of NCBI NO: 21555010 NR Description: sterol-C-methyltransferase [Arabidopsis thaliana]
  misc_feature (1)..(222): Homolog of NCBI NO: 15222955 NR Description: S-adenosyl-methionine-sterol-C-methyltransferase [Arabidopsis thaliana] >gi|14030613|gb|AAK52981.1|AF375397_1 [Arabidopsis thaliana] >gi|21360447|gb|AAM47339.1|
  misc_feature (1)..(222): Homolog of NCBI NO: 2246456 NR Description: S-adenosyl-methionine-sterol-C-methyltransferase
  misc_feature (1)..(218): Homolog of NCBI NO: 7443718 NR Description: probable sterol 24-C-methyltransferase (EC
  misc_feature (1)..(218): Homolog of NCBI NO: 7443717 NR Description: probable sterol 24-C-methyltransferase (EC
  misc_feature (1)..(217): Homolog of NCBI NO: 3560533 NR Description: 24-methylene lophenol C24(1)methyltransferase
MRAIASHSRANVVGITINEYQVNRARLHNKKAGLDALCEVVCGNFLQMPFDDNSFDGAYSIEATCHAPKLEEVYAEIYRVLKPGSMYVSYEWVTTEKFKAEDDEHVEVIQGIERGDALPGLRAYVDIAETAKKVGFEIVKEKDLASPPAEPWWTRLKMGRLAYWRNHIVVQILSAVGVAPKGTVDVHEMLFKTADYLTRGGETGIFSPMHMILCRKPESPEESS

SEQ ID NO: 103348 - DNA, 1243 bp, Arabidopsis thaliana
  misc_feature (1)..(1243): Ceres Seq. ID no. 13612583
  misc_feature: MA Experiment ID: 108434 Result: Down-regulated in Transcription
  misc_feature: MA Experiment 108434 PARAMETER Experiment Name: At_Root_Tips_cDNA_P Parameter: Tissue Value: Root Tips
  misc_feature: MA Experiment ID: 108461 Result: Down-regulated in Transcription
  misc_feature: MA Experiment 108461 PARAMETER Experiment Name: At_Germinating_Seeds_cDNA_P Parameter: Age (day) Value: 1 vs. 0
  misc_feature: MA Experiment 108461 PARAMETER Experiment Name: At_Germinating_Seeds_cDNA_P Parameter: Tissue Value: Germinating Seeds
  misc_feature: MA Experiment ID: 108462 Result: Down-regulated in Transcription
  misc_feature: MA Experiment 108462 PARAMETER Experiment Name: At_Germinating_Seeds_cDNA_P Parameter: Age (day) Value: 2 vs. 0
  misc_feature: MA Experiment 108462 PARAMETER Experiment Name: At_Germinating_Seeds_cDNA_P Parameter: Tissue Value: Germinating Seeds
  misc_feature: MA Experiment ID: 108463 Result: Down-regulated in Transcription
  misc_feature: MA Experiment 108463 PARAMETER Experiment Name: At_Germinating_Seeds_cDNA_P Parameter: Age (day) Value: 3 vs. 0
  misc_feature: MA Experiment 108463 PARAMETER Experiment Name: At_Germinating_Seeds_cDNA_P Parameter: Tissue Value: Germinating Seeds
  misc_feature: MA Experiment ID: 108473 Result: Up-regulated in Transcription
  misc_feature: MA Experiment 108473 PARAMETER Experiment Name: At_Drought_Flowers_cDNA_P Parameter: Timepoint (hr) Value: 7 d
  misc_feature: MA Experiment 108473 PARAMETER Experiment Name: At_Drought_Flowers_cDNA_P Parameter: Tissue Value: Flower
  misc_feature: MA Experiment 108473 PARAMETER Experiment Name: At_Drought_Flowers_cDNA_P Parameter: Treatment Value: Drought vs. No Drought
  misc_feature: MA Experiment ID: 108501 Result: Down-regulated in Transcription
  misc_feature: MA Experiment 108501 PARAMETER Experiment Name: At_ap2_floral_buds_cDNA_P Parameter: Plant Line Value: ap2 (Ler.)
  misc_feature: MA Experiment 108501 PARAMETER Experiment Name: At_ap2_floral_buds_cDNA_P Parameter: Tissue Value: Closed Flower
  misc_feature: MA Experiment ID: 108561 Result: Up-regulated in Transcription
  misc_feature: MA Experiment 108561 PARAMETER Experiment Name: At_100uM_ABA_cDNA_P Parameter: Timepoint (hr) Value: 6
  misc_feature: MA Experiment 108561 PARAMETER Experiment Name: At_100uM_ABA_cDNA_P Parameter: Tissue Value: Aerial
  misc_feature: MA Experiment 108561 PARAMETER Experiment Name: At_100uM_ABA_cDNA_P Parameter: Treatment Value: 100uM ABA vs. No Treatment
  misc_feature: MA Experiment ID: 108572 Result: Up-regulated in Transcription
  misc_feature: MA Experiment 108572 PARAMETER Experiment Name: At_Drought_cDNA_P Parameter: Timepoint (hr) Value: 1
  misc_feature: MA Experiment 108572 PARAMETER Experiment Name: At_Drought_cDNA_P Parameter: Tissue Value: Aerial
  misc_feature: MA Experiment 108572 PARAMETER Experiment Name: At_Drought_cDNA_P Parameter: Treatment Value: Drought vs. No Drought
  misc_feature: MA Experiment ID: 108573 Result: Up-regulated in Transcription
  misc_feature: MA Experiment 108573 PARAMETER Experiment Name: At_Drought_cDNA_P Parameter: Timepoint (hr) Value: 6
  misc_feature: MA Experiment 108573 PARAMETER Experiment Name: At_Drought_cDNA_P Parameter: Tissue Value: Aerial
  misc_feature: MA Experiment 108573 PARAMETER Experiment Name: At_Drought_cDNA_P Parameter: Treatment Value: Drought vs. No Drought
  misc_feature: MA Experiment ID: 108576 Result: Up-regulated in Transcription
  misc_feature: MA Experiment 108576 PARAMETER Experiment Name: At_42deg_Heat_cDNA_P Parameter: Temperature (deg C) Value: 42 vs. 22
  misc_feature: MA Experiment 108576 PARAMETER Experiment Name: At_42deg_Heat_cDNA_P Parameter: Timepoint (hr) Value: 1
  misc_feature: MA Experiment 108576 PARAMETER Experiment Name: At_42deg_Heat_cDNA_P Parameter: Tissue Value: Aerial
  misc_feature: MA Experiment ID: 108577 Result: Up-regulated in Transcription
  misc_feature: MA Experiment 108577 PARAMETER Experiment Name: At_42deg_Heat_cDNA_P Parameter: Temperature (deg C) Value: 42 vs. 22
  misc_feature: MA Experiment 108577 PARAMETER Experiment Name: At_42deg_Heat_cDNA_P Parameter: Timepoint (hr) Value: 6
  misc_feature: MA Experiment 108577 PARAMETER Experiment Name: At_42deg_Heat_cDNA_P Parameter: Tissue Value: Aerial
  misc_feature: MA Experiment ID: 108585 Result: Up-regulated in Transcription
  misc_feature: MA Experiment 108585 PARAMETER Experiment Name: At_5mM_NaNP_cDNA_P Parameter: Timepoint (hr) Value: 6
  misc_feature: MA Experiment 108585 PARAMETER Experiment Name: At_5mM_NaNP_cDNA_P Parameter: Tissue Value: Aerial
  misc_feature: MA Experiment 108585 PARAMETER Experiment Name: At_5mM_NaNP_cDNA_P Parameter: Treatment Value: null
  misc_feature: MA Experiment ID: 108605 Result: Up-regulated in Transcription
  misc_feature: MA Experiment 108605 PARAMETER Experiment Name: At_100uM_ABA_cDNA_P Parameter: Timepoint (hr) Value: 6
  misc_feature: MA Experiment 108605 PARAMETER Experiment Name: At_100uM_ABA_cDNA_P Parameter: Tissue Value: Aerial
  misc_feature: MA Experiment 108605 PARAMETER Experiment Name: At_100uM_ABA_cDNA_P Parameter: Treatment Value: 100uM ABA vs. No Treatment
  misc_feature: MA Experiment ID: 108607 Result: Up-regulated in Transcription
  misc_feature: MA Experiment 108607 PARAMETER Experiment Name: At_100uM_ABA_cDNA_P Parameter: Timepoint (hr) Value: 4
  misc_feature: MA Experiment 108607 PARAMETER Experiment Name: At_100uM_ABA_cDNA_P Parameter: Tissue Value: Aerial
  misc_feature: MA Experiment 108607 PARAMETER Experiment Name: At_100uM_ABA_cDNA_P Parameter: Treatment Value: 100uM ABA vs. No Treatment
  misc_feature: MA Experiment ID: 20000069 Result: Up-regulated in Transcription
  misc_feature: MA Experiment 20000069 PARAMETER Experiment Name: At_100uM_ABA_Mutants_cDNA_P Parameter: Plant Line Value: CS23
  misc_feature: MA Experiment 20000069 PARAMETER Experiment Name: At_100uM_ABA_Mutants_cDNA_P Parameter: Timepoint (hr) Value: 6
  misc_feature: MA Experiment 20000069 PARAMETER Experiment Name: At_100uM_ABA_Mutants_cDNA_P Parameter: Tissue Value: Aerial
  misc_feature: MA Experiment 20000069 PARAMETER Experiment Name: At_100uM_ABA_Mutants_cDNA_P Parameter: Treatment Value: 100uM ABA vs. No Treatment
  misc_feature: MA Experiment ID: 20000111 Result: Up-regulated in Transcription
  misc_feature: MA Experiment 20000111 PARAMETER Experiment Name: At_42deg_Heat_cDNA_P Parameter: Temperature (deg C) Value: 42 vs. 22
  misc_feature: MA Experiment 20000111 PARAMETER Experiment Name: At_42deg_Heat_cDNA_P Parameter: Timepoint (hr) Value: 6
  misc_feature: MA Experiment 20000111 PARAMETER Experiment Name: At_42deg_Heat_cDNA_P Parameter: Tissue Value: Aerial
  misc_feature: MA Experiment ID: 20000112 Result: Up-regulated in Transcription
  misc_feature: MA Experiment 20000112 PARAMETER Experiment Name: At_42deg_Heat_cDNA_P Parameter: Temperature (deg C) Value: 42 vs. 22
  misc_feature: MA Experiment 20000112 PARAMETER Experiment Name: At_42deg_Heat_cDNA_P Parameter: Timepoint (hr) Value: 2
  misc_feature: MA Experiment 20000112 PARAMETER Experiment Name: At_42deg_Heat_cDNA_P Parameter: Tissue Value: Aerial
  misc_feature: MA Experiment ID: 20000113 Result: Up-regulated in Transcription
  misc_feature: MA Experiment 20000113 PARAMETER Experiment Name: At_42deg_Heat_cDNA_P Parameter: Temperature (deg C) Value: 42 vs. 22
  misc_feature: MA Experiment 20000113 PARAMETER Experiment Name: At_42deg_Heat_cDNA_P Parameter: Timepoint (hr) Value: 8
  misc_feature: MA Experiment 20000113 PARAMETER Experiment Name: At_42deg_Heat_cDNA_P Parameter: Tissue Value: Aerial
  misc_feature: MA Experiment ID: 20000117 Result: Up-regulated in Transcription
  misc_feature: MA Experiment 20000117 PARAMETER Experiment Name: At_100uM_ABA_Mutants_cDNA_P Parameter: Plant Line Value: Columbia
  misc_feature: MA Experiment 20000117 PARAMETER Experiment Name: At_100uM_ABA_Mutants_cDNA_P Parameter: Timepoint (hr) Value: 6
  misc_feature: MA Experiment 20000117 PARAMETER Experiment Name: At_100uM_ABA_Mutants_cDNA_P Parameter: Tissue Value: Aerial
  misc_feature: MA Experiment 20000117 PARAMETER Experiment Name: At_100uM_ABA_Mutants_cDNA_P Parameter: Treatment Value: 100uM ABA vs. No Treatment
  misc_feature: MA Experiment ID: 20000144 Result: Up-regulated in Transcription
  misc_feature: MA Experiment 20000144 PARAMETER Experiment Name: At_42deg_Heat_cDNA_P Parameter: Temperature (deg C) Value: 42 vs. 22
  misc_feature: MA Experiment 20000144 PARAMETER Experiment Name: At_42deg_Heat_cDNA_P Parameter: Timepoint (hr) Value: 1
  misc_feature: MA Experiment 20000144 PARAMETER Experiment Name: At_42deg_Heat_cDNA_P Parameter: Tissue Value: Aerial
  misc_feature: MA Experiment ID: 20000169 Result: Up-regulated in Transcription
  misc_feature: MA Experiment 20000169 PARAMETER Experiment Name: At_100uM_ABA_P Parameter: Age (day) Value: 14
  misc_feature: MA Experiment 20000169 PARAMETER Experiment Name: At_100uM_ABA_P Parameter: Organism Value: A. thaliana
  misc_feature: MA Experiment 20000169 PARAMETER Experiment Name: At_100uM_ABA_P Parameter: Plant Line Value: WS
  misc_feature: MA Experiment 20000169 PARAMETER Experiment Name: At_100uM_ABA_P Parameter: Timepoint (hr) Value: 6
  misc_feature: MA Experiment 20000169 PARAMETER Experiment Name: At_100uM_ABA_P Parameter: Tissue Value: Aerial
  misc_feature: MA Experiment 20000169 PARAMETER Experiment Name: At_100uM_ABA_P Parameter: Treatment Value: 100uM ABA vs. No Treatment
  misc_feature: MA Experiment ID: 20000173 Result: Up-regulated in Transcription
  misc_feature: MA Experiment 20000173 PARAMETER Experiment Name: At_42deg_Heat_P Parameter: Age (day) Value: 14
  misc_feature: MA Experiment 20000173 PARAMETER Experiment Name: At_42deg_Heat_P Parameter: Organism Value: A. thaliana
  misc_feature: MA Experiment 20000173 PARAMETER Experiment Name: At_42deg_Heat_P Parameter: Plant Line Value: WS
  misc_feature: MA Experiment 20000173 PARAMETER Experiment Name: At_42deg_Heat_P Parameter: Temperature (deg C) Value: 42 vs. 22
  misc_feature: MA Experiment 20000173 PARAMETER Experiment Name: At_42deg_Heat_P Parameter: Timepoint (hr) Value: 6
  misc_feature: MA Experiment 20000173 PARAMETER Experiment Name: At_42deg_Heat_P Parameter: Tissue Value: Aerial
  misc_feature: MA Experiment ID: 20000180 Result: Down-regulated in Transcription
  misc_feature: MA Experiment 20000180 PARAMETER Experiment Name: At_Germinating_Seeds_P Parameter: Age (hr) Value: 24 vs. 0
  misc_feature: MA Experiment 20000180 PARAMETER Experiment Name: At_Germinating_Seeds_P Parameter: Tissue Value: Germinating Seeds
  misc_feature: MA Experiment ID: 20000182 Result: Up-regulated in Transcription
  misc_feature: MA Experiment 20000182 PARAMETER Experiment Name: At_2mM_SA_P Parameter: Age (day) Value: 14
  misc_feature: MA Experiment 20000182 PARAMETER Experiment Name: At_2mM_SA_P Parameter: Organism Value: A. thaliana
  misc_feature: MA Experiment 20000182 PARAMETER Experiment Name: At_2mM_SA_P Parameter: Plant Line Value: WS
  misc_feature: MA Experiment 20000182 PARAMETER Experiment Name: At_2mM_SA_P Parameter: Timepoint (hr) Value: 6
  misc_feature: MA Experiment 20000182 PARAMETER Experiment Name: At_2mM_SA_P Parameter: Tissue Value: Aerial
  misc_feature: MA Experiment 20000182 PARAMETER Experiment Name: At_2mM_SA_P Parameter: Treatment Value: 2mM SA vs. No Treatment
  misc_feature: MA Experiment ID: 20000184 Result: Down-regulated in Transcription
  misc_feature: MA Experiment 20000184 PARAMETER Experiment Name: At_Shoots__P Parameter: Age (day) Value: 7
  misc_feature: MA Experiment 20000184 PARAMETER Experiment Name: At_Shoots__P Parameter: Tissue Value: Shoots vs. Whole Plant
  misc_feature: MA Experiment ID: 20000224 Result: Down-regulated in Transcription
  misc_feature: MA Experiment ID: 20000227 Result: Down-regulated in Transcription
  misc_feature: MA Experiment 20000227 PARAMETER Experiment Name: At_Root-Tips-vs-Tops_P Parameter: Tissue Value: Root Tips vs. Root Tops
  misc_feature: MA Experiment ID: 20000234 Result: Down-regulated in Transcription
  misc_feature: MA Experiment 20000234 PARAMETER Experiment Name: At_Siliques_P Parameter: Age (day) Value: 21
  misc_feature: MA Experiment 20000234 PARAMETER Experiment Name: At_Siliques_P Parameter: Organism Value: A. thaliana
  misc_feature: MA Experiment 20000234 PARAMETER Experiment Name: At_Siliques_P Parameter: Plant Line Value: WS
  misc_feature: MA Experiment 20000234 PARAMETER Experiment Name: At_Siliques_P Parameter: Tissue Value: Less Than 5mm Siliques vs. Whole Plant
  misc_feature: MA Experiment ID: 20000235 Result: Down-regulated in Transcription
  misc_feature: MA Experiment 20000235 PARAMETER Experiment Name: At_Siliques_P Parameter: Age (day) Value: 21
  misc_feature: MA Experiment 20000235 PARAMETER Experiment Name: At_Siliques_P Parameter: Organism Value: A. thaliana
  misc_feature: MA Experiment 20000235 PARAMETER Experiment Name: At_Siliques_P Parameter: Plant Line Value: WS
  misc_feature: MA Experiment 20000235 PARAMETER Experiment Name: At_Siliques_P Parameter: Tissue Value: 5-10mm Siliques vs. Whole Plant
  misc_feature: MA Experiment ID: 20000265 Result: Down-regulated in Transcription
  misc_feature: MA Experiment 20000265 PARAMETER Experiment Name: At_Open_Flower_P Parameter: Age (day) Value: 21
  misc_feature: MA Experiment 20000265 PARAMETER Experiment Name: At_Open_Flower_P Parameter: Plant Line Value: WS
  misc_feature: MA Experiment 20000265 PARAMETER Experiment Name: At_Open_Flower_P Parameter: Tissue Value: Closed Flower vs. Whole Plant
  misc_feature: MA Experiment ID: 20000286 Result: Down-regulated in Transcription
  misc_feature: MA Experiment 20000286 PARAMETER Experiment Name: At_Open_Flower_P Parameter: Age (day) Value: 21
  misc_feature: MA Experiment 20000286 PARAMETER Experiment Name: At_Open_Flower_P Parameter: Plant Line Value: WS
  misc_feature: MA Experiment 20000286 PARAMETER Experiment Name: At_Open_Flower_P Parameter: Tissue Value: Half Open vs. Whole Plant
  misc_feature: MA Experiment ID: 20000436 Result: Up-regulated in Transcription
  misc_feature: MA Experiment 20000436 PARAMETER Experiment Name: At_Drought_P Parameter: Age (day) Value: 7
  misc_feature: MA Experiment 20000436 PARAMETER Experiment Name: At_Drought_P Parameter: Organism Value: A. thaliana
  misc_feature: MA Experiment 20000436 PARAMETER Experiment Name: At_Drought_P Parameter: Plant Line Value: WS
  misc_feature: MA Experiment 20000436 PARAMETER Experiment Name: At_Drought_P Parameter: Timepoint (hr) Value: 12
  misc_feature: MA Experiment 20000436 PARAMETER Experiment Name: At_Drought_P Parameter: Tissue Value: Whole Plant
  misc_feature: MA Experiment 20000436 PARAMETER Experiment Name: At_Drought_P Parameter: Treatment Value: Drought vs. No Drought
  misc_feature: MA Experiment ID: 20000437 Result: Up-regulated in Transcription
  misc_feature: MA Experiment 20000437 PARAMETER Experiment Name: At_Drought_P Parameter: Age (day) Value: 8
  misc_feature: MA Experiment 20000437 PARAMETER Experiment Name: At_Drought_P Parameter: Organism Value: A. thaliana
  misc_feature: MA Experiment 20000437 PARAMETER Experiment Name: At_Drought_P Parameter: Plant Line Value: WS
  misc_feature: MA Experiment 20000437 PARAMETER Experiment Name: At_Drought_P Parameter: Timepoint (hr) Value: 24
  misc_feature: MA Experiment 20000437 PARAMETER Experiment Name: At_Drought_P Parameter: Tissue Value: Whole Plant
  misc_feature: MA Experiment 20000437 PARAMETER Experiment Name: At_Drought_P Parameter: Treatment Value: Drought vs. No Drought
  misc_feature: MA Experiment ID: 20000438 Result: Down-regulated in Transcription
  misc_feature: MA Experiment 20000438 PARAMETER Experiment Name: At_Shoots__P Parameter: Age (day) Value: 14
  misc_feature: MA Experiment 20000438 PARAMETER Experiment Name: At_Shoots__P Parameter: Tissue Value: Shoots vs. Whole Plant
  misc_feature: MA Experiment ID: 20000495 Result: Down-regulated in Transcription
  misc_feature: MA Experiment 20000495 PARAMETER Experiment Name: At_Guard_Cells_P Parameter: Harvest Date Value: 8/2/2002
  misc_feature: MA Experiment 20000495 PARAMETER Experiment Name: At_Guard_Cells_P Parameter: Organism Value: A. thaliana
  misc_feature: MA Experiment 20000495 PARAMETER Experiment Name: At_Guard_Cells_P Parameter: Tissue Value: Guard Cells vs. Leaves
  misc_feature: MA Experiment ID: 20001248 Result: Up-regulated in Transcription
  misc_feature: MA Experiment 20001248 PARAMETER Experiment Name: At_Far-red-induction_P Parameter: Age (day) Value: 7
  misc_feature: MA Experiment 20001248 PARAMETER Experiment Name: At_Far-red-induction_P Parameter: Light Value: Far-red vs. White
  misc_feature: MA Experiment 20001248 PARAMETER Experiment Name: At_Far-red-induction_P Parameter: Organism Value: A. thaliana
  misc_feature: MA Experiment 20001248 PARAMETER Experiment Name: At_Far-red-induction_P Parameter: Plant Line Value: Columbia
  misc_feature: MA Experiment 20001248 PARAMETER Experiment Name: At_Far-red-induction_P Parameter: Timepoint (hr) Value: 4
  misc_feature: MA Experiment 20001248 PARAMETER Experiment Name: At_Far-red-induction_P Parameter: Tissue Value: Whole Plant
  misc_feature: MA Experiment ID: 20001450 Result: Up-regulated in Transcription
  misc_feature: MA Experiment 20001450 PARAMETER Experiment Name: At_Far-red-induction_P Parameter: Age (day) Value: 7
  misc_feature: MA Experiment 20001450 PARAMETER Experiment Name: At_Far-red-induction_P Parameter: Light Value: Far-red vs. White
  misc_feature: MA Experiment 20001450 PARAMETER Experiment Name: At_Far-red-induction_P Parameter: Organism Value: A. thaliana
  misc_feature: MA Experiment 20001450 PARAMETER Experiment Name: At_Far-red-induction_P Parameter: Plant Line Value: Columbia
  misc_feature: MA Experiment 20001450 PARAMETER Experiment Name: At_Far-red-induction_P Parameter: Timepoint (hr) Value: 8
  misc_feature: MA Experiment 20001450 PARAMETER Experiment Name: At_Far-red-induction_P Parameter: Tissue Value: Whole Plant
  misc_feature: MA Experiment ID: 20001554 Result: Up-regulated in Transcription
  misc_feature: MA Experiment 20001554 PARAMETER Experiment Name: At_Drought_Soil_Dry_P Parameter: Age (day) Value: 21
  misc_feature: MA Experiment 20001554 PARAMETER Experiment Name: At_Drought_Soil_Dry_P Parameter: Organism Value: A. thaliana
  misc_feature: MA Experiment 20001554 PARAMETER Experiment Name: At_Drought_Soil_Dry_P Parameter: Plant Line Value: WS
  misc_feature: MA Experiment 20001554 PARAMETER Experiment Name: At_Drought_Soil_Dry_P Parameter: Post Timepoint (hr) Value: None
  misc_feature: MA Experiment 20001554 PARAMETER Experiment Name: At_Drought_Soil_Dry_P Parameter: Post-Treatment Value: None
  misc_feature: MA Experiment 20001554 PARAMETER Experiment Name: At_Drought_Soil_Dry_P Parameter: Timepoint (day) Value: 7
  misc_feature: MA Experiment 20001554 PARAMETER Experiment Name: At_Drought_Soil_Dry_P Parameter: Treatment Value: Drought vs. No Drought
  misc_feature: MA Experiment ID: 20001557 Result: Down-regulated in Transcription
  misc_feature: MA Experiment 20001557 PARAMETER Experiment Name: At_Drought_Soil_Dry_P Parameter: Age (day) Value: 27
  misc_feature: MA Experiment 20001557 PARAMETER Experiment Name: At_Drought_Soil_Dry_P Parameter: Organism Value: A. thaliana
  misc_feature: MA Experiment 20001557 PARAMETER Experiment Name: At_Drought_Soil_Dry_P Parameter: Plant Line Value: WS
  misc_feature: MA Experiment 20001557 PARAMETER Experiment Name: At_Drought_Soil_Dry_P Parameter: Post Timepoint (hr) Value: 3
  misc_feature: MA Experiment 20001557 PARAMETER Experiment Name: At_Drought_Soil_Dry_P Parameter: Post-Treatment Value: Re-Water vs. No Drought
  misc_feature: MA Experiment 20001557 PARAMETER Experiment Name: At_Drought_Soil_Dry_P Parameter: Timepoint (day) Value: 13
  misc_feature: MA Experiment 20001557 PARAMETER Experiment Name: At_Drought_Soil_Dry_P Parameter: Treatment Value: Drought vs. No Drought
  misc_feature: MA Experiment ID: 20001558 Result: Down-regulated in Transcription
  misc_feature: MA Experiment 20001558 PARAMETER Experiment Name: At_Drought_Soil_Dry_P Parameter: Age (day) Value: 27
  misc_feature: MA Experiment 20001558 PARAMETER Experiment Name: At_Drought_Soil_Dry_P Parameter: Organism Value: A. thaliana
  misc_feature: MA Experiment 20001558 PARAMETER Experiment Name: At_Drought_Soil_Dry_P Parameter: Plant Line Value: WS
  misc_feature: MA Experiment 20001558 PARAMETER Experiment Name: At_Drought_Soil_Dry_P Parameter: Post Timepoint (hr) Value: 6
  misc_feature: MA Experiment 20001558 PARAMETER Experiment Name: At_Drought_Soil_Dry_P Parameter: Post-Treatment Value: Re-Water vs. No Drought
  misc_feature: MA Experiment 20001558 PARAMETER Experiment Name: At_Drought_Soil_Dry_P Parameter: Timepoint (day) Value: 13
  misc_feature: MA Experiment 20001558 PARAMETER Experiment Name: At_Drought_Soil_Dry_P Parameter: Treatment Value: Drought vs. No Drought
  misc_feature: MA Experiment ID: 20001560 Result: Down-regulated in Transcription
  misc_feature: MA Experiment 20001560 PARAMETER Experiment Name: At_Drought_Soil_Dry_P Parameter: Age (day) Value: 28
  misc_feature: MA Experiment 20001560 PARAMETER Experiment Name: At_Drought_Soil_Dry_P Parameter: Organism Value: A. thaliana
  misc_feature: MA Experiment 20001560 PARAMETER Experiment Name: At_Drought_Soil_Dry_P Parameter: Plant Line Value: WS
  misc_feature: MA Experiment 20001560 PARAMETER Experiment Name: At_Drought_Soil_Dry_P Parameter: Post Timepoint (hr) Value: None
  misc_feature: MA Experiment 20001560 PARAMETER Experiment Name: At_Drought_Soil_Dry_P Parameter: Post-Treatment Value: None
  misc_feature: MA Experiment 20001560 PARAMETER Experiment Name: At_Drought_Soil_Dry_P Parameter: Timepoint (day) Value: 14
  misc_feature: MA Experiment 20001560 PARAMETER Experiment Name: At_Drought_Soil_Dry_P Parameter: Treatment Value: Drought vs. No Drought
  misc_feature: MA Experiment ID: 20001906 Result: Up-regulated in Transcription
  misc_feature: MA Experiment 20001906 PARAMETER Experiment Name: At_Drought_Reproduction_P Parameter: Age (day) Value: 35
  misc_feature: MA Experiment 20001906 PARAMETER Experiment Name: At_Drought_Reproduction_P Parameter: Organism Value: A. thaliana
  misc_feature: MA Experiment 20001906 PARAMETER Experiment Name: At_Drought_Reproduction_P Parameter: Plant Line Value: WS
  misc_feature: MA Experiment 20001906 PARAMETER Experiment Name: At_Drought_Reproduction_P Parameter: Timepoint (day) Value: 5
  misc_feature: MA Experiment 20001906 PARAMETER Experiment Name: At_Drought_Reproduction_P Parameter: Tissue Value: Siliques
  misc_feature: MA Experiment 20001906 PARAMETER Experiment Name: At_Drought_Reproduction_P Parameter: Treatment Value: Drought vs. No Drought
  misc_feature: MA Experiment ID: 20001908 Result: Up-regulated in Transcription
  misc_feature: MA Experiment 20001908 PARAMETER Experiment Name: At_Drought_Reproduction_P Parameter: Age (day) Value: 40
  misc_feature: MA Experiment 20001908 PARAMETER Experiment Name: At_Drought_Reproduction_P Parameter: Organism Value: A. thaliana
  misc_feature: MA Experiment 20001908 PARAMETER Experiment Name: At_Drought_Reproduction_P Parameter: Plant Line Value: WS
  misc_feature: MA Experiment 20001908 PARAMETER Experiment Name: At_Drought_Reproduction_P Parameter: Timepoint (day) Value: 10
  misc_feature: MA Experiment 20001908 PARAMETER Experiment Name: At_Drought_Reproduction_P Parameter: Tissue Value: Siliques
  misc_feature: MA Experiment 20001908 PARAMETER Experiment Name: At_Drought_Reproduction_P Parameter: Treatment Value: Drought vs. No Drought
  misc_feature: MA Experiment ID: 20001911 Result: Up-regulated in Transcription
  misc_feature: MA Experiment 20001911 PARAMETER Experiment Name: At_Drought_Reproduction_P Parameter: Age (day) Value: 40
  misc_feature: MA Experiment 20001911 PARAMETER Experiment Name: At_Drought_Reproduction_P Parameter: Organism Value: A. thaliana
  misc_feature: MA Experiment 20001911 PARAMETER Experiment Name: At_Drought_Reproduction_P Parameter: Plant Line Value: WS
  misc_feature: MA Experiment 20001911 PARAMETER Experiment Name: At_Drought_Reproduction_P Parameter: Timepoint (day) Value: 10
  misc_feature: MA Experiment 20001911 PARAMETER Experiment Name: At_Drought_Reproduction_P Parameter: Tissue Value: Flowers
  misc_feature: MA Experiment 20001911 PARAMETER Experiment Name: At_Drought_Reproduction_P Parameter: Treatment Value: Drought vs. No Drought
agccgccgctttcacttacctcttcctcttccttcttcttcttctaccttcttctcgtaaaggttttgctacacactggagctcgcaaatctggctatcgaaaaccacaatcacaaactcaacttcggggccttcaaggccaatcacaagaaagtcatgggaccaatgataagaacagaggaagaagaagactatacaagtccaccgtggctaatgccaatgctacgagggagttacttcgtcccttgttccatccatgtcgattcaaacaaaaacgaatgcaatttgttctgtcttgattgtgctggaaatgccttttgctcttactgtttagtcaaacataaagaccatcgtgttgttcagatacgaagatcttcgtaccataacgttgtgagagtgaatgagatacagaagttcatagacatcgcttgtgttcagacatatattatcaacagcgcaaagatcgtgttcctcaatgaaagacctcagcctagaatcggtaaaggtgttacaaacacttgtgaaatctgttgcagaagtctccttgattctttcaggttctgctctctcggctgcaagcttggaggaatgaggagaggagatttatctctaaccttctctttgaaaggaaagcatgggagagagtaccttggtgggtcggaatcagatgaagctactacaccgactaagatgcgtaagaccaatgctttcaaccgtctgatgagtggtctctcgatctcaaccgttagattcgatgactacggtcccaatggtgatcaaaggtcttcaagctctggtgatgaaggtggttttagtttctctccgggaacacctccgatctataatcaccggaattcaagcagacgaaagggtgtccctcaccgtgctccgttctaagaaaagataattactaaatttccaaccccatagtaattaattatatatatatatatatagataatggtataatacaatgtataacttggggtgaaatttaggatgtagtcataatgttgtaaatgtgtattatttctttttatagtttttctaaaagataaaggtgaaataattagaacacatacataaatacattttttataagtatagaagaattaggttttatagtggaagtgtttgatgtttagtttgtttaaaaggcatggctttgtcttgtgttgtaatgtaatgtgtacattaaatttttgttcatacaataataatatcaaggtgaatgatatattat

SEQ ID NO: 103349 - protein, 246 aa, Arabidopsis thaliana; identical to SEQ ID NO: 41222
  peptide (1)..(246): Ceres Seq. ID no. 13612584
  misc_feature (13)..(240): Pfam Name: Protein of unknown function, DUF597 Pfam Description: Protein of unknown function, DUF597
  misc_feature (1)..(246): Homolog of NCBI NO: 18394936 NR Description: expressed protein [Arabidopsis thaliana] At1g21000/F9H16_1 [Arabidopsis thaliana]
  misc_feature (1)..(246): Homolog of NCBI NO: 21537073 NR Description: unknown [Arabidopsis thaliana]
  misc_feature (4)..(246): Homolog of NCBI NO: 25337907 NR Description: hypothetical protein F9H16.1 - Arabidopsis >gi|4836888|gb|AAD30591.1|AC007369_1 Unknown protein [Arabidopsis >gi|13877713|gb|AAK43934.1|AF370615_1 Unknown protein
  misc_feature (1)..(246): Homolog of NCBI NO: 18411153 NR Description: expressed protein [Arabidopsis thaliana]
  misc_feature (4)..(246): Homolog of NCBI NO: 21536890 NR Description: unknown [Arabidopsis thaliana]
  misc_feature (4)..(246): Homolog of NCBI NO: 25337904 NR Description: unknown protein F14G6.19 [imported] - Arabidopsis
  misc_feature (9)..(195): Homolog of NCBI NO: 15217560 NR Description: hypothetical protein [Arabidopsis thaliana]
  misc_feature (1)..(147): Homolog of NCBI NO: 6714272 NR Description: F6N18.8 [Arabidopsis thaliana]
  misc_feature (1)..(178): Homolog of NCBI NO: 37537092 NR Description: unknown protein [Oryza sativa (japonica
  misc_feature (210)..(246): Homolog of NCBI NO: 37537092 NR Description: unknown protein [Oryza sativa (japonica

SEQ ID NO: 103350 - protein, 243 aa, Arabidopsis thaliana; identical to SEQ ID NO: 41223
  peptide (1)..(243): Ceres Seq. ID no. 13612585
  misc_feature (10)..(237): Pfam Name: Protein of unknown function, DUF597 Pfam Description: Protein of unknown function, DUF597
  misc_feature (1)..(243): Homolog of NCBI NO: 18394936 NR Description: expressed protein [Arabidopsis thaliana] At1g21000/F9H16_1 [Arabidopsis thaliana]
  misc_feature (1)..(243): Homolog of NCBI NO: 21537073 NR Description: unknown [Arabidopsis thaliana]
  misc_feature (1)..(243): Homolog of NCBI NO: 25337907 NR Description: hypothetical protein F9H16.1 - Arabidopsis >gi|4836888|gb|AAD30591.1|AC007369_1 Unknown protein [Arabidopsis >gi|13877713|gb|AAK43934.1|AF370615_1 Unknown protein
  misc_feature (1)..(243): Homolog of NCBI NO: 18411153 NR Description: expressed protein [Arabidopsis thaliana]
  misc_feature (1)..(243): Homolog of NCBI NO: 21536890 NR Description: unknown [Arabidopsis thaliana]
  misc_feature (1)..(243): Homolog of NCBI NO: 25337904 NR Description: unknown protein F14G6.19 [imported] - Arabidopsis
  misc_feature (6)..(192): Homolog of NCBI NO: 15217560 NR Description: hypothetical protein [Arabidopsis thaliana]
  misc_feature (1)..(144): Homolog of NCBI NO: 6714272 NR Description: F6N18.8 [Arabidopsis thaliana]
  misc_feature (1)..(175): Homolog of NCBI NO: 37537092 NR Description: unknown protein [Oryza sativa (japonica
  misc_feature (207)..(243): Homolog of NCBI NO: 37537092 NR Description: unknown protein [Oryza sativa (japonica

SEQ ID NO: 103351 - protein, 227 aa, Arabidopsis thaliana; identical to SEQ ID NO: 41224
  peptide (1)..(227): Ceres Seq. ID no. 13612586
  misc_feature (1)..(221): Pfam Name: Protein of unknown function, DUF597 Pfam Description: Protein of unknown function, DUF597
  misc_feature (1)..(227): Homolog of NCBI NO: 18394936 NR Description: expressed protein [Arabidopsis thaliana] At1g21000/F9H16_1 [Arabidopsis thaliana]
  misc_feature (1)..(227): Homolog of NCBI NO: 21537073 NR Description: unknown [Arabidopsis thaliana]
  misc_feature (1)..(227): Homolog of NCBI NO: 25337907 NR Description: hypothetical protein F9H16.1 - Arabidopsis >gi|4836888|gb|AAD30591.1|AC007369_1 Unknown protein [Arabidopsis >gi|13877713|gb|AAK43934.1|AF370615_1 Unknown protein
  misc_feature (1)..(227): Homolog of NCBI NO: 18411153 NR Description: expressed protein [Arabidopsis thaliana]
  misc_feature (1)..(227): Homolog of NCBI NO: 21536890 NR Description: unknown [Arabidopsis thaliana]
  misc_feature (1)..(227): Homolog of NCBI NO: 25337904 NR Description: unknown protein F14G6.19 [imported] - Arabidopsis
  misc_feature (1)..(176): Homolog of NCBI NO: 15217560 NR Description: hypothetical protein [Arabidopsis thaliana]
  misc_feature (1)..(128): Homolog of NCBI NO: 6714272 NR Description: F6N18.8 [Arabidopsis thaliana]
  misc_feature (1)..(159): Homolog of NCBI NO: 37537092 NR Description: unknown protein [Oryza sativa (japonica
  misc_feature (191)..(227): Homolog of NCBI NO: 37537092 NR Description: unknown protein [Oryza sativa (japonica

SEQ ID NO: 103352 - DNA, 1293 bp, Arabidopsis thaliana
  misc_feature (1)..(1293): Ceres Seq. ID no. 13612594
  misc_feature: MA Experiment ID: 108461 Result: Up-regulated in Transcription
  misc_feature: MA Experiment 108461 PARAMETER Experiment Name: At_Germinating_Seeds_cDNA_P Parameter: Age (day) Value: 1 vs. 0
  misc_feature: MA Experiment 108461 PARAMETER Experiment Name: At_Germinating_Seeds_cDNA_P Parameter: Tissue Value: Germinating Seeds
  misc_feature: MA Experiment ID: 108462 Result: Up-regulated in Transcription
  misc_feature: MA Experiment 108462 PARAMETER Experiment Name: At_Germinating_Seeds_cDNA_P Parameter: Age (day) Value: 2 vs. 0
  misc_feature: MA Experiment 108462 PARAMETER Experiment Name: At_Germinating_Seeds_cDNA_P Parameter: Tissue Value: Germinating Seeds
  misc_feature: MA Experiment ID: 108463 Result: Up-regulated in Transcription
  misc_feature: MA Experiment 108463 PARAMETER Experiment Name: At_Germinating_Seeds_cDNA_P Parameter: Age (day) Value: 3 vs. 0
  misc_feature: MA Experiment 108463 PARAMETER Experiment Name: At_Germinating_Seeds_cDNA_P Parameter: Tissue Value: Germinating Seeds
  misc_feature: MA Experiment ID: 108573 Result: Up-regulated in Transcription
  misc_feature: MA Experiment 108573 PARAMETER Experiment Name: At_Drought_cDNA_P Parameter: Timepoint (hr) Value: 6
  misc_feature: MA Experiment 108573 PARAMETER Experiment Name: At_Drought_cDNA_P Parameter: Tissue Value: Aerial
  misc_feature: MA Experiment 108573 PARAMETER Experiment Name: At_Drought_cDNA_P Parameter: Treatment Value: Drought vs. No Drought
  misc_feature: MA Experiment ID: 20000224 Result: Up-regulated in Transcription
  misc_feature: MA Experiment ID: 20000227 Result: Up-regulated in Transcription
  misc_feature: MA Experiment 20000227 PARAMETER Experiment Name: At_Root-Tips-vs-Tops_P Parameter: Tissue Value: Root Tips vs. Root Tops
  misc_feature: MA Experiment ID: 20000265 Result: Up-regulated in Transcription
  misc_feature: MA Experiment 20000265 PARAMETER Experiment Name: At_Open_Flower_P Parameter: Age (day) Value: 21
  misc_feature: MA Experiment 20000265 PARAMETER Experiment Name: At_Open_Flower_P Parameter: Plant Line Value: WS
  misc_feature: MA Experiment 20000265 PARAMETER Experiment Name: At_Open_Flower_P Parameter: Tissue Value: Closed Flower vs. Whole Plant
ggaaccaattggttctgatttcagatttcgaatttttttaatttgaatccaaatggagaaagcagagaacgagaagaagccatcggctgtatctgacgtcggagcatgggctatgaacgtaacgagctccgttgggatcatcatggctaataaacaactaatgtcatcatctggattcggcttcagcttcgcgacaactctcacgggatttcactttgctcttactgctctcgttggtatggtgtcgaatgcgactggtttatcagcatctaagcatgttcctctttgggagcttctttggttctcactcgttgctaatatctcaatcgctgctatgaattttagtcttatgttgaactctgttggcttctaccagatatcgaaattgagcatgattccagttgtttgtgtgatggaatgggttctacatagtaagcattactcgagagaagtgaaggcatctgtcatggttgttgttgtaggagttgggatttgtactgttactgatgtcaaagttaatgccaaaggtttcatttgtgcttgcactgccgttttctccacttctctccagcagatctcaataggttcactgcagaagaaatactcgatcggatcattcgagttgctgagtaagacagctccaatccaagccatttcactcctcatctttggtccatttgttgactatttcttgagtggcagattcatttcgacttacaagatgacttatagcgcaatgttatgcattcttctctcctgcgcattggcggttttctgcaacataagccaatatctctgcatcggaagattctctgctacctcattccaagttcttggccacatgaaaacagtctgtgtcttaacattaggatggcttatctttgattcggagatgacattcaagaacatagcagggatggtcttagccgtggtgggaatggtgatatacagttgggcagtcgagttagagaaacagagaaagtcgaaagtgataccgcatggtaaacacagtatgacagaagatgagattaaacttctcaaagaaggtatagaacatatggatttgaaagacatggagcttggaaataataaagcataaatatagctctattcaagagaaacgttttttggttatatttttggttactcatttcccccatcatgtactcttttcttttgccctttttttcgttctttgtctcaaagaacctttttagcctcttattgatgagctctcctctgcagagcacattcttttttctatagaaatatatgattcctctacttctttgc

SEQ ID NO: 103353 - protein, 348 aa, Arabidopsis thaliana
  peptide (1)..(348): Ceres Seq. ID no. 13612595
  misc_feature (1)..(348): Homolog of NCBI NO: 18394949 NR Description: transporter-related [Arabidopsis thaliana]
  misc_feature (1)..(348): Homolog of NCBI NO: 21536703 NR Description: unknown [Arabidopsis thaliana]
  misc_feature (1)..(347): Homolog of NCBI NO: 18411172 NR Description: transporter-related [Arabidopsis thaliana]
  misc_feature (37)..(348): Homolog of NCBI NO: 26450366 NR Description: unknown protein [Arabidopsis thaliana]
  misc_feature (4)..(347): Homolog of NCBI NO: 15238957 NR Description: transporter-related [Arabidopsis thaliana] gb|AAF04433.1~gene_id:MDH9.11~strong similarity to unknown
  misc_feature (42)..(348): Homolog of NCBI NO: 33146838 NR Description: transporter-related-like [Oryza sativa (japonica
  misc_feature (5)..(48): Homolog of NCBI NO: 33146838 NR Description: transporter-related-like [Oryza sativa (japonica
  misc_feature (7)..(318): Homolog of NCBI NO: 30313364 NR Description: putative transmembrane protein [Oryza sativa]
  misc_feature (5)..(337): Homolog of NCBI NO: 15234794 NR Description: transporter-related [Arabidopsis thaliana]
  misc_feature (1)..(315): Homolog of NCBI NO: 18399097 NR Description: transporter-related [Arabidopsis thaliana]
MEKAENEKKPSAVSDVGAWAMNVTSSVGIIMANKQLMSSSGFGFSFATTLTGFHFALTALVGMVSNATGLSASKHVPLWELLWFSLVANISIAAMNFSLMLNSVGFYQISKLSMIPVVCVMEWVLHSKHYSREVKASVMVVVVGVGICTVTDVKVNAKGFICACTAVFSTSLQQISIGSLQKKYSIGSFELLSKTAPIQAISLLIFGPFVDYFLSGRFISTYKMTYSAMLCILLSCALAVFCNISQYLCIGRFSATSFQVLGHMKTVCVLTLGWLIFDSEMTFKNIAGMVLAVVGMVIYSWAVELEKQRKSKVIPHGKHSMTEDEIKLLKEGIEHMDLKDMELGNNKA

SEQ ID NO: 103354 - protein, 328 aa, Arabidopsis thaliana
  peptide (1)..(328): Ceres Seq. ID no. 13612596
  misc_feature (1)..(328): Homolog of NCBI NO: 18394949 NR Description: transporter-related [Arabidopsis thaliana]
  misc_feature (1)..(328): Homolog of NCBI NO: 21536703 NR Description: unknown [Arabidopsis thaliana]
  misc_feature (1)..(327): Homolog of NCBI NO: 18411172 NR Description: transporter-related [Arabidopsis thaliana]
  misc_feature (17)..(328): Homolog of NCBI NO: 26450366 NR Description: unknown protein [Arabidopsis thaliana]
  misc_feature (1)..(327): Homolog of NCBI NO: 15238957 NR Description: transporter-related [Arabidopsis thaliana] gb|AAF04433.1~gene_id:MDH9.11~strong similarity to unknown
  misc_feature (22)..(328): Homolog of NCBI NO: 33146838 NR Description: transporter-related-like [Oryza sativa (japonica
  misc_feature (1)..(28): Homolog of NCBI NO: 33146838 NR Description: transporter-related-like [Oryza sativa (japonica
  misc_feature (1)..(298): Homolog of NCBI NO: 30313364 NR Description: putative transmembrane protein [Oryza sativa]
  misc_feature (1)..(317): Homolog of NCBI NO: 15234794 NR Description: transporter-related [Arabidopsis thaliana]
  misc_feature (1)..(295): Homolog of NCBI NO: 18399097 NR Description: transporter-related [Arabidopsis thaliana]
MNVTSSVGIIMANKQLMSSSGFGFSFATTLTGFHFALTALVGMVSNATGLSASKHVPLWELLWFSLVANISIAAMNFSLMLNSVGFYQISKLSMIPVVCVMEWVLHSKHYSREVKASVMVVVVGVGICTVTDVKVNAKGFICACTAVFSTSLQQISIGSLQKKYSIGSFELLSKTAPIQAISLLIFGPFVDYFLSGRFISTYKMTYSAMLCILLSCALAVFCNISQYLCIGRFSATSFQVLGHMKTVCVLTLGWLIFDSEMTFKNIAGMVLAVVGMVIYSWAVELEKQRKSKVIPHGKHSMTEDEIKLLKEGIEHMDLKDMELGNNKA

SEQ ID NO: 103355 - protein, 318 aa, Arabidopsis thaliana
  peptide (1)..(318): Ceres Seq. ID no. 13612597
  misc_feature (1)..(318): Homolog of NCBI NO: 18394949 NR Description: transporter-related [Arabidopsis thaliana]
  misc_feature (1)..(318): Homolog of NCBI NO: 21536703 NR Description: unknown [Arabidopsis thaliana]
  misc_feature (1)..(317): Homolog of NCBI NO: 18411172 NR Description: transporter-related [Arabidopsis thaliana]
  misc_feature (7)..(318): Homolog of NCBI NO: 26450366 NR Description: unknown protein [Arabidopsis thaliana]
  misc_feature (1)..(317): Homolog of NCBI NO: 15238957 NR Description: transporter-related [Arabidopsis thaliana] gb|AAF04433.1~gene_id:MDH9.11~strong similarity to unknown
  misc_feature (12)..(318): Homolog of NCBI NO: 33146838 NR Description: transporter-related-like [Oryza sativa (japonica
  misc_feature (1)..(18): Homolog of NCBI NO: 33146838 NR Description: transporter-related-like [Oryza sativa (japonica
  misc_feature (1)..(288): Homolog of NCBI NO: 30313364 NR Description: putative transmembrane protein [Oryza sativa]
  misc_feature (1)..(307): Homolog of NCBI NO: 15234794 NR Description: transporter-related [Arabidopsis thaliana]
  misc_feature (1)..(285): Homolog of NCBI NO: 18399097 NR Description: transporter-related [Arabidopsis thaliana]
MANKQLMSSSGFGFSFATTLTGFHFALTALVGMVSNATGLSASKHVPLWELLWFSLVANISIAAMNFSLMLNSVGFYQISKLSMIPVVCVMEWVLHSKHYSREVKASVMVVVVGVGICTVTDVKVNAKGFICACTAVFSTSLQQISIGSLQKKYSIGSFELLSKTAPIQAISLLIFGPFVDYFLSGRFISTYKMTYSAMLCILLSCALAVFCNISQYLCIGRFSATSFQVLGHMKTVCVLTLGWLIFDSEMTFKNIAGMVLAVVGMVIYSWAVELEKQRKSKVIPHGKHSMTEDEIKLLKEGIEHMDLKDMELGNNKA

SEQ ID NO: 103356 - DNA, 1593 bp, Arabidopsis thaliana
  misc_feature (1)..(1593): Ceres Seq. ID no. 13612598
  misc_feature: MA Experiment ID: 108434 Result: Down-regulated in Transcription
  misc_feature: MA Experiment 108434 PARAMETER Experiment Name: At_Root_Tips_cDNA_P Parameter: Tissue Value: Root Tips
  misc_feature: MA Experiment ID: 108461 Result: Up-regulated in Transcription
  misc_feature: MA Experiment 108461 PARAMETER Experiment Name: At_Germinating_Seeds_cDNA_P Parameter: Age (day) Value: 1 vs. 0
  misc_feature: MA Experiment 108461 PARAMETER Experiment Name: At_Germinating_Seeds_cDNA_P Parameter: Tissue Value: Germinating Seeds
  misc_feature: MA Experiment ID: 108462 Result: Up-regulated in Transcription
  misc_feature: MA Experiment 108462 PARAMETER Experiment Name: At_Germinating_Seeds_cDNA_P Parameter: Age (day) Value: 2 vs. 0
  misc_feature: MA Experiment 108462 PARAMETER Experiment Name: At_Germinating_Seeds_cDNA_P Parameter: Tissue Value: Germinating Seeds
  misc_feature: MA Experiment ID: 108463 Result: Up-regulated in Transcription
  misc_feature: MA Experiment 108463 PARAMETER Experiment Name: At_Germinating_Seeds_cDNA_P Parameter: Age (day) Value: 3 vs. 0
  misc_feature: MA Experiment 108463 PARAMETER Experiment Name: At_Germinating_Seeds_cDNA_P Parameter: Tissue Value: Germinating Seeds
  misc_feature: MA Experiment ID: 108464 Result: Up-regulated in Transcription
  misc_feature: MA Experiment 108464 PARAMETER Experiment Name: At_Germinating_Seeds_cDNA_P Parameter: Age (day) Value: 4 vs. 0
  misc_feature: MA Experiment 108464 PARAMETER Experiment Name: At_Germinating_Seeds_cDNA_P Parameter: Tissue Value: Germinating Seeds
  misc_feature: MA Experiment ID: 108488 Result: Down-regulated in Transcription
  misc_feature: MA Experiment ID: 108595 Result: Down-regulated in Transcription
  misc_feature: MA Experiment 108595 PARAMETER Experiment Name: At_Ler-pi_Ovule_cDNA_P Parameter: Plant Line Value: null
  misc_feature: MA Experiment ID: 20000495 Result: Down-regulated in Transcription
  misc_feature: MA Experiment 20000495 PARAMETER Experiment Name: At_Guard_Cells_P Parameter: Harvest Date Value: 8/2/2002
  misc_feature: MA Experiment 20000495 PARAMETER Experiment Name: At_Guard_Cells_P Parameter: Organism Value: A. thaliana
  misc_feature: MA Experiment 20000495 PARAMETER Experiment Name: At_Guard_Cells_P Parameter: Tissue Value: Guard Cells vs. Leaves
  misc_feature: MA Experiment ID: 20001558 Result: Down-regulated in Transcription
  misc_feature: MA Experiment 20001558 PARAMETER Experiment Name: At_Drought_Soil_Dry_P Parameter: Age (day) Value: 27
  misc_feature: MA Experiment 20001558 PARAMETER Experiment Name: At_Drought_Soil_Dry_P Parameter: Organism Value: A. thaliana
  misc_feature: MA Experiment 20001558 PARAMETER Experiment Name: At_Drought_Soil_Dry_P Parameter: Plant Line Value: WS
  misc_feature: MA Experiment 20001558 PARAMETER Experiment Name: At_Drought_Soil_Dry_P Parameter: Post Timepoint (hr) Value: 6
  misc_feature: MA Experiment 20001558 PARAMETER Experiment Name: At_Drought_Soil_Dry_P Parameter: Post-Treatment Value: Re-Water vs. No Drought
  misc_feature: MA Experiment 20001558 PARAMETER Experiment Name: At_Drought_Soil_Dry_P Parameter: Timepoint (day) Value: 13
  misc_feature: MA Experiment 20001558 PARAMETER Experiment Name: At_Drought_Soil_Dry_P Parameter: Treatment Value: Drought vs. No Drought
  misc_feature: MA Experiment ID: 20001560 Result: Down-regulated in Transcription
  misc_feature: MA Experiment 20001560 PARAMETER Experiment Name: At_Drought_Soil_Dry_P Parameter: Age (day) Value: 28
  misc_feature: MA Experiment 20001560 PARAMETER Experiment Name: At_Drought_Soil_Dry_P Parameter: Organism Value: A. thaliana
  misc_feature: MA Experiment 20001560 PARAMETER Experiment Name: At_Drought_Soil_Dry_P Parameter: Plant Line Value: WS
  misc_feature: MA Experiment 20001560 PARAMETER Experiment Name: At_Drought_Soil_Dry_P Parameter: Post Timepoint (hr) Value: None
  misc_feature: MA Experiment 20001560 PARAMETER Experiment Name: At_Drought_Soil_Dry_P Parameter: Post-Treatment Value: None
  misc_feature: MA Experiment 20001560 PARAMETER Experiment Name: At_Drought_Soil_Dry_P Parameter: Timepoint (day) Value: 14
  misc_feature: MA Experiment 20001560 PARAMETER Experiment Name: At_Drought_Soil_Dry_P Parameter: Treatment Value: Drought vs. No Drought
aggagcggttgagttgaaatttgctggcgcgtactcgtcaacgtaacgcgcgtggagtgttttcgtgtccctcctcctcctcctcctcctcactaagacaaatattttgaggttctctttctcgtttgtgtgatctgtctgacaagctagaagaatcgtagatcgtgatcggattgatttgataattatggtgaaggagacggagttttacgatgtcctcggcgttagccccaccgctacggaggctgagattaagaaagcttattacatcaaggcacgccaagtgcatccagataaaaaccctaatgatcctcaggctgctcataatttccaggtattgggagaggcctaccaagtgctaagtgatccagggcaacgtcaggcctatgacacatctgggaagtcagggatttcaactgagatcattgatcctgcggctatatttgctatgctttttgggagtgaactctttgaagaatacatagggcagcttgctatggcatcaatggcttcacttgatatcttcactgaaggggatcagattgatactaaaaagattatagaaaaaatgagggctgttcagaaagaaagagaagacaaacttgctcagattcttaaggaccgcctcaacctatatatgacgaacaaagatgaatttactagcaatgctgaagctgaagtaacaagactctcaaatgcagcatacggggtggaaatgttgaacacaatcggatatatatatgtcagacaagcggcaaaagagcttgggaagaaagctatttatctcggtgtgccattcgtagctgaatggtttaggacgaaaggtcacttcatcaaatcccaagtaacagctgcaacaggtgcatacgctttattccagctgcaagaggaaatgaaaaggcaactaagtgctgaaggcaattataccgagaaggaacttgaagagtacatgaagacccataagaaagtaatgattgattctctgtggaagctcaatgttgctgatatcgaaagcactatctcccgtgtttgtgagcaggtacttcaagatcccactgccaagagagaggagcttcgtgcaagggccaaggggttaaaaactctgggaaagatcttccagaagaacaagatagccagtgagagtgatcctttagtaagagccgaacttcacaaactaaacggaaatggtcaagaacatgatcattcatccacatcaccaaaatctgatgaagcatctcgctctaccgttggacctcaggaaccgcaaagcccttatgtggaagcaccgaaacttggagaagagcaaatcaactattacttcccaaggcctgcgccgcctccaggagcacagagacactcttaaactggcaatggattgattcacagatgaacgaaaaggttattttttcctttttttgctatataatataagtctttatgcatatttgatatatttgcaggcgttggtattaccattatgtaatttttattattgttagaagaagaaattattggatctttgaaaaaagcacatgttatctcatcttagacaatgtataatgtttttattctatttatatatttgatgtttgg

SEQ ID NO: 103357 - protein, 391 aa, Arabidopsis thaliana; identical to SEQ ID NO: 24955
  peptide (1)..(391): Ceres Seq. ID no. 13612599
  misc_feature (6)..(71): Pfam Name: DnaJ domain Pfam Description: DnaJ domain
  misc_feature (1)..(391): Homolog of NCBI NO: 18394951 NR Description: DnaJ protein family [Arabidopsis thaliana]
  misc_feature (1)..(391): Homolog of NCBI NO: 15223142 NR Description: DnaJ protein family [Arabidopsis thaliana]
  misc_feature (1)..(391): Homolog of NCBI NO: 26449747 NR Description: putative DnaJ protein [Arabidopsis thaliana]
  misc_feature (1)..(386): Homolog of NCBI NO: 2230757 NR Description: dnaJ-like protein [Arabidopsis thaliana]
  misc_feature (88)..(391): Homolog of NCBI NO: 15982848 NR Description: At1g21080/T22I11_9 [Arabidopsis thaliana]
  misc_feature (130)..(389): Homolog of NCBI NO: 27817868 NR Description: OJ1081_B12.17 [Oryza sativa (japonica
  misc_feature (1)..(130): Homolog of NCBI NO: 27817868 NR Description: OJ1081_B12.17 [Oryza sativa (japonica
  misc_feature (1)..(355): Homolog of NCBI NO: 30699227 NR Description: DnaJ protein family [Arabidopsis thaliana]
  misc_feature (1)..(314): Homolog of NCBI NO: 15226572 NR Description: DnaJ protein family [Arabidopsis thaliana]
  misc_feature (1)..(344): Homolog of NCBI NO: 15234962 NR Description: DnaJ protein family [Arabidopsis thaliana]

SEQ ID NO: 103358 - protein, 304 aa, Arabidopsis thaliana; identical to SEQ ID NO: 24956
  peptide (1)..(304): Ceres Seq. ID no. 13612600
  misc_feature (1)..(304): Homolog of NCBI NO: 18394951 NR Description: DnaJ protein family [Arabidopsis thaliana]
  misc_feature (1)..(304): Homolog of NCBI NO: 15223142 NR Description: DnaJ protein family [Arabidopsis thaliana]
  misc_feature (1)..(304): Homolog of NCBI NO: 26449747 NR Description: putative DnaJ protein [Arabidopsis thaliana]
  misc_feature (1)..(299): Homolog of NCBI NO: 2230757 NR Description: dnaJ-like protein [Arabidopsis thaliana]
  misc_feature (1)..(304): Homolog of NCBI NO: 15982848 NR Description: At1g21080/T22I11_9 [Arabidopsis thaliana]
  misc_feature (43)..(302): Homolog of NCBI NO: 27817868 NR Description: OJ1081_B12.17 [Oryza sativa (japonica
  misc_feature (1)..(43): Homolog of NCBI NO: 27817868 NR Description: OJ1081_B12.17 [Oryza sativa (japonica
  misc_feature (1)..(268): Homolog of NCBI NO: 30699227 NR Description: DnaJ protein family [Arabidopsis thaliana]
  misc_feature (1)..(227): Homolog of NCBI NO: 15226572 NR Description: DnaJ protein family [Arabidopsis thaliana]
  misc_feature (1)..(257): Homolog of NCBI NO: 15234962 NR Description: DnaJ protein family [Arabidopsis thaliana]

SEQ ID NO: 103359 - protein, 288 aa, Arabidopsis thaliana; identical to SEQ ID NO: 24957
  peptide (1)..(288): Ceres Seq. ID no. 13612601
  misc_feature (1)..(288): Homolog of NCBI NO: 18394951 NR Description: DnaJ protein family [Arabidopsis thaliana]
  misc_feature (1)..(288): Homolog of NCBI NO: 15223142 NR Description: DnaJ protein family [Arabidopsis thaliana]
  misc_feature (1)..(288): Homolog of NCBI NO: 26449747 NR Description: putative DnaJ protein [Arabidopsis thaliana]
  misc_feature (1)..(283): Homolog of NCBI NO: 2230757 NR Description: dnaJ-like protein [Arabidopsis thaliana]
  misc_feature (1)..(288): Homolog of NCBI NO: 15982848 NR Description: At1g21080/T22I11_9 [Arabidopsis thaliana]
  misc_feature (27)..(286): Homolog of NCBI NO: 27817868 NR Description: OJ1081_B12.17 [Oryza sativa (japonica
  misc_feature (1)..(27): Homolog of NCBI NO: 27817868 NR Description: OJ1081_B12.17 [Oryza sativa (japonica
  misc_feature (1)..(252): Homolog of NCBI NO: 30699227 NR Description: DnaJ protein family [Arabidopsis thaliana]
  misc_feature (1)..(211): Homolog of NCBI NO: 15226572 NR Description: DnaJ protein family [Arabidopsis thaliana]
  misc_feature (1)..(241): Homolog of NCBI NO: 15234962 NR Description: DnaJ protein family [Arabidopsis thaliana]

SEQ ID NO: 103360 - DNA, 1356 bp, Arabidopsis thaliana
  misc_feature (1)..(1356): Ceres Seq. ID no. 13612605
  misc_feature: MA Experiment ID: 108434 Result: Down-regulated in Transcription
  misc_feature: MA Experiment 108434 PARAMETER Experiment Name: At_Root_Tips_cDNA_P Parameter: Tissue Value: Root Tips
  misc_feature: MA Experiment ID: 108435 Result: Down-regulated in Transcription
  misc_feature: MA Experiment 108435 PARAMETER Experiment Name: At_stm_Mutants_cDNA_P Parameter: Plant Line Value: wt Landsburg vs stm
  misc_feature: MA Experiment 108435 PARAMETER Experiment Name: At_stm_Mutants_cDNA_P Parameter: Tissue Value: Shoot Apical Meristem Region
  misc_feature: MA Experiment ID: 108462 Result: Up-regulated in Transcription
  misc_feature: MA Experiment 108462 PARAMETER Experiment Name: At_Germinating_Seeds_cDNA_P Parameter: Age (day) Value: 2 vs. 0
  misc_feature: MA Experiment 108462 PARAMETER Experiment Name: At_Germinating_Seeds_cDNA_P Parameter: Tissue Value: Germinating Seeds
  misc_feature: MA Experiment ID: 108463 Result: Up-regulated in Transcription
  misc_feature: MA Experiment 108463 PARAMETER Experiment Name: At_Germinating_Seeds_cDNA_P Parameter: Age (day) Value: 3 vs. 0
  misc_feature: MA Experiment 108463 PARAMETER Experiment Name: At_Germinating_Seeds_cDNA_P Parameter: Tissue Value: Germinating Seeds
  misc_feature: MA Experiment ID: 108464 Result: Up-regulated in Transcription
  misc_feature: MA Experiment 108464 PARAMETER Experiment Name: At_Germinating_Seeds_cDNA_P Parameter: Age (day) Value: 4 vs. 0
  misc_feature: MA Experiment 108464 PARAMETER Experiment Name: At_Germinating_Seeds_cDNA_P Parameter: Tissue Value: Germinating Seeds
  misc_feature: MA Experiment ID: 108501 Result: Down-regulated in Transcription
  misc_feature: MA Experiment 108501 PARAMETER Experiment Name: At_ap2_floral_buds_cDNA_P Parameter: Plant Line Value: ap2 (Ler.)
  misc_feature: MA Experiment 108501 PARAMETER Experiment Name: At_ap2_floral_buds_cDNA_P Parameter: Tissue Value: Closed Flower
  misc_feature: MA Experiment ID: 108572 Result: Down-regulated in Transcription
  misc_feature: MA Experiment 108572 PARAMETER Experiment Name: At_Drought_cDNA_P Parameter: Timepoint (hr) Value: 1
  misc_feature: MA Experiment 108572 PARAMETER Experiment Name: At_Drought_cDNA_P Parameter: Tissue Value: Aerial
  misc_feature: MA Experiment 108572 PARAMETER Experiment Name: At_Drought_cDNA_P Parameter: Treatment Value: Drought vs. No Drought
  misc_feature: MA Experiment ID: 108577 Result: Down-regulated in Transcription
  misc_feature: MA Experiment 108577 PARAMETER Experiment Name: At_42deg_Heat_cDNA_P Parameter: Temperature (deg C) Value: 42 vs. 22
  misc_feature: MA Experiment 108577 PARAMETER Experiment Name: At_42deg_Heat_cDNA_P Parameter: Timepoint (hr) Value: 6
  misc_feature: MA Experiment 108577 PARAMETER Experiment Name: At_42deg_Heat_cDNA_P Parameter: Tissue Value: Aerial
  misc_feature: MA Experiment ID: 108594 Result: Down-regulated in Transcription
  misc_feature: MA Experiment 108594 PARAMETER Experiment Name: At_Ler-rhl_Root_cDNA_P Parameter: Plant Line Value: null
  misc_feature: MA Experiment ID: 108595 Result: Down-regulated in Transcription
  misc_feature: MA Experiment 108595 PARAMETER Experiment Name: At_Ler-pi_Ovule_cDNA_P Parameter: Plant Line Value: null
  misc_feature: MA Experiment ID: 108608 Result: Down-regulated in Transcription
  misc_feature: MA Experiment 108608 PARAMETER Experiment Name: At_100uM_ABA_cDNA_P Parameter: Timepoint (hr) Value: 1
  misc_feature: MA Experiment 108608 PARAMETER Experiment Name: At_100uM_ABA_cDNA_P Parameter: Tissue Value: Aerial
  misc_feature: MA Experiment 108608 PARAMETER Experiment Name: At_100uM_ABA_cDNA_P Parameter: Treatment Value: 100uM ABA vs. No Treatment
  misc_feature: MA Experiment ID: 20000068 Result: Down-regulated in Transcription
  misc_feature: MA Experiment ID: 20000069 Result: Up-regulated in Transcription
  misc_feature: MA Experiment 20000069 PARAMETER Experiment Name: At_100uM_ABA_Mutants_cDNA_P Parameter: Plant Line Value: CS23
  misc_feature: MA Experiment 20000069 PARAMETER Experiment Name: At_100uM_ABA_Mutants_cDNA_P Parameter: Timepoint (hr) Value: 6
  misc_feature: MA Experiment 20000069 PARAMETER Experiment Name: At_100uM_ABA_Mutants_cDNA_P Parameter: Tissue Value: Aerial
  misc_feature: MA Experiment 20000069 PARAMETER Experiment Name: At_100uM_ABA_Mutants_cDNA_P Parameter: Treatment Value: 100uM ABA vs. No Treatment
  misc_feature: MA Experiment ID: 20000071 Result: Up-regulated in Transcription
  misc_feature: MA Experiment 20000071 PARAMETER Experiment Name: At_100uM_ABA_Mutants_cDNA_P Parameter: Plant Line Value: CS8104
  misc_feature: MA Experiment 20000071 PARAMETER Experiment Name: At_100uM_ABA_Mutants_cDNA_P Parameter: Timepoint (hr) Value: 6
  misc_feature: MA Experiment 20000071 PARAMETER Experiment Name: At_100uM_ABA_Mutants_cDNA_P Parameter: Tissue Value: Aerial
  misc_feature: MA Experiment 20000071 PARAMETER Experiment Name: At_100uM_ABA_Mutants_cDNA_P Parameter: Treatment Value: 100uM ABA vs. No Treatment
  misc_feature: MA Experiment ID: 20000072 Result: Up-regulated in Transcription
  misc_feature: MA Experiment 20000072 PARAMETER Experiment Name: At_100uM_ABA_Mutants_cDNA_P Parameter: Plant Line Value: CS8105
  misc_feature: MA Experiment 20000072 PARAMETER Experiment Name: At_100uM_ABA_Mutants_cDNA_P Parameter: Timepoint (hr) Value: 6
  misc_feature: MA Experiment 20000072 PARAMETER Experiment Name: At_100uM_ABA_Mutants_cDNA_P Parameter: Tissue Value: Aerial
  misc_feature: MA Experiment 20000072 PARAMETER Experiment Name: At_100uM_ABA_Mutants_cDNA_P Parameter: Treatment Value: 100uM ABA vs. No Treatment
  misc_feature: MA Experiment ID: 20000086 Result: Up-regulated in Transcription
  misc_feature: MA Experiment 20000086 PARAMETER Experiment Name: At_100uM_ABA_Mutants_cDNA_P Parameter: Plant Line Value: CS22
  misc_feature: MA Experiment 20000086 PARAMETER Experiment Name: At_100uM_ABA_Mutants_cDNA_P Parameter: Timepoint (hr) Value: 6
  misc_feature: MA Experiment 20000086 PARAMETER Experiment Name: At_100uM_ABA_Mutants_cDNA_P Parameter: Tissue Value: Aerial
  misc_feature: MA Experiment 20000086 PARAMETER Experiment Name: At_100uM_ABA_Mutants_cDNA_P Parameter: Treatment Value: 100uM ABA vs. No Treatment
  misc_feature: MA Experiment ID: 20000088 Result: Up-regulated in Transcription
  misc_feature: MA Experiment 20000088 PARAMETER Experiment Name: At_100uM_ABA_Mutants_cDNA_P Parameter: Plant Line Value: Landsberg
  misc_feature: MA Experiment 20000088 PARAMETER Experiment Name: At_100uM_ABA_Mutants_cDNA_P Parameter: Timepoint (hr) Value: 6
  misc_feature: MA Experiment 20000088 PARAMETER Experiment Name: At_100uM_ABA_Mutants_cDNA_P Parameter: Tissue Value: Aerial
  misc_feature: MA Experiment 20000088 PARAMETER Experiment Name: At_100uM_ABA_Mutants_cDNA_P Parameter: Treatment Value: 100uM ABA vs. No Treatment
  misc_feature: MA Experiment ID: 20000089 Result: Up-regulated in Transcription
  misc_feature: MA Experiment ID: 20000090 Result: Up-regulated in Transcription
  misc_feature: MA Experiment ID: 20000111 Result: Down-regulated in Transcription
  misc_feature: MA Experiment 20000111 PARAMETER Experiment Name: At_42deg_Heat_cDNA_P Parameter: Temperature (deg C) Value: 42 vs. 22
  misc_feature: MA Experiment 20000111 PARAMETER Experiment Name: At_42deg_Heat_cDNA_P Parameter: Timepoint (hr) Value: 6
  misc_feature: MA Experiment 20000111 PARAMETER Experiment Name: At_42deg_Heat_cDNA_P Parameter: Tissue Value: Aerial
  misc_feature: MA Experiment ID: 20000112 Result: Down-regulated in Transcription
  misc_feature: MA Experiment 20000112 PARAMETER Experiment Name: At_42deg_Heat_cDNA_P Parameter: Temperature (deg C) Value: 42 vs. 22
  misc_feature: MA Experiment 20000112 PARAMETER Experiment Name: At_42deg_Heat_cDNA_P Parameter: Timepoint (hr) Value: 2
  misc_feature: MA Experiment 20000112 PARAMETER Experiment Name: At_42deg_Heat_cDNA_P Parameter: Tissue Value: Aerial
  misc_feature: MA Experiment ID: 20000113 Result: Down-regulated in Transcription
  misc_feature: MA Experiment 20000113 PARAMETER Experiment Name: At_42deg_Heat_cDNA_P Parameter: Temperature (deg C) Value: 42 vs. 22
  misc_feature: MA Experiment 20000113 PARAMETER Experiment Name: At_42deg_Heat_cDNA_P Parameter: Timepoint (hr) Value: 8
  misc_feature: MA Experiment 20000113 PARAMETER Experiment Name: At_42deg_Heat_cDNA_P Parameter: Tissue Value: Aerial
  misc_feature: MA Experiment ID: 20000117 Result: Up-regulated in Transcription
  misc_feature: MA Experiment 20000117 PARAMETER Experiment Name: At_100uM_ABA_Mutants_cDNA_P Parameter: Plant Line Value: Columbia
  misc_feature: MA Experiment 20000117 PARAMETER Experiment Name: At_100uM_ABA_Mutants_cDNA_P Parameter: Timepoint (hr) Value: 6
  misc_feature: MA Experiment 20000117 PARAMETER Experiment Name: At_100uM_ABA_Mutants_cDNA_P Parameter: Tissue Value: Aerial
  misc_feature: MA Experiment 20000117 PARAMETER Experiment Name: At_100uM_ABA_Mutants_cDNA_P Parameter: Treatment Value: 100uM ABA vs. No Treatment
  misc_feature: MA Experiment ID: 20000144 Result: Down-regulated in Transcription
  misc_feature: MA Experiment 20000144 PARAMETER Experiment Name: At_42deg_Heat_cDNA_P Parameter: Temperature (deg C) Value: 42 vs. 22
  misc_feature: MA Experiment 20000144 PARAMETER Experiment Name: At_42deg_Heat_cDNA_P Parameter: Timepoint (hr) Value: 1
  misc_feature: MA Experiment 20000144 PARAMETER Experiment Name: At_42deg_Heat_cDNA_P Parameter: Tissue Value: Aerial
  misc_feature: MA Experiment ID: 20000171 Result: Down-regulated in Transcription
  misc_feature: MA Experiment 20000171 PARAMETER Experiment Name: At_42deg_Heat_P Parameter: Age (day) Value: 14
  misc_feature: MA Experiment 20000171 PARAMETER Experiment Name: At_42deg_Heat_P Parameter: Organism Value: A. thaliana
  misc_feature: MA Experiment 20000171 PARAMETER Experiment Name: At_42deg_Heat_P Parameter: Plant Line Value: WS
  misc_feature: MA Experiment 20000171 PARAMETER Experiment Name: At_42deg_Heat_P Parameter: Temperature (deg C) Value: 42 vs. 22
  misc_feature: MA Experiment 20000171 PARAMETER Experiment Name: At_42deg_Heat_P Parameter: Timepoint (hr) Value: 1
  misc_feature: MA Experiment 20000171 PARAMETER Experiment Name: At_42deg_Heat_P Parameter: Tissue Value: Aerial
  misc_feature: MA Experiment ID: 20000173 Result: Down-regulated in Transcription
  misc_feature: MA Experiment 20000173 PARAMETER Experiment Name: At_42deg_Heat_P Parameter: Age (day) Value: 14
  misc_feature: MA Experiment 20000173 PARAMETER Experiment Name: At_42deg_Heat_P Parameter: Organism Value: A. thaliana
  misc_feature: MA Experiment 20000173 PARAMETER Experiment Name: At_42deg_Heat_P Parameter: Plant Line Value: WS
  misc_feature: MA Experiment 20000173 PARAMETER Experiment Name: At_42deg_Heat_P Parameter: Temperature (deg C) Value: 42 vs. 22
  misc_feature: MA Experiment 20000173 PARAMETER Experiment Name: At_42deg_Heat_P Parameter: Timepoint (hr) Value: 6
  misc_feature: MA Experiment 20000173 PARAMETER Experiment Name: At_42deg_Heat_P Parameter: Tissue Value: Aerial
  misc_feature: MA Experiment ID: 20000179 Result: Down-regulated in Transcription
  misc_feature: MA Experiment 20000179 PARAMETER Experiment Name: At_Germinating_Seeds_P Parameter: Age (hr) Value: 6 vs. 0
  misc_feature: MA Experiment 20000179 PARAMETER Experiment Name: At_Germinating_Seeds_P Parameter: Tissue Value: Germinating Seeds
  misc_feature: MA Experiment ID: 20000180 Result: Down-regulated in Transcription
  misc_feature: MA Experiment 20000180 PARAMETER Experiment Name: At_Germinating_Seeds_P Parameter: Age (hr) Value: 24 vs. 0
  misc_feature: MA Experiment 20000180 PARAMETER Experiment Name: At_Germinating_Seeds_P Parameter: Tissue Value: Germinating Seeds
  misc_feature: MA Experiment ID: 20000185 Result: Down-regulated in Transcription
  misc_feature: MA Experiment 20000185 PARAMETER Experiment Name: At_Roots__P Parameter: Age (day) Value: 7 vs. 21
  misc_feature: MA Experiment 20000185 PARAMETER Experiment Name: At_Roots__P Parameter: Organism Value: A. thaliana
  misc_feature: MA Experiment 20000185 PARAMETER Experiment Name: At_Roots__P Parameter: Tissue Value: Roots vs. Whole Plant
  misc_feature: MA Experiment ID: 20000224 Result: Down-regulated in Transcription
  misc_feature: MA Experiment ID: 20000227 Result: Down-regulated in Transcription
  misc_feature: MA Experiment 20000227 PARAMETER Experiment Name: At_Root-Tips-vs-Tops_P Parameter: Tissue Value: Root Tips vs. Root Tops
  misc_feature: MA Experiment ID: 20000234 Result: Down-regulated in Transcription
  misc_feature: MA Experiment 20000234 PARAMETER Experiment Name: At_Siliques_P Parameter: Age (day) Value: 21
  misc_feature: MA Experiment 20000234 PARAMETER Experiment Name: At_Siliques_P Parameter: Organism Value: A. thaliana
  misc_feature: MA Experiment 20000234 PARAMETER Experiment Name: At_Siliques_P Parameter: Plant Line Value: WS
  misc_feature: MA Experiment 20000234 PARAMETER Experiment Name: At_Siliques_P Parameter: Tissue Value: Less Than 5mm Siliques vs. Whole Plant
  misc_feature: MA Experiment ID: 20000264 Result: Down-regulated in Transcription
  misc_feature: MA Experiment 20000264 PARAMETER Experiment Name: At_Open_Flower_P Parameter: Age (day) Value: 21
  misc_feature: MA Experiment 20000264 PARAMETER Experiment Name: At_Open_Flower_P Parameter: Plant Line Value: WS
  misc_feature: MA Experiment 20000264 PARAMETER Experiment Name: At_Open_Flower_P Parameter: Tissue Value: Open Flower vs. Whole Plant
  misc_feature: MA Experiment ID: 20000265 Result: Down-regulated in Transcription
  misc_feature: MA Experiment 20000265 PARAMETER Experiment Name: At_Open_Flower_P Parameter: Age (day) Value: 21
  misc_feature: MA Experiment 20000265 PARAMETER Experiment Name: At_Open_Flower_P Parameter: Plant Line Value: WS
  misc_feature: MA Experiment 20000265 PARAMETER Experiment Name: At_Open_Flower_P Parameter: Tissue Value: Closed Flower vs. Whole Plant
  misc_feature: MA Experiment ID: 20000286 Result: Down-regulated in Transcription
  misc_feature: MA Experiment 20000286 PARAMETER Experiment Name: At_Open_Flower_P Parameter: Age (day) Value: 21
  misc_feature: MA Experiment 20000286 PARAMETER Experiment Name: At_Open_Flower_P Parameter: Plant Line Value: WS
  misc_feature: MA Experiment 20000286 PARAMETER Experiment Name: At_Open_Flower_P Parameter: Tissue Value: Half Open vs. Whole Plant
  misc_feature: MA Experiment ID: 20000308 Result: Down-regulated in Transcription
  misc_feature: MA Experiment 20000308 PARAMETER Experiment Name: At_100mM_NaCl__P Parameter: Age (day) Value: 17
  misc_feature: MA Experiment 20000308 PARAMETER Experiment Name: At_100mM_NaCl__P Parameter: Organism Value: A. thaliana
  misc_feature: MA Experiment 20000308 PARAMETER Experiment Name: At_100mM_NaCl__P Parameter: Plant Line Value: WS
  misc_feature: MA Experiment 20000308 PARAMETER Experiment Name: At_100mM_NaCl__P Parameter: Timepoint (hr) Value: 72
  misc_feature: MA Experiment 20000308 PARAMETER Experiment Name: At_100mM_NaCl__P Parameter: Tissue Value: Whole Plant
  misc_feature: MA Experiment 20000308 PARAMETER Experiment Name: At_100mM_NaCl__P Parameter: Treatment Value: 100mM NaCl vs. No Treatment
  misc_feature: MA Experiment ID: 20000439 Result: Down-regulated in Transcription
  misc_feature: MA Experiment 20000439 PARAMETER Experiment Name: At_Roots__P Parameter: Age (day) Value: 14 vs. 21
  misc_feature: MA Experiment 20000439 PARAMETER Experiment Name: At_Roots__P Parameter: Organism Value: A. thaliana
  misc_feature: MA Experiment 20000439 PARAMETER Experiment Name: At_Roots__P Parameter: Tissue Value: Roots vs. Whole Plant
  misc_feature: MA Experiment ID: 20000441 Result: Up-regulated in Transcription
  misc_feature: MA Experiment 20000441 PARAMETER Experiment Name: At_1uM_BR-BRZ__P Parameter: Tissue Value: Shoot Apices
  misc_feature: MA Experiment 20000441 PARAMETER Experiment Name: At_1uM_BR-BRZ__P Parameter: Treatment Value: 1uM BR vs. No Treatment
  misc_feature: MA Experiment ID: 20000443 Result: Up-regulated in Transcription
  misc_feature: MA Experiment 20000443 PARAMETER Experiment Name: At_1uM_BR-BRZ__P Parameter: Tissue Value: Shoot Apices
  misc_feature: MA Experiment 20000443 PARAMETER Experiment Name: At_1uM_BR-BRZ__P Parameter: Treatment Value: 1uM BRZ vs. No Treatment
  misc_feature: MA Experiment ID: 20000451 Result: Down-regulated in Transcription
  misc_feature: MA Experiment 20000451 PARAMETER Experiment Name: At_CS6879_Shoots-Roots_P Parameter: Age (day) Value: 14
  misc_feature: MA Experiment 20000451 PARAMETER Experiment Name: At_CS6879_Shoots-Roots_P Parameter: Organism Value: A. thaliana
  misc_feature: MA Experiment 20000451 PARAMETER Experiment Name: At_CS6879_Shoots-Roots_P Parameter: Plant Line Value: CS6879 vs. WS
  misc_feature: MA Experiment 20000451 PARAMETER Experiment Name: At_CS6879_Shoots-Roots_P Parameter: Tissue Value: Roots
  misc_feature: MA Experiment ID: 20000452 Result: Down-regulated in Transcription
  misc_feature: MA Experiment 20000452 PARAMETER Experiment Name: At_CS6879_Shoots-Roots_P Parameter: Age (day) Value: 14
  misc_feature: MA Experiment 20000452 PARAMETER Experiment Name: At_CS6879_Shoots-Roots_P Parameter: Organism Value: A. thaliana
  misc_feature: MA Experiment 20000452 PARAMETER Experiment Name: At_CS6879_Shoots-Roots_P Parameter: Plant Line Value: CS6879 vs. WS
  misc_feature: MA Experiment 20000452 PARAMETER Experiment Name: At_CS6879_Shoots-Roots_P Parameter: Tissue Value: Shoots
  misc_feature: MA Experiment ID: 20000495 Result: Down-regulated in Transcription
  misc_feature: MA Experiment 20000495 PARAMETER Experiment Name: At_Guard_Cells_P Parameter: Harvest Date Value: 8/2/2002
  misc_feature: MA Experiment 20000495 PARAMETER Experiment Name: At_Guard_Cells_P Parameter: Organism Value: A. thaliana
  misc_feature: MA Experiment 20000495 PARAMETER Experiment Name: At_Guard_Cells_P Parameter: Tissue Value: Guard Cells vs. Leaves
  misc_feature: MA Experiment ID: 20000496 Result: Down-regulated in Transcription
  misc_feature: MA Experiment 20000496 PARAMETER Experiment Name: At_Guard_Cells_P Parameter: Harvest Date Value: 7/19/2002
  misc_feature: MA Experiment 20000496 PARAMETER Experiment Name: At_Guard_Cells_P Parameter: Organism Value: Canola
  misc_feature: MA Experiment 20000496 PARAMETER Experiment Name: At_Guard_Cells_P Parameter: Tissue Value: Guard Cells vs. Leaves
  misc_feature: MA Experiment ID: 20000575 Result: Down-regulated in Transcription
  misc_feature: MA Experiment 20000575 PARAMETER Experiment Name: At_100uM_ABA_Mutants__P Parameter: Organism Value: A. thaliana
  misc_feature: MA Experiment 20000575 PARAMETER Experiment Name: At_100uM_ABA_Mutants__P Parameter: Plant Line Value: CS22
  misc_feature: MA Experiment 20000575 PARAMETER Experiment Name: At_100uM_ABA_Mutants__P Parameter: Timepoint (hr) Value: 6
  misc_feature: MA Experiment 20000575 PARAMETER Experiment Name: At_100uM_ABA_Mutants__P Parameter: Tissue Value: Whole Plant
  misc_feature: MA Experiment 20000575 PARAMETER Experiment Name: At_100uM_ABA_Mutants__P Parameter: Treatment Value: 1uM ABA vs. No Treatment
  misc_feature: MA Experiment ID: 20000576 Result: Down-regulated in Transcription
  misc_feature: MA Experiment 20000576 PARAMETER Experiment Name: At_100uM_ABA_Mutants__P Parameter: Organism Value: A. thaliana
  misc_feature: MA Experiment 20000576 PARAMETER Experiment Name: At_100uM_ABA_Mutants__P Parameter: Plant Line Value: CS23
  misc_feature: MA Experiment 20000576 PARAMETER Experiment Name: At_100uM_ABA_Mutants__P Parameter: Timepoint (hr) Value: 6
  misc_feature: MA Experiment 20000576 PARAMETER Experiment Name: At_100uM_ABA_Mutants__P Parameter: Tissue Value: Whole Plant
  misc_feature: MA Experiment 20000576 PARAMETER Experiment Name: At_100uM_ABA_Mutants__P Parameter: Treatment Value: 1uM ABA vs. No Treatment
  misc_feature: MA Experiment ID: 20000794 Result: Down-regulated in Transcription
  misc_feature: MA Experiment 20000794 PARAMETER Experiment Name: At_Petals_P Parameter: Age (day) Value: 23-25 days
  misc_feature: MA Experiment 20000794 PARAMETER Experiment Name: At_Petals_P Parameter: Plant Line Value: WS
  misc_feature: MA Experiment 20000794 PARAMETER Experiment Name: At_Petals_P Parameter: Tissue Value: Petals vs. Whole plant
  misc_feature: MA Experiment ID: 20001248 Result: Up-regulated in Transcription
  misc_feature: MA Experiment 20001248 PARAMETER Experiment Name: At_Far-red-induction_P Parameter: Age (day) Value: 7
  misc_feature: MA Experiment 20001248 PARAMETER Experiment Name: At_Far-red-induction_P Parameter: Light Value: Far-red vs. White
  misc_feature: MA Experiment 20001248 PARAMETER Experiment Name: At_Far-red-induction_P Parameter: Organism Value: A. thaliana
  misc_feature: MA Experiment 20001248 PARAMETER Experiment Name: At_Far-red-induction_P Parameter: Plant Line Value: Columbia
  misc_feature: MA Experiment 20001248 PARAMETER Experiment Name: At_Far-red-induction_P Parameter: Timepoint (hr) Value: 4
  misc_feature: MA Experiment 20001248 PARAMETER Experiment Name: At_Far-red-induction_P Parameter: Tissue Value: Whole Plant
  misc_feature: MA Experiment ID: 20001451 Result: Down-regulated in Transcription
  misc_feature: MA Experiment 20001451 PARAMETER Experiment Name: At_Far-red-induction_P Parameter: Age (day) Value: 7
  misc_feature: MA Experiment 20001451 PARAMETER Experiment Name: At_Far-red-induction_P Parameter: Light Value: Far-red vs. White
  misc_feature: MA Experiment 20001451 PARAMETER Experiment Name: At_Far-red-induction_P Parameter: Organism Value: A. thaliana
  misc_feature: MA Experiment 20001451 PARAMETER Experiment Name: At_Far-red-induction_P Parameter: Plant Line Value: Columbia
  misc_feature: MA Experiment 20001451 PARAMETER Experiment Name: At_Far-red-induction_P Parameter: Timepoint (hr) Value: 24
  misc_feature: MA Experiment 20001451 PARAMETER Experiment Name: At_Far-red-induction_P Parameter: Tissue Value: Whole Plant
  misc_feature: MA Experiment ID: 20001458 Result: Up-regulated in Transcription
  misc_feature: MA Experiment 20001458 PARAMETER Experiment Name: At_50mM_NH4NO3_L-to-H_P Parameter: Age (day) Value: Undefined
  misc_feature: MA Experiment 20001458 PARAMETER Experiment Name: At_50mM_NH4NO3_L-to-H_P Parameter: Organism Value: Undefined
  misc_feature: MA Experiment 20001458 PARAMETER Experiment Name: At_50mM_NH4NO3_L-to-H_P Parameter: Plant Line Value: Undefined
  misc_feature: MA Experiment 20001458 PARAMETER Experiment Name: At_50mM_NH4NO3_L-to-H_P Parameter: Timepoint (hr) Value: 2
  misc_feature: MA Experiment 20001458 PARAMETER Experiment Name: At_50mM_NH4NO3_L-to-H_P Parameter: Tissue Value: Siliques
  misc_feature: MA Experiment 20001458 PARAMETER Experiment Name: At_50mM_NH4NO3_L-to-H_P Parameter: Treatment Value: 50mM NH4NO3 vs. 100mM Manitol
  misc_feature: MA Experiment ID: 20001555 Result: Down-regulated in Transcription
  misc_feature: MA Experiment 20001555 PARAMETER Experiment Name: At_Drought_Soil_Dry_P Parameter: Age (day) Value: 24
  misc_feature: MA Experiment 20001555 PARAMETER Experiment Name: At_Drought_Soil_Dry_P Parameter: Organism Value: A. thaliana
  misc_feature: MA Experiment 20001555 PARAMETER Experiment Name: At_Drought_Soil_Dry_P Parameter: Plant Line Value: WS
  misc_feature: MA Experiment 20001555 PARAMETER Experiment Name: At_Drought_Soil_Dry_P Parameter: Post Timepoint (hr) Value: None
  misc_feature: MA Experiment 20001555 PARAMETER Experiment Name: At_Drought_Soil_Dry_P Parameter: Post-Treatment Value: None
  misc_feature: MA Experiment 20001555 PARAMETER Experiment Name: At_Drought_Soil_Dry_P Parameter: Timepoint (day) Value: 10
  misc_feature: MA Experiment 20001555 PARAMETER Experiment Name: At_Drought_Soil_Dry_P Parameter: Treatment Value: Drought vs. No Drought
  misc_feature: MA Experiment ID: 20001556 Result: Down-regulated in Transcription
  misc_feature: MA Experiment 20001556 PARAMETER Experiment Name: At_Drought_Soil_Dry_P Parameter: Age (day) Value: 26
  misc_feature: MA Experiment 20001556 PARAMETER Experiment Name: At_Drought_Soil_Dry_P Parameter: Organism Value: A. thaliana
  misc_feature: MA Experiment 20001556 PARAMETER Experiment Name: At_Drought_Soil_Dry_P Parameter: Plant Line Value: WS
  misc_feature: MA Experiment 20001556 PARAMETER Experiment Name: At_Drought_Soil_Dry_P Parameter: Post Timepoint (hr) Value: None
  misc_feature: MA Experiment 20001556 PARAMETER Experiment Name: At_Drought_Soil_Dry_P Parameter: Post-Treatment Value: None
  misc_feature: MA Experiment 20001556 PARAMETER Experiment Name: At_Drought_Soil_Dry_P Parameter: Timepoint (day) Value: 12
  misc_feature: MA Experiment 20001556 PARAMETER Experiment Name: At_Drought_Soil_Dry_P Parameter: Treatment Value: Drought vs. No Drought
  misc_feature: MA Experiment ID: 20001560 Result: Down-regulated in Transcription
  misc_feature: MA Experiment 20001560 PARAMETER Experiment Name: At_Drought_Soil_Dry_P Parameter: Age (day) Value: 28
  misc_feature: MA Experiment 20001560 PARAMETER Experiment Name: At_Drought_Soil_Dry_P Parameter: Organism Value: A. thaliana
  misc_feature: MA Experiment 20001560 PARAMETER Experiment Name: At_Drought_Soil_Dry_P Parameter: Plant Line Value: WS
  misc_feature: MA Experiment 20001560 PARAMETER Experiment Name: At_Drought_Soil_Dry_P Parameter: Post Timepoint (hr) Value: None
  misc_feature: MA Experiment 20001560 PARAMETER Experiment Name: At_Drought_Soil_Dry_P Parameter: Post-Treatment Value: None
  misc_feature: MA Experiment 20001560 PARAMETER Experiment Name: At_Drought_Soil_Dry_P Parameter: Timepoint (day) Value: 14
  misc_feature: MA Experiment 20001560 PARAMETER Experiment Name: At_Drought_Soil_Dry_P Parameter: Treatment Value: Drought vs. No Drought
  misc_feature: MA Experiment ID: 20001760 Result: Down-regulated in Transcription
  misc_feature: MA Experiment 20001760 PARAMETER Experiment Name: At_50mM_NH4NO3_L-to-H_P Parameter: Timepoint (hr) Value: 2
  misc_feature: MA Experiment 20001760 PARAMETER Experiment Name: At_50mM_NH4NO3_L-to-H_P Parameter: Tissue Value: Siliques
  misc_feature: MA Experiment 20001760 PARAMETER Experiment Name: At_50mM_NH4NO3_L-to-H_P Parameter: Treatment Value: 50mM NH4NO3 vs 100mM Mannitol
  misc_feature: MA Experiment ID: 20001904 Result: Down-regulated in Transcription
  misc_feature: MA Experiment 20001904 PARAMETER Experiment Name: At_Drought_Reproduction_P Parameter: Age (day) Value: 37
  misc_feature: MA Experiment 20001904 PARAMETER Experiment Name: At_Drought_Reproduction_P Parameter: Organism Value: A. thaliana
  misc_feature: MA Experiment 20001904 PARAMETER Experiment Name: At_Drought_Reproduction_P Parameter: Plant Line Value: WS
  misc_feature: MA Experiment 20001904 PARAMETER Experiment Name: At_Drought_Reproduction_P Parameter: Timepoint (day) Value: 7
  misc_feature: MA Experiment 20001904 PARAMETER Experiment Name: At_Drought_Reproduction_P Parameter: Tissue Value: Rosettes
  misc_feature: MA Experiment 20001904 PARAMETER Experiment Name: At_Drought_Reproduction_P Parameter: Treatment Value: Drought vs. No Drought
  misc_feature: MA Experiment ID: 20001905 Result: Down-regulated in Transcription
  misc_feature: MA Experiment 20001905 PARAMETER Experiment Name: At_Drought_Reproduction_P Parameter: Age (day) Value: 40
  misc_feature: MA Experiment 20001905 PARAMETER Experiment Name: At_Drought_Reproduction_P Parameter: Organism Value: A. thaliana
  misc_feature: MA Experiment 20001905 PARAMETER Experiment Name: At_Drought_Reproduction_P Parameter: Plant Line Value: WS
  misc_feature: MA Experiment 20001905 PARAMETER Experiment Name: At_Drought_Reproduction_P Parameter: Timepoint (day) Value: 10
  misc_feature: MA Experiment 20001905 PARAMETER Experiment Name: At_Drought_Reproduction_P Parameter: Tissue Value: Rosettes
  misc_feature: MA Experiment 20001905 PARAMETER Experiment Name: At_Drought_Reproduction_P Parameter: Treatment Value: Drought vs. No Drought
  misc_feature: MA Experiment ID: 20001906 Result: Down-regulated in Transcription
  misc_feature: MA Experiment 20001906 PARAMETER Experiment Name: At_Drought_Reproduction_P Parameter: Age (day) Value: 35
  misc_feature: MA Experiment 20001906 PARAMETER Experiment Name: At_Drought_Reproduction_P Parameter: Organism Value: A. thaliana
  misc_feature: MA Experiment 20001906 PARAMETER Experiment Name: At_Drought_Reproduction_P Parameter: Plant Line Value: WS
  misc_feature: MA Experiment 20001906 PARAMETER Experiment Name: At_Drought_Reproduction_P Parameter: Timepoint (day) Value: 5
  misc_feature: MA Experiment 20001906 PARAMETER Experiment Name: At_Drought_Reproduction_P Parameter: Tissue Value: Siliques
  misc_feature: MA Experiment 20001906 PARAMETER Experiment Name: At_Drought_Reproduction_P Parameter: Treatment Value: Drought vs. No Drought
  misc_feature: MA Experiment ID: 20001907 Result: Down-regulated in Transcription
  misc_feature: MA Experiment 20001907 PARAMETER Experiment Name: At_Drought_Reproduction_P Parameter: Age (day) Value: 37
  misc_feature: MA Experiment 20001907 PARAMETER Experiment Name: At_Drought_Reproduction_P Parameter: Organism Value: A. thaliana
  misc_feature: MA Experiment 20001907 PARAMETER Experiment Name: At_Drought_Reproduction_P Parameter: Plant Line Value: WS
  misc_feature: MA Experiment 20001907 PARAMETER Experiment Name: At_Drought_Reproduction_P Parameter: Timepoint (day) Value: 7
  misc_feature: MA Experiment 20001907 PARAMETER Experiment Name: At_Drought_Reproduction_P Parameter: Tissue Value: Siliques
  misc_feature: MA Experiment 20001907 PARAMETER Experiment Name: At_Drought_Reproduction_P Parameter: Treatment Value: Drought vs. No Drought
  misc_feature: MA Experiment ID: 20001910 Result: Down-regulated in Transcription
  misc_feature: MA Experiment 20001910 PARAMETER Experiment Name: At_Drought_Reproduction_P Parameter: Age (day) Value: 37
  misc_feature: MA Experiment 20001910 PARAMETER Experiment Name: At_Drought_Reproduction_P Parameter: Organism Value: A. thaliana
  misc_feature: MA Experiment 20001910 PARAMETER Experiment Name: At_Drought_Reproduction_P Parameter: Plant Line Value: WS
  misc_feature: MA Experiment 20001910 PARAMETER Experiment Name: At_Drought_Reproduction_P Parameter: Timepoint (day) Value: 7
  misc_feature: MA Experiment 20001910 PARAMETER Experiment Name: At_Drought_Reproduction_P Parameter: Tissue Value: Flowers
  misc_feature: MA Experiment 20001910 PARAMETER Experiment Name: At_Drought_Reproduction_P Parameter: Treatment Value: Drought vs. No Drought
atactaaatcatcaacactacaaagaagaaacacactatctctctctctctctcaatacatctttcctcacttctgatcagtgtgatcacgtagagtgccttgaaggagaagaaagaaacaaaaagaaataaaaatgggataccttctagaagaaaccttaagctctaactctaaaaccccaattgttatcgatgatgataacgagttgggtttgatggccgtgagactagccaatgctgctgcctttccgatggttctcaaagccgccctcgagctcggtgtctttgacactctctatgctgaagcctctcgcagcgactcgttcctttcaccatctgaaatagcgagtaagctaccaactacacctcgtaaccctgaggctccggttttgttggaccgtatgcttcgtctactcgctagctattctgtggtcaagtgtggtaaggtctcagaaggaaagggtgagagggtctacagagcagagccaatttgcaggtttttcttgaaggataacattcaagatattggatcccttgcttctcaagtcattgtcaatttcgatagcgtcttcctcaatacttgggcacaattgaaagacgtggttctagaaggaggagatgcatttggccgcgcacatggtggtatgaagctctttgactatatgggtacagatgagagattcagcaaactatttaaccagaccggttttaccattgcggttgtgaagaaggctcttgaagtttaccaaggcttcaaaggtgtgaatgttttagttgatgtgggaggaggagttggtaacactcttggtgttgttgcttctaagtatccaaatattaagggtatcaactttgatctaacctgtgccttggcacaagcaccttcttatcccggtgtggagcatgttgccggagatatgtttgtggatgtcccaaccggagatgccatgatcttgaaacgtatacttcatgattggaccgatgaagattgtgtcaagattcttaagaattgttggaaatcactaccagaaagcggtaaagtagttgttatagaattagtcactcctgatgaggcagagaatggagacatcaacgcaaacattgcctttgacatggacatgttaatgttcacacaatgttccggaggaaaagagagatcaagagctgagtttgaagctttggctgcagcttctggctttacccattgcaagttcgtttgccaagcttatcactgctggattattgagttctgtaaataaaatgtgtgaaatgtaaaacaaaatcgtcgttaattatatatttccatctttgttgccattctttcttgatatctttgtcttcgagtaataaaagtgtttt

SEQ ID NO: 103361 - protein, 373 aa, Arabidopsis thaliana
  peptide (1)..(373): Ceres Seq. ID no. 13612606
  misc_feature (107)..(350): Pfam Name: O-methyltransferase Pfam Description: O-methyltransferase
  misc_feature (1)..(373): Homolog of NCBI NO: 15218138 NR Description: O-methyltransferase 1, putative [Arabidopsis
  misc_feature (1)..(373): Homolog of NCBI NO: 21618219 NR Description: O-methyltransferase, putative [Arabidopsis
  misc_feature (1)..(373): Homolog of NCBI NO: 15218133 NR Description: O-methyltransferase 1, putative [Arabidopsis
  misc_feature (1)..(373): Homolog of NCBI NO: 15218137 NR Description: O-methyltransferase 1, putative [Arabidopsis
  misc_feature (1)..(373): Homolog of NCBI NO: 15218135 NR Description: O-methyltransferase 1, putative [Arabidopsis
  misc_feature (1)..(274): Homolog of NCBI NO: 30687192 NR Description: O-methyltransferase 1, putative [Arabidopsis
  misc_feature (20)..(373): Homolog of NCBI NO: 15223731 NR Description: O-methyltransferase family 2 [Arabidopsis
  misc_feature (40)..(373): Homolog of NCBI NO: 21617938 NR Description: putative catechol O-methyltransferase
  misc_feature (21)..(373): Homolog of NCBI NO: 15223976 NR Description: O-methyltransferase family 2 [Arabidopsis
  misc_feature (21)..(373): Homolog of NCBI NO: 27808586 NR Description: At1g77520 [Arabidopsis thaliana]
MGYLLEETLSSNSKTPIVIDDDNELGLMAVRLANAAAFPMVLKAALELGVFDTLYAEASRSDSFLSPSEIASKLPTTPRNPEAPVLLDRMLRLLASYSVVKCGKVSEGKGERVYRAEPICRFFLKDNIQDIGSLASQVIVNFDSVFLNTWAQLKDVVLEGGDAFGRAHGGMKLFDYMGTDERFSKLFNQTGFTIAVVKKALEVYQGFKGVNVLVDVGGGVGNTLGVVASKYPNIKGINFDLTCALAQAPSYPGVEHVAGDMFVDVPTGDAMILKRILHDWTDEDCVKILKNCWKSLPESGKVVVIELVTPDEAENGDINANIAFDMDMLMFTQCSGGKERSRAEFEALAAASGFTHCKFVCQAYHCWIIEFCK

SEQ ID NO: 103362 - protein, 346 aa, Arabidopsis thaliana
  peptide (1)..(346): Ceres Seq. ID no. 13612607
  misc_feature (80)..(323): Pfam Name: O-methyltransferase Pfam Description: O-methyltransferase
  misc_feature (1)..(346): Homolog of NCBI NO: 15218138 NR Description: O-methyltransferase 1, putative [Arabidopsis
  misc_feature (1)..(346): Homolog of NCBI NO: 21618219 NR Description: O-methyltransferase, putative [Arabidopsis
  misc_feature (1)..(346): Homolog of NCBI NO: 15218133 NR Description: O-methyltransferase 1, putative [Arabidopsis
  misc_feature (1)..(346): Homolog of NCBI NO: 15218137 NR Description: O-methyltransferase 1, putative [Arabidopsis
  misc_feature (1)..(346): Homolog of NCBI NO: 15218135 NR Description: O-methyltransferase 1, putative [Arabidopsis
  misc_feature (1)..(247): Homolog of NCBI NO: 30687192 NR Description: O-methyltransferase 1, putative [Arabidopsis
  misc_feature (1)..(346): Homolog of NCBI NO: 15223731 NR Description: O-methyltransferase family 2 [Arabidopsis
  misc_feature (13)..(346): Homolog of NCBI NO: 21617938 NR Description: putative catechol O-methyltransferase
  misc_feature (1)..(346): Homolog of NCBI NO: 15223976 NR Description: O-methyltransferase family 2 [Arabidopsis
  misc_feature (1)..(346): Homolog of NCBI NO: 27808586 NR Description: At1g77520 [Arabidopsis thaliana]
MAVRLANAAAFPMVLKAALELGVFDTLYAEASRSDSFLSPSEIASKLPTTPRNPEAPVLLDRMLRLLASYSVVKCGKVSEGKGERVYRAEPICRFFLKDNIQDIGSLASQVIVNFDSVFLNTWAQLKDVVLEGGDAFGRAHGGMKLFDYMGTDERFSKLFNQTGFTIAVVKKALEVYQGFKGVNVLVDVGGGVGNTLGVVASKYPNIKGINFDLTCALAQAPSYPGVEHVAGDMFVDVPTGDAMILKRILHDWTDEDCVKILKNCWKSLPESGKVVVIELVTPDEAENGDINANIAFDMDMLMFTQCSGGKERSRAEFEALAAASGFTHCKFVCQAYHCWIIEFCK

SEQ ID NO: 103363 - protein, 334 aa, Arabidopsis thaliana
  peptide (1)..(334): Ceres Seq. ID no. 13612608
  misc_feature (68)..(311): Pfam Name: O-methyltransferase Pfam Description: O-methyltransferase
  misc_feature (1)..(334): Homolog of NCBI NO: 15218138 NR Description: O-methyltransferase 1, putative [Arabidopsis
  misc_feature (1)..(334): Homolog of NCBI NO: 21618219 NR Description: O-methyltransferase, putative [Arabidopsis
  misc_feature (1)..(334): Homolog of NCBI NO: 15218133 NR Description: O-methyltransferase 1, putative [Arabidopsis
  misc_feature (1)..(334): Homolog of NCBI NO: 15218137 NR Description: O-methyltransferase 1, putative [Arabidopsis
  misc_feature (1)..(334): Homolog of NCBI NO: 15218135 NR Description: O-methyltransferase 1, putative [Arabidopsis
  misc_feature (1)..(235): Homolog of NCBI NO: 30687192 NR Description: O-methyltransferase 1, putative [Arabidopsis
  misc_feature (1)..(334): Homolog of NCBI NO: 15223731 NR Description: O-methyltransferase family 2 [Arabidopsis
  misc_feature (1)..(334): Homolog of NCBI NO: 21617938 NR Description: putative catechol O-methyltransferase
  misc_feature (1)..(334): Homolog of NCBI NO: 15223976 NR Description: O-methyltransferase family 2 [Arabidopsis
  misc_feature (1)..(334): Homolog of NCBI NO: 27808586 NR Description: At1g77520 [Arabidopsis thaliana]
MVLKAALELGVFDTLYAEASRSDSFLSPSEIASKLPTTPRNPEAPVLLDRMLRLLASYSVVKCGKVSEGKGERVYRAEPICRFFLKDNIQDIGSLASQVIVNFDSVFLNTWAQLKDVVLEGGDAFGRAHGGMKLFDYMGTDERFSKLFNQTGFTIAVVKKALEVYQGFKGVNVLVDVGGGVGNTLGVVASKYPNIKGINFDLTCALAQAPSYPGVEHVAGDMFVDVPTGDAMILKRILHDWTDEDCVKILKNCWKSLPESGKVVVIELVTPDEAENGDINANIAFDMDMLMFTQCSGGKERSRAEFEALAAASGFTHCKFVCQAYHCWIIEFCK

SEQ ID NO: 103364 - DNA, 2399 bp, Arabidopsis thaliana
  misc_feature (1)..(2399): Ceres Seq. ID no. 13612613
  misc_feature: MA Experiment ID: 108435 Result: Up-regulated in Transcription
  misc_feature: MA Experiment 108435 PARAMETER Experiment Name: At_stm_Mutants_cDNA_P Parameter: Plant Line Value: wt Landsburg vs stm
  misc_feature: MA Experiment 108435 PARAMETER Experiment Name: At_stm_Mutants_cDNA_P Parameter: Tissue Value: Shoot Apical Meristem Region
  misc_feature: MA Experiment ID: 108489 Result: Down-regulated in Transcription
  misc_feature: MA Experiment ID: 108501 Result: Down-regulated in Transcription
  misc_feature: MA Experiment 108501 PARAMETER Experiment Name: At_ap2_floral_buds_cDNA_P Parameter: Plant Line Value: ap2 (Ler.)
  misc_feature: MA Experiment 108501 PARAMETER Experiment Name: At_ap2_floral_buds_cDNA_P Parameter: Tissue Value: Closed Flower
  misc_feature: MA Experiment ID: 108561 Result: Down-regulated in Transcription
  misc_feature: MA Experiment 108561 PARAMETER Experiment Name: At_100uM_ABA_cDNA_P Parameter: Timepoint (hr) Value: 6
  misc_feature: MA Experiment 108561 PARAMETER Experiment Name: At_100uM_ABA_cDNA_P Parameter: Tissue Value: Aerial
  misc_feature: MA Experiment 108561 PARAMETER Experiment Name: At_100uM_ABA_cDNA_P Parameter: Treatment Value: 100uM ABA vs. No Treatment
  misc_feature: MA Experiment ID: 108573 Result: Down-regulated in Transcription
  misc_feature: MA Experiment 108573 PARAMETER Experiment Name: At_Drought_cDNA_P Parameter: Timepoint (hr) Value: 6
  misc_feature: MA Experiment 108573 PARAMETER Experiment Name: At_Drought_cDNA_P Parameter: Tissue Value: Aerial
  misc_feature: MA Experiment 108573 PARAMETER Experiment Name: At_Drought_cDNA_P Parameter: Treatment Value: Drought vs. No Drought
  misc_feature: MA Experiment ID: 108579 Result: Up-regulated in Transcription
  misc_feature: MA Experiment 108579 PARAMETER Experiment Name: At_4deg_Cold_cDNA_P Parameter: Temperature (deg C) Value: 4 vs. 22
  misc_feature: MA Experiment 108579 PARAMETER Experiment Name: At_4deg_Cold_cDNA_P Parameter: Timepoint (hr) Value: 6
  misc_feature: MA Experiment 108579 PARAMETER Experiment Name: At_4deg_Cold_cDNA_P Parameter: Tissue Value: Aerial
  misc_feature: MA Experiment ID: 108595 Result: Down-regulated in Transcription
  misc_feature: MA Experiment 108595 PARAMETER Experiment Name: At_Ler-pi_Ovule_cDNA_P Parameter: Plant Line Value: null
  misc_feature: MA Experiment ID: 108607 Result: Down-regulated in Transcription
  misc_feature: MA Experiment 108607 PARAMETER Experiment Name: At_100uM_ABA_cDNA_P Parameter: Timepoint (hr) Value: 4
  misc_feature: MA Experiment 108607 PARAMETER Experiment Name: At_100uM_ABA_cDNA_P Parameter: Tissue Value: Aerial
  misc_feature: MA Experiment 108607 PARAMETER Experiment Name: At_100uM_ABA_cDNA_P Parameter: Treatment Value: 100uM ABA vs. No Treatment
  misc_feature: MA Experiment ID: 108668 Result: Up-regulated in Transcription
  misc_feature: MA Experiment 108668 PARAMETER Experiment Name: At_2mM_SA_cDNA_P Parameter: Plant Line Value: WS
  misc_feature: MA Experiment 108668 PARAMETER Experiment Name: At_2mM_SA_cDNA_P Parameter: Timepoint (hr) Value: 6
  misc_feature: MA Experiment 108668 PARAMETER Experiment Name: At_2mM_SA_cDNA_P Parameter: Treatment Value: 2mM SA vs. No Treatment
  misc_feature: MA Experiment ID: 20000071 Result: Down-regulated in Transcription
  misc_feature: MA Experiment 20000071 PARAMETER Experiment Name: At_100uM_ABA_Mutants_cDNA_P Parameter: Plant Line Value: CS8104
  misc_feature: MA Experiment 20000071 PARAMETER Experiment Name: At_100uM_ABA_Mutants_cDNA_P Parameter: Timepoint (hr) Value: 6
  misc_feature: MA Experiment 20000071 PARAMETER Experiment Name: At_100uM_ABA_Mutants_cDNA_P Parameter: Tissue Value: Aerial
  misc_feature: MA Experiment 20000071 PARAMETER Experiment Name: At_100uM_ABA_Mutants_cDNA_P Parameter: Treatment Value: 100uM ABA vs. No Treatment
  misc_feature: MA Experiment ID: 20000090 Result: Up-regulated in Transcription
  misc_feature: MA Experiment ID: 20000111 Result: Down-regulated in Transcription
  misc_feature: MA Experiment 20000111 PARAMETER Experiment Name: At_42deg_Heat_cDNA_P Parameter: Temperature (deg C) Value: 42 vs. 22
  misc_feature: MA Experiment 20000111 PARAMETER Experiment Name: At_42deg_Heat_cDNA_P Parameter: Timepoint (hr) Value: 6
  misc_feature: MA Experiment 20000111 PARAMETER Experiment Name: At_42deg_Heat_cDNA_P Parameter: Tissue Value: Aerial
  misc_feature: MA Experiment ID: 20000112 Result: Down-regulated in Transcription
  misc_feature: MA Experiment 20000112 PARAMETER Experiment Name: At_42deg_Heat_cDNA_P Parameter: Temperature (deg C) Value: 42 vs. 22
  misc_feature: MA Experiment 20000112 PARAMETER Experiment Name: At_42deg_Heat_cDNA_P Parameter: Timepoint (hr) Value: 2
  misc_feature: MA Experiment 20000112 PARAMETER Experiment Name: At_42deg_Heat_cDNA_P Parameter: Tissue Value: Aerial
  misc_feature: MA Experiment ID: 20000113 Result: Down-regulated in Transcription
  misc_feature: MA Experiment 20000113 PARAMETER Experiment Name: At_42deg_Heat_cDNA_P Parameter: Temperature (deg C) Value: 42 vs. 22
  misc_feature: MA Experiment 20000113 PARAMETER Experiment Name: At_42deg_Heat_cDNA_P Parameter: Timepoint (hr) Value: 8
  misc_feature: MA Experiment 20000113 PARAMETER Experiment Name: At_42deg_Heat_cDNA_P Parameter: Tissue Value: Aerial
  misc_feature: MA Experiment ID: 20000144 Result: Down-regulated in Transcription
  misc_feature: MA Experiment 20000144 PARAMETER Experiment Name: At_42deg_Heat_cDNA_P Parameter: Temperature (deg C) Value: 42 vs. 22
  misc_feature: MA Experiment 20000144 PARAMETER Experiment Name: At_42deg_Heat_cDNA_P Parameter: Timepoint (hr) Value: 1
  misc_feature: MA Experiment 20000144 PARAMETER Experiment Name: At_42deg_Heat_cDNA_P Parameter: Tissue Value: Aerial
  misc_feature: MA Experiment ID: 20000173 Result: Down-regulated in Transcription
  misc_feature: MA Experiment 20000173 PARAMETER Experiment Name: At_42deg_Heat_P Parameter: Age (day) Value: 14
  misc_feature: MA Experiment 20000173 PARAMETER Experiment Name: At_42deg_Heat_P Parameter: Organism Value: A. thaliana
  misc_feature: MA Experiment 20000173 PARAMETER Experiment Name: At_42deg_Heat_P Parameter: Plant Line Value: WS
  misc_feature: MA Experiment 20000173 PARAMETER Experiment Name: At_42deg_Heat_P Parameter: Temperature (deg C) Value: 42 vs. 22
  misc_feature: MA Experiment 20000173 PARAMETER Experiment Name: At_42deg_Heat_P Parameter: Timepoint (hr) Value: 6
  misc_feature: MA Experiment 20000173 PARAMETER Experiment Name: At_42deg_Heat_P Parameter: Tissue Value: Aerial
  misc_feature: MA Experiment ID: 20000182 Result: Up-regulated in Transcription
  misc_feature: MA Experiment 20000182 PARAMETER Experiment Name: At_2mM_SA_P Parameter: Age (day) Value: 14
  misc_feature: MA Experiment 20000182 PARAMETER Experiment Name: At_2mM_SA_P Parameter: Organism Value: A. thaliana
  misc_feature: MA Experiment 20000182 PARAMETER Experiment Name: At_2mM_SA_P Parameter: Plant Line Value: WS
  misc_feature: MA Experiment 20000182 PARAMETER Experiment Name: At_2mM_SA_P Parameter: Timepoint (hr) Value: 6
  misc_feature: MA Experiment 20000182 PARAMETER Experiment Name: At_2mM_SA_P Parameter: Tissue Value: Aerial
  misc_feature: MA Experiment 20000182 PARAMETER Experiment Name: At_2mM_SA_P Parameter: Treatment Value: 2mM SA vs. No Treatment
  misc_feature: MA Experiment ID: 20000184 Result: Down-regulated in Transcription
  misc_feature: MA Experiment 20000184 PARAMETER Experiment Name: At_Shoots__P Parameter: Age (day) Value: 7
  misc_feature: MA Experiment 20000184 PARAMETER Experiment Name: At_Shoots__P Parameter: Tissue Value: Shoots vs. Whole Plant
  misc_feature: MA Experiment ID: 20000185 Result: Down-regulated in Transcription
  misc_feature: MA Experiment 20000185 PARAMETER Experiment Name: At_Roots__P Parameter: Age (day) Value: 7 vs. 21
  misc_feature: MA Experiment 20000185 PARAMETER Experiment Name: At_Roots__P Parameter: Organism Value: A. thaliana
  misc_feature: MA Experiment 20000185 PARAMETER Experiment Name: At_Roots__P Parameter: Tissue Value: Roots vs. Whole Plant
  misc_feature: MA Experiment ID: 20000224 Result: Up-regulated in Transcription
  misc_feature: MA Experiment ID: 20000234 Result: Down-regulated in Transcription
  misc_feature: MA Experiment 20000234 PARAMETER Experiment Name: At_Siliques_P Parameter: Age (day) Value: 21
  misc_feature: MA Experiment 20000234 PARAMETER Experiment Name: At_Siliques_P Parameter: Organism Value: A. thaliana
  misc_feature: MA Experiment 20000234 PARAMETER Experiment Name: At_Siliques_P Parameter: Plant Line Value: WS
  misc_feature: MA Experiment 20000234 PARAMETER Experiment Name: At_Siliques_P Parameter: Tissue Value: Less Than 5mm Siliques vs. Whole Plant
  misc_feature: MA Experiment ID: 20000235 Result: Down-regulated in Transcription
  misc_feature: MA Experiment 20000235 PARAMETER Experiment Name: At_Siliques_P Parameter: Age (day) Value: 21
  misc_feature: MA Experiment 20000235 PARAMETER Experiment Name: At_Siliques_P Parameter: Organism Value: A. thaliana
  misc_feature: MA Experiment 20000235 PARAMETER Experiment Name: At_Siliques_P Parameter: Plant Line Value: WS
  misc_feature: MA Experiment 20000235 PARAMETER Experiment Name: At_Siliques_P Parameter: Tissue Value: 5-10mm Siliques vs. Whole Plant
  misc_feature: MA Experiment ID: 20000264 Result: Down-regulated in Transcription
  misc_feature: MA Experiment 20000264 PARAMETER Experiment Name: At_Open_Flower_P Parameter: Age (day) Value: 21
  misc_feature: MA Experiment 20000264 PARAMETER Experiment Name: At_Open_Flower_P Parameter: Plant Line Value: WS
  misc_feature: MA Experiment 20000264 PARAMETER Experiment Name: At_Open_Flower_P Parameter: Tissue Value: Open Flower vs. Whole Plant
  misc_feature: MA Experiment ID: 20000265 Result: Down-regulated in Transcription
  misc_feature: MA Experiment 20000265 PARAMETER Experiment Name: At_Open_Flower_P Parameter: Age (day) Value: 21
  misc_feature: MA Experiment 20000265 PARAMETER Experiment Name: At_Open_Flower_P Parameter: Plant Line Value: WS
  misc_feature: MA Experiment 20000265 PARAMETER Experiment Name: At_Open_Flower_P Parameter: Tissue Value: Closed Flower vs. Whole Plant
  misc_feature: MA Experiment ID: 20000286 Result: Down-regulated in Transcription
  misc_feature: MA Experiment 20000286 PARAMETER Experiment Name: At_Open_Flower_P Parameter: Age (day) Value: 21
  misc_feature: MA Experiment 20000286 PARAMETER Experiment Name: At_Open_Flower_P Parameter: Plant Line Value: WS
  misc_feature: MA Experiment 20000286 PARAMETER Experiment Name: At_Open_Flower_P Parameter: Tissue Value: Half Open vs. Whole Plant
  misc_feature: MA Experiment ID: 20000436 Result: Down-regulated in Transcription
  misc_feature: MA Experiment 20000436 PARAMETER Experiment Name: At_Drought_P Parameter: Age (day) Value: 7
  misc_feature: MA Experiment 20000436 PARAMETER Experiment Name: At_Drought_P Parameter: Organism Value: A. thaliana
  misc_feature: MA Experiment 20000436 PARAMETER Experiment Name: At_Drought_P Parameter: Plant Line Value: WS
  misc_feature: MA Experiment 20000436 PARAMETER Experiment Name: At_Drought_P Parameter: Timepoint (hr) Value: 12
  misc_feature: MA Experiment 20000436 PARAMETER Experiment Name: At_Drought_P Parameter: Tissue Value: Whole Plant
  misc_feature: MA Experiment 20000436 PARAMETER Experiment Name: At_Drought_P Parameter: Treatment Value: Drought vs. No Drought
  misc_feature: MA Experiment ID: 20000437 Result: Down-regulated in Transcription
  misc_feature: MA Experiment 20000437 PARAMETER Experiment Name: At_Drought_P Parameter: Age (day) Value: 8
  misc_feature: MA Experiment 20000437 PARAMETER Experiment Name: At_Drought_P Parameter: Organism Value: A. thaliana
  misc_feature: MA Experiment 20000437 PARAMETER Experiment Name: At_Drought_P Parameter: Plant Line Value: WS
  misc_feature: MA Experiment 20000437 PARAMETER Experiment Name: At_Drought_P Parameter: Timepoint (hr) Value: 24
  misc_feature: MA Experiment 20000437 PARAMETER Experiment Name: At_Drought_P Parameter: Tissue Value: Whole Plant
  misc_feature: MA Experiment 20000437 PARAMETER Experiment Name: At_Drought_P Parameter: Treatment Value: Drought vs. No Drought
  misc_feature: MA Experiment ID: 20000439 Result: Down-regulated in Transcription
  misc_feature: MA Experiment 20000439 PARAMETER Experiment Name: At_Roots__P Parameter: Age (day) Value: 14 vs. 21
  misc_feature: MA Experiment 20000439 PARAMETER Experiment Name: At_Roots__P Parameter: Organism Value: A. thaliana
  misc_feature: MA Experiment 20000439 PARAMETER Experiment Name: At_Roots__P Parameter: Tissue Value: Roots vs. Whole Plant
  misc_feature: MA Experiment ID: 20000452 Result: Down-regulated in Transcription
  misc_feature: MA Experiment 20000452 PARAMETER Experiment Name: At_CS6879_Shoots-Roots_P Parameter: Age (day) Value: 14
  misc_feature: MA Experiment 20000452 PARAMETER Experiment Name: At_CS6879_Shoots-Roots_P Parameter: Organism Value: A. thaliana
  misc_feature: MA Experiment 20000452 PARAMETER Experiment Name: At_CS6879_Shoots-Roots_P Parameter: Plant Line Value: CS6879 vs. WS
  misc_feature: MA Experiment 20000452 PARAMETER Experiment Name: At_CS6879_Shoots-Roots_P Parameter: Tissue Value: Shoots
  misc_feature: MA Experiment ID: 20000495 Result: Down-regulated in Transcription
  misc_feature: MA Experiment 20000495 PARAMETER Experiment Name: At_Guard_Cells_P Parameter: Harvest Date Value: 8/2/2002
  misc_feature: MA Experiment 20000495 PARAMETER Experiment Name: At_Guard_Cells_P Parameter: Organism Value: A. thaliana
  misc_feature: MA Experiment 20000495 PARAMETER Experiment Name: At_Guard_Cells_P Parameter: Tissue Value: Guard Cells vs. Leaves
  misc_feature: MA Experiment ID: 20000527 Result: Down-regulated in Transcription
  misc_feature: MA Experiment 20000527 PARAMETER Experiment Name: At_10percent_PEG_P Parameter: Age (day) Value: 20
  misc_feature: MA Experiment 20000527 PARAMETER Experiment Name: At_10percent_PEG_P Parameter: Organism Value: A. thaliana
  misc_feature: MA Experiment 20000527 PARAMETER Experiment Name: At_10percent_PEG_P Parameter: Plant Line Value: WS
  misc_feature: MA Experiment 20000527 PARAMETER Experiment Name: At_10percent_PEG_P Parameter: Timepoint (day) Value: 20
  misc_feature: MA Experiment 20000527 PARAMETER Experiment Name: At_10percent_PEG_P Parameter: Tissue Value: Whole Plant
  misc_feature: MA Experiment 20000527 PARAMETER Experiment Name: At_10percent_PEG_P Parameter: Treatment Value: 10percent PEG vs. No Treatment
  misc_feature: MA Experiment ID: 20000794 Result: Down-regulated in Transcription
  misc_feature: MA Experiment 20000794 PARAMETER Experiment Name: At_Petals_P Parameter: Age (day) Value: 23-25 days
  misc_feature: MA Experiment 20000794 PARAMETER Experiment Name: At_Petals_P Parameter: Plant Line Value: WS
  misc_feature: MA Experiment 20000794 PARAMETER Experiment Name: At_Petals_P Parameter: Tissue Value: Petals vs. Whole plant
  misc_feature: MA Experiment ID: 20001554 Result: Down-regulated in Transcription
  misc_feature: MA Experiment 20001554 PARAMETER Experiment Name: At_Drought_Soil_Dry_P Parameter: Age (day) Value: 21
  misc_feature: MA Experiment 20001554 PARAMETER Experiment Name: At_Drought_Soil_Dry_P Parameter: Organism Value: A. thaliana
  misc_feature: MA Experiment 20001554 PARAMETER Experiment Name: At_Drought_Soil_Dry_P Parameter: Plant Line Value: WS
  misc_feature: MA Experiment 20001554 PARAMETER Experiment Name: At_Drought_Soil_Dry_P Parameter: Post Timepoint (hr) Value: None
  misc_feature: MA Experiment 20001554 PARAMETER Experiment Name: At_Drought_Soil_Dry_P Parameter: Post-Treatment Value: None
  misc_feature: MA Experiment 20001554 PARAMETER Experiment Name: At_Drought_Soil_Dry_P Parameter: Timepoint (day) Value: 7
  misc_feature: MA Experiment 20001554 PARAMETER Experiment Name: At_Drought_Soil_Dry_P Parameter: Treatment Value: Drought vs. No Drought
  misc_feature: MA Experiment ID: 20001555 Result: Down-regulated in Transcription
  misc_feature: MA Experiment 20001555 PARAMETER Experiment Name: At_Drought_Soil_Dry_P Parameter: Age (day) Value: 24
  misc_feature: MA Experiment 20001555 PARAMETER Experiment Name: At_Drought_Soil_Dry_P Parameter: Organism Value: A. thaliana
  misc_feature: MA Experiment 20001555 PARAMETER Experiment Name: At_Drought_Soil_Dry_P Parameter: Plant Line Value: WS
  misc_feature: MA Experiment 20001555 PARAMETER Experiment Name: At_Drought_Soil_Dry_P Parameter: Post Timepoint (hr) Value: None
  misc_feature: MA Experiment 20001555 PARAMETER Experiment Name: At_Drought_Soil_Dry_P Parameter: Post-Treatment Value: None
  misc_feature: MA Experiment 20001555 PARAMETER Experiment Name: At_Drought_Soil_Dry_P Parameter: Timepoint (day) Value: 10
  misc_feature: MA Experiment 20001555 PARAMETER Experiment Name: At_Drought_Soil_Dry_P Parameter: Treatment Value: Drought vs. No Drought
  misc_feature: MA Experiment ID: 20001556 Result: Down-regulated in Transcription
  misc_feature: MA Experiment 20001556 PARAMETER Experiment Name: At_Drought_Soil_Dry_P Parameter: Age (day) Value: 26
  misc_feature: MA Experiment 20001556 PARAMETER Experiment Name: At_Drought_Soil_Dry_P Parameter: Organism Value: A. thaliana
  misc_feature: MA Experiment 20001556 PARAMETER Experiment Name: At_Drought_Soil_Dry_P Parameter: Plant Line Value: WS
  misc_feature: MA Experiment 20001556 PARAMETER Experiment Name: At_Drought_Soil_Dry_P Parameter: Post Timepoint (hr) Value: None
  misc_feature: MA Experiment 20001556 PARAMETER Experiment Name: At_Drought_Soil_Dry_P Parameter: Post-Treatment Value: None
  misc_feature: MA Experiment 20001556 PARAMETER Experiment Name: At_Drought_Soil_Dry_P Parameter: Timepoint (day) Value: 12
  misc_feature: MA Experiment 20001556 PARAMETER Experiment Name: At_Drought_Soil_Dry_P Parameter: Treatment Value: Drought vs. No Drought
  misc_feature: MA Experiment ID: 20001559 Result: Down-regulated in Transcription
  misc_feature: MA Experiment 20001559 PARAMETER Experiment Name: At_Drought_Soil_Dry_P Parameter: Age (day) Value: 28
  misc_feature: MA Experiment 20001559 PARAMETER Experiment Name: At_Drought_Soil_Dry_P Parameter: Organism Value: A. thaliana
  misc_feature: MA Experiment 20001559 PARAMETER Experiment Name: At_Drought_Soil_Dry_P Parameter: Plant Line Value: WS
  misc_feature: MA Experiment 20001559 PARAMETER Experiment Name: At_Drought_Soil_Dry_P Parameter: Post Timepoint (hr) Value: 29
  misc_feature: MA Experiment 20001559 PARAMETER Experiment Name: At_Drought_Soil_Dry_P Parameter: Post-Treatment Value: Re-Water vs. No Drought
  misc_feature: MA Experiment 20001559 PARAMETER Experiment Name: At_Drought_Soil_Dry_P Parameter: Timepoint (day) Value: 14
  misc_feature: MA Experiment 20001559 PARAMETER Experiment Name: At_Drought_Soil_Dry_P Parameter: Treatment Value: Drought vs. No Drought
  misc_feature: MA Experiment ID: 20001560 Result: Down-regulated in Transcription
  misc_feature: MA Experiment 20001560 PARAMETER Experiment Name: At_Drought_Soil_Dry_P Parameter: Age (day) Value: 28
  misc_feature: MA Experiment 20001560 PARAMETER Experiment Name: At_Drought_Soil_Dry_P Parameter: Organism Value: A. thaliana
  misc_feature: MA Experiment 20001560 PARAMETER Experiment Name: At_Drought_Soil_Dry_P Parameter: Plant Line Value: WS
  misc_feature: MA Experiment 20001560 PARAMETER Experiment Name: At_Drought_Soil_Dry_P Parameter: Post Timepoint (hr) Value: None
  misc_feature: MA Experiment 20001560 PARAMETER Experiment Name: At_Drought_Soil_Dry_P Parameter: Post-Treatment Value: None
  misc_feature: MA Experiment 20001560 PARAMETER Experiment Name: At_Drought_Soil_Dry_P Parameter: Timepoint (day) Value: 14
  misc_feature: MA Experiment 20001560 PARAMETER Experiment Name: At_Drought_Soil_Dry_P Parameter: Treatment Value: Drought vs. No Drought
  misc_feature: MA Experiment ID: 20001904 Result: Down-regulated in Transcription
  misc_feature: MA Experiment 20001904 PARAMETER Experiment Name: At_Drought_Reproduction_P Parameter: Age (day) Value: 37
  misc_feature: MA Experiment 20001904 PARAMETER Experiment Name: At_Drought_Reproduction_P Parameter: Organism Value: A. thaliana
  misc_feature: MA Experiment 20001904 PARAMETER Experiment Name: At_Drought_Reproduction_P Parameter: Plant Line Value: WS
  misc_feature: MA Experiment 20001904 PARAMETER Experiment Name: At_Drought_Reproduction_P Parameter: Timepoint (day) Value: 7
  misc_feature: MA Experiment 20001904 PARAMETER Experiment Name: At_Drought_Reproduction_P Parameter: Tissue Value: Rosettes
  misc_feature: MA Experiment 20001904 PARAMETER Experiment Name: At_Drought_Reproduction_P Parameter: Treatment Value: Drought vs. No Drought
aggagattagcgaaaactcaaaacaggaacaaagttaaaagagtgagagagaaagaaagagagaagatgaaggtacaggagggtttgttcgtggtggctgttttctaccttgcttatacgcagctagtcaaggggcaacctcgcaaggagtgccaaactagatgtggcaatgtcgcagttgagtacccttttggtacttctccaggttgttactatcccggagatgaaagtttcaatcttacttgcaacgagcaagagaagctcttctttggcaacatgccagtcatcaacatgtctctcagcggccagcttcgtgttcggctagttagatccagagtttgctacgatagtcaaggaaaacagactgactacattgcccagcggaccaccctgggtaatttcactctctctgaacttaacagatttactgtagtaggttgtaacagttacgcatttctccgcacatctggagttgaaaaatactcaactggatgcatatcaatatgtgattctgccacaacgaaaaacggatcatgttctggtgaaggttgctgccagatccctgtccctagaggatactcttttgtcagagtaaaaccacatagctttcacaaccatcctactgtgcatctgtttaatccttgcacctacgcctttctcgttgaagatggtatgtttgacttccatgctttggaagatctcaacaatctgcgaaatgttactacgttccctgtagtactagattggtctatcggagacaagacttgcaaacaagtagaatacaggggcgtgtgtggtggtaacagcacatgtttcgattctactggtggaaccgggtataactgcaaatgtttagaaggttttgaggggaatccataccttccaaacggttgtcaagacatcaatgaatgtattagtagtagacataactgttcggagcatagtacctgtgaaaacacgaaggggagcttcaactgtaactgcccatctggttaccgcaaagattcccttaatagctgtactcgtaaagtcaggcctgaatactttagatggactcaaatttttcttggaaccaccatcggcttctcggttatcatgcttgggattagctgtctacaacagaaaattaagcaccggaagaacacagagctccgacaaaaattcttcgagcaaaatggtggaggcatgttgatacagcgagtctcgggagcagggccatcaaatgttgatgtcaaaatcttcactgagaaaggaatgaaggaagcaactaatggttaccatgagagcagaatcctgggtcagggaggccaaggaacagtgtacaaagggatattgccggacaactccatagttgctataaagaaagctcggcttggaaaccgtagccaagtagagcagttcatcaacgaagtgctagtgctttcacaaatcaaccataggaacgtggtcaaggtcttggggtgttgtttagagacagaagtccccttgttggtctatgagttcattaacagtggtacccttttcgatcacttgcacggttccttgtatgattcttcacttacatgggagcaccgtctgaggatagcaacagaagtagcaggaagtcttgcatatcttcactcttctgcttctattccaatcatccaccgagatatcaagactgctaatattctcctggataaaaacttaactgcaaaagtagctgactttggtgcatcaagattgataccgatggataaagagcagctcacaacaatagtgcaaggcactctaggttacctagacccagaatattacaacacagggttgttaaacgaaaagagcgatgtttatagttttggggtcgtcctaatggaactgctctcaggtcaaaaggcattgtgtttcgaaagaccacattgcccaaaaaatcttgtgagttgttttgcttctgccacaaagaataataggttccatgaaattattgatgggcaagtgatgaatgaggataaccagagagagatccaggaagctgcaagaattgctgcagagtgtacaaggctaatgggagaggaaaggccaaggatgaaagaagtagctgcagagttagaggccttgagagttaaaacaactaaatataagtggtcggatcagtatcgtgagacaggggagattgaacacttgctcggcgttcaaatcttgtcagcacaaggcgaaaccagtagcagcattggctatgacagcatcagaaatgtaacaacattggacattgaagctggccgttgatattaatgctctgacaaaatcacatgtatatcttttgtttgtaaaaaaagaaagtcatttccttgttgcttcatcaataatgctttgacagatttgtttgtacatcatcaataatcatgttcatattttccttt

SEQ ID NO: 103365 - protein, 754 aa, Arabidopsis thaliana
  peptide (1)..(754): Ceres Seq. ID no. 13612614
  misc_feature (23)..(754): Homolog of NCBI NO: 15218170 NR Description: wall-associated kinase 5 [Arabidopsis thaliana]
  misc_feature (23)..(754): Homolog of NCBI NO: 18394970 NR Description: wall-associated kinase 1 [Arabidopsis thaliana]
  misc_feature (23)..(754): Homolog of NCBI NO: 25751318 NR Description: probable serine/threonine-specific protein kinase
  misc_feature (23)..(754): Homolog of NCBI NO: 25287665 NR Description: hypothetical protein F16F4.10 [imported] -
  misc_feature (23)..(754): Homolog of NCBI NO: 15218167 NR Description: wall-associated kinase 4 [Arabidopsis thaliana]
  misc_feature (23)..(754): Homolog of NCBI NO: 3355308 NR Description: wall-associated kinase 4 [Arabidopsis thaliana]
  misc_feature (23)..(754): Homolog of NCBI NO: 15218171 NR Description: wall-associated kinase 3 [Arabidopsis thaliana]
  misc_feature (297)..(754): Homolog of NCBI NO: 25287657 NR Description: F16F4.8 protein - Arabidopsis thaliana
  misc_feature (23)..(325): Homolog of NCBI NO: 25287657 NR Description: F16F4.8 protein - Arabidopsis thaliana
  misc_feature (114)..(702): Homolog of NCBI NO: 38346752 NR Description: OSJNBa0081G05.15 [Oryza sativa (japonica
RRLAKTQNRNKVKRVREKEREKMKVQEGLFVVAVFYLAYTQLVKGQPRKECQTRCGNVAVEYPFGTSPGCYYPGDESFNLTCNEQEKLFFGNMPVINMSLSGQLRVRLVRSRVCYDSQGKQTDYIAQRTTLGNFTLSELNRFTVVGCNSYAFLRTSGVEKYSTGCISICDSATTKNGSCSGEGCCQIPVPRGYSFVRVKPHSFHNHPTVHLFNPCTYAFLVEDGMFDFHALEDLNNLRNVTTFPVVLDWSIGDKTCKQVEYRGVCGGNSTCFDSTGGTGYNCKCLEGFEGNPYLPNGCQDINECISSRHNCSEHSTCENTKGSFNCNCPSGYRKDSLNSCTRKVRPEYFRWTQIFLGTTIGFSVIMLGISCLQQKIKHRKNTELRQKFFEQNGGGMLIQRVSGAGPSNVDVKIFTEKGMKEATNGYHESRILGQGGQGTVYKGILPDNSIVAIKKARLGNRSQVEQFINEVLVLSQINHRNVVKVLGCCLETEVPLLVYEFINSGTLFDHLHGSLYDSSLTWEHRLRIATEVAGSLAYLHSSASIPIIHRDIKTANILLDKNLTAKVADFGASRLIPMDKEQLTTIVQGTLGYLDPEYYNTGLLNEKSDVYSFGVVLMELLSGQKALCFERPHCPKNLVSCFASATKNNRFHEIIDGQVMNEDNQREIQEAARIAAECTRLMGEERPRMKEVAAELEALRVKTTKYKWSDQYRETGEIEHLLGVQILSAQGETSSSIGYDSIRNVTTLDIEAGR

SEQ ID NO: 103366 - protein, 732 aa, Arabidopsis thaliana
  peptide (1)..(732): Ceres Seq. ID no. 13612615
  misc_feature (1)..(732): Homolog of NCBI NO: 15218170 NR Description: wall-associated kinase 5 [Arabidopsis thaliana]
  misc_feature (1)..(732): Homolog of NCBI NO: 18394970 NR Description: wall-associated kinase 1 [Arabidopsis thaliana]
  misc_feature (1)..(732): Homolog of NCBI NO: 25751318 NR Description: probable serine/threonine-specific protein kinase
  misc_feature (1)..(732): Homolog of NCBI NO: 25287665 NR Description: hypothetical protein F16F4.10 [imported] -
  misc_feature (1)..(732): Homolog of NCBI NO: 15218167 NR Description: wall-associated kinase 4 [Arabidopsis thaliana]
  misc_feature (1)..(732): Homolog of NCBI NO: 3355308 NR Description: wall-associated kinase 4 [Arabidopsis thaliana]
  misc_feature (1)..(732): Homolog of NCBI NO: 15218171 NR Description: wall-associated kinase 3 [Arabidopsis thaliana]
  misc_feature (275)..(732): Homolog of NCBI NO: 25287657 NR Description: F16F4.8 protein - Arabidopsis thaliana
  misc_feature (1)..(303): Homolog of NCBI NO: 25287657 NR Description: F16F4.8 protein - Arabidopsis thaliana
  misc_feature (92)..(680): Homolog of NCBI NO: 38346752 NR Description: OSJNBa0081G05.15 [Oryza sativa (japonica
MKVQEGLFVVAVFYLAYTQLVKGQPRKECQTRCGNVAVEYPFGTSPGCYYPGDESFNLTCNEQEKLFFGNMPVINMSLSGQLRVRLVRSRVCYDSQGKQTDYIAQRTTLGNFTLSELNRFTVVGCNSYAFLRTSGVEKYSTGCISICDSATTKNGSCSGEGCCQIPVPRGYSFVRVKPHSFHNHPTVHLFNPCTYAFLVEDGMFDFHALEDLNNLRNVTTFPVVLDWSIGDKTCKQVEYRGVCGGNSTCFDSTGGTGYNCKCLEGFEGNPYLPNGCQDINECISSRHNCSEHSTCENTKGSFNCNCPSGYRKDSLNSCTRKVRPEYFRWTQIFLGTTIGFSVIMLGISCLQQKIKHRKNTELRQKFFEQNGGGMLIQRVSGAGPSNVDVKIFTEKGMKEATNGYHESRILGQGGQGTVYKGILPDNSIVAIKKARLGNRSQVEQFINEVLVLSQINHRNVVKVLGCCLETEVPLLVYEFINSGTLFDHLHGSLYDSSLTWEHRLRIATEVAGSLAYLHSSASIPIIHRDIKTANILLDKNLTAKVADFGASRLIPMDKEQLTTIVQGTLGYLDPEYYNTGLLNEKSDVYSFGVVLMELLSGQKALCFERPHCPKNLVSCFASATKNNRFHEIIDGQVMNEDNQREIQEAARIAAECTRLMGEERPRMKEVAAELEALRVKTTKYKWSDQYRETGEIEHLLGVQILSAQGETSSSIGYDSIRNVTTLDIEAGR

SEQ ID NO: 103367 - protein, 662 aa, Arabidopsis thaliana
  peptide (1)..(662): Ceres Seq. ID no. 13612616
  misc_feature (1)..(662): Homolog of NCBI NO: 15218170 NR Description: wall-associated kinase 5 [Arabidopsis thaliana]
  misc_feature (1)..(662): Homolog of NCBI NO: 18394970 NR Description: wall-associated kinase 1 [Arabidopsis thaliana]
  misc_feature (1)..(662): Homolog of NCBI NO: 25751318 NR Description: probable serine/threonine-specific protein kinase
  misc_feature (1)..(662): Homolog of NCBI NO: 25287665 NR Description: hypothetical protein F16F4.10 [imported] -
  misc_feature (1)..(662): Homolog of NCBI NO: 15218167 NR Description: wall-associated kinase 4 [Arabidopsis thaliana]
  misc_feature (1)..(662): Homolog of NCBI NO: 3355308 NR Description: wall-associated kinase 4 [Arabidopsis thaliana]
  misc_feature (1)..(662): Homolog of NCBI NO: 15218171 NR Description: wall-associated kinase 3 [Arabidopsis thaliana]
  misc_feature (205)..(662): Homolog of NCBI NO: 25287657 NR Description: F16F4.8 protein - Arabidopsis thaliana
  misc_feature (1)..(233): Homolog of NCBI NO: 25287657 NR Description: F16F4.8 protein - Arabidopsis thaliana
  misc_feature (22)..(610): Homolog of NCBI NO: 38346752 NR Description: OSJNBa0081G05.15 [Oryza sativa (japonica
MPVINMSLSGQLRVRLVRSRVCYDSQGKQTDYIAQRTTLGNFTLSELNRFTVVGCNSYAFLRTSGVEKYSTGCISICDSATTKNGSCSGEGCCQIPVPRGYSFVRVKPHSFHNHPTVHLFNPCTYAFLVEDGMFDFHALEDLNNLRNVTTFPVVLDWSIGDKTCKQVEYRGVCGGNSTCFDSTGGTGYNCKCLEGFEGNPYLPNGCQDINECISSRHNCSEHSTCENTKGSFNCNCPSGYRKDSLNSCTRKVRPEYFRWTQIFLGTTIGFSVIMLGISCLQQKIKHRKNTELRQKFFEQNGGGMLIQRVSGAGPSNVDVKIFTEKGMKEATNGYHESRILGQGGQGTVYKGILPDNSIVAIKKARLGNRSQVEQFINEVLVLSQINHRNVVKVLGCCLETEVPLLVYEFINSGTLFDHLHGSLYDSSLTWEHRLRIATEVAGSLAYLHSSASIPIIHRDIKTANILLDKNLTAKVADFGASRLIPMDKEQLTTIVQGTLGYLDPEYYNTGLLNEKSDVYSFGVVLMELLSGQKALCFERPHCPKNLVSCFASATKNNRFHEIIDGQVMNEDNQREIQEAARIAAECTRLMGEERPRMKEVAAELEALRVKTTKYKWSDQYRETGEIEHLLGVQILSAQGETSSSIGYDSIRNVTTLDIEAGR

SEQ ID NO: 103368 - DNA, 1839 bp, Arabidopsis thaliana
  misc_feature (1)..(1839): Ceres Seq. ID no. 13612617
  misc_feature: MA Experiment ID: 108434 Result: Down-regulated in Transcription
  misc_feature: MA Experiment 108434 PARAMETER Experiment Name: At_Root_Tips_cDNA_P Parameter: Tissue Value: Root Tips
  misc_feature: MA Experiment ID: 108463 Result: Down-regulated in Transcription
  misc_feature: MA Experiment 108463 PARAMETER Experiment Name: At_Germinating_Seeds_cDNA_P Parameter: Age (day) Value: 3 vs. 0
  misc_feature: MA Experiment 108463 PARAMETER Experiment Name: At_Germinating_Seeds_cDNA_P Parameter: Tissue Value: Germinating Seeds
  misc_feature: MA Experiment ID: 108464 Result: Down-regulated in Transcription
  misc_feature: MA Experiment 108464 PARAMETER Experiment Name: At_Germinating_Seeds_cDNA_P Parameter: Age (day) Value: 4 vs. 0
  misc_feature: MA Experiment 108464 PARAMETER Experiment Name: At_Germinating_Seeds_cDNA_P Parameter: Tissue Value: Germinating Seeds
  misc_feature: MA Experiment ID: 108573 Result: Up-regulated in Transcription
  misc_feature: MA Experiment 108573 PARAMETER Experiment Name: At_Drought_cDNA_P Parameter: Timepoint (hr) Value: 6
  misc_feature: MA Experiment 108573 PARAMETER Experiment Name: At_Drought_cDNA_P Parameter: Tissue Value: Aerial
  misc_feature: MA Experiment 108573 PARAMETER Experiment Name: At_Drought_cDNA_P Parameter: Treatment Value: Drought vs. No Drought
  misc_feature: MA Experiment ID: 108577 Result: Down-regulated in Transcription
  misc_feature: MA Experiment 108577 PARAMETER Experiment Name: At_42deg_Heat_cDNA_P Parameter: Temperature (deg C) Value: 42 vs. 22
  misc_feature: MA Experiment 108577 PARAMETER Experiment Name: At_42deg_Heat_cDNA_P Parameter: Timepoint (hr) Value: 6
  misc_feature: MA Experiment 108577 PARAMETER Experiment Name: At_42deg_Heat_cDNA_P Parameter: Tissue Value: Aerial
  misc_feature: MA Experiment ID: 20000069 Result: Up-regulated in Transcription
  misc_feature: MA Experiment 20000069 PARAMETER Experiment Name: At_100uM_ABA_Mutants_cDNA_P Parameter: Plant Line Value: CS23
  misc_feature: MA Experiment 20000069 PARAMETER Experiment Name: At_100uM_ABA_Mutants_cDNA_P Parameter: Timepoint (hr) Value: 6
  misc_feature: MA Experiment 20000069 PARAMETER Experiment Name: At_100uM_ABA_Mutants_cDNA_P Parameter: Tissue Value: Aerial
  misc_feature: MA Experiment 20000069 PARAMETER Experiment Name: At_100uM_ABA_Mutants_cDNA_P Parameter: Treatment Value: 100uM ABA vs. No Treatment
  misc_feature: MA Experiment ID: 20000070 Result: Up-regulated in Transcription
  misc_feature: MA Experiment 20000070 PARAMETER Experiment Name: At_100uM_ABA_Mutants_cDNA_P Parameter: Plant Line Value: CS24
  misc_feature: MA Experiment 20000070 PARAMETER Experiment Name: At_100uM_ABA_Mutants_cDNA_P Parameter: Timepoint (hr) Value: 6
  misc_feature: MA Experiment 20000070 PARAMETER Experiment Name: At_100uM_ABA_Mutants_cDNA_P Parameter: Tissue Value: Aerial
  misc_feature: MA Experiment 20000070 PARAMETER Experiment Name: At_100uM_ABA_Mutants_cDNA_P Parameter: Treatment Value: 100uM ABA vs. No Treatment
  misc_feature: MA Experiment ID: 20000072 Result: Up-regulated in Transcription
  misc_feature: MA Experiment 20000072 PARAMETER Experiment Name: At_100uM_ABA_Mutants_cDNA_P Parameter: Plant Line Value: CS8105
  misc_feature: MA Experiment 20000072 PARAMETER Experiment Name: At_100uM_ABA_Mutants_cDNA_P Parameter: Timepoint (hr) Value: 6
  misc_feature: MA Experiment 20000072 PARAMETER Experiment Name: At_100uM_ABA_Mutants_cDNA_P Parameter: Tissue Value: Aerial
  misc_feature: MA Experiment 20000072 PARAMETER Experiment Name: At_100uM_ABA_Mutants_cDNA_P Parameter: Treatment Value: 100uM ABA vs. No Treatment
  misc_feature: MA Experiment ID: 20000086 Result: Up-regulated in Transcription
  misc_feature: MA Experiment 20000086 PARAMETER Experiment Name: At_100uM_ABA_Mutants_cDNA_P Parameter: Plant Line Value: CS22
  misc_feature: MA Experiment 20000086 PARAMETER Experiment Name: At_100uM_ABA_Mutants_cDNA_P Parameter: Timepoint (hr) Value: 6
  misc_feature: MA Experiment 20000086 PARAMETER Experiment Name: At_100uM_ABA_Mutants_cDNA_P Parameter: Tissue Value: Aerial
  misc_feature: MA Experiment 20000086 PARAMETER Experiment Name: At_100uM_ABA_Mutants_cDNA_P Parameter: Treatment Value: 100uM ABA vs. No Treatment
  misc_feature: MA Experiment ID: 20000087 Result: Up-regulated in Transcription
  misc_feature: MA Experiment 20000087 PARAMETER Experiment Name: At_100uM_ABA_Mutants_cDNA_P Parameter: Plant Line Value: WS
  misc_feature: MA Experiment 20000087 PARAMETER Experiment Name: At_100uM_ABA_Mutants_cDNA_P Parameter: Timepoint (hr) Value: 6
  misc_feature: MA Experiment 20000087 PARAMETER Experiment Name: At_100uM_ABA_Mutants_cDNA_P Parameter: Tissue Value: Aerial
  misc_feature: MA Experiment 20000087 PARAMETER Experiment Name: At_100uM_ABA_Mutants_cDNA_P Parameter: Treatment Value: 100uM ABA vs. No Treatment
  misc_feature: MA Experiment ID: 20000088 Result: Up-regulated in Transcription
  misc_feature: MA Experiment 20000088 PARAMETER Experiment Name: At_100uM_ABA_Mutants_cDNA_P Parameter: Plant Line Value: Landsberg
  misc_feature: MA Experiment 20000088 PARAMETER Experiment Name: At_100uM_ABA_Mutants_cDNA_P Parameter: Timepoint (hr) Value: 6
  misc_feature: MA Experiment 20000088 PARAMETER Experiment Name: At_100uM_ABA_Mutants_cDNA_P Parameter: Tissue Value: Aerial
  misc_feature: MA Experiment 20000088 PARAMETER Experiment Name: At_100uM_ABA_Mutants_cDNA_P Parameter: Treatment Value: 100uM ABA vs. No Treatment
  misc_feature: MA Experiment ID: 20000111 Result: Down-regulated in Transcription
  misc_feature: MA Experiment 20000111 PARAMETER Experiment Name: At_42deg_Heat_cDNA_P Parameter: Temperature (deg C) Value: 42 vs. 22
  misc_feature: MA Experiment 20000111 PARAMETER Experiment Name: At_42deg_Heat_cDNA_P Parameter: Timepoint (hr) Value: 6
  misc_feature: MA Experiment 20000111 PARAMETER Experiment Name: At_42deg_Heat_cDNA_P Parameter: Tissue Value: Aerial
  misc_feature: MA Experiment ID: 20000185 Result: Up-regulated in Transcription
  misc_feature: MA Experiment 20000185 PARAMETER Experiment Name: At_Roots__P Parameter: Age (day) Value: 7 vs. 21
  misc_feature: MA Experiment 20000185 PARAMETER Experiment Name: At_Roots__P Parameter: Organism Value: A. thaliana
  misc_feature: MA Experiment 20000185 PARAMETER Experiment Name: At_Roots__P Parameter: Tissue Value: Roots vs. Whole Plant
  misc_feature: MA Experiment ID: 20000224 Result: Down-regulated in Transcription
  misc_feature: MA Experiment ID: 20000227 Result: Down-regulated in Transcription
  misc_feature: MA Experiment 20000227 PARAMETER Experiment Name: At_Root-Tips-vs-Tops_P Parameter: Tissue Value: Root Tips vs. Root Tops
  misc_feature: MA Experiment ID: 20000234 Result: Down-regulated in Transcription
  misc_feature: MA Experiment 20000234 PARAMETER Experiment Name: At_Siliques_P Parameter: Age (day) Value: 21
  misc_feature: MA Experiment 20000234 PARAMETER Experiment Name: At_Siliques_P Parameter: Organism Value: A. thaliana
  misc_feature: MA Experiment 20000234 PARAMETER Experiment Name: At_Siliques_P Parameter: Plant Line Value: WS
  misc_feature: MA Experiment 20000234 PARAMETER Experiment Name: At_Siliques_P Parameter: Tissue Value: Less Than 5mm Siliques vs. Whole Plant
  misc_feature: MA Experiment ID: 20000235 Result: Down-regulated in Transcription
  misc_feature: MA Experiment 20000235 PARAMETER Experiment Name: At_Siliques_P Parameter: Age (day) Value: 21
  misc_feature: MA Experiment 20000235 PARAMETER Experiment Name: At_Siliques_P Parameter: Organism Value: A. thaliana
  misc_feature: MA Experiment 20000235 PARAMETER Experiment Name: At_Siliques_P Parameter: Plant Line Value: WS
  misc_feature: MA Experiment 20000235 PARAMETER Experiment Name: At_Siliques_P Parameter: Tissue Value: 5-10mm Siliques vs. Whole Plant
  misc_feature: MA Experiment ID: 20000436 Result: Up-regulated in Transcription
  misc_feature: MA Experiment 20000436 PARAMETER Experiment Name: At_Drought_P Parameter: Age (day) Value: 7
  misc_feature: MA Experiment 20000436 PARAMETER Experiment Name: At_Drought_P Parameter: Organism Value: A. thaliana
  misc_feature: MA Experiment 20000436 PARAMETER Experiment Name: At_Drought_P Parameter: Plant Line Value: WS
  misc_feature: MA Experiment 20000436 PARAMETER Experiment Name: At_Drought_P Parameter: Timepoint (hr) Value: 12
  misc_feature: MA Experiment 20000436 PARAMETER Experiment Name: At_Drought_P Parameter: Tissue Value: Whole Plant
  misc_feature: MA Experiment 20000436 PARAMETER Experiment Name: At_Drought_P Parameter: Treatment Value: Drought vs. No Drought
  misc_feature: MA Experiment ID: 20000439 Result: Up-regulated in Transcription
  misc_feature: MA Experiment 20000439 PARAMETER Experiment Name: At_Roots__P Parameter: Age (day) Value: 14 vs. 21
  misc_feature: MA Experiment 20000439 PARAMETER Experiment Name: At_Roots__P Parameter: Organism Value: A. thaliana
  misc_feature: MA Experiment 20000439 PARAMETER Experiment Name: At_Roots__P Parameter: Tissue Value: Roots vs. Whole Plant
  misc_feature: MA Experiment ID: 20000453 Result: Up-regulated in Transcription
  misc_feature: MA Experiment 20000453 PARAMETER Experiment Name: At_100uM_ABA_P Parameter: Age (day) Value: 15
  misc_feature: MA Experiment 20000453 PARAMETER Experiment Name: At_100uM_ABA_P Parameter: Organism Value: A. thaliana
  misc_feature: MA Experiment 20000453 PARAMETER Experiment Name: At_100uM_ABA_P Parameter: Plant Line Value: WS
  misc_feature: MA Experiment 20000453 PARAMETER Experiment Name: At_100uM_ABA_P Parameter: Timepoint (hr) Value: 24
  misc_feature: MA Experiment 20000453 PARAMETER Experiment Name: At_100uM_ABA_P Parameter: Tissue Value: Aerial
  misc_feature: MA Experiment 20000453 PARAMETER Experiment Name: At_100uM_ABA_P Parameter: Treatment Value: 100uM ABA vs. No Treatment
  misc_feature: MA Experiment ID: 20000496 Result: Up-regulated in Transcription
  misc_feature: MA Experiment 20000496 PARAMETER Experiment Name: At_Guard_Cells_P Parameter: Harvest Date Value: 7/19/2002
  misc_feature: MA Experiment 20000496 PARAMETER Experiment Name: At_Guard_Cells_P Parameter: Organism Value: Canola
  misc_feature: MA Experiment 20000496 PARAMETER Experiment Name: At_Guard_Cells_P Parameter: Tissue Value: Guard Cells vs. Leaves
  misc_feature: MA Experiment ID: 20000794 Result: Up-regulated in Transcription
  misc_feature: MA Experiment 20000794 PARAMETER Experiment Name: At_Petals_P Parameter: Age (day) Value: 23-25 days
  misc_feature: MA Experiment 20000794 PARAMETER Experiment Name: At_Petals_P Parameter: Plant Line Value: WS
  misc_feature: MA Experiment 20000794 PARAMETER Experiment Name: At_Petals_P Parameter: Tissue Value: Petals vs. Whole plant
  misc_feature: MA Experiment ID: 20001555 Result: Up-regulated in Transcription
  misc_feature: MA Experiment 20001555 PARAMETER Experiment Name: At_Drought_Soil_Dry_P Parameter: Age (day) Value: 24
  misc_feature: MA Experiment 20001555 PARAMETER Experiment Name: At_Drought_Soil_Dry_P Parameter: Organism Value: A. thaliana
  misc_feature: MA Experiment 20001555 PARAMETER Experiment Name: At_Drought_Soil_Dry_P Parameter: Plant Line Value: WS
  misc_feature: MA Experiment 20001555 PARAMETER Experiment Name: At_Drought_Soil_Dry_P Parameter: Post Timepoint (hr) Value: None
  misc_feature: MA Experiment 20001555 PARAMETER Experiment Name: At_Drought_Soil_Dry_P Parameter: Post-Treatment Value: None
  misc_feature: MA Experiment 20001555 PARAMETER Experiment Name: At_Drought_Soil_Dry_P Parameter: Timepoint (day) Value: 10
  misc_feature: MA Experiment 20001555 PARAMETER Experiment Name: At_Drought_Soil_Dry_P Parameter: Treatment Value: Drought vs. No Drought
  misc_feature: MA Experiment ID: 20001757 Result: Down-regulated in Transcription
  misc_feature: MA Experiment 20001757 PARAMETER Experiment Name: At_50mM_NH4NO3_L-to-H_P Parameter: Timepoint (hr) Value: 6
  misc_feature: MA Experiment 20001757 PARAMETER Experiment Name: At_50mM_NH4NO3_L-to-H_P Parameter: Tissue Value: Leaf
  misc_feature: MA Experiment 20001757 PARAMETER Experiment Name: At_50mM_NH4NO3_L-to-H_P Parameter: Treatment Value: 50mM NH4NO3 vs 100mM Mannitol
  misc_feature: MA Experiment ID: 20001904 Result: Up-regulated in Transcription
  misc_feature: MA Experiment 20001904 PARAMETER Experiment Name: At_Drought_Reproduction_P Parameter: Age (day) Value: 37
  misc_feature: MA Experiment 20001904 PARAMETER Experiment Name: At_Drought_Reproduction_P Parameter: Organism Value: A. thaliana
  misc_feature: MA Experiment 20001904 PARAMETER Experiment Name: At_Drought_Reproduction_P Parameter: Plant Line Value: WS
  misc_feature: MA Experiment 20001904 PARAMETER Experiment Name: At_Drought_Reproduction_P Parameter: Timepoint (day) Value: 7
  misc_feature: MA Experiment 20001904 PARAMETER Experiment Name: At_Drought_Reproduction_P Parameter: Tissue Value: Rosettes
  misc_feature: MA Experiment 20001904 PARAMETER Experiment Name: At_Drought_Reproduction_P Parameter: Treatment Value: Drought vs. No Drought
  misc_feature: MA Experiment ID: 20001905 Result: Up-regulated in Transcription
  misc_feature: MA Experiment 20001905 PARAMETER Experiment Name: At_Drought_Reproduction_P Parameter: Age (day) Value: 40
  misc_feature: MA Experiment 20001905 PARAMETER Experiment Name: At_Drought_Reproduction_P Parameter: Organism Value: A. thaliana
  misc_feature: MA Experiment 20001905 PARAMETER Experiment Name: At_Drought_Reproduction_P Parameter: Plant Line Value: WS
  misc_feature: MA Experiment 20001905 PARAMETER Experiment Name: At_Drought_Reproduction_P Parameter: Timepoint (day) Value: 10
  misc_feature: MA Experiment 20001905 PARAMETER Experiment Name: At_Drought_Reproduction_P Parameter: Tissue Value: Rosettes
  misc_feature: MA Experiment 20001905 PARAMETER Experiment Name: At_Drought_Reproduction_P Parameter: Treatment Value: Drought vs. No Drought
  misc_feature: MA Experiment ID: 20001906 Result: Up-regulated in Transcription
  misc_feature: MA Experiment 20001906 PARAMETER Experiment Name: At_Drought_Reproduction_P Parameter: Age (day) Value: 35
  misc_feature: MA Experiment 20001906 PARAMETER Experiment Name: At_Drought_Reproduction_P Parameter: Organism Value: A. thaliana
  misc_feature: MA Experiment 20001906 PARAMETER Experiment Name: At_Drought_Reproduction_P Parameter: Plant Line Value: WS
  misc_feature: MA Experiment 20001906 PARAMETER Experiment Name: At_Drought_Reproduction_P Parameter: Timepoint (day) Value: 5
  misc_feature: MA Experiment 20001906 PARAMETER Experiment Name: At_Drought_Reproduction_P Parameter: Tissue Value: Siliques
  misc_feature: MA Experiment 20001906 PARAMETER Experiment Name: At_Drought_Reproduction_P Parameter: Treatment Value: Drought vs. No Drought
  misc_feature: MA Experiment ID: 20001908 Result: Up-regulated in Transcription
  misc_feature: MA Experiment 20001908 PARAMETER Experiment Name: At_Drought_Reproduction_P Parameter: Age (day) Value: 40
  misc_feature: MA Experiment 20001908 PARAMETER Experiment Name: At_Drought_Reproduction_P Parameter: Organism Value: A. thaliana
  misc_feature: MA Experiment 20001908 PARAMETER Experiment Name: At_Drought_Reproduction_P Parameter: Plant Line Value: WS
  misc_feature: MA Experiment 20001908 PARAMETER Experiment Name: At_Drought_Reproduction_P Parameter: Timepoint (day) Value: 10
  misc_feature: MA Experiment 20001908 PARAMETER Experiment Name: At_Drought_Reproduction_P Parameter: Tissue Value: Siliques
  misc_feature: MA Experiment 20001908 PARAMETER Experiment Name: At_Drought_Reproduction_P Parameter: Treatment Value: Drought vs. No Drought
gtagctactgtgtcacgcttttctctagcgaatactttgatgcttcttcatgactctttaacaagattattctgagcttttcctctggccttctaattattaaagtcttcctttttatctattgttaagtgatggctactgaagagaagcctcttaattctcttgatttaagccatgatgattcttcccctgcttcaaatcaggctgaaggatcatctgctataactgaagacacttctgcgaatgttcaacaatggaggcgaaagaatctctctttacagataccctctagagcagctggtctctctcctgaagattcggttgttatcaaaatgcctccaacgcctagtccaactccaagaagagtcaactttgctttgacttcgagttctccaggtcctactcctacttcttcttctgttcttcctcgtggcaaatcgtccctgaagaatctattgccaaaagctgggtgtaaaccaaaaacctctaacactgatatcgagaagggacaagggaatgcctgttctcctcctgcatcgcaggagaaggcttcgatatcgaggtcattatcactttcaaagctatttacacctaggatcaagagaacttcgtccctacctgtgactcctgttattctttcaaactcagagtcagctcacggaggaaccagtgttgctcctcaaactccaaacagaaaagggagtgtacacatagctcgctctcgctctgtgccccttaacgacaaggaattaagcctgaagggaatggattcatttttcagagtaattccttcgactcctcgtgttaaggaaggagacgttttctcaaatgcatcagaggctggtaatactgaaacaggtgatgctgatggagaagacatacctgaggatgaagcagtttgtaggatttgtttggtagagctctgtgaaggaggagaaaccttaaaaatggagtgtagttgcaaaggcgaacttgctcttgcccacaaagattgtgctcttaaatggttcaccataaagggtaacaagacttgtgaggtgtgtaaacaagaagttaagaacttacctgtaacactcttacgcatccaaagccttcgaaattctggtgttcctcagctagatgtctctggctatagggtgtggcaggaggtaccggttctagtaatcatcagcatgctcgcttacttctgcttcctcgagcagctcctggttgagaatatgggtacaggtgccatcgctatatcactgccgttttcttgtattcttggtcttcttgcatccatgaccgcatcaaccatggtaatgagaagatttgtctggatttacgcatctgtccagtttgcgttggtcgttctcttcgcccatatattttactctgtggtgaagttgcaaccagttctgtcagttcttctgtcaacatttgctggatttggtgtatgcatatgcggaagttcagtgatggttgagtttgtgagatggagacgaagatggcgagccagaaggctagagcaacagctgaaccatgctttgactctgtcacaaccgccgcaaccactggatccaacaacctctctgcatcattcaaatacctcatagagagccaagaagtggacagatgattttacatttatacagtgtagtttggttaatgtttatgtaatgatttgtataaaagaaaaagagaaagtgatccaaggaatgcttaaagattgttccttttgtttgttttacatacacatttgtattgttgtaagtttgtaactttgatttgctcaatctctgcaaatgaaatgtttgtagcagtattggtttctctgtataataaaaagatttaaaattg

SEQ ID NO: 103369 - protein, 487 aa, Arabidopsis thaliana; identical to SEQ ID NO: 42080
  peptide (1)..(487): Ceres Seq. ID no. 13612618
  misc_feature (257)..(304): Pfam Name: Zinc finger, C3HC4 type (RING finger) Pfam Description: Zinc finger, C3HC4 type (RING finger)
  misc_feature (1)..(487): Homolog of NCBI NO: 18424371 NR Description: zinc finger (C3HC4-type RING finger) protein
  misc_feature (1)..(487): Homolog of NCBI NO: 30697388 NR Description: zinc finger (C3HC4-type RING finger) protein
  misc_feature (1)..(381): Homolog of NCBI NO: 13605863 NR Description: AT5g60580/muf9_230 [Arabidopsis thaliana]
  misc_feature (13)..(486): Homolog of NCBI NO: 18398630 NR Description: zinc finger (C3HC4-type RING finger) protein [Arabidopsis thaliana] >gi|15809927|gb|AAL06891.1| [Arabidopsis thaliana] >gi|21360565|gb|AAM47479.1|
  misc_feature (82)..(480): Homolog of NCBI NO: 32489688 NR Description: OSJNBb0004G23.1 [Oryza sativa (japonica
  misc_feature (14)..(451): Homolog of NCBI NO: 9757769 NR Description: gene_id:MOK16.9~unknown protein [Arabidopsis
  misc_feature (14)..(451): Homolog of NCBI NO: 18414148 NR Description: zinc finger (C3HC4-type RING finger) protein [Arabidopsis thaliana] >gi|15809868|gb|AAL06862.1| [Arabidopsis thaliana] >gi|21655303|gb|AAM65363.1|
  misc_feature (14)..(451): Homolog of NCBI NO: 11290062 NR Description: hypothetical protein F15A17.210 - Arabidopsis >gi|7413595|emb|CAB86085.1| putative protein [Arabidopsis
  misc_feature (273)..(486): Homolog of NCBI NO: 6682253 NR Description: unknown protein [Arabidopsis thaliana]
  misc_feature (77)..(452): Homolog of NCBI NO: 21594296 NR Description: unknown [Arabidopsis thaliana]

SEQ ID NO: 103370 - protein, 420 aa, Arabidopsis thaliana; identical to SEQ ID NO: 42081
  peptide (1)..(420): Ceres Seq. ID no. 13612619
  misc_feature (190)..(237): Pfam Name: Zinc finger, C3HC4 type (RING finger) Pfam Description: Zinc finger, C3HC4 type (RING finger)
  misc_feature (1)..(420): Homolog of NCBI NO: 18424371 NR Description: zinc finger (C3HC4-type RING finger) protein
  misc_feature (1)..(420): Homolog of NCBI NO: 30697388 NR Description: zinc finger (C3HC4-type RING finger) protein
  misc_feature (1)..(314): Homolog of NCBI NO: 13605863 NR Description: AT5g60580/muf9_230 [Arabidopsis thaliana]
  misc_feature (1)..(419): Homolog of NCBI NO: 18398630 NR Description: zinc finger (C3HC4-type RING finger) protein [Arabidopsis thaliana] >gi|15809927|gb|AAL06891.1| [Arabidopsis thaliana] >gi|21360565|gb|AAM47479.1|
  misc_feature (15)..(413): Homolog of NCBI NO: 32489688 NR Description: OSJNBb0004G23.1 [Oryza sativa (japonica
  misc_feature (1)..(384): Homolog of NCBI NO: 9757769 NR Description: gene_id:MOK16.9~unknown protein [Arabidopsis
  misc_feature (1)..(384): Homolog of NCBI NO: 18414148 NR Description: zinc finger (C3HC4-type RING finger) protein [Arabidopsis thaliana] >gi|15809868|gb|AAL06862.1| [Arabidopsis thaliana] >gi|21655303|gb|AAM65363.1|
  misc_feature (1)..(384): Homolog of NCBI NO: 11290062 NR Description: hypothetical protein F15A17.210 - Arabidopsis >gi|7413595|emb|CAB86085.1| putative protein [Arabidopsis
  misc_feature (206)..(419): Homolog of NCBI NO: 6682253 NR Description: unknown protein [Arabidopsis thaliana]
  misc_feature (10)..(385): Homolog of NCBI NO: 21594296 NR Description: unknown [Arabidopsis thaliana]

SEQ ID NO: 103371 - protein, 276 aa, Arabidopsis thaliana; identical to SEQ ID NO: 42082
  peptide (1)..(276): Ceres Seq. ID no. 13612620
  misc_feature (46)..(93): Pfam Name: Zinc finger, C3HC4 type (RING finger) Pfam Description: Zinc finger, C3HC4 type (RING finger)
  misc_feature (1)..(276): Homolog of NCBI NO: 18424371 NR Description: zinc finger (C3HC4-type RING finger) protein
  misc_feature (1)..(276): Homolog of NCBI NO: 30697388 NR Description: zinc finger (C3HC4-type RING finger) protein
  misc_feature (1)..(170): Homolog of NCBI NO: 13605863 NR Description: AT5g60580/muf9_230 [Arabidopsis thaliana]
  misc_feature (1)..(275): Homolog of NCBI NO: 18398630 NR Description: zinc finger (C3HC4-type RING finger) protein [Arabidopsis thaliana] >gi|15809927|gb|AAL06891.1| [Arabidopsis thaliana] >gi|21360565|gb|AAM47479.1|
  misc_feature (1)..(269): Homolog of NCBI NO: 32489688 NR Description: OSJNBb0004G23.1 [Oryza sativa (japonica
  misc_feature (1)..(240): Homolog of NCBI NO: 9757769 NR Description: gene_id:MOK16.9~unknown protein [Arabidopsis
  misc_feature (1)..(240): Homolog of NCBI NO: 18414148 NR Description: zinc finger (C3HC4-type RING finger) protein [Arabidopsis thaliana] >gi|15809868|gb|AAL06862.1| [Arabidopsis thaliana] >gi|21655303|gb|AAM65363.1|
  misc_feature (1)..(240): Homolog of NCBI NO: 11290062 NR Description: hypothetical protein F15A17.210 - Arabidopsis >gi|7413595|emb|CAB86085.1| putative protein [Arabidopsis
  misc_feature (62)..(275): Homolog of NCBI NO: 6682253 NR Description: unknown protein [Arabidopsis thaliana]
  misc_feature (1)..(241): Homolog of NCBI NO: 21594296 NR Description: unknown [Arabidopsis thaliana]

SEQ ID NO: 103372 - DNA, 1997 bp, Arabidopsis thaliana
  misc_feature (1)..(1997): Ceres Seq. ID no. 13612629
  misc_feature: MA Experiment ID: 108434 Result: Up-regulated in Transcription
  misc_feature: MA Experiment 108434 PARAMETER Experiment Name: At_Root_Tips_cDNA_P Parameter: Tissue Value: Root Tips
  misc_feature: MA Experiment ID: 108463 Result: Down-regulated in Transcription
  misc_feature: MA Experiment 108463 PARAMETER Experiment Name: At_Germinating_Seeds_cDNA_P Parameter: Age (day) Value: 3 vs. 0
  misc_feature: MA Experiment 108463 PARAMETER Experiment Name: At_Germinating_Seeds_cDNA_P Parameter: Tissue Value: Germinating Seeds
  misc_feature: MA Experiment ID: 108572 Result: Down-regulated in Transcription
  misc_feature: MA Experiment 108572 PARAMETER Experiment Name: At_Drought_cDNA_P Parameter: Timepoint (hr) Value: 1
  misc_feature: MA Experiment 108572 PARAMETER Experiment Name: At_Drought_cDNA_P Parameter: Tissue Value: Aerial
  misc_feature: MA Experiment 108572 PARAMETER Experiment Name: At_Drought_cDNA_P Parameter: Treatment Value: Drought vs. No Drought
  misc_feature: MA Experiment ID: 108573 Result: Down-regulated in Transcription
  misc_feature: MA Experiment 108573 PARAMETER Experiment Name: At_Drought_cDNA_P Parameter: Timepoint (hr) Value: 6
  misc_feature: MA Experiment 108573 PARAMETER Experiment Name: At_Drought_cDNA_P Parameter: Tissue Value: Aerial
  misc_feature: MA Experiment 108573 PARAMETER Experiment Name: At_Drought_cDNA_P Parameter: Treatment Value: Drought vs. No Drought
  misc_feature: MA Experiment ID: 20000087 Result: Up-regulated in Transcription
  misc_feature: MA Experiment 20000087 PARAMETER Experiment Name: At_100uM_ABA_Mutants_cDNA_P Parameter: Plant Line Value: WS
  misc_feature: MA Experiment 20000087 PARAMETER Experiment Name: At_100uM_ABA_Mutants_cDNA_P Parameter: Timepoint (hr) Value: 6
  misc_feature: MA Experiment 20000087 PARAMETER Experiment Name: At_100uM_ABA_Mutants_cDNA_P Parameter: Tissue Value: Aerial
  misc_feature: MA Experiment 20000087 PARAMETER Experiment Name: At_100uM_ABA_Mutants_cDNA_P Parameter: Treatment Value: 100uM ABA vs. No Treatment
  misc_feature: MA Experiment ID: 20000089 Result: Up-regulated in Transcription
  misc_feature: MA Experiment ID: 20000090 Result: Up-regulated in Transcription
  misc_feature: MA Experiment ID: 20000093 Result: Up-regulated in Transcription
  misc_feature: MA Experiment 20000093 PARAMETER Experiment Name: At_42deg_Heat_cDNA_P Parameter: Temperature (deg C) Value: 42 vs. 22
  misc_feature: MA Experiment 20000093 PARAMETER Experiment Name: At_42deg_Heat_cDNA_P Parameter: Timepoint (hr) Value: 0.5
  misc_feature: MA Experiment 20000093 PARAMETER Experiment Name: At_42deg_Heat_cDNA_P Parameter: Tissue Value: Aerial
  misc_feature: MA Experiment ID: 20000111 Result: Up-regulated in Transcription
  misc_feature: MA Experiment 20000111 PARAMETER Experiment Name: At_42deg_Heat_cDNA_P Parameter: Temperature (deg C) Value: 42 vs. 22
  misc_feature: MA Experiment 20000111 PARAMETER Experiment Name: At_42deg_Heat_cDNA_P Parameter: Timepoint (hr) Value: 6
  misc_feature: MA Experiment 20000111 PARAMETER Experiment Name: At_42deg_Heat_cDNA_P Parameter: Tissue Value: Aerial
  misc_feature: MA Experiment ID: 20000112 Result: Up-regulated in Transcription
  misc_feature: MA Experiment 20000112 PARAMETER Experiment Name: At_42deg_Heat_cDNA_P Parameter: Temperature (deg C) Value: 42 vs. 22
  misc_feature: MA Experiment 20000112 PARAMETER Experiment Name: At_42deg_Heat_cDNA_P Parameter: Timepoint (hr) Value: 2
  misc_feature: MA Experiment 20000112 PARAMETER Experiment Name: At_42deg_Heat_cDNA_P Parameter: Tissue Value: Aerial
  misc_feature: MA Experiment ID: 20000113 Result: Up-regulated in Transcription
  misc_feature: MA Experiment 20000113 PARAMETER Experiment Name: At_42deg_Heat_cDNA_P Parameter: Temperature (deg C) Value: 42 vs. 22
  misc_feature: MA Experiment 20000113 PARAMETER Experiment Name: At_42deg_Heat_cDNA_P Parameter: Timepoint (hr) Value: 8
  misc_feature: MA Experiment 20000113 PARAMETER Experiment Name: At_42deg_Heat_cDNA_P Parameter: Tissue Value: Aerial
  misc_feature: MA Experiment ID: 20000144 Result: Up-regulated in Transcription
  misc_feature: MA Experiment 20000144 PARAMETER Experiment Name: At_42deg_Heat_cDNA_P Parameter: Temperature (deg C) Value: 42 vs. 22
  misc_feature: MA Experiment 20000144 PARAMETER Experiment Name: At_42deg_Heat_cDNA_P Parameter: Timepoint (hr) Value: 1
  misc_feature: MA Experiment 20000144 PARAMETER Experiment Name: At_42deg_Heat_cDNA_P Parameter: Tissue Value: Aerial
  misc_feature: MA Experiment ID: 20000171 Result: Up-regulated in Transcription
  misc_feature: MA Experiment 20000171 PARAMETER Experiment Name: At_42deg_Heat_P Parameter: Age (day) Value: 14
  misc_feature: MA Experiment 20000171 PARAMETER Experiment Name: At_42deg_Heat_P Parameter: Organism Value: A. thaliana
  misc_feature: MA Experiment 20000171 PARAMETER Experiment Name: At_42deg_Heat_P Parameter: Plant Line Value: WS
  misc_feature: MA Experiment 20000171 PARAMETER Experiment Name: At_42deg_Heat_P Parameter: Temperature (deg C) Value: 42 vs. 22
  misc_feature: MA Experiment 20000171 PARAMETER Experiment Name: At_42deg_Heat_P Parameter: Timepoint (hr) Value: 1
  misc_feature: MA Experiment 20000171 PARAMETER Experiment Name: At_42deg_Heat_P Parameter: Tissue Value: Aerial
  misc_feature: MA Experiment ID: 20000173 Result: Up-regulated in Transcription
  misc_feature: MA Experiment 20000173 PARAMETER Experiment Name: At_42deg_Heat_P Parameter: Age (day) Value: 14
  misc_feature: MA Experiment 20000173 PARAMETER Experiment Name: At_42deg_Heat_P Parameter: Organism Value: A. thaliana
  misc_feature: MA Experiment 20000173 PARAMETER Experiment Name: At_42deg_Heat_P Parameter: Plant Line Value: WS
  misc_feature: MA Experiment 20000173 PARAMETER Experiment Name: At_42deg_Heat_P Parameter: Temperature (deg C) Value: 42 vs. 22
  misc_feature: MA Experiment 20000173 PARAMETER Experiment Name: At_42deg_Heat_P Parameter: Timepoint (hr) Value: 6
  misc_feature: MA Experiment 20000173 PARAMETER Experiment Name: At_42deg_Heat_P Parameter: Tissue Value: Aerial
  misc_feature: MA Experiment ID: 20000179 Result: Up-regulated in Transcription
  misc_feature: MA Experiment 20000179 PARAMETER Experiment Name: At_Germinating_Seeds_P Parameter: Age (hr) Value: 6 vs. 0
  misc_feature: MA Experiment 20000179 PARAMETER Experiment Name: At_Germinating_Seeds_P Parameter: Tissue Value: Germinating Seeds
  misc_feature: MA Experiment ID: 20000224 Result: Up-regulated in Transcription
  misc_feature: MA Experiment ID: 20000227 Result: Up-regulated in Transcription
  misc_feature: MA Experiment 20000227 PARAMETER Experiment Name: At_Root-Tips-vs-Tops_P Parameter: Tissue Value: Root Tips vs. Root Tops
  misc_feature: MA Experiment ID: 20000437 Result: Down-regulated in Transcription
  misc_feature: MA Experiment 20000437 PARAMETER Experiment Name: At_Drought_P Parameter: Age (day) Value: 8
  misc_feature: MA Experiment 20000437 PARAMETER Experiment Name: At_Drought_P Parameter: Organism Value: A. thaliana
  misc_feature: MA Experiment 20000437 PARAMETER Experiment Name: At_Drought_P Parameter: Plant Line Value: WS
  misc_feature: MA Experiment 20000437 PARAMETER Experiment Name: At_Drought_P Parameter: Timepoint (hr) Value: 24
  misc_feature: MA Experiment 20000437 PARAMETER Experiment Name: At_Drought_P Parameter: Tissue Value: Whole Plant
  misc_feature: MA Experiment 20000437 PARAMETER Experiment Name: At_Drought_P Parameter: Treatment Value: Drought vs. No Drought
  misc_feature: MA Experiment ID: 20000495 Result: Up-regulated in Transcription
  misc_feature: MA Experiment 20000495 PARAMETER Experiment Name: At_Guard_Cells_P Parameter: Harvest Date Value: 8/2/2002
  misc_feature: MA Experiment 20000495 PARAMETER Experiment Name: At_Guard_Cells_P Parameter: Organism Value: A. thaliana
  misc_feature: MA Experiment 20000495 PARAMETER Experiment Name: At_Guard_Cells_P Parameter: Tissue Value: Guard Cells vs. Leaves
  misc_feature: MA Experiment ID: 20001450 Result: Down-regulated in Transcription
  misc_feature: MA Experiment 20001450 PARAMETER Experiment Name: At_Far-red-induction_P Parameter: Age (day) Value: 7
  misc_feature: MA Experiment 20001450 PARAMETER Experiment Name: At_Far-red-induction_P Parameter: Light Value: Far-red vs. White
  misc_feature: MA Experiment 20001450 PARAMETER Experiment Name: At_Far-red-induction_P Parameter: Organism Value: A. thaliana
  misc_feature: MA Experiment 20001450 PARAMETER Experiment Name: At_Far-red-induction_P Parameter: Plant Line Value: Columbia
  misc_feature: MA Experiment 20001450 PARAMETER Experiment Name: At_Far-red-induction_P Parameter: Timepoint (hr) Value: 8
  misc_feature: MA Experiment 20001450 PARAMETER Experiment Name: At_Far-red-induction_P Parameter: Tissue Value: Whole Plant
  misc_feature: MA Experiment ID: 20001558 Result: Up-regulated in Transcription
  misc_feature: MA Experiment 20001558 PARAMETER Experiment Name: At_Drought_Soil_Dry_P Parameter: Age (day) Value: 27
  misc_feature: MA Experiment 20001558 PARAMETER Experiment Name: At_Drought_Soil_Dry_P Parameter: Organism Value: A. thaliana
  misc_feature: MA Experiment 20001558 PARAMETER Experiment Name: At_Drought_Soil_Dry_P Parameter: Plant Line Value: WS
  misc_feature: MA Experiment 20001558 PARAMETER Experiment Name: At_Drought_Soil_Dry_P Parameter: Post Timepoint (hr) Value: 6
  misc_feature: MA Experiment 20001558 PARAMETER Experiment Name: At_Drought_Soil_Dry_P Parameter: Post-Treatment Value: Re-Water vs. No Drought
  misc_feature: MA Experiment 20001558 PARAMETER Experiment Name: At_Drought_Soil_Dry_P Parameter: Timepoint (day) Value: 13
  misc_feature: MA Experiment 20001558 PARAMETER Experiment Name: At_Drought_Soil_Dry_P Parameter: Treatment Value: Drought vs. No Drought
  misc_feature: MA Experiment ID: 20001560 Result: Up-regulated in Transcription
  misc_feature: MA Experiment 20001560 PARAMETER Experiment Name: At_Drought_Soil_Dry_P Parameter: Age (day) Value: 28
  misc_feature: MA Experiment 20001560 PARAMETER Experiment Name: At_Drought_Soil_Dry_P Parameter: Organism Value: A. thaliana
  misc_feature: MA Experiment 20001560 PARAMETER Experiment Name: At_Drought_Soil_Dry_P Parameter: Plant Line Value: WS
  misc_feature: MA Experiment 20001560 PARAMETER Experiment Name: At_Drought_Soil_Dry_P Parameter: Post Timepoint (hr) Value: None
  misc_feature: MA Experiment 20001560 PARAMETER Experiment Name: At_Drought_Soil_Dry_P Parameter: Post-Treatment Value: None
  misc_feature: MA Experiment 20001560 PARAMETER Experiment Name: At_Drought_Soil_Dry_P Parameter: Timepoint (day) Value: 14
  misc_feature: MA Experiment 20001560 PARAMETER Experiment Name: At_Drought_Soil_Dry_P Parameter: Treatment Value: Drought vs. No Drought
acatatcactctttctccttcacgagggatttttgttccgatctacttctccggcttatcaccgatttagatctaagcctgaggtttccttttgcattttagagattccgagaatgagacaacggcaactattttccgtgtttttgcttctcttagctttcgtttcgttccagaagctttgctactgtgacgatcaaacggttctgtatgaatcgttcgatgagccttttgatggccgctggatcgtttcgaagaatagtgattacgaaggtgtatggaagcatgcaaagagtgaaggacatgaggattatggacttctcgtgagtgagaaggctaggaagtatggaattgtgaaagagcttgacgagcctctaaacctcaaggaaggaactgttgttcttcagtacgaggttcgtttccaggaaggacttgagtgtggtggtgcttacttgaagtacctccgtcctcaggaagctggatggacacctcagggattcgatagtgaatccccttactctatcatgtttgggcctgacaagtgtggaggtacgaacaaagtgcatttcatcttgaagcacaagaatcccaagagtggcgagtacgttgaacaccatctgaagttccctccctctgttccttatgacaagctttcccatgtctacaccgccatcttgaaacccgacaacgaggttagaattttggttgatggagaggagaagaaaaaggccaatttactctctggtgaagactttgagcctgcattgatccctgccaagaccatccctgaccctgaagacaagaaaccagaggattgggacgaaagagccaagattcctgatccaaatgccgtgaagcctgaggactgggatgaggatgcacctatggagattgaagatgaggaagctgagaaacccgaaggatggttagatgatgagcctgaggaggtcgacgaccccgaagcgaccaagcctgaagattgggatgatgaggaagatggtatgtgggaggctcctaaaattgacaaccccaagtgtgaagcagcacctggttgtggtgaatggaagagaccaatgaagaggaatcctgcttacaagggcaaatggagctcacctcttattgataacccggcttacaagggaatctggaaacccagagatatccctaaccctgactactttgagctagacagacccgattacgaacccattgcagccatcggtattgagatctggacaatgcaagatggtatcttgtttgacaacatcttgatagcgaaagacgagaaggtcgctgagacttacagacagaccacttggaagcccaaattcgatgttgagaaagagaaacaaaaggcagaagaggaagctgctggctctgcagatggtctcaagagctaccagaaggttgtattcgacctcttgaacaaggttgcagatttatctttcctaagtgcctacaagtctaagatcacggaactgattgagaaagccgagcaacaaccaaacttaaccattggtgtcctcgtcgccattgtggttgtattcttctcgctcttcctcaagcttatctttggtggcaaaaaggcggcggcacctgtggaaaagaagaaaccagaagtagcggagagttcaaagagtggggatgaggcggagaagaaggaagaaaccgcggcaccacgcaaaaggcaaccgagacgtgataattagaacaagattttaaagtagttttcgaagatgtgaaagaaaagttcagatttatttttctgtttttggttttgggttgaatgttgttttctgctgtagcctataatggtgtaacaccaagtttgagaaatttttgtctttgggcgaagaaaagaaaggaggaatatgtatgtgaagacggtttgttgacagccaaattgtagcttctatttctttttcatccccttcagtagtaacaactggttgcttgaaacattagagttttcttatttgaatcaaaagagtttttataac

SEQ ID NO: 103373 - protein, 567 aa, Arabidopsis thaliana; identical to SEQ ID NO: 26469
  peptide (1)..(567): Ceres Seq. ID no. 13612630
  misc_feature (66)..(423): Pfam Name: Calreticulin family Pfam Description: Calreticulin family
  misc_feature (38)..(567): Homolog of NCBI NO: 15240353 NR Description: calnexin 1 (CNX1) [Arabidopsis thaliana]
  misc_feature (38)..(567): Homolog of NCBI NO: 31321896 NR Description: putative papillar cell-specific calnexin
  misc_feature (38)..(567): Homolog of NCBI NO: 15240773 NR Description: calnexin, putative [Arabidopsis thaliana]
  misc_feature (38)..(567): Homolog of NCBI NO: 473878 NR Description: calnexin homolog
  misc_feature (43)..(566): Homolog of NCBI NO: 3334138 NR Description: CALNEXIN HOMOLOG PRECURSOR
  misc_feature (67)..(564): Homolog of NCBI NO: 21740628 NR Description: OSJNBb0012E08.10 [Oryza sativa (japonica
  misc_feature (43)..(567): Homolog of NCBI NO: 11131469 NR Description: Calnexin homolog precursor
  misc_feature (44)..(566): Homolog of NCBI NO: 11131766 NR Description: Calnexin homolog precursor
  misc_feature (149)..(564): Homolog of NCBI NO: 7441503 NR Description: calnexin - maize (fragment)
  misc_feature (73)..(556): Homolog of NCBI NO: 40740610 NR Description: hypothetical protein AN3592.2 [Aspergillus

SEQ ID NO: 103374 - protein, 530 aa, Arabidopsis thaliana; identical to SEQ ID NO: 26470
  peptide (1)..(530): Ceres Seq. ID no. 13612631
  misc_feature (29)..(386): Pfam Name: Calreticulin family Pfam Description: Calreticulin family
  misc_feature (1)..(530): Homolog of NCBI NO: 15240353 NR Description: calnexin 1 (CNX1) [Arabidopsis thaliana]
  misc_feature (1)..(530): Homolog of NCBI NO: 31321896 NR Description: putative papillar cell-specific calnexin
  misc_feature (1)..(530): Homolog of NCBI NO: 15240773 NR Description: calnexin, putative [Arabidopsis thaliana]
  misc_feature (1)..(530): Homolog of NCBI NO: 473878 NR Description: calnexin homolog
  misc_feature (6)..(529): Homolog of NCBI NO: 3334138 NR Description: CALNEXIN HOMOLOG PRECURSOR
  misc_feature (30)..(527): Homolog of NCBI NO: 21740628 NR Description: OSJNBb0012E08.10 [Oryza sativa (japonica
  misc_feature (6)..(530): Homolog of NCBI NO: 11131469 NR Description: Calnexin homolog precursor
  misc_feature (7)..(529): Homolog of NCBI NO: 11131766 NR Description: Calnexin homolog precursor
  misc_feature (112)..(527): Homolog of NCBI NO: 7441503 NR Description: calnexin - maize (fragment)
  misc_feature (36)..(519): Homolog of NCBI NO: 40740610 NR Description: hypothetical protein AN3592.2 [Aspergillus

SEQ ID NO: 103375 - protein, 394 aa, Arabidopsis thaliana; identical to SEQ ID NO: 26471
  peptide (1)..(394): Ceres Seq. ID no. 13612632
  misc_feature (1)..(250): Pfam Name: Calreticulin family Pfam Description: Calreticulin family
  misc_feature (1)..(394): Homolog of NCBI NO: 15240353 NR Description: calnexin 1 (CNX1) [Arabidopsis thaliana]
  misc_feature (1)..(394): Homolog of NCBI NO: 31321896 NR Description: putative papillar cell-specific calnexin
  misc_feature (1)..(394): Homolog of NCBI NO: 15240773 NR Description: calnexin, putative [Arabidopsis thaliana]
  misc_feature (1)..(394): Homolog of NCBI NO: 473878 NR Description: calnexin homolog
  misc_feature (1)..(393): Homolog of NCBI NO: 3334138 NR Description: CALNEXIN HOMOLOG PRECURSOR
  misc_feature (1)..(391): Homolog of NCBI NO: 21740628 NR Description: OSJNBb0012E08.10 [Oryza sativa (japonica
  misc_feature (1)..(394): Homolog of NCBI NO: 11131469 NR Description: Calnexin homolog precursor
  misc_feature (1)..(393): Homolog of NCBI NO: 11131766 NR Description: Calnexin homolog precursor
  misc_feature (1)..(391): Homolog of NCBI NO: 7441503 NR Description: calnexin - maize (fragment)
  misc_feature (1)..(383): Homolog of NCBI NO: 40740610 NR Description: hypothetical protein AN3592.2 [Aspergillus

SEQ ID NO: 103376 - DNA, 2156 bp, Arabidopsis thaliana
  misc_feature (1)..(2156): Ceres Seq. ID no. 13612633
  misc_feature: MA Experiment ID: 108434 Result: Down-regulated in Transcription
  misc_feature: MA Experiment 108434 PARAMETER Experiment Name: At_Root_Tips_cDNA_P Parameter: Tissue Value: Root Tips
  misc_feature: MA Experiment ID: 108585 Result: Up-regulated in Transcription
  misc_feature: MA Experiment 108585 PARAMETER Experiment Name: At_5mM_NaNP_cDNA_P Parameter: Timepoint (hr) Value: 6
  misc_feature: MA Experiment 108585 PARAMETER Experiment Name: At_5mM_NaNP_cDNA_P Parameter: Tissue Value: Aerial
  misc_feature: MA Experiment 108585 PARAMETER Experiment Name: At_5mM_NaNP_cDNA_P Parameter: Treatment Value: null
  misc_feature: MA Experiment ID: 20000070 Result: Down-regulated in Transcription
  misc_feature: MA Experiment 20000070 PARAMETER Experiment Name: At_100uM_ABA_Mutants_cDNA_P Parameter: Plant Line Value: CS24
  misc_feature: MA Experiment 20000070 PARAMETER Experiment Name: At_100uM_ABA_Mutants_cDNA_P Parameter: Timepoint (hr) Value: 6
  misc_feature: MA Experiment 20000070 PARAMETER Experiment Name: At_100uM_ABA_Mutants_cDNA_P Parameter: Tissue Value: Aerial
  misc_feature: MA Experiment 20000070 PARAMETER Experiment Name: At_100uM_ABA_Mutants_cDNA_P Parameter: Treatment Value: 100uM ABA vs. No Treatment
  misc_feature: MA Experiment ID: 20000184 Result: Down-regulated in Transcription
  misc_feature: MA Experiment 20000184 PARAMETER Experiment Name: At_Shoots__P Parameter: Age (day) Value: 7
  misc_feature: MA Experiment 20000184 PARAMETER Experiment Name: At_Shoots__P Parameter: Tissue Value: Shoots vs. Whole Plant
  misc_feature: MA Experiment ID: 20000185 Result: Down-regulated in Transcription
  misc_feature: MA Experiment 20000185 PARAMETER Experiment Name: At_Roots__P Parameter: Age (day) Value: 7 vs. 21
  misc_feature: MA Experiment 20000185 PARAMETER Experiment Name: At_Roots__P Parameter: Organism Value: A. thaliana
  misc_feature: MA Experiment 20000185 PARAMETER Experiment Name: At_Roots__P Parameter: Tissue Value: Roots vs. Whole Plant
  misc_feature: MA Experiment ID: 20000227 Result: Down-regulated in Transcription
  misc_feature: MA Experiment 20000227 PARAMETER Experiment Name: At_Root-Tips-vs-Tops_P Parameter: Tissue Value: Root Tips vs. Root Tops
  misc_feature: MA Experiment ID: 20000234 Result: Down-regulated in Transcription
  misc_feature: MA Experiment 20000234 PARAMETER Experiment Name: At_Siliques_P Parameter: Age (day) Value: 21
  misc_feature: MA Experiment 20000234 PARAMETER Experiment Name: At_Siliques_P Parameter: Organism Value: A. thaliana
  misc_feature: MA Experiment 20000234 PARAMETER Experiment Name: At_Siliques_P Parameter: Plant Line Value: WS
  misc_feature: MA Experiment 20000234 PARAMETER Experiment Name: At_Siliques_P Parameter: Tissue Value: Less Than 5mm Siliques vs. Whole Plant
  misc_feature: MA Experiment ID: 20000235 Result: Down-regulated in Transcription
  misc_feature: MA Experiment 20000235 PARAMETER Experiment Name: At_Siliques_P Parameter: Age (day) Value: 21
  misc_feature: MA Experiment 20000235 PARAMETER Experiment Name: At_Siliques_P Parameter: Organism Value: A. thaliana
  misc_feature: MA Experiment 20000235 PARAMETER Experiment Name: At_Siliques_P Parameter: Plant Line Value: WS
  misc_feature: MA Experiment 20000235 PARAMETER Experiment Name: At_Siliques_P Parameter: Tissue Value: 5-10mm Siliques vs. Whole Plant
  misc_feature: MA Experiment ID: 20000264 Result: Down-regulated in Transcription
  misc_feature: MA Experiment 20000264 PARAMETER Experiment Name: At_Open_Flower_P Parameter: Age (day) Value: 21
  misc_feature: MA Experiment 20000264 PARAMETER Experiment Name: At_Open_Flower_P Parameter: Plant Line Value: WS
  misc_feature: MA Experiment 20000264 PARAMETER Experiment Name: At_Open_Flower_P Parameter: Tissue Value: Open Flower vs. Whole Plant
  misc_feature: MA Experiment ID: 20000265 Result: Down-regulated in Transcription
  misc_feature: MA Experiment 20000265 PARAMETER Experiment Name: At_Open_Flower_P Parameter: Age (day) Value: 21
  misc_feature: MA Experiment 20000265 PARAMETER Experiment Name: At_Open_Flower_P Parameter: Plant Line Value: WS
  misc_feature: MA Experiment 20000265 PARAMETER Experiment Name: At_Open_Flower_P Parameter: Tissue Value: Closed Flower vs. Whole Plant
  misc_feature: MA Experiment ID: 20000286 Result: Down-regulated in Transcription
  misc_feature: MA Experiment 20000286 PARAMETER Experiment Name: At_Open_Flower_P Parameter: Age (day) Value: 21
  misc_feature: MA Experiment 20000286 PARAMETER Experiment Name: At_Open_Flower_P Parameter: Plant Line Value: WS
  misc_feature: MA Experiment 20000286 PARAMETER Experiment Name: At_Open_Flower_P Parameter: Tissue Value: Half Open vs. Whole Plant
  misc_feature: MA Experiment ID: 20000438 Result: Down-regulated in Transcription
  misc_feature: MA Experiment 20000438 PARAMETER Experiment Name: At_Shoots__P Parameter: Age (day) Value: 14
  misc_feature: MA Experiment 20000438 PARAMETER Experiment Name: At_Shoots__P Parameter: Tissue Value: Shoots vs. Whole Plant
  misc_feature: MA Experiment ID: 20000441 Result: Up-regulated in Transcription
  misc_feature: MA Experiment 20000441 PARAMETER Experiment Name: At_1uM_BR-BRZ__P Parameter: Tissue Value: Shoot Apices
  misc_feature: MA Experiment 20000441 PARAMETER Experiment Name: At_1uM_BR-BRZ__P Parameter: Treatment Value: 1uM BR vs. No Treatment
  misc_feature: MA Experiment ID: 20000573 Result: Down-regulated in Transcription
  misc_feature: MA Experiment 20000573 PARAMETER Experiment Name: At_100uM_ABA_Mutants__P Parameter: Organism Value: A. thaliana
  misc_feature: MA Experiment 20000573 PARAMETER Experiment Name: At_100uM_ABA_Mutants__P Parameter: Plant Line Value: CS22 vs. Ler wt
  misc_feature: MA Experiment 20000573 PARAMETER Experiment Name: At_100uM_ABA_Mutants__P Parameter: Timepoint (hr) Value: N/A
  misc_feature: MA Experiment 20000573 PARAMETER Experiment Name: At_100uM_ABA_Mutants__P Parameter: Tissue Value: Whole Plant
  misc_feature: MA Experiment 20000573 PARAMETER Experiment Name: At_100uM_ABA_Mutants__P Parameter: Treatment Value: None
  misc_feature: MA Experiment ID: 20000574 Result: Down-regulated in Transcription
  misc_feature: MA Experiment 20000574 PARAMETER Experiment Name: At_100uM_ABA_Mutants__P Parameter: Organism Value: A. thaliana
  misc_feature: MA Experiment 20000574 PARAMETER Experiment Name: At_100uM_ABA_Mutants__P Parameter: Plant Line Value: CS23 vs. Ler wt
  misc_feature: MA Experiment 20000574 PARAMETER Experiment Name: At_100uM_ABA_Mutants__P Parameter: Timepoint (hr) Value: N/A
  misc_feature: MA Experiment 20000574 PARAMETER Experiment Name: At_100uM_ABA_Mutants__P Parameter: Tissue Value: Whole Plant
  misc_feature: MA Experiment 20000574 PARAMETER Experiment Name: At_100uM_ABA_Mutants__P Parameter: Treatment Value: None
  misc_feature: MA Experiment ID: 20001247 Result: Up-regulated in Transcription
  misc_feature: MA Experiment 20001247 PARAMETER Experiment Name: At_Far-red-induction_P Parameter: Age (day) Value: 7
  misc_feature: MA Experiment 20001247 PARAMETER Experiment Name: At_Far-red-induction_P Parameter: Light Value: Far-red vs. White
  misc_feature: MA Experiment 20001247 PARAMETER Experiment Name: At_Far-red-induction_P Parameter: Organism Value: A. thaliana
  misc_feature: MA Experiment 20001247 PARAMETER Experiment Name: At_Far-red-induction_P Parameter: Plant Line Value: Columbia
  misc_feature: MA Experiment 20001247 PARAMETER Experiment Name: At_Far-red-induction_P Parameter: Timepoint (hr) Value: 1
  misc_feature: MA Experiment 20001247 PARAMETER Experiment Name: At_Far-red-induction_P Parameter: Tissue Value: Whole Plant
aattaccacaaagaagaacttgcaaatcccttctcttttgttcaagtcgtacgacagagcctttgaaagaaagaactggtggggaagcgttaagctacagataactccaagatacgggtctttgtttgttttgaagatcagattcattttacgataattccgttactcgttattgtgtatatatatctctttcccggaaatttcggttcttgttgtacaaaaactccaaaaaaacgcataaaaaatattctgtaaatggttgaaattctctgggaatttcaacgggtcttgtggtatcatgtcacagaagagagagtttgaagaagggaaaggtcgaattgagggcggctcatccgaagacaagcgtagaagattcaaaagtgtggttcaggaggtaatgagattacaaaccgtcaaacattttctcgaacctgttctcgagcccttaattcgtaaagtggtcaaagaagaagttgaattagctcttggaaagcatctagcaggcatcaagtggatttgtgagaaagagactcatcctttggaatcaaggaatctacagttaaagttcttgaacaatctatcgcttcccgtgtttacttcagctcggatagaaggagatgaaggccaagctataagagttggattaatagacccttcaactggccaaattttctcttctggtcctgcatcatccgccaaactcgaagtttttgtcgttgagggtgattttaacagtgttagtgattggactgatgaggatatcaggaataacattgtaagagagagagaaggaaagaaacctctactcaatgggaatgtatttgcggttcttaatgatggcattggtgttatggatgaaatctcatttacagataactctagctggactaggagcaggaagttcagactcggggtacgaatagtggatcagtttgattatgtcaaaattagagaggcaataacagagtcctttgtcgtaagagatcatcgaggagagttgtacaaaaagcatcatcctccttctcttttcgatgaagtatggagattggaaaagatagggaaagatggagcatttcacagacgactgaatttgtcaaatataaacactgtcaaggatttcttaacacatttccatttaaactcttcaaaactccgacaagttcttggtacgggtatgtcttcaaagatgtgggaaattactttggaccatgctcgatcatgtgttctagatagtagcgtccatgtgtaccaagctcctggatttcagaagaaaacagctgttgtcttcaacgtcgtagctcaagtgcttggactgctcgtggattttcagtatattcctgctgaaaagttatcagagattgaaaaggctcaagcggaggtgatggtaattgatgcattgagtcacctaaatgaagtaatctcgtatgatgatgaggtttccatgatgaggaacgttctcaatgccccggcttctcaaggcagtgttgccgggattgattattcgggtctgagtttgaccagtttggacggatacggttttgtgtcaagtcttcacaacacagcagaatgtagtggcaagcacagtgatgatgttgacatggaagttactccacatggtttatatgaagactacgacaatctctggaactgctctcacattctaggcttagaagaaccgcaatctgagttgcagagtgcgcttgacgatttcatgtcacagaagaatgcttcggtcggtggtaaggctcacagcaaaagatggacaaagcttttcagtgtctcgagatggctctctgttttcaagtatgtcaagttaggaaaaatataaaatgagtttagtacacaaaagaacaaaacgactcgctgcgccgcgccctggacagattcgtgtatatatatactcggggaaagcttgggtttctgatgatccagaggcgttcaaaagtgttttctttcttcttcttcttctggttgtctccatctttgtgttaaagatgtgaatatatgttttaggacagcttcatttttgttgaaagcttaaaaaacagggtcttttataatctctgtgattagtaccaaattgcagatttgcagaactacgtttttcttggtttgtcaggtaatgtgaaactgaataaaatgaatattatttgaat

SEQ ID NO: 103377 - protein, 509 aa, Arabidopsis thaliana
  peptide (1)..(509): Ceres Seq. ID no. 13612634
  misc_feature (28)..(509): Homolog of NCBI NO: 10178088 NR Description: contains similarity to calmodulin-binding
  misc_feature (34)..(509): Homolog of NCBI NO: 30697704 NR Description: calmodulin-binding protein [Arabidopsis thaliana]
  misc_feature (185)..(509): Homolog of NCBI NO: 20260396 NR Description: putative protein [Arabidopsis thaliana]
  misc_feature (4)..(463): Homolog of NCBI NO: 30687005 NR Description: calmodulin-binding protein [Arabidopsis thaliana]
  misc_feature (2)..(377): Homolog of NCBI NO: 15242785 NR Description: calmodulin-binding protein [Arabidopsis thaliana]
  misc_feature (4)..(377): Homolog of NCBI NO: 32482927 NR Description: OSJNBa0058G03.4 [Oryza sativa (japonica
  misc_feature (87)..(463): Homolog of NCBI NO: 7484830 NR Description: calmodulin-binding protein homolog F14M19.80 -
  misc_feature (51)..(383): Homolog of NCBI NO: 25354646 NR Description: probable calmodulin-binding protein [imported] -
  misc_feature (20)..(376): Homolog of NCBI NO: 22329041 NR Description: calmodulin-binding protein [Arabidopsis thaliana]
  misc_feature (97)..(401): Homolog of NCBI NO: 7489107 NR Description: calmodulin-binding protein TCB60 - common tobacco
MSQKREFEEGKGRIEGGSSEDKRRRFKSVVQEVMRLQTVKHFLEPVLEPLIRKVVKEEVELALGKHLAGIKWICEKETHPLESRNLQLKFLNNLSLPVFTSARIEGDEGQAIRVGLIDPSTGQIFSSGPASSAKLEVFVVEGDFNSVSDWTDEDIRNNIVREREGKKPLLNGNVFAVLNDGIGVMDEISFTDNSSWTRSRKFRLGVRIVDQFDYVKIREAITESFVVRDHRGELYKKHHPPSLFDEVWRLEKIGKDGAFHRRLNLSNINTVKDFLTHFHLNSSKLRQVLGTGMSSKMWEITLDHARSCVLDSSVHVYQAPGFQKKTAVVFNVVAQVLGLLVDFQYIPAEKLSEIEKAQAEVMVIDALSHLNEVISYDDEVSMMRNVLNAPASQGSVAGIDYSGLSLTSLDGYGFVSSLHNTAECSGKHSDDVDMEVTPHGLYEDYDNLWNCSHILGLEEPQSELQSALDDFMSQKNASVGGKAHSKRWTKLFSVSRWLSVFKYVKLGKI

SEQ ID NO: 103378 - protein, 476 aa, Arabidopsis thaliana
  peptide (1)..(476): Ceres Seq. ID no. 13612635
  misc_feature (1)..(476): Homolog of NCBI NO: 10178088 NR Description: contains similarity to calmodulin-binding
  misc_feature (1)..(476): Homolog of NCBI NO: 30697704 NR Description: calmodulin-binding protein [Arabidopsis thaliana]
  misc_feature (152)..(476): Homolog of NCBI NO: 20260396 NR Description: putative protein [Arabidopsis thaliana]
  misc_feature (1)..(430): Homolog of NCBI NO: 30687005 NR Description: calmodulin-binding protein [Arabidopsis thaliana]
  misc_feature (1)..(344): Homolog of NCBI NO: 15242785 NR Description: calmodulin-binding protein [Arabidopsis thaliana]
  misc_feature (1)..(344): Homolog of NCBI NO: 32482927 NR Description: OSJNBa0058G03.4 [Oryza sativa (japonica
  misc_feature (54)..(430): Homolog of NCBI NO: 7484830 NR Description: calmodulin-binding protein homolog F14M19.80 -
  misc_feature (18)..(350): Homolog of NCBI NO: 25354646 NR Description: probable calmodulin-binding protein [imported] -
  misc_feature (1)..(343): Homolog of NCBI NO: 22329041 NR Description: calmodulin-binding protein [Arabidopsis thaliana]
  misc_feature (64)..(368): Homolog of NCBI NO: 7489107 NR Description: calmodulin-binding protein TCB60 - common tobacco
MRLQTVKHFLEPVLEPLIRKVVKEEVELALGKHLAGIKWICEKETHPLESRNLQLKFLNNLSLPVFTSARIEGDEGQAIRVGLIDPSTGQIFSSGPASSAKLEVFVVEGDFNSVSDWTDEDIRNNIVREREGKKPLLNGNVFAVLNDGIGVMDEISFTDNSSWTRSRKFRLGVRIVDQFDYVKIREAITESFVVRDHRGELYKKHHPPSLFDEVWRLEKIGKDGAFHRRLNLSNINTVKDFLTHFHLNSSKLRQVLGTGMSSKMWEITLDHARSCVLDSSVHVYQAPGFQKKTAVVFNVVAQVLGLLVDFQYIPAEKLSEIEKAQAEVMVIDALSHLNEVISYDDEVSMMRNVLNAPASQGSVAGIDYSGLSLTSLDGYGFVSSLHNTAECSGKHSDDVDMEVTPHGLYEDYDNLWNCSHILGLEEPQSELQSALDDFMSQKNASVGGKAHSKRWTKLFSVSRWLSVFKYVKLGKI

SEQ ID NO: 103379 - protein, 325 aa, Arabidopsis thaliana
  peptide (1)..(325): Ceres Seq. ID no. 13612636
  misc_feature (1)..(325): Homolog of NCBI NO: 10178088 NR Description: contains similarity to calmodulin-binding
  misc_feature (1)..(325): Homolog of NCBI NO: 30697704 NR Description: calmodulin-binding protein [Arabidopsis thaliana]
  misc_feature (1)..(325): Homolog of NCBI NO: 20260396 NR Description: putative protein [Arabidopsis thaliana]
  misc_feature (1)..(279): Homolog of NCBI NO: 30687005 NR Description: calmodulin-binding protein [Arabidopsis thaliana]
  misc_feature (1)..(193): Homolog of NCBI NO: 15242785 NR Description: calmodulin-binding protein [Arabidopsis thaliana]
  misc_feature (1)..(193): Homolog of NCBI NO: 32482927 NR Description: OSJNBa0058G03.4 [Oryza sativa (japonica
  misc_feature (1)..(279): Homolog of NCBI NO: 7484830 NR Description: calmodulin-binding protein homolog F14M19.80 -
  misc_feature (1)..(199): Homolog of NCBI NO: 25354646 NR Description: probable calmodulin-binding protein [imported] -
  misc_feature (1)..(192): Homolog of NCBI NO: 22329041 NR Description: calmodulin-binding protein [Arabidopsis thaliana]
  misc_feature (1)..(217): Homolog of NCBI NO: 7489107 NR Description: calmodulin-binding protein TCB60 - common tobacco
MDEISFTDNSSWTRSRKFRLGVRIVDQFDYVKIREAITESFVVRDHRGELYKKHHPPSLFDEVWRLEKIGKDGAFHRRLNLSNINTVKDFLTHFHLNSSKLRQVLGTGMSSKMWEITLDHARSCVLDSSVHVYQAPGFQKKTAVVFNVVAQVLGLLVDFQYIPAEKLSEIEKAQAEVMVIDALSHLNEVISYDDEVSMMRNVLNAPASQGSVAGIDYSGLSLTSLDGYGFVSSLHNTAECSGKHSDDVDMEVTPHGLYEDYDNLWNCSHILGLEEPQSELQSALDDFMSQKNASVGGKAHSKRWTKLFSVSRWLSVFKYVKLGKI

SEQ ID NO: 103380 - DNA, 1252 bp, Arabidopsis thaliana
  misc_feature (1)..(1252): Ceres Seq. ID no. 13612639
  misc_feature: MA Experiment ID: 108434 Result: Up-regulated in Transcription
  misc_feature: MA Experiment 108434 PARAMETER Experiment Name: At_Root_Tips_cDNA_P Parameter: Tissue Value: Root Tips
  misc_feature: MA Experiment ID: 108461 Result: Up-regulated in Transcription
  misc_feature: MA Experiment 108461 PARAMETER Experiment Name: At_Germinating_Seeds_cDNA_P Parameter: Age (day) Value: 1 vs. 0
  misc_feature: MA Experiment 108461 PARAMETER Experiment Name: At_Germinating_Seeds_cDNA_P Parameter: Tissue Value: Germinating Seeds
  misc_feature: MA Experiment ID: 108462 Result: Up-regulated in Transcription
  misc_feature: MA Experiment 108462 PARAMETER Experiment Name: At_Germinating_Seeds_cDNA_P Parameter: Age (day) Value: 2 vs. 0
  misc_feature: MA Experiment 108462 PARAMETER Experiment Name: At_Germinating_Seeds_cDNA_P Parameter: Tissue Value: Germinating Seeds
  misc_feature: MA Experiment ID: 108668 Result: Up-regulated in Transcription
  misc_feature: MA Experiment 108668 PARAMETER Experiment Name: At_2mM_SA_cDNA_P Parameter: Plant Line Value: WS
  misc_feature: MA Experiment 108668 PARAMETER Experiment Name: At_2mM_SA_cDNA_P Parameter: Timepoint (hr) Value: 6
  misc_feature: MA Experiment 108668 PARAMETER Experiment Name: At_2mM_SA_cDNA_P Parameter: Treatment Value: 2mM SA vs. No Treatment
  misc_feature: MA Experiment ID: 20000113 Result: Down-regulated in Transcription
  misc_feature: MA Experiment 20000113 PARAMETER Experiment Name: At_42deg_Heat_cDNA_P Parameter: Temperature (deg C) Value: 42 vs. 22
  misc_feature: MA Experiment 20000113 PARAMETER Experiment Name: At_42deg_Heat_cDNA_P Parameter: Timepoint (hr) Value: 8
  misc_feature: MA Experiment 20000113 PARAMETER Experiment Name: At_42deg_Heat_cDNA_P Parameter: Tissue Value: Aerial
  misc_feature: MA Experiment ID: 20000179 Result: Up-regulated in Transcription
  misc_feature: MA Experiment 20000179 PARAMETER Experiment Name: At_Germinating_Seeds_P Parameter: Age (hr) Value: 6 vs. 0
  misc_feature: MA Experiment 20000179 PARAMETER Experiment Name: At_Germinating_Seeds_P Parameter: Tissue Value: Germinating Seeds
  misc_feature: MA Experiment ID: 20000182 Result: Up-regulated in Transcription
  misc_feature: MA Experiment 20000182 PARAMETER Experiment Name: At_2mM_SA_P Parameter: Age (day) Value: 14
  misc_feature: MA Experiment 20000182 PARAMETER Experiment Name: At_2mM_SA_P Parameter: Organism Value: A. thaliana
  misc_feature: MA Experiment 20000182 PARAMETER Experiment Name: At_2mM_SA_P Parameter: Plant Line Value: WS
  misc_feature: MA Experiment 20000182 PARAMETER Experiment Name: At_2mM_SA_P Parameter: Timepoint (hr) Value: 6
  misc_feature: MA Experiment 20000182 PARAMETER Experiment Name: At_2mM_SA_P Parameter: Tissue Value: Aerial
  misc_feature: MA Experiment 20000182 PARAMETER Experiment Name: At_2mM_SA_P Parameter: Treatment Value: 2mM SA vs. No Treatment
  misc_feature: MA Experiment ID: 20000235 Result: Down-regulated in Transcription
  misc_feature: MA Experiment 20000235 PARAMETER Experiment Name: At_Siliques_P Parameter: Age (day) Value: 21
  misc_feature: MA Experiment 20000235 PARAMETER Experiment Name: At_Siliques_P Parameter: Organism Value: A. thaliana
  misc_feature: MA Experiment 20000235 PARAMETER Experiment Name: At_Siliques_P Parameter: Plant Line Value: WS
  misc_feature: MA Experiment 20000235 PARAMETER Experiment Name: At_Siliques_P Parameter: Tissue Value: 5-10mm Siliques vs. Whole Plant
  misc_feature: MA Experiment ID: 20000437 Result: Up-regulated in Transcription
  misc_feature: MA Experiment 20000437 PARAMETER Experiment Name: At_Drought_P Parameter: Age (day) Value: 8
  misc_feature: MA Experiment 20000437 PARAMETER Experiment Name: At_Drought_P Parameter: Organism Value: A. thaliana
  misc_feature: MA Experiment 20000437 PARAMETER Experiment Name: At_Drought_P Parameter: Plant Line Value: WS
  misc_feature: MA Experiment 20000437 PARAMETER Experiment Name: At_Drought_P Parameter: Timepoint (hr) Value: 24
  misc_feature: MA Experiment 20000437 PARAMETER Experiment Name: At_Drought_P Parameter: Tissue Value: Whole Plant
  misc_feature: MA Experiment 20000437 PARAMETER Experiment Name: At_Drought_P Parameter: Treatment Value: Drought vs. No Drought
  misc_feature: MA Experiment ID: 20000794 Result: Down-regulated in Transcription
  misc_feature: MA Experiment 20000794 PARAMETER Experiment Name: At_Petals_P Parameter: Age (day) Value: 23-25 days
  misc_feature: MA Experiment 20000794 PARAMETER Experiment Name: At_Petals_P Parameter: Plant Line Value: WS
  misc_feature: MA Experiment 20000794 PARAMETER Experiment Name: At_Petals_P Parameter: Tissue Value: Petals vs. Whole plant
  misc_feature: MA Experiment ID: 20001905 Result: Up-regulated in Transcription
  misc_feature: MA Experiment 20001905 PARAMETER Experiment Name: At_Drought_Reproduction_P Parameter: Age (day) Value: 40
  misc_feature: MA Experiment 20001905 PARAMETER Experiment Name: At_Drought_Reproduction_P Parameter: Organism Value: A. thaliana
  misc_feature: MA Experiment 20001905 PARAMETER Experiment Name: At_Drought_Reproduction_P Parameter: Plant Line Value: WS
  misc_feature: MA Experiment 20001905 PARAMETER Experiment Name: At_Drought_Reproduction_P Parameter: Timepoint (day) Value: 10
  misc_feature: MA Experiment 20001905 PARAMETER Experiment Name: At_Drought_Reproduction_P Parameter: Tissue Value: Rosettes
  misc_feature: MA Experiment 20001905 PARAMETER Experiment Name: At_Drought_Reproduction_P Parameter: Treatment Value: Drought vs. No Drought
attatcactacccacatctgtcttaccttctccgatctctctctctatttgtccacctcacacacaaccctataaacaagacaagacctcgcaaagctcaaaccttttccttctttttttctatcaagttcctcacttctcggatccgggtcctaaatctgggtcaaccctttttacgatcatcggaaatggaccctccactagtgaacgattcctccttctctgcagctaatccttcttcttacactctctccgagatttggcctttccctgtaaacgacgccgttcgctctggtctccgtttagctgttaactccggtcgagtctttactcgctctgaacattccggcaataaagacgtctccgcggctgaggaatctacagtcaccgatctaactgctggctggggaagtagaaagactagagatttgaactctgaggatgattcttcaaagatggtttcttccagcagcagtggtaatgaattgaaagaatcaggggataagaaaagaaaactgtgtggatctgaaagtggaaatggagatggttcgatgagacctgaaggcgaaacaagttcgggtggtggtggaagcaaagcaacggaacagaagaacaaacctgagccaccaaaggattatattcatgtgagagcaagaagaggacaagctactgaccggcatagtttagcagagcgagctagaagagaaaagatcagtgagaagatgacagctcttcaagatataattccaggatgtaataagataatcggaaaagcccttgtgctcgatgagattatcaattatattcagtcattgcagcggcaagttgagtttctatcaatgaagctagaagttgttaactcgggtgcaagtactggtccgacaataggagtttttccttccggtgatctcgggactttaccgattgacgttcatcgaacaatatacgagcaacaagaagctaatgaaacccgagtatctcaaccggagtggctccatatgcaggttgatgggaactttaaccgaaccacataaaaaagagtctttctctgattgatggatgtgttttgtaggcagtaaaaatgaatgcaaccctttattttttatcctatgcgtgtgtatcattttgctgttatatcataagatagaatatgagagtgaccagagagattaacactttataaaacattgttgtattgtcctattatataacttgtaacaattgattcagtaacatatgttggtcttaaatc

SEQ ID NO: 103381 - protein, 343 aa, Arabidopsis thaliana; identical to SEQ ID NO: 40052
  peptide (1)..(343): Ceres Seq. ID no. 13612640
  misc_feature (222)..(272): Pfam Name: Helix-loop-helix DNA-binding domain Pfam Description: Helix-loop-helix DNA-binding domain
  misc_feature (63)..(343): Homolog of NCBI NO: 15241896 NR Description: bHLH protein family [Arabidopsis thaliana]
  misc_feature (71)..(343): Homolog of NCBI NO: 33339703 NR Description: MYC1 [Catharanthus roseus]
  misc_feature (134)..(343): Homolog of NCBI NO: 29150361 NR Description: hypothetical protein [Oryza sativa (japonica
  misc_feature (81)..(343): Homolog of NCBI NO: 18406408 NR Description: bHLH protein [Arabidopsis thaliana] putative bHLH protein [Arabidopsis thaliana]
  misc_feature (81)..(343): Homolog of NCBI NO: 21592490 NR Description: unknown [Arabidopsis thaliana]
  misc_feature (81)..(308): Homolog of NCBI NO: 25404871 NR Description: protein T30E16.21 [imported] - Arabidopsis >gi|8778763|gb|AAF79771.1|AC009317_30 T30E16.21 [Arabidopsis
  misc_feature (81)..(308): Homolog of NCBI NO: 25453562 NR Description: helix-loop-helix protein homolog [imported] -
  misc_feature (81)..(308): Homolog of NCBI NO: 30696324 NR Description: bHLH protein [Arabidopsis thaliana]
  misc_feature (50)..(286): Homolog of NCBI NO: 20127085 NR Description: putative bHLH transcription factor [Arabidopsis
  misc_feature (124)..(295): Homolog of NCBI NO: 29647487 NR Description: OJ1191_A10.7 [Oryza sativa (japonica

SEQ ID NO: 103382 - protein, 281 aa, Arabidopsis thaliana; identical to SEQ ID NO: 40053
  peptide (1)..(281): Ceres Seq. ID no. 13612641
  misc_feature (160)..(210): Pfam Name: Helix-loop-helix DNA-binding domain Pfam Description: Helix-loop-helix DNA-binding domain
  misc_feature (1)..(281): Homolog of NCBI NO: 15241896 NR Description: bHLH protein family [Arabidopsis thaliana]
  misc_feature (9)..(281): Homolog of NCBI NO: 33339703 NR Description: MYC1 [Catharanthus roseus]
  misc_feature (72)..(281): Homolog of NCBI NO: 29150361 NR Description: hypothetical protein [Oryza sativa (japonica
  misc_feature (19)..(281): Homolog of NCBI NO: 18406408 NR Description: bHLH protein [Arabidopsis thaliana] putative bHLH protein [Arabidopsis thaliana]
  misc_feature (19)..(281): Homolog of NCBI NO: 21592490 NR Description: unknown [Arabidopsis thaliana]
  misc_feature (19)..(246): Homolog of NCBI NO: 25404871 NR Description: protein T30E16.21 [imported] - Arabidopsis >gi|8778763|gb|AAF79771.1|AC009317_30 T30E16.21 [Arabidopsis
  misc_feature (19)..(246): Homolog of NCBI NO: 25453562 NR Description: helix-loop-helix protein homolog [imported] -
  misc_feature (19)..(246): Homolog of NCBI NO: 30696324 NR Description: bHLH protein [Arabidopsis thaliana]
  misc_feature (1)..(224): Homolog of NCBI NO: 20127085 NR Description: putative bHLH transcription factor [Arabidopsis
  misc_feature (62)..(233): Homolog of NCBI NO: 29647487 NR Description: OJ1191_A10.7 [Oryza sativa (japonica

SEQ ID NO: 103383 - protein, 192 aa, Arabidopsis thaliana; identical to SEQ ID NO: 40054
  peptide (1)..(192): Ceres Seq. ID no. 13612642
  misc_feature (71)..(121): Pfam Name: Helix-loop-helix DNA-binding domain Pfam Description: Helix-loop-helix DNA-binding domain
  misc_feature (1)..(192): Homolog of NCBI NO: 15241896 NR Description: bHLH protein family [Arabidopsis thaliana]
  misc_feature (1)..(192): Homolog of NCBI NO: 33339703 NR Description: MYC1 [Catharanthus roseus]
  misc_feature (1)..(192): Homolog of NCBI NO: 29150361 NR Description: hypothetical protein [Oryza sativa (japonica
  misc_feature (1)..(192): Homolog of NCBI NO: 18406408 NR Description: bHLH protein [Arabidopsis thaliana] putative bHLH protein [Arabidopsis thaliana]
  misc_feature (1)..(192): Homolog of NCBI NO: 21592490 NR Description: unknown [Arabidopsis thaliana]
  misc_feature (1)..(157): Homolog of NCBI NO: 25404871 NR Description: protein T30E16.21 [imported] - Arabidopsis >gi|8778763|gb|AAF79771.1|AC009317_30 T30E16.21 [Arabidopsis
  misc_feature (1)..(157): Homolog of NCBI NO: 25453562 NR Description: helix-loop-helix protein homolog [imported] -
  misc_feature (1)..(157): Homolog of NCBI NO: 30696324 NR Description: bHLH protein [Arabidopsis thaliana]
  misc_feature (1)..(135): Homolog of NCBI NO: 20127085 NR Description: putative bHLH transcription factor [Arabidopsis
  misc_feature (1)..(144): Homolog of NCBI NO: 29647487 NR Description: OJ1191_A10.7 [Oryza sativa (japonica

SEQ ID NO: 103384 - DNA, 1338 bp, Arabidopsis thaliana
  misc_feature (1)..(1338): Ceres Seq. ID no. 13612654
  misc_feature: MA Experiment ID: 108488 Result: Down-regulated in Transcription
  misc_feature: MA Experiment ID: 108573 Result: Up-regulated in Transcription
  misc_feature: MA Experiment 108573 PARAMETER Experiment Name: At_Drought_cDNA_P Parameter: Timepoint (hr) Value: 6
  misc_feature: MA Experiment 108573 PARAMETER Experiment Name: At_Drought_cDNA_P Parameter: Tissue Value: Aerial
  misc_feature: MA Experiment 108573 PARAMETER Experiment Name: At_Drought_cDNA_P Parameter: Treatment Value: Drought vs. No Drought
  misc_feature: MA Experiment ID: 108574 Result: Down-regulated in Transcription
  misc_feature: MA Experiment 108574 PARAMETER Experiment Name: At_Wounding__cDNA_P Parameter: Timepoint (hr) Value: 1
  misc_feature: MA Experiment 108574 PARAMETER Experiment Name: At_Wounding__cDNA_P Parameter: Tissue Value: Aerial
  misc_feature: MA Experiment 108574 PARAMETER Experiment Name: At_Wounding__cDNA_P Parameter: Treatment Value: Wounding vs. No Wounding
  misc_feature: MA Experiment ID: 108579 Result: Down-regulated in Transcription
  misc_feature: MA Experiment 108579 PARAMETER Experiment Name: At_4deg_Cold_cDNA_P Parameter: Temperature (deg C) Value: 4 vs. 22
  misc_feature: MA Experiment 108579 PARAMETER Experiment Name: At_4deg_Cold_cDNA_P Parameter: Timepoint (hr) Value: 6
  misc_feature: MA Experiment 108579 PARAMETER Experiment Name: At_4deg_Cold_cDNA_P Parameter: Tissue Value: Aerial
  misc_feature: MA Experiment ID: 108594 Result: Up-regulated in Transcription
  misc_feature: MA Experiment 108594 PARAMETER Experiment Name: At_Ler-rhl_Root_cDNA_P Parameter: Plant Line Value: null
  misc_feature: MA Experiment ID: 20000069 Result: Up-regulated in Transcription
  misc_feature: MA Experiment 20000069 PARAMETER Experiment Name: At_100uM_ABA_Mutants_cDNA_P Parameter: Plant Line Value: CS23
  misc_feature: MA Experiment 20000069 PARAMETER Experiment Name: At_100uM_ABA_Mutants_cDNA_P Parameter: Timepoint (hr) Value: 6
  misc_feature: MA Experiment 20000069 PARAMETER Experiment Name: At_100uM_ABA_Mutants_cDNA_P Parameter: Tissue Value: Aerial
  misc_feature: MA Experiment 20000069 PARAMETER Experiment Name: At_100uM_ABA_Mutants_cDNA_P Parameter: Treatment Value: 100uM ABA vs. No Treatment
  misc_feature: MA Experiment ID: 20000071 Result: Up-regulated in Transcription
  misc_feature: MA Experiment 20000071 PARAMETER Experiment Name: At_100uM_ABA_Mutants_cDNA_P Parameter: Plant Line Value: CS8104
  misc_feature: MA Experiment 20000071 PARAMETER Experiment Name: At_100uM_ABA_Mutants_cDNA_P Parameter: Timepoint (hr) Value: 6
  misc_feature: MA Experiment 20000071 PARAMETER Experiment Name: At_100uM_ABA_Mutants_cDNA_P Parameter: Tissue Value: Aerial
  misc_feature: MA Experiment 20000071 PARAMETER Experiment Name: At_100uM_ABA_Mutants_cDNA_P Parameter: Treatment Value: 100uM ABA vs. No Treatment
  misc_feature: MA Experiment ID: 20000179 Result: Up-regulated in Transcription
  misc_feature: MA Experiment 20000179 PARAMETER Experiment Name: At_Germinating_Seeds_P Parameter: Age (hr) Value: 6 vs. 0
  misc_feature: MA Experiment 20000179 PARAMETER Experiment Name: At_Germinating_Seeds_P Parameter: Tissue Value: Germinating Seeds
  misc_feature: MA Experiment ID: 20000184 Result: Down-regulated in Transcription
  misc_feature: MA Experiment 20000184 PARAMETER Experiment Name: At_Shoots__P Parameter: Age (day) Value: 7
  misc_feature: MA Experiment 20000184 PARAMETER Experiment Name: At_Shoots__P Parameter: Tissue Value: Shoots vs. Whole Plant
  misc_feature: MA Experiment ID: 20000213 Result: Down-regulated in Transcription
  misc_feature: MA Experiment 20000213 PARAMETER Experiment Name: At_4deg_Cold_P Parameter: Timepoint (hr) Value: 2
  misc_feature: MA Experiment ID: 20000224 Result: Down-regulated in Transcription
  misc_feature: MA Experiment ID: 20000437 Result: Up-regulated in Transcription
  misc_feature: MA Experiment 20000437 PARAMETER Experiment Name: At_Drought_P Parameter: Age (day) Value: 8
  misc_feature: MA Experiment 20000437 PARAMETER Experiment Name: At_Drought_P Parameter: Organism Value: A. thaliana
  misc_feature: MA Experiment 20000437 PARAMETER Experiment Name: At_Drought_P Parameter: Plant Line Value: WS
  misc_feature: MA Experiment 20000437 PARAMETER Experiment Name: At_Drought_P Parameter: Timepoint (hr) Value: 24
  misc_feature: MA Experiment 20000437 PARAMETER Experiment Name: At_Drought_P Parameter: Tissue Value: Whole Plant
  misc_feature: MA Experiment 20000437 PARAMETER Experiment Name: At_Drought_P Parameter: Treatment Value: Drought vs. No Drought
  misc_feature: MA Experiment ID: 20000573 Result: Up-regulated in Transcription
  misc_feature: MA Experiment 20000573 PARAMETER Experiment Name: At_100uM_ABA_Mutants__P Parameter: Organism Value: A. thaliana
  misc_feature: MA Experiment 20000573 PARAMETER Experiment Name: At_100uM_ABA_Mutants__P Parameter: Plant Line Value: CS22 vs. Ler wt
  misc_feature: MA Experiment 20000573 PARAMETER Experiment Name: At_100uM_ABA_Mutants__P Parameter: Timepoint (hr) Value: N/A
  misc_feature: MA Experiment 20000573 PARAMETER Experiment Name: At_100uM_ABA_Mutants__P Parameter: Tissue Value: Whole Plant
  misc_feature: MA Experiment 20000573 PARAMETER Experiment Name: At_100uM_ABA_Mutants__P Parameter: Treatment Value: None
  misc_feature: MA Experiment ID: 20000794 Result: Up-regulated in Transcription
  misc_feature: MA Experiment 20000794 PARAMETER Experiment Name: At_Petals_P Parameter: Age (day) Value: 23-25 days
  misc_feature: MA Experiment 20000794 PARAMETER Experiment Name: At_Petals_P Parameter: Plant Line Value: WS
  misc_feature: MA Experiment 20000794 PARAMETER Experiment Name: At_Petals_P Parameter: Tissue Value: Petals vs. Whole plant
  misc_feature: MA Experiment ID: 20001248 Result: Up-regulated in Transcription
  misc_feature: MA Experiment 20001248 PARAMETER Experiment Name: At_Far-red-induction_P Parameter: Age (day) Value: 7
  misc_feature: MA Experiment 20001248 PARAMETER Experiment Name: At_Far-red-induction_P Parameter: Light Value: Far-red vs. White
  misc_feature: MA Experiment 20001248 PARAMETER Experiment Name: At_Far-red-induction_P Parameter: Organism Value: A. thaliana
  misc_feature: MA Experiment 20001248 PARAMETER Experiment Name: At_Far-red-induction_P Parameter: Plant Line Value: Columbia
  misc_feature: MA Experiment 20001248 PARAMETER Experiment Name: At_Far-red-induction_P Parameter: Timepoint (hr) Value: 4
  misc_feature: MA Experiment 20001248 PARAMETER Experiment Name: At_Far-red-induction_P Parameter: Tissue Value: Whole Plant
  misc_feature: MA Experiment ID: 20001450 Result: Up-regulated in Transcription
  misc_feature: MA Experiment 20001450 PARAMETER Experiment Name: At_Far-red-induction_P Parameter: Age (day) Value: 7
  misc_feature: MA Experiment 20001450 PARAMETER Experiment Name: At_Far-red-induction_P Parameter: Light Value: Far-red vs. White
  misc_feature: MA Experiment 20001450 PARAMETER Experiment Name: At_Far-red-induction_P Parameter: Organism Value: A. thaliana
  misc_feature: MA Experiment 20001450 PARAMETER Experiment Name: At_Far-red-induction_P Parameter: Plant Line Value: Columbia
  misc_feature: MA Experiment 20001450 PARAMETER Experiment Name: At_Far-red-induction_P Parameter: Timepoint (hr) Value: 8
  misc_feature: MA Experiment 20001450 PARAMETER Experiment Name: At_Far-red-induction_P Parameter: Tissue Value: Whole Plant
  misc_feature: MA Experiment ID: 20001451 Result: Up-regulated in Transcription
  misc_feature: MA Experiment 20001451 PARAMETER Experiment Name: At_Far-red-induction_P Parameter: Age (day) Value: 7
  misc_feature: MA Experiment 20001451 PARAMETER Experiment Name: At_Far-red-induction_P Parameter: Light Value: Far-red vs. White
  misc_feature: MA Experiment 20001451 PARAMETER Experiment Name: At_Far-red-induction_P Parameter: Organism Value: A. thaliana
  misc_feature: MA Experiment 20001451 PARAMETER Experiment Name: At_Far-red-induction_P Parameter: Plant Line Value: Columbia
  misc_feature: MA Experiment 20001451 PARAMETER Experiment Name: At_Far-red-induction_P Parameter: Timepoint (hr) Value: 24
  misc_feature: MA Experiment 20001451 PARAMETER Experiment Name: At_Far-red-induction_P Parameter: Tissue Value: Whole Plant
  misc_feature: MA Experiment ID: 20001904 Result: Up-regulated in Transcription
  misc_feature: MA Experiment 20001904 PARAMETER Experiment Name: At_Drought_Reproduction_P Parameter: Age (day) Value: 37
  misc_feature: MA Experiment 20001904 PARAMETER Experiment Name: At_Drought_Reproduction_P Parameter: Organism Value: A. thaliana
  misc_feature: MA Experiment 20001904 PARAMETER Experiment Name: At_Drought_Reproduction_P Parameter: Plant Line Value: WS
  misc_feature: MA Experiment 20001904 PARAMETER Experiment Name: At_Drought_Reproduction_P Parameter: Timepoint (day) Value: 7
  misc_feature: MA Experiment 20001904 PARAMETER Experiment Name: At_Drought_Reproduction_P Parameter: Tissue Value: Rosettes
  misc_feature: MA Experiment 20001904 PARAMETER Experiment Name: At_Drought_Reproduction_P Parameter: Treatment Value: Drought vs. No Drought
  misc_feature: MA Experiment ID: 20001905 Result: Up-regulated in Transcription
  misc_feature: MA Experiment 20001905 PARAMETER Experiment Name: At_Drought_Reproduction_P Parameter: Age (day) Value: 40
  misc_feature: MA Experiment 20001905 PARAMETER Experiment Name: At_Drought_Reproduction_P Parameter: Organism Value: A. thaliana
  misc_feature: MA Experiment 20001905 PARAMETER Experiment Name: At_Drought_Reproduction_P Parameter: Plant Line Value: WS
  misc_feature: MA Experiment 20001905 PARAMETER Experiment Name: At_Drought_Reproduction_P Parameter: Timepoint (day) Value: 10
  misc_feature: MA Experiment 20001905 PARAMETER Experiment Name: At_Drought_Reproduction_P Parameter: Tissue Value: Rosettes
  misc_feature: MA Experiment 20001905 PARAMETER Experiment Name: At_Drought_Reproduction_P Parameter: Treatment Value: Drought vs. No Drought
  misc_feature: MA Experiment ID: 20001911 Result: Up-regulated in Transcription
  misc_feature: MA Experiment 20001911 PARAMETER Experiment Name: At_Drought_Reproduction_P Parameter: Age (day) Value: 40
  misc_feature: MA Experiment 20001911 PARAMETER Experiment Name: At_Drought_Reproduction_P Parameter: Organism Value: A. thaliana
  misc_feature: MA Experiment 20001911 PARAMETER Experiment Name: At_Drought_Reproduction_P Parameter: Plant Line Value: WS
  misc_feature: MA Experiment 20001911 PARAMETER Experiment Name: At_Drought_Reproduction_P Parameter: Timepoint (day) Value: 10
  misc_feature: MA Experiment 20001911 PARAMETER Experiment Name: At_Drought_Reproduction_P Parameter: Tissue Value: Flowers
  misc_feature: MA Experiment 20001911 PARAMETER Experiment Name: At_Drought_Reproduction_P Parameter: Treatment Value: Drought vs. No Drought
agaatctgtttctttcttcacccaccaaaagtagcaaacctttgccacctaaaaatcttaccagttgggtgaaagttgccaaaatagagcttgcttttgtcgcaatcctatatttttcagattgattgttggtgggtttgtgtaaatggcggctcttttaggcagatcctgccggaaactgagttttccgagcttgagtcacggagctaggagggtatcgacggaaactggaaaaccattgaatctatactctgctattaatcaagcgcttcacatcgctttggacaccgatcctcggtcttatgtctttggggaagacgttggctttggtggagtctttcgctgtacaacaggtttagctgaacgattcgggaaaaaccgtgtcttcaatactcctctttgtgagcagggcattgttggatttggcattggtctagcagcaatgggtaatcgagcaattgtagagattcagtttgcagattatatatatcctgcttttgatcagattgttaatgaagctgcaaagttcagataccgaagtggtaaccaattcaactgtggaggacttacgataagagcaccatatggagcagttggtcatggtggacattaccattcacaatcccctgaagctttcttttgccatgtccctggtattaaggttgttatccctcggagtccacgagaagcaaagggactgttgttgtcatgtatccgtgatccaaatcccgttgttttcttcgaaccaaagtggctgtatcgtcaagcagtagaagaagtccctgagcatgactatatgatacctttatcagaagcagaggttataagagaaggcaatgacattacactggttggatggggagctcagcttaccgttatggaacaagcttgtctggacgcggaaaaggaaggaatatcatgtgaactgatagatctcaagacactgcttccttgggacaaagaaaccgttgaggcttcagttaaaaagactggcagacttcttataagccatgaagctcctgtaacaggaggttttggagcagagatctctgcaacaattctggaacgttgctttttgaagttagaagctccagtaagcagagtttgtggtctggatactccatttcctcttgtgtttgaaccattctacatgcccaccaagaacaagatattggatgcaatcaaatcgactgtgaattactagccgtactatctgtagtttactgtttacactaggactaatgtaatcgcatgtctttgttatcaattcgtctaatgtaacactaccgattaactttaatgaatttcaagataacgaaaacatgttataataggact

SEQ ID NO: 103385 - protein, 352 aa, Arabidopsis thaliana
  peptide (1)..(352): Ceres Seq. ID no. 13612655
  misc_feature (222)..(342): Pfam Name: Transketolase, C-terminal domain Pfam Description: Transketolase, C-terminal domain
  misc_feature (1)..(352): Homolog of NCBI NO: 15222731 NR Description: branched-chain alpha-keto acid decarboxylase E1 subunit [Arabidopsis thaliana] >gi|25284437|pir||D96597
  misc_feature (1)..(352): Homolog of NCBI NO: 11252215 NR Description: 3-methyl-2-oxobutanoate dehydrogenase (lipoamide)
  misc_feature (2)..(352): Homolog of NCBI NO: 15231242 NR Description: branched chain alpha-keto acid dehydrogenase E1 subunit [Arabidopsis thaliana]
  misc_feature (23)..(352): Homolog of NCBI NO: 34395021 NR Description: putative branched-chain alpha-keto acid
  misc_feature (27)..(352): Homolog of NCBI NO: 12964600 NR Description: branched-chain alpha-keto acid dehydrogenase
  misc_feature (27)..(352): Homolog of NCBI NO: 481864 NR Description: 3-methyl-2-oxobutanoate dehydrogenase (lipoamide)
  misc_feature (27)..(352): Homolog of NCBI NO: 162640 NR Description: branched chain alpha-keto acid dehydrogenase
  misc_feature (32)..(352): Homolog of NCBI NO: 40353220 NR Description: branched chain ketoacid dehydrogenase E1, beta branched chain keto acid dehydrogenase E1, beta polypeptide [Mus >gi|39794050|gb|AAH64099.1| Branched chain ketoacid dehydrogenase
  misc_feature (1)..(352): Homolog of NCBI NO: 27806223 NR Description: branched chain keto acid dehydrogenase E1, beta
  misc_feature (27)..(352): Homolog of NCBI NO: 346979 NR Description: 3-methyl-2-oxobutanoate dehydrogenase (lipoamide)
MAALLGRSCRKLSFPSLSHGARRVSTETGKPLNLYSAINQALHIALDTDPRSYVFGEDVGFGGVFRCTTGLAERFGKNRVFNTPLCEQGIVGFGIGLAAMGNRAIVEIQFADYIYPAFDQIVNEAAKFRYRSGNQFNCGGLTIRAPYGAVGHGGHYHSQSPEAFFCHVPGIKVVIPRSPREAKGLLLSCIRDPNPVVFFEPKWLYRQAVEEVPEHDYMIPLSEAEVIREGNDITLVGWGAQLTVMEQACLDAEKEGISCELIDLKTLLPWDKETVEASVKKTGRLLISHEAPVTGGFGAEISATILERCFLKLEAPVSRVCGLDTPFPLVFEPFYMPTKNKILDAIKSTVNY

SEQ ID NO: 103386 - protein, 253 aa, Arabidopsis thaliana; identical to SEQ ID NO: 35113
  peptide (1)..(253): Ceres Seq. ID no. 13612656
  misc_feature (123)..(243): Pfam Name: Transketolase, C-terminal domain Pfam Description: Transketolase, C-terminal domain
  misc_feature (1)..(253): Homolog of NCBI NO: 15222731 NR Description: branched-chain alpha-keto acid decarboxylase E1 subunit [Arabidopsis thaliana] >gi|25284437|pir||D96597
  misc_feature (1)..(253): Homolog of NCBI NO: 11252215 NR Description: 3-methyl-2-oxobutanoate dehydrogenase (lipoamide)
  misc_feature (1)..(253): Homolog of NCBI NO: 15231242 NR Description: branched chain alpha-keto acid dehydrogenase E1 subunit [Arabidopsis thaliana]
  misc_feature (1)..(253): Homolog of NCBI NO: 34395021 NR Description: putative branched-chain alpha-keto acid
  misc_feature (1)..(253): Homolog of NCBI NO: 12964600 NR Description: branched-chain alpha-keto acid dehydrogenase
  misc_feature (1)..(253): Homolog of NCBI NO: 481864 NR Description: 3-methyl-2-oxobutanoate dehydrogenase (lipoamide)
  misc_feature (1)..(253): Homolog of NCBI NO: 162640 NR Description: branched chain alpha-keto acid dehydrogenase
  misc_feature (1)..(253): Homolog of NCBI NO: 40353220 NR Description: branched chain ketoacid dehydrogenase E1, beta branched chain keto acid dehydrogenase E1, beta polypeptide [Mus >gi|39794050|gb|AAH64099.1| Branched chain ketoacid dehydrogenase
  misc_feature (1)..(253): Homolog of NCBI NO: 27806223 NR Description: branched chain keto acid dehydrogenase E1, beta
  misc_feature (1)..(253): Homolog of NCBI NO: 346979 NR Description: 3-methyl-2-oxobutanoate dehydrogenase (lipoamide)

SEQ ID NO: 103387 - DNA, 1153 bp, Arabidopsis thaliana
  misc_feature (1)..(1153): Ceres Seq. ID no. 13612661
  misc_feature: MA Experiment ID: 108434 Result: Up-regulated in Transcription
  misc_feature: MA Experiment 108434 PARAMETER Experiment Name: At_Root_Tips_cDNA_P Parameter: Tissue Value: Root Tips
  misc_feature: MA Experiment ID: 108461 Result: Up-regulated in Transcription
  misc_feature: MA Experiment 108461 PARAMETER Experiment Name: At_Germinating_Seeds_cDNA_P Parameter: Age (day) Value: 1 vs. 0
  misc_feature: MA Experiment 108461 PARAMETER Experiment Name: At_Germinating_Seeds_cDNA_P Parameter: Tissue Value: Germinating Seeds
  misc_feature: MA Experiment ID: 108462 Result: Up-regulated in Transcription
  misc_feature: MA Experiment 108462 PARAMETER Experiment Name: At_Germinating_Seeds_cDNA_P Parameter: Age (day) Value: 2 vs. 0
  misc_feature: MA Experiment 108462 PARAMETER Experiment Name: At_Germinating_Seeds_cDNA_P Parameter: Tissue Value: Germinating Seeds
  misc_feature: MA Experiment ID: 108463 Result: Up-regulated in Transcription
  misc_feature: MA Experiment 108463 PARAMETER Experiment Name: At_Germinating_Seeds_cDNA_P Parameter: Age (day) Value: 3 vs. 0
  misc_feature: MA Experiment 108463 PARAMETER Experiment Name: At_Germinating_Seeds_cDNA_P Parameter: Tissue Value: Germinating Seeds
  misc_feature: MA Experiment ID: 108464 Result: Up-regulated in Transcription
  misc_feature: MA Experiment 108464 PARAMETER Experiment Name: At_Germinating_Seeds_cDNA_P Parameter: Age (day) Value: 4 vs. 0
  misc_feature: MA Experiment 108464 PARAMETER Experiment Name: At_Germinating_Seeds_cDNA_P Parameter: Tissue Value: Germinating Seeds
  misc_feature: MA Experiment ID: 108579 Result: Down-regulated in Transcription
  misc_feature: MA Experiment 108579 PARAMETER Experiment Name: At_4deg_Cold_cDNA_P Parameter: Temperature (deg C) Value: 4 vs. 22
  misc_feature: MA Experiment 108579 PARAMETER Experiment Name: At_4deg_Cold_cDNA_P Parameter: Timepoint (hr) Value: 6
  misc_feature: MA Experiment 108579 PARAMETER Experiment Name: At_4deg_Cold_cDNA_P Parameter: Tissue Value: Aerial
  misc_feature: MA Experiment ID: 20000113 Result: Down-regulated in Transcription
  misc_feature: MA Experiment 20000113 PARAMETER Experiment Name: At_42deg_Heat_cDNA_P Parameter: Temperature (deg C) Value: 42 vs. 22
  misc_feature: MA Experiment 20000113 PARAMETER Experiment Name: At_42deg_Heat_cDNA_P Parameter: Timepoint (hr) Value: 8
  misc_feature: MA Experiment 20000113 PARAMETER Experiment Name: At_42deg_Heat_cDNA_P Parameter: Tissue Value: Aerial
  misc_feature: MA Experiment ID: 20000179 Result: Up-regulated in Transcription
  misc_feature: MA Experiment 20000179 PARAMETER Experiment Name: At_Germinating_Seeds_P Parameter: Age (hr) Value: 6 vs. 0
  misc_feature: MA Experiment 20000179 PARAMETER Experiment Name: At_Germinating_Seeds_P Parameter: Tissue Value: Germinating Seeds
  misc_feature: MA Experiment ID: 20000184 Result: Down-regulated in Transcription
  misc_feature: MA Experiment 20000184 PARAMETER Experiment Name: At_Shoots__P Parameter: Age (day) Value: 7
  misc_feature: MA Experiment 20000184 PARAMETER Experiment Name: At_Shoots__P Parameter: Tissue Value: Shoots vs. Whole Plant
  misc_feature: MA Experiment ID: 20000573 Result: Down-regulated in Transcription
  misc_feature: MA Experiment 20000573 PARAMETER Experiment Name: At_100uM_ABA_Mutants__P Parameter: Organism Value: A. thaliana
  misc_feature: MA Experiment 20000573 PARAMETER Experiment Name: At_100uM_ABA_Mutants__P Parameter: Plant Line Value: CS22 vs. Ler wt
  misc_feature: MA Experiment 20000573 PARAMETER Experiment Name: At_100uM_ABA_Mutants__P Parameter: Timepoint (hr) Value: N/A
  misc_feature: MA Experiment 20000573 PARAMETER Experiment Name: At_100uM_ABA_Mutants__P Parameter: Tissue Value: Whole Plant
  misc_feature: MA Experiment 20000573 PARAMETER Experiment Name: At_100uM_ABA_Mutants__P Parameter: Treatment Value: None
  misc_feature: MA Experiment ID: 20000574 Result: Down-regulated in Transcription
  misc_feature: MA Experiment 20000574 PARAMETER Experiment Name: At_100uM_ABA_Mutants__P Parameter: Organism Value: A. thaliana
  misc_feature: MA Experiment 20000574 PARAMETER Experiment Name: At_100uM_ABA_Mutants__P Parameter: Plant Line Value: CS23 vs. Ler wt
  misc_feature: MA Experiment 20000574 PARAMETER Experiment Name: At_100uM_ABA_Mutants__P Parameter: Timepoint (hr) Value: N/A
  misc_feature: MA Experiment 20000574 PARAMETER Experiment Name: At_100uM_ABA_Mutants__P Parameter: Tissue Value: Whole Plant
  misc_feature: MA Experiment 20000574 PARAMETER Experiment Name: At_100uM_ABA_Mutants__P Parameter: Treatment Value: None
agacactcctccaatggcgcctcagcttctctcctccagtaacttcaaatctctctttgactctgtcgatacgttcctcttcgactgcgatggtgttatatggaagggtgaaacgctcatcgatggcgtctcccaaactctcgaccttatccgttctaagggtaaaaatgttgtctttgtgaccaacaattccgtaaaatcgaggaggcaatacgctgaaaagttccgatctttgggtgtcacttctattactcaggatgagatcttctcttcgtcatttgcggcagctatgtatctcaaagtcaataactttcctaaggacaagaaggtttatgtgattggtggagagggtgttcttgaggagctgcagattgccggttttacaggtcttggtggtcctgaagatggtgaaaagaaggcacaatggaaatcaaactctctctttgaacatgataaaagtgtgggagcagttgtagttggactagaccccaacattaactactataagcttcagtacgggactctctgtgtacgcgagaatccgggatgtctcttcattgcgaccaaccgtgatgcagtaggacatatgacggatctgcaagagtggcctggtgctgggtgtatggttgctgccatgtgtggatcgactgaaagagaaccaatagttgttgggaaaccatctactttcatgatggactttctgctacaaaaatttgggacggaaacgtcaagaatgtgcatggtaggtgataggctagatactgatatcttgtttgggcagaatgctggctgcaaaactctcctcgtcctaacaggggtgacaagtgaatctaatctactagataagggcaacaagatagaaccagactattacacaagcacagtctctgatatcataaaactgatggagtccccctagtaagtaagggcatcatcattcatcatcttgctttacactttggaacagtgatttacgtcctgttgcaagatgaaatttttctgattctttgtcttggttagtaatctgatgaagcatcagaaaacatgatttcattttgttatgttgctgaataaaggatttgagaagtcgatgaagagttgaaagaatggtaataagcaaatagtaagattatcatggggaaagtccaaaagc

SEQ ID NO: 103388 - protein, 305 aa, Arabidopsis thaliana
  peptide (1)..(305): Ceres Seq. ID no. 13612662
  misc_feature (22)..(272): Pfam Name: haloacid dehalogenase-like hydrolase Pfam Description: haloacid dehalogenase-like hydrolase
  misc_feature (5)..(305): Homolog of NCBI NO: 10177912 NR Description: 4-nitrophenylphosphatase-like protein
  misc_feature (5)..(305): Homolog of NCBI NO: 15238800 NR Description: phosphoglycolate phosphatase, putative
  misc_feature (5)..(305): Homolog of NCBI NO: 21593203 NR Description: 4-nitrophenylphosphatase-like protein
  misc_feature (2)..(299): Homolog of NCBI NO: 15239406 NR Description: phosphoglycolate phosphatase, putative thaliana] >gi|30692947|ref|NP_198485.2| phosphoglycolate putative [Arabidopsis thaliana] >gi|20453153|gb|AAM19818.1|
  misc_feature (2)..(299): Homolog of NCBI NO: 26450878 NR Description: putative p-nitrophenylphosphatase [Arabidopsis
  misc_feature (14)..(301): Homolog of NCBI NO: 38345235 NR Description: OSJNBa0084K20.14 [Oryza sativa (japonica
  misc_feature (154)..(299): Homolog of NCBI NO: 8885622 NR Description: N-glyceraldehyde-2-phosphotransferase-like
  misc_feature (2)..(133): Homolog of NCBI NO: 8885622 NR Description: N-glyceraldehyde-2-phosphotransferase-like
  misc_feature (2)..(275): Homolog of NCBI NO: 8953699 NR Description: 4-nitrophenylphosphatase-like [Arabidopsis
  misc_feature (18)..(303): Homolog of NCBI NO: 15982558 NR Description: phosphoglycolate phosphatase precursor reinhardtii] >gi|28316388|dbj|BAC56941.1| phosphoglycolate
DTPPMAPQLLSSSNFKSLFDSVDTFLFDCDGVIWKGETLIDGVSQTLDLIRSKGKNVVFVTNNSVKSRRQYAEKFRSLGVTSITQDEIFSSSFAAAMYLKVNNFPKDKKVYVIGGEGVLEELQIAGFTGLGGPEDGEKKAQWKSNSLFEHDKSVGAVVVGLDPNINYYKLQYGTLCVRENPGCLFIATNRDAVGHMTDLQEWPGAGCMVAAMCGSTEREPIVVGKPSTFMMDFLLQKFGTETSRMCMVGDRLDTDILFGQNAGCKTLLVLTGVTSESNLLDKGNKIEPDYYTSTVSDIIKLMESP

SEQ ID NO: 103389 - protein, 301 aa, Arabidopsis thaliana; identical to SEQ ID NO: 23774
  peptide (1)..(301): Ceres Seq. ID no. 13612663
  misc_feature (18)..(268): Pfam Name: haloacid dehalogenase-like hydrolase Pfam Description: haloacid dehalogenase-like hydrolase
  misc_feature (1)..(301): Homolog of NCBI NO: 10177912 NR Description: 4-nitrophenylphosphatase-like protein
  misc_feature (1)..(301): Homolog of NCBI NO: 15238800 NR Description: phosphoglycolate phosphatase, putative
  misc_feature (1)..(301): Homolog of NCBI NO: 21593203 NR Description: 4-nitrophenylphosphatase-like protein
  misc_feature (1)..(295): Homolog of NCBI NO: 15239406 NR Description: phosphoglycolate phosphatase, putative thaliana] >gi|30692947|ref|NP_198485.2| phosphoglycolate putative [Arabidopsis thaliana] >gi|20453153|gb|AAM19818.1|
  misc_feature (1)..(295): Homolog of NCBI NO: 26450878 NR Description: putative p-nitrophenylphosphatase [Arabidopsis
  misc_feature (10)..(297): Homolog of NCBI NO: 38345235 NR Description: OSJNBa0084K20.14 [Oryza sativa (japonica
  misc_feature (150)..(295): Homolog of NCBI NO: 8885622 NR Description: N-glyceraldehyde-2-phosphotransferase-like
  misc_feature (1)..(129): Homolog of NCBI NO: 8885622 NR Description: N-glyceraldehyde-2-phosphotransferase-like
  misc_feature (1)..(271): Homolog of NCBI NO: 8953699 NR Description: 4-nitrophenylphosphatase-like [Arabidopsis
  misc_feature (14)..(299): Homolog of NCBI NO: 15982558 NR Description: phosphoglycolate phosphatase precursor reinhardtii] >gi|28316388|dbj|BAC56941.1| phosphoglycolate

SEQ ID NO: 103390 - protein, 209 aa, Arabidopsis thaliana; identical to SEQ ID NO: 23775
  peptide (1)..(209): Ceres Seq. ID no. 13612664
  misc_feature (1)..(176): Pfam Name: haloacid dehalogenase-like hydrolase Pfam Description: haloacid dehalogenase-like hydrolase
  misc_feature (1)..(209): Homolog of NCBI NO: 10177912 NR Description: 4-nitrophenylphosphatase-like protein
  misc_feature (1)..(209): Homolog of NCBI NO: 15238800 NR Description: phosphoglycolate phosphatase, putative
  misc_feature (1)..(209): Homolog of NCBI NO: 21593203 NR Description: 4-nitrophenylphosphatase-like protein
  misc_feature (1)..(203): Homolog of NCBI NO: 15239406 NR Description: phosphoglycolate phosphatase, putative thaliana] >gi|30692947|ref|NP_198485.2| phosphoglycolate putative [Arabidopsis thaliana] >gi|20453153|gb|AAM19818.1|
  misc_feature (1)..(203): Homolog of NCBI NO: 26450878 NR Description: putative p-nitrophenylphosphatase [Arabidopsis
  misc_feature (1)..(205): Homolog of NCBI NO: 38345235 NR Description: OSJNBa0084K20.14 [Oryza sativa (japonica
  misc_feature (58)..(203): Homolog of NCBI NO: 8885622 NR Description: N-glyceraldehyde-2-phosphotransferase-like
  misc_feature (1)..(37): Homolog of NCBI NO: 8885622 NR Description: N-glyceraldehyde-2-phosphotransferase-like
  misc_feature (1)..(179): Homolog of NCBI NO: 8953699 NR Description: 4-nitrophenylphosphatase-like [Arabidopsis
  misc_feature (1)..(207): Homolog of NCBI NO: 15982558 NR Description: phosphoglycolate phosphatase precursor reinhardtii] >gi|28316388|dbj|BAC56941.1| phosphoglycolate

SEQ ID NO: 103391 - DNA, 842 bp, Arabidopsis thaliana
  misc_feature (1)..(842): Ceres Seq. ID no. 13612665
  misc_feature: MA Experiment ID: 108594 Result: Down-regulated in Transcription
  misc_feature: MA Experiment 108594 PARAMETER Experiment Name: At_Ler-rhl_Root_cDNA_P Parameter: Plant Line Value: null
  misc_feature: MA Experiment ID: 20000495 Result: Down-regulated in Transcription
  misc_feature: MA Experiment 20000495 PARAMETER Experiment Name: At_Guard_Cells_P Parameter: Harvest Date Value: 8/2/2002
  misc_feature: MA Experiment 20000495 PARAMETER Experiment Name: At_Guard_Cells_P Parameter: Organism Value: A. thaliana
  misc_feature: MA Experiment 20000495 PARAMETER Experiment Name: At_Guard_Cells_P Parameter: Tissue Value: Guard Cells vs. Leaves
  misc_feature: MA Experiment ID: 20000794 Result: Down-regulated in Transcription
  misc_feature: MA Experiment 20000794 PARAMETER Experiment Name: At_Petals_P Parameter: Age (day) Value: 23-25 days
  misc_feature: MA Experiment 20000794 PARAMETER Experiment Name: At_Petals_P Parameter: Plant Line Value: WS
  misc_feature: MA Experiment 20000794 PARAMETER Experiment Name: At_Petals_P Parameter: Tissue Value: Petals vs. Whole plant
  misc_feature: MA Experiment ID: 20001451 Result: Down-regulated in Transcription
  misc_feature: MA Experiment 20001451 PARAMETER Experiment Name: At_Far-red-induction_P Parameter: Age (day) Value: 7
  misc_feature: MA Experiment 20001451 PARAMETER Experiment Name: At_Far-red-induction_P Parameter: Light Value: Far-red vs. White
  misc_feature: MA Experiment 20001451 PARAMETER Experiment Name: At_Far-red-induction_P Parameter: Organism Value: A. thaliana
  misc_feature: MA Experiment 20001451 PARAMETER Experiment Name: At_Far-red-induction_P Parameter: Plant Line Value: Columbia
  misc_feature: MA Experiment 20001451 PARAMETER Experiment Name: At_Far-red-induction_P Parameter: Timepoint (hr) Value: 24
  misc_feature: MA Experiment 20001451 PARAMETER Experiment Name: At_Far-red-induction_P Parameter: Tissue Value: Whole Plant
  misc_feature: MA Experiment ID: 20001911 Result: Down-regulated in Transcription
  misc_feature: MA Experiment 20001911 PARAMETER Experiment Name: At_Drought_Reproduction_P Parameter: Age (day) Value: 40
  misc_feature: MA Experiment 20001911 PARAMETER Experiment Name: At_Drought_Reproduction_P Parameter: Organism Value: A. thaliana
  misc_feature: MA Experiment 20001911 PARAMETER Experiment Name: At_Drought_Reproduction_P Parameter: Plant Line Value: WS
  misc_feature: MA Experiment 20001911 PARAMETER Experiment Name: At_Drought_Reproduction_P Parameter: Timepoint (day) Value: 10
  misc_feature: MA Experiment 20001911 PARAMETER Experiment Name: At_Drought_Reproduction_P Parameter: Tissue Value: Flowers
  misc_feature: MA Experiment 20001911 PARAMETER Experiment Name: At_Drought_Reproduction_P Parameter: Treatment Value: Drought vs. No Drought
accactctcttctcctgttttcctcttccccaactctcaattttgctcagacaaaaaatcaatggctttgcaagtgcagcaaacttcagcagccttcacaatctcctcaccatccaccgccgctgcacgcatcaaactctcccctttcagaaccgtggcggttaaccgcggagttagatgcagcggcggtggagtcggaggcggagatgccgggaagaaaaaagcagttcctaattcgaattatgtagttcctattgacaaattctcgtcttcttcgtcgattactaggcctttgattgagatacttcgtgaccttaataagaagattcctgataacattgttaagagtcatgatcctccttctacttctgctgctacttctggttttatcccttggtaccatgcaaatcggatgcttagcttctatgctcctggttggtgtggtgaagttagagatgttattttctctgagaatggaaatgttactgttgtttatcgtctcactattcgtggctctgatggtgaggcacatcgtgaatcaactgggacagtaacgacgactgatgatcacatcgaggatccagttactgcagctgaggaaatagcattctgcagagcatgtgctcgatttggtctcggcttgtatctataccacgaatagttcaccgatcatatcaagtttccttactgtttttcaagaccctcaattccgtgatctgtttgttttttcttccttctttttgacatccttgtgttatctagagtaccaaaacatgcaattaacaggagtttttatgtataaccaaactcttcatgttataatatatacagttacattacat

SEQ ID NO: 103392 - protein, 219 aa, Arabidopsis thaliana
  peptide (1)..(219): Ceres Seq. ID no. 13612666
  misc_feature (21)..(219): Homolog of NCBI NO: 15238827 NR Description: expressed protein [Arabidopsis thaliana] gb|AAF26028.1~gene_id:MCA23.21~similar to unknown protein
  misc_feature (21)..(219): Homolog of NCBI NO: 21593360 NR Description: unknown [Arabidopsis thaliana]
  misc_feature (91)..(219): Homolog of NCBI NO: 15224018 NR Description: expressed protein [Arabidopsis thaliana]
  misc_feature (75)..(175): Homolog of NCBI NO: 27573357 NR Description: hypothetical protein [Oryza sativa (japonica
  misc_feature (91)..(219): Homolog of NCBI NO: 9367245 NR Description: SnRK1-interacting protein 1 [Hordeum vulgare
  misc_feature (91)..(219): Homolog of NCBI NO: 34907336 NR Description: putative SnRK1-interacting protein 1 [Oryza
PLSSPVFLFPNSQFCSDKKSMALQVQQTSAAFTISSPSTAAARIKLSPFRTVAVNRGVRCSGGGVGGGDAGKKKAVPNSNYVVPIDKFSSSSSITRPLIEILRDLNKKIPDNIVKSHDPPSTSAATSGFIPWYHANRMLSFYAPGWCGEVRDVIFSENGNVTVVYRLTIRGSDGEAHRESTGTVTTTDDHIEDPVTAAEEIAFCRACARFGLGLYLYHE

SEQ ID NO: 103393 - protein, 199 aa, Arabidopsis thaliana
  peptide (1)..(199): Ceres Seq. ID no. 13612667
  misc_feature (1)..(199): Homolog of NCBI NO: 15238827 NR Description: expressed protein [Arabidopsis thaliana] gb|AAF26028.1~gene_id:MCA23.21~similar to unknown protein
  misc_feature (1)..(199): Homolog of NCBI NO: 21593360 NR Description: unknown [Arabidopsis thaliana]
  misc_feature (71)..(199): Homolog of NCBI NO: 15224018 NR Description: expressed protein [Arabidopsis thaliana]
  misc_feature (55)..(155): Homolog of NCBI NO: 27573357 NR Description: hypothetical protein [Oryza sativa (japonica
  misc_feature (71)..(199): Homolog of NCBI NO: 9367245 NR Description: SnRK1-interacting protein 1 [Hordeum vulgare
  misc_feature (71)..(199): Homolog of NCBI NO: 34907336 NR Description: putative SnRK1-interacting protein 1 [Oryza
MALQVQQTSAAFTISSPSTAAARIKLSPFRTVAVNRGVRCSGGGVGGGDAGKKKAVPNSNYVVPIDKFSSSSSITRPLIEILRDLNKKIPDNIVKSHDPPSTSAATSGFIPWYHANRMLSFYAPGWCGEVRDVIFSENGNVTVVYRLTIRGSDGEAHRESTGTVTTTDDHIEDPVTAAEEIAFCRACARFGLGLYLYHE

SEQ ID NO: 103394 - DNA, 1708 bp, Arabidopsis thaliana
  misc_feature (1)..(1708): Ceres Seq. ID no. 13612672
  misc_feature: MA Experiment ID: 108434 Result: Up-regulated in Transcription
  misc_feature: MA Experiment 108434 PARAMETER Experiment Name: At_Root_Tips_cDNA_P Parameter: Tissue Value: Root Tips
  misc_feature: MA Experiment ID: 108462 Result: Down-regulated in Transcription
  misc_feature: MA Experiment 108462 PARAMETER Experiment Name: At_Germinating_Seeds_cDNA_P Parameter: Age (day) Value: 2 vs. 0
  misc_feature: MA Experiment 108462 PARAMETER Experiment Name: At_Germinating_Seeds_cDNA_P Parameter: Tissue Value: Germinating Seeds
  misc_feature: MA Experiment ID: 108463 Result: Down-regulated in Transcription
  misc_feature: MA Experiment 108463 PARAMETER Experiment Name: At_Germinating_Seeds_cDNA_P Parameter: Age (day) Value: 3 vs. 0
  misc_feature: MA Experiment 108463 PARAMETER Experiment Name: At_Germinating_Seeds_cDNA_P Parameter: Tissue Value: Germinating Seeds
  misc_feature: MA Experiment ID: 108573 Result: Down-regulated in Transcription
  misc_feature: MA Experiment 108573 PARAMETER Experiment Name: At_Drought_cDNA_P Parameter: Timepoint (hr) Value: 6
  misc_feature: MA Experiment 108573 PARAMETER Experiment Name: At_Drought_cDNA_P Parameter: Tissue Value: Aerial
  misc_feature: MA Experiment 108573 PARAMETER Experiment Name: At_Drought_cDNA_P Parameter: Treatment Value: Drought vs. No Drought
  misc_feature: MA Experiment ID: 108576 Result: Up-regulated in Transcription
  misc_feature: MA Experiment 108576 PARAMETER Experiment Name: At_42deg_Heat_cDNA_P Parameter: Temperature (deg C) Value: 42 vs. 22
  misc_feature: MA Experiment 108576 PARAMETER Experiment Name: At_42deg_Heat_cDNA_P Parameter: Timepoint (hr) Value: 1
  misc_feature: MA Experiment 108576 PARAMETER Experiment Name: At_42deg_Heat_cDNA_P Parameter: Tissue Value: Aerial
  misc_feature: MA Experiment ID: 20000093 Result: Up-regulated in Transcription
  misc_feature: MA Experiment 20000093 PARAMETER Experiment Name: At_42deg_Heat_cDNA_P Parameter: Temperature (deg C) Value: 42 vs. 22
  misc_feature: MA Experiment 20000093 PARAMETER Experiment Name: At_42deg_Heat_cDNA_P Parameter: Timepoint (hr) Value: 0.5
  misc_feature: MA Experiment 20000093 PARAMETER Experiment Name: At_42deg_Heat_cDNA_P Parameter: Tissue Value: Aerial
  misc_feature: MA Experiment ID: 20000111 Result: Up-regulated in Transcription
  misc_feature: MA Experiment 20000111 PARAMETER Experiment Name: At_42deg_Heat_cDNA_P Parameter: Temperature (deg C) Value: 42 vs. 22
  misc_feature: MA Experiment 20000111 PARAMETER Experiment Name: At_42deg_Heat_cDNA_P Parameter: Timepoint (hr) Value: 6
  misc_feature: MA Experiment 20000111 PARAMETER Experiment Name: At_42deg_Heat_cDNA_P Parameter: Tissue Value: Aerial
  misc_feature: MA Experiment ID: 20000112 Result: Up-regulated in Transcription
  misc_feature: MA Experiment 20000112 PARAMETER Experiment Name: At_42deg_Heat_cDNA_P Parameter: Temperature (deg C) Value: 42 vs. 22
  misc_feature: MA Experiment 20000112 PARAMETER Experiment Name: At_42deg_Heat_cDNA_P Parameter: Timepoint (hr) Value: 2
  misc_feature: MA Experiment 20000112 PARAMETER Experiment Name: At_42deg_Heat_cDNA_P Parameter: Tissue Value: Aerial
  misc_feature: MA Experiment ID: 20000113 Result: Up-regulated in Transcription
  misc_feature: MA Experiment 20000113 PARAMETER Experiment Name: At_42deg_Heat_cDNA_P Parameter: Temperature (deg C) Value: 42 vs. 22
  misc_feature: MA Experiment 20000113 PARAMETER Experiment Name: At_42deg_Heat_cDNA_P Parameter: Timepoint (hr) Value: 8
  misc_feature: MA Experiment 20000113 PARAMETER Experiment Name: At_42deg_Heat_cDNA_P Parameter: Tissue Value: Aerial
  misc_feature: MA Experiment ID: 20000144 Result: Up-regulated in Transcription
  misc_feature: MA Experiment 20000144 PARAMETER Experiment Name: At_42deg_Heat_cDNA_P Parameter: Temperature (deg C) Value: 42 vs. 22
  misc_feature: MA Experiment 20000144 PARAMETER Experiment Name: At_42deg_Heat_cDNA_P Parameter: Timepoint (hr) Value: 1
  misc_feature: MA Experiment 20000144 PARAMETER Experiment Name: At_42deg_Heat_cDNA_P Parameter: Tissue Value: Aerial
  misc_feature: MA Experiment ID: 20000171 Result: Up-regulated in Transcription
  misc_feature: MA Experiment 20000171 PARAMETER Experiment Name: At_42deg_Heat_P Parameter: Age (day) Value: 14
  misc_feature: MA Experiment 20000171 PARAMETER Experiment Name: At_42deg_Heat_P Parameter: Organism Value: A. thaliana
  misc_feature: MA Experiment 20000171 PARAMETER Experiment Name: At_42deg_Heat_P Parameter: Plant Line Value: WS
  misc_feature: MA Experiment 20000171 PARAMETER Experiment Name: At_42deg_Heat_P Parameter: Temperature (deg C) Value: 42 vs. 22
  misc_feature: MA Experiment 20000171 PARAMETER Experiment Name: At_42deg_Heat_P Parameter: Timepoint (hr) Value: 1
  misc_feature: MA Experiment 20000171 PARAMETER Experiment Name: At_42deg_Heat_P Parameter: Tissue Value: Aerial
  misc_feature: MA Experiment ID: 20000224 Result: Up-regulated in Transcription
atcttctacacagttctgaagcaacaaaacagggttttggctagggttttaactttggctgctctgtctcaatccctcgagacttaaacccacttagtacaatctccatataatttgagtagaacctaaaagatcgaagcttgaggaaaatggtcccttccaatggcgcaaaggttcttcgcttgttgagtcgtcgatgtctctcttcatcgcttattcaagatttagccaatcagaaactgagaggagtatgtattgggagttataggagattgaatacgagtgttggcaatcatgctaacgtgattggagattacgcttcaaaatctggacatgatcggaaatggatcaactttggaggttttaatactaattttggttctacaaggtcttttcatggaacaggttcttcgtttatgtctgctaaggactactatagtgttcttggagtgagtaagaatgctcaagaaggtgaaatcaagaaggcttattatgggcttgctaagaaactccatcctgatatgaataaagatgatccagaagctgagacgaagttccaggaagtctcaaaagcatatgaaattttgaaagataaggagaagcgtgacctttatgaccaggttggtcatgaagcatttgagcaaaatgctagtggtggatttccaaatgatcaaggcttcggtggtggtggtggtggtgggtttaacccatttgatatctttgggagcttcaatggcgatatttttaacatgtaccggcaagatattggaggtcaagatgtcaaggttttgcttgatctttctttcatggaagctgttcaaggatgctccaaaactgtgacttttcaaaccgagatggcttgtaatacttgtggtggacaaggtgttcctcctggtaccaaacgagagaaatgcaaagcctgtaatggctctgggatgacctcactgaggaggggtatgttaagcatccaaacaacttgccagaagtgtggtggagctggtcaaacgttctcaagtatttgcaaatcctgtagaggggctagagtggttcgaggacagaagtcagtgaaagtcactattgatccaggggttgacaatagtgatacattaaaggtggcaagggtgggtggggctgatcctgaaggtgaccagcctggagatctttatgttactctcaaggttcgtgaagatcctgtgttccgcagagaaggatcggatattcatgtggacgcggttctcagtgttacccaggccattcttggaggaaccattcaagttccaaccctcactggtgatgttgtcgtgaaggtccgtcctggaacccaacctggtcacaaagtagtgctaagaaataaaggaattagagcaagaaagtcgactaaatttggggatcagtatgtgcatttcaacgtcagcatccctgcaaatataacgcagagacagcgtgaactgcttgaggaatttagtaaagcagaacaaggtgaatacgagcagcgcacagcaactggatcttcccagtgaaaaatgcaaatgctgctataagcctaaaaagctattgttgtggctgtatcaatggatatataatcaatcagacaatgattgagattatattgcgtaggattagtggagagtattgtctgggttttacttttaactaattctacaatgctacaagataaaaagaaggaaaagcctgtgctgttattgcc

SEQ ID NO: 103395 - protein, 456 aa, Arabidopsis thaliana; identical to SEQ ID NO: 29406
  peptide (1)..(456): Ceres Seq. ID no. 13612673
  misc_feature (318)..(439): Pfam Name: DnaJ C terminal region Pfam Description: DnaJ C terminal region
  misc_feature (1)..(456): Homolog of NCBI NO: 18422864 NR Description: DnaJ protein GFA2, putative [Arabidopsis >gi|26452200|dbj|BAC43188.1| putative DnaJ protein [Arabidopsis
  misc_feature (1)..(456): Homolog of NCBI NO: 21429604 NR Description: GFA2 [Arabidopsis thaliana]
  misc_feature (1)..(456): Homolog of NCBI NO: 21553367 NR Description: DnaJ protein-like [Arabidopsis thaliana]
  misc_feature (1)..(456): Homolog of NCBI NO: 10177754 NR Description: DnaJ protein-like [Arabidopsis thaliana]
  misc_feature (90)..(450): Homolog of NCBI NO: 15675997 NR Description: dnaJ protein [Neisseria meningitidis MC58] DnaJ protein [Neisseria meningitidis Z2491]
  misc_feature (93)..(445): Homolog of NCBI NO: 39995145 NR Description: chaperone protein dnaJ [Geobacter sulfurreducens >gi|39981907|gb|AAR33369.1| chaperone protein dnaJ [Geobacter
  misc_feature (90)..(445): Homolog of NCBI NO: 34497100 NR Description: heat shock protein dnaJ; chaperone with DnaK violaceum ATCC 12472] >gi|34102957|gb|AAQ59321.1| heat shock
  misc_feature (90)..(454): Homolog of NCBI NO: 16759006 NR Description: DnaJ protein [Salmonella enterica subsp. enterica Typhi] >gi|16763403|ref|NP_459018.1| heat shock protein, DnaJ and stimulates ATPase activity of DnaK [Salmonella typhimurium
  misc_feature (90)..(445): Homolog of NCBI NO: 15640872 NR Description: dnaJ protein [Vibrio cholerae]
  misc_feature (90)..(445): Homolog of NCBI NO: 27363826 NR Description: DnaJ chaperone [Vibrio vulnificus CMCP6]

SEQ ID NO: 103396 - protein, 367 aa, Arabidopsis thaliana; identical to SEQ ID NO: 29407
  peptide (1)..(367): Ceres Seq. ID no. 13612674
  misc_feature (229)..(350): Pfam Name: DnaJ C terminal region Pfam Description: DnaJ C terminal region
  misc_feature (1)..(367): Homolog of NCBI NO: 18422864 NR Description: DnaJ protein GFA2, putative [Arabidopsis >gi|26452200|dbj|BAC43188.1| putative DnaJ protein [Arabidopsis
  misc_feature (1)..(367): Homolog of NCBI NO: 21429604 NR Description: GFA2 [Arabidopsis thaliana]
  misc_feature (1)..(367): Homolog of NCBI NO: 21553367 NR Description: DnaJ protein-like [Arabidopsis thaliana]
  misc_feature (1)..(367): Homolog of NCBI NO: 10177754 NR Description: DnaJ protein-like [Arabidopsis thaliana]
  misc_feature (1)..(361): Homolog of NCBI NO: 15675997 NR Description: dnaJ protein [Neisseria meningitidis MC58] DnaJ protein [Neisseria meningitidis Z2491]
  misc_feature (4)..(356): Homolog of NCBI NO: 39995145 NR Description: chaperone protein dnaJ [Geobacter sulfurreducens >gi|39981907|gb|AAR33369.1| chaperone protein dnaJ [Geobacter
  misc_feature (1)..(356): Homolog of NCBI NO: 34497100 NR Description: heat shock protein dnaJ; chaperone with DnaK violaceum ATCC 12472] >gi|34102957|gb|AAQ59321.1| heat shock
  misc_feature (1)..(365): Homolog of NCBI NO: 16759006 NR Description: DnaJ protein [Salmonella enterica subsp. enterica Typhi] >gi|16763403|ref|NP_459018.1| heat shock protein, DnaJ and stimulates ATPase activity of DnaK [Salmonella typhimurium
  misc_feature (1)..(356): Homolog of NCBI NO: 15640872 NR Description: dnaJ protein [Vibrio cholerae]
  misc_feature (1)..(356): Homolog of NCBI NO: 27363826 NR Description: DnaJ chaperone [Vibrio vulnificus CMCP6]

SEQ ID NO: 103397 - protein, 332 aa, Arabidopsis thaliana; identical to SEQ ID NO: 29408
  peptide (1)..(332): Ceres Seq. ID no. 13612675
  misc_feature (194)..(315): Pfam Name: DnaJ C terminal region Pfam Description: DnaJ C terminal region
  misc_feature (1)..(332): Homolog of NCBI NO: 18422864 NR Description: DnaJ protein GFA2, putative [Arabidopsis >gi|26452200|dbj|BAC43188.1| putative DnaJ protein [Arabidopsis
  misc_feature (1)..(332): Homolog of NCBI NO: 21429604 NR Description: GFA2 [Arabidopsis thaliana]
  misc_feature (1)..(332): Homolog of NCBI NO: 21553367 NR Description: DnaJ protein-like [Arabidopsis thaliana]
  misc_feature (1)..(332): Homolog of NCBI NO: 10177754 NR Description: DnaJ protein-like [Arabidopsis thaliana]
  misc_feature (1)..(326): Homolog of NCBI NO: 15675997 NR Description: dnaJ protein [Neisseria meningitidis MC58] DnaJ protein [Neisseria meningitidis Z2491]
  misc_feature (1)..(321): Homolog of NCBI NO: 39995145 NR Description: chaperone protein dnaJ [Geobacter sulfurreducens >gi|39981907|gb|AAR33369.1| chaperone protein dnaJ [Geobacter
  misc_feature (1)..(321): Homolog of NCBI NO: 34497100 NR Description: heat shock protein dnaJ; chaperone with DnaK violaceum ATCC 12472] >gi|34102957|gb|AAQ59321.1| heat shock
  misc_feature (1)..(330): Homolog of NCBI NO: 16759006 NR Description: DnaJ protein [Salmonella enterica subsp. enterica Typhi] >gi|16763403|ref|NP_459018.1| heat shock protein, DnaJ and stimulates ATPase activity of DnaK [Salmonella typhimurium
  misc_feature (1)..(321): Homolog of NCBI NO: 15640872 NR Description: dnaJ protein [Vibrio cholerae]
  misc_feature (1)..(321): Homolog of NCBI NO: 27363826 NR Description: DnaJ chaperone [Vibrio vulnificus CMCP6]

SEQ ID NO: 103398 - DNA, 1464 bp, Arabidopsis thaliana
  misc_feature (1)..(1464): Ceres Seq. ID no. 13612680
  misc_feature: MA Experiment ID: 20000184 Result: Down-regulated in Transcription
  misc_feature: MA Experiment 20000184 PARAMETER Experiment Name: At_Shoots__P Parameter: Age (day) Value: 7
  misc_feature: MA Experiment 20000184 PARAMETER Experiment Name: At_Shoots__P Parameter: Tissue Value: Shoots vs. Whole Plant
  misc_feature: MA Experiment ID: 20000185 Result: Down-regulated in Transcription
  misc_feature: MA Experiment 20000185 PARAMETER Experiment Name: At_Roots__P Parameter: Age (day) Value: 7 vs. 21
  misc_feature: MA Experiment 20000185 PARAMETER Experiment Name: At_Roots__P Parameter: Organism Value: A. thaliana
  misc_feature: MA Experiment 20000185 PARAMETER Experiment Name: At_Roots__P Parameter: Tissue Value: Roots vs. Whole Plant
  misc_feature: MA Experiment ID: 20000234 Result: Up-regulated in Transcription
  misc_feature: MA Experiment 20000234 PARAMETER Experiment Name: At_Siliques_P Parameter: Age (day) Value: 21
  misc_feature: MA Experiment 20000234 PARAMETER Experiment Name: At_Siliques_P Parameter: Organism Value: A. thaliana
  misc_feature: MA Experiment 20000234 PARAMETER Experiment Name: At_Siliques_P Parameter: Plant Line Value: WS
  misc_feature: MA Experiment 20000234 PARAMETER Experiment Name: At_Siliques_P Parameter: Tissue Value: Less Than 5mm Siliques vs. Whole Plant
  misc_feature: MA Experiment ID: 20000264 Result: Up-regulated in Transcription
  misc_feature: MA Experiment 20000264 PARAMETER Experiment Name: At_Open_Flower_P Parameter: Age (day) Value: 21
  misc_feature: MA Experiment 20000264 PARAMETER Experiment Name: At_Open_Flower_P Parameter: Plant Line Value: WS
  misc_feature: MA Experiment 20000264 PARAMETER Experiment Name: At_Open_Flower_P Parameter: Tissue Value: Open Flower vs. Whole Plant
  misc_feature: MA Experiment ID: 20000265 Result: Up-regulated in Transcription
  misc_feature: MA Experiment 20000265 PARAMETER Experiment Name: At_Open_Flower_P Parameter: Age (day) Value: 21
  misc_feature: MA Experiment 20000265 PARAMETER Experiment Name: At_Open_Flower_P Parameter: Plant Line Value: WS
  misc_feature: MA Experiment 20000265 PARAMETER Experiment Name: At_Open_Flower_P Parameter: Tissue Value: Closed Flower vs. Whole Plant
  misc_feature: MA Experiment ID: 20000286 Result: Up-regulated in Transcription
  misc_feature: MA Experiment 20000286 PARAMETER Experiment Name: At_Open_Flower_P Parameter: Age (day) Value: 21
  misc_feature: MA Experiment 20000286 PARAMETER Experiment Name: At_Open_Flower_P Parameter: Plant Line Value: WS
  misc_feature: MA Experiment 20000286 PARAMETER Experiment Name: At_Open_Flower_P Parameter: Tissue Value: Half Open vs. Whole Plant
  misc_feature: MA Experiment ID: 20000794 Result: Up-regulated in Transcription
  misc_feature: MA Experiment 20000794 PARAMETER Experiment Name: At_Petals_P Parameter: Age (day) Value: 23-25 days
  misc_feature: MA Experiment 20000794 PARAMETER Experiment Name: At_Petals_P Parameter: Plant Line Value: WS
  misc_feature: MA Experiment 20000794 PARAMETER Experiment Name: At_Petals_P Parameter: Tissue Value: Petals vs. Whole plant
  misc_feature: MA Experiment ID: 20001757 Result: Down-regulated in Transcription
  misc_feature: MA Experiment 20001757 PARAMETER Experiment Name: At_50mM_NH4NO3_L-to-H_P Parameter: Timepoint (hr) Value: 6
  misc_feature: MA Experiment 20001757 PARAMETER Experiment Name: At_50mM_NH4NO3_L-to-H_P Parameter: Tissue Value: Leaf
  misc_feature: MA Experiment 20001757 PARAMETER Experiment Name: At_50mM_NH4NO3_L-to-H_P Parameter: Treatment Value: 50mM NH4NO3 vs 100mM Mannitol
  misc_feature: MA Experiment ID: 20001910 Result: Up-regulated in Transcription
  misc_feature: MA Experiment 20001910 PARAMETER Experiment Name: At_Drought_Reproduction_P Parameter: Age (day) Value: 37
  misc_feature: MA Experiment 20001910 PARAMETER Experiment Name: At_Drought_Reproduction_P Parameter: Organism Value: A. thaliana
  misc_feature: MA Experiment 20001910 PARAMETER Experiment Name: At_Drought_Reproduction_P Parameter: Plant Line Value: WS
  misc_feature: MA Experiment 20001910 PARAMETER Experiment Name: At_Drought_Reproduction_P Parameter: Timepoint (day) Value: 7
  misc_feature: MA Experiment 20001910 PARAMETER Experiment Name: At_Drought_Reproduction_P Parameter: Tissue Value: Flowers
  misc_feature: MA Experiment 20001910 PARAMETER Experiment Name: At_Drought_Reproduction_P Parameter: Treatment Value: Drought vs. No Drought
  misc_feature: MA Experiment ID: 20001911 Result: Up-regulated in Transcription
  misc_feature: MA Experiment 20001911 PARAMETER Experiment Name: At_Drought_Reproduction_P Parameter: Age (day) Value: 40
  misc_feature: MA Experiment 20001911 PARAMETER Experiment Name: At_Drought_Reproduction_P Parameter: Organism Value: A. thaliana
  misc_feature: MA Experiment 20001911 PARAMETER Experiment Name: At_Drought_Reproduction_P Parameter: Plant Line Value: WS
  misc_feature: MA Experiment 20001911 PARAMETER Experiment Name: At_Drought_Reproduction_P Parameter: Timepoint (day) Value: 10
  misc_feature: MA Experiment 20001911 PARAMETER Experiment Name: At_Drought_Reproduction_P Parameter: Tissue Value: Flowers
  misc_feature: MA Experiment 20001911 PARAMETER Experiment Name: At_Drought_Reproduction_P Parameter: Treatment Value: Drought vs. No Drought
ataaaaaataaaaaatactgtaaaataaatagatagtcataactagtgtattacaaaaaaaaaataaagtaaataaaagtaatcactagctagtgactaaactaaatcccaattatgggtcgtgtacattttggtgtatcagcattctttgttttttgtttgttaggtttatcagctaatgcaaagatcttcaatattaattctcctccaggttctgatatcactaacgcattgttgaaagcattcaatgaggcatgccaattcccgacaaagagcaccgttatgatcccaaaaggtgaatacaagcttggggagatcgtgatgatgggtccatgcaaagctcctataaggattgctcttctaggtaccgtgaaagctgacggtaacgctaatggaaaggagaaatgggtcgctttccgcaacattaatgggtttaagttgaacggaggtggtgttttcgacggtgaaggaaacgcagcttggagggtcaacaactgccacaagactttcaactgcaagaagctccccatcagcattaggtttgatttcgtcaccgacgcgaaaattagaggcattacctccttagatgcaaagcacttccacattaacgtcattggagcaaagaacgtgacattcgaagacgtcaagatcattgcccctgcagagagtcccaacaccgatggtatccacgttggaagaagtgacggaatcaagatcatcaattcatttatctccacaggagatgactgtgtctctgttggagatgggatgaagaaccttcttgtcgaaagagttacatgcggtccgggacatggaatcagtattggaagtcttggaaggtacagccacgaggaaaacgttagtggcatcaagatcatcaactgcactctccaagagactgacaatggtctaaggatcaagacatggccttctgctgcttgtaccacaaccgcctccgatatccatttcgagaacatcctcctcaagaacgtcagcaaccccatcctcatcgaccaagagtactgcccatggaaccaatgcaacaagcagaaaccatcaacgatcaagttggccaacattagcttcaagaagatcagaggaacatcaggaaacaaagacgcagtgaagcttttgtgtagcaagggatatccatgtcagaacgttgaggttggtgacgtgaacatccagtataccggagcagatggtccagcgactttccaatgctctaacgtatcaccaaagcttgtgggaactcagattccaaaagcgtgtagcagcccggtgacaaagccaccaaagtagaatgtgtatatattataaactcaatacacaatctaaatgtacacccttagtgtatgctgtatgcttcaattgatatctttgtgaaatgacctatttttttgagcttttggtatattgtaagaaatgaaccattcttgaaaaaaaaaaacatctaactaattt

SEQ ID NO: 103399 - protein, 395 aa, Arabidopsis thaliana; identical to SEQ ID NO: 30029
  peptide (1)..(395): Ceres Seq. ID no. 13612681
  misc_feature (48)..(386): Pfam Name: Glycosyl hydrolases family 28 Pfam Description: Glycosyl hydrolases family 28
  misc_feature (1)..(395): Homolog of NCBI NO: 15238902 NR Description: polygalacturonase, putative [Arabidopsis >gi|8777404|dbj|BAA96994.1| polygalacturonase [Arabidopsis >gi|26452386|dbj|BAC43278.1| putative polygalacturonase
  misc_feature (5)..(389): Homolog of NCBI NO: 11263969 NR Description: polygalacturonase (EC 3.2.1.15) [imported] - thaliana >gi|2982583|emb|CAA05892.1| polygalacturonase thaliana] >gi|3152948|emb|CAA06610.1| polygalacturonase
  misc_feature (5)..(389): Homolog of NCBI NO: 15231874 NR Description: polygalacturonase, putative [Arabidopsis >gi|6648194|gb|AAF21192.1|AC013483_16 polygalacturonase (PGA3) thaliana] >gi|17529010|gb|AAL38715.1| putative
  misc_feature (1)..(395): Homolog of NCBI NO: 15231876 NR Description: polygalacturonase, putative [Arabidopsis >gi|6648195|gb|AAF21193.1|AC013483_17 putative polygalacturonase
  misc_feature (1)..(392): Homolog of NCBI NO: 15231878 NR Description: exopolygalacturonase [Arabidopsis thaliana]
  misc_feature (1)..(394): Homolog of NCBI NO: 21668071 NR Description: putative pollen polygalacturonase [Brassica
  misc_feature (1)..(394): Homolog of NCBI NO: 30984029 NR Description: polygalacturonase [Brassica napus]
  misc_feature (1)..(394): Homolog of NCBI NO: 548490 NR Description: Polygalacturonase precursor (PG) (Pectinase)
  misc_feature (8)..(394): Homolog of NCBI NO: 3024385 NR Description: POLYGALACTURONASE PRECURSOR (PG) (PECTINASE)
  misc_feature (8)..(394): Homolog of NCBI NO: 3024386 NR Description: POLYGALACTURONASE PRECURSOR (PG) (PECTINASE)

SEQ ID NO: 103400 - protein, 339 aa, Arabidopsis thaliana; identical to SEQ ID NO: 30030
  peptide (1)..(339): Ceres Seq. ID no. 13612682
  misc_feature (1)..(330): Pfam Name: Glycosyl hydrolases family 28 Pfam Description: Glycosyl hydrolases family 28
  misc_feature (1)..(339): Homolog of NCBI NO: 15238902 NR Description: polygalacturonase, putative [Arabidopsis >gi|8777404|dbj|BAA96994.1| polygalacturonase [Arabidopsis >gi|26452386|dbj|BAC43278.1| putative polygalacturonase
  misc_feature (1)..(333): Homolog of NCBI NO: 11263969 NR Description: polygalacturonase (EC 3.2.1.15) [imported] - thaliana >gi|2982583|emb|CAA05892.1| polygalacturonase thaliana] >gi|3152948|emb|CAA06610.1| polygalacturonase
  misc_feature (1)..(333): Homolog of NCBI NO: 15231874 NR Description: polygalacturonase, putative [Arabidopsis >gi|6648194|gb|AAF21192.1|AC013483_16 polygalacturonase (PGA3) thaliana] >gi|17529010|gb|AAL38715.1| putative
  misc_feature (1)..(339): Homolog of NCBI NO: 15231876 NR Description: polygalacturonase, putative [Arabidopsis >gi|6648195|gb|AAF21193.1|AC013483_17 putative polygalacturonase
  misc_feature (1)..(336): Homolog of NCBI NO: 15231878 NR Description: exopolygalacturonase [Arabidopsis thaliana]
  misc_feature (1)..(338): Homolog of NCBI NO: 21668071 NR Description: putative pollen polygalacturonase [Brassica
  misc_feature (1)..(338): Homolog of NCBI NO: 30984029 NR Description: polygalacturonase [Brassica napus]
  misc_feature (1)..(338): Homolog of NCBI NO: 548490 NR Description: Polygalacturonase precursor (PG) (Pectinase)
  misc_feature (1)..(338): Homolog of NCBI NO: 3024385 NR Description: POLYGALACTURONASE PRECURSOR (PG) (PECTINASE)
  misc_feature (1)..(338): Homolog of NCBI NO: 3024386 NR Description: POLYGALACTURONASE PRECURSOR (PG) (PECTINASE)

SEQ ID NO: 103401 - protein, 326 aa, Arabidopsis thaliana; identical to SEQ ID NO: 30031
  peptide (1)..(326): Ceres Seq. ID no. 13612683
  misc_feature (1)..(317): Pfam Name: Glycosyl hydrolases family 28 Pfam Description: Glycosyl hydrolases family 28
  misc_feature (1)..(326): Homolog of NCBI NO: 15238902 NR Description: polygalacturonase, putative [Arabidopsis >gi|8777404|dbj|BAA96994.1| polygalacturonase [Arabidopsis >gi|26452386|dbj|BAC43278.1| putative polygalacturonase
  misc_feature (1)..(320): Homolog of NCBI NO: 11263969 NR Description: polygalacturonase (EC 3.2.1.15) [imported] - thaliana >gi|2982583|emb|CAA05892.1| polygalacturonase thaliana] >gi|3152948|emb|CAA06610.1| polygalacturonase
  misc_feature (1)..(320): Homolog of NCBI NO: 15231874 NR Description: polygalacturonase, putative [Arabidopsis >gi|6648194|gb|AAF21192.1|AC013483_16 polygalacturonase (PGA3) thaliana] >gi|17529010|gb|AAL38715.1| putative
  misc_feature (1)..(326): Homolog of NCBI NO: 15231876 NR Description: polygalacturonase, putative [Arabidopsis >gi|6648195|gb|AAF21193.1|AC013483_17 putative polygalacturonase
  misc_feature (1)..(323): Homolog of NCBI NO: 15231878 NR Description: exopolygalacturonase [Arabidopsis thaliana]
  misc_feature (1)..(325): Homolog of NCBI NO: 21668071 NR Description: putative pollen polygalacturonase [Brassica
  misc_feature (1)..(325): Homolog of NCBI NO: 30984029 NR Description: polygalacturonase [Brassica napus]
  misc_feature (1)..(325): Homolog of NCBI NO: 548490 NR Description: Polygalacturonase precursor (PG) (Pectinase)
  misc_feature (1)..(325): Homolog of NCBI NO: 3024385 NR Description: POLYGALACTURONASE PRECURSOR (PG) (PECTINASE)
  misc_feature (1)..(325): Homolog of NCBI NO: 3024386 NR Description: POLYGALACTURONASE PRECURSOR (PG) (PECTINASE)

SEQ ID NO: 103402 - DNA, 1869 bp, Arabidopsis thaliana
  misc_feature (1)..(1869): Ceres Seq. ID no. 13612691
  misc_feature: MA Experiment ID: 108435 Result: Down-regulated in Transcription
  misc_feature: MA Experiment 108435 PARAMETER Experiment Name: At_stm_Mutants_cDNA_P Parameter: Plant Line Value: wt Landsburg vs stm
  misc_feature: MA Experiment 108435 PARAMETER Experiment Name: At_stm_Mutants_cDNA_P Parameter: Tissue Value: Shoot Apical Meristem Region
  misc_feature: MA Experiment ID: 108461 Result: Up-regulated in Transcription
  misc_feature: MA Experiment 108461 PARAMETER Experiment Name: At_Germinating_Seeds_cDNA_P Parameter: Age (day) Value: 1 vs. 0
  misc_feature: MA Experiment 108461 PARAMETER Experiment Name: At_Germinating_Seeds_cDNA_P Parameter: Tissue Value: Germinating Seeds
  misc_feature: MA Experiment ID: 108462 Result: Up-regulated in Transcription
  misc_feature: MA Experiment 108462 PARAMETER Experiment Name: At_Germinating_Seeds_cDNA_P Parameter: Age (day) Value: 2 vs. 0
  misc_feature: MA Experiment 108462 PARAMETER Experiment Name: At_Germinating_Seeds_cDNA_P Parameter: Tissue Value: Germinating Seeds
  misc_feature: MA Experiment ID: 108463 Result: Up-regulated in Transcription
  misc_feature: MA Experiment 108463 PARAMETER Experiment Name: At_Germinating_Seeds_cDNA_P Parameter: Age (day) Value: 3 vs. 0
  misc_feature: MA Experiment 108463 PARAMETER Experiment Name: At_Germinating_Seeds_cDNA_P Parameter: Tissue Value: Germinating Seeds
  misc_feature: MA Experiment ID: 108464 Result: Up-regulated in Transcription
  misc_feature: MA Experiment 108464 PARAMETER Experiment Name: At_Germinating_Seeds_cDNA_P Parameter: Age (day) Value: 4 vs. 0
  misc_feature: MA Experiment 108464 PARAMETER Experiment Name: At_Germinating_Seeds_cDNA_P Parameter: Tissue Value: Germinating Seeds
  misc_feature: MA Experiment ID: 108595 Result: Down-regulated in Transcription
  misc_feature: MA Experiment 108595 PARAMETER Experiment Name: At_Ler-pi_Ovule_cDNA_P Parameter: Plant Line Value: null
  misc_feature: MA Experiment ID: 20000087 Result: Down-regulated in Transcription
  misc_feature: MA Experiment 20000087 PARAMETER Experiment Name: At_100uM_ABA_Mutants_cDNA_P Parameter: Plant Line Value: WS
  misc_feature: MA Experiment 20000087 PARAMETER Experiment Name: At_100uM_ABA_Mutants_cDNA_P Parameter: Timepoint (hr) Value: 6
  misc_feature: MA Experiment 20000087 PARAMETER Experiment Name: At_100uM_ABA_Mutants_cDNA_P Parameter: Tissue Value: Aerial
  misc_feature: MA Experiment 20000087 PARAMETER Experiment Name: At_100uM_ABA_Mutants_cDNA_P Parameter: Treatment Value: 100uM ABA vs. No Treatment
  misc_feature: MA Experiment ID: 20000179 Result: Up-regulated in Transcription
  misc_feature: MA Experiment 20000179 PARAMETER Experiment Name: At_Germinating_Seeds_P Parameter: Age (hr) Value: 6 vs. 0
  misc_feature: MA Experiment 20000179 PARAMETER Experiment Name: At_Germinating_Seeds_P Parameter: Tissue Value: Germinating Seeds
  misc_feature: MA Experiment ID: 20000180 Result: Up-regulated in Transcription
  misc_feature: MA Experiment 20000180 PARAMETER Experiment Name: At_Germinating_Seeds_P Parameter: Age (hr) Value: 24 vs. 0
  misc_feature: MA Experiment 20000180 PARAMETER Experiment Name: At_Germinating_Seeds_P Parameter: Tissue Value: Germinating Seeds
  misc_feature: MA Experiment ID: 20000185 Result: Down-regulated in Transcription
  misc_feature: MA Experiment 20000185 PARAMETER Experiment Name: At_Roots__P Parameter: Age (day) Value: 7 vs. 21
  misc_feature: MA Experiment 20000185 PARAMETER Experiment Name: At_Roots__P Parameter: Organism Value: A. thaliana
  misc_feature: MA Experiment 20000185 PARAMETER Experiment Name: At_Roots__P Parameter: Tissue Value: Roots vs. Whole Plant
  misc_feature: MA Experiment ID: 20000439 Result: Down-regulated in Transcription
  misc_feature: MA Experiment 20000439 PARAMETER Experiment Name: At_Roots__P Parameter: Age (day) Value: 14 vs. 21
  misc_feature: MA Experiment 20000439 PARAMETER Experiment Name: At_Roots__P Parameter: Organism Value: A. thaliana
  misc_feature: MA Experiment 20000439 PARAMETER Experiment Name: At_Roots__P Parameter: Tissue Value: Roots vs. Whole Plant
  misc_feature: MA Experiment ID: 20000451 Result: Up-regulated in Transcription
  misc_feature: MA Experiment 20000451 PARAMETER Experiment Name: At_CS6879_Shoots-Roots_P Parameter: Age (day) Value: 14
  misc_feature: MA Experiment 20000451 PARAMETER Experiment Name: At_CS6879_Shoots-Roots_P Parameter: Organism Value: A. thaliana
  misc_feature: MA Experiment 20000451 PARAMETER Experiment Name: At_CS6879_Shoots-Roots_P Parameter: Plant Line Value: CS6879 vs. WS
  misc_feature: MA Experiment 20000451 PARAMETER Experiment Name: At_CS6879_Shoots-Roots_P Parameter: Tissue Value: Roots
  misc_feature: MA Experiment ID: 20000495 Result: Down-regulated in Transcription
  misc_feature: MA Experiment 20000495 PARAMETER Experiment Name: At_Guard_Cells_P Parameter: Harvest Date Value: 8/2/2002
  misc_feature: MA Experiment 20000495 PARAMETER Experiment Name: At_Guard_Cells_P Parameter: Organism Value: A. thaliana
  misc_feature: MA Experiment 20000495 PARAMETER Experiment Name: At_Guard_Cells_P Parameter: Tissue Value: Guard Cells vs. Leaves
  misc_feature: MA Experiment ID: 20000794 Result: Down-regulated in Transcription
  misc_feature: MA Experiment 20000794 PARAMETER Experiment Name: At_Petals_P Parameter: Age (day) Value: 23-25 days
  misc_feature: MA Experiment 20000794 PARAMETER Experiment Name: At_Petals_P Parameter: Plant Line Value: WS
  misc_feature: MA Experiment 20000794 PARAMETER Experiment Name: At_Petals_P Parameter: Tissue Value: Petals vs. Whole plant
  misc_feature: MA Experiment ID: 20001248 Result: Down-regulated in Transcription
  misc_feature: MA Experiment 20001248 PARAMETER Experiment Name: At_Far-red-induction_P Parameter: Age (day) Value: 7
  misc_feature: MA Experiment 20001248 PARAMETER Experiment Name: At_Far-red-induction_P Parameter: Light Value: Far-red vs. White
  misc_feature: MA Experiment 20001248 PARAMETER Experiment Name: At_Far-red-induction_P Parameter: Organism Value: A. thaliana
  misc_feature: MA Experiment 20001248 PARAMETER Experiment Name: At_Far-red-induction_P Parameter: Plant Line Value: Columbia
  misc_feature: MA Experiment 20001248 PARAMETER Experiment Name: At_Far-red-induction_P Parameter: Timepoint (hr) Value: 4
  misc_feature: MA Experiment 20001248 PARAMETER Experiment Name: At_Far-red-induction_P Parameter: Tissue Value: Whole Plant
  misc_feature: MA Experiment ID: 20001450 Result: Down-regulated in Transcription
  misc_feature: MA Experiment 20001450 PARAMETER Experiment Name: At_Far-red-induction_P Parameter: Age (day) Value: 7
  misc_feature: MA Experiment 20001450 PARAMETER Experiment Name: At_Far-red-induction_P Parameter: Light Value: Far-red vs. White
  misc_feature: MA Experiment 20001450 PARAMETER Experiment Name: At_Far-red-induction_P Parameter: Organism Value: A. thaliana
  misc_feature: MA Experiment 20001450 PARAMETER Experiment Name: At_Far-red-induction_P Parameter: Plant Line Value: Columbia
  misc_feature: MA Experiment 20001450 PARAMETER Experiment Name: At_Far-red-induction_P Parameter: Timepoint (hr) Value: 8
  misc_feature: MA Experiment 20001450 PARAMETER Experiment Name: At_Far-red-induction_P Parameter: Tissue Value: Whole Plant
  misc_feature: MA Experiment ID: 20001451 Result: Down-regulated in Transcription
  misc_feature: MA Experiment 20001451 PARAMETER Experiment Name: At_Far-red-induction_P Parameter: Age (day) Value: 7
  misc_feature: MA Experiment 20001451 PARAMETER Experiment Name: At_Far-red-induction_P Parameter: Light Value: Far-red vs. White
  misc_feature: MA Experiment 20001451 PARAMETER Experiment Name: At_Far-red-induction_P Parameter: Organism Value: A. thaliana
  misc_feature: MA Experiment 20001451 PARAMETER Experiment Name: At_Far-red-induction_P Parameter: Plant Line Value: Columbia
  misc_feature: MA Experiment 20001451 PARAMETER Experiment Name: At_Far-red-induction_P Parameter: Timepoint (hr) Value: 24
  misc_feature: MA Experiment 20001451 PARAMETER Experiment Name: At_Far-red-induction_P Parameter: Tissue Value: Whole Plant
aatcacaagacaaccacaaaactctcactccaaaactctcaattttgccttcctttgatcgaatactacaatggcgtctgtatctgcaattggagttctcaaggtacctcctgcttcgacttccaattccaccggaaaagccacggaggcggttcccacgaggactctttctttctcctcctctgttacttcatccgacgacaagatttcactcaaatccaccgtctcccgtctttgtaaatctgttgttcgcaggaatccgatcatcgtctctcccaaagccgtctcagattctcaaaactctcaaacttgtctcgatcctgatgctagcagcagtgttttggggataatcttaggaggtggagctggaactcgtctttatccacttacgaagaagagagcgaaaccagctgtgcctcttggtgctaactataggcttattgatattcctgtgagcaactgtttgaatagcaacatatccaagatctatgttcttactcagttcaattccgcgtctttgaatcgtcatctttcacgagcttatgctagtaacatgggaggttataagaatgaaggattcgttgaagttctcgctgctcaacagagtcctgaaaaccccaactggttccaggggacagctgatgccgtcaggcaatacttgtggttgttcgaggagcataatgtcttggagtatctcattcttgctggggatcatttgtatagaatggactatgagaagtttattcaagcacatagggagactgatgctgatatcacagtagctgcattaccaatggacgagcaacgagccactgcttttgggctgatgaagattgatgaggaaggacgtattattgaatttgctgaaaaaccaaaaggggagcacctaaaggccatgaaggttgacacaacaattctaggtcttgatgatcagagagccaaggagatgcctttcattgctagtatgggtatttatgttgtaagcagagatgtaatgctagacttactacggaatcagtttcctggagctaatgactttggaagtgaagtcattcccggtgccacttcccttggactgagggtgcaagcttacctatatgatggttactgggaagacattggtactatagaggcattttataacgctaatcttggaatcaccaagaaaccagttcctgattttagtttctatgaccgttctgctccgatctacacacagccgcgttatttaccaccgtctaagatgcttgatgctgatgttactgacagtgtcatcggagagggctgtgttatcaagaactgcaaaattcatcactctgtggttggactccgttcctgcatatcagaaggtgctattattgaagattcgttattaatgggagctgattattacgagactgctacggaaaagagcctcttaagcgcgaaaggaagtgtacccataggtattgggaaaaactcgcacatcaaaagggccatcatcgacaaaaacgcacgtatcggtgacaatgtcaagatcataaacagcgacaacgtgcaagaggcagcgagagagactgatggatatttcataaagagcggaattgtaacggttatcaaagacgccttaatcccaaccggcactgtcatctgaagtacacataatgctcctttgtttatttcttcatctttctaatgccctatcaataagttttctttatggctttttaagccccaataaatctactactagttgtaatgctgcttacgaaagagattacgaaatcatgttttcacaataccattgtctcttttgagaaaaaagaagaccctatgaatttcactaaatttatcttttgtagcttattatcaataaaattaagtttcttc

SEQ ID NO: 103403 - protein, 520 aa, Arabidopsis thaliana; identical to SEQ ID NO: 27025
  peptide (1)..(520): Ceres Seq. ID no. 13612692
  misc_feature (91)..(366): Pfam Name: Nucleotidyl transferase Pfam Description: Nucleotidyl transferase
  misc_feature (1)..(520): Homolog of NCBI NO: 15238933 NR Description: glucose-1-phosphate adenylyltransferase, small
  misc_feature (1)..(520): Homolog of NCBI NO: 1575754 NR Description: ADP glucose pyrophosphorylase small subunit
  misc_feature (1)..(520): Homolog of NCBI NO: 17865468 NR Description: Glucose-1-phosphate adenylyltransferase small
  misc_feature (1)..(520): Homolog of NCBI NO: 13487787 NR Description: ADP-glucose pyrophosphorylase small subunit
  misc_feature (5)..(520): Homolog of NCBI NO: 1071859 NR Description: glucose-1-phosphate adenylyltransferase (EC
  misc_feature (1)..(520): Homolog of NCBI NO: 1237080 NR Description: ADP-glucose pyrophosphorylase [Pisum sativum]
  misc_feature (5)..(520): Homolog of NCBI NO: 232164 NR Description: Glucose-1-phosphate adenylyltransferase small
  misc_feature (4)..(520): Homolog of NCBI NO: 1707944 NR Description: Glucose-1-phosphate adenylyltransferase small
  misc_feature (1)..(520): Homolog of NCBI NO: 29421116 NR Description: ADP-glucose pyrophosphorylase small subunit
  misc_feature (5)..(520): Homolog of NCBI NO: 17865461 NR Description: Glucose-1-phosphate adenylyltransferase small

SEQ ID NO: 103404 - protein, 359 aa, Arabidopsis thaliana; identical to SEQ ID NO: 27026
  peptide (1)..(359): Ceres Seq. ID no. 13612693
  misc_feature (1)..(205): Pfam Name: Nucleotidyl transferase Pfam Description: Nucleotidyl transferase
  misc_feature (1)..(359): Homolog of NCBI NO: 15238933 NR Description: glucose-1-phosphate adenylyltransferase, small
  misc_feature (1)..(359): Homolog of NCBI NO: 1575754 NR Description: ADP glucose pyrophosphorylase small subunit
  misc_feature (1)..(359): Homolog of NCBI NO: 17865468 NR Description: Glucose-1-phosphate adenylyltransferase small
  misc_feature (1)..(359): Homolog of NCBI NO: 13487787 NR Description: ADP-glucose pyrophosphorylase small subunit
  misc_feature (1)..(359): Homolog of NCBI NO: 1071859 NR Description: glucose-1-phosphate adenylyltransferase (EC
  misc_feature (1)..(359): Homolog of NCBI NO: 1237080 NR Description: ADP-glucose pyrophosphorylase [Pisum sativum]
  misc_feature (1)..(359): Homolog of NCBI NO: 232164 NR Description: Glucose-1-phosphate adenylyltransferase small
  misc_feature (1)..(359): Homolog of NCBI NO: 1707944 NR Description: Glucose-1-phosphate adenylyltransferase small
  misc_feature (1)..(359): Homolog of NCBI NO: 29421116 NR Description: ADP-glucose pyrophosphorylase small subunit
  misc_feature (1)..(359): Homolog of NCBI NO: 17865461 NR Description: Glucose-1-phosphate adenylyltransferase small

SEQ ID NO: 103405 - protein, 302 aa, Arabidopsis thaliana; identical to SEQ ID NO: 27027
  peptide (1)..(302): Ceres Seq. ID no. 13612694
  misc_feature (1)..(148): Pfam Name: Nucleotidyl transferase Pfam Description: Nucleotidyl transferase
  misc_feature (1)..(302): Homolog of NCBI NO: 15238933 NR Description: glucose-1-phosphate adenylyltransferase, small
  misc_feature (1)..(302): Homolog of NCBI NO: 1575754 NR Description: ADP glucose pyrophosphorylase small subunit
  misc_feature (1)..(302): Homolog of NCBI NO: 17865468 NR Description: Glucose-1-phosphate adenylyltransferase small
  misc_feature (1)..(302): Homolog of NCBI NO: 13487787 NR Description: ADP-glucose pyrophosphorylase small subunit
  misc_feature (1)..(302): Homolog of NCBI NO: 1071859 NR Description: glucose-1-phosphate adenylyltransferase (EC
  misc_feature (1)..(302): Homolog of NCBI NO: 1237080 NR Description: ADP-glucose pyrophosphorylase [Pisum sativum]
  misc_feature (1)..(302): Homolog of NCBI NO: 232164 NR Description: Glucose-1-phosphate adenylyltransferase small
  misc_feature (1)..(302): Homolog of NCBI NO: 1707944 NR Description: Glucose-1-phosphate adenylyltransferase small
  misc_feature (1)..(302): Homolog of NCBI NO: 29421116 NR Description: ADP-glucose pyrophosphorylase small subunit
  misc_feature (1)..(302): Homolog of NCBI NO: 17865461 NR Description: Glucose-1-phosphate adenylyltransferase small

SEQ ID NO: 103406 - DNA, 840 bp, Arabidopsis thaliana
  misc_feature (1)..(840): Ceres Seq. ID no. 13612703
  misc_feature: MA Experiment ID: 108434 Result: Up-regulated in Transcription
  misc_feature: MA Experiment 108434 PARAMETER Experiment Name: At_Root_Tips_cDNA_P Parameter: Tissue Value: Root Tips
  misc_feature: MA Experiment ID: 108435 Result: Up-regulated in Transcription
  misc_feature: MA Experiment 108435 PARAMETER Experiment Name: At_stm_Mutants_cDNA_P Parameter: Plant Line Value: wt Landsburg vs stm
  misc_feature: MA Experiment 108435 PARAMETER Experiment Name: At_stm_Mutants_cDNA_P Parameter: Tissue Value: Shoot Apical Meristem Region
  misc_feature: MA Experiment ID: 108488 Result: Up-regulated in Transcription
  misc_feature: MA Experiment ID: 108573 Result: Up-regulated in Transcription
  misc_feature: MA Experiment 108573 PARAMETER Experiment Name: At_Drought_cDNA_P Parameter: Timepoint (hr) Value: 6
  misc_feature: MA Experiment 108573 PARAMETER Experiment Name: At_Drought_cDNA_P Parameter: Tissue Value: Aerial
  misc_feature: MA Experiment 108573 PARAMETER Experiment Name: At_Drought_cDNA_P Parameter: Treatment Value: Drought vs. No Drought
  misc_feature: MA Experiment ID: 108576 Result: Down-regulated in Transcription
  misc_feature: MA Experiment 108576 PARAMETER Experiment Name: At_42deg_Heat_cDNA_P Parameter: Temperature (deg C) Value: 42 vs. 22
  misc_feature: MA Experiment 108576 PARAMETER Experiment Name: At_42deg_Heat_cDNA_P Parameter: Timepoint (hr) Value: 1
  misc_feature: MA Experiment 108576 PARAMETER Experiment Name: At_42deg_Heat_cDNA_P Parameter: Tissue Value: Aerial
  misc_feature: MA Experiment ID: 108595 Result: Up-regulated in Transcription
  misc_feature: MA Experiment 108595 PARAMETER Experiment Name: At_Ler-pi_Ovule_cDNA_P Parameter: Plant Line Value: null
  misc_feature: MA Experiment ID: 20000030 Result: Up-regulated in Transcription
  misc_feature: MA Experiment 20000030 PARAMETER Experiment Name: At_CS6630_Roots_cDNA_P Parameter: Plant Line Value: CS6630 vs. WS
  misc_feature: MA Experiment 20000030 PARAMETER Experiment Name: At_CS6630_Roots_cDNA_P Parameter: Tissue Value: Roots
  misc_feature: MA Experiment ID: 20000071 Result: Up-regulated in Transcription
  misc_feature: MA Experiment 20000071 PARAMETER Experiment Name: At_100uM_ABA_Mutants_cDNA_P Parameter: Plant Line Value: CS8104
  misc_feature: MA Experiment 20000071 PARAMETER Experiment Name: At_100uM_ABA_Mutants_cDNA_P Parameter: Timepoint (hr) Value: 6
  misc_feature: MA Experiment 20000071 PARAMETER Experiment Name: At_100uM_ABA_Mutants_cDNA_P Parameter: Tissue Value: Aerial
  misc_feature: MA Experiment 20000071 PARAMETER Experiment Name: At_100uM_ABA_Mutants_cDNA_P Parameter: Treatment Value: 100uM ABA vs. No Treatment
  misc_feature: MA Experiment ID: 20000072 Result: Up-regulated in Transcription
  misc_feature: MA Experiment 20000072 PARAMETER Experiment Name: At_100uM_ABA_Mutants_cDNA_P Parameter: Plant Line Value: CS8105
  misc_feature: MA Experiment 20000072 PARAMETER Experiment Name: At_100uM_ABA_Mutants_cDNA_P Parameter: Timepoint (hr) Value: 6
  misc_feature: MA Experiment 20000072 PARAMETER Experiment Name: At_100uM_ABA_Mutants_cDNA_P Parameter: Tissue Value: Aerial
  misc_feature: MA Experiment 20000072 PARAMETER Experiment Name: At_100uM_ABA_Mutants_cDNA_P Parameter: Treatment Value: 100uM ABA vs. No Treatment
  misc_feature: MA Experiment ID: 20000087 Result: Up-regulated in Transcription
  misc_feature: MA Experiment 20000087 PARAMETER Experiment Name: At_100uM_ABA_Mutants_cDNA_P Parameter: Plant Line Value: WS
  misc_feature: MA Experiment 20000087 PARAMETER Experiment Name: At_100uM_ABA_Mutants_cDNA_P Parameter: Timepoint (hr) Value: 6
  misc_feature: MA Experiment 20000087 PARAMETER Experiment Name: At_100uM_ABA_Mutants_cDNA_P Parameter: Tissue Value: Aerial
  misc_feature: MA Experiment 20000087 PARAMETER Experiment Name: At_100uM_ABA_Mutants_cDNA_P Parameter: Treatment Value: 100uM ABA vs. No Treatment
  misc_feature: MA Experiment ID: 20000111 Result: Down-regulated in Transcription
  misc_feature: MA Experiment 20000111 PARAMETER Experiment Name: At_42deg_Heat_cDNA_P Parameter: Temperature (deg C) Value: 42 vs. 22
  misc_feature: MA Experiment 20000111 PARAMETER Experiment Name: At_42deg_Heat_cDNA_P Parameter: Timepoint (hr) Value: 6
  misc_feature: MA Experiment 20000111 PARAMETER Experiment Name: At_42deg_Heat_cDNA_P Parameter: Tissue Value: Aerial
  misc_feature: MA Experiment ID: 20000113 Result: Down-regulated in Transcription
  misc_feature: MA Experiment 20000113 PARAMETER Experiment Name: At_42deg_Heat_cDNA_P Parameter: Temperature (deg C) Value: 42 vs. 22
  misc_feature: MA Experiment 20000113 PARAMETER Experiment Name: At_42deg_Heat_cDNA_P Parameter: Timepoint (hr) Value: 8
  misc_feature: MA Experiment 20000113 PARAMETER Experiment Name: At_42deg_Heat_cDNA_P Parameter: Tissue Value: Aerial
  misc_feature: MA Experiment ID: 20000117 Result: Up-regulated in Transcription
  misc_feature: MA Experiment 20000117 PARAMETER Experiment Name: At_100uM_ABA_Mutants_cDNA_P Parameter: Plant Line Value: Columbia
  misc_feature: MA Experiment 20000117 PARAMETER Experiment Name: At_100uM_ABA_Mutants_cDNA_P Parameter: Timepoint (hr) Value: 6
  misc_feature: MA Experiment 20000117 PARAMETER Experiment Name: At_100uM_ABA_Mutants_cDNA_P Parameter: Tissue Value: Aerial
  misc_feature: MA Experiment 20000117 PARAMETER Experiment Name: At_100uM_ABA_Mutants_cDNA_P Parameter: Treatment Value: 100uM ABA vs. No Treatment
  misc_feature: MA Experiment ID: 20000144 Result: Down-regulated in Transcription
  misc_feature: MA Experiment 20000144 PARAMETER Experiment Name: At_42deg_Heat_cDNA_P Parameter: Temperature (deg C) Value: 42 vs. 22
  misc_feature: MA Experiment 20000144 PARAMETER Experiment Name: At_42deg_Heat_cDNA_P Parameter: Timepoint (hr) Value: 1
  misc_feature: MA Experiment 20000144 PARAMETER Experiment Name: At_42deg_Heat_cDNA_P Parameter: Tissue Value: Aerial
  misc_feature: MA Experiment ID: 20000171 Result: Down-regulated in Transcription
  misc_feature: MA Experiment 20000171 PARAMETER Experiment Name: At_42deg_Heat_P Parameter: Age (day) Value: 14
  misc_feature: MA Experiment 20000171 PARAMETER Experiment Name: At_42deg_Heat_P Parameter: Organism Value: A. thaliana
  misc_feature: MA Experiment 20000171 PARAMETER Experiment Name: At_42deg_Heat_P Parameter: Plant Line Value: WS
  misc_feature: MA Experiment 20000171 PARAMETER Experiment Name: At_42deg_Heat_P Parameter: Temperature (deg C) Value: 42 vs. 22
  misc_feature: MA Experiment 20000171 PARAMETER Experiment Name: At_42deg_Heat_P Parameter: Timepoint (hr) Value: 1
  misc_feature: MA Experiment 20000171 PARAMETER Experiment Name: At_42deg_Heat_P Parameter: Tissue Value: Aerial
  misc_feature: MA Experiment ID: 20000173 Result: Down-regulated in Transcription
  misc_feature: MA Experiment 20000173 PARAMETER Experiment Name: At_42deg_Heat_P Parameter: Age (day) Value: 14
  misc_feature: MA Experiment 20000173 PARAMETER Experiment Name: At_42deg_Heat_P Parameter: Organism Value: A. thaliana
  misc_feature: MA Experiment 20000173 PARAMETER Experiment Name: At_42deg_Heat_P Parameter: Plant Line Value: WS
  misc_feature: MA Experiment 20000173 PARAMETER Experiment Name: At_42deg_Heat_P Parameter: Temperature (deg C) Value: 42 vs. 22
  misc_feature: MA Experiment 20000173 PARAMETER Experiment Name: At_42deg_Heat_P Parameter: Timepoint (hr) Value: 6
  misc_feature: MA Experiment 20000173 PARAMETER Experiment Name: At_42deg_Heat_P Parameter: Tissue Value: Aerial
  misc_feature: MA Experiment ID: 20000185 Result: Down-regulated in Transcription
  misc_feature: MA Experiment 20000185 PARAMETER Experiment Name: At_Roots__P Parameter: Age (day) Value: 7 vs. 21
  misc_feature: MA Experiment 20000185 PARAMETER Experiment Name: At_Roots__P Parameter: Organism Value: A. thaliana
  misc_feature: MA Experiment 20000185 PARAMETER Experiment Name: At_Roots__P Parameter: Tissue Value: Roots vs. Whole Plant
  misc_feature: MA Experiment ID: 20000227 Result: Down-regulated in Transcription
  misc_feature: MA Experiment 20000227 PARAMETER Experiment Name: At_Root-Tips-vs-Tops_P Parameter: Tissue Value: Root Tips vs. Root Tops
  misc_feature: MA Experiment ID: 20000234 Result: Up-regulated in Transcription
  misc_feature: MA Experiment 20000234 PARAMETER Experiment Name: At_Siliques_P Parameter: Age (day) Value: 21
  misc_feature: MA Experiment 20000234 PARAMETER Experiment Name: At_Siliques_P Parameter: Organism Value: A. thaliana
  misc_feature: MA Experiment 20000234 PARAMETER Experiment Name: At_Siliques_P Parameter: Plant Line Value: WS
  misc_feature: MA Experiment 20000234 PARAMETER Experiment Name: At_Siliques_P Parameter: Tissue Value: Less Than 5mm Siliques vs. Whole Plant
  misc_feature: MA Experiment ID: 20000264 Result: Up-regulated in Transcription
  misc_feature: MA Experiment 20000264 PARAMETER Experiment Name: At_Open_Flower_P Parameter: Age (day) Value: 21
  misc_feature: MA Experiment 20000264 PARAMETER Experiment Name: At_Open_Flower_P Parameter: Plant Line Value: WS
  misc_feature: MA Experiment 20000264 PARAMETER Experiment Name: At_Open_Flower_P Parameter: Tissue Value: Open Flower vs. Whole Plant
  misc_feature: MA Experiment ID: 20000265 Result: Up-regulated in Transcription
  misc_feature: MA Experiment 20000265 PARAMETER Experiment Name: At_Open_Flower_P Parameter: Age (day) Value: 21
  misc_feature: MA Experiment 20000265 PARAMETER Experiment Name: At_Open_Flower_P Parameter: Plant Line Value: WS
  misc_feature: MA Experiment 20000265 PARAMETER Experiment Name: At_Open_Flower_P Parameter: Tissue Value: Closed Flower vs. Whole Plant
  misc_feature: MA Experiment ID: 20000286 Result: Up-regulated in Transcription
  misc_feature: MA Experiment 20000286 PARAMETER Experiment Name: At_Open_Flower_P Parameter: Age (day) Value: 21
  misc_feature: MA Experiment 20000286 PARAMETER Experiment Name: At_Open_Flower_P Parameter: Plant Line Value: WS
  misc_feature: MA Experiment 20000286 PARAMETER Experiment Name: At_Open_Flower_P Parameter: Tissue Value: Half Open vs. Whole Plant
  misc_feature: MA Experiment ID: 20000451 Result: Up-regulated in Transcription
  misc_feature: MA Experiment 20000451 PARAMETER Experiment Name: At_CS6879_Shoots-Roots_P Parameter: Age (day) Value: 14
  misc_feature: MA Experiment 20000451 PARAMETER Experiment Name: At_CS6879_Shoots-Roots_P Parameter: Organism Value: A. thaliana
  misc_feature: MA Experiment 20000451 PARAMETER Experiment Name: At_CS6879_Shoots-Roots_P Parameter: Plant Line Value: CS6879 vs. WS
  misc_feature: MA Experiment 20000451 PARAMETER Experiment Name: At_CS6879_Shoots-Roots_P Parameter: Tissue Value: Roots
  misc_feature: MA Experiment ID: 20000495 Result: Up-regulated in Transcription
  misc_feature: MA Experiment 20000495 PARAMETER Experiment Name: At_Guard_Cells_P Parameter: Harvest Date Value: 8/2/2002
  misc_feature: MA Experiment 20000495 PARAMETER Experiment Name: At_Guard_Cells_P Parameter: Organism Value: A. thaliana
  misc_feature: MA Experiment 20000495 PARAMETER Experiment Name: At_Guard_Cells_P Parameter: Tissue Value: Guard Cells vs. Leaves
  misc_feature: MA Experiment ID: 20000496 Result: Up-regulated in Transcription
  misc_feature: MA Experiment 20000496 PARAMETER Experiment Name: At_Guard_Cells_P Parameter: Harvest Date Value: 7/19/2002
  misc_feature: MA Experiment 20000496 PARAMETER Experiment Name: At_Guard_Cells_P Parameter: Organism Value: Canola
  misc_feature: MA Experiment 20000496 PARAMETER Experiment Name: At_Guard_Cells_P Parameter: Tissue Value: Guard Cells vs. Leaves
  misc_feature: MA Experiment ID: 20000573 Result: Down-regulated in Transcription
  misc_feature: MA Experiment 20000573 PARAMETER Experiment Name: At_100uM_ABA_Mutants__P Parameter: Organism Value: A. thaliana
  misc_feature: MA Experiment 20000573 PARAMETER Experiment Name: At_100uM_ABA_Mutants__P Parameter: Plant Line Value: CS22 vs. Ler wt
  misc_feature: MA Experiment 20000573 PARAMETER Experiment Name: At_100uM_ABA_Mutants__P Parameter: Timepoint (hr) Value: N/A
  misc_feature: MA Experiment 20000573 PARAMETER Experiment Name: At_100uM_ABA_Mutants__P Parameter: Tissue Value: Whole Plant
  misc_feature: MA Experiment 20000573 PARAMETER Experiment Name: At_100uM_ABA_Mutants__P Parameter: Treatment Value: None
  misc_feature: MA Experiment ID: 20001555 Result: Up-regulated in Transcription
  misc_feature: MA Experiment 20001555 PARAMETER Experiment Name: At_Drought_Soil_Dry_P Parameter: Age (day) Value: 24
  misc_feature: MA Experiment 20001555 PARAMETER Experiment Name: At_Drought_Soil_Dry_P Parameter: Organism Value: A. thaliana
  misc_feature: MA Experiment 20001555 PARAMETER Experiment Name: At_Drought_Soil_Dry_P Parameter: Plant Line Value: WS
  misc_feature: MA Experiment 20001555 PARAMETER Experiment Name: At_Drought_Soil_Dry_P Parameter: Post Timepoint (hr) Value: None
  misc_feature: MA Experiment 20001555 PARAMETER Experiment Name: At_Drought_Soil_Dry_P Parameter: Post-Treatment Value: None
  misc_feature: MA Experiment 20001555 PARAMETER Experiment Name: At_Drought_Soil_Dry_P Parameter: Timepoint (day) Value: 10
  misc_feature: MA Experiment 20001555 PARAMETER Experiment Name: At_Drought_Soil_Dry_P Parameter: Treatment Value: Drought vs. No Drought
  misc_feature: MA Experiment ID: 20001559 Result: Up-regulated in Transcription
  misc_feature: MA Experiment 20001559 PARAMETER Experiment Name: At_Drought_Soil_Dry_P Parameter: Age (day) Value: 28
  misc_feature: MA Experiment 20001559 PARAMETER Experiment Name: At_Drought_Soil_Dry_P Parameter: Organism Value: A. thaliana
  misc_feature: MA Experiment 20001559 PARAMETER Experiment Name: At_Drought_Soil_Dry_P Parameter: Plant Line Value: WS
  misc_feature: MA Experiment 20001559 PARAMETER Experiment Name: At_Drought_Soil_Dry_P Parameter: Post Timepoint (hr) Value: 29
  misc_feature: MA Experiment 20001559 PARAMETER Experiment Name: At_Drought_Soil_Dry_P Parameter: Post-Treatment Value: Re-Water vs. No Drought
  misc_feature: MA Experiment 20001559 PARAMETER Experiment Name: At_Drought_Soil_Dry_P Parameter: Timepoint (day) Value: 14
  misc_feature: MA Experiment 20001559 PARAMETER Experiment Name: At_Drought_Soil_Dry_P Parameter: Treatment Value: Drought vs. No Drought
  misc_feature: MA Experiment ID: 20001904 Result: Up-regulated in Transcription
  misc_feature: MA Experiment 20001904 PARAMETER Experiment Name: At_Drought_Reproduction_P Parameter: Age (day) Value: 37
  misc_feature: MA Experiment 20001904 PARAMETER Experiment Name: At_Drought_Reproduction_P Parameter: Organism Value: A. thaliana
  misc_feature: MA Experiment 20001904 PARAMETER Experiment Name: At_Drought_Reproduction_P Parameter: Plant Line Value: WS
  misc_feature: MA Experiment 20001904 PARAMETER Experiment Name: At_Drought_Reproduction_P Parameter: Timepoint (day) Value: 7
  misc_feature: MA Experiment 20001904 PARAMETER Experiment Name: At_Drought_Reproduction_P Parameter: Tissue Value: Rosettes
  misc_feature: MA Experiment 20001904 PARAMETER Experiment Name: At_Drought_Reproduction_P Parameter: Treatment Value: Drought vs. No Drought
  misc_feature: MA Experiment ID: 20001905 Result: Up-regulated in Transcription
  misc_feature: MA Experiment 20001905 PARAMETER Experiment Name: At_Drought_Reproduction_P Parameter: Age (day) Value: 40
  misc_feature: MA Experiment 20001905 PARAMETER Experiment Name: At_Drought_Reproduction_P Parameter: Organism Value: A. thaliana
  misc_feature: MA Experiment 20001905 PARAMETER Experiment Name: At_Drought_Reproduction_P Parameter: Plant Line Value: WS
  misc_feature: MA Experiment 20001905 PARAMETER Experiment Name: At_Drought_Reproduction_P Parameter: Timepoint (day) Value: 10
  misc_feature: MA Experiment 20001905 PARAMETER Experiment Name: At_Drought_Reproduction_P Parameter: Tissue Value: Rosettes
  misc_feature: MA Experiment 20001905 PARAMETER Experiment Name: At_Drought_Reproduction_P Parameter: Treatment Value: Drought vs. No Drought
acacgaaacgattccgcttctccgcttccttcataaatatctcactcatcgtctctagattgttctttcacacgcaattttcatttctctcttaaccgtaaacgaatctctcttctcaaagttttattttctctctgcgatggctcaagaagatgttactgctgttgctactaacggtgctggtccggtggagacgcatcttgtcttcactgagttcaagcagatgttgctcgttgaagctcaaaaggtcggtgacgctgttactttctacaaatctgcttttggtgcgatcgagtctggtcattctctttaccctaagcgtaagcttgaccaagagcttcctcatgttctctcttctgagcttaatctcgctggctcttccttcgttgtttgcgacgtttcctctctccctggtttttctactgcgaaatcggaaggttcgggagtgacttttcttctcggaactaaggatgctgaagccgccgttgcgaaagctgttgacgccggagctgtgaaagtggaggttacggaggcagaagttgaactgggattcaaaggaaaagttacggatccttttggtgtcacttggatcttcgcggagaagaagaccgtgatcaccgacgagaacaaagaggtttagaatctgtcgtcggatctaattcttcgtcggtttctgaacaaaaaaaactatctattatcctaggtttatgcttttattttgtcttttgtggaatccggtaatcagtaaaccggatcgagtaggctaatgactttcggattctaatttcaccccttttgacaaactctaatcttggtgaaattgcatattaatctcgggct

SEQ ID NO: 103407 - protein, 166 aa, Arabidopsis thaliana; identical to SEQ ID NO: 21805
  peptide (1)..(166): Ceres Seq. ID no. 13612704
  misc_feature (40)..(151): Pfam Name: Glyoxalase/Bleomycin resistance Pfam Description: Glyoxalase/Bleomycin resistance
  misc_feature (1)..(166): Homolog of NCBI NO: 18422918 NR Description: expressed protein [Arabidopsis thaliana] gene_id:MJE7.12~unknown protein [Arabidopsis thaliana] unknown protein [Arabidopsis thaliana]
  misc_feature (21)..(151): Homolog of NCBI NO: 28565534 NR Description: early tobacco anther 1 [Nicotiana tabacum]
  misc_feature (40)..(155): Homolog of NCBI NO: 16263553 NR Description: Hypothetical protein [Sinorhizobium meliloti]
  misc_feature (40)..(162): Homolog of NCBI NO: 26990157 NR Description: glyoxalase family protein [Pseudomonas putida >gi|24985094|gb|AAN69046.1|AE016537_4 glyoxalase family protein

SEQ ID NO: 103408 - protein, 138 aa, Arabidopsis thaliana; identical to SEQ ID NO: 21806
  peptide (1)..(138): Ceres Seq. ID no. 13612705
  misc_feature (12)..(123): Pfam Name: Glyoxalase/Bleomycin resistance Pfam Description: Glyoxalase/Bleomycin resistance
  misc_feature (1)..(138): Homolog of NCBI NO: 18422918 NR Description: expressed protein [Arabidopsis thaliana] gene_id:MJE7.12~unknown protein [Arabidopsis thaliana] unknown protein [Arabidopsis thaliana]
  misc_feature (1)..(123): Homolog of NCBI NO: 28565534 NR Description: early tobacco anther 1 [Nicotiana tabacum]
  misc_feature (12)..(127): Homolog of NCBI NO: 16263553 NR Description: Hypothetical protein [Sinorhizobium meliloti]
  misc_feature (12)..(134): Homolog of NCBI NO: 26990157 NR Description: glyoxalase family protein [Pseudomonas putida >gi|24985094|gb|AAN69046.1|AE016537_4 glyoxalase family protein

SEQ ID NO: 103409 - protein, 98 aa, Arabidopsis thaliana
  peptide (1)..(98): Ceres Seq. ID no. 13612706
MLLLLLLTVLVRWRRILSSLSSSRCCSLKLKRSVTLLLSTNLLLVRSSLVILFTLSVSLTKSFLMFSLLSLISLALPSLFATFPLSLVFLLRNRKVRE

SEQ ID NO: 103410 - DNA, 1246 bp, Arabidopsis thaliana
  misc_feature (1)..(1246): Ceres Seq. ID no. 13612717
  misc_feature: MA Experiment ID: 108434 Result: Down-regulated in Transcription
  misc_feature: MA Experiment 108434 PARAMETER Experiment Name: At_Root_Tips_cDNA_P Parameter: Tissue Value: Root Tips
  misc_feature: MA Experiment ID: 108488 Result: Up-regulated in Transcription
  misc_feature: MA Experiment ID: 108577 Result: Down-regulated in Transcription
  misc_feature: MA Experiment 108577 PARAMETER Experiment Name: At_42deg_Heat_cDNA_P Parameter: Temperature (deg C) Value: 42 vs. 22
  misc_feature: MA Experiment 108577 PARAMETER Experiment Name: At_42deg_Heat_cDNA_P Parameter: Timepoint (hr) Value: 6
  misc_feature: MA Experiment 108577 PARAMETER Experiment Name: At_42deg_Heat_cDNA_P Parameter: Tissue Value: Aerial
  misc_feature: MA Experiment ID: 108595 Result: Down-regulated in Transcription
  misc_feature: MA Experiment 108595 PARAMETER Experiment Name: At_Ler-pi_Ovule_cDNA_P Parameter: Plant Line Value: null
  misc_feature: MA Experiment ID: 20000185 Result: Down-regulated in Transcription
  misc_feature: MA Experiment 20000185 PARAMETER Experiment Name: At_Roots__P Parameter: Age (day) Value: 7 vs. 21
  misc_feature: MA Experiment 20000185 PARAMETER Experiment Name: At_Roots__P Parameter: Organism Value: A. thaliana
  misc_feature: MA Experiment 20000185 PARAMETER Experiment Name: At_Roots__P Parameter: Tissue Value: Roots vs. Whole Plant
  misc_feature: MA Experiment ID: 20000439 Result: Down-regulated in Transcription
  misc_feature: MA Experiment 20000439 PARAMETER Experiment Name: At_Roots__P Parameter: Age (day) Value: 14 vs. 21
  misc_feature: MA Experiment 20000439 PARAMETER Experiment Name: At_Roots__P Parameter: Organism Value: A. thaliana
  misc_feature: MA Experiment 20000439 PARAMETER Experiment Name: At_Roots__P Parameter: Tissue Value: Roots vs. Whole Plant
aaaaaatctcacaatcgttttttgcttatctctttcaatggacacctctctctcccaccacggatctctcccgtttcccccatcgcgccgcaatttcgttaaacaaaaccgcggcggcgattgcgtttttctcccctcgcgtcgtaagttccgatacgattcgttggtggtggtttccgctgcgtcttcgggacagagcatcgacgcgcctctagttccacggtcgcctcagggaaggtttctaagttccgtcttggtgaaaaaacggcagctctttcatttcgccgtcgctgatttgcttaaacagctcgctgatgataaggaagcttccttatctcgtatgttccttagttatggttccgatgaagcttccctccacagaaggatagctcaacttaaggagagtgattgccaaattgcaattgaagacataatgtacatgttgatcttgtacaaattctcagagataagagtgcctcttgttccaaagcttcccagttgcatttacaacggaagactcgagatctcgccttcgaaagactgggaacttgagtcaatccatagctttgacgttcttgaactcatcaaagaacatagtaacgcagtcatcagtttaagagtgaattcgagtttgactgacgattgtgcgacaacggagatagataagaatcgtctcagtaaagtatacacagcttcggtcttatatggatactttttaaaatctgcttctcttagacaccaactcgaatgctcattatcacaacaccatggaagtttcactaagcaactgaggcattacatttctgagttcgatcccaagatattgcggagatgcgcaaaaccaaggtcacatgaagcaaaaagcctgatagaaaagcagagtttagctctttttggtcctgaggaaagcagcaaagagagcattgtgacatcgttttctagcctgaagaggttgcttcttgaggctgtggcgtttggtacgtttctatgggacacagaggagtatgtagatggcgcgtttaagctcaaggagaatgagaatgcagaggaagaaacaaatagcagtgtttgaagtatgtatgaaccagtttgctagaagaaaacttgaatatcttttttggtggacattgcatataatatatagattaaatcagggtcaatggctatatgaaattatttttgtctatagtttgagtaatcatatgtatagtgtataatggatgatttaatagagagattggttttg

SEQ ID NO: 103411 - protein, 356 aa, Arabidopsis thaliana
  peptide (1)..(356): Ceres Seq. ID no. 13612718
  misc_feature (23)..(345): Pfam Name: Protein of unknown function (DUF760) Pfam Description: Protein of unknown function (DUF760)
  misc_feature (13)..(356): Homolog of NCBI NO: 15239021 NR Description: expressed protein [Arabidopsis thaliana] gb|AAF02142.1~gene_id:K15N18.6~strong similarity to unknown [Arabidopsis thaliana] >gi|28392972|gb|AAO41921.1| unknown
  misc_feature (13)..(258): Homolog of NCBI NO: 18397912 NR Description: expressed protein [Arabidopsis thaliana] unknown protein [Arabidopsis thaliana] unknown protein [Arabidopsis thaliana]
  misc_feature (261)..(351): Homolog of NCBI NO: 18397912 NR Description: expressed protein [Arabidopsis thaliana] unknown protein [Arabidopsis thaliana] unknown protein [Arabidopsis thaliana]
  misc_feature (46)..(249): Homolog of NCBI NO: 17064820 NR Description: Unknown protein [Arabidopsis thaliana]
  misc_feature (46)..(249): Homolog of NCBI NO: 18401645 NR Description: expressed protein [Arabidopsis thaliana] gb|AAF02142.1~gene_id:MEB5.2~similar to unknown protein thaliana] >gi|20466177|gb|AAM20406.1| unknown protein
  misc_feature (262)..(340): Homolog of NCBI NO: 17064820 NR Description: Unknown protein [Arabidopsis thaliana]
  misc_feature (262)..(340): Homolog of NCBI NO: 18401645 NR Description: expressed protein [Arabidopsis thaliana] gb|AAF02142.1~gene_id:MEB5.2~similar to unknown protein thaliana] >gi|20466177|gb|AAM20406.1| unknown protein
  misc_feature (38)..(249): Homolog of NCBI NO: 15221185 NR Description: expressed protein [Arabidopsis thaliana] T1N15.6 [Arabidopsis thaliana] >gi|18086465|gb|AAL57686.1| [Arabidopsis thaliana] >gi|24030356|gb|AAN41342.1| unknown
  misc_feature (262)..(340): Homolog of NCBI NO: 15221185 NR Description: expressed protein [Arabidopsis thaliana] T1N15.6 [Arabidopsis thaliana] >gi|18086465|gb|AAL57686.1| [Arabidopsis thaliana] >gi|24030356|gb|AAN41342.1| unknown
  misc_feature (51)..(249): Homolog of NCBI NO: 32489097 NR Description: OSJNBa0093F12.3 [Oryza sativa (japonica
KNLTIVFCLSLSMDTSLSHHGSLPFPPSRRNFVKQNRGGDCVFLPSRRKFRYDSLVVVSAASSGQSIDAPLVPRSPQGRFLSSVLVKKRQLFHFAVADLLKQLADDKEASLSRMFLSYGSDEASLHRRIAQLKESDCQIAIEDIMYMLILYKFSEIRVPLVPKLPSCIYNGRLEISPSKDWELESIHSFDVLELIKEHSNAVISLRVNSSLTDDCATTEIDKNRLSKVYTASVLYGYFLKSASLRHQLECSLSQHHGSFTKQLRHYISEFDPKILRRCAKPRSHEAKSLIEKQSLALFGPEESSKESIVTSFSSLKRLLLEAVAFGTFLWDTEEYVDGAFKLKENENAEEETNSSV

SEQ ID NO: 103412 - protein, 344 aa, Arabidopsis thaliana; identical to SEQ ID NO: 27936
  peptide (1)..(344): Ceres Seq. ID no. 13612719
  misc_feature (11)..(333): Pfam Name: Protein of unknown function (DUF760) Pfam Description: Protein of unknown function (DUF760)
  misc_feature (1)..(344): Homolog of NCBI NO: 15239021 NR Description: expressed protein [Arabidopsis thaliana] gb|AAF02142.1~gene_id:K15N18.6~strong similarity to unknown [Arabidopsis thaliana] >gi|28392972|gb|AAO41921.1| unknown
  misc_feature (1)..(246): Homolog of NCBI NO: 18397912 NR Description: expressed protein [Arabidopsis thaliana] unknown protein [Arabidopsis thaliana] unknown protein [Arabidopsis thaliana]
  misc_feature (249)..(339): Homolog of NCBI NO: 18397912 NR Description: expressed protein [Arabidopsis thaliana] unknown protein [Arabidopsis thaliana] unknown protein [Arabidopsis thaliana]
  misc_feature (34)..(237): Homolog of NCBI NO: 17064820 NR Description: Unknown protein [Arabidopsis thaliana]
  misc_feature (34)..(237): Homolog of NCBI NO: 18401645 NR Description: expressed protein [Arabidopsis thaliana] gb|AAF02142.1~gene_id:MEB5.2~similar to unknown protein thaliana] >gi|20466177|gb|AAM20406.1| unknown protein
  misc_feature (250)..(328): Homolog of NCBI NO: 17064820 NR Description: Unknown protein [Arabidopsis thaliana]
  misc_feature (250)..(328): Homolog of NCBI NO: 18401645 NR Description: expressed protein [Arabidopsis thaliana] gb|AAF02142.1~gene_id:MEB5.2~similar to unknown protein thaliana] >gi|20466177|gb|AAM20406.1| unknown protein
  misc_feature (26)..(237): Homolog of NCBI NO: 15221185 NR Description: expressed protein [Arabidopsis thaliana] T1N15.6 [Arabidopsis thaliana] >gi|18086465|gb|AAL57686.1| [Arabidopsis thaliana] >gi|24030356|gb|AAN41342.1| unknown
  misc_feature (250)..(328): Homolog of NCBI NO: 15221185 NR Description: expressed protein [Arabidopsis thaliana] T1N15.6 [Arabidopsis thaliana] >gi|18086465|gb|AAL57686.1| [Arabidopsis thaliana] >gi|24030356|gb|AAN41342.1| unknown
  misc_feature (39)..(237): Homolog of NCBI NO: 32489097 NR Description: OSJNBa0093F12.3 [Oryza sativa (japonica

SEQ ID NO: 103413 - protein, 243 aa, Arabidopsis thaliana; identical to SEQ ID NO: 27937
  peptide (1)..(243): Ceres Seq. ID no. 13612720
  misc_feature (1)..(232): Pfam Name: Protein of unknown function (DUF760) Pfam Description: Protein of unknown function (DUF760)
  misc_feature (1)..(243): Homolog of NCBI NO: 15239021 NR Description: expressed protein [Arabidopsis thaliana] gb|AAF02142.1~gene_id:K15N18.6~strong similarity to unknown [Arabidopsis thaliana] >gi|28392972|gb|AAO41921.1| unknown
  misc_feature (1)..(145): Homolog of NCBI NO: 18397912 NR Description: expressed protein [Arabidopsis thaliana] unknown protein [Arabidopsis thaliana] unknown protein [Arabidopsis thaliana]
  misc_feature (148)..(238): Homolog of NCBI NO: 18397912 NR Description: expressed protein [Arabidopsis thaliana] unknown protein [Arabidopsis thaliana] unknown protein [Arabidopsis thaliana]
  misc_feature (1)..(136): Homolog of NCBI NO: 17064820 NR Description: Unknown protein [Arabidopsis thaliana]
  misc_feature (1)..(136): Homolog of NCBI NO: 18401645 NR Description: expressed protein [Arabidopsis thaliana] gb|AAF02142.1~gene_id:MEB5.2~similar to unknown protein thaliana] >gi|20466177|gb|AAM20406.1| unknown protein
  misc_feature (149)..(227): Homolog of NCBI NO: 17064820 NR Description: Unknown protein [Arabidopsis thaliana]
  misc_feature (149)..(227): Homolog of NCBI NO: 18401645 NR Description: expressed protein [Arabidopsis thaliana] gb|AAF02142.1~gene_id:MEB5.2~similar to unknown protein thaliana] >gi|20466177|gb|AAM20406.1| unknown protein
  misc_feature (1)..(136): Homolog of NCBI NO: 15221185 NR Description: expressed protein [Arabidopsis thaliana] T1N15.6 [Arabidopsis thaliana] >gi|18086465|gb|AAL57686.1| [Arabidopsis thaliana] >gi|24030356|gb|AAN41342.1| unknown
  misc_feature (149)..(227): Homolog of NCBI NO: 15221185 NR Description: expressed protein [Arabidopsis thaliana] T1N15.6 [Arabidopsis thaliana] >gi|18086465|gb|AAL57686.1| [Arabidopsis thaliana] >gi|24030356|gb|AAN41342.1| unknown
  misc_feature (1)..(136): Homolog of NCBI NO: 32489097 NR Description: OSJNBa0093F12.3 [Oryza sativa (japonica

SEQ ID NO: 103414 - DNA, 952 bp, Arabidopsis thaliana
  misc_feature (1)..(952): Ceres Seq. ID no. 13612725
  misc_feature: MA Experiment ID: 108434 Result: Up-regulated in Transcription
  misc_feature: MA Experiment 108434 PARAMETER Experiment Name: At_Root_Tips_cDNA_P Parameter: Tissue Value: Root Tips
  misc_feature: MA Experiment ID: 108461 Result: Down-regulated in Transcription
  misc_feature: MA Experiment 108461 PARAMETER Experiment Name: At_Germinating_Seeds_cDNA_P Parameter: Age (day) Value: 1 vs. 0
  misc_feature: MA Experiment 108461 PARAMETER Experiment Name: At_Germinating_Seeds_cDNA_P Parameter: Tissue Value: Germinating Seeds
  misc_feature: MA Experiment ID: 108462 Result: Down-regulated in Transcription
  misc_feature: MA Experiment 108462 PARAMETER Experiment Name: At_Germinating_Seeds_cDNA_P Parameter: Age (day) Value: 2 vs. 0
  misc_feature: MA Experiment 108462 PARAMETER Experiment Name: At_Germinating_Seeds_cDNA_P Parameter: Tissue Value: Germinating Seeds
  misc_feature: MA Experiment ID: 108463 Result: Down-regulated in Transcription
  misc_feature: MA Experiment 108463 PARAMETER Experiment Name: At_Germinating_Seeds_cDNA_P Parameter: Age (day) Value: 3 vs. 0
  misc_feature: MA Experiment 108463 PARAMETER Experiment Name: At_Germinating_Seeds_cDNA_P Parameter: Tissue Value: Germinating Seeds
  misc_feature: MA Experiment ID: 108464 Result: Down-regulated in Transcription
  misc_feature: MA Experiment 108464 PARAMETER Experiment Name: At_Germinating_Seeds_cDNA_P Parameter: Age (day) Value: 4 vs. 0
  misc_feature: MA Experiment 108464 PARAMETER Experiment Name: At_Germinating_Seeds_cDNA_P Parameter: Tissue Value: Germinating Seeds
  misc_feature: MA Experiment ID: 20000173 Result: Down-regulated in Transcription
  misc_feature: MA Experiment 20000173 PARAMETER Experiment Name: At_42deg_Heat_P Parameter: Age (day) Value: 14
  misc_feature: MA Experiment 20000173 PARAMETER Experiment Name: At_42deg_Heat_P Parameter: Organism Value: A. thaliana
  misc_feature: MA Experiment 20000173 PARAMETER Experiment Name: At_42deg_Heat_P Parameter: Plant Line Value: WS
  misc_feature: MA Experiment 20000173 PARAMETER Experiment Name: At_42deg_Heat_P Parameter: Temperature (deg C) Value: 42 vs. 22
  misc_feature: MA Experiment 20000173 PARAMETER Experiment Name: At_42deg_Heat_P Parameter: Timepoint (hr) Value: 6
  misc_feature: MA Experiment 20000173 PARAMETER Experiment Name: At_42deg_Heat_P Parameter: Tissue Value: Aerial
  misc_feature: MA Experiment ID: 20000184 Result: Down-regulated in Transcription
  misc_feature: MA Experiment 20000184 PARAMETER Experiment Name: At_Shoots__P Parameter: Age (day) Value: 7
  misc_feature: MA Experiment 20000184 PARAMETER Experiment Name: At_Shoots__P Parameter: Tissue Value: Shoots vs. Whole Plant
aagtttctgagatttccggatttagatttagggttttgtaactttggagagctcaagttcggtttcgttcatctccctcttaattcactttaattcagggtttagggtttcatttattttgttttccccaattcgatatgtattctgatctagtggtggctgaaactaaaatcagcaaaacgttcaagaaccgtctcaatggtggttccggtgacttctcttctcgcggcaaacaacaacaagtcacaaggaagagaggaaggcaagatgatgataagtgggagcatgatcttttcgaagacgatgacgagcctcggctttcaaaacgtagagttgaccctaaagatcttcgcttgaagctccaaaagaaacgtcatggctcgcaaattggtggacgagtatttagtgtaagcgtggcggatctacgagataagttatccaggacagtgaatccacaaacaaagaacagtaaaagggaggctgttagaccagccataaagaaggtttcagtgggaaccaaacccgagactagagcggctccgaatagagctaccaagaaggatccacagcagaatgatgcatcggttgatagcttcctggaatcattgggtctcgagaaatattcgactgcatttcaagtggaagaagttgatatggatgctcttaggcatatgacagatgatgacctcaaagctttgctcataccaatgggacctaggaagaagatacttcttgctttgggagataaccgtggatagtccagcttcgagcttaggtgcatgatgatacacatctcggatattgtcagaaagatgctgcattttgacttttcattgtctttttatctttctcatatgtatctcaagagacaacaagtagttagagttttgagattaaacagttgtaaccttttaacatagagagacaagaggagcaatgttggaatgtgttt

SEQ ID NO: 103415 - protein, 206 aa, Arabidopsis thaliana
  peptide (1)..(206): Ceres Seq. ID no. 13612726
  misc_feature (143)..(205): Pfam Name: SAM domain (Sterile alpha motif) Pfam Description: SAM domain (Sterile alpha motif)
  misc_feature (1)..(206): Homolog of NCBI NO: 30695517 NR Description: expressed protein [Arabidopsis thaliana]
  misc_feature (1)..(202): Homolog of NCBI NO: 18397861 NR Description: expressed protein [Arabidopsis thaliana] unknown protein [Arabidopsis thaliana] AT3g07170/T1B9_17 [Arabidopsis thaliana]
  misc_feature (1)..(191): Homolog of NCBI NO: 39546279 NR Description: OSJNBa0083D01.12 [Oryza sativa (japonica
  misc_feature (149)..(201): Homolog of NCBI NO: 22330538 NR Description: expressed protein [Arabidopsis thaliana]
  misc_feature (149)..(201): Homolog of NCBI NO: 38345636 NR Description: OSJNBb0048E02.6 [Oryza sativa (japonica
MYSDLVVAETKISKTFKNRLNGGSGDFSSRGKQQQVTRKRGRQDDDKWEHDLFEDDDEPRLSKRRVDPKDLRLKLQKKRHGSQIGGRVFSVSVADLRDKLSRTVNPQTKNSKREAVRPAIKKVSVGTKPETRAAPNRATKKDPQQNDASVDSFLESLGLEKYSTAFQVEEVDMDALRHMTDDDLKALLIPMGPRKKILLALGDNRG

SEQ ID NO: 103416 - DNA, 2870 bp, Arabidopsis thaliana
  misc_feature (1)..(2870): Ceres Seq. ID no. 13612727
  misc_feature: MA Experiment ID: 20000439 Result: Up-regulated in Transcription
  misc_feature: MA Experiment 20000439 PARAMETER Experiment Name: At_Roots__P Parameter: Age (day) Value: 14 vs. 21
  misc_feature: MA Experiment 20000439 PARAMETER Experiment Name: At_Roots__P Parameter: Organism Value: A. thaliana
  misc_feature: MA Experiment 20000439 PARAMETER Experiment Name: At_Roots__P Parameter: Tissue Value: Roots vs. Whole Plant
aatatagaacaattagttatatatgttcttcagatttcaatcaggaaattagaacatgctcttttgggttttgctcagtagtttctgtgtgttttgtttctccagtccagatggtttcttgagcttatcatgtggcggctcaagttacaccgctgcttataacatctcatgggtttcagacaacgattatatcgaaacaggtaacactaccacggttacttacgccgaggggaattctacttccagtgttcccatcagattattcccggatcctcaaggtcgccaatgttacaagttacctgtgaggaaagacttgtcttcagttctgattcgtgctacattcgtttatagaaactatgatagccagaatagtcctccagcatttcatgtctctcttggaaggagaatcactagtactgttgatcttagaaccaatgatccttggattgaagagttagtttggccagtcaacaatgattctcttttgctttgcttgcttgcggttaaaggaagaggtattccggttatctcttctctagaagtacggccacttcctttaggttcttacaaatacagcctggagggttcaccagatataattctcaggagaagttaccgaatcaatagcggatacacaaatgggactatccggtatccttcagatccatttgatcgaatatgggatccggatcaaagttattcaccgtttcacgcctcttggagcttcaatggactcacaaaattgaattccttcaatattactgagaatccaccagcttctgttcttaagacagcaagaattcttgctcgcaaagaaagtctttcatatactctttctctacatacaccaggggactactacattatcctctactttgctgggatactctcactctccccttcttttagtgtgacgatcaatgatgaagtcaaacaatctgattacaccgtaactagctcagaagctggtaccttgtactttacgcaaaaaggaatcagtaagttaaacatcaccctcagaaaaatcaagttcaatcctcaagtgagtgctcttgaggtatatgaaatcctccaaatccctcctgaagcttcttctaccacagtttcggcacttaaagtcatagagcaatttaccgggcaagaccttggatggcaagacgacccatgcacaccgcttccttggaaccacatcgaatgtgaaggaaaccgtgttacatcattgttcctttcaaaaatcaacctgaggtccattagtccaacattcggagacttgctcgatctcaaaacactcgacttgcataatacatcacttacaggagcaatacagaatgtaggcagccttaaggatctccagaaactgaatttgagcttcaatcagttagaatcttttggctccgagctggaagatctggttaaccttgaagttctggacctgcaaaacaacagcttacaaggatcagttcctgaaacattaggaaagctgaagaaacttcgtctcctgaatctggaaaacaataacttagtaggtcccttgccacagtctcttaacataacgggtctggaagtcaggataacgggaaatccatgcctttcgttctcttcaatatcatgcaacaatgtgtcttcaacaattgacacaccacaagtcactatccctatcaataagaaacaaagaaaacagaaccgtatagcgatcttgcttggagtttctggtggagccttgtttgccacctttcttgtctttgttttcatgtcgatcttcacgaggagacagagaaacaaagagagagatataaccagagcacaactgaaaatgcagaactggaacgcttcaagaatcttttctcacaaagagatcaagtcagctactagaaatttcaaggaagtgattggtcgtggaagttttggagctgtataccgtggaaaactaccagatggaaaacaagttgcggtcaaagtgcgatttgatagaactcaacttggagctgattctttcatcaatgaggtgcaccttttgtctcagatccgccaccaaaatctagtttcatttgagggcttctgctatgaaccaaaacgtcaaatactggtgtatgagtatctgtctggtggatccttagctgatcacctttacggtccacgtagcaaaaggcattcattgaactgggtttcaagactaaaagttgctgttgatgctgcaaaaggattggactacctgcataatggaagtgagccgagaattatacatcgggatgtaaagagcagtaacatacttttagacaaggatatgaacgcgaaagtttctgattttggcctgtcaaaacaatttacaaaagcagatgcatctcatattactactgttgttaaaggcaccgcaggctaccttgaccccgaatattactctaccctgcagctgacagagaaaagtgatgtctatagctttggtgtggttctgttggagcttatctgtggaagagaacccttaagtcactcaggatcaccagattcgtttaacttggtcttatgggctaggccaaacttacaagcaggagcttttgagattgtggatgatatcttgaaggagacatttgatccagcgagcatgaaaaaagctgcttcgattgctataagatgtgtgggaagagatgcatctggaagaccgtctatcgccgaagttttgactaaactgaaagaagcgtacagtcttcaactctcatatctagctgcttcagcacatacagactgataacacatcacaaacaagagtaaatacataacttgtattatttttttttgtttttccgtttgtgttacatatatttgtaatccaactgaaaatgtatttactcttatactaactacattttatcatt

SEQ ID NO: 103417 - protein, 895 aa, Arabidopsis thaliana
  peptide (1)..(895): Ceres Seq. ID no. 13612728
  misc_feature (20)..(487): Homolog of NCBI NO: 25387148 NR Description: probable protein kinase [imported] - Arabidopsis >gi|9802795|gb|AAF99864.1|AC015448_14 Putative protein kinase
  misc_feature (432)..(895): Homolog of NCBI NO: 25387148 NR Description: probable protein kinase [imported] - Arabidopsis >gi|9802795|gb|AAF99864.1|AC015448_14 Putative protein kinase
  misc_feature (2)..(487): Homolog of NCBI NO: 15222042 NR Description: leucine rich repeat protein kinase, putative
  misc_feature (435)..(886): Homolog of NCBI NO: 15222042 NR Description: leucine rich repeat protein kinase, putative
  misc_feature (7)..(442): Homolog of NCBI NO: 9758831 NR Description: receptor-like protein kinase [Arabidopsis
  misc_feature (435)..(879): Homolog of NCBI NO: 9758831 NR Description: receptor-like protein kinase [Arabidopsis
  misc_feature (1)..(487): Homolog of NCBI NO: 11072027 NR Description: F12A21.14 [Arabidopsis thaliana]
  misc_feature (434)..(884): Homolog of NCBI NO: 11072027 NR Description: F12A21.14 [Arabidopsis thaliana]
  misc_feature (2)..(489): Homolog of NCBI NO: 15238489 NR Description: leucine rich repeat protein kinase, putative
  misc_feature (435)..(879): Homolog of NCBI NO: 15238489 NR Description: leucine rich repeat protein kinase, putative
MLFWVLLSSFCVFCFSSPDGFLSLSCGGSSYTAAYNISWVSDNDYIETGNTTTVTYAEGNSTSSVPIRLFPDPQGRQCYKLPVRKDLSSVLIRATFVYRNYDSQNSPPAFHVSLGRRITSTVDLRTNDPWIEELVWPVNNDSLLLCLLAVKGRGIPVISSLEVRPLPLGSYKYSLEGSPDIILRRSYRINSGYTNGTIRYPSDPFDRIWDPDQSYSPFHASWSFNGLTKLNSFNITENPPASVLKTARILARKESLSYTLSLHTPGDYYIILYFAGILSLSPSFSVTINDEVKQSDYTVTSSEAGTLYFTQKGISKLNITLRKIKFNPQVSALEVYEILQIPPEASSTTVSALKVIEQFTGQDLGWQDDPCTPLPWNHIECEGNRVTSLFLSKINLRSISPTFGDLLDLKTLDLHNTSLTGAIQNVGSLKDLQKLNLSFNQLESFGSELEDLVNLEVLDLQNNSLQGSVPETLGKLKKLRLLNLENNNLVGPLPQSLNITGLEVRITGNPCLSFSSISCNNVSSTIDTPQVTIPINKKQRKQNRIAILLGVSGGALFATFLVFVFMSIFTRRQRNKERDITRAQLKMQNWNASRIFSHKEIKSATRNFKEVIGRGSFGAVYRGKLPDGKQVAVKVRFDRTQLGADSFINEVHLLSQIRHQNLVSFEGFCYEPKRQILVYEYLSGGSLADHLYGPRSKRHSLNWVSRLKVAVDAAKGLDYLHNGSEPRIIHRDVKSSNILLDKDMNAKVSDFGLSKQFTKADASHITTVVKGTAGYLDPEYYSTLQLTEKSDVYSFGVVLLELICGREPLSHSGSPDSFNLVLWARPNLQAGAFEIVDDILKETFDPASMKKAASIAIRCVGRDASGRPSIAEVLTKLKEAYSLQLSYLAASAHTD

SEQ ID NO: 103418 - DNA, 1595 bp, Arabidopsis thaliana
  misc_feature (1)..(1595): Ceres Seq. ID no. 13612737
  misc_feature: MA Experiment ID: 108434 Result: Down-regulated in Transcription
  misc_feature: MA Experiment 108434 PARAMETER Experiment Name: At_Root_Tips_cDNA_P Parameter: Tissue Value: Root Tips
  misc_feature: MA Experiment ID: 108462 Result: Up-regulated in Transcription
  misc_feature: MA Experiment 108462 PARAMETER Experiment Name: At_Germinating_Seeds_cDNA_P Parameter: Age (day) Value: 2 vs. 0
  misc_feature: MA Experiment 108462 PARAMETER Experiment Name: At_Germinating_Seeds_cDNA_P Parameter: Tissue Value: Germinating Seeds
  misc_feature: MA Experiment ID: 108463 Result: Up-regulated in Transcription
  misc_feature: MA Experiment 108463 PARAMETER Experiment Name: At_Germinating_Seeds_cDNA_P Parameter: Age (day) Value: 3 vs. 0
  misc_feature: MA Experiment 108463 PARAMETER Experiment Name: At_Germinating_Seeds_cDNA_P Parameter: Tissue Value: Germinating Seeds
  misc_feature: MA Experiment ID: 108573 Result: Up-regulated in Transcription
  misc_feature: MA Experiment 108573 PARAMETER Experiment Name: At_Drought_cDNA_P Parameter: Timepoint (hr) Value: 6
  misc_feature: MA Experiment 108573 PARAMETER Experiment Name: At_Drought_cDNA_P Parameter: Tissue Value: Aerial
  misc_feature: MA Experiment 108573 PARAMETER Experiment Name: At_Drought_cDNA_P Parameter: Treatment Value: Drought vs. No Drought
  misc_feature: MA Experiment ID: 108576 Result: Down-regulated in Transcription
  misc_feature: MA Experiment 108576 PARAMETER Experiment Name: At_42deg_Heat_cDNA_P Parameter: Temperature (deg C) Value: 42 vs. 22
  misc_feature: MA Experiment 108576 PARAMETER Experiment Name: At_42deg_Heat_cDNA_P Parameter: Timepoint (hr) Value: 1
  misc_feature: MA Experiment 108576 PARAMETER Experiment Name: At_42deg_Heat_cDNA_P Parameter: Tissue Value: Aerial
  misc_feature: MA Experiment ID: 108577 Result: Down-regulated in Transcription
  misc_feature: MA Experiment 108577 PARAMETER Experiment Name: At_42deg_Heat_cDNA_P Parameter: Temperature (deg C) Value: 42 vs. 22
  misc_feature: MA Experiment 108577 PARAMETER Experiment Name: At_42deg_Heat_cDNA_P Parameter: Timepoint (hr) Value: 6
  misc_feature: MA Experiment 108577 PARAMETER Experiment Name: At_42deg_Heat_cDNA_P Parameter: Tissue Value: Aerial
  misc_feature: MA Experiment ID: 108595 Result: Down-regulated in Transcription
  misc_feature: MA Experiment 108595 PARAMETER Experiment Name: At_Ler-pi_Ovule_cDNA_P Parameter: Plant Line Value: null
  misc_feature: MA Experiment ID: 20000030 Result: Down-regulated in Transcription
  misc_feature: MA Experiment 20000030 PARAMETER Experiment Name: At_CS6630_Roots_cDNA_P Parameter: Plant Line Value: CS6630 vs. WS
  misc_feature: MA Experiment 20000030 PARAMETER Experiment Name: At_CS6630_Roots_cDNA_P Parameter: Tissue Value: Roots
  misc_feature: MA Experiment ID: 20000069 Result: Down-regulated in Transcription
  misc_feature: MA Experiment 20000069 PARAMETER Experiment Name: At_100uM_ABA_Mutants_cDNA_P Parameter: Plant Line Value: CS23
  misc_feature: MA Experiment 20000069 PARAMETER Experiment Name: At_100uM_ABA_Mutants_cDNA_P Parameter: Timepoint (hr) Value: 6
  misc_feature: MA Experiment 20000069 PARAMETER Experiment Name: At_100uM_ABA_Mutants_cDNA_P Parameter: Tissue Value: Aerial
  misc_feature: MA Experiment 20000069 PARAMETER Experiment Name: At_100uM_ABA_Mutants_cDNA_P Parameter: Treatment Value: 100uM ABA vs. No Treatment
  misc_feature: MA Experiment ID: 20000070 Result: Down-regulated in Transcription
  misc_feature: MA Experiment 20000070 PARAMETER Experiment Name: At_100uM_ABA_Mutants_cDNA_P Parameter: Plant Line Value: CS24
  misc_feature: MA Experiment 20000070 PARAMETER Experiment Name: At_100uM_ABA_Mutants_cDNA_P Parameter: Timepoint (hr) Value: 6
  misc_feature: MA Experiment 20000070 PARAMETER Experiment Name: At_100uM_ABA_Mutants_cDNA_P Parameter: Tissue Value: Aerial
  misc_feature: MA Experiment 20000070 PARAMETER Experiment Name: At_100uM_ABA_Mutants_cDNA_P Parameter: Treatment Value: 100uM ABA vs. No Treatment
  misc_feature: MA Experiment ID: 20000071 Result: Down-regulated in Transcription
  misc_feature: MA Experiment 20000071 PARAMETER Experiment Name: At_100uM_ABA_Mutants_cDNA_P Parameter: Plant Line Value: CS8104
  misc_feature: MA Experiment 20000071 PARAMETER Experiment Name: At_100uM_ABA_Mutants_cDNA_P Parameter: Timepoint (hr) Value: 6
  misc_feature: MA Experiment 20000071 PARAMETER Experiment Name: At_100uM_ABA_Mutants_cDNA_P Parameter: Tissue Value: Aerial
  misc_feature: MA Experiment 20000071 PARAMETER Experiment Name: At_100uM_ABA_Mutants_cDNA_P Parameter: Treatment Value: 100uM ABA vs. No Treatment
  misc_feature: MA Experiment ID: 20000072 Result: Down-regulated in Transcription
  misc_feature: MA Experiment 20000072 PARAMETER Experiment Name: At_100uM_ABA_Mutants_cDNA_P Parameter: Plant Line Value: CS8105
  misc_feature: MA Experiment 20000072 PARAMETER Experiment Name: At_100uM_ABA_Mutants_cDNA_P Parameter: Timepoint (hr) Value: 6
  misc_feature: MA Experiment 20000072 PARAMETER Experiment Name: At_100uM_ABA_Mutants_cDNA_P Parameter: Tissue Value: Aerial
  misc_feature: MA Experiment 20000072 PARAMETER Experiment Name: At_100uM_ABA_Mutants_cDNA_P Parameter: Treatment Value: 100uM ABA vs. No Treatment
  misc_feature: MA Experiment ID: 20000086 Result: Down-regulated in Transcription
  misc_feature: MA Experiment 20000086 PARAMETER Experiment Name: At_100uM_ABA_Mutants_cDNA_P Parameter: Plant Line Value: CS22
  misc_feature: MA Experiment 20000086 PARAMETER Experiment Name: At_100uM_ABA_Mutants_cDNA_P Parameter: Timepoint (hr) Value: 6
  misc_feature: MA Experiment 20000086 PARAMETER Experiment Name: At_100uM_ABA_Mutants_cDNA_P Parameter: Tissue Value: Aerial
  misc_feature: MA Experiment 20000086 PARAMETER Experiment Name: At_100uM_ABA_Mutants_cDNA_P Parameter: Treatment Value: 100uM ABA vs. No Treatment
  misc_feature: MA Experiment ID: 20000087 Result: Down-regulated in Transcription
  misc_feature: MA Experiment 20000087 PARAMETER Experiment Name: At_100uM_ABA_Mutants_cDNA_P Parameter: Plant Line Value: WS
  misc_feature: MA Experiment 20000087 PARAMETER Experiment Name: At_100uM_ABA_Mutants_cDNA_P Parameter: Timepoint (hr) Value: 6
  misc_feature: MA Experiment 20000087 PARAMETER Experiment Name: At_100uM_ABA_Mutants_cDNA_P Parameter: Tissue Value: Aerial
  misc_feature: MA Experiment 20000087 PARAMETER Experiment Name: At_100uM_ABA_Mutants_cDNA_P Parameter: Treatment Value: 100uM ABA vs. No Treatment
  misc_feature: MA Experiment ID: 20000089 Result: Down-regulated in Transcription
  misc_feature: MA Experiment ID: 20000090 Result: Down-regulated in Transcription
  misc_feature: MA Experiment ID: 20000117 Result: Down-regulated in Transcription
  misc_feature: MA Experiment 20000117 PARAMETER Experiment Name: At_100uM_ABA_Mutants_cDNA_P Parameter: Plant Line Value: Columbia
  misc_feature: MA Experiment 20000117 PARAMETER Experiment Name: At_100uM_ABA_Mutants_cDNA_P Parameter: Timepoint (hr) Value: 6
  misc_feature: MA Experiment 20000117 PARAMETER Experiment Name: At_100uM_ABA_Mutants_cDNA_P Parameter: Tissue Value: Aerial
  misc_feature: MA Experiment 20000117 PARAMETER Experiment Name: At_100uM_ABA_Mutants_cDNA_P Parameter: Treatment Value: 100uM ABA vs. No Treatment
  misc_feature: MA Experiment ID: 20000184 Result: Up-regulated in Transcription
  misc_feature: MA Experiment 20000184 PARAMETER Experiment Name: At_Shoots__P Parameter: Age (day) Value: 7
  misc_feature: MA Experiment 20000184 PARAMETER Experiment Name: At_Shoots__P Parameter: Tissue Value: Shoots vs. Whole Plant
  misc_feature: MA Experiment ID: 20000234 Result: Down-regulated in Transcription
  misc_feature: MA Experiment 20000234 PARAMETER Experiment Name: At_Siliques_P Parameter: Age (day) Value: 21
  misc_feature: MA Experiment 20000234 PARAMETER Experiment Name: At_Siliques_P Parameter: Organism Value: A. thaliana
  misc_feature: MA Experiment 20000234 PARAMETER Experiment Name: At_Siliques_P Parameter: Plant Line Value: WS
  misc_feature: MA Experiment 20000234 PARAMETER Experiment Name: At_Siliques_P Parameter: Tissue Value: Less Than 5mm Siliques vs. Whole Plant
  misc_feature: MA Experiment ID: 20000264 Result: Down-regulated in Transcription
  misc_feature: MA Experiment 20000264 PARAMETER Experiment Name: At_Open_Flower_P Parameter: Age (day) Value: 21
  misc_feature: MA Experiment 20000264 PARAMETER Experiment Name: At_Open_Flower_P Parameter: Plant Line Value: WS
  misc_feature: MA Experiment 20000264 PARAMETER Experiment Name: At_Open_Flower_P Parameter: Tissue Value: Open Flower vs. Whole Plant
  misc_feature: MA Experiment ID: 20000265 Result: Down-regulated in Transcription
  misc_feature: MA Experiment 20000265 PARAMETER Experiment Name: At_Open_Flower_P Parameter: Age (day) Value: 21
  misc_feature: MA Experiment 20000265 PARAMETER Experiment Name: At_Open_Flower_P Parameter: Plant Line Value: WS
  misc_feature: MA Experiment 20000265 PARAMETER Experiment Name: At_Open_Flower_P Parameter: Tissue Value: Closed Flower vs. Whole Plant
  misc_feature: MA Experiment ID: 20000286 Result: Down-regulated in Transcription
  misc_feature: MA Experiment 20000286 PARAMETER Experiment Name: At_Open_Flower_P Parameter: Age (day) Value: 21
  misc_feature: MA Experiment 20000286 PARAMETER Experiment Name: At_Open_Flower_P Parameter: Plant Line Value: WS
  misc_feature: MA Experiment 20000286 PARAMETER Experiment Name: At_Open_Flower_P Parameter: Tissue Value: Half Open vs. Whole Plant
  misc_feature: MA Experiment ID: 20000436 Result: Up-regulated in Transcription
  misc_feature: MA Experiment 20000436 PARAMETER Experiment Name: At_Drought_P Parameter: Age (day) Value: 7
  misc_feature: MA Experiment 20000436 PARAMETER Experiment Name: At_Drought_P Parameter: Organism Value: A. thaliana
  misc_feature: MA Experiment 20000436 PARAMETER Experiment Name: At_Drought_P Parameter: Plant Line Value: WS
  misc_feature: MA Experiment 20000436 PARAMETER Experiment Name: At_Drought_P Parameter: Timepoint (hr) Value: 12
  misc_feature: MA Experiment 20000436 PARAMETER Experiment Name: At_Drought_P Parameter: Tissue Value: Whole Plant
  misc_feature: MA Experiment 20000436 PARAMETER Experiment Name: At_Drought_P Parameter: Treatment Value: Drought vs. No Drought
  misc_feature: MA Experiment ID: 20000794 Result: Down-regulated in Transcription
  misc_feature: MA Experiment 20000794 PARAMETER Experiment Name: At_Petals_P Parameter: Age (day) Value: 23-25 days
  misc_feature: MA Experiment 20000794 PARAMETER Experiment Name: At_Petals_P Parameter: Plant Line Value: WS
  misc_feature: MA Experiment 20000794 PARAMETER Experiment Name: At_Petals_P Parameter: Tissue Value: Petals vs. Whole plant
  misc_feature: MA Experiment ID: 20001248 Result: Down-regulated in Transcription
  misc_feature: MA Experiment 20001248 PARAMETER Experiment Name: At_Far-red-induction_P Parameter: Age (day) Value: 7
  misc_feature: MA Experiment 20001248 PARAMETER Experiment Name: At_Far-red-induction_P Parameter: Light Value: Far-red vs. White
  misc_feature: MA Experiment 20001248 PARAMETER Experiment Name: At_Far-red-induction_P Parameter: Organism Value: A. thaliana
  misc_feature: MA Experiment 20001248 PARAMETER Experiment Name: At_Far-red-induction_P Parameter: Plant Line Value: Columbia
  misc_feature: MA Experiment 20001248 PARAMETER Experiment Name: At_Far-red-induction_P Parameter: Timepoint (hr) Value: 4
  misc_feature: MA Experiment 20001248 PARAMETER Experiment Name: At_Far-red-induction_P Parameter: Tissue Value: Whole Plant
  misc_feature: MA Experiment ID: 20001451 Result: Down-regulated in Transcription
  misc_feature: MA Experiment 20001451 PARAMETER Experiment Name: At_Far-red-induction_P Parameter: Age (day) Value: 7
  misc_feature: MA Experiment 20001451 PARAMETER Experiment Name: At_Far-red-induction_P Parameter: Light Value: Far-red vs. White
  misc_feature: MA Experiment 20001451 PARAMETER Experiment Name: At_Far-red-induction_P Parameter: Organism Value: A. thaliana
  misc_feature: MA Experiment 20001451 PARAMETER Experiment Name: At_Far-red-induction_P Parameter: Plant Line Value: Columbia
  misc_feature: MA Experiment 20001451 PARAMETER Experiment Name: At_Far-red-induction_P Parameter: Timepoint (hr) Value: 24
  misc_feature: MA Experiment 20001451 PARAMETER Experiment Name: At_Far-red-induction_P Parameter: Tissue Value: Whole Plant
agatcaaactcaaaacaaaatttgtttgttcgtttgatctttcttaaaaatatgaaaattaacatcagagattccaccatggtccggcctgccaccgagacaccaatcactaatctttggaactccaacgtcgaccttgtcatccccagattccatacccctagtgtctacttctacagacccaccggcgcttccaatttctttgaccctcaggtcatgaaggaagctctttccaaagcccttgtccctttttaccctatggctggtcgcttgaagagagacgatgatggtcgtattgagatcgattgtaacggtgctggtgttctcttcgttgtggctgatactccttctgttatcgatgattttggtgattttgctcctacccttaatctccgtcagcttattcccgaagttgatcactccgctggcattcactctttcccgcttctcgttttgcaggtgactttctttaaatgtgggggagcttcacttggggttgggatgcaacatcacgcggcagatggtttctctggtcttcattttatcaacacatggtctgatatggctcgtggtcttgacctaaccattccacctttcattgatcgaacactcctccgagctagggacccgccacagcctgcttttcatcatgttgaatatcagcctgcaccaagtatgaagatacctcttgatccgtctaaatcaggacctgagaataccactgtctctatattcaaattaacacgagaccagcttgttgctcttaaggcgaaatccaaggaggatgggaacactgtcagctacagctcatacgagatgttggcagggcatgtgtggagatcagtgggaaaggcgcgagggcttccaaacgaccaagagacgaaactgtacattgcaactgatggaaggtctagactacgtccgcagctgcctcctggttactttgggaatgtgatattcactgcaacaccattggctgttgcaggggatttgttatctaagccaacatggtatgctgcaggacagattcatgatttcttggttcgtatggatgataactatctgaggtcagctcttgactacctggagatgcagcctgatctgtcagcccttgtccgcggtgcacatacctacaagtgcccaaatttgggaatcacaagctgggttagattacctatttatgatgcagactttggttggggtcgtcctatctttatgggacctggtggaattccatacgagggtttgtcttttgtgctaccaagtcctactaatgatggcagcttatccgttgccattgccctccaatctgaacacatgaaactgtttgagaagtttttgtttgagatatgagagcgttaagccctcgtttttccctcagtaaatttgggcaaatttgcttcttgtcatcatcctgtgttttagagggtacaacaaatcataaggtgtgcttatggtctgtaactttggactatgtcgtataggaacttttgctttatgttaatacagatgataagtgttgttctataacacatgccgtgattgttttgtgtctcattggttatatccaccatgctgtatgattttcagcttcc

SEQ ID NO: 103419 - protein, 450 aa, Arabidopsis thaliana
  peptide (1)..(450): Ceres Seq. ID no. 13612738
  misc_feature (18)..(450): Pfam Name: Transferase family Pfam Description: Transferase family
  misc_feature (18)..(450): Homolog of NCBI NO: 15239747 NR Description: anthranilate
  misc_feature (18)..(450): Homolog of NCBI NO: 21536883 NR Description: anthranilate N-benzoyltransferase [Arabidopsis
  misc_feature (18)..(449): Homolog of NCBI NO: 27475616 NR Description: hydroxycinnamoyl transferase [Nicotiana tabacum]
  misc_feature (18)..(450): Homolog of NCBI NO: 38345030 NR Description: OSJNBa0029H02.14 [Oryza sativa (japonica
  misc_feature (18)..(449): Homolog of NCBI NO: 32400295 NR Description: hydroxyanthranilate hydroxycinnamoyltransferase 3
  misc_feature (18)..(449): Homolog of NCBI NO: 32400291 NR Description: hydroxyanthranilate hydroxycinnamoyltransferase 1
  misc_feature (18)..(449): Homolog of NCBI NO: 32400293 NR Description: hydroxyanthranilate hydroxycinnamoyltransferase 2
  misc_feature (16)..(449): Homolog of NCBI NO: 6469032 NR Description: N-hydroxycinnamoyl/benzoyltransferase [Ipomoea
  misc_feature (16)..(449): Homolog of NCBI NO: 40644899 NR Description: hydroxycinnamoyl CoA quinate transferase
  misc_feature (16)..(450): Homolog of NCBI NO: 40644084 NR Description: hydroxycinnamoyl CoA quinate transferase
RSNSKQNLFVRLIFLKNMKINIRDSTMVRPATETPITNLWNSNVDLVIPRFHTPSVYFYRPTGASNFFDPQVMKEALSKALVPFYPMAGRLKRDDDGRIEIDCNGAGVLFVVADTPSVIDDFGDFAPTLNLRQLIPEVDHSAGIHSFPLLVLQVTFFKCGGASLGVGMQHHAADGFSGLHFINTWSDMARGLDLTIPPFIDRTLLRARDPPQPAFHHVEYQPAPSMKIPLDPSKSGPENTTVSIFKLTRDQLVALKAKSKEDGNTVSYSSYEMLAGHVWRSVGKARGLPNDQETKLYIATDGRSRLRPQLPPGYFGNVIFTATPLAVAGDLLSKPTWYAAGQIHDFLVRMDDNYLRSALDYLEMQPDLSALVRGAHTYKCPNLGITSWVRLPIYDADFGWGRPIFMGPGGIPYEGLSFVLPSPTNDGSLSVAIALQSEHMKLFEKFLFEI

SEQ ID NO: 103420 - protein, 433 aa, Arabidopsis thaliana
  peptide (1)..(433): Ceres Seq. ID no. 13612739
  misc_feature (1)..(433): Pfam Name: Transferase family Pfam Description: Transferase family
  misc_feature (1)..(433): Homolog of NCBI NO: 15239747 NR Description: anthranilate
  misc_feature (1)..(433): Homolog of NCBI NO: 21536883 NR Description: anthranilate N-benzoyltransferase [Arabidopsis
  misc_feature (1)..(432): Homolog of NCBI NO: 27475616 NR Description: hydroxycinnamoyl transferase [Nicotiana tabacum]
  misc_feature (1)..(433): Homolog of NCBI NO: 38345030 NR Description: OSJNBa0029H02.14 [Oryza sativa (japonica
  misc_feature (1)..(432): Homolog of NCBI NO: 32400295 NR Description: hydroxyanthranilate hydroxycinnamoyltransferase 3
  misc_feature (1)..(432): Homolog of NCBI NO: 32400291 NR Description: hydroxyanthranilate hydroxycinnamoyltransferase 1
  misc_feature (1)..(432): Homolog of NCBI NO: 32400293 NR Description: hydroxyanthranilate hydroxycinnamoyltransferase 2
  misc_feature (1)..(432): Homolog of NCBI NO: 6469032 NR Description: N-hydroxycinnamoyl/benzoyltransferase [Ipomoea
  misc_feature (1)..(432): Homolog of NCBI NO: 40644899 NR Description: hydroxycinnamoyl CoA quinate transferase
  misc_feature (1)..(433): Homolog of NCBI NO: 40644084 NR Description: hydroxycinnamoyl CoA quinate transferase
MKINIRDSTMVRPATETPITNLWNSNVDLVIPRFHTPSVYFYRPTGASNFFDPQVMKEALSKALVPFYPMAGRLKRDDDGRIEIDCNGAGVLFVVADTPSVIDDFGDFAPTLNLRQLIPEVDHSAGIHSFPLLVLQVTFFKCGGASLGVGMQHHAADGFSGLHFINTWSDMARGLDLTIPPFIDRTLLRARDPPQPAFHHVEYQPAPSMKIPLDPSKSGPENTTVSIFKLTRDQLVALKAKSKEDGNTVSYSSYEMLAGHVWRSVGKARGLPNDQETKLYIATDGRSRLRPQLPPGYFGNVIFTATPLAVAGDLLSKPTWYAAGQIHDFLVRMDDNYLRSALDYLEMQPDLSALVRGAHTYKCPNLGITSWVRLPIYDADFGWGRPIFMGPGGIPYEGLSFVLPSPTNDGSLSVAIALQSEHMKLFEKFLFEI

SEQ ID NO: 103421 - protein, 424 aa, Arabidopsis thaliana
  peptide (1)..(424): Ceres Seq. ID no. 13612740
  misc_feature (1)..(424): Pfam Name: Transferase family Pfam Description: Transferase family
  misc_feature (1)..(424): Homolog of NCBI NO: 15239747 NR Description: anthranilate
  misc_feature (1)..(424): Homolog of NCBI NO: 21536883 NR Description: anthranilate N-benzoyltransferase [Arabidopsis
  misc_feature (1)..(423): Homolog of NCBI NO: 27475616 NR Description: hydroxycinnamoyl transferase [Nicotiana tabacum]
  misc_feature (1)..(424): Homolog of NCBI NO: 38345030 NR Description: OSJNBa0029H02.14 [Oryza sativa (japonica
  misc_feature (1)..(423): Homolog of NCBI NO: 32400295 NR Description: hydroxyanthranilate hydroxycinnamoyltransferase 3
  misc_feature (1)..(423): Homolog of NCBI NO: 32400291 NR Description: hydroxyanthranilate hydroxycinnamoyltransferase 1
  misc_feature (1)..(423): Homolog of NCBI NO: 32400293 NR Description: hydroxyanthranilate hydroxycinnamoyltransferase 2
  misc_feature (1)..(423): Homolog of NCBI NO: 6469032 NR Description: N-hydroxycinnamoyl/benzoyltransferase [Ipomoea
  misc_feature (1)..(423): Homolog of NCBI NO: 40644899 NR Description: hydroxycinnamoyl CoA quinate transferase
  misc_feature (1)..(424): Homolog of NCBI NO: 40644084 NR Description: hydroxycinnamoyl CoA quinate transferase
MVRPATETPITNLWNSNVDLVIPRFHTPSVYFYRPTGASNFFDPQVMKEALSKALVPFYPMAGRLKRDDDGRIEIDCNGAGVLFVVADTPSVIDDFGDFAPTLNLRQLIPEVDHSAGIHSFPLLVLQVTFFKCGGASLGVGMQHHAADGFSGLHFINTWSDMARGLDLTIPPFIDRTLLRARDPPQPAFHHVEYQPAPSMKIPLDPSKSGPENTTVSIFKLTRDQLVALKAKSKEDGNTVSYSSYEMLAGHVWRSVGKARGLPNDQETKLYIATDGRSRLRPQLPPGYFGNVIFTATPLAVAGDLLSKPTWYAAGQIHDFLVRMDDNYLRSALDYLEMQPDLSALVRGAHTYKCPNLGITSWVRLPIYDADFGWGRPIFMGPGGIPYEGLSFVLPSPTNDGSLSVAIALQSEHMKLFEKFLFEI

SEQ ID NO: 103422 - DNA, 690 bp, Arabidopsis thaliana
  misc_feature (1)..(690): Ceres Seq. ID no. 13612745
  misc_feature: MA Experiment ID: 108668 Result: Up-regulated in Transcription
  misc_feature: MA Experiment 108668 PARAMETER Experiment Name: At_2mM_SA_cDNA_P Parameter: Plant Line Value: WS
  misc_feature: MA Experiment 108668 PARAMETER Experiment Name: At_2mM_SA_cDNA_P Parameter: Timepoint (hr) Value: 6
  misc_feature: MA Experiment 108668 PARAMETER Experiment Name: At_2mM_SA_cDNA_P Parameter: Treatment Value: 2mM SA vs. No Treatment
tctctctctctctctctctttgtctccgccatgacaagctcttcatctccttcacgcaaggcgttaagcaagatcgcgtgtaataggttacaaaaggagttatcagagtggcaagtaaatccaccgactgggtttaagcacagagttactgataatcttcaaaaatgggtaattgaggtaacaggagcacctggtacgctttacgctaatgaaacttataatcttcaggttgagtttcctcaacattatcctatggaagctcctcaggtgatttttgttccaccagcaccgttacatcctcatatttacagcaatggacatatttgtttagatattctgtatgactcatggtctccagcaatgacagtgagttcagtctgcatcagcatcctctcaatgctatcaagttcccccgaaaagcaacgcccgactgataacgatcgatatgtgaagaactgcaagaacgggaggtctcctaaagagacaaggtggtggttccatgacgacaaggtttaatgatgacgaccgtaagatgtctctcctttcagttacaaaagaggtttatataatttcccaagactgataatactaattgaaattcctcatggcctcccacttttttttctgtaacggatcattatgtataaatgacatctgaaatgtttcagtgtctgaattaacaccttgtgc

SEQ ID NO: 103423 - protein, 171 aa, Arabidopsis thaliana
  peptide (1)..(171): Ceres Seq. ID no. 13612746
  misc_feature (11)..(171): Homolog of NCBI NO: 18422281 NR Description: ubiquitin-conjugating enzyme 18 (UBC18)
  misc_feature (11)..(171): Homolog of NCBI NO: 18401461 NR Description: ubiquitin-conjugating enzyme 15 (UBC15)
  misc_feature (11)..(171): Homolog of NCBI NO: 481811 NR Description: ubiquitin-conjugating enzyme UBC2-1 - Arabidopsis
  misc_feature (11)..(171): Homolog of NCBI NO: 18410856 NR Description: ubiquitin-conjugating enzyme 16 (UBC16)
  misc_feature (11)..(171): Homolog of NCBI NO: 4090259 NR Description: ubiquitin-conjugating enzyme E2 [Pseudotsuga
  misc_feature (11)..(171): Homolog of NCBI NO: 2801444 NR Description: ubiquitin-conjugating enzyme 16 [Arabidopsis
  misc_feature (11)..(171): Homolog of NCBI NO: 18419831 NR Description: ubiquitin-conjugating enzyme 17 (UBC17)
  misc_feature (11)..(140): Homolog of NCBI NO: 34897008 NR Description: putative ubiquitin-conjugating enzyme E2 [Oryza
  misc_feature (75)..(171): Homolog of NCBI NO: 25293670 NR Description: ubiquitin-conjugating enzyme 18 [imported] -
  misc_feature (11)..(110): Homolog of NCBI NO: 31712068 NR Description: putative ubiquitin-conjugating enzyme, 3'-partial
SLSLSLFVSAMTSSSSPSRKALSKIACNRLQKELSEWQVNPPTGFKHRVTDNLQKWVIEVTGAPGTLYANETYNLQVEFPQHYPMEAPQVIFVPPAPLHPHIYSNGHICLDILYDSWSPAMTVSSVCISILSMLSSSPEKQRPTDNDRYVKNCKNGRSPKETRWWFHDDKV

SEQ ID NO: 103424 - protein, 161 aa, Arabidopsis thaliana; identical to SEQ ID NO: 25474
  peptide (1)..(161): Ceres Seq. ID no. 13612747
  misc_feature (1)..(161): Homolog of NCBI NO: 18422281 NR Description: ubiquitin-conjugating enzyme 18 (UBC18)
  misc_feature (1)..(161): Homolog of NCBI NO: 18401461 NR Description: ubiquitin-conjugating enzyme 15 (UBC15)
  misc_feature (1)..(161): Homolog of NCBI NO: 481811 NR Description: ubiquitin-conjugating enzyme UBC2-1 - Arabidopsis
  misc_feature (1)..(161): Homolog of NCBI NO: 18410856 NR Description: ubiquitin-conjugating enzyme 16 (UBC16)
  misc_feature (1)..(161): Homolog of NCBI NO: 4090259 NR Description: ubiquitin-conjugating enzyme E2 [Pseudotsuga
  misc_feature (1)..(161): Homolog of NCBI NO: 2801444 NR Description: ubiquitin-conjugating enzyme 16 [Arabidopsis
  misc_feature (1)..(161): Homolog of NCBI NO: 18419831 NR Description: ubiquitin-conjugating enzyme 17 (UBC17)
  misc_feature (1)..(130): Homolog of NCBI NO: 34897008 NR Description: putative ubiquitin-conjugating enzyme E2 [Oryza
  misc_feature (65)..(161): Homolog of NCBI NO: 25293670 NR Description: ubiquitin-conjugating enzyme 18 [imported] -
  misc_feature (1)..(100): Homolog of NCBI NO: 31712068 NR Description: putative ubiquitin-conjugating enzyme, 3'-partial

SEQ ID NO: 103425 - protein, 87 aa, Arabidopsis thaliana; identical to SEQ ID NO: 25475
  peptide (1)..(87): Ceres Seq. ID no. 13612748
  misc_feature (1)..(87): Homolog of NCBI NO: 18422281 NR Description: ubiquitin-conjugating enzyme 18 (UBC18)
  misc_feature (1)..(87): Homolog of NCBI NO: 18401461 NR Description: ubiquitin-conjugating enzyme 15 (UBC15)
  misc_feature (1)..(87): Homolog of NCBI NO: 481811 NR Description: ubiquitin-conjugating enzyme UBC2-1 - Arabidopsis
  misc_feature (1)..(87): Homolog of NCBI NO: 18410856 NR Description: ubiquitin-conjugating enzyme 16 (UBC16)
  misc_feature (1)..(87): Homolog of NCBI NO: 4090259 NR Description: ubiquitin-conjugating enzyme E2 [Pseudotsuga
  misc_feature (1)..(87): Homolog of NCBI NO: 2801444 NR Description: ubiquitin-conjugating enzyme 16 [Arabidopsis
  misc_feature (1)..(87): Homolog of NCBI NO: 18419831 NR Description: ubiquitin-conjugating enzyme 17 (UBC17)
  misc_feature (1)..(56): Homolog of NCBI NO: 34897008 NR Description: putative ubiquitin-conjugating enzyme E2 [Oryza
  misc_feature (1)..(87): Homolog of NCBI NO: 25293670 NR Description: ubiquitin-conjugating enzyme 18 [imported] -
  misc_feature (1)..(26): Homolog of NCBI NO: 31712068 NR Description: putative ubiquitin-conjugating enzyme, 3'-partial

SEQ ID NO: 103426 - DNA, 675 bp, Arabidopsis thaliana
  misc_feature (1)..(675): Ceres Seq. ID no. 13612749
  misc_feature: MA Experiment ID: 108461 Result: Up-regulated in Transcription
  misc_feature: MA Experiment 108461 PARAMETER Experiment Name: At_Germinating_Seeds_cDNA_P Parameter: Age (day) Value: 1 vs. 0
  misc_feature: MA Experiment 108461 PARAMETER Experiment Name: At_Germinating_Seeds_cDNA_P Parameter: Tissue Value: Germinating Seeds
  misc_feature: MA Experiment ID: 108462 Result: Up-regulated in Transcription
  misc_feature: MA Experiment 108462 PARAMETER Experiment Name: At_Germinating_Seeds_cDNA_P Parameter: Age (day) Value: 2 vs. 0
  misc_feature: MA Experiment 108462 PARAMETER Experiment Name: At_Germinating_Seeds_cDNA_P Parameter: Tissue Value: Germinating Seeds
  misc_feature: MA Experiment ID: 108464 Result: Up-regulated in Transcription
  misc_feature: MA Experiment 108464 PARAMETER Experiment Name: At_Germinating_Seeds_cDNA_P Parameter: Age (day) Value: 4 vs. 0
  misc_feature: MA Experiment 108464 PARAMETER Experiment Name: At_Germinating_Seeds_cDNA_P Parameter: Tissue Value: Germinating Seeds
  misc_feature: MA Experiment ID: 108561 Result: Down-regulated in Transcription
  misc_feature: MA Experiment 108561 PARAMETER Experiment Name: At_100uM_ABA_cDNA_P Parameter: Timepoint (hr) Value: 6
  misc_feature: MA Experiment 108561 PARAMETER Experiment Name: At_100uM_ABA_cDNA_P Parameter: Tissue Value: Aerial
  misc_feature: MA Experiment 108561 PARAMETER Experiment Name: At_100uM_ABA_cDNA_P Parameter: Treatment Value: 100uM ABA vs. No Treatment
  misc_feature: MA Experiment ID: 20000179 Result: Up-regulated in Transcription
  misc_feature: MA Experiment 20000179 PARAMETER Experiment Name: At_Germinating_Seeds_P Parameter: Age (hr) Value: 6 vs. 0
  misc_feature: MA Experiment 20000179 PARAMETER Experiment Name: At_Germinating_Seeds_P Parameter: Tissue Value: Germinating Seeds
  misc_feature: MA Experiment ID: 20000180 Result: Up-regulated in Transcription
  misc_feature: MA Experiment 20000180 PARAMETER Experiment Name: At_Germinating_Seeds_P Parameter: Age (hr) Value: 24 vs. 0
  misc_feature: MA Experiment 20000180 PARAMETER Experiment Name: At_Germinating_Seeds_P Parameter: Tissue Value: Germinating Seeds
  misc_feature: MA Experiment ID: 20001248 Result: Down-regulated in Transcription
  misc_feature: MA Experiment 20001248 PARAMETER Experiment Name: At_Far-red-induction_P Parameter: Age (day) Value: 7
  misc_feature: MA Experiment 20001248 PARAMETER Experiment Name: At_Far-red-induction_P Parameter: Light Value: Far-red vs. White
  misc_feature: MA Experiment 20001248 PARAMETER Experiment Name: At_Far-red-induction_P Parameter: Organism Value: A. thaliana
  misc_feature: MA Experiment 20001248 PARAMETER Experiment Name: At_Far-red-induction_P Parameter: Plant Line Value: Columbia
  misc_feature: MA Experiment 20001248 PARAMETER Experiment Name: At_Far-red-induction_P Parameter: Timepoint (hr) Value: 4
  misc_feature: MA Experiment 20001248 PARAMETER Experiment Name: At_Far-red-induction_P Parameter: Tissue Value: Whole Plant
aaatttcaaaatccctaaaaagctttcaaacaaataaactcagaaaaaatggccgaaaccgaaacggagtcgatcaccacctcttctccaccgccgatctcagaaaccgaaaactccaccacattaccaacaacggagacggagaagaatcccaatccggtaaccatttccctcagaatctggccaccgactcaaaaaactcgcgacgccgtgattaaccgtctgatcgaaacactgtcaaccgaatcaatcctctccaagagattcggatctcttgaatccgaagaagcttcctccgtcgcgaaatcaatcgaagacgaagcttacgccatcgcttctgccaccgtattcggtgatgacgacgggatcgagattcttaaagcttattctaaagagattagtaaacgtatgcttgaatctgttaaggctaagagtaatgtggcttctcctccaccgaaggatggtgatggaattgaatcagctgttgattcgaagattgattcaagtgaagcttgacgaggcttgaatatggtgttgttctcttatctctaactatctttttatttgttttagattggtatgcgattatctatctcagagttttgtttgttgtataacttgtggatttgggacctgttactaatatgattttgtggttgatttggttttgacgtt

SEQ ID NO: 103427 - protein, 155 aa, Arabidopsis thaliana
  peptide (1)..(155): Ceres Seq. ID no. 13612750
  misc_feature (1)..(155): Homolog of NCBI NO: 15239170 NR Description: expressed protein [Arabidopsis thaliana] contains similarity to MFP1 attachment factor 1~gene_id:MMG4.9
  misc_feature (1)..(155): Homolog of NCBI NO: 21618109 NR Description: MFP1 attachment factor 1 [Arabidopsis thaliana]
  misc_feature (1)..(154): Homolog of NCBI NO: 18401618 NR Description: expressed protein [Arabidopsis thaliana]
  misc_feature (1)..(154): Homolog of NCBI NO: 21553809 NR Description: unknown [Arabidopsis thaliana]
  misc_feature (17)..(153): Homolog of NCBI NO: 7546725 NR Description: MFP1 attachment factor 1 [Lycopersicon esculentum]
MAETETESITTSSPPPISETENSTTLPTTETEKNPNPVTISLRIWPPTQKTRDAVINRLIETLSTESILSKRFGSLESEEASSVAKSIEDEAYAIASATVFGDDDGIEILKAYSKEISKRMLESVKAKSNVASPPPKDGDGIESAVDSKIDSSEA

SEQ ID NO: 103428 - DNA, 1276 bp, Arabidopsis thaliana
  misc_feature (1)..(1276): Ceres Seq. ID no. 13612751
  misc_feature: MA Experiment ID: 20000166 Result: Up-regulated in Transcription
  misc_feature: MA Experiment 20000166 PARAMETER Experiment Name: At_100uM_ABA_P Parameter: Age (day) Value: 14
  misc_feature: MA Experiment 20000166 PARAMETER Experiment Name: At_100uM_ABA_P Parameter: Organism Value: A. thaliana
  misc_feature: MA Experiment 20000166 PARAMETER Experiment Name: At_100uM_ABA_P Parameter: Plant Line Value: WS
  misc_feature: MA Experiment 20000166 PARAMETER Experiment Name: At_100uM_ABA_P Parameter: Timepoint (hr) Value: 1
  misc_feature: MA Experiment 20000166 PARAMETER Experiment Name: At_100uM_ABA_P Parameter: Tissue Value: Aerial
  misc_feature: MA Experiment 20000166 PARAMETER Experiment Name: At_100uM_ABA_P Parameter: Treatment Value: 100uM ABA vs. No Treatment
  misc_feature: MA Experiment ID: 20000182 Result: Up-regulated in Transcription
  misc_feature: MA Experiment 20000182 PARAMETER Experiment Name: At_2mM_SA_P Parameter: Age (day) Value: 14
  misc_feature: MA Experiment 20000182 PARAMETER Experiment Name: At_2mM_SA_P Parameter: Organism Value: A. thaliana
  misc_feature: MA Experiment 20000182 PARAMETER Experiment Name: At_2mM_SA_P Parameter: Plant Line Value: WS
  misc_feature: MA Experiment 20000182 PARAMETER Experiment Name: At_2mM_SA_P Parameter: Timepoint (hr) Value: 6
  misc_feature: MA Experiment 20000182 PARAMETER Experiment Name: At_2mM_SA_P Parameter: Tissue Value: Aerial
  misc_feature: MA Experiment 20000182 PARAMETER Experiment Name: At_2mM_SA_P Parameter: Treatment Value: 2mM SA vs. No Treatment
  misc_feature: MA Experiment ID: 20000185 Result: Up-regulated in Transcription
  misc_feature: MA Experiment 20000185 PARAMETER Experiment Name: At_Roots__P Parameter: Age (day) Value: 7 vs. 21
  misc_feature: MA Experiment 20000185 PARAMETER Experiment Name: At_Roots__P Parameter: Organism Value: A. thaliana
  misc_feature: MA Experiment 20000185 PARAMETER Experiment Name: At_Roots__P Parameter: Tissue Value: Roots vs. Whole Plant
  misc_feature: MA Experiment ID: 20000227 Result: Down-regulated in Transcription
  misc_feature: MA Experiment 20000227 PARAMETER Experiment Name: At_Root-Tips-vs-Tops_P Parameter: Tissue Value: Root Tips vs. Root Tops
  misc_feature: MA Experiment ID: 20000264 Result: Down-regulated in Transcription
  misc_feature: MA Experiment 20000264 PARAMETER Experiment Name: At_Open_Flower_P Parameter: Age (day) Value: 21
  misc_feature: MA Experiment 20000264 PARAMETER Experiment Name: At_Open_Flower_P Parameter: Plant Line Value: WS
  misc_feature: MA Experiment 20000264 PARAMETER Experiment Name: At_Open_Flower_P Parameter: Tissue Value: Open Flower vs. Whole Plant
  misc_feature: MA Experiment ID: 20000265 Result: Down-regulated in Transcription
  misc_feature: MA Experiment 20000265 PARAMETER Experiment Name: At_Open_Flower_P Parameter: Age (day) Value: 21
  misc_feature: MA Experiment 20000265 PARAMETER Experiment Name: At_Open_Flower_P Parameter: Plant Line Value: WS
  misc_feature: MA Experiment 20000265 PARAMETER Experiment Name: At_Open_Flower_P Parameter: Tissue Value: Closed Flower vs. Whole Plant
  misc_feature: MA Experiment ID: 20000267 Result: Up-regulated in Transcription
  misc_feature: MA Experiment 20000267 PARAMETER Experiment Name: At_Drought_P Parameter: Age (day) Value: 7
  misc_feature: MA Experiment 20000267 PARAMETER Experiment Name: At_Drought_P Parameter: Organism Value: A. thaliana
  misc_feature: MA Experiment 20000267 PARAMETER Experiment Name: At_Drought_P Parameter: Plant Line Value: WS
  misc_feature: MA Experiment 20000267 PARAMETER Experiment Name: At_Drought_P Parameter: Timepoint (hr) Value: 6
  misc_feature: MA Experiment 20000267 PARAMETER Experiment Name: At_Drought_P Parameter: Tissue Value: Whole Plant
  misc_feature: MA Experiment 20000267 PARAMETER Experiment Name: At_Drought_P Parameter: Treatment Value: Drought vs. No Drought
  misc_feature: MA Experiment ID: 20000268 Result: Up-regulated in Transcription
  misc_feature: MA Experiment 20000268 PARAMETER Experiment Name: At_100mM_NaCl__P Parameter: Age (day) Value: 14
  misc_feature: MA Experiment 20000268 PARAMETER Experiment Name: At_100mM_NaCl__P Parameter: Organism Value: A. thaliana
  misc_feature: MA Experiment 20000268 PARAMETER Experiment Name: At_100mM_NaCl__P Parameter: Plant Line Value: WS
  misc_feature: MA Experiment 20000268 PARAMETER Experiment Name: At_100mM_NaCl__P Parameter: Timepoint (hr) Value: 6
  misc_feature: MA Experiment 20000268 PARAMETER Experiment Name: At_100mM_NaCl__P Parameter: Tissue Value: Whole Plant
  misc_feature: MA Experiment 20000268 PARAMETER Experiment Name: At_100mM_NaCl__P Parameter: Treatment Value: 100mM NaCl vs. No Treatment
  misc_feature: MA Experiment ID: 20000286 Result: Down-regulated in Transcription
  misc_feature: MA Experiment 20000286 PARAMETER Experiment Name: At_Open_Flower_P Parameter: Age (day) Value: 21
  misc_feature: MA Experiment 20000286 PARAMETER Experiment Name: At_Open_Flower_P Parameter: Plant Line Value: WS
  misc_feature: MA Experiment 20000286 PARAMETER Experiment Name: At_Open_Flower_P Parameter: Tissue Value: Half Open vs. Whole Plant
  misc_feature: MA Experiment ID: 20000436 Result: Up-regulated in Transcription
  misc_feature: MA Experiment 20000436 PARAMETER Experiment Name: At_Drought_P Parameter: Age (day) Value: 7
  misc_feature: MA Experiment 20000436 PARAMETER Experiment Name: At_Drought_P Parameter: Organism Value: A. thaliana
  misc_feature: MA Experiment 20000436 PARAMETER Experiment Name: At_Drought_P Parameter: Plant Line Value: WS
  misc_feature: MA Experiment 20000436 PARAMETER Experiment Name: At_Drought_P Parameter: Timepoint (hr) Value: 12
  misc_feature: MA Experiment 20000436 PARAMETER Experiment Name: At_Drought_P Parameter: Tissue Value: Whole Plant
  misc_feature: MA Experiment 20000436 PARAMETER Experiment Name: At_Drought_P Parameter: Treatment Value: Drought vs. No Drought
  misc_feature: MA Experiment ID: 20000439 Result: Up-regulated in Transcription
  misc_feature: MA Experiment 20000439 PARAMETER Experiment Name: At_Roots__P Parameter: Age (day) Value: 14 vs. 21
  misc_feature: MA Experiment 20000439 PARAMETER Experiment Name: At_Roots__P Parameter: Organism Value: A. thaliana
  misc_feature: MA Experiment 20000439 PARAMETER Experiment Name: At_Roots__P Parameter: Tissue Value: Roots vs. Whole Plant
  misc_feature: MA Experiment ID: 20000495 Result: Up-regulated in Transcription
  misc_feature: MA Experiment 20000495 PARAMETER Experiment Name: At_Guard_Cells_P Parameter: Harvest Date Value: 8/2/2002
  misc_feature: MA Experiment 20000495 PARAMETER Experiment Name: At_Guard_Cells_P Parameter: Organism Value: A. thaliana
  misc_feature: MA Experiment 20000495 PARAMETER Experiment Name: At_Guard_Cells_P Parameter: Tissue Value: Guard Cells vs. Leaves
  misc_feature: MA Experiment ID: 20000573 Result: Down-regulated in Transcription
  misc_feature: MA Experiment 20000573 PARAMETER Experiment Name: At_100uM_ABA_Mutants__P Parameter: Organism Value: A. thaliana
  misc_feature: MA Experiment 20000573 PARAMETER Experiment Name: At_100uM_ABA_Mutants__P Parameter: Plant Line Value: CS22 vs. Ler wt
  misc_feature: MA Experiment 20000573 PARAMETER Experiment Name: At_100uM_ABA_Mutants__P Parameter: Timepoint (hr) Value: N/A
  misc_feature: MA Experiment 20000573 PARAMETER Experiment Name: At_100uM_ABA_Mutants__P Parameter: Tissue Value: Whole Plant
  misc_feature: MA Experiment 20000573 PARAMETER Experiment Name: At_100uM_ABA_Mutants__P Parameter: Treatment Value: None
  misc_feature: MA Experiment ID: 20000574 Result: Down-regulated in Transcription
  misc_feature: MA Experiment 20000574 PARAMETER Experiment Name: At_100uM_ABA_Mutants__P Parameter: Organism Value: A. thaliana
  misc_feature: MA Experiment 20000574 PARAMETER Experiment Name: At_100uM_ABA_Mutants__P Parameter: Plant Line Value: CS23 vs. Ler wt
  misc_feature: MA Experiment 20000574 PARAMETER Experiment Name: At_100uM_ABA_Mutants__P Parameter: Timepoint (hr) Value: N/A
  misc_feature: MA Experiment 20000574 PARAMETER Experiment Name: At_100uM_ABA_Mutants__P Parameter: Tissue Value: Whole Plant
  misc_feature: MA Experiment 20000574 PARAMETER Experiment Name: At_100uM_ABA_Mutants__P Parameter: Treatment Value: None
  misc_feature: MA Experiment ID: 20000709 Result: Down-regulated in Transcription
  misc_feature: MA Experiment 20000709 PARAMETER Experiment Name: At_15mM_NH4NO3_L-to-H_P Parameter: Age (hr) Value: 14
  misc_feature: MA Experiment 20000709 PARAMETER Experiment Name: At_15mM_NH4NO3_L-to-H_P Parameter: Organism Value: A. thaliana
  misc_feature: MA Experiment 20000709 PARAMETER Experiment Name: At_15mM_NH4NO3_L-to-H_P Parameter: Plant Line Value: WS
  misc_feature: MA Experiment 20000709 PARAMETER Experiment Name: At_15mM_NH4NO3_L-to-H_P Parameter: Timepoint (hr) Value: 4
  misc_feature: MA Experiment 20000709 PARAMETER Experiment Name: At_15mM_NH4NO3_L-to-H_P Parameter: Tissue Value: Aerial
  misc_feature: MA Experiment 20000709 PARAMETER Experiment Name: At_15mM_NH4NO3_L-to-H_P Parameter: Treatment Value: 15mM NH4NO3 vs. 30mM Mannitol
  misc_feature: MA Experiment ID: 20000794 Result: Down-regulated in Transcription
  misc_feature: MA Experiment 20000794 PARAMETER Experiment Name: At_Petals_P Parameter: Age (day) Value: 23-25 days
  misc_feature: MA Experiment 20000794 PARAMETER Experiment Name: At_Petals_P Parameter: Plant Line Value: WS
  misc_feature: MA Experiment 20000794 PARAMETER Experiment Name: At_Petals_P Parameter: Tissue Value: Petals vs. Whole plant
  misc_feature: MA Experiment ID: 20001248 Result: Down-regulated in Transcription
  misc_feature: MA Experiment 20001248 PARAMETER Experiment Name: At_Far-red-induction_P Parameter: Age (day) Value: 7
  misc_feature: MA Experiment 20001248 PARAMETER Experiment Name: At_Far-red-induction_P Parameter: Light Value: Far-red vs. White
  misc_feature: MA Experiment 20001248 PARAMETER Experiment Name: At_Far-red-induction_P Parameter: Organism Value: A. thaliana
  misc_feature: MA Experiment 20001248 PARAMETER Experiment Name: At_Far-red-induction_P Parameter: Plant Line Value: Columbia
  misc_feature: MA Experiment 20001248 PARAMETER Experiment Name: At_Far-red-induction_P Parameter: Timepoint (hr) Value: 4
  misc_feature: MA Experiment 20001248 PARAMETER Experiment Name: At_Far-red-induction_P Parameter: Tissue Value: Whole Plant
  misc_feature: MA Experiment ID: 20001554 Result: Up-regulated in Transcription
  misc_feature: MA Experiment 20001554 PARAMETER Experiment Name: At_Drought_Soil_Dry_P Parameter: Age (day) Value: 21
  misc_feature: MA Experiment 20001554 PARAMETER Experiment Name: At_Drought_Soil_Dry_P Parameter: Organism Value: A. thaliana
  misc_feature: MA Experiment 20001554 PARAMETER Experiment Name: At_Drought_Soil_Dry_P Parameter: Plant Line Value: WS
  misc_feature: MA Experiment 20001554 PARAMETER Experiment Name: At_Drought_Soil_Dry_P Parameter: Post Timepoint (hr) Value: None
  misc_feature: MA Experiment 20001554 PARAMETER Experiment Name: At_Drought_Soil_Dry_P Parameter: Post-Treatment Value: None
  misc_feature: MA Experiment 20001554 PARAMETER Experiment Name: At_Drought_Soil_Dry_P Parameter: Timepoint (day) Value: 7
  misc_feature: MA Experiment 20001554 PARAMETER Experiment Name: At_Drought_Soil_Dry_P Parameter: Treatment Value: Drought vs. No Drought
  misc_feature: MA Experiment ID: 20001555 Result: Up-regulated in Transcription
  misc_feature: MA Experiment 20001555 PARAMETER Experiment Name: At_Drought_Soil_Dry_P Parameter: Age (day) Value: 24
  misc_feature: MA Experiment 20001555 PARAMETER Experiment Name: At_Drought_Soil_Dry_P Parameter: Organism Value: A. thaliana
  misc_feature: MA Experiment 20001555 PARAMETER Experiment Name: At_Drought_Soil_Dry_P Parameter: Plant Line Value: WS
  misc_feature: MA Experiment 20001555 PARAMETER Experiment Name: At_Drought_Soil_Dry_P Parameter: Post Timepoint (hr) Value: None
  misc_feature: MA Experiment 20001555 PARAMETER Experiment Name: At_Drought_Soil_Dry_P Parameter: Post-Treatment Value: None
  misc_feature: MA Experiment 20001555 PARAMETER Experiment Name: At_Drought_Soil_Dry_P Parameter: Timepoint (day) Value: 10
  misc_feature: MA Experiment 20001555 PARAMETER Experiment Name: At_Drought_Soil_Dry_P Parameter: Treatment Value: Drought vs. No Drought
  misc_feature: MA Experiment ID: 20001557 Result: Down-regulated in Transcription
  misc_feature: MA Experiment 20001557 PARAMETER Experiment Name: At_Drought_Soil_Dry_P Parameter: Age (day) Value: 27
  misc_feature: MA Experiment 20001557 PARAMETER Experiment Name: At_Drought_Soil_Dry_P Parameter: Organism Value: A. thaliana
  misc_feature: MA Experiment 20001557 PARAMETER Experiment Name: At_Drought_Soil_Dry_P Parameter: Plant Line Value: WS
  misc_feature: MA Experiment 20001557 PARAMETER Experiment Name: At_Drought_Soil_Dry_P Parameter: Post Timepoint (hr) Value: 3
  misc_feature: MA Experiment 20001557 PARAMETER Experiment Name: At_Drought_Soil_Dry_P Parameter: Post-Treatment Value: Re-Water vs. No Drought
  misc_feature: MA Experiment 20001557 PARAMETER Experiment Name: At_Drought_Soil_Dry_P Parameter: Timepoint (day) Value: 13
  misc_feature: MA Experiment 20001557 PARAMETER Experiment Name: At_Drought_Soil_Dry_P Parameter: Treatment Value: Drought vs. No Drought
  misc_feature: MA Experiment ID: 20001558 Result: Down-regulated in Transcription
  misc_feature: MA Experiment 20001558 PARAMETER Experiment Name: At_Drought_Soil_Dry_P Parameter: Age (day) Value: 27
  misc_feature: MA Experiment 20001558 PARAMETER Experiment Name: At_Drought_Soil_Dry_P Parameter: Organism Value: A. thaliana
  misc_feature: MA Experiment 20001558 PARAMETER Experiment Name: At_Drought_Soil_Dry_P Parameter: Plant Line Value: WS
  misc_feature: MA Experiment 20001558 PARAMETER Experiment Name: At_Drought_Soil_Dry_P Parameter: Post Timepoint (hr) Value: 6
  misc_feature: MA Experiment 20001558 PARAMETER Experiment Name: At_Drought_Soil_Dry_P Parameter: Post-Treatment Value: Re-Water vs. No Drought
  misc_feature: MA Experiment 20001558 PARAMETER Experiment Name: At_Drought_Soil_Dry_P Parameter: Timepoint (day) Value: 13
  misc_feature: MA Experiment 20001558 PARAMETER Experiment Name: At_Drought_Soil_Dry_P Parameter: Treatment Value: Drought vs. No Drought
  misc_feature: MA Experiment ID: 20001560 Result: Down-regulated in Transcription
  misc_feature: MA Experiment 20001560 PARAMETER Experiment Name: At_Drought_Soil_Dry_P Parameter: Age (day) Value: 28
  misc_feature: MA Experiment 20001560 PARAMETER Experiment Name: At_Drought_Soil_Dry_P Parameter: Organism Value: A. thaliana
  misc_feature: MA Experiment 20001560 PARAMETER Experiment Name: At_Drought_Soil_Dry_P Parameter: Plant Line Value: WS
  misc_feature: MA Experiment 20001560 PARAMETER Experiment Name: At_Drought_Soil_Dry_P Parameter: Post Timepoint (hr) Value: None
  misc_feature: MA Experiment 20001560 PARAMETER Experiment Name: At_Drought_Soil_Dry_P Parameter: Post-Treatment Value: None
  misc_feature: MA Experiment 20001560 PARAMETER Experiment Name: At_Drought_Soil_Dry_P Parameter: Timepoint (day) Value: 14
  misc_feature: MA Experiment 20001560 PARAMETER Experiment Name: At_Drought_Soil_Dry_P Parameter: Treatment Value: Drought vs. No Drought
  misc_feature: MA Experiment ID: 20001905 Result: Up-regulated in Transcription
  misc_feature: MA Experiment 20001905 PARAMETER Experiment Name: At_Drought_Reproduction_P Parameter: Age (day) Value: 40
  misc_feature: MA Experiment 20001905 PARAMETER Experiment Name: At_Drought_Reproduction_P Parameter: Organism Value: A. thaliana
  misc_feature: MA Experiment 20001905 PARAMETER Experiment Name: At_Drought_Reproduction_P Parameter: Plant Line Value: WS
  misc_feature: MA Experiment 20001905 PARAMETER Experiment Name: At_Drought_Reproduction_P Parameter: Timepoint (day) Value: 10
  misc_feature: MA Experiment 20001905 PARAMETER Experiment Name: At_Drought_Reproduction_P Parameter: Tissue Value: Rosettes
  misc_feature: MA Experiment 20001905 PARAMETER Experiment Name: At_Drought_Reproduction_P Parameter: Treatment Value: Drought vs. No Drought
  misc_feature: MA Experiment ID: 20001910 Result: Up-regulated in Transcription
  misc_feature: MA Experiment 20001910 PARAMETER Experiment Name: At_Drought_Reproduction_P Parameter: Age (day) Value: 37
  misc_feature: MA Experiment 20001910 PARAMETER Experiment Name: At_Drought_Reproduction_P Parameter: Organism Value: A. thaliana
  misc_feature: MA Experiment 20001910 PARAMETER Experiment Name: At_Drought_Reproduction_P Parameter: Plant Line Value: WS
  misc_feature: MA Experiment 20001910 PARAMETER Experiment Name: At_Drought_Reproduction_P Parameter: Timepoint (day) Value: 7
  misc_feature: MA Experiment 20001910 PARAMETER Experiment Name: At_Drought_Reproduction_P Parameter: Tissue Value: Flowers
  misc_feature: MA Experiment 20001910 PARAMETER Experiment Name: At_Drought_Reproduction_P Parameter: Treatment Value: Drought vs. No Drought
  misc_feature: MA Experiment ID: 20001911 Result: Up-regulated in Transcription
  misc_feature: MA Experiment 20001911 PARAMETER Experiment Name: At_Drought_Reproduction_P Parameter: Age (day) Value: 40
  misc_feature: MA Experiment 20001911 PARAMETER Experiment Name: At_Drought_Reproduction_P Parameter: Organism Value: A. thaliana
  misc_feature: MA Experiment 20001911 PARAMETER Experiment Name: At_Drought_Reproduction_P Parameter: Plant Line Value: WS
  misc_feature: MA Experiment 20001911 PARAMETER Experiment Name: At_Drought_Reproduction_P Parameter: Timepoint (day) Value: 10
  misc_feature: MA Experiment 20001911 PARAMETER Experiment Name: At_Drought_Reproduction_P Parameter: Tissue Value: Flowers
  misc_feature: MA Experiment 20001911 PARAMETER Experiment Name: At_Drought_Reproduction_P Parameter: Treatment Value: Drought vs. No Drought
atgaatatcgttggattgagcaaacgtttcttctccgatcgtcgctctcttcacgggatcaacaatgctctcttgaaaacagtgttcaccggtcggaaaccgattctcggattctccggccgatcgattcacgagctacgcaaaactgggaatttcgtaatccctcgtgttttctccgtgtcgcgaaatctaacgacgaaggcttcgtcttcttcttcgaaacaacctgcgtttctacgatggtatttgagaaagctcgaatcacatccttttatgactaagagtatcactacttctgtcatctatatggctgcagatctcacttctcagatgatcacaatggagccaactggttcttttgacttgataagaacagcgagaatggcgagctttgggttgatatttctcgggccgtctcagcatctgtggttcagttatctttcgaagatattgccaaagcgcgacgtgttgacaacctttaagaaaataatgatggggcaggttcttttcggacctgttagcaacacagtcttctattcctacaatgctgctttacaaggcgaaaattctgaggaaattgtggcgagattgaagagagatcttctgccaacattgaaaaatggacttatgtattggccggtctgtgattttgttacattcaagtatgtgccagttcatctacagttattgcttgtaacgtcagtttttgggggttgggtttcttctcccttcctacatcctctctcttctctttctctacactttcatctaatggccggcctgagatggagagagtggtggaacacgatggccttccccacccggcgtatctggaatcgtttcaccgttcgcgtcgggtttcgacacagcggacttttgaggttagaacatgacgtgagttcttgcgagtatgaagacatacacataatgtggaatttgttacacaagaatgaagatcttacacgcgtaccaatccaacaacaacaacaacagaggaagaaaccttgttggaatcttcttggttcgtatctttgccaaagattctgatccgttttatgatataaaccaaaccattgttgtatttgagagagccttgacgggtcccttgcagtgtggtgtggttttattgacaaatttcgcaaataatgaatccgaggttgcagagttttaaattagctgttatatattccattgcatacctctatgtacttatcatcacatgagtgttgtatatatattacaaaatgctttacatagtttgatactacctatgttc

SEQ ID NO: 103429 - protein, 348 aa, Arabidopsis thaliana
  peptide (1)..(348): Ceres Seq. ID no. 13612752
  misc_feature (185)..(237): Pfam Name: Mpv17 / PMP22 family Pfam Description: Mpv17 / PMP22 family
  misc_feature (1)..(237): Homolog of NCBI NO: 9757841 NR Description: contains similarity to 22 kDa peroxisomal
  misc_feature (1)..(239): Homolog of NCBI NO: 18422298 NR Description: peroxisomal membrane protein family (22 kDa)
  misc_feature (1)..(239): Homolog of NCBI NO: 21553640 NR Description: contains similarity to 22 kDa peroxisomal
  misc_feature (60)..(230): Homolog of NCBI NO: 7485624 NR Description: hypothetical protein F17I5.90 - Arabidopsis >gi|3297814|emb|CAA19872.1| putative protein [Arabidopsis >gi|7270339|emb|CAB80107.1| putative protein [Arabidopsis
  misc_feature (60)..(239): Homolog of NCBI NO: 18418319 NR Description: peroxisomal membrane protein, putative (22 kDa) thaliana] >gi|11762212|gb|AAG40384.1|AF325032_1 AT4g33900
  misc_feature (68)..(239): Homolog of NCBI NO: 15226016 NR Description: peroxisomal membrane protein, putative (22 kDa) thaliana] >gi|25411581|pir||C84522 22 kDa peroxisomal membrane
  misc_feature (258)..(348): Homolog of NCBI NO: 15239192 NR Description: expressed protein [Arabidopsis thaliana] gene_id:MMG4.18~unknown protein [Arabidopsis thaliana]
  misc_feature (79)..(239): Homolog of NCBI NO: 32417658 NR Description: hypothetical protein [Neurospora crassa]
  misc_feature (69)..(239): Homolog of NCBI NO: 21594286 NR Description: unknown [Arabidopsis thaliana]
  misc_feature (69)..(239): Homolog of NCBI NO: 15241166 NR Description: expressed protein [Arabidopsis thaliana]
MNIVGLSKRFFSDRRSLHGINNALLKTVFTGRKPILGFSGRSIHELRKTGNFVIPRVFSVSRNLTTKASSSSSKQPAFLRWYLRKLESHPFMTKSITTSVIYMAADLTSQMITMEPTGSFDLIRTARMASFGLIFLGPSQHLWFSYLSKILPKRDVLTTFKKIMMGQVLFGPVSNTVFYSYNAALQGENSEEIVARLKRDLLPTLKNGLMYWPVCDFVTFKYVPVHLQLLLVTSVFGGWVSSPFLHPLSSLSLHFHLMAGLRWREWWNTMAFPTRRIWNRFTVRVGFRHSGLLRLEHDVSSCEYEDIHIMWNLLHKNEDLTRVPIQQQQQQRKKPCWNLLGSYLCQRF

SEQ ID NO: 103430 - protein, 257 aa, Arabidopsis thaliana
  peptide (1)..(257): Ceres Seq. ID no. 13612753
  misc_feature (94)..(146): Pfam Name: Mpv17 / PMP22 family Pfam Description: Mpv17 / PMP22 family
  misc_feature (1)..(146): Homolog of NCBI NO: 9757841 NR Description: contains similarity to 22 kDa peroxisomal
  misc_feature (1)..(148): Homolog of NCBI NO: 18422298 NR Description: peroxisomal membrane protein family (22 kDa)
  misc_feature (1)..(148): Homolog of NCBI NO: 21553640 NR Description: contains similarity to 22 kDa peroxisomal
  misc_feature (1)..(139): Homolog of NCBI NO: 7485624 NR Description: hypothetical protein F17I5.90 - Arabidopsis >gi|3297814|emb|CAA19872.1| putative protein [Arabidopsis >gi|7270339|emb|CAB80107.1| putative protein [Arabidopsis
  misc_feature (1)..(148): Homolog of NCBI NO: 18418319 NR Description: peroxisomal membrane protein, putative (22 kDa) thaliana] >gi|11762212|gb|AAG40384.1|AF325032_1 AT4g33900
  misc_feature (1)..(148): Homolog of NCBI NO: 15226016 NR Description: peroxisomal membrane protein, putative (22 kDa) thaliana] >gi|25411581|pir||C84522 22 kDa peroxisomal membrane
  misc_feature (167)..(257): Homolog of NCBI NO: 15239192 NR Description: expressed protein [Arabidopsis thaliana] gene_id:MMG4.18~unknown protein [Arabidopsis thaliana]
  misc_feature (1)..(148): Homolog of NCBI NO: 32417658 NR Description: hypothetical protein [Neurospora crassa]
  misc_feature (1)..(148): Homolog of NCBI NO: 21594286 NR Description: unknown [Arabidopsis thaliana]
  misc_feature (1)..(148): Homolog of NCBI NO: 15241166 NR Description: expressed protein [Arabidopsis thaliana]
MTKSITTSVIYMAADLTSQMITMEPTGSFDLIRTARMASFGLIFLGPSQHLWFSYLSKILPKRDVLTTFKKIMMGQVLFGPVSNTVFYSYNAALQGENSEEIVARLKRDLLPTLKNGLMYWPVCDFVTFKYVPVHLQLLLVTSVFGGWVSSPFLHPLSSLSLHFHLMAGLRWREWWNTMAFPTRRIWNRFTVRVGFRHSGLLRLEHDVSSCEYEDIHIMWNLLHKNEDLTRVPIQQQQQQRKKPCWNLLGSYLCQRF

SEQ ID NO: 103431 - protein, 246 aa, Arabidopsis thaliana
  peptide (1)..(246): Ceres Seq. ID no. 13612754
  misc_feature (83)..(135): Pfam Name: Mpv17 / PMP22 family Pfam Description: Mpv17 / PMP22 family
  misc_feature (1)..(135): Homolog of NCBI NO: 9757841 NR Description: contains similarity to 22 kDa peroxisomal
  misc_feature (1)..(137): Homolog of NCBI NO: 18422298 NR Description: peroxisomal membrane protein family (22 kDa)
  misc_feature (1)..(137): Homolog of NCBI NO: 21553640 NR Description: contains similarity to 22 kDa peroxisomal
  misc_feature (1)..(128): Homolog of NCBI NO: 7485624 NR Description: hypothetical protein F17I5.90 - Arabidopsis >gi|3297814|emb|CAA19872.1| putative protein [Arabidopsis >gi|7270339|emb|CAB80107.1| putative protein [Arabidopsis
  misc_feature (1)..(137): Homolog of NCBI NO: 18418319 NR Description: peroxisomal membrane protein, putative (22 kDa) thaliana] >gi|11762212|gb|AAG40384.1|AF325032_1 AT4g33900
  misc_feature (1)..(137): Homolog of NCBI NO: 15226016 NR Description: peroxisomal membrane protein, putative (22 kDa) thaliana] >gi|25411581|pir||C84522 22 kDa peroxisomal membrane
  misc_feature (156)..(246): Homolog of NCBI NO: 15239192 NR Description: expressed protein [Arabidopsis thaliana] gene_id:MMG4.18~unknown protein [Arabidopsis thaliana]
  misc_feature (1)..(137): Homolog of NCBI NO: 32417658 NR Description: hypothetical protein [Neurospora crassa]
  misc_feature (1)..(137): Homolog of NCBI NO: 21594286 NR Description: unknown [Arabidopsis thaliana]
  misc_feature (1)..(137): Homolog of NCBI NO: 15241166 NR Description: expressed protein [Arabidopsis thaliana]
MAADLTSQMITMEPTGSFDLIRTARMASFGLIFLGPSQHLWFSYLSKILPKRDVLTTFKKIMMGQVLFGPVSNTVFYSYNAALQGENSEEIVARLKRDLLPTLKNGLMYWPVCDFVTFKYVPVHLQLLLVTSVFGGWVSSPFLHPLSSLSLHFHLMAGLRWREWWNTMAFPTRRIWNRFTVRVGFRHSGLLRLEHDVSSCEYEDIHIMWNLLHKNEDLTRVPIQQQQQQRKKPCWNLLGSYLCQRF

SEQ ID NO: 103432 - DNA, 1239 bp, Arabidopsis thaliana
  misc_feature (1)..(1239): Ceres Seq. ID no. 13612762
  misc_feature: MA Experiment ID: 108434 Result: Down-regulated in Transcription
  misc_feature: MA Experiment 108434 PARAMETER Experiment Name: At_Root_Tips_cDNA_P Parameter: Tissue Value: Root Tips
atcttttcttacaaagactttttgacatctccccctccagctattatatagtctccttttttcttttctgcattcacataatatttcccctatatagtttacacaacatcatacccaccaacatatataatcttgatcatagagagataaacagaggccgctatcaagaacaagactaagaacaagacttcactaggagtacaagtatgggaagagcaccgtgttgtgacaaagcaaacgtgaagaaagggccttggtctcctgaggaagatgcaaaactcaaatcttacattgaaaatagtggcaccggaggcaattggatcgctttgcctcaaaagattggtttaaagagatgtggaaagagttgcaggctgaggtggcttaactatcttagaccaaacatcaaacatggtggcttctctgaggaagaagaaaacatcatttgtagcctttaccttacaattggtagcaggtggtctataatcgctgctcaattgccgggacgaacagacaacgatataaaaaactattggaacacgaggctcaagaagaaactcattaacaaacaacgcaaggagcttcaagaagcttgtatggagcagcaagagatgatggtgatgatgaagagacaacaccaacaacaacaaatccaaacttcttttatgatgagacaagaccaaacaatgttcacatggccactacatcatcataatgttcaagttccagctcttttcatgaatcaaaccaactcgttttgcgaccaagaagatgttaagccagtgctcatcaagaacatggtcaagatcgaagatcaagaactggagaaaacaaaccctcatcatcatcaagattcaatgacaaacgcttttgatcatctctctttctctcaactcttgttagatcctaatcataaccacttaggatcaggcgagggtttctccatgaactctatcttgagcgccaacacaaactctccattgcttaatacaagtaatgataatcagtggttcgggaatttccaggccgaaaccgtaaacttgttctcaggagcctccacaagtacttcggcagatcaaagcactataagttgggaagacataagctctcttgtttattctgattcaaagcaatttttttaattataataatatattattcttaagatgaaacgtacatcattattattaattgggggtacgtaacgtatatatggaataacgatctagtttgtttaaattt

SEQ ID NO: 103433 - protein, 310 aa, Arabidopsis thaliana; identical to SEQ ID NO: 43028
  peptide (1)..(310): Ceres Seq. ID no. 13612763
  misc_feature (14)..(62): Pfam Name: Myb-like DNA-binding domain Pfam Description: Myb-like DNA-binding domain
  misc_feature (1)..(310): Homolog of NCBI NO: 15229192 NR Description: myb family transcription factor(AtMYB84)
  misc_feature (1)..(310): Homolog of NCBI NO: 2832408 NR Description: R2R3-MYB transcription factor [Arabidopsis
  misc_feature (1)..(288): Homolog of NCBI NO: 11273952 NR Description: myb-related transcription factor MYB68 [imported] Arabidopsis thaliana >gi|3941494|gb|AAC83623.1| putative
  misc_feature (1)..(288): Homolog of NCBI NO: 15239158 NR Description: myb DNA-binding protein (MYB68) [Arabidopsis
  misc_feature (1)..(142): Homolog of NCBI NO: 19073324 NR Description: typical P-type R2R3 Myb protein [Sorghum bicolor]
  misc_feature (1)..(142): Homolog of NCBI NO: 33773103 NR Description: P-type R2R3 Myb protein [Sorghum bicolor]
  misc_feature (1)..(301): Homolog of NCBI NO: 15242793 NR Description: myb family transcription factor [Arabidopsis
  misc_feature (1)..(301): Homolog of NCBI NO: 11358686 NR Description: probable transcription factor MYB36 [imported] - thaliana >gi|3941448|gb|AAC83600.1| putative transcription factor
  misc_feature (1)..(122): Homolog of NCBI NO: 40253739 NR Description: putative P-type R2R3 Myb protein [Oryza sativa
  misc_feature (1)..(118): Homolog of NCBI NO: 18419456 NR Description: blind [Lycopersicon esculentum]

SEQ ID NO: 103434 - protein, 181 aa, Arabidopsis thaliana; identical to SEQ ID NO: 43029
  peptide (1)..(181): Ceres Seq. ID no. 13612764
  misc_feature (1)..(181): Homolog of NCBI NO: 15229192 NR Description: myb family transcription factor(AtMYB84)
  misc_feature (1)..(181): Homolog of NCBI NO: 2832408 NR Description: R2R3-MYB transcription factor [Arabidopsis
  misc_feature (1)..(159): Homolog of NCBI NO: 11273952 NR Description: myb-related transcription factor MYB68 [imported] Arabidopsis thaliana >gi|3941494|gb|AAC83623.1| putative
  misc_feature (1)..(159): Homolog of NCBI NO: 15239158 NR Description: myb DNA-binding protein (MYB68) [Arabidopsis
  misc_feature (1)..(13): Homolog of NCBI NO: 19073324 NR Description: typical P-type R2R3 Myb protein [Sorghum bicolor]
  misc_feature (1)..(13): Homolog of NCBI NO: 33773103 NR Description: P-type R2R3 Myb protein [Sorghum bicolor]
  misc_feature (1)..(172): Homolog of NCBI NO: 15242793 NR Description: myb family transcription factor [Arabidopsis
  misc_feature (1)..(172): Homolog of NCBI NO: 11358686 NR Description: probable transcription factor MYB36 [imported] - thaliana >gi|3941448|gb|AAC83600.1| putative transcription factor
  misc_feature (1)..(96): Homolog of NCBI NO: 15235710 NR Description: myb DNA-binding protein (AtMYB87) [Arabidopsis
  misc_feature (1)..(79): Homolog of NCBI NO: 6552361 NR Description: myb-related transcription factor LBM2 [Nicotiana

SEQ ID NO: 103435 - protein, 176 aa, Arabidopsis thaliana; identical to SEQ ID NO: 43030
  peptide (1)..(176): Ceres Seq. ID no. 13612765
  misc_feature (1)..(176): Homolog of NCBI NO: 15229192 NR Description: myb family transcription factor(AtMYB84)
  misc_feature (1)..(176): Homolog of NCBI NO: 2832408 NR Description: R2R3-MYB transcription factor [Arabidopsis
  misc_feature (1)..(154): Homolog of NCBI NO: 11273952 NR Description: myb-related transcription factor MYB68 [imported] Arabidopsis thaliana >gi|3941494|gb|AAC83623.1| putative
  misc_feature (1)..(154): Homolog of NCBI NO: 15239158 NR Description: myb DNA-binding protein (MYB68) [Arabidopsis
  misc_feature (1)..(167): Homolog of NCBI NO: 15242793 NR Description: myb family transcription factor [Arabidopsis
  misc_feature (1)..(167): Homolog of NCBI NO: 11358686 NR Description: probable transcription factor MYB36 [imported] - thaliana >gi|3941448|gb|AAC83600.1| putative transcription factor
  misc_feature (1)..(91): Homolog of NCBI NO: 15235710 NR Description: myb DNA-binding protein (AtMYB87) [Arabidopsis
  misc_feature (1)..(74): Homolog of NCBI NO: 6552361 NR Description: myb-related transcription factor LBM2 [Nicotiana
  misc_feature (1)..(99): Homolog of NCBI NO: 34147924 NR Description: R2R3-MYB transcription factor [Pinus taeda]
  misc_feature (1)..(39): Homolog of NCBI NO: 15226524 NR Description: MYB transcription factor (Atmyb2) [Arabidopsis

SEQ ID NO: 103436 - DNA, 1130 bp, Arabidopsis thaliana
  misc_feature (1)..(1130): Ceres Seq. ID no. 13612766
  misc_feature: MA Experiment ID: 108561 Result: Down-regulated in Transcription
  misc_feature: MA Experiment 108561 PARAMETER Experiment Name: At_100uM_ABA_cDNA_P Parameter: Timepoint (hr) Value: 6
  misc_feature: MA Experiment 108561 PARAMETER Experiment Name: At_100uM_ABA_cDNA_P Parameter: Tissue Value: Aerial
  misc_feature: MA Experiment 108561 PARAMETER Experiment Name: At_100uM_ABA_cDNA_P Parameter: Treatment Value: 100uM ABA vs. No Treatment
  misc_feature: MA Experiment ID: 108572 Result: Down-regulated in Transcription
  misc_feature: MA Experiment 108572 PARAMETER Experiment Name: At_Drought_cDNA_P Parameter: Timepoint (hr) Value: 1
  misc_feature: MA Experiment 108572 PARAMETER Experiment Name: At_Drought_cDNA_P Parameter: Tissue Value: Aerial
  misc_feature: MA Experiment 108572 PARAMETER Experiment Name: At_Drought_cDNA_P Parameter: Treatment Value: Drought vs. No Drought
  misc_feature: MA Experiment ID: 108577 Result: Down-regulated in Transcription
  misc_feature: MA Experiment 108577 PARAMETER Experiment Name: At_42deg_Heat_cDNA_P Parameter: Temperature (deg C) Value: 42 vs. 22
  misc_feature: MA Experiment 108577 PARAMETER Experiment Name: At_42deg_Heat_cDNA_P Parameter: Timepoint (hr) Value: 6
  misc_feature: MA Experiment 108577 PARAMETER Experiment Name: At_42deg_Heat_cDNA_P Parameter: Tissue Value: Aerial
  misc_feature: MA Experiment ID: 108579 Result: Up-regulated in Transcription
  misc_feature: MA Experiment 108579 PARAMETER Experiment Name: At_4deg_Cold_cDNA_P Parameter: Temperature (deg C) Value: 4 vs. 22
  misc_feature: MA Experiment 108579 PARAMETER Experiment Name: At_4deg_Cold_cDNA_P Parameter: Timepoint (hr) Value: 6
  misc_feature: MA Experiment 108579 PARAMETER Experiment Name: At_4deg_Cold_cDNA_P Parameter: Tissue Value: Aerial
  misc_feature: MA Experiment ID: 20000087 Result: Down-regulated in Transcription
  misc_feature: MA Experiment 20000087 PARAMETER Experiment Name: At_100uM_ABA_Mutants_cDNA_P Parameter: Plant Line Value: WS
  misc_feature: MA Experiment 20000087 PARAMETER Experiment Name: At_100uM_ABA_Mutants_cDNA_P Parameter: Timepoint (hr) Value: 6
  misc_feature: MA Experiment 20000087 PARAMETER Experiment Name: At_100uM_ABA_Mutants_cDNA_P Parameter: Tissue Value: Aerial
  misc_feature: MA Experiment 20000087 PARAMETER Experiment Name: At_100uM_ABA_Mutants_cDNA_P Parameter: Treatment Value: 100uM ABA vs. No Treatment
  misc_feature: MA Experiment ID: 20000180 Result: Up-regulated in Transcription
  misc_feature: MA Experiment 20000180 PARAMETER Experiment Name: At_Germinating_Seeds_P Parameter: Age (hr) Value: 24 vs. 0
  misc_feature: MA Experiment 20000180 PARAMETER Experiment Name: At_Germinating_Seeds_P Parameter: Tissue Value: Germinating Seeds
  misc_feature: MA Experiment ID: 20000213 Result: Up-regulated in Transcription
  misc_feature: MA Experiment 20000213 PARAMETER Experiment Name: At_4deg_Cold_P Parameter: Timepoint (hr) Value: 2
  misc_feature: MA Experiment ID: 20000437 Result: Down-regulated in Transcription
  misc_feature: MA Experiment 20000437 PARAMETER Experiment Name: At_Drought_P Parameter: Age (day) Value: 8
  misc_feature: MA Experiment 20000437 PARAMETER Experiment Name: At_Drought_P Parameter: Organism Value: A. thaliana
  misc_feature: MA Experiment 20000437 PARAMETER Experiment Name: At_Drought_P Parameter: Plant Line Value: WS
  misc_feature: MA Experiment 20000437 PARAMETER Experiment Name: At_Drought_P Parameter: Timepoint (hr) Value: 24
  misc_feature: MA Experiment 20000437 PARAMETER Experiment Name: At_Drought_P Parameter: Tissue Value: Whole Plant
  misc_feature: MA Experiment 20000437 PARAMETER Experiment Name: At_Drought_P Parameter: Treatment Value: Drought vs. No Drought
  misc_feature: MA Experiment ID: 20000794 Result: Down-regulated in Transcription
  misc_feature: MA Experiment 20000794 PARAMETER Experiment Name: At_Petals_P Parameter: Age (day) Value: 23-25 days
  misc_feature: MA Experiment 20000794 PARAMETER Experiment Name: At_Petals_P Parameter: Plant Line Value: WS
  misc_feature: MA Experiment 20000794 PARAMETER Experiment Name: At_Petals_P Parameter: Tissue Value: Petals vs. Whole plant
  misc_feature: MA Experiment ID: 20001451 Result: Down-regulated in Transcription
  misc_feature: MA Experiment 20001451 PARAMETER Experiment Name: At_Far-red-induction_P Parameter: Age (day) Value: 7
  misc_feature: MA Experiment 20001451 PARAMETER Experiment Name: At_Far-red-induction_P Parameter: Light Value: Far-red vs. White
  misc_feature: MA Experiment 20001451 PARAMETER Experiment Name: At_Far-red-induction_P Parameter: Organism Value: A. thaliana
  misc_feature: MA Experiment 20001451 PARAMETER Experiment Name: At_Far-red-induction_P Parameter: Plant Line Value: Columbia
  misc_feature: MA Experiment 20001451 PARAMETER Experiment Name: At_Far-red-induction_P Parameter: Timepoint (hr) Value: 24
  misc_feature: MA Experiment 20001451 PARAMETER Experiment Name: At_Far-red-induction_P Parameter: Tissue Value: Whole Plant
  misc_feature: MA Experiment ID: 20001911 Result: Down-regulated in Transcription
  misc_feature: MA Experiment 20001911 PARAMETER Experiment Name: At_Drought_Reproduction_P Parameter: Age (day) Value: 40
  misc_feature: MA Experiment 20001911 PARAMETER Experiment Name: At_Drought_Reproduction_P Parameter: Organism Value: A. thaliana
  misc_feature: MA Experiment 20001911 PARAMETER Experiment Name: At_Drought_Reproduction_P Parameter: Plant Line Value: WS
  misc_feature: MA Experiment 20001911 PARAMETER Experiment Name: At_Drought_Reproduction_P Parameter: Timepoint (day) Value: 10
  misc_feature: MA Experiment 20001911 PARAMETER Experiment Name: At_Drought_Reproduction_P Parameter: Tissue Value: Flowers
  misc_feature: MA Experiment 20001911 PARAMETER Experiment Name: At_Drought_Reproduction_P Parameter: Treatment Value: Drought vs. No Drought
gtgatattaacacttcgaagcttcttcttcctttagtaaattcaagtgtgaggtgtgtttattgataaagtgctcattttctcggatctcagatcttagatccaaaccctcattatttcattgatccaagatctaatagcttgagcttgctgggattttagttatggcgagacggcaagtaggttcaacaagacgtgttggcgatggtggaagcttcccttttgcaggagctttacactcaaagtctcgatcttctccactactatctatttgccttgttcttgtgggggcttgtcttctcattggttatgcttacagtggtccaggtatatttaaaagtatcaaagaagttagcaaagttacaggtgactattcttgcacagcagaagtccaaagagccattcctgtacttaagaaggcttatggagatggcatgcgcaaagtcttgcatgtgggccctgacacatgctcagtggtttccagtctattgaaagaagaagagactgaagcatggggtgttgaaccatatgatattgaggatgcagattctcactgcaagagttttgtgagcaaaggtcttgtacgtgttgctgatatcaagtttcctctgccctaccgggcaaaatccttctctcttgtgattgtgtcagatgctctggattatctctcacccaagtacctgaacaagaccgttcctgaactcgcaagggtggcttcagacggtgtggttctttttgcaggtctccctggtcagcagagagctaaagttgctgaactctctaaattcggccgacccgctaaaatgcgtagcgcatcgtggtggaaccgctttttcgtccagacaaacttagaagaaaacgatgcaccaagcaagaagttcgaacaggctgtttccaaaggattatacaaaccagcctgccaagtcttccacctcaagccattacattaaccagccaccaccaaagcctactggttccacaccaaagcatatttacacgtagagccgcacgcgaaaaaaaaaaatagcgtaatcgatatttctccttgtattttgtaacaggtcagtttttatccttcaatgttgtatccgccaacacaatttttcctattcaattaaatcataattatta

SEQ ID NO: 103437 - protein, 261 aa, Arabidopsis thaliana; identical to SEQ ID NO: 23144
  peptide (1)..(261): Ceres Seq. ID no. 13612767
  misc_feature (1)..(261): Homolog of NCBI NO: 18408931 NR Description: expressed protein [Arabidopsis thaliana]
  misc_feature (1)..(261): Homolog of NCBI NO: 21593192 NR Description: unknown [Arabidopsis thaliana]
  misc_feature (1)..(261): Homolog of NCBI NO: 18424995 NR Description: expressed protein [Arabidopsis thaliana]
  misc_feature (1)..(211): Homolog of NCBI NO: 9758568 NR Description: emb|CAB66910.1~gene_id:K22J17.2~similar to
  misc_feature (91)..(261): Homolog of NCBI NO: 16649137 NR Description: Unknown protein [Arabidopsis thaliana]
  misc_feature (1)..(257): Homolog of NCBI NO: 34895744 NR Description: P0019D06.30 [Oryza sativa (japonica

SEQ ID NO: 103438 - protein, 171 aa, Arabidopsis thaliana; identical to SEQ ID NO: 23145
  peptide (1)..(171): Ceres Seq. ID no. 13612768
  misc_feature (1)..(171): Homolog of NCBI NO: 18408931 NR Description: expressed protein [Arabidopsis thaliana]
  misc_feature (1)..(171): Homolog of NCBI NO: 21593192 NR Description: unknown [Arabidopsis thaliana]
  misc_feature (1)..(171): Homolog of NCBI NO: 18424995 NR Description: expressed protein [Arabidopsis thaliana]
  misc_feature (1)..(121): Homolog of NCBI NO: 9758568 NR Description: emb|CAB66910.1~gene_id:K22J17.2~similar to
  misc_feature (1)..(171): Homolog of NCBI NO: 16649137 NR Description: Unknown protein [Arabidopsis thaliana]
  misc_feature (1)..(167): Homolog of NCBI NO: 34895744 NR Description: P0019D06.30 [Oryza sativa (japonica

SEQ ID NO: 103439 - DNA, 1831 bp, Arabidopsis thaliana
  misc_feature (1)..(1831): Ceres Seq. ID no. 13612773
  misc_feature: MA Experiment ID: 20000069 Result: Down-regulated in Transcription
  misc_feature: MA Experiment 20000069 PARAMETER Experiment Name: At_100uM_ABA_Mutants_cDNA_P Parameter: Plant Line Value: CS23
  misc_feature: MA Experiment 20000069 PARAMETER Experiment Name: At_100uM_ABA_Mutants_cDNA_P Parameter: Timepoint (hr) Value: 6
  misc_feature: MA Experiment 20000069 PARAMETER Experiment Name: At_100uM_ABA_Mutants_cDNA_P Parameter: Tissue Value: Aerial
  misc_feature: MA Experiment 20000069 PARAMETER Experiment Name: At_100uM_ABA_Mutants_cDNA_P Parameter: Treatment Value: 100uM ABA vs. No Treatment
  misc_feature: MA Experiment ID: 20000089 Result: Down-regulated in Transcription
  misc_feature: MA Experiment ID: 20000173 Result: Down-regulated in Transcription
  misc_feature: MA Experiment 20000173 PARAMETER Experiment Name: At_42deg_Heat_P Parameter: Age (day) Value: 14
  misc_feature: MA Experiment 20000173 PARAMETER Experiment Name: At_42deg_Heat_P Parameter: Organism Value: A. thaliana
  misc_feature: MA Experiment 20000173 PARAMETER Experiment Name: At_42deg_Heat_P Parameter: Plant Line Value: WS
  misc_feature: MA Experiment 20000173 PARAMETER Experiment Name: At_42deg_Heat_P Parameter: Temperature (deg C) Value: 42 vs. 22
  misc_feature: MA Experiment 20000173 PARAMETER Experiment Name: At_42deg_Heat_P Parameter: Timepoint (hr) Value: 6
  misc_feature: MA Experiment 20000173 PARAMETER Experiment Name: At_42deg_Heat_P Parameter: Tissue Value: Aerial
  misc_feature: MA Experiment ID: 20000227 Result: Up-regulated in Transcription
  misc_feature: MA Experiment 20000227 PARAMETER Experiment Name: At_Root-Tips-vs-Tops_P Parameter: Tissue Value: Root Tips vs. Root Tops
  misc_feature: MA Experiment ID: 20000573 Result: Down-regulated in Transcription
  misc_feature: MA Experiment 20000573 PARAMETER Experiment Name: At_100uM_ABA_Mutants__P Parameter: Organism Value: A. thaliana
  misc_feature: MA Experiment 20000573 PARAMETER Experiment Name: At_100uM_ABA_Mutants__P Parameter: Plant Line Value: CS22 vs. Ler wt
  misc_feature: MA Experiment 20000573 PARAMETER Experiment Name: At_100uM_ABA_Mutants__P Parameter: Timepoint (hr) Value: N/A
  misc_feature: MA Experiment 20000573 PARAMETER Experiment Name: At_100uM_ABA_Mutants__P Parameter: Tissue Value: Whole Plant
  misc_feature: MA Experiment 20000573 PARAMETER Experiment Name: At_100uM_ABA_Mutants__P Parameter: Treatment Value: None
  misc_feature: MA Experiment ID: 20000574 Result: Down-regulated in Transcription
  misc_feature: MA Experiment 20000574 PARAMETER Experiment Name: At_100uM_ABA_Mutants__P Parameter: Organism Value: A. thaliana
  misc_feature: MA Experiment 20000574 PARAMETER Experiment Name: At_100uM_ABA_Mutants__P Parameter: Plant Line Value: CS23 vs. Ler wt
  misc_feature: MA Experiment 20000574 PARAMETER Experiment Name: At_100uM_ABA_Mutants__P Parameter: Timepoint (hr) Value: N/A
  misc_feature: MA Experiment 20000574 PARAMETER Experiment Name: At_100uM_ABA_Mutants__P Parameter: Tissue Value: Whole Plant
  misc_feature: MA Experiment 20000574 PARAMETER Experiment Name: At_100uM_ABA_Mutants__P Parameter: Treatment Value: None
  misc_feature: MA Experiment ID: 20001451 Result: Up-regulated in Transcription
  misc_feature: MA Experiment 20001451 PARAMETER Experiment Name: At_Far-red-induction_P Parameter: Age (day) Value: 7
  misc_feature: MA Experiment 20001451 PARAMETER Experiment Name: At_Far-red-induction_P Parameter: Light Value: Far-red vs. White
  misc_feature: MA Experiment 20001451 PARAMETER Experiment Name: At_Far-red-induction_P Parameter: Organism Value: A. thaliana
  misc_feature: MA Experiment 20001451 PARAMETER Experiment Name: At_Far-red-induction_P Parameter: Plant Line Value: Columbia
  misc_feature: MA Experiment 20001451 PARAMETER Experiment Name: At_Far-red-induction_P Parameter: Timepoint (hr) Value: 24
  misc_feature: MA Experiment 20001451 PARAMETER Experiment Name: At_Far-red-induction_P Parameter: Tissue Value: Whole Plant
  misc_feature: MA Experiment ID: 20001906 Result: Down-regulated in Transcription
  misc_feature: MA Experiment 20001906 PARAMETER Experiment Name: At_Drought_Reproduction_P Parameter: Age (day) Value: 35
  misc_feature: MA Experiment 20001906 PARAMETER Experiment Name: At_Drought_Reproduction_P Parameter: Organism Value: A. thaliana
  misc_feature: MA Experiment 20001906 PARAMETER Experiment Name: At_Drought_Reproduction_P Parameter: Plant Line Value: WS
  misc_feature: MA Experiment 20001906 PARAMETER Experiment Name: At_Drought_Reproduction_P Parameter: Timepoint (day) Value: 5
  misc_feature: MA Experiment 20001906 PARAMETER Experiment Name: At_Drought_Reproduction_P Parameter: Tissue Value: Siliques
  misc_feature: MA Experiment 20001906 PARAMETER Experiment Name: At_Drought_Reproduction_P Parameter: Treatment Value: Drought vs. No Drought
agattgtgttgttgttgttgttttaacgcttctttctgagataaagacatgcgtttctttttcagctcacattattttcccaaatgttgtgagtttgagaagaaaagtctgtttttttattgagatttttttgtttctatagattctatcgaaatgccgatgtttcagccgttaaagagagatgggttaataggatttgaaggtggtggtgatgggcaagtcttagatctggatactgcagtgaaagatggagttctcggtggtgttaatggtggtggtgttggagttgttgatgagaaattggatctgaagaagatgataaaggagctagatttacaagatataccttctgttttcatttgtcctatctccttagagccgatgcaagatcctgtgactttgtgtactggtcaaacctatgaaaggttaaacattcacaaatggtttaacctaggtcacttgacttgtcctactacaatgcaagagctttgggatgatacggtaactcctaataaaactcttcatcatttgatctatacttggttctctcagaagtatgtgttgatgaagaaacgttctgaggatgttcaaggacgagctattgagattttggggactttgaagaaagctaaaggtcaagctagggttcatgctttgagtgagcttaaacagattgttattgctcatcttatggcgaggaagactgttgttgaagaaggtggtgtctctgtgatctcttctcttttgggtccttttacttctcatgctgttggatctgaggttgttgctattcttgtgagtcttgatcttgattctgattcgaaatccggcttgatgcaaccagctaaggtttctttgattgttgatatgttgaatgatggatctaatgagactaagatcaattgtgctagattgattagaggattggtggaagagaaagggtttagagcagagcttgtttcaagtcatagtttgcttgttgggttaatgagattggttaaggataagagacatagaaatggagtatctcctgcacttcggttgcttaaaccgatttcggttcataaacaagttcgaagcttgatggttagcattggagcagtgcctcaattagttgatatcttaccgtctttagacccggaatgtttggagttagctctgtttgttcttgatgctttgtgtacagacgtggaaggaagagttgctgtcaaagactctgcaaacacaataccttatacagttagggtgctgatgagggtgtctgagaattgcactaactacgcgctgtcgattctttggtctgtctgcaaattagctccagaagaatgttcaccacttgctgttgaggttggtcttgctgcaaagctgttactcgtgatccagagcgggtgtgatgcagcgttgaagcagcggtcagcagagctacttaagctttgtagtctacattattcagacaccatgtttatttccaaatgcaaactcacaaggacaatccaatagcattggcactgattgatcacaggattcagcgggttatccatgaaacggtaaatgtgcattgcattacgaatctgcctttgccctgatgtatatatagatgatgagtttgaagattgagctattggttttggtggtaacaattcaaaggaagaggcaatcagctgatggaaacatggggaagacgaagaaaccgggtggttgagggatcggtatgtaatgttaccatattggttcgttttgcaataagcattgggaattagaaaaaaactgtgtaaagttaccgcctctggctcaaatcaatttcagaagaacaaagaaaaagaagaatttg

SEQ ID NO: 103440 - protein, 448 aa, Arabidopsis thaliana
  peptide (1)..(448): Ceres Seq. ID no. 13612774
  misc_feature (63)..(137): Pfam Name: U-box domain Pfam Description: U-box domain
  misc_feature (1)..(420): Homolog of NCBI NO: 11358045 NR Description: hypothetical protein T16K5.160 - Arabidopsis >gi|6723426|emb|CAB66919.1| putative protein [Arabidopsis
  misc_feature (1)..(448): Homolog of NCBI NO: 18408953 NR Description: expressed protein [Arabidopsis thaliana]
  misc_feature (1)..(448): Homolog of NCBI NO: 21536926 NR Description: unknown [Arabidopsis thaliana]
  misc_feature (1)..(448): Homolog of NCBI NO: 15239204 NR Description: expressed protein [Arabidopsis thaliana]
  misc_feature (1)..(448): Homolog of NCBI NO: 17064800 NR Description: Unknown protein [Arabidopsis thaliana]
  misc_feature (1)..(440): Homolog of NCBI NO: 7486518 NR Description: hypothetical protein F6H11.10 - Arabidopsis >gi|2827699|emb|CAA16672.1| predicted protein [Arabidopsis
  misc_feature (64)..(447): Homolog of NCBI NO: 20330772 NR Description: Unknown protein [Oryza sativa (japonica
  misc_feature (21)..(157): Homolog of NCBI NO: 20330772 NR Description: Unknown protein [Oryza sativa (japonica
  misc_feature (64)..(426): Homolog of NCBI NO: 13539578 NR Description: photoperiod responsive protein [Solanum tuberosum
  misc_feature (63)..(440): Homolog of NCBI NO: 25408431 NR Description: hypothetical protein At2g35930 [imported] - thaliana >gi|4510376|gb|AAD21464.1| unknown protein [Arabidopsis
MPMFQPLKRDGLIGFEGGGDGQVLDLDTAVKDGVLGGVNGGGVGVVDEKLDLKKMIKELDLQDIPSVFICPISLEPMQDPVTLCTGQTYERLNIHKWFNLGHLTCPTTMQELWDDTVTPNKTLHHLIYTWFSQKYVLMKKRSEDVQGRAIEILGTLKKAKGQARVHALSELKQIVIAHLMARKTVVEEGGVSVISSLLGPFTSHAVGSEVVAILVSLDLDSDSKSGLMQPAKVSLIVDMLNDGSNETKINCARLIRGLVEEKGFRAELVSSHSLLVGLMRLVKDKRHRNGVSPALRLLKPISVHKQVRSLMVSIGAVPQLVDILPSLDPECLELALFVLDALCTDVEGRVAVKDSANTIPYTVRVLMRVSENCTNYALSILWSVCKLAPEECSPLAVEVGLAAKLLLVIQSGCDAALKQRSAELLKLCSLHYSDTMFISKCKLTRTIQ

SEQ ID NO: 103441 - protein, 446 aa, Arabidopsis thaliana
  peptide (1)..(446): Ceres Seq. ID no. 13612775
  misc_feature (61)..(135): Pfam Name: U-box domain Pfam Description: U-box domain
  misc_feature (1)..(418): Homolog of NCBI NO: 11358045 NR Description: hypothetical protein T16K5.160 - Arabidopsis >gi|6723426|emb|CAB66919.1| putative protein [Arabidopsis
  misc_feature (1)..(446): Homolog of NCBI NO: 18408953 NR Description: expressed protein [Arabidopsis thaliana]
  misc_feature (1)..(446): Homolog of NCBI NO: 21536926 NR Description: unknown [Arabidopsis thaliana]
  misc_feature (1)..(446): Homolog of NCBI NO: 15239204 NR Description: expressed protein [Arabidopsis thaliana]
  misc_feature (1)..(446): Homolog of NCBI NO: 17064800 NR Description: Unknown protein [Arabidopsis thaliana]
  misc_feature (1)..(438): Homolog of NCBI NO: 7486518 NR Description: hypothetical protein F6H11.10 - Arabidopsis >gi|2827699|emb|CAA16672.1| predicted protein [Arabidopsis
  misc_feature (62)..(445): Homolog of NCBI NO: 20330772 NR Description: Unknown protein [Oryza sativa (japonica
  misc_feature (19)..(155): Homolog of NCBI NO: 20330772 NR Description: Unknown protein [Oryza sativa (japonica
  misc_feature (62)..(424): Homolog of NCBI NO: 13539578 NR Description: photoperiod responsive protein [Solanum tuberosum
  misc_feature (61)..(438): Homolog of NCBI NO: 25408431 NR Description: hypothetical protein At2g35930 [imported] - thaliana >gi|4510376|gb|AAD21464.1| unknown protein [Arabidopsis
MFQPLKRDGLIGFEGGGDGQVLDLDTAVKDGVLGGVNGGGVGVVDEKLDLKKMIKELDLQDIPSVFICPISLEPMQDPVTLCTGQTYERLNIHKWFNLGHLTCPTTMQELWDDTVTPNKTLHHLIYTWFSQKYVLMKKRSEDVQGRAIEILGTLKKAKGQARVHALSELKQIVIAHLMARKTVVEEGGVSVISSLLGPFTSHAVGSEVVAILVSLDLDSDSKSGLMQPAKVSLIVDMLNDGSNETKINCARLIRGLVEEKGFRAELVSSHSLLVGLMRLVKDKRHRNGVSPALRLLKPISVHKQVRSLMVSIGAVPQLVDILPSLDPECLELALFVLDALCTDVEGRVAVKDSANTIPYTVRVLMRVSENCTNYALSILWSVCKLAPEECSPLAVEVGLAAKLLLVIQSGCDAALKQRSAELLKLCSLHYSDTMFISKCKLTRTIQ

SEQ ID NO: 103442 - protein, 394 aa, Arabidopsis thaliana
  peptide (1)..(394): Ceres Seq. ID no. 13612776
  misc_feature (9)..(83): Pfam Name: U-box domain Pfam Description: U-box domain
  misc_feature (1)..(366): Homolog of NCBI NO: 11358045 NR Description: hypothetical protein T16K5.160 - Arabidopsis >gi|6723426|emb|CAB66919.1| putative protein [Arabidopsis
  misc_feature (1)..(394): Homolog of NCBI NO: 18408953 NR Description: expressed protein [Arabidopsis thaliana]
  misc_feature (1)..(394): Homolog of NCBI NO: 21536926 NR Description: unknown [Arabidopsis thaliana]
  misc_feature (1)..(394): Homolog of NCBI NO: 15239204 NR Description: expressed protein [Arabidopsis thaliana]
  misc_feature (1)..(394): Homolog of NCBI NO: 17064800 NR Description: Unknown protein [Arabidopsis thaliana]
  misc_feature (1)..(386): Homolog of NCBI NO: 7486518 NR Description: hypothetical protein F6H11.10 - Arabidopsis >gi|2827699|emb|CAA16672.1| predicted protein [Arabidopsis
  misc_feature (10)..(393): Homolog of NCBI NO: 20330772 NR Description: Unknown protein [Oryza sativa (japonica
  misc_feature (1)..(103): Homolog of NCBI NO: 20330772 NR Description: Unknown protein [Oryza sativa (japonica
  misc_feature (10)..(372): Homolog of NCBI NO: 13539578 NR Description: photoperiod responsive protein [Solanum tuberosum
  misc_feature (9)..(386): Homolog of NCBI NO: 25408431 NR Description: hypothetical protein At2g35930 [imported] - thaliana >gi|4510376|gb|AAD21464.1| unknown protein [Arabidopsis
MIKELDLQDIPSVFICPISLEPMQDPVTLCTGQTYERLNIHKWFNLGHLTCPTTMQELWDDTVTPNKTLHHLIYTWFSQKYVLMKKRSEDVQGRAIEILGTLKKAKGQARVHALSELKQIVIAHLMARKTVVEEGGVSVISSLLGPFTSHAVGSEVVAILVSLDLDSDSKSGLMQPAKVSLIVDMLNDGSNETKINCARLIRGLVEEKGFRAELVSSHSLLVGLMRLVKDKRHRNGVSPALRLLKPISVHKQVRSLMVSIGAVPQLVDILPSLDPECLELALFVLDALCTDVEGRVAVKDSANTIPYTVRVLMRVSENCTNYALSILWSVCKLAPEECSPLAVEVGLAAKLLLVIQSGCDAALKQRSAELLKLCSLHYSDTMFISKCKLTRTIQ

SEQ ID NO: 103443 - DNA, 959 bp, Arabidopsis thaliana
  misc_feature (1)..(959): Ceres Seq. ID no. 13612781
  misc_feature: MA Experiment ID: 108474 Result: Down-regulated in Transcription
  misc_feature: MA Experiment 108474 PARAMETER Experiment Name: At_Drought_Flowers_cDNA_P Parameter: Timepoint (hr) Value: null
  misc_feature: MA Experiment 108474 PARAMETER Experiment Name: At_Drought_Flowers_cDNA_P Parameter: Treatment Value: Drought vs. No Drought
  misc_feature: MA Experiment ID: 108501 Result: Down-regulated in Transcription
  misc_feature: MA Experiment 108501 PARAMETER Experiment Name: At_ap2_floral_buds_cDNA_P Parameter: Plant Line Value: ap2 (Ler.)
  misc_feature: MA Experiment 108501 PARAMETER Experiment Name: At_ap2_floral_buds_cDNA_P Parameter: Tissue Value: Closed Flower
  misc_feature: MA Experiment ID: 20000182 Result: Down-regulated in Transcription
  misc_feature: MA Experiment 20000182 PARAMETER Experiment Name: At_2mM_SA_P Parameter: Age (day) Value: 14
  misc_feature: MA Experiment 20000182 PARAMETER Experiment Name: At_2mM_SA_P Parameter: Organism Value: A. thaliana
  misc_feature: MA Experiment 20000182 PARAMETER Experiment Name: At_2mM_SA_P Parameter: Plant Line Value: WS
  misc_feature: MA Experiment 20000182 PARAMETER Experiment Name: At_2mM_SA_P Parameter: Timepoint (hr) Value: 6
  misc_feature: MA Experiment 20000182 PARAMETER Experiment Name: At_2mM_SA_P Parameter: Tissue Value: Aerial
  misc_feature: MA Experiment 20000182 PARAMETER Experiment Name: At_2mM_SA_P Parameter: Treatment Value: 2mM SA vs. No Treatment
  misc_feature: MA Experiment ID: 20000265 Result: Up-regulated in Transcription
  misc_feature: MA Experiment 20000265 PARAMETER Experiment Name: At_Open_Flower_P Parameter: Age (day) Value: 21
  misc_feature: MA Experiment 20000265 PARAMETER Experiment Name: At_Open_Flower_P Parameter: Plant Line Value: WS
  misc_feature: MA Experiment 20000265 PARAMETER Experiment Name: At_Open_Flower_P Parameter: Tissue Value: Closed Flower vs. Whole Plant
  misc_feature: MA Experiment ID: 20000286 Result: Up-regulated in Transcription
  misc_feature: MA Experiment 20000286 PARAMETER Experiment Name: At_Open_Flower_P Parameter: Age (day) Value: 21
  misc_feature: MA Experiment 20000286 PARAMETER Experiment Name: At_Open_Flower_P Parameter: Plant Line Value: WS
  misc_feature: MA Experiment 20000286 PARAMETER Experiment Name: At_Open_Flower_P Parameter: Tissue Value: Half Open vs. Whole Plant
  misc_feature: MA Experiment ID: 20000709 Result: Down-regulated in Transcription
  misc_feature: MA Experiment 20000709 PARAMETER Experiment Name: At_15mM_NH4NO3_L-to-H_P Parameter: Age (hr) Value: 14
  misc_feature: MA Experiment 20000709 PARAMETER Experiment Name: At_15mM_NH4NO3_L-to-H_P Parameter: Organism Value: A. thaliana
  misc_feature: MA Experiment 20000709 PARAMETER Experiment Name: At_15mM_NH4NO3_L-to-H_P Parameter: Plant Line Value: WS
  misc_feature: MA Experiment 20000709 PARAMETER Experiment Name: At_15mM_NH4NO3_L-to-H_P Parameter: Timepoint (hr) Value: 4
  misc_feature: MA Experiment 20000709 PARAMETER Experiment Name: At_15mM_NH4NO3_L-to-H_P Parameter: Tissue Value: Aerial
  misc_feature: MA Experiment 20000709 PARAMETER Experiment Name: At_15mM_NH4NO3_L-to-H_P Parameter: Treatment Value: 15mM NH4NO3 vs. 30mM Mannitol
  misc_feature: MA Experiment ID: 20001773 Result: Up-regulated in Transcription
  misc_feature: MA Experiment 20001773 PARAMETER Experiment Name: At_Far-red-enriched-adult_P Parameter: Age (day) Value: 30
  misc_feature: MA Experiment 20001773 PARAMETER Experiment Name: At_Far-red-enriched-adult_P Parameter: Light Value: Far-red enriched vs. White
  misc_feature: MA Experiment 20001773 PARAMETER Experiment Name: At_Far-red-enriched-adult_P Parameter: Organism Value: A. thaliana
  misc_feature: MA Experiment 20001773 PARAMETER Experiment Name: At_Far-red-enriched-adult_P Parameter: Plant Line Value: Columbia
  misc_feature: MA Experiment 20001773 PARAMETER Experiment Name: At_Far-red-enriched-adult_P Parameter: Timepoint (hr) Value: 48
  misc_feature: MA Experiment 20001773 PARAMETER Experiment Name: At_Far-red-enriched-adult_P Parameter: Tissue Value: Aerial
  misc_feature: MA Experiment ID: 20001910 Result: Down-regulated in Transcription
  misc_feature: MA Experiment 20001910 PARAMETER Experiment Name: At_Drought_Reproduction_P Parameter: Age (day) Value: 37
  misc_feature: MA Experiment 20001910 PARAMETER Experiment Name: At_Drought_Reproduction_P Parameter: Organism Value: A. thaliana
  misc_feature: MA Experiment 20001910 PARAMETER Experiment Name: At_Drought_Reproduction_P Parameter: Plant Line Value: WS
  misc_feature: MA Experiment 20001910 PARAMETER Experiment Name: At_Drought_Reproduction_P Parameter: Timepoint (day) Value: 7
  misc_feature: MA Experiment 20001910 PARAMETER Experiment Name: At_Drought_Reproduction_P Parameter: Tissue Value: Flowers
  misc_feature: MA Experiment 20001910 PARAMETER Experiment Name: At_Drought_Reproduction_P Parameter: Treatment Value: Drought vs. No Drought
caagatcgtcaagagacagtaaacctaaaatggcgaactcagacaaaagattattcgagaaggtagctataataaccggaggagcaagagggataggagcggccacggcgagattgttcacagagaatggcgcgtatgtgatagtcgcggatatccttgagaatgaaggcatccttgtggcggaatcgatcggtgggtgttacgttcattgtgacgtatcgaaggaggctgatgttgaggcggcagtggagctagcaatgagacgtaaaggtagactagatgtgatgttcaacaatgccgggatgtcgcttaacgaaggtagtatcatggggatggacgtggacatggttaacaaacttgtctcggttaatgtcaatggtgttttgcatggtatcaaacatgccgctaaggccatgatcaaagggggacgaggaggctcgataatatgcacatcgagctcatcagggctaatgggaggacttggaggacatgcgtatacgctctccaaaggagccatcaacggggtggtgaggacaacggcgtgcgagcttgggtctcacggcatccgtgtgaatagcatctctcctcatggagttcccactgacatcttggttaatgcgtaccgtaagttccttaaccatgacaaactcaacgtcgctgaggtcaccgacattattgctgagaaagggagtttgctgaccggaagagccggtactgtggaggacgtagctcaagcagctttgtttcttgcaagccaagaatcgtcggggttcattaccggacataacttggttgttgatggtggttacacatctgccactagtactatgagatttatctacaactagttttcgtttggtggtgtttccttttcaaagttgttctttgaaaaaagaaaaaaaaaaagagtttatcttaattgctaacttgtcaatctttcttaattcggttgaataatc

SEQ ID NO: 103444 - protein, 281 aa, Arabidopsis thaliana
  peptide (1)..(281): Ceres Seq. ID no. 13612782
  misc_feature (10)..(281): Homolog of NCBI NO: 15229190 NR Description: tapetal-specific alcohol dehydrogenase (ATA1)
  misc_feature (10)..(281): Homolog of NCBI NO: 21554236 NR Description: alcohol dehydrogenase (ATA1) [Arabidopsis
  misc_feature (10)..(281): Homolog of NCBI NO: 2501781 NR Description: alcohol dehydrogenase [Arabidopsis thaliana]
  misc_feature (11)..(280): Homolog of NCBI NO: 1293690 NR Description: STA1-12
  misc_feature (11)..(280): Homolog of NCBI NO: 1293688 NR Description: STA1-2 >gi|1293692|gb|AAB42055.1| STA1-18
  misc_feature (11)..(270): Homolog of NCBI NO: 30688484 NR Description: short-chain dehydrogenase/reductase family protein
  misc_feature (15)..(272): Homolog of NCBI NO: 15230558 NR Description: short-chain dehydrogenase/reductase family protein
  misc_feature (12)..(276): Homolog of NCBI NO: 33146885 NR Description: putative short-chain alcohol dehydrogenase [Oryza
  misc_feature (15)..(276): Homolog of NCBI NO: 34898190 NR Description: putative short-chain alcohol dehydrogenase [Oryza
  misc_feature (15)..(270): Homolog of NCBI NO: 34899216 NR Description: alcohol dehydrogenase-like protein [Oryza sativa
RSSRDSKPKMANSDKRLFEKVAIITGGARGIGAATARLFTENGAYVIVADILENEGILVAESIGGCYVHCDVSKEADVEAAVELAMRRKGRLDVMFNNAGMSLNEGSIMGMDVDMVNKLVSVNVNGVLHGIKHAAKAMIKGGRGGSIICTSSSSGLMGGLGGHAYTLSKGAINGVVRTTACELGSHGIRVNSISPHGVPTDILVNAYRKFLNHDKLNVAEVTDIIAEKGSLLTGRAGTVEDVAQAALFLASQESSGFITGHNLVVDGGYTSATSTMRFIYN

SEQ ID NO: 103445 - protein, 272 aa, Arabidopsis thaliana
  peptide (1)..(272): Ceres Seq. ID no. 13612783
  misc_feature (1)..(272): Homolog of NCBI NO: 15229190 NR Description: tapetal-specific alcohol dehydrogenase (ATA1)
  misc_feature (1)..(272): Homolog of NCBI NO: 21554236 NR Description: alcohol dehydrogenase (ATA1) [Arabidopsis
  misc_feature (1)..(272): Homolog of NCBI NO: 2501781 NR Description: alcohol dehydrogenase [Arabidopsis thaliana]
  misc_feature (2)..(271): Homolog of NCBI NO: 1293690 NR Description: STA1-12
  misc_feature (2)..(271): Homolog of NCBI NO: 1293688 NR Description: STA1-2 >gi|1293692|gb|AAB42055.1| STA1-18
  misc_feature (2)..(261): Homolog of NCBI NO: 30688484 NR Description: short-chain dehydrogenase/reductase family protein
  misc_feature (6)..(263): Homolog of NCBI NO: 15230558 NR Description: short-chain dehydrogenase/reductase family protein
  misc_feature (3)..(267): Homolog of NCBI NO: 33146885 NR Description: putative short-chain alcohol dehydrogenase [Oryza
  misc_feature (6)..(267): Homolog of NCBI NO: 34898190 NR Description: putative short-chain alcohol dehydrogenase [Oryza
  misc_feature (6)..(261): Homolog of NCBI NO: 34899216 NR Description: alcohol dehydrogenase-like protein [Oryza sativa
MANSDKRLFEKVAIITGGARGIGAATARLFTENGAYVIVADILENEGILVAESIGGCYVHCDVSKEADVEAAVELAMRRKGRLDVMFNNAGMSLNEGSIMGMDVDMVNKLVSVNVNGVLHGIKHAAKAMIKGGRGGSIICTSSSSGLMGGLGGHAYTLSKGAINGVVRTTACELGSHGIRVNSISPHGVPTDILVNAYRKFLNHDKLNVAEVTDIIAEKGSLLTGRAGTVEDVAQAALFLASQESSGFITGHNLVVDGGYTSATSTMRFIYN

SEQ ID NO: 103446 - protein, 196 aa, Arabidopsis thaliana
  peptide (1)..(196): Ceres Seq. ID no. 13612784
  misc_feature (1)..(196): Homolog of NCBI NO: 15229190 NR Description: tapetal-specific alcohol dehydrogenase (ATA1)
  misc_feature (1)..(196): Homolog of NCBI NO: 21554236 NR Description: alcohol dehydrogenase (ATA1) [Arabidopsis
  misc_feature (1)..(196): Homolog of NCBI NO: 2501781 NR Description: alcohol dehydrogenase [Arabidopsis thaliana]
  misc_feature (1)..(195): Homolog of NCBI NO: 1293690 NR Description: STA1-12
  misc_feature (1)..(195): Homolog of NCBI NO: 1293688 NR Description: STA1-2 >gi|1293692|gb|AAB42055.1| STA1-18
  misc_feature (1)..(185): Homolog of NCBI NO: 30688484 NR Description: short-chain dehydrogenase/reductase family protein
  misc_feature (1)..(187): Homolog of NCBI NO: 15230558 NR Description: short-chain dehydrogenase/reductase family protein
  misc_feature (1)..(191): Homolog of NCBI NO: 33146885 NR Description: putative short-chain alcohol dehydrogenase [Oryza
  misc_feature (1)..(191): Homolog of NCBI NO: 34898190 NR Description: putative short-chain alcohol dehydrogenase [Oryza
  misc_feature (1)..(185): Homolog of NCBI NO: 34899216 NR Description: alcohol dehydrogenase-like protein [Oryza sativa
MRRKGRLDVMFNNAGMSLNEGSIMGMDVDMVNKLVSVNVNGVLHGIKHAAKAMIKGGRGGSIICTSSSSGLMGGLGGHAYTLSKGAINGVVRTTACELGSHGIRVNSISPHGVPTDILVNAYRKFLNHDKLNVAEVTDIIAEKGSLLTGRAGTVEDVAQAALFLASQESSGFITGHNLVVDGGYTSATSTMRFIYN

SEQ ID NO: 103447 - DNA, 1405 bp, Arabidopsis thaliana
  misc_feature (1)..(1405): Ceres Seq. ID no. 13612791
  misc_feature: MA Experiment ID: 108434 Result: Down-regulated in Transcription
  misc_feature: MA Experiment 108434 PARAMETER Experiment Name: At_Root_Tips_cDNA_P Parameter: Tissue Value: Root Tips
  misc_feature: MA Experiment ID: 108463 Result: Up-regulated in Transcription
  misc_feature: MA Experiment 108463 PARAMETER Experiment Name: At_Germinating_Seeds_cDNA_P Parameter: Age (day) Value: 3 vs. 0
  misc_feature: MA Experiment 108463 PARAMETER Experiment Name: At_Germinating_Seeds_cDNA_P Parameter: Tissue Value: Germinating Seeds
  misc_feature: MA Experiment ID: 108488 Result: Down-regulated in Transcription
  misc_feature: MA Experiment ID: 108572 Result: Up-regulated in Transcription
  misc_feature: MA Experiment 108572 PARAMETER Experiment Name: At_Drought_cDNA_P Parameter: Timepoint (hr) Value: 1
  misc_feature: MA Experiment 108572 PARAMETER Experiment Name: At_Drought_cDNA_P Parameter: Tissue Value: Aerial
  misc_feature: MA Experiment 108572 PARAMETER Experiment Name: At_Drought_cDNA_P Parameter: Treatment Value: Drought vs. No Drought
  misc_feature: MA Experiment ID: 108573 Result: Up-regulated in Transcription
  misc_feature: MA Experiment 108573 PARAMETER Experiment Name: At_Drought_cDNA_P Parameter: Timepoint (hr) Value: 6
  misc_feature: MA Experiment 108573 PARAMETER Experiment Name: At_Drought_cDNA_P Parameter: Tissue Value: Aerial
  misc_feature: MA Experiment 108573 PARAMETER Experiment Name: At_Drought_cDNA_P Parameter: Treatment Value: Drought vs. No Drought
  misc_feature: MA Experiment ID: 108576 Result: Up-regulated in Transcription
  misc_feature: MA Experiment 108576 PARAMETER Experiment Name: At_42deg_Heat_cDNA_P Parameter: Temperature (deg C) Value: 42 vs. 22
  misc_feature: MA Experiment 108576 PARAMETER Experiment Name: At_42deg_Heat_cDNA_P Parameter: Timepoint (hr) Value: 1
  misc_feature: MA Experiment 108576 PARAMETER Experiment Name: At_42deg_Heat_cDNA_P Parameter: Tissue Value: Aerial
  misc_feature: MA Experiment ID: 108594 Result: Down-regulated in Transcription
  misc_feature: MA Experiment 108594 PARAMETER Experiment Name: At_Ler-rhl_Root_cDNA_P Parameter: Plant Line Value: null
  misc_feature: MA Experiment ID: 108605 Result: Up-regulated in Transcription
  misc_feature: MA Experiment 108605 PARAMETER Experiment Name: At_100uM_ABA_cDNA_P Parameter: Timepoint (hr) Value: 6
  misc_feature: MA Experiment 108605 PARAMETER Experiment Name: At_100uM_ABA_cDNA_P Parameter: Tissue Value: Aerial
  misc_feature: MA Experiment 108605 PARAMETER Experiment Name: At_100uM_ABA_cDNA_P Parameter: Treatment Value: 100uM ABA vs. No Treatment
  misc_feature: MA Experiment ID: 108607 Result: Up-regulated in Transcription
  misc_feature: MA Experiment 108607 PARAMETER Experiment Name: At_100uM_ABA_cDNA_P Parameter: Timepoint (hr) Value: 4
  misc_feature: MA Experiment 108607 PARAMETER Experiment Name: At_100uM_ABA_cDNA_P Parameter: Tissue Value: Aerial
  misc_feature: MA Experiment 108607 PARAMETER Experiment Name: At_100uM_ABA_cDNA_P Parameter: Treatment Value: 100uM ABA vs. No Treatment
  misc_feature: MA Experiment ID: 108608 Result: Up-regulated in Transcription
  misc_feature: MA Experiment 108608 PARAMETER Experiment Name: At_100uM_ABA_cDNA_P Parameter: Timepoint (hr) Value: 1
  misc_feature: MA Experiment 108608 PARAMETER Experiment Name: At_100uM_ABA_cDNA_P Parameter: Tissue Value: Aerial
  misc_feature: MA Experiment 108608 PARAMETER Experiment Name: At_100uM_ABA_cDNA_P Parameter: Treatment Value: 100uM ABA vs. No Treatment
  misc_feature: MA Experiment ID: 108668 Result: Up-regulated in Transcription
  misc_feature: MA Experiment 108668 PARAMETER Experiment Name: At_2mM_SA_cDNA_P Parameter: Plant Line Value: WS
  misc_feature: MA Experiment 108668 PARAMETER Experiment Name: At_2mM_SA_cDNA_P Parameter: Timepoint (hr) Value: 6
  misc_feature: MA Experiment 108668 PARAMETER Experiment Name: At_2mM_SA_cDNA_P Parameter: Treatment Value: 2mM SA vs. No Treatment
  misc_feature: MA Experiment ID: 20000070 Result: Up-regulated in Transcription
  misc_feature: MA Experiment 20000070 PARAMETER Experiment Name: At_100uM_ABA_Mutants_cDNA_P Parameter: Plant Line Value: CS24
  misc_feature: MA Experiment 20000070 PARAMETER Experiment Name: At_100uM_ABA_Mutants_cDNA_P Parameter: Timepoint (hr) Value: 6
  misc_feature: MA Experiment 20000070 PARAMETER Experiment Name: At_100uM_ABA_Mutants_cDNA_P Parameter: Tissue Value: Aerial
  misc_feature: MA Experiment 20000070 PARAMETER Experiment Name: At_100uM_ABA_Mutants_cDNA_P Parameter: Treatment Value: 100uM ABA vs. No Treatment
  misc_feature: MA Experiment ID: 20000071 Result: Up-regulated in Transcription
  misc_feature: MA Experiment 20000071 PARAMETER Experiment Name: At_100uM_ABA_Mutants_cDNA_P Parameter: Plant Line Value: CS8104
  misc_feature: MA Experiment 20000071 PARAMETER Experiment Name: At_100uM_ABA_Mutants_cDNA_P Parameter: Timepoint (hr) Value: 6
  misc_feature: MA Experiment 20000071 PARAMETER Experiment Name: At_100uM_ABA_Mutants_cDNA_P Parameter: Tissue Value: Aerial
  misc_feature: MA Experiment 20000071 PARAMETER Experiment Name: At_100uM_ABA_Mutants_cDNA_P Parameter: Treatment Value: 100uM ABA vs. No Treatment
  misc_feature: MA Experiment ID: 20000072 Result: Up-regulated in Transcription
  misc_feature: MA Experiment 20000072 PARAMETER Experiment Name: At_100uM_ABA_Mutants_cDNA_P Parameter: Plant Line Value: CS8105
  misc_feature: MA Experiment 20000072 PARAMETER Experiment Name: At_100uM_ABA_Mutants_cDNA_P Parameter: Timepoint (hr) Value: 6
  misc_feature: MA Experiment 20000072 PARAMETER Experiment Name: At_100uM_ABA_Mutants_cDNA_P Parameter: Tissue Value: Aerial
  misc_feature: MA Experiment 20000072 PARAMETER Experiment Name: At_100uM_ABA_Mutants_cDNA_P Parameter: Treatment Value: 100uM ABA vs. No Treatment
  misc_feature: MA Experiment ID: 20000088 Result: Up-regulated in Transcription
  misc_feature: MA Experiment 20000088 PARAMETER Experiment Name: At_100uM_ABA_Mutants_cDNA_P Parameter: Plant Line Value: Landsberg
  misc_feature: MA Experiment 20000088 PARAMETER Experiment Name: At_100uM_ABA_Mutants_cDNA_P Parameter: Timepoint (hr) Value: 6
  misc_feature: MA Experiment 20000088 PARAMETER Experiment Name: At_100uM_ABA_Mutants_cDNA_P Parameter: Tissue Value: Aerial
  misc_feature: MA Experiment 20000088 PARAMETER Experiment Name: At_100uM_ABA_Mutants_cDNA_P Parameter: Treatment Value: 100uM ABA vs. No Treatment
  misc_feature: MA Experiment ID: 20000093 Result: Up-regulated in Transcription
  misc_feature: MA Experiment 20000093 PARAMETER Experiment Name: At_42deg_Heat_cDNA_P Parameter: Temperature (deg C) Value: 42 vs. 22
  misc_feature: MA Experiment 20000093 PARAMETER Experiment Name: At_42deg_Heat_cDNA_P Parameter: Timepoint (hr) Value: 0.5
  misc_feature: MA Experiment 20000093 PARAMETER Experiment Name: At_42deg_Heat_cDNA_P Parameter: Tissue Value: Aerial
  misc_feature: MA Experiment ID: 20000111 Result: Up-regulated in Transcription
  misc_feature: MA Experiment 20000111 PARAMETER Experiment Name: At_42deg_Heat_cDNA_P Parameter: Temperature (deg C) Value: 42 vs. 22
  misc_feature: MA Experiment 20000111 PARAMETER Experiment Name: At_42deg_Heat_cDNA_P Parameter: Timepoint (hr) Value: 6
  misc_feature: MA Experiment 20000111 PARAMETER Experiment Name: At_42deg_Heat_cDNA_P Parameter: Tissue Value: Aerial
  misc_feature: MA Experiment ID: 20000112 Result: Up-regulated in Transcription
  misc_feature: MA Experiment 20000112 PARAMETER Experiment Name: At_42deg_Heat_cDNA_P Parameter: Temperature (deg C) Value: 42 vs. 22
  misc_feature: MA Experiment 20000112 PARAMETER Experiment Name: At_42deg_Heat_cDNA_P Parameter: Timepoint (hr) Value: 2
  misc_feature: MA Experiment 20000112 PARAMETER Experiment Name: At_42deg_Heat_cDNA_P Parameter: Tissue Value: Aerial
  misc_feature: MA Experiment ID: 20000113 Result: Up-regulated in Transcription
  misc_feature: MA Experiment 20000113 PARAMETER Experiment Name: At_42deg_Heat_cDNA_P Parameter: Temperature (deg C) Value: 42 vs. 22
  misc_feature: MA Experiment 20000113 PARAMETER Experiment Name: At_42deg_Heat_cDNA_P Parameter: Timepoint (hr) Value: 8
  misc_feature: MA Experiment 20000113 PARAMETER Experiment Name: At_42deg_Heat_cDNA_P Parameter: Tissue Value: Aerial
  misc_feature: MA Experiment ID: 20000117 Result: Up-regulated in Transcription
  misc_feature: MA Experiment 20000117 PARAMETER Experiment Name: At_100uM_ABA_Mutants_cDNA_P Parameter: Plant Line Value: Columbia
  misc_feature: MA Experiment 20000117 PARAMETER Experiment Name: At_100uM_ABA_Mutants_cDNA_P Parameter: Timepoint (hr) Value: 6
  misc_feature: MA Experiment 20000117 PARAMETER Experiment Name: At_100uM_ABA_Mutants_cDNA_P Parameter: Tissue Value: Aerial
  misc_feature: MA Experiment 20000117 PARAMETER Experiment Name: At_100uM_ABA_Mutants_cDNA_P Parameter: Treatment Value: 100uM ABA vs. No Treatment
  misc_feature: MA Experiment ID: 20000144 Result: Up-regulated in Transcription
  misc_feature: MA Experiment 20000144 PARAMETER Experiment Name: At_42deg_Heat_cDNA_P Parameter: Temperature (deg C) Value: 42 vs. 22
  misc_feature: MA Experiment 20000144 PARAMETER Experiment Name: At_42deg_Heat_cDNA_P Parameter: Timepoint (hr) Value: 1
  misc_feature: MA Experiment 20000144 PARAMETER Experiment Name: At_42deg_Heat_cDNA_P Parameter: Tissue Value: Aerial
  misc_feature: MA Experiment ID: 20000166 Result: Up-regulated in Transcription
  misc_feature: MA Experiment 20000166 PARAMETER Experiment Name: At_100uM_ABA_P Parameter: Age (day) Value: 14
  misc_feature: MA Experiment 20000166 PARAMETER Experiment Name: At_100uM_ABA_P Parameter: Organism Value: A. thaliana
  misc_feature: MA Experiment 20000166 PARAMETER Experiment Name: At_100uM_ABA_P Parameter: Plant Line Value: WS
  misc_feature: MA Experiment 20000166 PARAMETER Experiment Name: At_100uM_ABA_P Parameter: Timepoint (hr) Value: 1
  misc_feature: MA Experiment 20000166 PARAMETER Experiment Name: At_100uM_ABA_P Parameter: Tissue Value: Aerial
  misc_feature: MA Experiment 20000166 PARAMETER Experiment Name: At_100uM_ABA_P Parameter: Treatment Value: 100uM ABA vs. No Treatment
  misc_feature: MA Experiment ID: 20000169 Result: Up-regulated in Transcription
  misc_feature: MA Experiment 20000169 PARAMETER Experiment Name: At_100uM_ABA_P Parameter: Age (day) Value: 14
  misc_feature: MA Experiment 20000169 PARAMETER Experiment Name: At_100uM_ABA_P Parameter: Organism Value: A. thaliana
  misc_feature: MA Experiment 20000169 PARAMETER Experiment Name: At_100uM_ABA_P Parameter: Plant Line Value: WS
  misc_feature: MA Experiment 20000169 PARAMETER Experiment Name: At_100uM_ABA_P Parameter: Timepoint (hr) Value: 6
  misc_feature: MA Experiment 20000169 PARAMETER Experiment Name: At_100uM_ABA_P Parameter: Tissue Value: Aerial
  misc_feature: MA Experiment 20000169 PARAMETER Experiment Name: At_100uM_ABA_P Parameter: Treatment Value: 100uM ABA vs. No Treatment
  misc_feature: MA Experiment ID: 20000171 Result: Up-regulated in Transcription
  misc_feature: MA Experiment 20000171 PARAMETER Experiment Name: At_42deg_Heat_P Parameter: Age (day) Value: 14
  misc_feature: MA Experiment 20000171 PARAMETER Experiment Name: At_42deg_Heat_P Parameter: Organism Value: A. thaliana
  misc_feature: MA Experiment 20000171 PARAMETER Experiment Name: At_42deg_Heat_P Parameter: Plant Line Value: WS
  misc_feature: MA Experiment 20000171 PARAMETER Experiment Name: At_42deg_Heat_P Parameter: Temperature (deg C) Value: 42 vs. 22
  misc_feature: MA Experiment 20000171 PARAMETER Experiment Name: At_42deg_Heat_P Parameter: Timepoint (hr) Value: 1
  misc_feature: MA Experiment 20000171 PARAMETER Experiment Name: At_42deg_Heat_P Parameter: Tissue Value: Aerial
  misc_feature: MA Experiment ID: 20000173 Result: Up-regulated in Transcription
  misc_feature: MA Experiment 20000173 PARAMETER Experiment Name: At_42deg_Heat_P Parameter: Age (day) Value: 14
  misc_feature: MA Experiment 20000173 PARAMETER Experiment Name: At_42deg_Heat_P Parameter: Organism Value: A. thaliana
  misc_feature: MA Experiment 20000173 PARAMETER Experiment Name: At_42deg_Heat_P Parameter: Plant Line Value: WS
  misc_feature: MA Experiment 20000173 PARAMETER Experiment Name: At_42deg_Heat_P Parameter: Temperature (deg C) Value: 42 vs. 22
  misc_feature: MA Experiment 20000173 PARAMETER Experiment Name: At_42deg_Heat_P Parameter: Timepoint (hr) Value: 6
  misc_feature: MA Experiment 20000173 PARAMETER Experiment Name: At_42deg_Heat_P Parameter: Tissue Value: Aerial
  misc_feature: MA Experiment ID: 20000234 Result: Down-regulated in Transcription
  misc_feature: MA Experiment 20000234 PARAMETER Experiment Name: At_Siliques_P Parameter: Age (day) Value: 21
  misc_feature: MA Experiment 20000234 PARAMETER Experiment Name: At_Siliques_P Parameter: Organism Value: A. thaliana
  misc_feature: MA Experiment 20000234 PARAMETER Experiment Name: At_Siliques_P Parameter: Plant Line Value: WS
  misc_feature: MA Experiment 20000234 PARAMETER Experiment Name: At_Siliques_P Parameter: Tissue Value: Less Than 5mm Siliques vs. Whole Plant
  misc_feature: MA Experiment ID: 20000235 Result: Down-regulated in Transcription
  misc_feature: MA Experiment 20000235 PARAMETER Experiment Name: At_Siliques_P Parameter: Age (day) Value: 21
  misc_feature: MA Experiment 20000235 PARAMETER Experiment Name: At_Siliques_P Parameter: Organism Value: A. thaliana
  misc_feature: MA Experiment 20000235 PARAMETER Experiment Name: At_Siliques_P Parameter: Plant Line Value: WS
  misc_feature: MA Experiment 20000235 PARAMETER Experiment Name: At_Siliques_P Parameter: Tissue Value: 5-10mm Siliques vs. Whole Plant
  misc_feature: MA Experiment ID: 20000267 Result: Up-regulated in Transcription
  misc_feature: MA Experiment 20000267 PARAMETER Experiment Name: At_Drought_P Parameter: Age (day) Value: 7
  misc_feature: MA Experiment 20000267 PARAMETER Experiment Name: At_Drought_P Parameter: Organism Value: A. thaliana
  misc_feature: MA Experiment 20000267 PARAMETER Experiment Name: At_Drought_P Parameter: Plant Line Value: WS
  misc_feature: MA Experiment 20000267 PARAMETER Experiment Name: At_Drought_P Parameter: Timepoint (hr) Value: 6
  misc_feature: MA Experiment 20000267 PARAMETER Experiment Name: At_Drought_P Parameter: Tissue Value: Whole Plant
  misc_feature: MA Experiment 20000267 PARAMETER Experiment Name: At_Drought_P Parameter: Treatment Value: Drought vs. No Drought
  misc_feature: MA Experiment ID: 20000268 Result: Up-regulated in Transcription
  misc_feature: MA Experiment 20000268 PARAMETER Experiment Name: At_100mM_NaCl__P Parameter: Age (day) Value: 14
  misc_feature: MA Experiment 20000268 PARAMETER Experiment Name: At_100mM_NaCl__P Parameter: Organism Value: A. thaliana
  misc_feature: MA Experiment 20000268 PARAMETER Experiment Name: At_100mM_NaCl__P Parameter: Plant Line Value: WS
  misc_feature: MA Experiment 20000268 PARAMETER Experiment Name: At_100mM_NaCl__P Parameter: Timepoint (hr) Value: 6
  misc_feature: MA Experiment 20000268 PARAMETER Experiment Name: At_100mM_NaCl__P Parameter: Tissue Value: Whole Plant
  misc_feature: MA Experiment 20000268 PARAMETER Experiment Name: At_100mM_NaCl__P Parameter: Treatment Value: 100mM NaCl vs. No Treatment
  misc_feature: MA Experiment ID: 20000436 Result: Up-regulated in Transcription
  misc_feature: MA Experiment 20000436 PARAMETER Experiment Name: At_Drought_P Parameter: Age (day) Value: 7
  misc_feature: MA Experiment 20000436 PARAMETER Experiment Name: At_Drought_P Parameter: Organism Value: A. thaliana
  misc_feature: MA Experiment 20000436 PARAMETER Experiment Name: At_Drought_P Parameter: Plant Line Value: WS
  misc_feature: MA Experiment 20000436 PARAMETER Experiment Name: At_Drought_P Parameter: Timepoint (hr) Value: 12
  misc_feature: MA Experiment 20000436 PARAMETER Experiment Name: At_Drought_P Parameter: Tissue Value: Whole Plant
  misc_feature: MA Experiment 20000436 PARAMETER Experiment Name: At_Drought_P Parameter: Treatment Value: Drought vs. No Drought
  misc_feature: MA Experiment ID: 20000437 Result: Up-regulated in Transcription
  misc_feature: MA Experiment 20000437 PARAMETER Experiment Name: At_Drought_P Parameter: Age (day) Value: 8
  misc_feature: MA Experiment 20000437 PARAMETER Experiment Name: At_Drought_P Parameter: Organism Value: A. thaliana
  misc_feature: MA Experiment 20000437 PARAMETER Experiment Name: At_Drought_P Parameter: Plant Line Value: WS
  misc_feature: MA Experiment 20000437 PARAMETER Experiment Name: At_Drought_P Parameter: Timepoint (hr) Value: 24
  misc_feature: MA Experiment 20000437 PARAMETER Experiment Name: At_Drought_P Parameter: Tissue Value: Whole Plant
  misc_feature: MA Experiment 20000437 PARAMETER Experiment Name: At_Drought_P Parameter: Treatment Value: Drought vs. No Drought
  misc_feature: MA Experiment ID: 20000453 Result: Up-regulated in Transcription
  misc_feature: MA Experiment 20000453 PARAMETER Experiment Name: At_100uM_ABA_P Parameter: Age (day) Value: 15
  misc_feature: MA Experiment 20000453 PARAMETER Experiment Name: At_100uM_ABA_P Parameter: Organism Value: A. thaliana
  misc_feature: MA Experiment 20000453 PARAMETER Experiment Name: At_100uM_ABA_P Parameter: Plant Line Value: WS
  misc_feature: MA Experiment 20000453 PARAMETER Experiment Name: At_100uM_ABA_P Parameter: Timepoint (hr) Value: 24
  misc_feature: MA Experiment 20000453 PARAMETER Experiment Name: At_100uM_ABA_P Parameter: Tissue Value: Aerial
  misc_feature: MA Experiment 20000453 PARAMETER Experiment Name: At_100uM_ABA_P Parameter: Treatment Value: 100uM ABA vs. No Treatment
  misc_feature: MA Experiment ID: 20000794 Result: Up-regulated in Transcription
  misc_feature: MA Experiment 20000794 PARAMETER Experiment Name: At_Petals_P Parameter: Age (day) Value: 23-25 days
  misc_feature: MA Experiment 20000794 PARAMETER Experiment Name: At_Petals_P Parameter: Plant Line Value: WS
  misc_feature: MA Experiment 20000794 PARAMETER Experiment Name: At_Petals_P Parameter: Tissue Value: Petals vs. Whole plant
  misc_feature: MA Experiment ID: 20001248 Result: Down-regulated in Transcription
  misc_feature: MA Experiment 20001248 PARAMETER Experiment Name: At_Far-red-induction_P Parameter: Age (day) Value: 7
  misc_feature: MA Experiment 20001248 PARAMETER Experiment Name: At_Far-red-induction_P Parameter: Light Value: Far-red vs. White
  misc_feature: MA Experiment 20001248 PARAMETER Experiment Name: At_Far-red-induction_P Parameter: Organism Value: A. thaliana
  misc_feature: MA Experiment 20001248 PARAMETER Experiment Name: At_Far-red-induction_P Parameter: Plant Line Value: Columbia
  misc_feature: MA Experiment 20001248 PARAMETER Experiment Name: At_Far-red-induction_P Parameter: Timepoint (hr) Value: 4
  misc_feature: MA Experiment 20001248 PARAMETER Experiment Name: At_Far-red-induction_P Parameter: Tissue Value: Whole Plant
  misc_feature: MA Experiment ID: 20001554 Result: Up-regulated in Transcription
  misc_feature: MA Experiment 20001554 PARAMETER Experiment Name: At_Drought_Soil_Dry_P Parameter: Age (day) Value: 21
  misc_feature: MA Experiment 20001554 PARAMETER Experiment Name: At_Drought_Soil_Dry_P Parameter: Organism Value: A. thaliana
  misc_feature: MA Experiment 20001554 PARAMETER Experiment Name: At_Drought_Soil_Dry_P Parameter: Plant Line Value: WS
  misc_feature: MA Experiment 20001554 PARAMETER Experiment Name: At_Drought_Soil_Dry_P Parameter: Post Timepoint (hr) Value: None
  misc_feature: MA Experiment 20001554 PARAMETER Experiment Name: At_Drought_Soil_Dry_P Parameter: Post-Treatment Value: None
  misc_feature: MA Experiment 20001554 PARAMETER Experiment Name: At_Drought_Soil_Dry_P Parameter: Timepoint (day) Value: 7
  misc_feature: MA Experiment 20001554 PARAMETER Experiment Name: At_Drought_Soil_Dry_P Parameter: Treatment Value: Drought vs. No Drought
  misc_feature: MA Experiment ID: 20001555 Result: Up-regulated in Transcription
  misc_feature: MA Experiment 20001555 PARAMETER Experiment Name: At_Drought_Soil_Dry_P Parameter: Age (day) Value: 24
  misc_feature: MA Experiment 20001555 PARAMETER Experiment Name: At_Drought_Soil_Dry_P Parameter: Organism Value: A. thaliana
  misc_feature: MA Experiment 20001555 PARAMETER Experiment Name: At_Drought_Soil_Dry_P Parameter: Plant Line Value: WS
  misc_feature: MA Experiment 20001555 PARAMETER Experiment Name: At_Drought_Soil_Dry_P Parameter: Post Timepoint (hr) Value: None
  misc_feature: MA Experiment 20001555 PARAMETER Experiment Name: At_Drought_Soil_Dry_P Parameter: Post-Treatment Value: None
  misc_feature: MA Experiment 20001555 PARAMETER Experiment Name: At_Drought_Soil_Dry_P Parameter: Timepoint (day) Value: 10
  misc_feature: MA Experiment 20001555 PARAMETER Experiment Name: At_Drought_Soil_Dry_P Parameter: Treatment Value: Drought vs. No Drought
  misc_feature: MA Experiment ID: 20001559 Result: Up-regulated in Transcription
  misc_feature: MA Experiment 20001559 PARAMETER Experiment Name: At_Drought_Soil_Dry_P Parameter: Age (day) Value: 28
  misc_feature: MA Experiment 20001559 PARAMETER Experiment Name: At_Drought_Soil_Dry_P Parameter: Organism Value: A. thaliana
  misc_feature: MA Experiment 20001559 PARAMETER Experiment Name: At_Drought_Soil_Dry_P Parameter: Plant Line Value: WS
  misc_feature: MA Experiment 20001559 PARAMETER Experiment Name: At_Drought_Soil_Dry_P Parameter: Post Timepoint (hr) Value: 29
  misc_feature: MA Experiment 20001559 PARAMETER Experiment Name: At_Drought_Soil_Dry_P Parameter: Post-Treatment Value: Re-Water vs. No Drought
  misc_feature: MA Experiment 20001559 PARAMETER Experiment Name: At_Drought_Soil_Dry_P Parameter: Timepoint (day) Value: 14
  misc_feature: MA Experiment 20001559 PARAMETER Experiment Name: At_Drought_Soil_Dry_P Parameter: Treatment Value: Drought vs. No Drought
  misc_feature: MA Experiment ID: 20001904 Result: Up-regulated in Transcription
  misc_feature: MA Experiment 20001904 PARAMETER Experiment Name: At_Drought_Reproduction_P Parameter: Age (day) Value: 37
  misc_feature: MA Experiment 20001904 PARAMETER Experiment Name: At_Drought_Reproduction_P Parameter: Organism Value: A. thaliana
  misc_feature: MA Experiment 20001904 PARAMETER Experiment Name: At_Drought_Reproduction_P Parameter: Plant Line Value: WS
  misc_feature: MA Experiment 20001904 PARAMETER Experiment Name: At_Drought_Reproduction_P Parameter: Timepoint (day) Value: 7
  misc_feature: MA Experiment 20001904 PARAMETER Experiment Name: At_Drought_Reproduction_P Parameter: Tissue Value: Rosettes
  misc_feature: MA Experiment 20001904 PARAMETER Experiment Name: At_Drought_Reproduction_P Parameter: Treatment Value: Drought vs. No Drought
  misc_feature: MA Experiment ID: 20001905 Result: Up-regulated in Transcription
  misc_feature: MA Experiment 20001905 PARAMETER Experiment Name: At_Drought_Reproduction_P Parameter: Age (day) Value: 40
  misc_feature: MA Experiment 20001905 PARAMETER Experiment Name: At_Drought_Reproduction_P Parameter: Organism Value: A. thaliana
  misc_feature: MA Experiment 20001905 PARAMETER Experiment Name: At_Drought_Reproduction_P Parameter: Plant Line Value: WS
  misc_feature: MA Experiment 20001905 PARAMETER Experiment Name: At_Drought_Reproduction_P Parameter: Timepoint (day) Value: 10
  misc_feature: MA Experiment 20001905 PARAMETER Experiment Name: At_Drought_Reproduction_P Parameter: Tissue Value: Rosettes
  misc_feature: MA Experiment 20001905 PARAMETER Experiment Name: At_Drought_Reproduction_P Parameter: Treatment Value: Drought vs. No Drought
  misc_feature: MA Experiment ID: 20001911 Result: Up-regulated in Transcription
  misc_feature: MA Experiment 20001911 PARAMETER Experiment Name: At_Drought_Reproduction_P Parameter: Age (day) Value: 40
  misc_feature: MA Experiment 20001911 PARAMETER Experiment Name: At_Drought_Reproduction_P Parameter: Organism Value: A. thaliana
  misc_feature: MA Experiment 20001911 PARAMETER Experiment Name: At_Drought_Reproduction_P Parameter: Plant Line Value: WS
  misc_feature: MA Experiment 20001911 PARAMETER Experiment Name: At_Drought_Reproduction_P Parameter: Timepoint (day) Value: 10
  misc_feature: MA Experiment 20001911 PARAMETER Experiment Name: At_Drought_Reproduction_P Parameter: Tissue Value: Flowers
  misc_feature: MA Experiment 20001911 PARAMETER Experiment Name: At_Drought_Reproduction_P Parameter: Treatment Value: Drought vs. No Drought
aaatgaacaaatatatcaaataataatagtgtaattaagtcggaggaaaacaacaagaacccagaaagaggaacgaagaaactaattcaaaggatcaagttcaccgcttcattttagtcattaaacaaagatggtgatgggaggagaagcatccatggaactggaccagtgttttcagaagatgaagatggaaggaatctcgatcaaagagtggaaagatatccctgtggagcttctgatgaggatcctttcccttgttgatgatcgtaatgtcattgttgcttctggtgtttgcactggctggagagatgctatctcttttggcctcactcgtctccgtctatcttggtgcaacaacaacatgaacagcttggttctttctcttgttcccaagtttgtaaagctgcagactttaaatctaaggcaggacaaaccgcaactagaggacaatgcagtggaggccatagcaaatcactgccatgagttacaagaacttgatctcagcaaaagcttgaaaattacagaccgttcactttatgcacttgctcatggttgcccagacctcacaaaactcaaccttagtggctgcacttcattcagcgacactgctattgcgtatttgaccagattctgcagaaagcttaaagttttgaatctttgcggatgtgtcaaagctgtaactgacaatgccttggaggctattgggaataactgcaatcagatgcagtcactaaacttgggatggtgtgagaatatcagtgatgatggggtaatgagtttagcttatggctgtccagatctcaggacccttgacctctgcggctgtgttcttattacagatgagagtgtggtagctctagcagactggtgtgtccacttgaggtcactggggctatactattgcagaaacataacagacagagcaatgtactcgctagctcaaagcggggtaaagaacaaaccgggatcgtggaaatcggttaagaaaggtaaatacgatgaagaaggactgagaagtctcaacattagccaatgcactgcccttacaccttcagcggttcaagctgtttgcgattcatttcccgcacttcacacatgctcaggaaggcattcgcttgtcatgagcggctgtctgaacttaacaactgtgcactgtgcttgtatccttcaggctcatcgtgcacacaatgcggttcctcatcctgctcattaagacagaggaatagttatgttgtatatataaacatcatgttgatggagattagtattataaacgaagtagcttttttaaggtttatgtgaaaccttagaagcttttgagttgttctttctttgtcttgaaagatcttttgtatattttggtgctatgttcataacttctttagtaagacctctcgttgttacc

SEQ ID NO: 103448 - protein, 360 aa, Arabidopsis thaliana; identical to SEQ ID NO: 30881
  peptide (1)..(360): Ceres Seq. ID no. 13612792
  misc_feature (1)..(360): Homolog of NCBI NO: 18394987 NR Description: F-box protein family [Arabidopsis thaliana]
  misc_feature (1)..(360): Homolog of NCBI NO: 21554029 NR Description: F-box protein AtFBL5 [Arabidopsis thaliana]
  misc_feature (1)..(360): Homolog of NCBI NO: 18411319 NR Description: F-box protein family [Arabidopsis thaliana]
  misc_feature (22)..(355): Homolog of NCBI NO: 34907434 NR Description: P0018C10.44 [Oryza sativa (japonica
  misc_feature (215)..(360): Homolog of NCBI NO: 26450797 NR Description: unknown protein [Arabidopsis thaliana]
  misc_feature (29)..(343): Homolog of NCBI NO: 31226369 NR Description: ENSANGP00000010053 [Anopheles gambiae]
  misc_feature (93)..(271): Homolog of NCBI NO: 5919219 NR Description: leucine-rich repeats containing F-box protein
  misc_feature (93)..(271): Homolog of NCBI NO: 7022695 NR Description: unnamed protein product [Homo sapiens]
  misc_feature (93)..(271): Homolog of NCBI NO: 16306582 NR Description: F-box and leucine-rich repeat protein 2; F-box
  misc_feature (66)..(271): Homolog of NCBI NO: 37590914 NR Description: Unknown (protein for MGC:73374) [Danio rerio]

SEQ ID NO: 103449 - protein, 358 aa, Arabidopsis thaliana; identical to SEQ ID NO: 30882
  peptide (1)..(358): Ceres Seq. ID no. 13612793
  misc_feature (1)..(358): Homolog of NCBI NO: 18394987 NR Description: F-box protein family [Arabidopsis thaliana]
  misc_feature (1)..(358): Homolog of NCBI NO: 21554029 NR Description: F-box protein AtFBL5 [Arabidopsis thaliana]
  misc_feature (1)..(358): Homolog of NCBI NO: 18411319 NR Description: F-box protein family [Arabidopsis thaliana]
  misc_feature (20)..(353): Homolog of NCBI NO: 34907434 NR Description: P0018C10.44 [Oryza sativa (japonica
  misc_feature (213)..(358): Homolog of NCBI NO: 26450797 NR Description: unknown protein [Arabidopsis thaliana]
  misc_feature (27)..(341): Homolog of NCBI NO: 31226369 NR Description: ENSANGP00000010053 [Anopheles gambiae]
  misc_feature (91)..(269): Homolog of NCBI NO: 5919219 NR Description: leucine-rich repeats containing F-box protein
  misc_feature (91)..(269): Homolog of NCBI NO: 7022695 NR Description: unnamed protein product [Homo sapiens]
  misc_feature (91)..(269): Homolog of NCBI NO: 16306582 NR Description: F-box and leucine-rich repeat protein 2; F-box
  misc_feature (64)..(269): Homolog of NCBI NO: 37590914 NR Description: Unknown (protein for MGC:73374) [Danio rerio]

SEQ ID NO: 103450 - protein, 352 aa, Arabidopsis thaliana; identical to SEQ ID NO: 30883
  peptide (1)..(352): Ceres Seq. ID no. 13612794
  misc_feature (1)..(352): Homolog of NCBI NO: 18394987 NR Description: F-box protein family [Arabidopsis thaliana]
  misc_feature (1)..(352): Homolog of NCBI NO: 21554029 NR Description: F-box protein AtFBL5 [Arabidopsis thaliana]
  misc_feature (1)..(352): Homolog of NCBI NO: 18411319 NR Description: F-box protein family [Arabidopsis thaliana]
  misc_feature (14)..(347): Homolog of NCBI NO: 34907434 NR Description: P0018C10.44 [Oryza sativa (japonica
  misc_feature (207)..(352): Homolog of NCBI NO: 26450797 NR Description: unknown protein [Arabidopsis thaliana]
  misc_feature (21)..(335): Homolog of NCBI NO: 31226369 NR Description: ENSANGP00000010053 [Anopheles gambiae]
  misc_feature (85)..(263): Homolog of NCBI NO: 5919219 NR Description: leucine-rich repeats containing F-box protein
  misc_feature (85)..(263): Homolog of NCBI NO: 7022695 NR Description: unnamed protein product [Homo sapiens]
  misc_feature (85)..(263): Homolog of NCBI NO: 16306582 NR Description: F-box and leucine-rich repeat protein 2; F-box
  misc_feature (58)..(263): Homolog of NCBI NO: 37590914 NR Description: Unknown (protein for MGC:73374) [Danio rerio]

SEQ ID NO: 103451 - DNA, 1249 bp, Arabidopsis thaliana
  misc_feature (1)..(1249): Ceres Seq. ID no. 13612795
  misc_feature: MA Experiment ID: 108434 Result: Down-regulated in Transcription
  misc_feature: MA Experiment 108434 PARAMETER Experiment Name: At_Root_Tips_cDNA_P Parameter: Tissue Value: Root Tips
  misc_feature: MA Experiment ID: 108569 Result: Up-regulated in Transcription
  misc_feature: MA Experiment 108569 PARAMETER Experiment Name: At_0.001%_MeJA__cDNA_P Parameter: Timepoint (hr) Value: 6
  misc_feature: MA Experiment 108569 PARAMETER Experiment Name: At_0.001%_MeJA__cDNA_P Parameter: Tissue Value: Aerial
  misc_feature: MA Experiment 108569 PARAMETER Experiment Name: At_0.001%_MeJA__cDNA_P Parameter: Treatment Value: 0.001% MeJA vs. No Treatment
  misc_feature: MA Experiment ID: 108605 Result: Up-regulated in Transcription
  misc_feature: MA Experiment 108605 PARAMETER Experiment Name: At_100uM_ABA_cDNA_P Parameter: Timepoint (hr) Value: 6
  misc_feature: MA Experiment 108605 PARAMETER Experiment Name: At_100uM_ABA_cDNA_P Parameter: Tissue Value: Aerial
  misc_feature: MA Experiment 108605 PARAMETER Experiment Name: At_100uM_ABA_cDNA_P Parameter: Treatment Value: 100uM ABA vs. No Treatment
  misc_feature: MA Experiment ID: 108609 Result: Up-regulated in Transcription
  misc_feature: MA Experiment 108609 PARAMETER Experiment Name: At_100uM_ABA_cDNA_P Parameter: Timepoint (hr) Value: 24
  misc_feature: MA Experiment 108609 PARAMETER Experiment Name: At_100uM_ABA_cDNA_P Parameter: Tissue Value: Aerial
  misc_feature: MA Experiment 108609 PARAMETER Experiment Name: At_100uM_ABA_cDNA_P Parameter: Treatment Value: 100uM ABA vs. No Treatment
  misc_feature: MA Experiment ID: 108668 Result: Down-regulated in Transcription
  misc_feature: MA Experiment 108668 PARAMETER Experiment Name: At_2mM_SA_cDNA_P Parameter: Plant Line Value: WS
  misc_feature: MA Experiment 108668 PARAMETER Experiment Name: At_2mM_SA_cDNA_P Parameter: Timepoint (hr) Value: 6
  misc_feature: MA Experiment 108668 PARAMETER Experiment Name: At_2mM_SA_cDNA_P Parameter: Treatment Value: 2mM SA vs. No Treatment
  misc_feature: MA Experiment ID: 20000090 Result: Down-regulated in Transcription
  misc_feature: MA Experiment ID: 20000113 Result: Down-regulated in Transcription
  misc_feature: MA Experiment 20000113 PARAMETER Experiment Name: At_42deg_Heat_cDNA_P Parameter: Temperature (deg C) Value: 42 vs. 22
  misc_feature: MA Experiment 20000113 PARAMETER Experiment Name: At_42deg_Heat_cDNA_P Parameter: Timepoint (hr) Value: 8
  misc_feature: MA Experiment 20000113 PARAMETER Experiment Name: At_42deg_Heat_cDNA_P Parameter: Tissue Value: Aerial
  misc_feature: MA Experiment ID: 20000180 Result: Up-regulated in Transcription
  misc_feature: MA Experiment 20000180 PARAMETER Experiment Name: At_Germinating_Seeds_P Parameter: Age (hr) Value: 24 vs. 0
  misc_feature: MA Experiment 20000180 PARAMETER Experiment Name: At_Germinating_Seeds_P Parameter: Tissue Value: Germinating Seeds
  misc_feature: MA Experiment ID: 20000182 Result: Down-regulated in Transcription
  misc_feature: MA Experiment 20000182 PARAMETER Experiment Name: At_2mM_SA_P Parameter: Age (day) Value: 14
  misc_feature: MA Experiment 20000182 PARAMETER Experiment Name: At_2mM_SA_P Parameter: Organism Value: A. thaliana
  misc_feature: MA Experiment 20000182 PARAMETER Experiment Name: At_2mM_SA_P Parameter: Plant Line Value: WS
  misc_feature: MA Experiment 20000182 PARAMETER Experiment Name: At_2mM_SA_P Parameter: Timepoint (hr) Value: 6
  misc_feature: MA Experiment 20000182 PARAMETER Experiment Name: At_2mM_SA_P Parameter: Tissue Value: Aerial
  misc_feature: MA Experiment 20000182 PARAMETER Experiment Name: At_2mM_SA_P Parameter: Treatment Value: 2mM SA vs. No Treatment
  misc_feature: MA Experiment ID: 20000185 Result: Down-regulated in Transcription
  misc_feature: MA Experiment 20000185 PARAMETER Experiment Name: At_Roots__P Parameter: Age (day) Value: 7 vs. 21
  misc_feature: MA Experiment 20000185 PARAMETER Experiment Name: At_Roots__P Parameter: Organism Value: A. thaliana
  misc_feature: MA Experiment 20000185 PARAMETER Experiment Name: At_Roots__P Parameter: Tissue Value: Roots vs. Whole Plant
  misc_feature: MA Experiment ID: 20000227 Result: Down-regulated in Transcription
  misc_feature: MA Experiment 20000227 PARAMETER Experiment Name: At_Root-Tips-vs-Tops_P Parameter: Tissue Value: Root Tips vs. Root Tops
  misc_feature: MA Experiment ID: 20000455 Result: Up-regulated in Transcription
  misc_feature: MA Experiment 20000455 PARAMETER Experiment Name: At_100uM_ABA_P Parameter: Age (day) Value: 16
  misc_feature: MA Experiment 20000455 PARAMETER Experiment Name: At_100uM_ABA_P Parameter: Organism Value: A. thaliana
  misc_feature: MA Experiment 20000455 PARAMETER Experiment Name: At_100uM_ABA_P Parameter: Plant Line Value: WS
  misc_feature: MA Experiment 20000455 PARAMETER Experiment Name: At_100uM_ABA_P Parameter: Timepoint (hr) Value: 48
  misc_feature: MA Experiment 20000455 PARAMETER Experiment Name: At_100uM_ABA_P Parameter: Tissue Value: Aerial
  misc_feature: MA Experiment 20000455 PARAMETER Experiment Name: At_100uM_ABA_P Parameter: Treatment Value: 100uM ABA vs. No Treatment
  misc_feature: MA Experiment ID: 20000794 Result: Down-regulated in Transcription
  misc_feature: MA Experiment 20000794 PARAMETER Experiment Name: At_Petals_P Parameter: Age (day) Value: 23-25 days
  misc_feature: MA Experiment 20000794 PARAMETER Experiment Name: At_Petals_P Parameter: Plant Line Value: WS
  misc_feature: MA Experiment 20000794 PARAMETER Experiment Name: At_Petals_P Parameter: Tissue Value: Petals vs. Whole plant
  misc_feature: MA Experiment ID: 20001248 Result: Down-regulated in Transcription
  misc_feature: MA Experiment 20001248 PARAMETER Experiment Name: At_Far-red-induction_P Parameter: Age (day) Value: 7
  misc_feature: MA Experiment 20001248 PARAMETER Experiment Name: At_Far-red-induction_P Parameter: Light Value: Far-red vs. White
  misc_feature: MA Experiment 20001248 PARAMETER Experiment Name: At_Far-red-induction_P Parameter: Organism Value: A. thaliana
  misc_feature: MA Experiment 20001248 PARAMETER Experiment Name: At_Far-red-induction_P Parameter: Plant Line Value: Columbia
  misc_feature: MA Experiment 20001248 PARAMETER Experiment Name: At_Far-red-induction_P Parameter: Timepoint (hr) Value: 4
  misc_feature: MA Experiment 20001248 PARAMETER Experiment Name: At_Far-red-induction_P Parameter: Tissue Value: Whole Plant
  misc_feature: MA Experiment ID: 20001450 Result: Down-regulated in Transcription
  misc_feature: MA Experiment 20001450 PARAMETER Experiment Name: At_Far-red-induction_P Parameter: Age (day) Value: 7
  misc_feature: MA Experiment 20001450 PARAMETER Experiment Name: At_Far-red-induction_P Parameter: Light Value: Far-red vs. White
  misc_feature: MA Experiment 20001450 PARAMETER Experiment Name: At_Far-red-induction_P Parameter: Organism Value: A. thaliana
  misc_feature: MA Experiment 20001450 PARAMETER Experiment Name: At_Far-red-induction_P Parameter: Plant Line Value: Columbia
  misc_feature: MA Experiment 20001450 PARAMETER Experiment Name: At_Far-red-induction_P Parameter: Timepoint (hr) Value: 8
  misc_feature: MA Experiment 20001450 PARAMETER Experiment Name: At_Far-red-induction_P Parameter: Tissue Value: Whole Plant
  misc_feature: MA Experiment ID: 20001451 Result: Down-regulated in Transcription
  misc_feature: MA Experiment 20001451 PARAMETER Experiment Name: At_Far-red-induction_P Parameter: Age (day) Value: 7
  misc_feature: MA Experiment 20001451 PARAMETER Experiment Name: At_Far-red-induction_P Parameter: Light Value: Far-red vs. White
  misc_feature: MA Experiment 20001451 PARAMETER Experiment Name: At_Far-red-induction_P Parameter: Organism Value: A. thaliana
  misc_feature: MA Experiment 20001451 PARAMETER Experiment Name: At_Far-red-induction_P Parameter: Plant Line Value: Columbia
  misc_feature: MA Experiment 20001451 PARAMETER Experiment Name: At_Far-red-induction_P Parameter: Timepoint (hr) Value: 24
  misc_feature: MA Experiment 20001451 PARAMETER Experiment Name: At_Far-red-induction_P Parameter: Tissue Value: Whole Plant
  misc_feature: MA Experiment ID: 20001555 Result: Up-regulated in Transcription
  misc_feature: MA Experiment 20001555 PARAMETER Experiment Name: At_Drought_Soil_Dry_P Parameter: Age (day) Value: 24
  misc_feature: MA Experiment 20001555 PARAMETER Experiment Name: At_Drought_Soil_Dry_P Parameter: Organism Value: A. thaliana
  misc_feature: MA Experiment 20001555 PARAMETER Experiment Name: At_Drought_Soil_Dry_P Parameter: Plant Line Value: WS
  misc_feature: MA Experiment 20001555 PARAMETER Experiment Name: At_Drought_Soil_Dry_P Parameter: Post Timepoint (hr) Value: None
  misc_feature: MA Experiment 20001555 PARAMETER Experiment Name: At_Drought_Soil_Dry_P Parameter: Post-Treatment Value: None
  misc_feature: MA Experiment 20001555 PARAMETER Experiment Name: At_Drought_Soil_Dry_P Parameter: Timepoint (day) Value: 10
  misc_feature: MA Experiment 20001555 PARAMETER Experiment Name: At_Drought_Soil_Dry_P Parameter: Treatment Value: Drought vs. No Drought
  misc_feature: MA Experiment ID: 20001557 Result: Down-regulated in Transcription
  misc_feature: MA Experiment 20001557 PARAMETER Experiment Name: At_Drought_Soil_Dry_P Parameter: Age (day) Value: 27
  misc_feature: MA Experiment 20001557 PARAMETER Experiment Name: At_Drought_Soil_Dry_P Parameter: Organism Value: A. thaliana
  misc_feature: MA Experiment 20001557 PARAMETER Experiment Name: At_Drought_Soil_Dry_P Parameter: Plant Line Value: WS
  misc_feature: MA Experiment 20001557 PARAMETER Experiment Name: At_Drought_Soil_Dry_P Parameter: Post Timepoint (hr) Value: 3
  misc_feature: MA Experiment 20001557 PARAMETER Experiment Name: At_Drought_Soil_Dry_P Parameter: Post-Treatment Value: Re-Water vs. No Drought
  misc_feature: MA Experiment 20001557 PARAMETER Experiment Name: At_Drought_Soil_Dry_P Parameter: Timepoint (day) Value: 13
  misc_feature: MA Experiment 20001557 PARAMETER Experiment Name: At_Drought_Soil_Dry_P Parameter: Treatment Value: Drought vs. No Drought
  misc_feature: MA Experiment ID: 20001560 Result: Up-regulated in Transcription
  misc_feature: MA Experiment 20001560 PARAMETER Experiment Name: At_Drought_Soil_Dry_P Parameter: Age (day) Value: 28
  misc_feature: MA Experiment 20001560 PARAMETER Experiment Name: At_Drought_Soil_Dry_P Parameter: Organism Value: A. thaliana
  misc_feature: MA Experiment 20001560 PARAMETER Experiment Name: At_Drought_Soil_Dry_P Parameter: Plant Line Value: WS
  misc_feature: MA Experiment 20001560 PARAMETER Experiment Name: At_Drought_Soil_Dry_P Parameter: Post Timepoint (hr) Value: None
  misc_feature: MA Experiment 20001560 PARAMETER Experiment Name: At_Drought_Soil_Dry_P Parameter: Post-Treatment Value: None
  misc_feature: MA Experiment 20001560 PARAMETER Experiment Name: At_Drought_Soil_Dry_P Parameter: Timepoint (day) Value: 14
  misc_feature: MA Experiment 20001560 PARAMETER Experiment Name: At_Drought_Soil_Dry_P Parameter: Treatment Value: Drought vs. No Drought
  misc_feature: MA Experiment ID: 20001905 Result: Down-regulated in Transcription
  misc_feature: MA Experiment 20001905 PARAMETER Experiment Name: At_Drought_Reproduction_P Parameter: Age (day) Value: 40
  misc_feature: MA Experiment 20001905 PARAMETER Experiment Name: At_Drought_Reproduction_P Parameter: Organism Value: A. thaliana
  misc_feature: MA Experiment 20001905 PARAMETER Experiment Name: At_Drought_Reproduction_P Parameter: Plant Line Value: WS
  misc_feature: MA Experiment 20001905 PARAMETER Experiment Name: At_Drought_Reproduction_P Parameter: Timepoint (day) Value: 10
  misc_feature: MA Experiment 20001905 PARAMETER Experiment Name: At_Drought_Reproduction_P Parameter: Tissue Value: Rosettes
  misc_feature: MA Experiment 20001905 PARAMETER Experiment Name: At_Drought_Reproduction_P Parameter: Treatment Value: Drought vs. No Drought
  misc_feature: MA Experiment ID: 20001911 Result: Down-regulated in Transcription
  misc_feature: MA Experiment 20001911 PARAMETER Experiment Name: At_Drought_Reproduction_P Parameter: Age (day) Value: 40
  misc_feature: MA Experiment 20001911 PARAMETER Experiment Name: At_Drought_Reproduction_P Parameter: Organism Value: A. thaliana
  misc_feature: MA Experiment 20001911 PARAMETER Experiment Name: At_Drought_Reproduction_P Parameter: Plant Line Value: WS
  misc_feature: MA Experiment 20001911 PARAMETER Experiment Name: At_Drought_Reproduction_P Parameter: Timepoint (day) Value: 10
  misc_feature: MA Experiment 20001911 PARAMETER Experiment Name: At_Drought_Reproduction_P Parameter: Tissue Value: Flowers
  misc_feature: MA Experiment 20001911 PARAMETER Experiment Name: At_Drought_Reproduction_P Parameter: Treatment Value: Drought vs. No Drought
acgattgatatatactgatctcttgtcttcttcactctccaacggttctgtactatcttcagagcttcgagaatgtcgatgttaatggcggccaaatccacttcactctttagctcaaaccctacaatttcagctaaaatagggcaaaaccctcgcggcgtcagatcggtttatccgacggtgagaatgcagtcacgtgttcaccgtctgattgaagagcaaggtgctgtgcttattcccggagtctacgacgcattatctgcggctattgtgcagcagaccggattctccgccgcattaatctccggttacgccctctccgccgtaactttgggaaaaccagatttcggtttgataacacctccggagatggcagcaacggcgagatcagtgtgtgctgcggctccaaagattccaatcattgcagatgcagatactggtggaggaaatgctctcaatgttcaaagaaccgtcaaggacttaatcgcagcaggtgctgctggttgcttccttgaggaccaggcatggccaaagaggtgtggacatatgcgtggcaaagaggtcatacctgcggaggaacacgctgctaaaatagcatcagcaagagacgctattggagatgctgacttttttctaatcgctaggactgatgctcgtgcactttccgcaaaaacaggactttcagacgccattgaccgtgctaatctttatatggaggcaggagctgatgcttcctttgttgaggcaccgagggacgatgacgagcttaaggaaatcggaaggcgcacaaaaggttacagactgtgtaacatgcttgaaggtggacgcacgccattgcatacgcctgatgagcttaaagaaatgggttttcacttgatcgcacacccacttacctcgctctatgcgtcgactcgagctcttgtcgatgttcttaagattctcaaggagaaaggaaccaccaaagaccacttagaaaagatgataactttcgaagagtttaaccgtttggtgaacttggattcatggtatgagctcgaaaccaagtactctaacctcagaaacgctctaggggaaacaaaataatgagattctgattactctgtccacaatcgaagctcttgcaatgtatcatcaataatgttatcttcttttttcacttgtttgtatcaatattcaataattgtgtgttttgacatgtaaaaactcaaaaaaagttctaatttatttggaaagcttgttcttgctgctt

SEQ ID NO: 103452 - protein, 336 aa, Arabidopsis thaliana; identical to SEQ ID NO: 24914
  peptide (1)..(336): Ceres Seq. ID no. 13612796
  misc_feature (115)..(193): Pfam Name: Isocitrate lyase family Pfam Description: Isocitrate lyase family
  misc_feature (1)..(336): Homolog of NCBI NO: 30687359 NR Description: expressed protein [Arabidopsis thaliana]
  misc_feature (1)..(336): Homolog of NCBI NO: 18411340 NR Description: carboxyphosphonoenolpyruvate mutase -related thaliana] >gi|21537183|gb|AAM61524.1|
  misc_feature (3)..(336): Homolog of NCBI NO: 18252195 NR Description: putative carboxyphosphonoenolpyruvate mutase thaliana] >gi|21386949|gb|AAM47878.1| putative
  misc_feature (5)..(336): Homolog of NCBI NO: 6831518 NR Description: Putative carboxyvinyl-carboxyphosphonate (Carboxyphosphonoenolpyruvate phosphonomutase) (CPEP >gi|25324618|pir||E96799 probable carboxyphosphonoenolpyruvate
  misc_feature (16)..(327): Homolog of NCBI NO: 6831519 NR Description: PUTATIVE CARBOXYVINYL-CARBOXYPHOSPHONATE (CARBOXYPHOSPHONOENOLPYRUVATE PHOSPHONOMUTASE) (CPEP
  misc_feature (66)..(336): Homolog of NCBI NO: 25324627 NR Description: F24J8.7 protein - Arabidopsis thaliana Similar carboxyphosphonoenolpyruvate phosphonomutases
  misc_feature (42)..(326): Homolog of NCBI NO: 23043034 NR Description: hypothetical protein [Trichodesmium erythraeum
  misc_feature (42)..(327): Homolog of NCBI NO: 17229355 NR Description: carboxyphosphonoenolpyruvate phosphonomutase sp. PCC 7120] >gi|25324632|pir||AI2038
  misc_feature (47)..(327): Homolog of NCBI NO: 18312827 NR Description: carboxyphosphonoenolpyruvate phosphonomutase [Pyrobaculum aerophilum] >gi|18160313|gb|AAL63676.1|
  misc_feature (41)..(326): Homolog of NCBI NO: 22985472 NR Description: hypothetical protein [Burkholderia fungorum]

SEQ ID NO: 103453 - protein, 334 aa, Arabidopsis thaliana; identical to SEQ ID NO: 24915
  peptide (1)..(334): Ceres Seq. ID no. 13612797
  misc_feature (113)..(191): Pfam Name: Isocitrate lyase family Pfam Description: Isocitrate lyase family
  misc_feature (1)..(334): Homolog of NCBI NO: 30687359 NR Description: expressed protein [Arabidopsis thaliana]
  misc_feature (1)..(334): Homolog of NCBI NO: 18411340 NR Description: carboxyphosphonoenolpyruvate mutase -related thaliana] >gi|21537183|gb|AAM61524.1|
  misc_feature (1)..(334): Homolog of NCBI NO: 18252195 NR Description: putative carboxyphosphonoenolpyruvate mutase thaliana] >gi|21386949|gb|AAM47878.1| putative
  misc_feature (3)..(334): Homolog of NCBI NO: 6831518 NR Description: Putative carboxyvinyl-carboxyphosphonate (Carboxyphosphonoenolpyruvate phosphonomutase) (CPEP >gi|25324618|pir||E96799 probable carboxyphosphonoenolpyruvate
  misc_feature (14)..(325): Homolog of NCBI NO: 6831519 NR Description: PUTATIVE CARBOXYVINYL-CARBOXYPHOSPHONATE (CARBOXYPHOSPHONOENOLPYRUVATE PHOSPHONOMUTASE) (CPEP
  misc_feature (64)..(334): Homolog of NCBI NO: 25324627 NR Description: F24J8.7 protein - Arabidopsis thaliana Similar carboxyphosphonoenolpyruvate phosphonomutases
  misc_feature (40)..(324): Homolog of NCBI NO: 23043034 NR Description: hypothetical protein [Trichodesmium erythraeum
  misc_feature (40)..(325): Homolog of NCBI NO: 17229355 NR Description: carboxyphosphonoenolpyruvate phosphonomutase sp. PCC 7120] >gi|25324632|pir||AI2038
  misc_feature (45)..(325): Homolog of NCBI NO: 18312827 NR Description: carboxyphosphonoenolpyruvate phosphonomutase [Pyrobaculum aerophilum] >gi|18160313|gb|AAL63676.1|
  misc_feature (39)..(324): Homolog of NCBI NO: 22985472 NR Description: hypothetical protein [Burkholderia fungorum]

SEQ ID NO: 103454 - protein, 332 aa, Arabidopsis thaliana; identical to SEQ ID NO: 24916
  peptide (1)..(332): Ceres Seq. ID no. 13612798
  misc_feature (111)..(189): Pfam Name: Isocitrate lyase family Pfam Description: Isocitrate lyase family
  misc_feature (1)..(332): Homolog of NCBI NO: 30687359 NR Description: expressed protein [Arabidopsis thaliana]
  misc_feature (1)..(332): Homolog of NCBI NO: 18411340 NR Description: carboxyphosphonoenolpyruvate mutase -related thaliana] >gi|21537183|gb|AAM61524.1|
  misc_feature (1)..(332): Homolog of NCBI NO: 18252195 NR Description: putative carboxyphosphonoenolpyruvate mutase thaliana] >gi|21386949|gb|AAM47878.1| putative
  misc_feature (1)..(332): Homolog of NCBI NO: 6831518 NR Description: Putative carboxyvinyl-carboxyphosphonate (Carboxyphosphonoenolpyruvate phosphonomutase) (CPEP >gi|25324618|pir||E96799 probable carboxyphosphonoenolpyruvate
  misc_feature (12)..(323): Homolog of NCBI NO: 6831519 NR Description: PUTATIVE CARBOXYVINYL-CARBOXYPHOSPHONATE (CARBOXYPHOSPHONOENOLPYRUVATE PHOSPHONOMUTASE) (CPEP
  misc_feature (62)..(332): Homolog of NCBI NO: 25324627 NR Description: F24J8.7 protein - Arabidopsis thaliana Similar carboxyphosphonoenolpyruvate phosphonomutases
  misc_feature (38)..(322): Homolog of NCBI NO: 23043034 NR Description: hypothetical protein [Trichodesmium erythraeum
  misc_feature (38)..(323): Homolog of NCBI NO: 17229355 NR Description: carboxyphosphonoenolpyruvate phosphonomutase sp. PCC 7120] >gi|25324632|pir||AI2038
  misc_feature (43)..(323): Homolog of NCBI NO: 18312827 NR Description: carboxyphosphonoenolpyruvate phosphonomutase [Pyrobaculum aerophilum] >gi|18160313|gb|AAL63676.1|
  misc_feature (37)..(322): Homolog of NCBI NO: 22985472 NR Description: hypothetical protein [Burkholderia fungorum]

SEQ ID NO: 103455 - DNA, 2171 bp, Arabidopsis thaliana
  misc_feature (1)..(2171): Ceres Seq. ID no. 13612799
  misc_feature: MA Experiment ID: 108434 Result: Down-regulated in Transcription
  misc_feature: MA Experiment 108434 PARAMETER Experiment Name: At_Root_Tips_cDNA_P Parameter: Tissue Value: Root Tips
  misc_feature: MA Experiment ID: 108463 Result: Up-regulated in Transcription
  misc_feature: MA Experiment 108463 PARAMETER Experiment Name: At_Germinating_Seeds_cDNA_P Parameter: Age (day) Value: 3 vs. 0
  misc_feature: MA Experiment 108463 PARAMETER Experiment Name: At_Germinating_Seeds_cDNA_P Parameter: Tissue Value: Germinating Seeds
  misc_feature: MA Experiment ID: 108464 Result: Up-regulated in Transcription
  misc_feature: MA Experiment 108464 PARAMETER Experiment Name: At_Germinating_Seeds_cDNA_P Parameter: Age (day) Value: 4 vs. 0
  misc_feature: MA Experiment 108464 PARAMETER Experiment Name: At_Germinating_Seeds_cDNA_P Parameter: Tissue Value: Germinating Seeds
  misc_feature: MA Experiment ID: 108573 Result: Up-regulated in Transcription
  misc_feature: MA Experiment 108573 PARAMETER Experiment Name: At_Drought_cDNA_P Parameter: Timepoint (hr) Value: 6
  misc_feature: MA Experiment 108573 PARAMETER Experiment Name: At_Drought_cDNA_P Parameter: Tissue Value: Aerial
  misc_feature: MA Experiment 108573 PARAMETER Experiment Name: At_Drought_cDNA_P Parameter: Treatment Value: Drought vs. No Drought
  misc_feature: MA Experiment ID: 108579 Result: Down-regulated in Transcription
  misc_feature: MA Experiment 108579 PARAMETER Experiment Name: At_4deg_Cold_cDNA_P Parameter: Temperature (deg C) Value: 4 vs. 22
  misc_feature: MA Experiment 108579 PARAMETER Experiment Name: At_4deg_Cold_cDNA_P Parameter: Timepoint (hr) Value: 6
  misc_feature: MA Experiment 108579 PARAMETER Experiment Name: At_4deg_Cold_cDNA_P Parameter: Tissue Value: Aerial
  misc_feature: MA Experiment ID: 20000087 Result: Down-regulated in Transcription
  misc_feature: MA Experiment 20000087 PARAMETER Experiment Name: At_100uM_ABA_Mutants_cDNA_P Parameter: Plant Line Value: WS
  misc_feature: MA Experiment 20000087 PARAMETER Experiment Name: At_100uM_ABA_Mutants_cDNA_P Parameter: Timepoint (hr) Value: 6
  misc_feature: MA Experiment 20000087 PARAMETER Experiment Name: At_100uM_ABA_Mutants_cDNA_P Parameter: Tissue Value: Aerial
  misc_feature: MA Experiment 20000087 PARAMETER Experiment Name: At_100uM_ABA_Mutants_cDNA_P Parameter: Treatment Value: 100uM ABA vs. No Treatment
  misc_feature: MA Experiment ID: 20000184 Result: Down-regulated in Transcription
  misc_feature: MA Experiment 20000184 PARAMETER Experiment Name: At_Shoots__P Parameter: Age (day) Value: 7
  misc_feature: MA Experiment 20000184 PARAMETER Experiment Name: At_Shoots__P Parameter: Tissue Value: Shoots vs. Whole Plant
  misc_feature: MA Experiment ID: 20000234 Result: Down-regulated in Transcription
  misc_feature: MA Experiment 20000234 PARAMETER Experiment Name: At_Siliques_P Parameter: Age (day) Value: 21
  misc_feature: MA Experiment 20000234 PARAMETER Experiment Name: At_Siliques_P Parameter: Organism Value: A. thaliana
  misc_feature: MA Experiment 20000234 PARAMETER Experiment Name: At_Siliques_P Parameter: Plant Line Value: WS
  misc_feature: MA Experiment 20000234 PARAMETER Experiment Name: At_Siliques_P Parameter: Tissue Value: Less Than 5mm Siliques vs. Whole Plant
  misc_feature: MA Experiment ID: 20000235 Result: Down-regulated in Transcription
  misc_feature: MA Experiment 20000235 PARAMETER Experiment Name: At_Siliques_P Parameter: Age (day) Value: 21
  misc_feature: MA Experiment 20000235 PARAMETER Experiment Name: At_Siliques_P Parameter: Organism Value: A. thaliana
  misc_feature: MA Experiment 20000235 PARAMETER Experiment Name: At_Siliques_P Parameter: Plant Line Value: WS
  misc_feature: MA Experiment 20000235 PARAMETER Experiment Name: At_Siliques_P Parameter: Tissue Value: 5-10mm Siliques vs. Whole Plant
  misc_feature: MA Experiment ID: 20000265 Result: Down-regulated in Transcription
  misc_feature: MA Experiment 20000265 PARAMETER Experiment Name: At_Open_Flower_P Parameter: Age (day) Value: 21
  misc_feature: MA Experiment 20000265 PARAMETER Experiment Name: At_Open_Flower_P Parameter: Plant Line Value: WS
  misc_feature: MA Experiment 20000265 PARAMETER Experiment Name: At_Open_Flower_P Parameter: Tissue Value: Closed Flower vs. Whole Plant
  misc_feature: MA Experiment ID: 20000286 Result: Down-regulated in Transcription
  misc_feature: MA Experiment 20000286 PARAMETER Experiment Name: At_Open_Flower_P Parameter: Age (day) Value: 21
  misc_feature: MA Experiment 20000286 PARAMETER Experiment Name: At_Open_Flower_P Parameter: Plant Line Value: WS
  misc_feature: MA Experiment 20000286 PARAMETER Experiment Name: At_Open_Flower_P Parameter: Tissue Value: Half Open vs. Whole Plant
  misc_feature: MA Experiment ID: 20001911 Result: Up-regulated in Transcription
  misc_feature: MA Experiment 20001911 PARAMETER Experiment Name: At_Drought_Reproduction_P Parameter: Age (day) Value: 40
  misc_feature: MA Experiment 20001911 PARAMETER Experiment Name: At_Drought_Reproduction_P Parameter: Organism Value: A. thaliana
  misc_feature: MA Experiment 20001911 PARAMETER Experiment Name: At_Drought_Reproduction_P Parameter: Plant Line Value: WS
  misc_feature: MA Experiment 20001911 PARAMETER Experiment Name: At_Drought_Reproduction_P Parameter: Timepoint (day) Value: 10
  misc_feature: MA Experiment 20001911 PARAMETER Experiment Name: At_Drought_Reproduction_P Parameter: Tissue Value: Flowers
  misc_feature: MA Experiment 20001911 PARAMETER Experiment Name: At_Drought_Reproduction_P Parameter: Treatment Value: Drought vs. No Drought
aaaaatcagaacccaaagccaaagcgtttttatcatttctgtcttcttctgtgtaaacagtaagaccccaaaggtcaaacctttaggctttgtttcttcctttaaggcttttttccgacgtttatatcagatttcttcttgtcaatttcttcatttggacaacctccataatccaagaccgacccttttcctctaatctctcctgttgcagctgaatggtggaacaaactgtggttagagaacatatcaaagcgagagtcatgtcattagtgaggtctgcagagccatcctcatataggaacccgaagctttacacgttgaatgagaatggtaataacaatggtgtcagttctgctcaaatctttgatccagataggtcaaagaatccttgtctgactgatgattcttacccaagccaaagttatgagaagtactttcttgattcgccaactgatgagtttgttcaacatcctattggctctggtgcctcggttagctcatttggctctttagactcatttccttatcagtcaagaccagttcttggatgttccatggaatttcagttaccgttggattcaacctctacttcatctacaaggcttttgggagattaccaagcggtttcttacagtccgagcatggatgtagtggaggagtttgatgatgagcaaatgagatcaaagattcaagagcttgaaagagcgcttctcggcgatgaagatgataaaatggttggaatagataacctcatggagattgacagcgaatggtcgtaccaaaacgaaagcgaacagcatcaagactcgcccaaagaatcatcgtctgcagattccaactctcatgtaagtagcaaagaagtggtgtctcaagccactccaaagcaaatcttgatatcttgtgctcgtgcgctatctgaaggaaaattagaagaagctttgtcaatggtaaatgagctgaggcagatagtttctatccaaggagacccttctcagagaatcgcagcttacatggtggaaggtctagctgcaagaatggccgcttcaggaaaattcatctacagagcattgaaatgcaaagagcctccttcggatgagaggcttgcagctatgcaagtcctgtttgaagtctgcccttgtttcaagttcgggtttttagcagctaatggtgcgatacttgaagcaatcaaaggtgaagaagaagttcacataatcgatttcgatataaaccaagggaaccaatacatgacactgatacgaagcattgctgagttgcctggtaaacgacctcgcctgaggttaacaggaattgatgaccctgaatcagtccaacgctccattggagggctaagaatcatcggtctaagactcgagcaactcgcagaggataatggagtatccttcaaattcaaagcaatgccttcaaagacttcgattgtctctccatcaacactcggttgcaaaccaggagaaaccttaatagtgaactttgcattccaacttcaccacatgcctgacgagagtgtcacaacagtaaaccagcgggacgagctacttcacatggtcaaaagcttaaacccaaagcttgtcacggtcgttgaacaagacgtgaacacaaacacttcaccgttctttcccagattcatagaggcttacgaatactactcagcagttttcgagtctctagacatgacacttccaagagaaagccaagagaggatgaatgtagaaagacagtgtctcgctagagacatagtcaacattgttgcttgcgaaggagaagaacggatagagagatacgaggctgcgggaaaatggagagcaaggatgatgatggctggattcaatccaaaaccaatgagtgctaaagtaaccaacaatatacaaaacctgataaagcaacaatattgcaataagtacaagcttaaagaagaaatgggtgagctccatttttgctgggaggagaaaagcttaatcgttgcttcagcttggaggtaagataagtgacaagagcatatagtctttatgtttcataaaacataattatgtttttactgtaatcttgggttattgtgtaactggttaaatcatctccatgtattattaccagaggttaggggtgatcacaggtactaaaagctaatctaacacttatggaagaatttttctttc

SEQ ID NO: 103456 - protein, 593 aa, Arabidopsis thaliana; identical to SEQ ID NO: 39767
  peptide (1)..(593): Ceres Seq. ID no. 13612800
  misc_feature (196)..(502): Pfam Name: GRAS family transcription factor Pfam Description: GRAS family transcription factor
  misc_feature (1)..(593): Homolog of NCBI NO: 15218990 NR Description: scarecrow-like transcription factor 1 (SCL1)
  misc_feature (242)..(593): Homolog of NCBI NO: 11358822 NR Description: scarecrow-like protein 1 [imported] - Arabidopsis
  misc_feature (135)..(593): Homolog of NCBI NO: 34907424 NR Description: scarecrow-like protein [Oryza sativa (japonica
  misc_feature (197)..(593): Homolog of NCBI NO: 15238903 NR Description: phytochrome A signal transduction 1 (PAT1) thaliana] >gi|8132289|gb|AAF73237.1|AF153443_1 phytochrome A transduction 1 protein [Arabidopsis thaliana]
  misc_feature (197)..(593): Homolog of NCBI NO: 26450054 NR Description: putative SCARECROW gene regulator [Arabidopsis
  misc_feature (223)..(592): Homolog of NCBI NO: 37533564 NR Description: putative SCARECROW gene regulator-like [Oryza
  misc_feature (201)..(592): Homolog of NCBI NO: 25989334 NR Description: chitin-inducible gibberellin-responsive protein
  misc_feature (179)..(593): Homolog of NCBI NO: 14517552 NR Description: F17J6.12/F17J6.12 [Arabidopsis thaliana]
  misc_feature (179)..(593): Homolog of NCBI NO: 23397333 NR Description: putative scarecrow protein [Arabidopsis thaliana]
  misc_feature (179)..(593): Homolog of NCBI NO: 30694805 NR Description: scarecrow-like transcription factor 5 (SCL5) thaliana] >gi|24030207|gb|AAN41283.1| putative scarecrow protein

SEQ ID NO: 103457 - protein, 578 aa, Arabidopsis thaliana; identical to SEQ ID NO: 39768
  peptide (1)..(578): Ceres Seq. ID no. 13612801
  misc_feature (181)..(487): Pfam Name: GRAS family transcription factor Pfam Description: GRAS family transcription factor
  misc_feature (1)..(578): Homolog of NCBI NO: 15218990 NR Description: scarecrow-like transcription factor 1 (SCL1)
  misc_feature (227)..(578): Homolog of NCBI NO: 11358822 NR Description: scarecrow-like protein 1 [imported] - Arabidopsis
  misc_feature (120)..(578): Homolog of NCBI NO: 34907424 NR Description: scarecrow-like protein [Oryza sativa (japonica
  misc_feature (182)..(578): Homolog of NCBI NO: 15238903 NR Description: phytochrome A signal transduction 1 (PAT1) thaliana] >gi|8132289|gb|AAF73237.1|AF153443_1 phytochrome A transduction 1 protein [Arabidopsis thaliana]
  misc_feature (182)..(578): Homolog of NCBI NO: 26450054 NR Description: putative SCARECROW gene regulator [Arabidopsis
  misc_feature (208)..(577): Homolog of NCBI NO: 37533564 NR Description: putative SCARECROW gene regulator-like [Oryza
  misc_feature (186)..(577): Homolog of NCBI NO: 25989334 NR Description: chitin-inducible gibberellin-responsive protein
  misc_feature (164)..(578): Homolog of NCBI NO: 14517552 NR Description: F17J6.12/F17J6.12 [Arabidopsis thaliana]
  misc_feature (164)..(578): Homolog of NCBI NO: 23397333 NR Description: putative scarecrow protein [Arabidopsis thaliana]
  misc_feature (164)..(578): Homolog of NCBI NO: 25405382 NR Description: scarecrow-like protein [imported] - Arabidopsis >gi|9454552|gb|AAF87875.1|AC012561_8 Putative transcription

SEQ ID NO: 103458 - protein, 480 aa, Arabidopsis thaliana; identical to SEQ ID NO: 39769
  peptide (1)..(480): Ceres Seq. ID no. 13612802
  misc_feature (83)..(389): Pfam Name: GRAS family transcription factor Pfam Description: GRAS family transcription factor
  misc_feature (1)..(480): Homolog of NCBI NO: 15218990 NR Description: scarecrow-like transcription factor 1 (SCL1)
  misc_feature (129)..(480): Homolog of NCBI NO: 11358822 NR Description: scarecrow-like protein 1 [imported] - Arabidopsis
  misc_feature (22)..(480): Homolog of NCBI NO: 34907424 NR Description: scarecrow-like protein [Oryza sativa (japonica
  misc_feature (84)..(480): Homolog of NCBI NO: 15238903 NR Description: phytochrome A signal transduction 1 (PAT1) thaliana] >gi|8132289|gb|AAF73237.1|AF153443_1 phytochrome A transduction 1 protein [Arabidopsis thaliana]
  misc_feature (84)..(480): Homolog of NCBI NO: 26450054 NR Description: putative SCARECROW gene regulator [Arabidopsis
  misc_feature (110)..(479): Homolog of NCBI NO: 37533564 NR Description: putative SCARECROW gene regulator-like [Oryza
  misc_feature (88)..(479): Homolog of NCBI NO: 25989334 NR Description: chitin-inducible gibberellin-responsive protein
  misc_feature (66)..(480): Homolog of NCBI NO: 14517552 NR Description: F17J6.12/F17J6.12 [Arabidopsis thaliana]
  misc_feature (66)..(480): Homolog of NCBI NO: 23397333 NR Description: putative scarecrow protein [Arabidopsis thaliana]
  misc_feature (66)..(480): Homolog of NCBI NO: 25405382 NR Description: scarecrow-like protein [imported] - Arabidopsis >gi|9454552|gb|AAF87875.1|AC012561_8 Putative transcription

SEQ ID NO: 103459 - DNA, 1637 bp, Arabidopsis thaliana
  misc_feature (1)..(1637): Ceres Seq. ID no. 13612803
  misc_feature: MA Experiment ID: 20000235 Result: Up-regulated in Transcription
  misc_feature: MA Experiment 20000235 PARAMETER Experiment Name: At_Siliques_P Parameter: Age (day) Value: 21
  misc_feature: MA Experiment 20000235 PARAMETER Experiment Name: At_Siliques_P Parameter: Organism Value: A. thaliana
  misc_feature: MA Experiment 20000235 PARAMETER Experiment Name: At_Siliques_P Parameter: Plant Line Value: WS
  misc_feature: MA Experiment 20000235 PARAMETER Experiment Name: At_Siliques_P Parameter: Tissue Value: 5-10mm Siliques vs. Whole Plant
  misc_feature: MA Experiment ID: 20000794 Result: Up-regulated in Transcription
  misc_feature: MA Experiment 20000794 PARAMETER Experiment Name: At_Petals_P Parameter: Age (day) Value: 23-25 days
  misc_feature: MA Experiment 20000794 PARAMETER Experiment Name: At_Petals_P Parameter: Plant Line Value: WS
  misc_feature: MA Experiment 20000794 PARAMETER Experiment Name: At_Petals_P Parameter: Tissue Value: Petals vs. Whole plant
aagatctaagcgaaaacaaaaaaaaatgccttaaaacatttgaagaagcaaaacgaagaaacagtgagagagatagaaatggcgagcttaactagtaataagcctagaaattttggtgcgtatagtcactacgctactccctgcactcgcacgcaccagattggagctctttttctcgtcgtctctaccttcttcgtcactaggcttttcgatcagtggttctcggaatccaattccgttactccggtgattgatctccgtcgtacttcttcttcttacggaatcaaaactgataacggtattatacggtggccggagcgaggttatgggtctcacctctcgctgaagatctacgtttatgatgagaatgagatcgacggtcttaaagagctgttgtacggtagggatggtagtgttaagaccaccgcatgcttgaaaggtcaatggggatctcaggttaaaattcacaagttgcttttggagtccaaatttaggacgattaagaaagatgaagcggatttgttctttgtgccagcttatgttaaatgtgtgagaatgttgggaggtcttaatgacaaggagatcaatcagacctatgtcaaggttttgagtcaaatgccgtatttccgaagatctggtggtcgtgatcatatatttgtttttccgagtggtgctggagctcacttgtttagatcctggtcaacatttatcaaccgctctattatcctcactcccgaggctgaccggactgacaagaaagacacaactgcctttaattcatggaaagatataatcataccaggaaacgtcgatgatgctatgactaaaaatggacaacctgatgttcagcctttgcctctgtcaaagaggaagtatttagcaaattatttaggtcgtgcacaagggaaggctggtcgacttaaattgattgacctatcaaagcaatttccagataagctagaatgtccagatttgaagtttagcggaactgaaaagtttggaaggacaacatattttgaacatctgaggaatgccaagttctgcctcgctcctcgtggggaatcatcatggacacttcgcttttatgaatcattctttgtggaatgtgtcccggttcttttatctgaccacgccgagctgcctttccagaatgttatcgactatgcccaagtatcgatcaaatggccatcaactcgaataggctcagagtttcttgattacttagcttcaatatcagatagagacatagaaggaatgatagcccgaggtcggaagattagatgtttgtttgtgtacggtccagattccgcaccctgcagtgcggttaaagggattctatgggagcttcaacgcaaagttagacatttccagcaatcgactgagacgttttggctgcacaatggcagttttgtgaatagagaactggtccagttcagtagctggagacctcctatgcctctaccttgaccggtttcaacattccactagaatatcttgtgtttacgaaacaaaatgaatgatacatttgagtacagtttttttgtgaacttgatttttttgtacatatcactcttcagtggaatttgtttgactaaaatttgatagaaaaatgacgaaccaacaaaattgatggcttc

SEQ ID NO: 103460 - protein, 462 aa, Arabidopsis thaliana
  peptide (1)..(462): Ceres Seq. ID no. 13612804
  misc_feature (91)..(296): Pfam Name: Exostosin family Pfam Description: Exostosin family
  misc_feature (1)..(462): Homolog of NCBI NO: 18394994 NR Description: Exostosin family [Arabidopsis thaliana]
  misc_feature (1)..(462): Homolog of NCBI NO: 18650643 NR Description: At1g21480/F24J8_23 [Arabidopsis thaliana]
  misc_feature (1)..(462): Homolog of NCBI NO: 21537341 NR Description: unknown [Arabidopsis thaliana]
  misc_feature (1)..(296): Homolog of NCBI NO: 25518706 NR Description: hypothetical protein F24J8.10 - Arabidopsis >gi|9454585|gb|AAF87908.1|AC015447_18 Hypothetical protein
  misc_feature (342)..(462): Homolog of NCBI NO: 25518706 NR Description: hypothetical protein F24J8.10 - Arabidopsis >gi|9454585|gb|AAF87908.1|AC015447_18 Hypothetical protein
  misc_feature (84)..(367): Homolog of NCBI NO: 15237173 NR Description: expressed protein [Arabidopsis thaliana] gb|AAC98455.1~gene_id:MRN17.17~strong similarity to unknown
  misc_feature (133)..(423): Homolog of NCBI NO: 34909176 NR Description: P0468B07.31 [Oryza sativa (japonica
  misc_feature (4)..(367): Homolog of NCBI NO: 15233650 NR Description: Exostosin family [Arabidopsis thaliana]
  misc_feature (89)..(216): Homolog of NCBI NO: 15223522 NR Description: hypothetical protein [Arabidopsis thaliana]
  misc_feature (310)..(429): Homolog of NCBI NO: 15223522 NR Description: hypothetical protein [Arabidopsis thaliana]
MASLTSNKPRNFGAYSHYATPCTRTHQIGALFLVVSTFFVTRLFDQWFSESNSVTPVIDLRRTSSSYGIKTDNGIIRWPERGYGSHLSLKIYVYDENEIDGLKELLYGRDGSVKTTACLKGQWGSQVKIHKLLLESKFRTIKKDEADLFFVPAYVKCVRMLGGLNDKEINQTYVKVLSQMPYFRRSGGRDHIFVFPSGAGAHLFRSWSTFINRSIILTPEADRTDKKDTTAFNSWKDIIIPGNVDDAMTKNGQPDVQPLPLSKRKYLANYLGRAQGKAGRLKLIDLSKQFPDKLECPDLKFSGTEKFGRTTYFEHLRNAKFCLAPRGESSWTLRFYESFFVECVPVLLSDHAELPFQNVIDYAQVSIKWPSTRIGSEFLDYLASISDRDIEGMIARGRKIRCLFVYGPDSAPCSAVKGILWELQRKVRHFQQSTETFWLHNGSFVNRELVQFSSWRPPMPLP

SEQ ID NO: 103461 - protein, 303 aa, Arabidopsis thaliana; identical to SEQ ID NO: 25984
  peptide (1)..(303): Ceres Seq. ID no. 13612805
  misc_feature (1)..(137): Pfam Name: Exostosin family Pfam Description: Exostosin family
  misc_feature (1)..(303): Homolog of NCBI NO: 18394994 NR Description: Exostosin family [Arabidopsis thaliana]
  misc_feature (1)..(303): Homolog of NCBI NO: 18650643 NR Description: At1g21480/F24J8_23 [Arabidopsis thaliana]
  misc_feature (1)..(303): Homolog of NCBI NO: 21537341 NR Description: unknown [Arabidopsis thaliana]
  misc_feature (1)..(137): Homolog of NCBI NO: 25518706 NR Description: hypothetical protein F24J8.10 - Arabidopsis >gi|9454585|gb|AAF87908.1|AC015447_18 Hypothetical protein
  misc_feature (183)..(303): Homolog of NCBI NO: 25518706 NR Description: hypothetical protein F24J8.10 - Arabidopsis >gi|9454585|gb|AAF87908.1|AC015447_18 Hypothetical protein
  misc_feature (1)..(208): Homolog of NCBI NO: 15237173 NR Description: expressed protein [Arabidopsis thaliana] gb|AAC98455.1~gene_id:MRN17.17~strong similarity to unknown
  misc_feature (1)..(264): Homolog of NCBI NO: 34909176 NR Description: P0468B07.31 [Oryza sativa (japonica
  misc_feature (1)..(208): Homolog of NCBI NO: 15233650 NR Description: Exostosin family [Arabidopsis thaliana]
  misc_feature (1)..(57): Homolog of NCBI NO: 15223522 NR Description: hypothetical protein [Arabidopsis thaliana]
  misc_feature (151)..(270): Homolog of NCBI NO: 15223522 NR Description: hypothetical protein [Arabidopsis thaliana]

SEQ ID NO: 103462 - protein, 283 aa, Arabidopsis thaliana; identical to SEQ ID NO: 25985
  peptide (1)..(283): Ceres Seq. ID no. 13612806
  misc_feature (1)..(117): Pfam Name: Exostosin family Pfam Description: Exostosin family
  misc_feature (1)..(283): Homolog of NCBI NO: 18394994 NR Description: Exostosin family [Arabidopsis thaliana]
  misc_feature (1)..(283): Homolog of NCBI NO: 18650643 NR Description: At1g21480/F24J8_23 [Arabidopsis thaliana]
  misc_feature (1)..(283): Homolog of NCBI NO: 21537341 NR Description: unknown [Arabidopsis thaliana]
  misc_feature (1)..(117): Homolog of NCBI NO: 25518706 NR Description: hypothetical protein F24J8.10 - Arabidopsis >gi|9454585|gb|AAF87908.1|AC015447_18 Hypothetical protein
  misc_feature (163)..(283): Homolog of NCBI NO: 25518706 NR Description: hypothetical protein F24J8.10 - Arabidopsis >gi|9454585|gb|AAF87908.1|AC015447_18 Hypothetical protein
  misc_feature (1)..(188): Homolog of NCBI NO: 15237173 NR Description: expressed protein [Arabidopsis thaliana] gb|AAC98455.1~gene_id:MRN17.17~strong similarity to unknown
  misc_feature (1)..(244): Homolog of NCBI NO: 34909176 NR Description: P0468B07.31 [Oryza sativa (japonica
  misc_feature (1)..(188): Homolog of NCBI NO: 15233650 NR Description: Exostosin family [Arabidopsis thaliana]
  misc_feature (1)..(37): Homolog of NCBI NO: 15223522 NR Description: hypothetical protein [Arabidopsis thaliana]
  misc_feature (131)..(250): Homolog of NCBI NO: 15223522 NR Description: hypothetical protein [Arabidopsis thaliana]

SEQ ID NO: 103463 - DNA, 1180 bp, Arabidopsis thaliana
  misc_feature (1)..(1180): Ceres Seq. ID no. 13612811
  misc_feature: MA Experiment ID: 20000086 Result: Up-regulated in Transcription
  misc_feature: MA Experiment 20000086 PARAMETER Experiment Name: At_100uM_ABA_Mutants_cDNA_P Parameter: Plant Line Value: CS22
  misc_feature: MA Experiment 20000086 PARAMETER Experiment Name: At_100uM_ABA_Mutants_cDNA_P Parameter: Timepoint (hr) Value: 6
  misc_feature: MA Experiment 20000086 PARAMETER Experiment Name: At_100uM_ABA_Mutants_cDNA_P Parameter: Tissue Value: Aerial
  misc_feature: MA Experiment 20000086 PARAMETER Experiment Name: At_100uM_ABA_Mutants_cDNA_P Parameter: Treatment Value: 100uM ABA vs. No Treatment
  misc_feature: MA Experiment ID: 20001451 Result: Up-regulated in Transcription
  misc_feature: MA Experiment 20001451 PARAMETER Experiment Name: At_Far-red-induction_P Parameter: Age (day) Value: 7
  misc_feature: MA Experiment 20001451 PARAMETER Experiment Name: At_Far-red-induction_P Parameter: Light Value: Far-red vs. White
  misc_feature: MA Experiment 20001451 PARAMETER Experiment Name: At_Far-red-induction_P Parameter: Organism Value: A. thaliana
  misc_feature: MA Experiment 20001451 PARAMETER Experiment Name: At_Far-red-induction_P Parameter: Plant Line Value: Columbia
  misc_feature: MA Experiment 20001451 PARAMETER Experiment Name: At_Far-red-induction_P Parameter: Timepoint (hr) Value: 24
  misc_feature: MA Experiment 20001451 PARAMETER Experiment Name: At_Far-red-induction_P Parameter: Tissue Value: Whole Plant
aatctagaacaagaaaccaaaacatacaccacttctgtttttaaaaaggtaaaaaagatcaagaagaaaccaaagaaaatcagacagcaacaagaaaagatcagttgttaagagaaggaaagtaggaaacgggtcagattgttagatagagagaggaagcgaagaaaaagagtcgcagtgttctttttccactgcgtggttttggtataatcagctgtggctacaacgaggaggcataatctaccgacgtcggattccggtgcgttcaccgactgggcggccacgacgacgacaccttcccgtgccaccgaggatctctctcttggtttcaatgctggttcctccgtcatccacggtggtttaggctcagcttccgtcgccgccggcgttccatcatggcctccgggatcttctgtccgttacggcctaccttcttcggcggcggcgacggagatgggcatggttggtctaagagatgtattccttgttgctccggcttatcaccaccagaacgccggagtgatatctggatccgatcatatgaacagtaatgcagctgcggcggcggcgctcggtgtcggagtgattcctctactcacggcgggtacaccgcagcaaaacgtggaagactccgacattaacttcctcggaaacaaccggagatggcagaataacaacaacaaccacgaaacgcagtatcttcacttcaagagtactaaccagacaacggtcggaacgagctcgaacaactcggggtctggctcaggcgcatcaggaaccgccacgtgtcaagactgtggaaatcaggcgaagaaagagtgtaagcagaggcggtgtaggacttgctgcaagagccgtggctttgattgttctactcacgtgaagagcacgtgggtctctgctgctcggcggagagagaggcaggtcatgcctaccggcgctaatccaacggctggctcgtctctttcgacctcctccgggacgaagaagccgaggatcgtagggtctcaacaacaacaacaacaacaagccacttctcatacttcaacttctaacacaccacctcaaagtttcgagaccagctccagccgacaaggtagttttacattttcattagtatacatagctacatgattttatgtatgtatatacatgcatataacactattagcccttcttg

SEQ ID NO: 103464 - protein, 226 aa, Arabidopsis thaliana
  peptide (1)..(226): Ceres Seq. ID no. 13612812
  misc_feature (103)..(214): Pfam Name: Domain of unknown function (DUF702) Pfam Description: Domain of unknown function (DUF702)
  misc_feature (1)..(214): Homolog of NCBI NO: 18416839 NR Description: lateral root primordia (LRP1) [Arabidopsis >gi|14586363|emb|CAC42894.1| lateral root primordia (LRP1)
  misc_feature (1)..(214): Homolog of NCBI NO: 882341 NR Description: LRP1
  misc_feature (1)..(221): Homolog of NCBI NO: 34906658 NR Description: putative LRP(lateral root primordia) 1 [Oryza
  misc_feature (102)..(212): Homolog of NCBI NO: 15239350 NR Description: zinc finger protein SHI-related [Arabidopsis >gi|4929803|gb|AAD34162.1|AF152555_1 putative zinc finger protein
  misc_feature (73)..(157): Homolog of NCBI NO: 15223669 NR Description: hypothetical protein [Arabidopsis thaliana]
  misc_feature (100)..(157): Homolog of NCBI NO: 15230389 NR Description: expressed protein [Arabidopsis thaliana]
  misc_feature (104)..(181): Homolog of NCBI NO: 15234365 NR Description: expressed protein [Arabidopsis thaliana]
  misc_feature (100)..(157): Homolog of NCBI NO: 15242760 NR Description: hypothetical protein [Arabidopsis thaliana]
  misc_feature (73)..(178): Homolog of NCBI NO: 15222285 NR Description: hypothetical protein [Arabidopsis thaliana]
  misc_feature (51)..(169): Homolog of NCBI NO: 15224110 NR Description: expressed protein [Arabidopsis thaliana]
MGMVGLRDVFLVAPAYHHQNAGVISGSDHMNSNAAAAAALGVGVIPLLTAGTPQQNVEDSDINFLGNNRRWQNNNNNHETQYLHFKSTNQTTVGTSSNNSGSGSGASGTATCQDCGNQAKKECKQRRCRTCCKSRGFDCSTHVKSTWVSAARRRERQVMPTGANPTAGSSLSTSSGTKKPRIVGSQQQQQQQATSHTSTSNTPPQSFETSSSRQGSFTFSLVYIAT

SEQ ID NO: 103465 - protein, 224 aa, Arabidopsis thaliana
  peptide (1)..(224): Ceres Seq. ID no. 13612813
  misc_feature (101)..(212): Pfam Name: Domain of unknown function (DUF702) Pfam Description: Domain of unknown function (DUF702)
  misc_feature (1)..(212): Homolog of NCBI NO: 18416839 NR Description: lateral root primordia (LRP1) [Arabidopsis >gi|14586363|emb|CAC42894.1| lateral root primordia (LRP1)
  misc_feature (1)..(212): Homolog of NCBI NO: 882341 NR Description: LRP1
  misc_feature (1)..(219): Homolog of NCBI NO: 34906658 NR Description: putative LRP(lateral root primordia) 1 [Oryza
  misc_feature (100)..(210): Homolog of NCBI NO: 15239350 NR Description: zinc finger protein SHI-related [Arabidopsis >gi|4929803|gb|AAD34162.1|AF152555_1 putative zinc finger protein
  misc_feature (71)..(155): Homolog of NCBI NO: 15223669 NR Description: hypothetical protein [Arabidopsis thaliana]
  misc_feature (98)..(155): Homolog of NCBI NO: 15230389 NR Description: expressed protein [Arabidopsis thaliana]
  misc_feature (102)..(179): Homolog of NCBI NO: 15234365 NR Description: expressed protein [Arabidopsis thaliana]
  misc_feature (98)..(155): Homolog of NCBI NO: 15242760 NR Description: hypothetical protein [Arabidopsis thaliana]
  misc_feature (71)..(176): Homolog of NCBI NO: 15222285 NR Description: hypothetical protein [Arabidopsis thaliana]
  misc_feature (49)..(167): Homolog of NCBI NO: 15224110 NR Description: expressed protein [Arabidopsis thaliana]
MVGLRDVFLVAPAYHHQNAGVISGSDHMNSNAAAAAALGVGVIPLLTAGTPQQNVEDSDINFLGNNRRWQNNNNNHETQYLHFKSTNQTTVGTSSNNSGSGSGASGTATCQDCGNQAKKECKQRRCRTCCKSRGFDCSTHVKSTWVSAARRRERQVMPTGANPTAGSSLSTSSGTKKPRIVGSQQQQQQQATSHTSTSNTPPQSFETSSSRQGSFTFSLVYIAT

SEQ ID NO: 103466 - protein, 197 aa, Arabidopsis thaliana
  peptide (1)..(197): Ceres Seq. ID no. 13612814
  misc_feature (74)..(185): Pfam Name: Domain of unknown function (DUF702) Pfam Description: Domain of unknown function (DUF702)
  misc_feature (1)..(185): Homolog of NCBI NO: 18416839 NR Description: lateral root primordia (LRP1) [Arabidopsis >gi|14586363|emb|CAC42894.1| lateral root primordia (LRP1)
  misc_feature (1)..(185): Homolog of NCBI NO: 882341 NR Description: LRP1
  misc_feature (1)..(192): Homolog of NCBI NO: 34906658 NR Description: putative LRP(lateral root primordia) 1 [Oryza
  misc_feature (73)..(183): Homolog of NCBI NO: 15239350 NR Description: zinc finger protein SHI-related [Arabidopsis >gi|4929803|gb|AAD34162.1|AF152555_1 putative zinc finger protein
  misc_feature (44)..(128): Homolog of NCBI NO: 15223669 NR Description: hypothetical protein [Arabidopsis thaliana]
  misc_feature (71)..(128): Homolog of NCBI NO: 15230389 NR Description: expressed protein [Arabidopsis thaliana]
  misc_feature (75)..(152): Homolog of NCBI NO: 15234365 NR Description: expressed protein [Arabidopsis thaliana]
  misc_feature (71)..(128): Homolog of NCBI NO: 15242760 NR Description: hypothetical protein [Arabidopsis thaliana]
  misc_feature (44)..(149): Homolog of NCBI NO: 15222285 NR Description: hypothetical protein [Arabidopsis thaliana]
  misc_feature (22)..(140): Homolog of NCBI NO: 15224110 NR Description: expressed protein [Arabidopsis thaliana]
MNSNAAAAAALGVGVIPLLTAGTPQQNVEDSDINFLGNNRRWQNNNNNHETQYLHFKSTNQTTVGTSSNNSGSGSGASGTATCQDCGNQAKKECKQRRCRTCCKSRGFDCSTHVKSTWVSAARRRERQVMPTGANPTAGSSLSTSSGTKKPRIVGSQQQQQQQATSHTSTSNTPPQSFETSSSRQGSFTFSLVYIAT

SEQ ID NO: 103467 - DNA, 1574 bp, Arabidopsis thaliana
  misc_feature (1)..(1574): Ceres Seq. ID no. 13612819
  misc_feature: MA Experiment ID: 108461 Result: Up-regulated in Transcription
  misc_feature: MA Experiment 108461 PARAMETER Experiment Name: At_Germinating_Seeds_cDNA_P Parameter: Age (day) Value: 1 vs. 0
  misc_feature: MA Experiment 108461 PARAMETER Experiment Name: At_Germinating_Seeds_cDNA_P Parameter: Tissue Value: Germinating Seeds
  misc_feature: MA Experiment ID: 108573 Result: Up-regulated in Transcription
  misc_feature: MA Experiment 108573 PARAMETER Experiment Name: At_Drought_cDNA_P Parameter: Timepoint (hr) Value: 6
  misc_feature: MA Experiment 108573 PARAMETER Experiment Name: At_Drought_cDNA_P Parameter: Tissue Value: Aerial
  misc_feature: MA Experiment 108573 PARAMETER Experiment Name: At_Drought_cDNA_P Parameter: Treatment Value: Drought vs. No Drought
  misc_feature: MA Experiment ID: 108576 Result: Down-regulated in Transcription
  misc_feature: MA Experiment 108576 PARAMETER Experiment Name: At_42deg_Heat_cDNA_P Parameter: Temperature (deg C) Value: 42 vs. 22
  misc_feature: MA Experiment 108576 PARAMETER Experiment Name: At_42deg_Heat_cDNA_P Parameter: Timepoint (hr) Value: 1
  misc_feature: MA Experiment 108576 PARAMETER Experiment Name: At_42deg_Heat_cDNA_P Parameter: Tissue Value: Aerial
  misc_feature: MA Experiment ID: 20000111 Result: Down-regulated in Transcription
  misc_feature: MA Experiment 20000111 PARAMETER Experiment Name: At_42deg_Heat_cDNA_P Parameter: Temperature (deg C) Value: 42 vs. 22
  misc_feature: MA Experiment 20000111 PARAMETER Experiment Name: At_42deg_Heat_cDNA_P Parameter: Timepoint (hr) Value: 6
  misc_feature: MA Experiment 20000111 PARAMETER Experiment Name: At_42deg_Heat_cDNA_P Parameter: Tissue Value: Aerial
  misc_feature: MA Experiment ID: 20000113 Result: Down-regulated in Transcription
  misc_feature: MA Experiment 20000113 PARAMETER Experiment Name: At_42deg_Heat_cDNA_P Parameter: Temperature (deg C) Value: 42 vs. 22
  misc_feature: MA Experiment 20000113 PARAMETER Experiment Name: At_42deg_Heat_cDNA_P Parameter: Timepoint (hr) Value: 8
  misc_feature: MA Experiment 20000113 PARAMETER Experiment Name: At_42deg_Heat_cDNA_P Parameter: Tissue Value: Aerial
gtcaaatcattttcgacgactgttattaataattaattcgttaatgacgcaccgttagtcaactccgcttcgtattaattactcctccgatctctttcttattcttctccggcgacacttcccttgcttctccctcttaggactctctctacgaatctgtaagcttcaaattcttacgccacactccgagattcgcttctgattattgtatgaatttttgagctccaaggatccactgccatgtatttatgctgctaaagcttgaaggcagtagtggaatcaccattaagttctttgctttgtaatttagcttgatttgagaataaacaaatgggaaaagcatcaggcttgcttctgtttctcttgggttttgggttctttgttgtcacatataatcttctgacacttatagttcacaatagatctggtgtgagtaattcagatggaagtccacttctggatcctgttgttcagatgcctctaaatattaggaaagccaagagttctccagcaccttttcatgttgccttaacagctacagatgcaccttataataagtggcagtgtcgtattatgtattattggtataagcagaagaaagctcttcctggttctgatatgggtggcttcacccgtattttgcattccggtaattctgataacttgatggatgaaatacccacatttgtggttgatcctcttcctccaggtcttgatcgggggtatgttgtcttgaatagaccatgggcattcgtgcaatggcttgaaagagctaccatcaaggaagactatgtgctcatggcagagcctgatcatgtatttgttaatccccttcccaatttggctgttggaggattcccagccgcttttccgtttttctatattactcctgaaaagtatgaaaacatagtcagaaagtattatccagcggagatggggccagtaacaaatatcgaccccattggcaactctcctgttatcataagcaaggaatcacttgaaaagattgctcctacatggatgaatgtctcgctgacaatgaaaaacgatccagaaactgataaggcatttggatgggtgctggaaatgtacggttacgcaattgcatctgctatacatggggtgcgtcacatacttcggaaggatttcatgcttcagcctccgtgggatttgtctaccaaggggaagtttatcattcattacacttatggatgcgactacaacatgaagggggagctgacatatggcaaaataggagagtggcgattcgataagagatcacatttgcggggtcctcctccaaggaacatgtccttgccgcctcccggtgttcccgaaagtgtggtgacacttgtgaagatggtgaatgaagctactgcgactatccctaattgggacactctctaactcacatccacacacaaaacacaaaccatagggacaaatccatacagcaacaatattttgcctaatttttttttccttctccctttacttcccttcttgtctgttttttcttgtaatggttaaattatgaacttgagtagtaaattacaaaattatttgtttgacac

SEQ ID NO: 103468 - protein, 358 aa, Arabidopsis thaliana; identical to SEQ ID NO: 27550
  peptide (1)..(358): Ceres Seq. ID no. 13612820
  misc_feature (1)..(358): Homolog of NCBI NO: 15240642 NR Description: expressed protein [Arabidopsis thaliana] expressed protein [Arabidopsis thaliana] putative protein [Arabidopsis thaliana]
  misc_feature (1)..(355): Homolog of NCBI NO: 22327055 NR Description: expressed protein [Arabidopsis thaliana] Unknown protein [Arabidopsis thaliana]
  misc_feature (2)..(357): Homolog of NCBI NO: 24413996 NR Description: hypothetical protein~similar to Arabidopsis
  misc_feature (188)..(357): Homolog of NCBI NO: 30682704 NR Description: expressed protein [Arabidopsis thaliana]
  misc_feature (56)..(132): Homolog of NCBI NO: 30682704 NR Description: expressed protein [Arabidopsis thaliana]
  misc_feature (188)..(339): Homolog of NCBI NO: 25371351 NR Description: hypothetical protein At2g25260 [imported] - thaliana >gi|4567251|gb|AAD23665.1| unknown protein [Arabidopsis
  misc_feature (56)..(132): Homolog of NCBI NO: 25371351 NR Description: hypothetical protein At2g25260 [imported] - thaliana >gi|4567251|gb|AAD23665.1| unknown protein [Arabidopsis
  misc_feature (8)..(175): Homolog of NCBI NO: 34903224 NR Description: unnamed protein product [Oryza sativa (japonica group)] >gi|6815101|dbj|BAA90387.1| unnamed protein product
  misc_feature (39)..(338): Homolog of NCBI NO: 22330795 NR Description: expressed protein [Arabidopsis thaliana] unknown protein [Arabidopsis thaliana]

SEQ ID NO: 103469 - protein, 310 aa, Arabidopsis thaliana; identical to SEQ ID NO: 27551
  peptide (1)..(310): Ceres Seq. ID no. 13612821
  misc_feature (1)..(310): Homolog of NCBI NO: 15240642 NR Description: expressed protein [Arabidopsis thaliana] expressed protein [Arabidopsis thaliana] putative protein [Arabidopsis thaliana]
  misc_feature (1)..(307): Homolog of NCBI NO: 22327055 NR Description: expressed protein [Arabidopsis thaliana] Unknown protein [Arabidopsis thaliana]
  misc_feature (1)..(309): Homolog of NCBI NO: 24413996 NR Description: hypothetical protein~similar to Arabidopsis
  misc_feature (140)..(309): Homolog of NCBI NO: 30682704 NR Description: expressed protein [Arabidopsis thaliana]
  misc_feature (8)..(84): Homolog of NCBI NO: 30682704 NR Description: expressed protein [Arabidopsis thaliana]
  misc_feature (140)..(291): Homolog of NCBI NO: 25371351 NR Description: hypothetical protein At2g25260 [imported] - thaliana >gi|4567251|gb|AAD23665.1| unknown protein [Arabidopsis
  misc_feature (8)..(84): Homolog of NCBI NO: 25371351 NR Description: hypothetical protein At2g25260 [imported] - thaliana >gi|4567251|gb|AAD23665.1| unknown protein [Arabidopsis
  misc_feature (1)..(127): Homolog of NCBI NO: 34903224 NR Description: unnamed protein product [Oryza sativa (japonica group)] >gi|6815101|dbj|BAA90387.1| unnamed protein product
  misc_feature (1)..(290): Homolog of NCBI NO: 22330795 NR Description: expressed protein [Arabidopsis thaliana] unknown protein [Arabidopsis thaliana]

SEQ ID NO: 103470 - protein, 277 aa, Arabidopsis thaliana; identical to SEQ ID NO: 27552
  peptide (1)..(277): Ceres Seq. ID no. 13612822
  misc_feature (1)..(277): Homolog of NCBI NO: 15240642 NR Description: expressed protein [Arabidopsis thaliana] expressed protein [Arabidopsis thaliana] putative protein [Arabidopsis thaliana]
  misc_feature (1)..(274): Homolog of NCBI NO: 22327055 NR Description: expressed protein [Arabidopsis thaliana] Unknown protein [Arabidopsis thaliana]
  misc_feature (1)..(276): Homolog of NCBI NO: 24413996 NR Description: hypothetical protein~similar to Arabidopsis
  misc_feature (107)..(276): Homolog of NCBI NO: 30682704 NR Description: expressed protein [Arabidopsis thaliana]
  misc_feature (1)..(51): Homolog of NCBI NO: 30682704 NR Description: expressed protein [Arabidopsis thaliana]
  misc_feature (107)..(258): Homolog of NCBI NO: 25371351 NR Description: hypothetical protein At2g25260 [imported] - thaliana >gi|4567251|gb|AAD23665.1| unknown protein [Arabidopsis
  misc_feature (1)..(51): Homolog of NCBI NO: 25371351 NR Description: hypothetical protein At2g25260 [imported] - thaliana >gi|4567251|gb|AAD23665.1| unknown protein [Arabidopsis
  misc_feature (1)..(94): Homolog of NCBI NO: 34903224 NR Description: unnamed protein product [Oryza sativa (japonica group)] >gi|6815101|dbj|BAA90387.1| unnamed protein product
  misc_feature (1)..(257): Homolog of NCBI NO: 22330795 NR Description: expressed protein [Arabidopsis thaliana] unknown protein [Arabidopsis thaliana]

SEQ ID NO: 103471 - DNA, 1703 bp, Arabidopsis thaliana
  misc_feature (1)..(1703): Ceres Seq. ID no. 13612825
  misc_feature: MA Experiment ID: 108435 Result: Up-regulated in Transcription
  misc_feature: MA Experiment 108435 PARAMETER Experiment Name: At_stm_Mutants_cDNA_P Parameter: Plant Line Value: wt Landsburg vs stm
  misc_feature: MA Experiment 108435 PARAMETER Experiment Name: At_stm_Mutants_cDNA_P Parameter: Tissue Value: Shoot Apical Meristem Region
  misc_feature: MA Experiment ID: 108461 Result: Down-regulated in Transcription
  misc_feature: MA Experiment 108461 PARAMETER Experiment Name: At_Germinating_Seeds_cDNA_P Parameter: Age (day) Value: 1 vs. 0
  misc_feature: MA Experiment 108461 PARAMETER Experiment Name: At_Germinating_Seeds_cDNA_P Parameter: Tissue Value: Germinating Seeds
  misc_feature: MA Experiment ID: 108462 Result: Down-regulated in Transcription
  misc_feature: MA Experiment 108462 PARAMETER Experiment Name: At_Germinating_Seeds_cDNA_P Parameter: Age (day) Value: 2 vs. 0
  misc_feature: MA Experiment 108462 PARAMETER Experiment Name: At_Germinating_Seeds_cDNA_P Parameter: Tissue Value: Germinating Seeds
  misc_feature: MA Experiment ID: 108463 Result: Down-regulated in Transcription
  misc_feature: MA Experiment 108463 PARAMETER Experiment Name: At_Germinating_Seeds_cDNA_P Parameter: Age (day) Value: 3 vs. 0
  misc_feature: MA Experiment 108463 PARAMETER Experiment Name: At_Germinating_Seeds_cDNA_P Parameter: Tissue Value: Germinating Seeds
  misc_feature: MA Experiment ID: 108464 Result: Down-regulated in Transcription
  misc_feature: MA Experiment 108464 PARAMETER Experiment Name: At_Germinating_Seeds_cDNA_P Parameter: Age (day) Value: 4 vs. 0
  misc_feature: MA Experiment 108464 PARAMETER Experiment Name: At_Germinating_Seeds_cDNA_P Parameter: Tissue Value: Germinating Seeds
  misc_feature: MA Experiment ID: 108489 Result: Up-regulated in Transcription
  misc_feature: MA Experiment ID: 20000185 Result: Up-regulated in Transcription
  misc_feature: MA Experiment 20000185 PARAMETER Experiment Name: At_Roots__P Parameter: Age (day) Value: 7 vs. 21
  misc_feature: MA Experiment 20000185 PARAMETER Experiment Name: At_Roots__P Parameter: Organism Value: A. thaliana
  misc_feature: MA Experiment 20000185 PARAMETER Experiment Name: At_Roots__P Parameter: Tissue Value: Roots vs. Whole Plant
  misc_feature: MA Experiment ID: 20000439 Result: Up-regulated in Transcription
  misc_feature: MA Experiment 20000439 PARAMETER Experiment Name: At_Roots__P Parameter: Age (day) Value: 14 vs. 21
  misc_feature: MA Experiment 20000439 PARAMETER Experiment Name: At_Roots__P Parameter: Organism Value: A. thaliana
  misc_feature: MA Experiment 20000439 PARAMETER Experiment Name: At_Roots__P Parameter: Tissue Value: Roots vs. Whole Plant
  misc_feature: MA Experiment ID: 20001458 Result: Up-regulated in Transcription
  misc_feature: MA Experiment 20001458 PARAMETER Experiment Name: At_50mM_NH4NO3_L-to-H_P Parameter: Age (day) Value: Undefined
  misc_feature: MA Experiment 20001458 PARAMETER Experiment Name: At_50mM_NH4NO3_L-to-H_P Parameter: Organism Value: Undefined
  misc_feature: MA Experiment 20001458 PARAMETER Experiment Name: At_50mM_NH4NO3_L-to-H_P Parameter: Plant Line Value: Undefined
  misc_feature: MA Experiment 20001458 PARAMETER Experiment Name: At_50mM_NH4NO3_L-to-H_P Parameter: Timepoint (hr) Value: 2
  misc_feature: MA Experiment 20001458 PARAMETER Experiment Name: At_50mM_NH4NO3_L-to-H_P Parameter: Tissue Value: Siliques
  misc_feature: MA Experiment 20001458 PARAMETER Experiment Name: At_50mM_NH4NO3_L-to-H_P Parameter: Treatment Value: 50mM NH4NO3 vs. 100mM Manitol
  misc_feature: MA Experiment ID: 20001459 Result: Up-regulated in Transcription
  misc_feature: MA Experiment 20001459 PARAMETER Experiment Name: At_50mM_NH4NO3_L-to-H_P Parameter: Age (day) Value: Undefined
  misc_feature: MA Experiment 20001459 PARAMETER Experiment Name: At_50mM_NH4NO3_L-to-H_P Parameter: Organism Value: Undefined
  misc_feature: MA Experiment 20001459 PARAMETER Experiment Name: At_50mM_NH4NO3_L-to-H_P Parameter: Plant Line Value: Undefined
  misc_feature: MA Experiment 20001459 PARAMETER Experiment Name: At_50mM_NH4NO3_L-to-H_P Parameter: Timepoint (hr) Value: 4
  misc_feature: MA Experiment 20001459 PARAMETER Experiment Name: At_50mM_NH4NO3_L-to-H_P Parameter: Tissue Value: Siliques
  misc_feature: MA Experiment 20001459 PARAMETER Experiment Name: At_50mM_NH4NO3_L-to-H_P Parameter: Treatment Value: 50mM NH4NO3 vs. 100mM Manitol
aaaacttcaccaaccccatttttaagcccctttctttgtttttatcctccgatcgatcaaaccaagaaaaaacactttcgtatttccctcgacgaaaaaaatggcaaccatttcgaatctcgctaatcttccccgcgccacctgcgtcgactccaaatcttcttcctcttcctccgtcttacctagatccttcgtcaatttccgcgctttgaatgcaaagctttcctcttctcagctttctcttcgttataaccaacgatcaataccttccctctctgtgaggtgttcagtgtctggtggaaatggaactgctggaaagagaacgactcttcatgatctatatgagaaggaaggtcagagtccttggtatgataatctttgccgtccagtcacagatcttctcccgttgattgctcgtggtgttagaggtgttactagcaaccctgcgatcttccaaaaagccatttccacttcaaatgcttataatgatcaattcaggacacttgtggaatcgggaaaggacattgaaagtgcgtattgggaacttgtggtgaaggatattcaggatgcctgcaaactttttgagccaatctatgaccagacagaaggtgcggatggctatgtctctgttgaagtttcacctaggcttgctgatgatacccaaggaactgttgaagctgctaaatatcttagcaaggttgtcaaccgtcgtaatgtctacattaagattcctgctactgctccatgcattccttccatcagggatgtcattgcagctggaataagtgtcaatgtcacgcttatattctcaatcgccagatatgaagcagtgatcgatgcatatttggatggcctcgaggcgtctggacttgatgacctctcaagagttaccagtgttgcttccttctttgtcagtcgggtggatactctcatggacaagatgcttgagcaaattggtacccctgaagccttagatctccgtgggaaggcggctgtggctcaagctgcattagcatacaagctataccagcagaaattctctggcccaagatgggaagctctggtaaagaaaggtgccaagaaacagagacttctctgggcatcaacaagtgtaaagaacccagcttactctgacaccttatatgtcgctcctctcatcggacctgacactgtatcaaccatgccggatcaagccctggaagcattcgcagatcatggaatagtgaagaggacaatagatgcgaatgtgtcagaagcagaagggatttacagtgcactagagaagctgggaatagactggaacaaagtaggagaacagttggaagacgaaggagtagattccttcaagaagagtttcgagagtctgctcggtacactgcaagacaaggccaacactctcaaactagccagccattgaggaaatgagtcatcattatgtttttggttacgctaaaataaaaagaagaacctttggcttttgttcttcaatccttatgcatgctttctaaagtggttatgatggattttgcttgatgttccacattatgggttattctattttctttgttcttgtaagatgatgcttcagaagagtttgttactttttaccgtatttgtaatttacattttcactgaaaacaattggcgagtaaaaaagtgtccttgtcttcttctttgttcggattatatgaacaattgttcct

SEQ ID NO: 103472 - protein, 438 aa, Arabidopsis thaliana; identical to SEQ ID NO: 21905
  peptide (1)..(438): Ceres Seq. ID no. 13612826
  misc_feature (87)..(426): Pfam Name: Transaldolase Pfam Description: Transaldolase
  misc_feature (1)..(438): Homolog of NCBI NO: 15240625 NR Description: transaldolase - like protein [Arabidopsis
  misc_feature (1)..(437): Homolog of NCBI NO: 7489279 NR Description: transaldolase (EC 2.2.1.2) - potato
  misc_feature (1)..(437): Homolog of NCBI NO: 10441272 NR Description: transaldolase [Lycopersicon esculentum]
  misc_feature (1)..(437): Homolog of NCBI NO: 32481059 NR Description: transaldolase [Lycopersicon esculentum]
  misc_feature (117)..(434): Homolog of NCBI NO: 34907042 NR Description: putative transaldolase [Oryza sativa (japonica group)] >gi|20160725|dbj|BAB89667.1| putative transaldolase
  misc_feature (59)..(117): Homolog of NCBI NO: 34907042 NR Description: putative transaldolase [Oryza sativa (japonica group)] >gi|20160725|dbj|BAB89667.1| putative transaldolase
  misc_feature (83)..(433): Homolog of NCBI NO: 29832856 NR Description: putative transaldolase [Streptomyces avermitilis >gi|29609977|dbj|BAC74025.1| putative transaldolase [Streptomyces
  misc_feature (84)..(433): Homolog of NCBI NO: 21220422 NR Description: putative transaldolase [Streptomyces coelicolor >gi|23822265|sp|Q9XAC0|TAL2_STRCO Transaldolase 2
  misc_feature (84)..(423): Homolog of NCBI NO: 29828309 NR Description: putative transaldolase [Streptomyces avermitilis >gi|29605412|dbj|BAC69478.1| putative transaldolase [Streptomyces
  misc_feature (77)..(433): Homolog of NCBI NO: 37522946 NR Description: transaldolase [Gloeobacter violaceus]

SEQ ID NO: 103473 - DNA, 978 bp, Arabidopsis thaliana
  misc_feature (1)..(978): Ceres Seq. ID no. 13612827
  misc_feature: MA Experiment ID: 108434 Result: Up-regulated in Transcription
  misc_feature: MA Experiment 108434 PARAMETER Experiment Name: At_Root_Tips_cDNA_P Parameter: Tissue Value: Root Tips
  misc_feature: MA Experiment ID: 108488 Result: Down-regulated in Transcription
  misc_feature: MA Experiment ID: 20000185 Result: Up-regulated in Transcription
  misc_feature: MA Experiment 20000185 PARAMETER Experiment Name: At_Roots__P Parameter: Age (day) Value: 7 vs. 21
  misc_feature: MA Experiment 20000185 PARAMETER Experiment Name: At_Roots__P Parameter: Organism Value: A. thaliana
  misc_feature: MA Experiment 20000185 PARAMETER Experiment Name: At_Roots__P Parameter: Tissue Value: Roots vs. Whole Plant
gctctcgacaaagcagctgagcgacttttgcacatttctagggttccaatcaaaatctatctgcaacaaaaatggctaatcgtttcagatcagggatctccttcttcaagaccatcgccgtaacagattctgtctcctccgttagatccaagtcgcttttcccagcgttgagaacttatgcaactgcttctgctcaaacaaccgctaatgttaaggtgcctattgctttagttggtgaaaatgggaactttgcttcatggctatacattgcagctgtgaaaatgaattccttggaaaagattgagacggatctttctgagatgattgaggcaatgaagacagctcctatttttgctcagtttacaaaggatccctctgttcctagagggacaagattggctgctattagggatgcttgtgatcaagcaaagtttgccgaacccactaagaacttcctctctttgttagctgagaatggaaagctgaagaacctagatgccattgtgaagaaatttatgcagctgacaaacgcacataggggagatgtcaaagttttggttaccacagtcattccgcttccccctgctgaggagaaagaactgactgagacgcttcaggagatcattggagcagggaagaaaatcactgtggaacaaaagattgatccaagtatctacggtggactaatcgtagagttccaacaaaaggtgttggacatgtcaatcaggacaagggcacaacagatggagaggctcctccgtgaacctgttgacttcaacaacctctgaaaatcttgagagaaatttcccccaagaaaacatgcttgtgatgaatgccaccaattgacaaataaatatggaccctcctgggaaacaatataatagctggccacttctctccctttgaattttgtcatttgctttttacatattgttgtttgcttcgaaataaagcttttcgagacatcaaatttcaatg

SEQ ID NO: 103474 - protein, 238 aa, Arabidopsis thaliana; identical to SEQ ID NO: 28758
  peptide (1)..(238): Ceres Seq. ID no. 13612828
  misc_feature (58)..(229): Pfam Name: ATP synthase delta (OSCP) subunit Pfam Description: ATP synthase delta (OSCP) subunit
  misc_feature (1)..(238): Homolog of NCBI NO: 15240628 NR Description: delta subunit of mitochondrial F1-ATPase thaliana] >gi|22096334|sp|Q96251|ATPO_ARATH ATP synthase delta mitochondrial precursor (Oligomycin sensitivity conferral
  misc_feature (1)..(238): Homolog of NCBI NO: 14190495 NR Description: AT5g13450/T22N19_100 [Arabidopsis thaliana]
  misc_feature (1)..(238): Homolog of NCBI NO: 1655482 NR Description: delta subunit of mitochondrial F1-ATPase
  misc_feature (1)..(235): Homolog of NCBI NO: 114682 NR Description: ATP synthase delta chain, mitochondrial precursor
  misc_feature (1)..(235): Homolog of NCBI NO: 4774163 NR Description: F1-ATP synthase delta subunit [Ipomoea batatas]
  misc_feature (1)..(234): Homolog of NCBI NO: 23507246 NR Description: oligomycin sensitivity conferring protein [Silene
  misc_feature (1)..(234): Homolog of NCBI NO: 23507248 NR Description: oligomycin sensitivity conferring protein [Silene
  misc_feature (33)..(233): Homolog of NCBI NO: 4502303 NR Description: ATP synthase, H+ transporting, mitochondrial F1 O subunit (oligomycin sensitivity conferring protein); ATP H+ transporting, mitochondrial F1 complex, O subunit; human ATP
  misc_feature (21)..(231): Homolog of NCBI NO: 27806307 NR Description: ATP synthase, H+ transporting, mitochondrial F1 O subunit (oligomycin sensitivity conferring protein) [Bos >gi|114681|sp|P13621|ATPO_BOVIN ATP synthase oligomycin
  misc_feature (34)..(233): Homolog of NCBI NO: 31208781 NR Description: ENSANGP00000011882 [Anopheles gambiae]

SEQ ID NO: 103475 - protein, 168 aa, Arabidopsis thaliana; identical to SEQ ID NO: 28759
  peptide (1)..(168): Ceres Seq. ID no. 13612829
  misc_feature (1)..(159): Pfam Name: ATP synthase delta (OSCP) subunit Pfam Description: ATP synthase delta (OSCP) subunit
  misc_feature (1)..(168): Homolog of NCBI NO: 15240628 NR Description: delta subunit of mitochondrial F1-ATPase thaliana] >gi|22096334|sp|Q96251|ATPO_ARATH ATP synthase delta mitochondrial precursor (Oligomycin sensitivity conferral
  misc_feature (1)..(168): Homolog of NCBI NO: 14190495 NR Description: AT5g13450/T22N19_100 [Arabidopsis thaliana]
  misc_feature (1)..(168): Homolog of NCBI NO: 1655482 NR Description: delta subunit of mitochondrial F1-ATPase
  misc_feature (1)..(165): Homolog of NCBI NO: 114682 NR Description: ATP synthase delta chain, mitochondrial precursor
  misc_feature (1)..(165): Homolog of NCBI NO: 4774163 NR Description: F1-ATP synthase delta subunit [Ipomoea batatas]
  misc_feature (1)..(164): Homolog of NCBI NO: 23507246 NR Description: oligomycin sensitivity conferring protein [Silene
  misc_feature (1)..(164): Homolog of NCBI NO: 23507248 NR Description: oligomycin sensitivity conferring protein [Silene
  misc_feature (1)..(163): Homolog of NCBI NO: 4502303 NR Description: ATP synthase, H+ transporting, mitochondrial F1 O subunit (oligomycin sensitivity conferring protein); ATP H+ transporting, mitochondrial F1 complex, O subunit; human ATP
  misc_feature (1)..(161): Homolog of NCBI NO: 27806307 NR Description: ATP synthase, H+ transporting, mitochondrial F1 O subunit (oligomycin sensitivity conferring protein) [Bos >gi|114681|sp|P13621|ATPO_BOVIN ATP synthase oligomycin
  misc_feature (1)..(163): Homolog of NCBI NO: 31208781 NR Description: ENSANGP00000011882 [Anopheles gambiae]

SEQ ID NO: 103476 - protein, 155 aa, Arabidopsis thaliana; identical to SEQ ID NO: 28760
  peptide (1)..(155): Ceres Seq. ID no. 13612830
  misc_feature (1)..(146): Pfam Name: ATP synthase delta (OSCP) subunit Pfam Description: ATP synthase delta (OSCP) subunit
  misc_feature (1)..(155): Homolog of NCBI NO: 15240628 NR Description: delta subunit of mitochondrial F1-ATPase thaliana] >gi|22096334|sp|Q96251|ATPO_ARATH ATP synthase delta mitochondrial precursor (Oligomycin sensitivity conferral
  misc_feature (1)..(155): Homolog of NCBI NO: 14190495 NR Description: AT5g13450/T22N19_100 [Arabidopsis thaliana]
  misc_feature (1)..(155): Homolog of NCBI NO: 1655482 NR Description: delta subunit of mitochondrial F1-ATPase
  misc_feature (1)..(152): Homolog of NCBI NO: 114682 NR Description: ATP synthase delta chain, mitochondrial precursor
  misc_feature (1)..(152): Homolog of NCBI NO: 4774163 NR Description: F1-ATP synthase delta subunit [Ipomoea batatas]
  misc_feature (1)..(151): Homolog of NCBI NO: 23507246 NR Description: oligomycin sensitivity conferring protein [Silene
  misc_feature (1)..(151): Homolog of NCBI NO: 23507248 NR Description: oligomycin sensitivity conferring protein [Silene
  misc_feature (1)..(150): Homolog of NCBI NO: 4502303 NR Description: ATP synthase, H+ transporting, mitochondrial F1 O subunit (oligomycin sensitivity conferring protein); ATP H+ transporting, mitochondrial F1 complex, O subunit; human ATP
  misc_feature (1)..(148): Homolog of NCBI NO: 27806307 NR Description: ATP synthase, H+ transporting, mitochondrial F1 O subunit (oligomycin sensitivity conferring protein) [Bos >gi|114681|sp|P13621|ATPO_BOVIN ATP synthase oligomycin
  misc_feature (1)..(150): Homolog of NCBI NO: 31208781 NR Description: ENSANGP00000011882 [Anopheles gambiae]

SEQ ID NO: 103477 - DNA, 870 bp, Arabidopsis thaliana
  misc_feature (1)..(870): Ceres Seq. ID no. 13612836
  misc_feature: MA Experiment ID: 108434 Result: Up-regulated in Transcription
  misc_feature: MA Experiment 108434 PARAMETER Experiment Name: At_Root_Tips_cDNA_P Parameter: Tissue Value: Root Tips
  misc_feature: MA Experiment ID: 108462 Result: Down-regulated in Transcription
  misc_feature: MA Experiment 108462 PARAMETER Experiment Name: At_Germinating_Seeds_cDNA_P Parameter: Age (day) Value: 2 vs. 0
  misc_feature: MA Experiment 108462 PARAMETER Experiment Name: At_Germinating_Seeds_cDNA_P Parameter: Tissue Value: Germinating Seeds
  misc_feature: MA Experiment ID: 108463 Result: Down-regulated in Transcription
  misc_feature: MA Experiment 108463 PARAMETER Experiment Name: At_Germinating_Seeds_cDNA_P Parameter: Age (day) Value: 3 vs. 0
  misc_feature: MA Experiment 108463 PARAMETER Experiment Name: At_Germinating_Seeds_cDNA_P Parameter: Tissue Value: Germinating Seeds
  misc_feature: MA Experiment ID: 108464 Result: Down-regulated in Transcription
  misc_feature: MA Experiment 108464 PARAMETER Experiment Name: At_Germinating_Seeds_cDNA_P Parameter: Age (day) Value: 4 vs. 0
  misc_feature: MA Experiment 108464 PARAMETER Experiment Name: At_Germinating_Seeds_cDNA_P Parameter: Tissue Value: Germinating Seeds
  misc_feature: MA Experiment ID: 108573 Result: Down-regulated in Transcription
  misc_feature: MA Experiment 108573 PARAMETER Experiment Name: At_Drought_cDNA_P Parameter: Timepoint (hr) Value: 6
  misc_feature: MA Experiment 108573 PARAMETER Experiment Name: At_Drought_cDNA_P Parameter: Tissue Value: Aerial
  misc_feature: MA Experiment 108573 PARAMETER Experiment Name: At_Drought_cDNA_P Parameter: Treatment Value: Drought vs. No Drought
  misc_feature: MA Experiment ID: 20000224 Result: Down-regulated in Transcription
  misc_feature: MA Experiment ID: 20001451 Result: Up-regulated in Transcription
  misc_feature: MA Experiment 20001451 PARAMETER Experiment Name: At_Far-red-induction_P Parameter: Age (day) Value: 7
  misc_feature: MA Experiment 20001451 PARAMETER Experiment Name: At_Far-red-induction_P Parameter: Light Value: Far-red vs. White
  misc_feature: MA Experiment 20001451 PARAMETER Experiment Name: At_Far-red-induction_P Parameter: Organism Value: A. thaliana
  misc_feature: MA Experiment 20001451 PARAMETER Experiment Name: At_Far-red-induction_P Parameter: Plant Line Value: Columbia
  misc_feature: MA Experiment 20001451 PARAMETER Experiment Name: At_Far-red-induction_P Parameter: Timepoint (hr) Value: 24
  misc_feature: MA Experiment 20001451 PARAMETER Experiment Name: At_Far-red-induction_P Parameter: Tissue Value: Whole Plant
acctttgaaagcaatcaattccattccatcaaaggggtttttagggtttcgtcactcgccgataatcctctctctctagaaaacatgactgccgaacagaaagtggagctcgccgccaaattggaagagcagaagatcgatcttgataaacctgaggttgaagatgatgatgacaatgatgaggatgattccgaggacgatgacgaggcggagggacatgatggggaggccggtggccggtcaaagcaaagcagaagtgagaaaaagagtcgtaaagctatgttgaagcttgggatgaaaccaatcactggtgttagccgtgtcaccgtcaaaaagagcaagaatatcttgtttgtgatatcaaaacctgatgtgttcaagagtccagcttcagatacatatgtgatctttggtgaggccaagatagaggatttgagctcgcagctgcagagtcaagccgcagagcagttcaaggctcccaacctcagcaacgtgatttcacaggagaaacatcgagtgctgcaactgcagctgctgttcaagatgatgatgatgaagaggtagacgaggagggagtagagccaaaggacatcgagcttgtgatgacccaagcaggagtgtctaagccaagggcagttaaggcgctcaagctcgctaatggagatatagtctctgccatcatggagcttaccacctaaatccgaaacttttcctactttgatgtgcttttcgtgtttttgttttcccattttcctttcaagtgattttgcatgttgtatcattatatactatacgtttggactcatttcatattttagaaatttgagtggattttcatgagtttatactctgtttattcacttatcatcc

SEQ ID NO: 103478 - protein, 187 aa, Arabidopsis thaliana
  peptide (1)..(187): Ceres Seq. ID no. 13612837
  misc_feature (85)..(144): Pfam Name: NAC domain Pfam Description: NAC domain
  misc_feature (29)..(187): Homolog of NCBI NO: 15240731 NR Description: expressed protein [Arabidopsis thaliana] contains similarity to nascent polypeptide associated complex
  misc_feature (25)..(162): Homolog of NCBI NO: 13899101 NR Description: alpha NAC-like protein [Arabidopsis thaliana]
  misc_feature (29)..(168): Homolog of NCBI NO: 15230476 NR Description: nascent polypeptide associated complex alpha -related [Arabidopsis thaliana] nascent polypeptide associated complex alpha chain, putative;
  misc_feature (25)..(162): Homolog of NCBI NO: 15229149 NR Description: alpha NAC-related protein [Arabidopsis thaliana]
  misc_feature (40)..(166): Homolog of NCBI NO: 15235122 NR Description: alpha NAC -related [Arabidopsis thaliana]
  misc_feature (54)..(166): Homolog of NCBI NO: 4115918 NR Description: similar to nascent polypeptide associated complex
  misc_feature (29)..(168): Homolog of NCBI NO: 34907258 NR Description: putative nascent polypeptide associated complex
  misc_feature (32)..(168): Homolog of NCBI NO: 32352154 NR Description: nascent polypeptide associated complex alpha
  misc_feature (25)..(165): Homolog of NCBI NO: 6752882 NR Description: nascent polypeptide associated complex alpha
  misc_feature (52)..(169): Homolog of NCBI NO: 34879082 NR Description: similar to KIAA0363 [Rattus norvegicus]
TFESNQFHSIKGVFRVSSLADNPLSLENMTAEQKVELAAKLEEQKIDLDKPEVEDDDDNDEDDSEDDDEAEGHDGEAGGRSKQSRSEKKSRKAMLKLGMKPITGVSRVTVKKSKNILFVISKPDVFKSPASDTYVIFGEAKIEDLSSQLQSQAAEQFKAPNLSNVISQEKHRVLQLQLLFKMMMMKR

SEQ ID NO: 103479 - protein, 159 aa, Arabidopsis thaliana
  peptide (1)..(159): Ceres Seq. ID no. 13612838
  misc_feature (57)..(116): Pfam Name: NAC domain Pfam Description: NAC domain
  misc_feature (1)..(159): Homolog of NCBI NO: 15240731 NR Description: expressed protein [Arabidopsis thaliana] contains similarity to nascent polypeptide associated complex
  misc_feature (1)..(134): Homolog of NCBI NO: 13899101 NR Description: alpha NAC-like protein [Arabidopsis thaliana]
  misc_feature (1)..(140): Homolog of NCBI NO: 15230476 NR Description: nascent polypeptide associated complex alpha -related [Arabidopsis thaliana] nascent polypeptide associated complex alpha chain, putative;
  misc_feature (1)..(134): Homolog of NCBI NO: 15229149 NR Description: alpha NAC-related protein [Arabidopsis thaliana]
  misc_feature (12)..(138): Homolog of NCBI NO: 15235122 NR Description: alpha NAC -related [Arabidopsis thaliana]
  misc_feature (26)..(138): Homolog of NCBI NO: 4115918 NR Description: similar to nascent polypeptide associated complex
  misc_feature (1)..(140): Homolog of NCBI NO: 34907258 NR Description: putative nascent polypeptide associated complex
  misc_feature (4)..(140): Homolog of NCBI NO: 32352154 NR Description: nascent polypeptide associated complex alpha
  misc_feature (1)..(137): Homolog of NCBI NO: 6752882 NR Description: nascent polypeptide associated complex alpha
  misc_feature (24)..(141): Homolog of NCBI NO: 34879082 NR Description: similar to KIAA0363 [Rattus norvegicus]
MTAEQKVELAAKLEEQKIDLDKPEVEDDDDNDEDDSEDDDEAEGHDGEAGGRSKQSRSEKKSRKAMLKLGMKPITGVSRVTVKKSKNILFVISKPDVFKSPASDTYVIFGEAKIEDLSSQLQSQAAEQFKAPNLSNVISQEKHRVLQLQLLFKMMMMKR

SEQ ID NO: 103480 - protein, 94 aa, Arabidopsis thaliana
  peptide (1)..(94): Ceres Seq. ID no. 13612839
  misc_feature (1)..(51): Pfam Name: NAC domain Pfam Description: NAC domain
  misc_feature (1)..(94): Homolog of NCBI NO: 15240731 NR Description: expressed protein [Arabidopsis thaliana] contains similarity to nascent polypeptide associated complex
  misc_feature (1)..(69): Homolog of NCBI NO: 13899101 NR Description: alpha NAC-like protein [Arabidopsis thaliana]
  misc_feature (1)..(75): Homolog of NCBI NO: 15230476 NR Description: nascent polypeptide associated complex alpha -related [Arabidopsis thaliana] nascent polypeptide associated complex alpha chain, putative;
  misc_feature (1)..(69): Homolog of NCBI NO: 15229149 NR Description: alpha NAC-related protein [Arabidopsis thaliana]
  misc_feature (1)..(73): Homolog of NCBI NO: 15235122 NR Description: alpha NAC -related [Arabidopsis thaliana]
  misc_feature (1)..(73): Homolog of NCBI NO: 4115918 NR Description: similar to nascent polypeptide associated complex
  misc_feature (1)..(75): Homolog of NCBI NO: 34907258 NR Description: putative nascent polypeptide associated complex
  misc_feature (1)..(75): Homolog of NCBI NO: 32352154 NR Description: nascent polypeptide associated complex alpha
  misc_feature (1)..(72): Homolog of NCBI NO: 6752882 NR Description: nascent polypeptide associated complex alpha
  misc_feature (1)..(76): Homolog of NCBI NO: 34879082 NR Description: similar to KIAA0363 [Rattus norvegicus]
MLKLGMKPITGVSRVTVKKSKNILFVISKPDVFKSPASDTYVIFGEAKIEDLSSQLQSQAAEQFKAPNLSNVISQEKHRVLQLQLLFKMMMMKR

SEQ ID NO: 103481 - DNA, 1616 bp, Arabidopsis thaliana
  misc_feature (1)..(1616): Ceres Seq. ID no. 13612840
  misc_feature: MA Experiment ID: 108434 Result: Down-regulated in Transcription
  misc_feature: MA Experiment 108434 PARAMETER Experiment Name: At_Root_Tips_cDNA_P Parameter: Tissue Value: Root Tips
  misc_feature: MA Experiment ID: 108461 Result: Down-regulated in Transcription
  misc_feature: MA Experiment 108461 PARAMETER Experiment Name: At_Germinating_Seeds_cDNA_P Parameter: Age (day) Value: 1 vs. 0
  misc_feature: MA Experiment 108461 PARAMETER Experiment Name: At_Germinating_Seeds_cDNA_P Parameter: Tissue Value: Germinating Seeds
  misc_feature: MA Experiment ID: 108462 Result: Down-regulated in Transcription
  misc_feature: MA Experiment 108462 PARAMETER Experiment Name: At_Germinating_Seeds_cDNA_P Parameter: Age (day) Value: 2 vs. 0
  misc_feature: MA Experiment 108462 PARAMETER Experiment Name: At_Germinating_Seeds_cDNA_P Parameter: Tissue Value: Germinating Seeds
  misc_feature: MA Experiment ID: 108469 Result: Up-regulated in Transcription
  misc_feature: MA Experiment ID: 108572 Result: Up-regulated in Transcription
  misc_feature: MA Experiment 108572 PARAMETER Experiment Name: At_Drought_cDNA_P Parameter: Timepoint (hr) Value: 1
  misc_feature: MA Experiment 108572 PARAMETER Experiment Name: At_Drought_cDNA_P Parameter: Tissue Value: Aerial
  misc_feature: MA Experiment 108572 PARAMETER Experiment Name: At_Drought_cDNA_P Parameter: Treatment Value: Drought vs. No Drought
  misc_feature: MA Experiment ID: 108573 Result: Up-regulated in Transcription
  misc_feature: MA Experiment 108573 PARAMETER Experiment Name: At_Drought_cDNA_P Parameter: Timepoint (hr) Value: 6
  misc_feature: MA Experiment 108573 PARAMETER Experiment Name: At_Drought_cDNA_P Parameter: Tissue Value: Aerial
  misc_feature: MA Experiment 108573 PARAMETER Experiment Name: At_Drought_cDNA_P Parameter: Treatment Value: Drought vs. No Drought
  misc_feature: MA Experiment ID: 108585 Result: Up-regulated in Transcription
  misc_feature: MA Experiment 108585 PARAMETER Experiment Name: At_5mM_NaNP_cDNA_P Parameter: Timepoint (hr) Value: 6
  misc_feature: MA Experiment 108585 PARAMETER Experiment Name: At_5mM_NaNP_cDNA_P Parameter: Tissue Value: Aerial
  misc_feature: MA Experiment 108585 PARAMETER Experiment Name: At_5mM_NaNP_cDNA_P Parameter: Treatment Value: null
  misc_feature: MA Experiment ID: 108594 Result: Down-regulated in Transcription
  misc_feature: MA Experiment 108594 PARAMETER Experiment Name: At_Ler-rhl_Root_cDNA_P Parameter: Plant Line Value: null
  misc_feature: MA Experiment ID: 108607 Result: Up-regulated in Transcription
  misc_feature: MA Experiment 108607 PARAMETER Experiment Name: At_100uM_ABA_cDNA_P Parameter: Timepoint (hr) Value: 4
  misc_feature: MA Experiment 108607 PARAMETER Experiment Name: At_100uM_ABA_cDNA_P Parameter: Tissue Value: Aerial
  misc_feature: MA Experiment 108607 PARAMETER Experiment Name: At_100uM_ABA_cDNA_P Parameter: Treatment Value: 100uM ABA vs. No Treatment
  misc_feature: MA Experiment ID: 108667 Result: Up-regulated in Transcription
  misc_feature: MA Experiment 108667 PARAMETER Experiment Name: At_2mM_SA_cDNA_P Parameter: Plant Line Value: WS
  misc_feature: MA Experiment 108667 PARAMETER Experiment Name: At_2mM_SA_cDNA_P Parameter: Timepoint (hr) Value: 1
  misc_feature: MA Experiment 108667 PARAMETER Experiment Name: At_2mM_SA_cDNA_P Parameter: Treatment Value: 2mM SA vs. No Treatment
  misc_feature: MA Experiment ID: 108668 Result: Up-regulated in Transcription
  misc_feature: MA Experiment 108668 PARAMETER Experiment Name: At_2mM_SA_cDNA_P Parameter: Plant Line Value: WS
  misc_feature: MA Experiment 108668 PARAMETER Experiment Name: At_2mM_SA_cDNA_P Parameter: Timepoint (hr) Value: 6
  misc_feature: MA Experiment 108668 PARAMETER Experiment Name: At_2mM_SA_cDNA_P Parameter: Treatment Value: 2mM SA vs. No Treatment
  misc_feature: MA Experiment ID: 20000070 Result: Up-regulated in Transcription
  misc_feature: MA Experiment 20000070 PARAMETER Experiment Name: At_100uM_ABA_Mutants_cDNA_P Parameter: Plant Line Value: CS24
  misc_feature: MA Experiment 20000070 PARAMETER Experiment Name: At_100uM_ABA_Mutants_cDNA_P Parameter: Timepoint (hr) Value: 6
  misc_feature: MA Experiment 20000070 PARAMETER Experiment Name: At_100uM_ABA_Mutants_cDNA_P Parameter: Tissue Value: Aerial
  misc_feature: MA Experiment 20000070 PARAMETER Experiment Name: At_100uM_ABA_Mutants_cDNA_P Parameter: Treatment Value: 100uM ABA vs. No Treatment
  misc_feature: MA Experiment ID: 20000071 Result: Up-regulated in Transcription
  misc_feature: MA Experiment 20000071 PARAMETER Experiment Name: At_100uM_ABA_Mutants_cDNA_P Parameter: Plant Line Value: CS8104
  misc_feature: MA Experiment 20000071 PARAMETER Experiment Name: At_100uM_ABA_Mutants_cDNA_P Parameter: Timepoint (hr) Value: 6
  misc_feature: MA Experiment 20000071 PARAMETER Experiment Name: At_100uM_ABA_Mutants_cDNA_P Parameter: Tissue Value: Aerial
  misc_feature: MA Experiment 20000071 PARAMETER Experiment Name: At_100uM_ABA_Mutants_cDNA_P Parameter: Treatment Value: 100uM ABA vs. No Treatment
  misc_feature: MA Experiment ID: 20000179 Result: Down-regulated in Transcription
  misc_feature: MA Experiment 20000179 PARAMETER Experiment Name: At_Germinating_Seeds_P Parameter: Age (hr) Value: 6 vs. 0
  misc_feature: MA Experiment 20000179 PARAMETER Experiment Name: At_Germinating_Seeds_P Parameter: Tissue Value: Germinating Seeds
  misc_feature: MA Experiment ID: 20000180 Result: Down-regulated in Transcription
  misc_feature: MA Experiment 20000180 PARAMETER Experiment Name: At_Germinating_Seeds_P Parameter: Age (hr) Value: 24 vs. 0
  misc_feature: MA Experiment 20000180 PARAMETER Experiment Name: At_Germinating_Seeds_P Parameter: Tissue Value: Germinating Seeds
  misc_feature: MA Experiment ID: 20000182 Result: Up-regulated in Transcription
  misc_feature: MA Experiment 20000182 PARAMETER Experiment Name: At_2mM_SA_P Parameter: Age (day) Value: 14
  misc_feature: MA Experiment 20000182 PARAMETER Experiment Name: At_2mM_SA_P Parameter: Organism Value: A. thaliana
  misc_feature: MA Experiment 20000182 PARAMETER Experiment Name: At_2mM_SA_P Parameter: Plant Line Value: WS
  misc_feature: MA Experiment 20000182 PARAMETER Experiment Name: At_2mM_SA_P Parameter: Timepoint (hr) Value: 6
  misc_feature: MA Experiment 20000182 PARAMETER Experiment Name: At_2mM_SA_P Parameter: Tissue Value: Aerial
  misc_feature: MA Experiment 20000182 PARAMETER Experiment Name: At_2mM_SA_P Parameter: Treatment Value: 2mM SA vs. No Treatment
  misc_feature: MA Experiment ID: 20000185 Result: Up-regulated in Transcription
  misc_feature: MA Experiment 20000185 PARAMETER Experiment Name: At_Roots__P Parameter: Age (day) Value: 7 vs. 21
  misc_feature: MA Experiment 20000185 PARAMETER Experiment Name: At_Roots__P Parameter: Organism Value: A. thaliana
  misc_feature: MA Experiment 20000185 PARAMETER Experiment Name: At_Roots__P Parameter: Tissue Value: Roots vs. Whole Plant
  misc_feature: MA Experiment ID: 20000265 Result: Up-regulated in Transcription
  misc_feature: MA Experiment 20000265 PARAMETER Experiment Name: At_Open_Flower_P Parameter: Age (day) Value: 21
  misc_feature: MA Experiment 20000265 PARAMETER Experiment Name: At_Open_Flower_P Parameter: Plant Line Value: WS
  misc_feature: MA Experiment 20000265 PARAMETER Experiment Name: At_Open_Flower_P Parameter: Tissue Value: Closed Flower vs. Whole Plant
  misc_feature: MA Experiment ID: 20000437 Result: Up-regulated in Transcription
  misc_feature: MA Experiment 20000437 PARAMETER Experiment Name: At_Drought_P Parameter: Age (day) Value: 8
  misc_feature: MA Experiment 20000437 PARAMETER Experiment Name: At_Drought_P Parameter: Organism Value: A. thaliana
  misc_feature: MA Experiment 20000437 PARAMETER Experiment Name: At_Drought_P Parameter: Plant Line Value: WS
  misc_feature: MA Experiment 20000437 PARAMETER Experiment Name: At_Drought_P Parameter: Timepoint (hr) Value: 24
  misc_feature: MA Experiment 20000437 PARAMETER Experiment Name: At_Drought_P Parameter: Tissue Value: Whole Plant
  misc_feature: MA Experiment 20000437 PARAMETER Experiment Name: At_Drought_P Parameter: Treatment Value: Drought vs. No Drought
  misc_feature: MA Experiment ID: 20000439 Result: Up-regulated in Transcription
  misc_feature: MA Experiment 20000439 PARAMETER Experiment Name: At_Roots__P Parameter: Age (day) Value: 14 vs. 21
  misc_feature: MA Experiment 20000439 PARAMETER Experiment Name: At_Roots__P Parameter: Organism Value: A. thaliana
  misc_feature: MA Experiment 20000439 PARAMETER Experiment Name: At_Roots__P Parameter: Tissue Value: Roots vs. Whole Plant
  misc_feature: MA Experiment ID: 20000527 Result: Down-regulated in Transcription
  misc_feature: MA Experiment 20000527 PARAMETER Experiment Name: At_10percent_PEG_P Parameter: Age (day) Value: 20
  misc_feature: MA Experiment 20000527 PARAMETER Experiment Name: At_10percent_PEG_P Parameter: Organism Value: A. thaliana
  misc_feature: MA Experiment 20000527 PARAMETER Experiment Name: At_10percent_PEG_P Parameter: Plant Line Value: WS
  misc_feature: MA Experiment 20000527 PARAMETER Experiment Name: At_10percent_PEG_P Parameter: Timepoint (day) Value: 20
  misc_feature: MA Experiment 20000527 PARAMETER Experiment Name: At_10percent_PEG_P Parameter: Tissue Value: Whole Plant
  misc_feature: MA Experiment 20000527 PARAMETER Experiment Name: At_10percent_PEG_P Parameter: Treatment Value: 10percent PEG vs. No Treatment
  misc_feature: MA Experiment ID: 20000709 Result: Up-regulated in Transcription
  misc_feature: MA Experiment 20000709 PARAMETER Experiment Name: At_15mM_NH4NO3_L-to-H_P Parameter: Age (hr) Value: 14
  misc_feature: MA Experiment 20000709 PARAMETER Experiment Name: At_15mM_NH4NO3_L-to-H_P Parameter: Organism Value: A. thaliana
  misc_feature: MA Experiment 20000709 PARAMETER Experiment Name: At_15mM_NH4NO3_L-to-H_P Parameter: Plant Line Value: WS
  misc_feature: MA Experiment 20000709 PARAMETER Experiment Name: At_15mM_NH4NO3_L-to-H_P Parameter: Timepoint (hr) Value: 4
  misc_feature: MA Experiment 20000709 PARAMETER Experiment Name: At_15mM_NH4NO3_L-to-H_P Parameter: Tissue Value: Aerial
  misc_feature: MA Experiment 20000709 PARAMETER Experiment Name: At_15mM_NH4NO3_L-to-H_P Parameter: Treatment Value: 15mM NH4NO3 vs. 30mM Mannitol
  misc_feature: MA Experiment ID: 20001450 Result: Down-regulated in Transcription
  misc_feature: MA Experiment 20001450 PARAMETER Experiment Name: At_Far-red-induction_P Parameter: Age (day) Value: 7
  misc_feature: MA Experiment 20001450 PARAMETER Experiment Name: At_Far-red-induction_P Parameter: Light Value: Far-red vs. White
  misc_feature: MA Experiment 20001450 PARAMETER Experiment Name: At_Far-red-induction_P Parameter: Organism Value: A. thaliana
  misc_feature: MA Experiment 20001450 PARAMETER Experiment Name: At_Far-red-induction_P Parameter: Plant Line Value: Columbia
  misc_feature: MA Experiment 20001450 PARAMETER Experiment Name: At_Far-red-induction_P Parameter: Timepoint (hr) Value: 8
  misc_feature: MA Experiment 20001450 PARAMETER Experiment Name: At_Far-red-induction_P Parameter: Tissue Value: Whole Plant
  misc_feature: MA Experiment ID: 20001451 Result: Down-regulated in Transcription
  misc_feature: MA Experiment 20001451 PARAMETER Experiment Name: At_Far-red-induction_P Parameter: Age (day) Value: 7
  misc_feature: MA Experiment 20001451 PARAMETER Experiment Name: At_Far-red-induction_P Parameter: Light Value: Far-red vs. White
  misc_feature: MA Experiment 20001451 PARAMETER Experiment Name: At_Far-red-induction_P Parameter: Organism Value: A. thaliana
  misc_feature: MA Experiment 20001451 PARAMETER Experiment Name: At_Far-red-induction_P Parameter: Plant Line Value: Columbia
  misc_feature: MA Experiment 20001451 PARAMETER Experiment Name: At_Far-red-induction_P Parameter: Timepoint (hr) Value: 24
  misc_feature: MA Experiment 20001451 PARAMETER Experiment Name: At_Far-red-induction_P Parameter: Tissue Value: Whole Plant
  misc_feature: MA Experiment ID: 20001556 Result: Up-regulated in Transcription
  misc_feature: MA Experiment 20001556 PARAMETER Experiment Name: At_Drought_Soil_Dry_P Parameter: Age (day) Value: 26
  misc_feature: MA Experiment 20001556 PARAMETER Experiment Name: At_Drought_Soil_Dry_P Parameter: Organism Value: A. thaliana
  misc_feature: MA Experiment 20001556 PARAMETER Experiment Name: At_Drought_Soil_Dry_P Parameter: Plant Line Value: WS
  misc_feature: MA Experiment 20001556 PARAMETER Experiment Name: At_Drought_Soil_Dry_P Parameter: Post Timepoint (hr) Value: None
  misc_feature: MA Experiment 20001556 PARAMETER Experiment Name: At_Drought_Soil_Dry_P Parameter: Post-Treatment Value: None
  misc_feature: MA Experiment 20001556 PARAMETER Experiment Name: At_Drought_Soil_Dry_P Parameter: Timepoint (day) Value: 12
  misc_feature: MA Experiment 20001556 PARAMETER Experiment Name: At_Drought_Soil_Dry_P Parameter: Treatment Value: Drought vs. No Drought
  misc_feature: MA Experiment ID: 20001557 Result: Up-regulated in Transcription
  misc_feature: MA Experiment 20001557 PARAMETER Experiment Name: At_Drought_Soil_Dry_P Parameter: Age (day) Value: 27
  misc_feature: MA Experiment 20001557 PARAMETER Experiment Name: At_Drought_Soil_Dry_P Parameter: Organism Value: A. thaliana
  misc_feature: MA Experiment 20001557 PARAMETER Experiment Name: At_Drought_Soil_Dry_P Parameter: Plant Line Value: WS
  misc_feature: MA Experiment 20001557 PARAMETER Experiment Name: At_Drought_Soil_Dry_P Parameter: Post Timepoint (hr) Value: 3
  misc_feature: MA Experiment 20001557 PARAMETER Experiment Name: At_Drought_Soil_Dry_P Parameter: Post-Treatment Value: Re-Water vs. No Drought
  misc_feature: MA Experiment 20001557 PARAMETER Experiment Name: At_Drought_Soil_Dry_P Parameter: Timepoint (day) Value: 13
  misc_feature: MA Experiment 20001557 PARAMETER Experiment Name: At_Drought_Soil_Dry_P Parameter: Treatment Value: Drought vs. No Drought
  misc_feature: MA Experiment ID: 20001558 Result: Up-regulated in Transcription
  misc_feature: MA Experiment 20001558 PARAMETER Experiment Name: At_Drought_Soil_Dry_P Parameter: Age (day) Value: 27
  misc_feature: MA Experiment 20001558 PARAMETER Experiment Name: At_Drought_Soil_Dry_P Parameter: Organism Value: A. thaliana
  misc_feature: MA Experiment 20001558 PARAMETER Experiment Name: At_Drought_Soil_Dry_P Parameter: Plant Line Value: WS
  misc_feature: MA Experiment 20001558 PARAMETER Experiment Name: At_Drought_Soil_Dry_P Parameter: Post Timepoint (hr) Value: 6
  misc_feature: MA Experiment 20001558 PARAMETER Experiment Name: At_Drought_Soil_Dry_P Parameter: Post-Treatment Value: Re-Water vs. No Drought
  misc_feature: MA Experiment 20001558 PARAMETER Experiment Name: At_Drought_Soil_Dry_P Parameter: Timepoint (day) Value: 13
  misc_feature: MA Experiment 20001558 PARAMETER Experiment Name: At_Drought_Soil_Dry_P Parameter: Treatment Value: Drought vs. No Drought
  misc_feature: MA Experiment ID: 20001560 Result: Up-regulated in Transcription
  misc_feature: MA Experiment 20001560 PARAMETER Experiment Name: At_Drought_Soil_Dry_P Parameter: Age (day) Value: 28
  misc_feature: MA Experiment 20001560 PARAMETER Experiment Name: At_Drought_Soil_Dry_P Parameter: Organism Value: A. thaliana
  misc_feature: MA Experiment 20001560 PARAMETER Experiment Name: At_Drought_Soil_Dry_P Parameter: Plant Line Value: WS
  misc_feature: MA Experiment 20001560 PARAMETER Experiment Name: At_Drought_Soil_Dry_P Parameter: Post Timepoint (hr) Value: None
  misc_feature: MA Experiment 20001560 PARAMETER Experiment Name: At_Drought_Soil_Dry_P Parameter: Post-Treatment Value: None
  misc_feature: MA Experiment 20001560 PARAMETER Experiment Name: At_Drought_Soil_Dry_P Parameter: Timepoint (day) Value: 14
  misc_feature: MA Experiment 20001560 PARAMETER Experiment Name: At_Drought_Soil_Dry_P Parameter: Treatment Value: Drought vs. No Drought
  misc_feature: MA Experiment ID: 20001757 Result: Down-regulated in Transcription
  misc_feature: MA Experiment 20001757 PARAMETER Experiment Name: At_50mM_NH4NO3_L-to-H_P Parameter: Timepoint (hr) Value: 6
  misc_feature: MA Experiment 20001757 PARAMETER Experiment Name: At_50mM_NH4NO3_L-to-H_P Parameter: Tissue Value: Leaf
  misc_feature: MA Experiment 20001757 PARAMETER Experiment Name: At_50mM_NH4NO3_L-to-H_P Parameter: Treatment Value: 50mM NH4NO3 vs 100mM Mannitol
  misc_feature: MA Experiment ID: 20001904 Result: Up-regulated in Transcription
  misc_feature: MA Experiment 20001904 PARAMETER Experiment Name: At_Drought_Reproduction_P Parameter: Age (day) Value: 37
  misc_feature: MA Experiment 20001904 PARAMETER Experiment Name: At_Drought_Reproduction_P Parameter: Organism Value: A. thaliana
  misc_feature: MA Experiment 20001904 PARAMETER Experiment Name: At_Drought_Reproduction_P Parameter: Plant Line Value: WS
  misc_feature: MA Experiment 20001904 PARAMETER Experiment Name: At_Drought_Reproduction_P Parameter: Timepoint (day) Value: 7
  misc_feature: MA Experiment 20001904 PARAMETER Experiment Name: At_Drought_Reproduction_P Parameter: Tissue Value: Rosettes
  misc_feature: MA Experiment 20001904 PARAMETER Experiment Name: At_Drought_Reproduction_P Parameter: Treatment Value: Drought vs. No Drought
atagattagttttgtacttctgttacgtggtgattattaaaacttgtaataacagtataatctggttttgttggtgtagattgatgatttcaacattgcaaagaaggaagaggacattgggttctacgctggatttgttggttgctctttcatgctcggacgagcttttacatctgtggcatggggacttgttgctgatcgttatggtagaaaacctgtaatcctcataggaaccgcttcagtggtcgtttttaatactctgtttggcctaagtttaaatttctggatggctattatcacaagattttgcctcggtagtttcaacggtttacttggtcctatcaaggcttacgcaatggaaatattccgtgatgagtatcaaggtttagcactctcagcagttagtacagcttggggaattggactcatcattggccctgctataggaggttttcttgctcagcctgcaaagcaatatccaagtttattctcacaggactccatttttggcaaatttcccttctttttgccatgcttagcaatatccgtttttgcattcttggtgaccatagtttcatcaaggattccggaaacattgcacaatcacaagtttaatgatgatgagtcttatgatgctctcaaagatttgtctgatgaccctgaatctaataaagtggcagagagaaatggaaaaagttctctcttgaacaactggccattaatttcatctatcatcgtatactgcgtcttttcactacatgatatggcttacacagagatcttttcattgtgggcaaacagtccgaggaaatatggaggtttgggatactccactgcagatgttggttctgttcttgccttttcaggctttggtctccttatctttcagctttcgctctactcttacgcagagaggcttttaggacctatcatagttacacgtatatctgggagcctagcaatggtcgtcttatcatgttacccactaatagcaaagttatctggtttagcccttaccgtgactgtaacttctgcatccgtagcaaagagtgttttaggtacttctgctataactggattattcatccttcaaaacaaggctgtgagacaagaccaaagaggagcagctaatggaattgccatgacagcgatgtctcttttcaaagccataggtccagcagcagcaggaatcattttttcgtggagcgagaaacgtcagggtgctgcttttctccctggcacccaaatggtattctttatactgaatgtggttttggcacttggagttgtattgacattcaaaccatttctagctgaaacacaacagtagaaaatgatgaagattttgatggtattcaaattacataatcagaatgtattgtataatatatagatttgtatgtctgatccaaagttagattagaaaaatggcaagagaaaaagaaaaaaaacttgttagaattgttgtcatcatcctttgtatgttataggacaagttgttcacaaaattttgtctaatgtgtcagaaccattgtaagaaggattcaataatgttttttgtacatgatgtttcgcgaataatattgacaagtcgtcaaatcctatcctgagattcc

SEQ ID NO: 103482 - protein, 392 aa, Arabidopsis thaliana
  peptide (1)..(392): Ceres Seq. ID no. 13612841
  misc_feature (1)..(392): Homolog of NCBI NO: 30684565 NR Description: transporter-related protein [Arabidopsis >gi|14517414|gb|AAK62597.1| AT5g13750/MXE10_2 [Arabidopsis
  misc_feature (1)..(392): Homolog of NCBI NO: 30684567 NR Description: transporter-related protein [Arabidopsis thaliana]
  misc_feature (1)..(392): Homolog of NCBI NO: 21555230 NR Description: transporter-like protein [Arabidopsis thaliana]
  misc_feature (1)..(363): Homolog of NCBI NO: 10177340 NR Description: transporter-like protein [Arabidopsis thaliana]
  misc_feature (1)..(392): Homolog of NCBI NO: 20260160 NR Description: transporter-like protein [Arabidopsis thaliana]
  misc_feature (1)..(392): Homolog of NCBI NO: 22326785 NR Description: transporter - related [Arabidopsis thaliana]
  misc_feature (1)..(392): Homolog of NCBI NO: 23452823 NR Description: major facilitator superfamily antiporter [Oryza
  misc_feature (1)..(391): Homolog of NCBI NO: 15229781 NR Description: transporter - related [Arabidopsis thaliana]
  misc_feature (1)..(388): Homolog of NCBI NO: 23452821 NR Description: major facilitator superfamily antiporter [Oryza
  misc_feature (1)..(392): Homolog of NCBI NO: 23452819 NR Description: major facilitator superfamily antiporter [Zea
MLGRAFTSVAWGLVADRYGRKPVILIGTASVVVFNTLFGLSLNFWMAIITRFCLGSFNGLLGPIKAYAMEIFRDEYQGLALSAVSTAWGIGLIIGPAIGGFLAQPAKQYPSLFSQDSIFGKFPFFLPCLAISVFAFLVTIVSSRIPETLHNHKFNDDESYDALKDLSDDPESNKVAERNGKSSLLNNWPLISSIIVYCVFSLHDMAYTEIFSLWANSPRKYGGLGYSTADVGSVLAFSGFGLLIFQLSLYSYAERLLGPIIVTRISGSLAMVVLSCYPLIAKLSGLALTVTVTSASVAKSVLGTSAITGLFILQNKAVRQDQRGAANGIAMTAMSLFKAIGPAAAGIIFSWSEKRQGAAFLPGTQMVFFILNVVLALGVVLTFKPFLAETQQ

SEQ ID NO: 103483 - protein, 347 aa, Arabidopsis thaliana
  peptide (1)..(347): Ceres Seq. ID no. 13612842
  misc_feature (1)..(347): Homolog of NCBI NO: 30684565 NR Description: transporter-related protein [Arabidopsis >gi|14517414|gb|AAK62597.1| AT5g13750/MXE10_2 [Arabidopsis
  misc_feature (1)..(347): Homolog of NCBI NO: 30684567 NR Description: transporter-related protein [Arabidopsis thaliana]
  misc_feature (1)..(347): Homolog of NCBI NO: 21555230 NR Description: transporter-like protein [Arabidopsis thaliana]
  misc_feature (1)..(318): Homolog of NCBI NO: 10177340 NR Description: transporter-like protein [Arabidopsis thaliana]
  misc_feature (1)..(347): Homolog of NCBI NO: 20260160 NR Description: transporter-like protein [Arabidopsis thaliana]
  misc_feature (1)..(347): Homolog of NCBI NO: 22326785 NR Description: transporter - related [Arabidopsis thaliana]
  misc_feature (1)..(347): Homolog of NCBI NO: 23452823 NR Description: major facilitator superfamily antiporter [Oryza
  misc_feature (1)..(346): Homolog of NCBI NO: 15229781 NR Description: transporter - related [Arabidopsis thaliana]
  misc_feature (1)..(343): Homolog of NCBI NO: 23452821 NR Description: major facilitator superfamily antiporter [Oryza
  misc_feature (1)..(347): Homolog of NCBI NO: 23452819 NR Description: major facilitator superfamily antiporter [Zea
MAIITRFCLGSFNGLLGPIKAYAMEIFRDEYQGLALSAVSTAWGIGLIIGPAIGGFLAQPAKQYPSLFSQDSIFGKFPFFLPCLAISVFAFLVTIVSSRIPETLHNHKFNDDESYDALKDLSDDPESNKVAERNGKSSLLNNWPLISSIIVYCVFSLHDMAYTEIFSLWANSPRKYGGLGYSTADVGSVLAFSGFGLLIFQLSLYSYAERLLGPIIVTRISGSLAMVVLSCYPLIAKLSGLALTVTVTSASVAKSVLGTSAITGLFILQNKAVRQDQRGAANGIAMTAMSLFKAIGPAAAGIIFSWSEKRQGAAFLPGTQMVFFILNVVLALGVVLTFKPFLAETQQ

SEQ ID NO: 103484 - protein, 324 aa, Arabidopsis thaliana
  peptide (1)..(324): Ceres Seq. ID no. 13612843
  misc_feature (1)..(324): Homolog of NCBI NO: 30684565 NR Description: transporter-related protein [Arabidopsis >gi|14517414|gb|AAK62597.1| AT5g13750/MXE10_2 [Arabidopsis
  misc_feature (1)..(324): Homolog of NCBI NO: 30684567 NR Description: transporter-related protein [Arabidopsis thaliana]
  misc_feature (1)..(324): Homolog of NCBI NO: 21555230 NR Description: transporter-like protein [Arabidopsis thaliana]
  misc_feature (1)..(295): Homolog of NCBI NO: 10177340 NR Description: transporter-like protein [Arabidopsis thaliana]
  misc_feature (1)..(324): Homolog of NCBI NO: 20260160 NR Description: transporter-like protein [Arabidopsis thaliana]
  misc_feature (1)..(324): Homolog of NCBI NO: 22326785 NR Description: transporter - related [Arabidopsis thaliana]
  misc_feature (1)..(324): Homolog of NCBI NO: 23452823 NR Description: major facilitator superfamily antiporter [Oryza
  misc_feature (1)..(323): Homolog of NCBI NO: 15229781 NR Description: transporter - related [Arabidopsis thaliana]
  misc_feature (1)..(320): Homolog of NCBI NO: 23452821 NR Description: major facilitator superfamily antiporter [Oryza
  misc_feature (1)..(324): Homolog of NCBI NO: 23452819 NR Description: major facilitator superfamily antiporter [Zea
MEIFRDEYQGLALSAVSTAWGIGLIIGPAIGGFLAQPAKQYPSLFSQDSIFGKFPFFLPCLAISVFAFLVTIVSSRIPETLHNHKFNDDESYDALKDLSDDPESNKVAERNGKSSLLNNWPLISSIIVYCVFSLHDMAYTEIFSLWANSPRKYGGLGYSTADVGSVLAFSGFGLLIFQLSLYSYAERLLGPIIVTRISGSLAMVVLSCYPLIAKLSGLALTVTVTSASVAKSVLGTSAITGLFILQNKAVRQDQRGAANGIAMTAMSLFKAIGPAAAGIIFSWSEKRQGAAFLPGTQMVFFILNVVLALGVVLTFKPFLAETQQ

SEQ ID NO: 103485 - DNA, 2027 bp, Arabidopsis thaliana
  misc_feature (1)..(2027): Ceres Seq. ID no. 13612844
  misc_feature: MA Experiment ID: 20000069 Result: Up-regulated in Transcription
  misc_feature: MA Experiment 20000069 PARAMETER Experiment Name: At_100uM_ABA_Mutants_cDNA_P Parameter: Plant Line Value: CS23
  misc_feature: MA Experiment 20000069 PARAMETER Experiment Name: At_100uM_ABA_Mutants_cDNA_P Parameter: Timepoint (hr) Value: 6
  misc_feature: MA Experiment 20000069 PARAMETER Experiment Name: At_100uM_ABA_Mutants_cDNA_P Parameter: Tissue Value: Aerial
  misc_feature: MA Experiment 20000069 PARAMETER Experiment Name: At_100uM_ABA_Mutants_cDNA_P Parameter: Treatment Value: 100uM ABA vs. No Treatment
  misc_feature: MA Experiment ID: 20000070 Result: Up-regulated in Transcription
  misc_feature: MA Experiment 20000070 PARAMETER Experiment Name: At_100uM_ABA_Mutants_cDNA_P Parameter: Plant Line Value: CS24
  misc_feature: MA Experiment 20000070 PARAMETER Experiment Name: At_100uM_ABA_Mutants_cDNA_P Parameter: Timepoint (hr) Value: 6
  misc_feature: MA Experiment 20000070 PARAMETER Experiment Name: At_100uM_ABA_Mutants_cDNA_P Parameter: Tissue Value: Aerial
  misc_feature: MA Experiment 20000070 PARAMETER Experiment Name: At_100uM_ABA_Mutants_cDNA_P Parameter: Treatment Value: 100uM ABA vs. No Treatment
  misc_feature: MA Experiment ID: 20000071 Result: Up-regulated in Transcription
  misc_feature: MA Experiment 20000071 PARAMETER Experiment Name: At_100uM_ABA_Mutants_cDNA_P Parameter: Plant Line Value: CS8104
  misc_feature: MA Experiment 20000071 PARAMETER Experiment Name: At_100uM_ABA_Mutants_cDNA_P Parameter: Timepoint (hr) Value: 6
  misc_feature: MA Experiment 20000071 PARAMETER Experiment Name: At_100uM_ABA_Mutants_cDNA_P Parameter: Tissue Value: Aerial
  misc_feature: MA Experiment 20000071 PARAMETER Experiment Name: At_100uM_ABA_Mutants_cDNA_P Parameter: Treatment Value: 100uM ABA vs. No Treatment
  misc_feature: MA Experiment ID: 20000117 Result: Up-regulated in Transcription
  misc_feature: MA Experiment 20000117 PARAMETER Experiment Name: At_100uM_ABA_Mutants_cDNA_P Parameter: Plant Line Value: Columbia
  misc_feature: MA Experiment 20000117 PARAMETER Experiment Name: At_100uM_ABA_Mutants_cDNA_P Parameter: Timepoint (hr) Value: 6
  misc_feature: MA Experiment 20000117 PARAMETER Experiment Name: At_100uM_ABA_Mutants_cDNA_P Parameter: Tissue Value: Aerial
  misc_feature: MA Experiment 20000117 PARAMETER Experiment Name: At_100uM_ABA_Mutants_cDNA_P Parameter: Treatment Value: 100uM ABA vs. No Treatment
  misc_feature: MA Experiment ID: 20000171 Result: Down-regulated in Transcription
  misc_feature: MA Experiment 20000171 PARAMETER Experiment Name: At_42deg_Heat_P Parameter: Age (day) Value: 14
  misc_feature: MA Experiment 20000171 PARAMETER Experiment Name: At_42deg_Heat_P Parameter: Organism Value: A. thaliana
  misc_feature: MA Experiment 20000171 PARAMETER Experiment Name: At_42deg_Heat_P Parameter: Plant Line Value: WS
  misc_feature: MA Experiment 20000171 PARAMETER Experiment Name: At_42deg_Heat_P Parameter: Temperature (deg C) Value: 42 vs. 22
  misc_feature: MA Experiment 20000171 PARAMETER Experiment Name: At_42deg_Heat_P Parameter: Timepoint (hr) Value: 1
  misc_feature: MA Experiment 20000171 PARAMETER Experiment Name: At_42deg_Heat_P Parameter: Tissue Value: Aerial
  misc_feature: MA Experiment ID: 20000173 Result: Down-regulated in Transcription
  misc_feature: MA Experiment 20000173 PARAMETER Experiment Name: At_42deg_Heat_P Parameter: Age (day) Value: 14
  misc_feature: MA Experiment 20000173 PARAMETER Experiment Name: At_42deg_Heat_P Parameter: Organism Value: A. thaliana
  misc_feature: MA Experiment 20000173 PARAMETER Experiment Name: At_42deg_Heat_P Parameter: Plant Line Value: WS
  misc_feature: MA Experiment 20000173 PARAMETER Experiment Name: At_42deg_Heat_P Parameter: Temperature (deg C) Value: 42 vs. 22
  misc_feature: MA Experiment 20000173 PARAMETER Experiment Name: At_42deg_Heat_P Parameter: Timepoint (hr) Value: 6
  misc_feature: MA Experiment 20000173 PARAMETER Experiment Name: At_42deg_Heat_P Parameter: Tissue Value: Aerial
  misc_feature: MA Experiment ID: 20000224 Result: Down-regulated in Transcription
  misc_feature: MA Experiment ID: 20000234 Result: Up-regulated in Transcription
  misc_feature: MA Experiment 20000234 PARAMETER Experiment Name: At_Siliques_P Parameter: Age (day) Value: 21
  misc_feature: MA Experiment 20000234 PARAMETER Experiment Name: At_Siliques_P Parameter: Organism Value: A. thaliana
  misc_feature: MA Experiment 20000234 PARAMETER Experiment Name: At_Siliques_P Parameter: Plant Line Value: WS
  misc_feature: MA Experiment 20000234 PARAMETER Experiment Name: At_Siliques_P Parameter: Tissue Value: Less Than 5mm Siliques vs. Whole Plant
  misc_feature: MA Experiment ID: 20000235 Result: Up-regulated in Transcription
  misc_feature: MA Experiment 20000235 PARAMETER Experiment Name: At_Siliques_P Parameter: Age (day) Value: 21
  misc_feature: MA Experiment 20000235 PARAMETER Experiment Name: At_Siliques_P Parameter: Organism Value: A. thaliana
  misc_feature: MA Experiment 20000235 PARAMETER Experiment Name: At_Siliques_P Parameter: Plant Line Value: WS
  misc_feature: MA Experiment 20000235 PARAMETER Experiment Name: At_Siliques_P Parameter: Tissue Value: 5-10mm Siliques vs. Whole Plant
  misc_feature: MA Experiment ID: 20000437 Result: Up-regulated in Transcription
  misc_feature: MA Experiment 20000437 PARAMETER Experiment Name: At_Drought_P Parameter: Age (day) Value: 8
  misc_feature: MA Experiment 20000437 PARAMETER Experiment Name: At_Drought_P Parameter: Organism Value: A. thaliana
  misc_feature: MA Experiment 20000437 PARAMETER Experiment Name: At_Drought_P Parameter: Plant Line Value: WS
  misc_feature: MA Experiment 20000437 PARAMETER Experiment Name: At_Drought_P Parameter: Timepoint (hr) Value: 24
  misc_feature: MA Experiment 20000437 PARAMETER Experiment Name: At_Drought_P Parameter: Tissue Value: Whole Plant
  misc_feature: MA Experiment 20000437 PARAMETER Experiment Name: At_Drought_P Parameter: Treatment Value: Drought vs. No Drought
  misc_feature: MA Experiment ID: 20000439 Result: Up-regulated in Transcription
  misc_feature: MA Experiment 20000439 PARAMETER Experiment Name: At_Roots__P Parameter: Age (day) Value: 14 vs. 21
  misc_feature: MA Experiment 20000439 PARAMETER Experiment Name: At_Roots__P Parameter: Organism Value: A. thaliana
  misc_feature: MA Experiment 20000439 PARAMETER Experiment Name: At_Roots__P Parameter: Tissue Value: Roots vs. Whole Plant
atggcgactccgacggagctaggtttctcttcacctggtggtggtggtgacgactctgacgataaccctccacagaagcgtacttcaaaacgtactgcttccgaaacagcaacagaagaagaaacgaagaagaagaaaaagaagaagacgaagcacaacacaaaaatggcttctcctccgagcaaccggatctggaacgaagaagacgagctctctatcttaaagggattggtggattttcgagctaaaacaggactcgaatccaaaattgattgggatgcgttttattgttacgtcaaaggttccattcatgtgaaagtttccaagtgccagcttatgagtaagaccaggaagttgaagaagaagttccttgatcaaatggagaaaatcgatcaaggaaatgatccacattttactaggtctagtgaaactgaagcttttggatattccatgatgatttggcgtaaaattgatgctgaatacactaatggtgttatggataaagcacatcaaagcgagagtggagaggaggtgtttgaggaggatgaggaagtggccttaattgacaaaggggctgcgaaaagtggcaagtcacctcatgaagctgttgttgttgttgacaaaataactacgaagaagaacgggactgctggaaaagagagtgatgatgatgatgatgatgtgttgtgtgctgtgcgggatgcgtttgagaccaccatgatgtcgcaaggattaagtgattatcaaaagaagttgcagcttgagaagctgatgaaccttggaactggtaaaagaagagagttgagcaatgaatggaaagcactatgtgttgaggaactaaaattgaatatcaacaagcttcgattttccgccaagcttgcagaggcagcaaatgatgatattttgatacatgtgtctatcagtctatcgtttaagctaaaactcaacgagacgacagacgataaaaagggattaagtttcttctgtgtagattattcttcttcttcttcttcttccattgtctcttgggttgagattccgatctcaatgtcgatcaatatcggagaaatctcaattccagaccttcctatcttcttctccatgttcttaaccatctacctaatcgcttacttcatcgtcttccgcaattggaaaccacaaatccgtcccgaagcttcaagctgcctgatctcaatcttccatggatctccagcggttttcctcgccacacgcgcagttttctcctcctccgaacgctccttcgcctccgcaaacaccgccgcacaaaacaccgtcctcgatttcagcgtcgcttacttcctcaccgatctcttccactacatcgtcttcaaccctaacgacgtactcttcatcggccatcacgtagccactctattcgtcttcctaacctgcagattcctcgtcttccacggggcttgcgccatcttaggcctcctgattctagctgaagtaacaagcgcgtgtcagaacgcgtggacgctcgccggagcaaggaagaatgatccggaatcacgattagctgtgaaagtgtacgatctcttgtctcctccgttttacgccttctacagtatcgttaggggtgtgttgggacctttgtttttcgggaaaatggtagcgttttacgctcgaggtggtgctcatggtgtgatacctaattggttgtggatttcttgggcaattgttgttggaattgctattactgttagtatactttggatttggaatctctggatagaattgtttagtgaaaggaaagctaacaaaatcagagtagacaagaaaattagatagtttcttctttcttctctagatcattgtttgatcttccttttcatgtactatatataatatatataccattattattctcaccttttagaattcctctaaatgatgtatgttttggaataatagatttgcttttgggtaagcagtatgtgcaaaatgcacttttaattcaactctgtattgttcagaagttcttctcttaagagtttcttccatac

SEQ ID NO: 103486 - protein, 603 aa, Arabidopsis thaliana
  peptide (1)..(603): Ceres Seq. ID no. 13612845
  misc_feature (59)..(156): Pfam Name: Protein of unknown function, DUF573 Pfam Description: Protein of unknown function, DUF573
  misc_feature (268)..(603): Homolog of NCBI NO: 15241364 NR Description: expressed protein [Arabidopsis thaliana]
  misc_feature (1)..(300): Homolog of NCBI NO: 15241364 NR Description: expressed protein [Arabidopsis thaliana]
  misc_feature (350)..(603): Homolog of NCBI NO: 26450181 NR Description: unknown protein [Arabidopsis thaliana]
  misc_feature (1)..(168): Homolog of NCBI NO: 18400896 NR Description: expressed protein [Arabidopsis thaliana] unknown protein [Arabidopsis thaliana] expressed protein [Arabidopsis thaliana]
  misc_feature (163)..(299): Homolog of NCBI NO: 18400896 NR Description: expressed protein [Arabidopsis thaliana] unknown protein [Arabidopsis thaliana] expressed protein [Arabidopsis thaliana]
  misc_feature (1)..(299): Homolog of NCBI NO: 18411272 NR Description: contains similarity to S. cerevisiae ADR1 gene [Arabidopsis thaliana] >gi|13605529|gb|AAK32758.1|AF361590_1 [Arabidopsis thaliana] >gi|18491133|gb|AAL69535.1|
  misc_feature (361)..(603): Homolog of NCBI NO: 15232128 NR Description: expressed protein [Arabidopsis thaliana]
  misc_feature (1)..(299): Homolog of NCBI NO: 25412336 NR Description: hypothetical protein At2g25650 [imported] -
  misc_feature (1)..(299): Homolog of NCBI NO: 7485258 NR Description: hypothetical protein A_IG005I10.11 - Arabidopsis >gi|2252832|gb|AAB62831.1| contains similarity to S. cerevisiae gene (PID:g924931) [Arabidopsis thaliana]
  misc_feature (363)..(595): Homolog of NCBI NO: 15230950 NR Description: hypothetical protein [Arabidopsis thaliana]
MATPTELGFSSPGGGGDDSDDNPPQKRTSKRTASETATEEETKKKKKKKTKHNTKMASPPSNRIWNEEDELSILKGLVDFRAKTGLESKIDWDAFYCYVKGSIHVKVSKCQLMSKTRKLKKKFLDQMEKIDQGNDPHFTRSSETEAFGYSMMIWRKIDAEYTNGVMDKAHQSESGEEVFEEDEEVALIDKGAAKSGKSPHEAVVVVDKITTKKNGTAGKESDDDDDDVLCAVRDAFETTMMSQGLSDYQKKLQLEKLMNLGTGKRRELSNEWKALCVEELKLNINKLRFSAKLAEAANDDILIHVSISLSFKLKLNETTDDKKGLSFFCVDYSSSSSSSIVSWVEIPISMSINIGEISIPDLPIFFSMFLTIYLIAYFIVFRNWKPQIRPEASSCLISIFHGSPAVFLATRAVFSSSERSFASANTAAQNTVLDFSVAYFLTDLFHYIVFNPNDVLFIGHHVATLFVFLTCRFLVFHGACAILGLLILAEVTSACQNAWTLAGARKNDPESRLAVKVYDLLSPPFYAFYSIVRGVLGPLFFGKMVAFYARGGAHGVIPNWLWISWAIVVGIAITVSILWIWNLWIELFSERKANKIRVDKKIR

SEQ ID NO: 103487 - protein, 548 aa, Arabidopsis thaliana
  peptide (1)..(548): Ceres Seq. ID no. 13612846
  misc_feature (4)..(101): Pfam Name: Protein of unknown function, DUF573 Pfam Description: Protein of unknown function, DUF573
  misc_feature (213)..(548): Homolog of NCBI NO: 15241364 NR Description: expressed protein [Arabidopsis thaliana]
  misc_feature (1)..(245): Homolog of NCBI NO: 15241364 NR Description: expressed protein [Arabidopsis thaliana]
  misc_feature (295)..(548): Homolog of NCBI NO: 26450181 NR Description: unknown protein [Arabidopsis thaliana]
  misc_feature (1)..(113): Homolog of NCBI NO: 18400896 NR Description: expressed protein [Arabidopsis thaliana] unknown protein [Arabidopsis thaliana] expressed protein [Arabidopsis thaliana]
  misc_feature (108)..(244): Homolog of NCBI NO: 18400896 NR Description: expressed protein [Arabidopsis thaliana] unknown protein [Arabidopsis thaliana] expressed protein [Arabidopsis thaliana]
  misc_feature (1)..(244): Homolog of NCBI NO: 18411272 NR Description: contains similarity to S. cerevisiae ADR1 gene [Arabidopsis thaliana] >gi|13605529|gb|AAK32758.1|AF361590_1 [Arabidopsis thaliana] >gi|18491133|gb|AAL69535.1|
  misc_feature (306)..(548): Homolog of NCBI NO: 15232128 NR Description: expressed protein [Arabidopsis thaliana]
  misc_feature (1)..(244): Homolog of NCBI NO: 25412336 NR Description: hypothetical protein At2g25650 [imported] -
  misc_feature (1)..(244): Homolog of NCBI NO: 7485258 NR Description: hypothetical protein A_IG005I10.11 - Arabidopsis >gi|2252832|gb|AAB62831.1| contains similarity to S. cerevisiae gene (PID:g924931) [Arabidopsis thaliana]
  misc_feature (308)..(540): Homolog of NCBI NO: 15230950 NR Description: hypothetical protein [Arabidopsis thaliana]
MASPPSNRIWNEEDELSILKGLVDFRAKTGLESKIDWDAFYCYVKGSIHVKVSKCQLMSKTRKLKKKFLDQMEKIDQGNDPHFTRSSETEAFGYSMMIWRKIDAEYTNGVMDKAHQSESGEEVFEEDEEVALIDKGAAKSGKSPHEAVVVVDKITTKKNGTAGKESDDDDDDVLCAVRDAFETTMMSQGLSDYQKKLQLEKLMNLGTGKRRELSNEWKALCVEELKLNINKLRFSAKLAEAANDDILIHVSISLSFKLKLNETTDDKKGLSFFCVDYSSSSSSSIVSWVEIPISMSINIGEISIPDLPIFFSMFLTIYLIAYFIVFRNWKPQIRPEASSCLISIFHGSPAVFLATRAVFSSSERSFASANTAAQNTVLDFSVAYFLTDLFHYIVFNPNDVLFIGHHVATLFVFLTCRFLVFHGACAILGLLILAEVTSACQNAWTLAGARKNDPESRLAVKVYDLLSPPFYAFYSIVRGVLGPLFFGKMVAFYARGGAHGVIPNWLWISWAIVVGIAITVSILWIWNLWIELFSERKANKIRVDKKIR

SEQ ID NO: 103488 - protein, 491 aa, Arabidopsis thaliana
  peptide (1)..(491): Ceres Seq. ID no. 13612847
  misc_feature (156)..(491): Homolog of NCBI NO: 15241364 NR Description: expressed protein [Arabidopsis thaliana]
  misc_feature (1)..(188): Homolog of NCBI NO: 15241364 NR Description: expressed protein [Arabidopsis thaliana]
  misc_feature (238)..(491): Homolog of NCBI NO: 26450181 NR Description: unknown protein [Arabidopsis thaliana]
  misc_feature (1)..(56): Homolog of NCBI NO: 18400896 NR Description: expressed protein [Arabidopsis thaliana] unknown protein [Arabidopsis thaliana] expressed protein [Arabidopsis thaliana]
  misc_feature (51)..(187): Homolog of NCBI NO: 18400896 NR Description: expressed protein [Arabidopsis thaliana] unknown protein [Arabidopsis thaliana] expressed protein [Arabidopsis thaliana]
  misc_feature (1)..(187): Homolog of NCBI NO: 18411272 NR Description: contains similarity to S. cerevisiae ADR1 gene [Arabidopsis thaliana] >gi|13605529|gb|AAK32758.1|AF361590_1 [Arabidopsis thaliana] >gi|18491133|gb|AAL69535.1|
  misc_feature (249)..(491): Homolog of NCBI NO: 15232128 NR Description: expressed protein [Arabidopsis thaliana]
  misc_feature (1)..(187): Homolog of NCBI NO: 25412336 NR Description: hypothetical protein At2g25650 [imported] -
  misc_feature (1)..(187): Homolog of NCBI NO: 7485258 NR Description: hypothetical protein A_IG005I10.11 - Arabidopsis >gi|2252832|gb|AAB62831.1| contains similarity to S. cerevisiae gene (PID:g924931) [Arabidopsis thaliana]
  misc_feature (251)..(483): Homolog of NCBI NO: 15230950 NR Description: hypothetical protein [Arabidopsis thaliana]
MSKTRKLKKKFLDQMEKIDQGNDPHFTRSSETEAFGYSMMIWRKIDAEYTNGVMDKAHQSESGEEVFEEDEEVALIDKGAAKSGKSPHEAVVVVDKITTKKNGTAGKESDDDDDDVLCAVRDAFETTMMSQGLSDYQKKLQLEKLMNLGTGKRRELSNEWKALCVEELKLNINKLRFSAKLAEAANDDILIHVSISLSFKLKLNETTDDKKGLSFFCVDYSSSSSSSIVSWVEIPISMSINIGEISIPDLPIFFSMFLTIYLIAYFIVFRNWKPQIRPEASSCLISIFHGSPAVFLATRAVFSSSERSFASANTAAQNTVLDFSVAYFLTDLFHYIVFNPNDVLFIGHHVATLFVFLTCRFLVFHGACAILGLLILAEVTSACQNAWTLAGARKNDPESRLAVKVYDLLSPPFYAFYSIVRGVLGPLFFGKMVAFYARGGAHGVIPNWLWISWAIVVGIAITVSILWIWNLWIELFSERKANKIRVDKKIR

SEQ ID NO: 103489 - DNA, 608 bp, Arabidopsis thaliana
  misc_feature (1)..(608): Ceres Seq. ID no. 13612860
  misc_feature: MA Experiment ID: 20000173 Result: Up-regulated in Transcription
  misc_feature: MA Experiment 20000173 PARAMETER Experiment Name: At_42deg_Heat_P Parameter: Age (day) Value: 14
  misc_feature: MA Experiment 20000173 PARAMETER Experiment Name: At_42deg_Heat_P Parameter: Organism Value: A. thaliana
  misc_feature: MA Experiment 20000173 PARAMETER Experiment Name: At_42deg_Heat_P Parameter: Plant Line Value: WS
  misc_feature: MA Experiment 20000173 PARAMETER Experiment Name: At_42deg_Heat_P Parameter: Temperature (deg C) Value: 42 vs. 22
  misc_feature: MA Experiment 20000173 PARAMETER Experiment Name: At_42deg_Heat_P Parameter: Timepoint (hr) Value: 6
  misc_feature: MA Experiment 20000173 PARAMETER Experiment Name: At_42deg_Heat_P Parameter: Tissue Value: Aerial
  misc_feature: MA Experiment ID: 20000180 Result: Down-regulated in Transcription
  misc_feature: MA Experiment 20000180 PARAMETER Experiment Name: At_Germinating_Seeds_P Parameter: Age (hr) Value: 24 vs. 0
  misc_feature: MA Experiment 20000180 PARAMETER Experiment Name: At_Germinating_Seeds_P Parameter: Tissue Value: Germinating Seeds
  misc_feature: MA Experiment ID: 20000184 Result: Up-regulated in Transcription
  misc_feature: MA Experiment 20000184 PARAMETER Experiment Name: At_Shoots__P Parameter: Age (day) Value: 7
  misc_feature: MA Experiment 20000184 PARAMETER Experiment Name: At_Shoots__P Parameter: Tissue Value: Shoots vs. Whole Plant
  misc_feature: MA Experiment ID: 20000264 Result: Down-regulated in Transcription
  misc_feature: MA Experiment 20000264 PARAMETER Experiment Name: At_Open_Flower_P Parameter: Age (day) Value: 21
  misc_feature: MA Experiment 20000264 PARAMETER Experiment Name: At_Open_Flower_P Parameter: Plant Line Value: WS
  misc_feature: MA Experiment 20000264 PARAMETER Experiment Name: At_Open_Flower_P Parameter: Tissue Value: Open Flower vs. Whole Plant
  misc_feature: MA Experiment ID: 20000439 Result: Down-regulated in Transcription
  misc_feature: MA Experiment 20000439 PARAMETER Experiment Name: At_Roots__P Parameter: Age (day) Value: 14 vs. 21
  misc_feature: MA Experiment 20000439 PARAMETER Experiment Name: At_Roots__P Parameter: Organism Value: A. thaliana
  misc_feature: MA Experiment 20000439 PARAMETER Experiment Name: At_Roots__P Parameter: Tissue Value: Roots vs. Whole Plant
  misc_feature: MA Experiment ID: 20000794 Result: Down-regulated in Transcription
  misc_feature: MA Experiment 20000794 PARAMETER Experiment Name: At_Petals_P Parameter: Age (day) Value: 23-25 days
  misc_feature: MA Experiment 20000794 PARAMETER Experiment Name: At_Petals_P Parameter: Plant Line Value: WS
  misc_feature: MA Experiment 20000794 PARAMETER Experiment Name: At_Petals_P Parameter: Tissue Value: Petals vs. Whole plant
  misc_feature: MA Experiment ID: 20001450 Result: Up-regulated in Transcription
  misc_feature: MA Experiment 20001450 PARAMETER Experiment Name: At_Far-red-induction_P Parameter: Age (day) Value: 7
  misc_feature: MA Experiment 20001450 PARAMETER Experiment Name: At_Far-red-induction_P Parameter: Light Value: Far-red vs. White
  misc_feature: MA Experiment 20001450 PARAMETER Experiment Name: At_Far-red-induction_P Parameter: Organism Value: A. thaliana
  misc_feature: MA Experiment 20001450 PARAMETER Experiment Name: At_Far-red-induction_P Parameter: Plant Line Value: Columbia
  misc_feature: MA Experiment 20001450 PARAMETER Experiment Name: At_Far-red-induction_P Parameter: Timepoint (hr) Value: 8
  misc_feature: MA Experiment 20001450 PARAMETER Experiment Name: At_Far-red-induction_P Parameter: Tissue Value: Whole Plant
  misc_feature: MA Experiment ID: 20001451 Result: Up-regulated in Transcription
  misc_feature: MA Experiment 20001451 PARAMETER Experiment Name: At_Far-red-induction_P Parameter: Age (day) Value: 7
  misc_feature: MA Experiment 20001451 PARAMETER Experiment Name: At_Far-red-induction_P Parameter: Light Value: Far-red vs. White
  misc_feature: MA Experiment 20001451 PARAMETER Experiment Name: At_Far-red-induction_P Parameter: Organism Value: A. thaliana
  misc_feature: MA Experiment 20001451 PARAMETER Experiment Name: At_Far-red-induction_P Parameter: Plant Line Value: Columbia
  misc_feature: MA Experiment 20001451 PARAMETER Experiment Name: At_Far-red-induction_P Parameter: Timepoint (hr) Value: 24
  misc_feature: MA Experiment 20001451 PARAMETER Experiment Name: At_Far-red-induction_P Parameter: Tissue Value: Whole Plant
  misc_feature: MA Experiment ID: 20001560 Result: Up-regulated in Transcription
  misc_feature: MA Experiment 20001560 PARAMETER Experiment Name: At_Drought_Soil_Dry_P Parameter: Age (day) Value: 28
  misc_feature: MA Experiment 20001560 PARAMETER Experiment Name: At_Drought_Soil_Dry_P Parameter: Organism Value: A. thaliana
  misc_feature: MA Experiment 20001560 PARAMETER Experiment Name: At_Drought_Soil_Dry_P Parameter: Plant Line Value: WS
  misc_feature: MA Experiment 20001560 PARAMETER Experiment Name: At_Drought_Soil_Dry_P Parameter: Post Timepoint (hr) Value: None
  misc_feature: MA Experiment 20001560 PARAMETER Experiment Name: At_Drought_Soil_Dry_P Parameter: Post-Treatment Value: None
  misc_feature: MA Experiment 20001560 PARAMETER Experiment Name: At_Drought_Soil_Dry_P Parameter: Timepoint (day) Value: 14
  misc_feature: MA Experiment 20001560 PARAMETER Experiment Name: At_Drought_Soil_Dry_P Parameter: Treatment Value: Drought vs. No Drought
gtttcttcgacagtggcaatgttttcatcttcgattaggttaatcgtatctgggttccaccggactcaacccctaaaatcgccggtaaattctccgagcgtcttcatctccgtacctaaattcttcaactctgagtcaaaatcgacgggaactggttcaagatccgtagcaatgagcagcgttgagaaaaccgggtcggattctggagcaatagagaatcgagcgagcaggatgagagagaagcttcaaaaagagctcgaaccagtggagttagtgatcgaagatgtttcgtatcagcacgctggtcacgccggaatgaaaggtagaaccgacgatgagacgcatttcaatgtgaagatcgtttctaaaggattcgagggaatgaatttggtgaagagacacaggttggtctatcatttgctccgggaagagttggatactggattgcacgctctttctatcgtctccaagacgccgtctgagtctccttctaaagactagtgtactggtactgtttaatgtatcttctgtttctgttatcagagtttctcatcaaactctgttcgattcaaagattgaatttttaccatcaaagtgctctgttttgg

SEQ ID NO: 103490 - protein, 166 aa, Arabidopsis thaliana
  peptide (1)..(166): Ceres Seq. ID no. 13612861
  misc_feature (81)..(162): Pfam Name: BolA-like protein Pfam Description: BolA-like protein
  misc_feature (7)..(135): Homolog of NCBI NO: 8778492 NR Description: F20N2.18 [Arabidopsis thaliana]
  misc_feature (58)..(166): Homolog of NCBI NO: 18405543 NR Description: expressed protein [Arabidopsis thaliana] AT1g55800/F14J16_13 [Arabidopsis thaliana]
  misc_feature (7)..(108): Homolog of NCBI NO: 8778331 NR Description: F14J16.3 [Arabidopsis thaliana]
  misc_feature (7)..(161): Homolog of NCBI NO: 15236742 NR Description: expressed protein [Arabidopsis thaliana]
  misc_feature (7)..(161): Homolog of NCBI NO: 28393578 NR Description: unknown protein [Arabidopsis thaliana]
VSSTVAMFSSSIRLIVSGFHRTQPLKSPVNSPSVFISVPKFFNSESKSTGTGSRSVAMSSVEKTGSDSGAIENRASRMREKLQKELEPVELVIEDVSYQHAGHAGMKGRTDDETHFNVKIVSKGFEGMNLVKRHRLVYHLLREELDTGLHALSIVSKTPSESPSKD

SEQ ID NO: 103491 - protein, 160 aa, Arabidopsis thaliana; identical to SEQ ID NO: 36884
  peptide (1)..(160): Ceres Seq. ID no. 13612862
  misc_feature (75)..(156): Pfam Name: BolA-like protein Pfam Description: BolA-like protein
  misc_feature (1)..(129): Homolog of NCBI NO: 8778492 NR Description: F20N2.18 [Arabidopsis thaliana]
  misc_feature (52)..(160): Homolog of NCBI NO: 18405543 NR Description: expressed protein [Arabidopsis thaliana] AT1g55800/F14J16_13 [Arabidopsis thaliana]
  misc_feature (1)..(102): Homolog of NCBI NO: 8778331 NR Description: F14J16.3 [Arabidopsis thaliana]
  misc_feature (1)..(155): Homolog of NCBI NO: 15236742 NR Description: expressed protein [Arabidopsis thaliana]
  misc_feature (1)..(155): Homolog of NCBI NO: 28393578 NR Description: unknown protein [Arabidopsis thaliana]

SEQ ID NO: 103492 - protein, 109 aa, Arabidopsis thaliana; identical to SEQ ID NO: 36885
  peptide (1)..(109): Ceres Seq. ID no. 13612863
  misc_feature (24)..(105): Pfam Name: BolA-like protein Pfam Description: BolA-like protein
  misc_feature (1)..(78): Homolog of NCBI NO: 8778492 NR Description: F20N2.18 [Arabidopsis thaliana]
  misc_feature (1)..(109): Homolog of NCBI NO: 18405543 NR Description: expressed protein [Arabidopsis thaliana] AT1g55800/F14J16_13 [Arabidopsis thaliana]
  misc_feature (1)..(51): Homolog of NCBI NO: 8778331 NR Description: F14J16.3 [Arabidopsis thaliana]
  misc_feature (1)..(104): Homolog of NCBI NO: 15236742 NR Description: expressed protein [Arabidopsis thaliana]
  misc_feature (1)..(104): Homolog of NCBI NO: 28393578 NR Description: unknown protein [Arabidopsis thaliana]

SEQ ID NO: 103493 - DNA, 1451 bp, Arabidopsis thaliana
  misc_feature (1)..(1451): Ceres Seq. ID no. 13612864
  misc_feature: MA Experiment ID: 20000227 Result: Up-regulated in Transcription
  misc_feature: MA Experiment 20000227 PARAMETER Experiment Name: At_Root-Tips-vs-Tops_P Parameter: Tissue Value: Root Tips vs. Root Tops
  misc_feature: MA Experiment ID: 20001557 Result: Up-regulated in Transcription
  misc_feature: MA Experiment 20001557 PARAMETER Experiment Name: At_Drought_Soil_Dry_P Parameter: Age (day) Value: 27
  misc_feature: MA Experiment 20001557 PARAMETER Experiment Name: At_Drought_Soil_Dry_P Parameter: Organism Value: A. thaliana
  misc_feature: MA Experiment 20001557 PARAMETER Experiment Name: At_Drought_Soil_Dry_P Parameter: Plant Line Value: WS
  misc_feature: MA Experiment 20001557 PARAMETER Experiment Name: At_Drought_Soil_Dry_P Parameter: Post Timepoint (hr) Value: 3
  misc_feature: MA Experiment 20001557 PARAMETER Experiment Name: At_Drought_Soil_Dry_P Parameter: Post-Treatment Value: Re-Water vs. No Drought
  misc_feature: MA Experiment 20001557 PARAMETER Experiment Name: At_Drought_Soil_Dry_P Parameter: Timepoint (day) Value: 13
  misc_feature: MA Experiment 20001557 PARAMETER Experiment Name: At_Drought_Soil_Dry_P Parameter: Treatment Value: Drought vs. No Drought
  misc_feature: MA Experiment ID: 20001558 Result: Up-regulated in Transcription
  misc_feature: MA Experiment 20001558 PARAMETER Experiment Name: At_Drought_Soil_Dry_P Parameter: Age (day) Value: 27
  misc_feature: MA Experiment 20001558 PARAMETER Experiment Name: At_Drought_Soil_Dry_P Parameter: Organism Value: A. thaliana
  misc_feature: MA Experiment 20001558 PARAMETER Experiment Name: At_Drought_Soil_Dry_P Parameter: Plant Line Value: WS
  misc_feature: MA Experiment 20001558 PARAMETER Experiment Name: At_Drought_Soil_Dry_P Parameter: Post Timepoint (hr) Value: 6
  misc_feature: MA Experiment 20001558 PARAMETER Experiment Name: At_Drought_Soil_Dry_P Parameter: Post-Treatment Value: Re-Water vs. No Drought
  misc_feature: MA Experiment 20001558 PARAMETER Experiment Name: At_Drought_Soil_Dry_P Parameter: Timepoint (day) Value: 13
  misc_feature: MA Experiment 20001558 PARAMETER Experiment Name: At_Drought_Soil_Dry_P Parameter: Treatment Value: Drought vs. No Drought
gctctcactcccaaaacgatgtcgtctctatctcgcgttctccgtggcaccttcaacacttgcccgatccgccgtttttcctccgccgccaccgtagtctccgaacccaccgcagtcactgccgcaatctcgcctcctcaaaagtcactaaccagtctcgtgaatggcgaacgaaaccccaaacggatcgtggagaaattcaagaaggcatgtgagtcggagcggttccggaccaacatagccgtgtacgatagaaccgtgcgccgtctcgtagccgcaaagagattacactatgtcgaagagattttggaggagcagaagaagtaccgcgacatgtcaaaagagggattcgcggcgaggatcatttctctgtatggaaaagccggcatgtttgaaaatgcacagaaggtgttcgaagaaatgccaaacagagactgcaagaggtcagtgttgtccttcaatgccttgcttagtgcatatagactttccaagaaattcgatgtggttgaagaacttttcaatgagttacctggaaagttatcaatcaaaccagatattgtatcttacaatactttgattaaggcattgtgtgagaaggattctttacctgaagctgttgcattgcttgatgagattgagaacaagggactaaaacctgatatagttacattcaacacacttttactgtcttcgtatctaaagggacagtttgagctaggggaagagatatgggctaaaatggtggagaagaatgtagcaatagacatcaggacttacaatgctaggctgcttggattagccaatgaggcgaaatcgaaagagctagtaaatctctttggagaacttaaggctagtgggctcaaacctgatgttttcagtttcaatgctatgattagaggatctatcaacgaaggaaaaatggacgaagctgaagcgtggtacaaagaaattgtgaagcatggttatcgtcctgataaagctacctttgctttattgcttcctgctatgtgtaaagcaggtgactttgagtctgcgattgagctcttcaaggagacattcagtaagcggtatcttgtcggtcaaacaacgttgcagcagttagttgatgaattggtgaaagggtctaagagagaagaagctgaggagattgtgaagattgcaaagaccaatgatttcttaaagttgaagctaaatttgccgtcccaggaagagtaagtcatttgctactctctcactaagtgtctcgttgaattgtgtctgagcagcttaagctatatgtatttgctggtgttgctttgtggcttttctacttctctaaactttcctctgtggaagtaagacttgtttctttctatgtagtttcgcttatttcactggtgcaaaaaacagcatgtagtcgaggtttaggcagaagaaaccctacaaatttaataaattttggttatttgttt

SEQ ID NO: 103494 - protein, 404 aa, Arabidopsis thaliana; identical to SEQ ID NO: 22285
  peptide (1)..(404): Ceres Seq. ID no. 13612865
  misc_feature (292)..(326): Pfam Name: PPR repeat Pfam Description: PPR repeat
  misc_feature (7)..(404): Homolog of NCBI NO: 15222796 NR Description: pentatricopeptide (PPR) repeat-containing protein
  misc_feature (7)..(403): Homolog of NCBI NO: 21617993 NR Description: unknown [Arabidopsis thaliana]
  misc_feature (7)..(403): Homolog of NCBI NO: 18399887 NR Description: pentatricopeptide (PPR) repeat-containing protein thaliana] >gi|10172603|dbj|BAB01407.1| unnamed protein product thaliana] >gi|22531265|gb|AAM97136.1| expressed expressed protein
  misc_feature (5)..(394): Homolog of NCBI NO: 15231160 NR Description: pentatricopeptide (PPR) repeat-containing protein thaliana] >gi|10172602|dbj|BAB01406.1| unnamed protein product
  misc_feature (47)..(404): Homolog of NCBI NO: 34910148 NR Description: B1070A12.17 [Oryza sativa (japonica
  misc_feature (7)..(384): Homolog of NCBI NO: 18407365 NR Description: pentatricopeptide (PPR) repeat-containing protein
  misc_feature (7)..(384): Homolog of NCBI NO: 21553755 NR Description: putative membrane-associated salt-inducible
  misc_feature (23)..(388): Homolog of NCBI NO: 15234493 NR Description: pentatricopeptide (PPR) repeat-containing protein
  misc_feature (23)..(388): Homolog of NCBI NO: 25455786 NR Description: membrane-associated salt-inducible protein like
  misc_feature (23)..(386): Homolog of NCBI NO: 15220068 NR Description: pentatricopeptide (PPR) repeat-containing protein

SEQ ID NO: 103495 - protein, 398 aa, Arabidopsis thaliana; identical to SEQ ID NO: 22286
  peptide (1)..(398): Ceres Seq. ID no. 13612866
  misc_feature (286)..(320): Pfam Name: PPR repeat Pfam Description: PPR repeat
  misc_feature (1)..(398): Homolog of NCBI NO: 15222796 NR Description: pentatricopeptide (PPR) repeat-containing protein
  misc_feature (1)..(397): Homolog of NCBI NO: 21617993 NR Description: unknown [Arabidopsis thaliana]
  misc_feature (1)..(397): Homolog of NCBI NO: 18399887 NR Description: pentatricopeptide (PPR) repeat-containing protein thaliana] >gi|10172603|dbj|BAB01407.1| unnamed protein product thaliana] >gi|22531265|gb|AAM97136.1| expressed expressed protein
  misc_feature (1)..(388): Homolog of NCBI NO: 15231160 NR Description: pentatricopeptide (PPR) repeat-containing protein thaliana] >gi|10172602|dbj|BAB01406.1| unnamed protein product
  misc_feature (41)..(398): Homolog of NCBI NO: 34910148 NR Description: B1070A12.17 [Oryza sativa (japonica
  misc_feature (1)..(378): Homolog of NCBI NO: 18407365 NR Description: pentatricopeptide (PPR) repeat-containing protein
  misc_feature (1)..(378): Homolog of NCBI NO: 21553755 NR Description: putative membrane-associated salt-inducible
  misc_feature (17)..(382): Homolog of NCBI NO: 15234493 NR Description: pentatricopeptide (PPR) repeat-containing protein
  misc_feature (17)..(382): Homolog of NCBI NO: 25455786 NR Description: membrane-associated salt-inducible protein like
  misc_feature (17)..(380): Homolog of NCBI NO: 15220068 NR Description: pentatricopeptide (PPR) repeat-containing protein

SEQ ID NO: 103496 - protein, 293 aa, Arabidopsis thaliana; identical to SEQ ID NO: 22287
  peptide (1)..(293): Ceres Seq. ID no. 13612867
  misc_feature (181)..(215): Pfam Name: PPR repeat Pfam Description: PPR repeat
  misc_feature (1)..(293): Homolog of NCBI NO: 15222796 NR Description: pentatricopeptide (PPR) repeat-containing protein
  misc_feature (1)..(292): Homolog of NCBI NO: 21617993 NR Description: unknown [Arabidopsis thaliana]
  misc_feature (1)..(292): Homolog of NCBI NO: 18399887 NR Description: pentatricopeptide (PPR) repeat-containing protein thaliana] >gi|10172603|dbj|BAB01407.1| unnamed protein product thaliana] >gi|22531265|gb|AAM97136.1| expressed expressed protein
  misc_feature (1)..(283): Homolog of NCBI NO: 15231160 NR Description: pentatricopeptide (PPR) repeat-containing protein thaliana] >gi|10172602|dbj|BAB01406.1| unnamed protein product
  misc_feature (1)..(293): Homolog of NCBI NO: 34910148 NR Description: B1070A12.17 [Oryza sativa (japonica
  misc_feature (1)..(273): Homolog of NCBI NO: 18407365 NR Description: pentatricopeptide (PPR) repeat-containing protein
  misc_feature (1)..(273): Homolog of NCBI NO: 21553755 NR Description: putative membrane-associated salt-inducible
  misc_feature (1)..(277): Homolog of NCBI NO: 15234493 NR Description: pentatricopeptide (PPR) repeat-containing protein
  misc_feature (1)..(277): Homolog of NCBI NO: 25455786 NR Description: membrane-associated salt-inducible protein like
  misc_feature (1)..(275): Homolog of NCBI NO: 15220068 NR Description: pentatricopeptide (PPR) repeat-containing protein

SEQ ID NO: 103497 - DNA, 1127 bp, Arabidopsis thaliana
  misc_feature (1)..(1127): Ceres Seq. ID no. 13612868
  misc_feature: MA Experiment ID: 108433 Result: Up-regulated in Transcription
  misc_feature: MA Experiment 108433 PARAMETER Experiment Name: At_rhl_Mutant2_cDNA_P Parameter: Age (day) Value: 7
  misc_feature: MA Experiment 108433 PARAMETER Experiment Name: At_rhl_Mutant2_cDNA_P Parameter: Organism Value: A. thaliana
  misc_feature: MA Experiment 108433 PARAMETER Experiment Name: At_rhl_Mutant2_cDNA_P Parameter: Plant Line Value: rhl Mutant vs. wt landsburg
  misc_feature: MA Experiment 108433 PARAMETER Experiment Name: At_rhl_Mutant2_cDNA_P Parameter: Tissue Value: Roots
  misc_feature: MA Experiment ID: 108434 Result: Down-regulated in Transcription
  misc_feature: MA Experiment 108434 PARAMETER Experiment Name: At_Root_Tips_cDNA_P Parameter: Tissue Value: Root Tips
  misc_feature: MA Experiment ID: 108464 Result: Up-regulated in Transcription
  misc_feature: MA Experiment 108464 PARAMETER Experiment Name: At_Germinating_Seeds_cDNA_P Parameter: Age (day) Value: 4 vs. 0
  misc_feature: MA Experiment 108464 PARAMETER Experiment Name: At_Germinating_Seeds_cDNA_P Parameter: Tissue Value: Germinating Seeds
  misc_feature: MA Experiment ID: 108585 Result: Up-regulated in Transcription
  misc_feature: MA Experiment 108585 PARAMETER Experiment Name: At_5mM_NaNP_cDNA_P Parameter: Timepoint (hr) Value: 6
  misc_feature: MA Experiment 108585 PARAMETER Experiment Name: At_5mM_NaNP_cDNA_P Parameter: Tissue Value: Aerial
  misc_feature: MA Experiment 108585 PARAMETER Experiment Name: At_5mM_NaNP_cDNA_P Parameter: Treatment Value: null
  misc_feature: MA Experiment ID: 108594 Result: Down-regulated in Transcription
  misc_feature: MA Experiment 108594 PARAMETER Experiment Name: At_Ler-rhl_Root_cDNA_P Parameter: Plant Line Value: null
  misc_feature: MA Experiment ID: 108667 Result: Up-regulated in Transcription
  misc_feature: MA Experiment 108667 PARAMETER Experiment Name: At_2mM_SA_cDNA_P Parameter: Plant Line Value: WS
  misc_feature: MA Experiment 108667 PARAMETER Experiment Name: At_2mM_SA_cDNA_P Parameter: Timepoint (hr) Value: 1
  misc_feature: MA Experiment 108667 PARAMETER Experiment Name: At_2mM_SA_cDNA_P Parameter: Treatment Value: 2mM SA vs. No Treatment
  misc_feature: MA Experiment ID: 20000087 Result: Down-regulated in Transcription
  misc_feature: MA Experiment 20000087 PARAMETER Experiment Name: At_100uM_ABA_Mutants_cDNA_P Parameter: Plant Line Value: WS
  misc_feature: MA Experiment 20000087 PARAMETER Experiment Name: At_100uM_ABA_Mutants_cDNA_P Parameter: Timepoint (hr) Value: 6
  misc_feature: MA Experiment 20000087 PARAMETER Experiment Name: At_100uM_ABA_Mutants_cDNA_P Parameter: Tissue Value: Aerial
  misc_feature: MA Experiment 20000087 PARAMETER Experiment Name: At_100uM_ABA_Mutants_cDNA_P Parameter: Treatment Value: 100uM ABA vs. No Treatment
  misc_feature: MA Experiment ID: 20000090 Result: Down-regulated in Transcription
  misc_feature: MA Experiment ID: 20000093 Result: Down-regulated in Transcription
  misc_feature: MA Experiment 20000093 PARAMETER Experiment Name: At_42deg_Heat_cDNA_P Parameter: Temperature (deg C) Value: 42 vs. 22
  misc_feature: MA Experiment 20000093 PARAMETER Experiment Name: At_42deg_Heat_cDNA_P Parameter: Timepoint (hr) Value: 0.5
  misc_feature: MA Experiment 20000093 PARAMETER Experiment Name: At_42deg_Heat_cDNA_P Parameter: Tissue Value: Aerial
  misc_feature: MA Experiment ID: 20000113 Result: Up-regulated in Transcription
  misc_feature: MA Experiment 20000113 PARAMETER Experiment Name: At_42deg_Heat_cDNA_P Parameter: Temperature (deg C) Value: 42 vs. 22
  misc_feature: MA Experiment 20000113 PARAMETER Experiment Name: At_42deg_Heat_cDNA_P Parameter: Timepoint (hr) Value: 8
  misc_feature: MA Experiment 20000113 PARAMETER Experiment Name: At_42deg_Heat_cDNA_P Parameter: Tissue Value: Aerial
  misc_feature: MA Experiment ID: 20000327 Result: Down-regulated in Transcription
  misc_feature: MA Experiment 20000327 PARAMETER Experiment Name: At_42deg_Heat_Sub_P Parameter: Age (day) Value: 14
  misc_feature: MA Experiment 20000327 PARAMETER Experiment Name: At_42deg_Heat_Sub_P Parameter: Organism Value: A. thaliana
  misc_feature: MA Experiment 20000327 PARAMETER Experiment Name: At_42deg_Heat_Sub_P Parameter: Plant Line Value: WS
  misc_feature: MA Experiment 20000327 PARAMETER Experiment Name: At_42deg_Heat_Sub_P Parameter: Temperature (deg C) Value: 42 vs. 22
  misc_feature: MA Experiment 20000327 PARAMETER Experiment Name: At_42deg_Heat_Sub_P Parameter: Timepoint (hr) Value: 1
  misc_feature: MA Experiment 20000327 PARAMETER Experiment Name: At_42deg_Heat_Sub_P Parameter: Tissue Value: Aerial
  misc_feature: MA Experiment ID: 20000346 Result: Up-regulated in Transcription
  misc_feature: MA Experiment 20000346 PARAMETER Experiment Name: At_2mM_SA_Sub_P Parameter: Age (day) Value: 14
  misc_feature: MA Experiment 20000346 PARAMETER Experiment Name: At_2mM_SA_Sub_P Parameter: Organism Value: A. thaliana
  misc_feature: MA Experiment 20000346 PARAMETER Experiment Name: At_2mM_SA_Sub_P Parameter: Plant Line Value: WS
  misc_feature: MA Experiment 20000346 PARAMETER Experiment Name: At_2mM_SA_Sub_P Parameter: Timepoint (hr) Value: 1
  misc_feature: MA Experiment 20000346 PARAMETER Experiment Name: At_2mM_SA_Sub_P Parameter: Tissue Value: Aerial
  misc_feature: MA Experiment 20000346 PARAMETER Experiment Name: At_2mM_SA_Sub_P Parameter: Treatment Value: 2mM SA vs. No Treatment
  misc_feature: MA Experiment ID: 20000355 Result: Down-regulated in Transcription
  misc_feature: MA Experiment 20000355 PARAMETER Experiment Name: At_Siliques_Sub_P Parameter: Age (day) Value: 21
  misc_feature: MA Experiment 20000355 PARAMETER Experiment Name: At_Siliques_Sub_P Parameter: Organism Value: A. thaliana
  misc_feature: MA Experiment 20000355 PARAMETER Experiment Name: At_Siliques_Sub_P Parameter: Plant Line Value: WS
  misc_feature: MA Experiment 20000355 PARAMETER Experiment Name: At_Siliques_Sub_P Parameter: Tissue Value: Less Than 5mm Siliques vs. Whole Plant
  misc_feature: MA Experiment ID: 20000440 Result: Down-regulated in Transcription
  misc_feature: MA Experiment 20000440 PARAMETER Experiment Name: At_Closed-Flower__Sub_P Parameter: Tissue Value: Closed Flower vs. Whole Plant
aaccattctctcttctcttctttatctcaaactctttcttcttccaaatcataaaccatggcaacatgcatagacacatgccgaaccggtaatacccaagacgatgattcccggttctgttgcatcaagaatttctttcgacccggtttctctgtaaaccggaagattcaccacacccaaatcgaagatgacgatgatgtctggatcaagatgcttgaagaagccaaatccgatgttaaacaagaacccattttatcaaactactactacgcttcgatcacatctcatcgatctttagagtctgctttagctcacatcctctccgtaaagctcagcaatttaaacctaccaagcaacacactcttcgaactgttcataagcgttttagaagaaagccctgagatcatcgaatccacgaagcaagatcttatagcagtcaaagaaagagacccagcttgtataagctacgttcattgcttcttgggcttcaaaggcttcctcgcttgtcaagctcatcgaatagctcataccctctggaaacagaacagaaaaatcgtagctttattgatccaaaacagagtatcagaatctttcgccgtcgatattcatcccggagcgaagatcggaaaagggattcttttagaccatgcgacgggcgtggtgatcggagagacggcggtggttggagacaatgtttcgattctacacggagtgaccttgggaggaacagggaaacagagtggtgatcggcatccgaagattggtgatggtgtgttgattggagctgggagttgtatattggggaatataacaatcggtgagggagctaagattggatcagggtcggtggtggttaaggatgtgccggcgcgtacgacggcggttggaaatccggcgaggttgattggtgggaaagagaatccgagaaaacatgataagattccttgtctgactatggaccagacatcgtatttaaccgagtggtctgattatgtgatttaacacaaatgtgtatttctttctttcttgtaactgatgatgatgaaacaagtcttgtctatttcttaatattttactatgtactaatcaaacaagtcttgaaatcaagctcatcgatctttaagaag

SEQ ID NO: 103498 - protein, 314 aa, Arabidopsis thaliana
  peptide (1)..(314): Ceres Seq. ID no. 13612869
  misc_feature (1)..(314): Homolog of NCBI NO: 15222799 NR Description: serine acetyltransferase [Arabidopsis thaliana]
  misc_feature (1)..(314): Homolog of NCBI NO: 2146775 NR Description: serine O-acetyltransferase (EC 2.3.1.30) SAT1
  misc_feature (15)..(314): Homolog of NCBI NO: 897678 NR Description: serine O-acetyltransferase [Arabidopsis thaliana]
  misc_feature (15)..(314): Homolog of NCBI NO: 15231152 NR Description: serine acetyltransferase (Sat-1) [Arabidopsis
  misc_feature (15)..(314): Homolog of NCBI NO: 1107505 NR Description: serine O-acetyltransferase [Arabidopsis thaliana]
  misc_feature (15)..(314): Homolog of NCBI NO: 1369758 NR Description: serine acetyltransferase
  misc_feature (46)..(314): Homolog of NCBI NO: 2129731 NR Description: serine O-acetyltransferase (EC 2.3.1.30) satA -
  misc_feature (38)..(314): Homolog of NCBI NO: 23343581 NR Description: serine acetyltransferase 1 [Nicotiana tabacum]
  misc_feature (34)..(314): Homolog of NCBI NO: 23343583 NR Description: serine acetyltransferase 4 [Nicotiana tabacum]
  misc_feature (43)..(314): Homolog of NCBI NO: 38350581 NR Description: serine acetyltransferase [Nicotiana
MATCIDTCRTGNTQDDDSRFCCIKNFFRPGFSVNRKIHHTQIEDDDDVWIKMLEEAKSDVKQEPILSNYYYASITSHRSLESALAHILSVKLSNLNLPSNTLFELFISVLEESPEIIESTKQDLIAVKERDPACISYVHCFLGFKGFLACQAHRIAHTLWKQNRKIVALLIQNRVSESFAVDIHPGAKIGKGILLDHATGVVIGETAVVGDNVSILHGVTLGGTGKQSGDRHPKIGDGVLIGAGSCILGNITIGEGAKIGSGSVVVKDVPARTTAVGNPARLIGGKENPRKHDKIPCLTMDQTSYLTEWSDYVI

SEQ ID NO: 103499 - protein, 263 aa, Arabidopsis thaliana
  peptide (1)..(263): Ceres Seq. ID no. 13612870
  misc_feature (1)..(263): Homolog of NCBI NO: 15222799 NR Description: serine acetyltransferase [Arabidopsis thaliana]
  misc_feature (1)..(263): Homolog of NCBI NO: 2146775 NR Description: serine O-acetyltransferase (EC 2.3.1.30) SAT1
  misc_feature (1)..(263): Homolog of NCBI NO: 897678 NR Description: serine O-acetyltransferase [Arabidopsis thaliana]
  misc_feature (1)..(263): Homolog of NCBI NO: 15231152 NR Description: serine acetyltransferase (Sat-1) [Arabidopsis
  misc_feature (1)..(263): Homolog of NCBI NO: 1107505 NR Description: serine O-acetyltransferase [Arabidopsis thaliana]
  misc_feature (1)..(263): Homolog of NCBI NO: 1369758 NR Description: serine acetyltransferase
  misc_feature (1)..(263): Homolog of NCBI NO: 2129731 NR Description: serine O-acetyltransferase (EC 2.3.1.30) satA -
  misc_feature (1)..(263): Homolog of NCBI NO: 23343581 NR Description: serine acetyltransferase 1 [Nicotiana tabacum]
  misc_feature (1)..(263): Homolog of NCBI NO: 23343583 NR Description: serine acetyltransferase 4 [Nicotiana tabacum]
  misc_feature (1)..(263): Homolog of NCBI NO: 38350581 NR Description: serine acetyltransferase [Nicotiana
MLEEAKSDVKQEPILSNYYYASITSHRSLESALAHILSVKLSNLNLPSNTLFELFISVLEESPEIIESTKQDLIAVKERDPACISYVHCFLGFKGFLACQAHRIAHTLWKQNRKIVALLIQNRVSESFAVDIHPGAKIGKGILLDHATGVVIGETAVVGDNVSILHGVTLGGTGKQSGDRHPKIGDGVLIGAGSCILGNITIGEGAKIGSGSVVVKDVPARTTAVGNPARLIGGKENPRKHDKIPCLTMDQTSYLTEWSDYVI

SEQ ID NO: 103500 - DNA, 831 bp, Arabidopsis thaliana
  misc_feature (1)..(831): Ceres Seq. ID no. 13612875
  misc_feature: MA Experiment ID: 108434 Result: Down-regulated in Transcription
  misc_feature: MA Experiment 108434 PARAMETER Experiment Name: At_Root_Tips_cDNA_P Parameter: Tissue Value: Root Tips
  misc_feature: MA Experiment ID: 108435 Result: Down-regulated in Transcription
  misc_feature: MA Experiment 108435 PARAMETER Experiment Name: At_stm_Mutants_cDNA_P Parameter: Plant Line Value: wt Landsburg vs stm
  misc_feature: MA Experiment 108435 PARAMETER Experiment Name: At_stm_Mutants_cDNA_P Parameter: Tissue Value: Shoot Apical Meristem Region
  misc_feature: MA Experiment ID: 108462 Result: Down-regulated in Transcription
  misc_feature: MA Experiment 108462 PARAMETER Experiment Name: At_Germinating_Seeds_cDNA_P Parameter: Age (day) Value: 2 vs. 0
  misc_feature: MA Experiment 108462 PARAMETER Experiment Name: At_Germinating_Seeds_cDNA_P Parameter: Tissue Value: Germinating Seeds
  misc_feature: MA Experiment ID: 108463 Result: Down-regulated in Transcription
  misc_feature: MA Experiment 108463 PARAMETER Experiment Name: At_Germinating_Seeds_cDNA_P Parameter: Age (day) Value: 3 vs. 0
  misc_feature: MA Experiment 108463 PARAMETER Experiment Name: At_Germinating_Seeds_cDNA_P Parameter: Tissue Value: Germinating Seeds
  misc_feature: MA Experiment ID: 108464 Result: Down-regulated in Transcription
  misc_feature: MA Experiment 108464 PARAMETER Experiment Name: At_Germinating_Seeds_cDNA_P Parameter: Age (day) Value: 4 vs. 0
  misc_feature: MA Experiment 108464 PARAMETER Experiment Name: At_Germinating_Seeds_cDNA_P Parameter: Tissue Value: Germinating Seeds
  misc_feature: MA Experiment ID: 108488 Result: Down-regulated in Transcription
  misc_feature: MA Experiment ID: 108576 Result: Up-regulated in Transcription
  misc_feature: MA Experiment 108576 PARAMETER Experiment Name: At_42deg_Heat_cDNA_P Parameter: Temperature (deg C) Value: 42 vs. 22
  misc_feature: MA Experiment 108576 PARAMETER Experiment Name: At_42deg_Heat_cDNA_P Parameter: Timepoint (hr) Value: 1
  misc_feature: MA Experiment 108576 PARAMETER Experiment Name: At_42deg_Heat_cDNA_P Parameter: Tissue Value: Aerial
  misc_feature: MA Experiment ID: 108579 Result: Up-regulated in Transcription
  misc_feature: MA Experiment 108579 PARAMETER Experiment Name: At_4deg_Cold_cDNA_P Parameter: Temperature (deg C) Value: 4 vs. 22
  misc_feature: MA Experiment 108579 PARAMETER Experiment Name: At_4deg_Cold_cDNA_P Parameter: Timepoint (hr) Value: 6
  misc_feature: MA Experiment 108579 PARAMETER Experiment Name: At_4deg_Cold_cDNA_P Parameter: Tissue Value: Aerial
  misc_feature: MA Experiment ID: 20000069 Result: Up-regulated in Transcription
  misc_feature: MA Experiment 20000069 PARAMETER Experiment Name: At_100uM_ABA_Mutants_cDNA_P Parameter: Plant Line Value: CS23
  misc_feature: MA Experiment 20000069 PARAMETER Experiment Name: At_100uM_ABA_Mutants_cDNA_P Parameter: Timepoint (hr) Value: 6
  misc_feature: MA Experiment 20000069 PARAMETER Experiment Name: At_100uM_ABA_Mutants_cDNA_P Parameter: Tissue Value: Aerial
  misc_feature: MA Experiment 20000069 PARAMETER Experiment Name: At_100uM_ABA_Mutants_cDNA_P Parameter: Treatment Value: 100uM ABA vs. No Treatment
  misc_feature: MA Experiment ID: 20000070 Result: Up-regulated in Transcription
  misc_feature: MA Experiment 20000070 PARAMETER Experiment Name: At_100uM_ABA_Mutants_cDNA_P Parameter: Plant Line Value: CS24
  misc_feature: MA Experiment 20000070 PARAMETER Experiment Name: At_100uM_ABA_Mutants_cDNA_P Parameter: Timepoint (hr) Value: 6
  misc_feature: MA Experiment 20000070 PARAMETER Experiment Name: At_100uM_ABA_Mutants_cDNA_P Parameter: Tissue Value: Aerial
  misc_feature: MA Experiment 20000070 PARAMETER Experiment Name: At_100uM_ABA_Mutants_cDNA_P Parameter: Treatment Value: 100uM ABA vs. No Treatment
  misc_feature: MA Experiment ID: 20000086 Result: Up-regulated in Transcription
  misc_feature: MA Experiment 20000086 PARAMETER Experiment Name: At_100uM_ABA_Mutants_cDNA_P Parameter: Plant Line Value: CS22
  misc_feature: MA Experiment 20000086 PARAMETER Experiment Name: At_100uM_ABA_Mutants_cDNA_P Parameter: Timepoint (hr) Value: 6
  misc_feature: MA Experiment 20000086 PARAMETER Experiment Name: At_100uM_ABA_Mutants_cDNA_P Parameter: Tissue Value: Aerial
  misc_feature: MA Experiment 20000086 PARAMETER Experiment Name: At_100uM_ABA_Mutants_cDNA_P Parameter: Treatment Value: 100uM ABA vs. No Treatment
  misc_feature: MA Experiment ID: 20000087 Result: Up-regulated in Transcription
  misc_feature: MA Experiment 20000087 PARAMETER Experiment Name: At_100uM_ABA_Mutants_cDNA_P Parameter: Plant Line Value: WS
  misc_feature: MA Experiment 20000087 PARAMETER Experiment Name: At_100uM_ABA_Mutants_cDNA_P Parameter: Timepoint (hr) Value: 6
  misc_feature: MA Experiment 20000087 PARAMETER Experiment Name: At_100uM_ABA_Mutants_cDNA_P Parameter: Tissue Value: Aerial
  misc_feature: MA Experiment 20000087 PARAMETER Experiment Name: At_100uM_ABA_Mutants_cDNA_P Parameter: Treatment Value: 100uM ABA vs. No Treatment
  misc_feature: MA Experiment ID: 20000088 Result: Up-regulated in Transcription
  misc_feature: MA Experiment 20000088 PARAMETER Experiment Name: At_100uM_ABA_Mutants_cDNA_P Parameter: Plant Line Value: Landsberg
  misc_feature: MA Experiment 20000088 PARAMETER Experiment Name: At_100uM_ABA_Mutants_cDNA_P Parameter: Timepoint (hr) Value: 6
  misc_feature: MA Experiment 20000088 PARAMETER Experiment Name: At_100uM_ABA_Mutants_cDNA_P Parameter: Tissue Value: Aerial
  misc_feature: MA Experiment 20000088 PARAMETER Experiment Name: At_100uM_ABA_Mutants_cDNA_P Parameter: Treatment Value: 100uM ABA vs. No Treatment
  misc_feature: MA Experiment ID: 20000090 Result: Up-regulated in Transcription
  misc_feature: MA Experiment ID: 20000093 Result: Up-regulated in Transcription
  misc_feature: MA Experiment 20000093 PARAMETER Experiment Name: At_42deg_Heat_cDNA_P Parameter: Temperature (deg C) Value: 42 vs. 22
  misc_feature: MA Experiment 20000093 PARAMETER Experiment Name: At_42deg_Heat_cDNA_P Parameter: Timepoint (hr) Value: 0.5
  misc_feature: MA Experiment 20000093 PARAMETER Experiment Name: At_42deg_Heat_cDNA_P Parameter: Tissue Value: Aerial
  misc_feature: MA Experiment ID: 20000112 Result: Up-regulated in Transcription
  misc_feature: MA Experiment 20000112 PARAMETER Experiment Name: At_42deg_Heat_cDNA_P Parameter: Temperature (deg C) Value: 42 vs. 22
  misc_feature: MA Experiment 20000112 PARAMETER Experiment Name: At_42deg_Heat_cDNA_P Parameter: Timepoint (hr) Value: 2
  misc_feature: MA Experiment 20000112 PARAMETER Experiment Name: At_42deg_Heat_cDNA_P Parameter: Tissue Value: Aerial
  misc_feature: MA Experiment ID: 20000113 Result: Up-regulated in Transcription
  misc_feature: MA Experiment 20000113 PARAMETER Experiment Name: At_42deg_Heat_cDNA_P Parameter: Temperature (deg C) Value: 42 vs. 22
  misc_feature: MA Experiment 20000113 PARAMETER Experiment Name: At_42deg_Heat_cDNA_P Parameter: Timepoint (hr) Value: 8
  misc_feature: MA Experiment 20000113 PARAMETER Experiment Name: At_42deg_Heat_cDNA_P Parameter: Tissue Value: Aerial
  misc_feature: MA Experiment ID: 20000117 Result: Up-regulated in Transcription
  misc_feature: MA Experiment 20000117 PARAMETER Experiment Name: At_100uM_ABA_Mutants_cDNA_P Parameter: Plant Line Value: Columbia
  misc_feature: MA Experiment 20000117 PARAMETER Experiment Name: At_100uM_ABA_Mutants_cDNA_P Parameter: Timepoint (hr) Value: 6
  misc_feature: MA Experiment 20000117 PARAMETER Experiment Name: At_100uM_ABA_Mutants_cDNA_P Parameter: Tissue Value: Aerial
  misc_feature: MA Experiment 20000117 PARAMETER Experiment Name: At_100uM_ABA_Mutants_cDNA_P Parameter: Treatment Value: 100uM ABA vs. No Treatment
  misc_feature: MA Experiment ID: 20000171 Result: Up-regulated in Transcription
  misc_feature: MA Experiment 20000171 PARAMETER Experiment Name: At_42deg_Heat_P Parameter: Age (day) Value: 14
  misc_feature: MA Experiment 20000171 PARAMETER Experiment Name: At_42deg_Heat_P Parameter: Organism Value: A. thaliana
  misc_feature: MA Experiment 20000171 PARAMETER Experiment Name: At_42deg_Heat_P Parameter: Plant Line Value: WS
  misc_feature: MA Experiment 20000171 PARAMETER Experiment Name: At_42deg_Heat_P Parameter: Temperature (deg C) Value: 42 vs. 22
  misc_feature: MA Experiment 20000171 PARAMETER Experiment Name: At_42deg_Heat_P Parameter: Timepoint (hr) Value: 1
  misc_feature: MA Experiment 20000171 PARAMETER Experiment Name: At_42deg_Heat_P Parameter: Tissue Value: Aerial
  misc_feature: MA Experiment ID: 20000184 Result: Down-regulated in Transcription
  misc_feature: MA Experiment 20000184 PARAMETER Experiment Name: At_Shoots__P Parameter: Age (day) Value: 7
  misc_feature: MA Experiment 20000184 PARAMETER Experiment Name: At_Shoots__P Parameter: Tissue Value: Shoots vs. Whole Plant
  misc_feature: MA Experiment ID: 20000185 Result: Down-regulated in Transcription
  misc_feature: MA Experiment 20000185 PARAMETER Experiment Name: At_Roots__P Parameter: Age (day) Value: 7 vs. 21
  misc_feature: MA Experiment 20000185 PARAMETER Experiment Name: At_Roots__P Parameter: Organism Value: A. thaliana
  misc_feature: MA Experiment 20000185 PARAMETER Experiment Name: At_Roots__P Parameter: Tissue Value: Roots vs. Whole Plant
  misc_feature: MA Experiment ID: 20000234 Result: Down-regulated in Transcription
  misc_feature: MA Experiment 20000234 PARAMETER Experiment Name: At_Siliques_P Parameter: Age (day) Value: 21
  misc_feature: MA Experiment 20000234 PARAMETER Experiment Name: At_Siliques_P Parameter: Organism Value: A. thaliana
  misc_feature: MA Experiment 20000234 PARAMETER Experiment Name: At_Siliques_P Parameter: Plant Line Value: WS
  misc_feature: MA Experiment 20000234 PARAMETER Experiment Name: At_Siliques_P Parameter: Tissue Value: Less Than 5mm Siliques vs. Whole Plant
  misc_feature: MA Experiment ID: 20000437 Result: Up-regulated in Transcription
  misc_feature: MA Experiment 20000437 PARAMETER Experiment Name: At_Drought_P Parameter: Age (day) Value: 8
  misc_feature: MA Experiment 20000437 PARAMETER Experiment Name: At_Drought_P Parameter: Organism Value: A. thaliana
  misc_feature: MA Experiment 20000437 PARAMETER Experiment Name: At_Drought_P Parameter: Plant Line Value: WS
  misc_feature: MA Experiment 20000437 PARAMETER Experiment Name: At_Drought_P Parameter: Timepoint (hr) Value: 24
  misc_feature: MA Experiment 20000437 PARAMETER Experiment Name: At_Drought_P Parameter: Tissue Value: Whole Plant
  misc_feature: MA Experiment 20000437 PARAMETER Experiment Name: At_Drought_P Parameter: Treatment Value: Drought vs. No Drought
  misc_feature: MA Experiment ID: 20000438 Result: Down-regulated in Transcription
  misc_feature: MA Experiment 20000438 PARAMETER Experiment Name: At_Shoots__P Parameter: Age (day) Value: 14
  misc_feature: MA Experiment 20000438 PARAMETER Experiment Name: At_Shoots__P Parameter: Tissue Value: Shoots vs. Whole Plant
  misc_feature: MA Experiment ID: 20000439 Result: Down-regulated in Transcription
  misc_feature: MA Experiment 20000439 PARAMETER Experiment Name: At_Roots__P Parameter: Age (day) Value: 14 vs. 21
  misc_feature: MA Experiment 20000439 PARAMETER Experiment Name: At_Roots__P Parameter: Organism Value: A. thaliana
  misc_feature: MA Experiment 20000439 PARAMETER Experiment Name: At_Roots__P Parameter: Tissue Value: Roots vs. Whole Plant
  misc_feature: MA Experiment ID: 20000495 Result: Down-regulated in Transcription
  misc_feature: MA Experiment 20000495 PARAMETER Experiment Name: At_Guard_Cells_P Parameter: Harvest Date Value: 8/2/2002
  misc_feature: MA Experiment 20000495 PARAMETER Experiment Name: At_Guard_Cells_P Parameter: Organism Value: A. thaliana
  misc_feature: MA Experiment 20000495 PARAMETER Experiment Name: At_Guard_Cells_P Parameter: Tissue Value: Guard Cells vs. Leaves
  misc_feature: MA Experiment ID: 20001247 Result: Down-regulated in Transcription
  misc_feature: MA Experiment 20001247 PARAMETER Experiment Name: At_Far-red-induction_P Parameter: Age (day) Value: 7
  misc_feature: MA Experiment 20001247 PARAMETER Experiment Name: At_Far-red-induction_P Parameter: Light Value: Far-red vs. White
  misc_feature: MA Experiment 20001247 PARAMETER Experiment Name: At_Far-red-induction_P Parameter: Organism Value: A. thaliana
  misc_feature: MA Experiment 20001247 PARAMETER Experiment Name: At_Far-red-induction_P Parameter: Plant Line Value: Columbia
  misc_feature: MA Experiment 20001247 PARAMETER Experiment Name: At_Far-red-induction_P Parameter: Timepoint (hr) Value: 1
  misc_feature: MA Experiment 20001247 PARAMETER Experiment Name: At_Far-red-induction_P Parameter: Tissue Value: Whole Plant
  misc_feature: MA Experiment ID: 20001248 Result: Up-regulated in Transcription
  misc_feature: MA Experiment 20001248 PARAMETER Experiment Name: At_Far-red-induction_P Parameter: Age (day) Value: 7
  misc_feature: MA Experiment 20001248 PARAMETER Experiment Name: At_Far-red-induction_P Parameter: Light Value: Far-red vs. White
  misc_feature: MA Experiment 20001248 PARAMETER Experiment Name: At_Far-red-induction_P Parameter: Organism Value: A. thaliana
  misc_feature: MA Experiment 20001248 PARAMETER Experiment Name: At_Far-red-induction_P Parameter: Plant Line Value: Columbia
  misc_feature: MA Experiment 20001248 PARAMETER Experiment Name: At_Far-red-induction_P Parameter: Timepoint (hr) Value: 4
  misc_feature: MA Experiment 20001248 PARAMETER Experiment Name: At_Far-red-induction_P Parameter: Tissue Value: Whole Plant
  misc_feature: MA Experiment ID: 20001451 Result: Down-regulated in Transcription
  misc_feature: MA Experiment 20001451 PARAMETER Experiment Name: At_Far-red-induction_P Parameter: Age (day) Value: 7
  misc_feature: MA Experiment 20001451 PARAMETER Experiment Name: At_Far-red-induction_P Parameter: Light Value: Far-red vs. White
  misc_feature: MA Experiment 20001451 PARAMETER Experiment Name: At_Far-red-induction_P Parameter: Organism Value: A. thaliana
  misc_feature: MA Experiment 20001451 PARAMETER Experiment Name: At_Far-red-induction_P Parameter: Plant Line Value: Columbia
  misc_feature: MA Experiment 20001451 PARAMETER Experiment Name: At_Far-red-induction_P Parameter: Timepoint (hr) Value: 24
  misc_feature: MA Experiment 20001451 PARAMETER Experiment Name: At_Far-red-induction_P Parameter: Tissue Value: Whole Plant
  misc_feature: MA Experiment ID: 20001459 Result: Down-regulated in Transcription
  misc_feature: MA Experiment 20001459 PARAMETER Experiment Name: At_50mM_NH4NO3_L-to-H_P Parameter: Age (day) Value: Undefined
  misc_feature: MA Experiment 20001459 PARAMETER Experiment Name: At_50mM_NH4NO3_L-to-H_P Parameter: Organism Value: Undefined
  misc_feature: MA Experiment 20001459 PARAMETER Experiment Name: At_50mM_NH4NO3_L-to-H_P Parameter: Plant Line Value: Undefined
  misc_feature: MA Experiment 20001459 PARAMETER Experiment Name: At_50mM_NH4NO3_L-to-H_P Parameter: Timepoint (hr) Value: 4
  misc_feature: MA Experiment 20001459 PARAMETER Experiment Name: At_50mM_NH4NO3_L-to-H_P Parameter: Tissue Value: Siliques
  misc_feature: MA Experiment 20001459 PARAMETER Experiment Name: At_50mM_NH4NO3_L-to-H_P Parameter: Treatment Value: 50mM NH4NO3 vs. 100mM Manitol
  misc_feature: MA Experiment ID: 20001558 Result: Down-regulated in Transcription
  misc_feature: MA Experiment 20001558 PARAMETER Experiment Name: At_Drought_Soil_Dry_P Parameter: Age (day) Value: 27
  misc_feature: MA Experiment 20001558 PARAMETER Experiment Name: At_Drought_Soil_Dry_P Parameter: Organism Value: A. thaliana
  misc_feature: MA Experiment 20001558 PARAMETER Experiment Name: At_Drought_Soil_Dry_P Parameter: Plant Line Value: WS
  misc_feature: MA Experiment 20001558 PARAMETER Experiment Name: At_Drought_Soil_Dry_P Parameter: Post Timepoint (hr) Value: 6
  misc_feature: MA Experiment 20001558 PARAMETER Experiment Name: At_Drought_Soil_Dry_P Parameter: Post-Treatment Value: Re-Water vs. No Drought
  misc_feature: MA Experiment 20001558 PARAMETER Experiment Name: At_Drought_Soil_Dry_P Parameter: Timepoint (day) Value: 13
  misc_feature: MA Experiment 20001558 PARAMETER Experiment Name: At_Drought_Soil_Dry_P Parameter: Treatment Value: Drought vs. No Drought
atccacaaaaaccattccctctctcaactctctgaatatttttcttcttacgatttacaaatttccgatgctgtgacattaacgtctgagaacagagaaacacttcaaatctttgaattcgtagtgcgacggagacggaggagccatcagtttcgaaaatggcgtgcgaaggtggaggatctaacgtcagatctagctactacaccattctcgggattcgtaaagatgcctctgtttccgatatccgcactgcttatcgtaagctagctatgaaatggcatccggatagatatgctcgaaatcctggagtcgccggagaagctaaacgtcggtttcaacaaatccaggaagcctattctgttttgaatgatgagaataagaggtcaatgtacgatgttggactatatgatcctcatgaagatgatgacgatgacttctgtgatttcatgcaagagatgatctcaatgatgaacaatgtcaaagacgcgggagagagcttggaagacttgcaacgaatgttcacggatatggttggtggagatggcgtgagctatgactgtaacaataatccaaagggcaacaaaagaccacgtgtcaatatctcgaggagtagtgctgcgatgcgttaaggcttacttcttttgtgtatgagtgtcgtgttgtatcaaaatttcaattccatgttcaattgtctagaccataaaataaattatctgtgaaaaccaactagaactaggtagaatctttggaatcccacatgccccaatcactaatgtatctctcatgatttggttgattttaaagattcgaaaattattcatgtattgttgc

SEQ ID NO: 103501 - protein, 156 aa, Arabidopsis thaliana; identical to SEQ ID NO: 36014
  peptide (1)..(156): Ceres Seq. ID no. 13612876
  misc_feature (13)..(82): Pfam Name: DnaJ domain Pfam Description: DnaJ domain
  misc_feature (1)..(156): Homolog of NCBI NO: 18405757 NR Description: DnaJ protein family [Arabidopsis thaliana] DnaJ protein, putative [Arabidopsis thaliana]
  misc_feature (1)..(156): Homolog of NCBI NO: 21554587 NR Description: DnaJ protein, putative [Arabidopsis thaliana]

SEQ ID NO: 103502 - protein, 119 aa, Arabidopsis thaliana; identical to SEQ ID NO: 36015
  peptide (1)..(119): Ceres Seq. ID no. 13612877
  misc_feature (1)..(119): Homolog of NCBI NO: 18405757 NR Description: DnaJ protein family [Arabidopsis thaliana] DnaJ protein, putative [Arabidopsis thaliana]
  misc_feature (1)..(119): Homolog of NCBI NO: 21554587 NR Description: DnaJ protein, putative [Arabidopsis thaliana]

SEQ ID NO: 103503 - protein, 88 aa, Arabidopsis thaliana
  peptide (1)..(88): Ceres Seq. ID no. 13612878
IHKNHSLSQLSEYFSSYDLQISDAVTLTSENRETLQIFEFVVRRRRRSHQFRKWRAKVEDLTSDLATTPFSGFVKMPLFPISALLIVS

SEQ ID NO: 103504 - DNA, 665 bp, Arabidopsis thaliana
  misc_feature (1)..(665): Ceres Seq. ID no. 13612885
  misc_feature: MA Experiment ID: 108434 Result: Up-regulated in Transcription
  misc_feature: MA Experiment 108434 PARAMETER Experiment Name: At_Root_Tips_cDNA_P Parameter: Tissue Value: Root Tips
  misc_feature: MA Experiment ID: 108462 Result: Down-regulated in Transcription
  misc_feature: MA Experiment 108462 PARAMETER Experiment Name: At_Germinating_Seeds_cDNA_P Parameter: Age (day) Value: 2 vs. 0
  misc_feature: MA Experiment 108462 PARAMETER Experiment Name: At_Germinating_Seeds_cDNA_P Parameter: Tissue Value: Germinating Seeds
  misc_feature: MA Experiment ID: 108463 Result: Down-regulated in Transcription
  misc_feature: MA Experiment 108463 PARAMETER Experiment Name: At_Germinating_Seeds_cDNA_P Parameter: Age (day) Value: 3 vs. 0
  misc_feature: MA Experiment 108463 PARAMETER Experiment Name: At_Germinating_Seeds_cDNA_P Parameter: Tissue Value: Germinating Seeds
  misc_feature: MA Experiment ID: 108464 Result: Down-regulated in Transcription
  misc_feature: MA Experiment 108464 PARAMETER Experiment Name: At_Germinating_Seeds_cDNA_P Parameter: Age (day) Value: 4 vs. 0
  misc_feature: MA Experiment 108464 PARAMETER Experiment Name: At_Germinating_Seeds_cDNA_P Parameter: Tissue Value: Germinating Seeds
  misc_feature: MA Experiment ID: 108573 Result: Down-regulated in Transcription
  misc_feature: MA Experiment 108573 PARAMETER Experiment Name: At_Drought_cDNA_P Parameter: Timepoint (hr) Value: 6
  misc_feature: MA Experiment 108573 PARAMETER Experiment Name: At_Drought_cDNA_P Parameter: Tissue Value: Aerial
  misc_feature: MA Experiment 108573 PARAMETER Experiment Name: At_Drought_cDNA_P Parameter: Treatment Value: Drought vs. No Drought
agggtttcgtcagagacagaagtgagagaggaggaaaaatgccggcgggacacggagtgagggcgagaacaagagatctgttcgcgagaccattcaggaagaagggttatattccactctccacttacctcagaaccttcaaggtcggcgattacgtcgatgtcaaggttaatggagctatccacaagggtatgcctcataagttctaccatggtcgtactggtcgcatctggaatgtcactaaacgtgccgttggtgttgaagtcaacaaacagattgggaacagaatcataaggaagaggatacatgtgcgtgtggagcatgtgcaacagtcaaggtgtgctgaggagtttaaactcagaaagaaacagaacgatgtgcttaaggctgatgctaaagccagaggtgagactatcagcaccaagagacagcctaaaggtcctaaaccgggtttcatggttgaaggtatgacattggagactgtcactcccattccttacgatgttgtcaacgatctcaagggtggttattgagttgtttccattttattatcattctctactcagaatttttgcacttgcttttttaattatgtttttgtatcaaacaagactgatttatatacgatatgagttcagattttgttaggaaagatggtttatccc

SEQ ID NO: 103505 - protein, 176 aa, Arabidopsis thaliana
  peptide (1)..(176): Ceres Seq. ID no. 13612886
  misc_feature (14)..(112): Pfam Name: Ribosomal protein L21e Pfam Description: Ribosomal protein L21e
  misc_feature (13)..(176): Homolog of NCBI NO: 18406015 NR Description: 60S ribosomal protein L21 (RPL21E) [Arabidopsis
  misc_feature (13)..(176): Homolog of NCBI NO: 18391042 NR Description: 60S ribosomal protein L21 (RPL21A) [Arabidopsis >gi|18391054|ref|NP_563849.1| 60S ribosomal protein L21 (RPL21C)
  misc_feature (13)..(176): Homolog of NCBI NO: 37535194 NR Description: 60S ribosomal protein L21 [Oryza sativa (japonica group)] >gi|13489167|gb|AAK27801.1| 60S ribosomal protein L21
  misc_feature (13)..(176): Homolog of NCBI NO: 11276828 NR Description: ribosomal protein L21 [imported] - rice
  misc_feature (9)..(176): Homolog of NCBI NO: 32400808 NR Description: 60s ribosomal protein L21 [Triticum aestivum]
  misc_feature (13)..(167): Homolog of NCBI NO: 6094029 NR Description: 60S RIBOSOMAL PROTEIN L21
  misc_feature (13)..(169): Homolog of NCBI NO: 15213768 NR Description: ribosomal protein L21 [Spodoptera frugiperda]
  misc_feature (13)..(167): Homolog of NCBI NO: 6319668 NR Description: Homology to rat L21; Rpl21ap [Saccharomyces
  misc_feature (13)..(169): Homolog of NCBI NO: 20129705 NR Description: CG12775-PA [Drosophila melanogaster]
  misc_feature (13)..(167): Homolog of NCBI NO: 6325178 NR Description: Homology to rat L21; Rpl21bp [Saccharomyces
GFVRDRSERGGKMPAGHGVRARTRDLFARPFRKKGYIPLSTYLRTFKVGDYVDVKVNGAIHKGMPHKFYHGRTGRIWNVTKRAVGVEVNKQIGNRIIRKRIHVRVEHVQQSRCAEEFKLRKKQNDVLKADAKARGETISTKRQPKGPKPGFMVEGMTLETVTPIPYDVVNDLKGGY

SEQ ID NO: 103506 - protein, 164 aa, Arabidopsis thaliana; identical to SEQ ID NO: 20517
  peptide (1)..(164): Ceres Seq. ID no. 13612887
  misc_feature (2)..(100): Pfam Name: Ribosomal protein L21e Pfam Description: Ribosomal protein L21e
  misc_feature (1)..(164): Homolog of NCBI NO: 18406015 NR Description: 60S ribosomal protein L21 (RPL21E) [Arabidopsis
  misc_feature (1)..(164): Homolog of NCBI NO: 18391042 NR Description: 60S ribosomal protein L21 (RPL21A) [Arabidopsis >gi|18391054|ref|NP_563849.1| 60S ribosomal protein L21 (RPL21C)
  misc_feature (1)..(164): Homolog of NCBI NO: 37535194 NR Description: 60S ribosomal protein L21 [Oryza sativa (japonica group)] >gi|13489167|gb|AAK27801.1| 60S ribosomal protein L21
  misc_feature (1)..(164): Homolog of NCBI NO: 11276828 NR Description: ribosomal protein L21 [imported] - rice
  misc_feature (1)..(164): Homolog of NCBI NO: 32400808 NR Description: 60s ribosomal protein L21 [Triticum aestivum]
  misc_feature (1)..(155): Homolog of NCBI NO: 6094029 NR Description: 60S RIBOSOMAL PROTEIN L21
  misc_feature (1)..(157): Homolog of NCBI NO: 15213768 NR Description: ribosomal protein L21 [Spodoptera frugiperda]
  misc_feature (1)..(155): Homolog of NCBI NO: 6319668 NR Description: Homology to rat L21; Rpl21ap [Saccharomyces
  misc_feature (1)..(157): Homolog of NCBI NO: 20129705 NR Description: CG12775-PA [Drosophila melanogaster]
  misc_feature (1)..(155): Homolog of NCBI NO: 6325178 NR Description: Homology to rat L21; Rpl21bp [Saccharomyces

SEQ ID NO: 103507 - protein, 113 aa, Arabidopsis thaliana; identical to SEQ ID NO: 20518
  peptide (1)..(113): Ceres Seq. ID no. 13612888
  misc_feature (1)..(113): Homolog of NCBI NO: 18406015 NR Description: 60S ribosomal protein L21 (RPL21E) [Arabidopsis
  misc_feature (1)..(113): Homolog of NCBI NO: 18391042 NR Description: 60S ribosomal protein L21 (RPL21A) [Arabidopsis >gi|18391054|ref|NP_563849.1| 60S ribosomal protein L21 (RPL21C)
  misc_feature (1)..(113): Homolog of NCBI NO: 37535194 NR Description: 60S ribosomal protein L21 [Oryza sativa (japonica group)] >gi|13489167|gb|AAK27801.1| 60S ribosomal protein L21
  misc_feature (1)..(113): Homolog of NCBI NO: 11276828 NR Description: ribosomal protein L21 [imported] - rice
  misc_feature (1)..(113): Homolog of NCBI NO: 32400808 NR Description: 60s ribosomal protein L21 [Triticum aestivum]
  misc_feature (1)..(104): Homolog of NCBI NO: 6094029 NR Description: 60S RIBOSOMAL PROTEIN L21
  misc_feature (1)..(106): Homolog of NCBI NO: 15213768 NR Description: ribosomal protein L21 [Spodoptera frugiperda]
  misc_feature (1)..(104): Homolog of NCBI NO: 6319668 NR Description: Homology to rat L21; Rpl21ap [Saccharomyces
  misc_feature (1)..(106): Homolog of NCBI NO: 20129705 NR Description: CG12775-PA [Drosophila melanogaster]
  misc_feature (1)..(104): Homolog of NCBI NO: 6325178 NR Description: Homology to rat L21; Rpl21bp [Saccharomyces

SEQ ID NO: 103508 - DNA, 1362 bp, Arabidopsis thaliana
  misc_feature (1)..(1362): Ceres Seq. ID no. 13612901
  misc_feature: MA Experiment ID: 108434 Result: Down-regulated in Transcription
  misc_feature: MA Experiment 108434 PARAMETER Experiment Name: At_Root_Tips_cDNA_P Parameter: Tissue Value: Root Tips
  misc_feature: MA Experiment ID: 108435 Result: Down-regulated in Transcription
  misc_feature: MA Experiment 108435 PARAMETER Experiment Name: At_stm_Mutants_cDNA_P Parameter: Plant Line Value: wt Landsburg vs stm
  misc_feature: MA Experiment 108435 PARAMETER Experiment Name: At_stm_Mutants_cDNA_P Parameter: Tissue Value: Shoot Apical Meristem Region
  misc_feature: MA Experiment ID: 108462 Result: Up-regulated in Transcription
  misc_feature: MA Experiment 108462 PARAMETER Experiment Name: At_Germinating_Seeds_cDNA_P Parameter: Age (day) Value: 2 vs. 0
  misc_feature: MA Experiment 108462 PARAMETER Experiment Name: At_Germinating_Seeds_cDNA_P Parameter: Tissue Value: Germinating Seeds
  misc_feature: MA Experiment ID: 108463 Result: Up-regulated in Transcription
  misc_feature: MA Experiment 108463 PARAMETER Experiment Name: At_Germinating_Seeds_cDNA_P Parameter: Age (day) Value: 3 vs. 0
  misc_feature: MA Experiment 108463 PARAMETER Experiment Name: At_Germinating_Seeds_cDNA_P Parameter: Tissue Value: Germinating Seeds
  misc_feature: MA Experiment ID: 108469 Result: Down-regulated in Transcription
  misc_feature: MA Experiment ID: 108573 Result: Up-regulated in Transcription
  misc_feature: MA Experiment 108573 PARAMETER Experiment Name: At_Drought_cDNA_P Parameter: Timepoint (hr) Value: 6
  misc_feature: MA Experiment 108573 PARAMETER Experiment Name: At_Drought_cDNA_P Parameter: Tissue Value: Aerial
  misc_feature: MA Experiment 108573 PARAMETER Experiment Name: At_Drought_cDNA_P Parameter: Treatment Value: Drought vs. No Drought
  misc_feature: MA Experiment ID: 108585 Result: Up-regulated in Transcription
  misc_feature: MA Experiment 108585 PARAMETER Experiment Name: At_5mM_NaNP_cDNA_P Parameter: Timepoint (hr) Value: 6
  misc_feature: MA Experiment 108585 PARAMETER Experiment Name: At_5mM_NaNP_cDNA_P Parameter: Tissue Value: Aerial
  misc_feature: MA Experiment 108585 PARAMETER Experiment Name: At_5mM_NaNP_cDNA_P Parameter: Treatment Value: null
  misc_feature: MA Experiment ID: 108595 Result: Down-regulated in Transcription
  misc_feature: MA Experiment 108595 PARAMETER Experiment Name: At_Ler-pi_Ovule_cDNA_P Parameter: Plant Line Value: null
  misc_feature: MA Experiment ID: 20000071 Result: Up-regulated in Transcription
  misc_feature: MA Experiment 20000071 PARAMETER Experiment Name: At_100uM_ABA_Mutants_cDNA_P Parameter: Plant Line Value: CS8104
  misc_feature: MA Experiment 20000071 PARAMETER Experiment Name: At_100uM_ABA_Mutants_cDNA_P Parameter: Timepoint (hr) Value: 6
  misc_feature: MA Experiment 20000071 PARAMETER Experiment Name: At_100uM_ABA_Mutants_cDNA_P Parameter: Tissue Value: Aerial
  misc_feature: MA Experiment 20000071 PARAMETER Experiment Name: At_100uM_ABA_Mutants_cDNA_P Parameter: Treatment Value: 100uM ABA vs. No Treatment
  misc_feature: MA Experiment ID: 20000185 Result: Down-regulated in Transcription
  misc_feature: MA Experiment 20000185 PARAMETER Experiment Name: At_Roots__P Parameter: Age (day) Value: 7 vs. 21
  misc_feature: MA Experiment 20000185 PARAMETER Experiment Name: At_Roots__P Parameter: Organism Value: A. thaliana
  misc_feature: MA Experiment 20000185 PARAMETER Experiment Name: At_Roots__P Parameter: Tissue Value: Roots vs. Whole Plant
  misc_feature: MA Experiment ID: 20000224 Result: Up-regulated in Transcription
  misc_feature: MA Experiment ID: 20000437 Result: Up-regulated in Transcription
  misc_feature: MA Experiment 20000437 PARAMETER Experiment Name: At_Drought_P Parameter: Age (day) Value: 8
  misc_feature: MA Experiment 20000437 PARAMETER Experiment Name: At_Drought_P Parameter: Organism Value: A. thaliana
  misc_feature: MA Experiment 20000437 PARAMETER Experiment Name: At_Drought_P Parameter: Plant Line Value: WS
  misc_feature: MA Experiment 20000437 PARAMETER Experiment Name: At_Drought_P Parameter: Timepoint (hr) Value: 24
  misc_feature: MA Experiment 20000437 PARAMETER Experiment Name: At_Drought_P Parameter: Tissue Value: Whole Plant
  misc_feature: MA Experiment 20000437 PARAMETER Experiment Name: At_Drought_P Parameter: Treatment Value: Drought vs. No Drought
  misc_feature: MA Experiment ID: 20000439 Result: Down-regulated in Transcription
  misc_feature: MA Experiment 20000439 PARAMETER Experiment Name: At_Roots__P Parameter: Age (day) Value: 14 vs. 21
  misc_feature: MA Experiment 20000439 PARAMETER Experiment Name: At_Roots__P Parameter: Organism Value: A. thaliana
  misc_feature: MA Experiment 20000439 PARAMETER Experiment Name: At_Roots__P Parameter: Tissue Value: Roots vs. Whole Plant
  misc_feature: MA Experiment ID: 20000445 Result: Up-regulated in Transcription
  misc_feature: MA Experiment 20000445 PARAMETER Experiment Name: At_100uM_NAA__P Parameter: Age (day) Value: 14
  misc_feature: MA Experiment 20000445 PARAMETER Experiment Name: At_100uM_NAA__P Parameter: Organism Value: A. thaliana
  misc_feature: MA Experiment 20000445 PARAMETER Experiment Name: At_100uM_NAA__P Parameter: Plant Line Value: WS
  misc_feature: MA Experiment 20000445 PARAMETER Experiment Name: At_100uM_NAA__P Parameter: Timepoint (hr) Value: 6
  misc_feature: MA Experiment 20000445 PARAMETER Experiment Name: At_100uM_NAA__P Parameter: Tissue Value: Aerial
  misc_feature: MA Experiment 20000445 PARAMETER Experiment Name: At_100uM_NAA__P Parameter: Treatment Value: 100uM NAA vs. No Treatment
  misc_feature: MA Experiment ID: 20000451 Result: Down-regulated in Transcription
  misc_feature: MA Experiment 20000451 PARAMETER Experiment Name: At_CS6879_Shoots-Roots_P Parameter: Age (day) Value: 14
  misc_feature: MA Experiment 20000451 PARAMETER Experiment Name: At_CS6879_Shoots-Roots_P Parameter: Organism Value: A. thaliana
  misc_feature: MA Experiment 20000451 PARAMETER Experiment Name: At_CS6879_Shoots-Roots_P Parameter: Plant Line Value: CS6879 vs. WS
  misc_feature: MA Experiment 20000451 PARAMETER Experiment Name: At_CS6879_Shoots-Roots_P Parameter: Tissue Value: Roots
  misc_feature: MA Experiment ID: 20000452 Result: Up-regulated in Transcription
  misc_feature: MA Experiment 20000452 PARAMETER Experiment Name: At_CS6879_Shoots-Roots_P Parameter: Age (day) Value: 14
  misc_feature: MA Experiment 20000452 PARAMETER Experiment Name: At_CS6879_Shoots-Roots_P Parameter: Organism Value: A. thaliana
  misc_feature: MA Experiment 20000452 PARAMETER Experiment Name: At_CS6879_Shoots-Roots_P Parameter: Plant Line Value: CS6879 vs. WS
  misc_feature: MA Experiment 20000452 PARAMETER Experiment Name: At_CS6879_Shoots-Roots_P Parameter: Tissue Value: Shoots
  misc_feature: MA Experiment ID: 20000456 Result: Up-regulated in Transcription
  misc_feature: MA Experiment 20000456 PARAMETER Experiment Name: At_100uM_BA_P Parameter: Age (day) Value: 14
  misc_feature: MA Experiment 20000456 PARAMETER Experiment Name: At_100uM_BA_P Parameter: Organism Value: A. thaliana
  misc_feature: MA Experiment 20000456 PARAMETER Experiment Name: At_100uM_BA_P Parameter: Plant Line Value: WS
  misc_feature: MA Experiment 20000456 PARAMETER Experiment Name: At_100uM_BA_P Parameter: Timepoint (hr) Value: 6
  misc_feature: MA Experiment 20000456 PARAMETER Experiment Name: At_100uM_BA_P Parameter: Tissue Value: Aerial
  misc_feature: MA Experiment 20000456 PARAMETER Experiment Name: At_100uM_BA_P Parameter: Treatment Value: 100uM BA vs. No Treatment
  misc_feature: MA Experiment ID: 20001911 Result: Up-regulated in Transcription
  misc_feature: MA Experiment 20001911 PARAMETER Experiment Name: At_Drought_Reproduction_P Parameter: Age (day) Value: 40
  misc_feature: MA Experiment 20001911 PARAMETER Experiment Name: At_Drought_Reproduction_P Parameter: Organism Value: A. thaliana
  misc_feature: MA Experiment 20001911 PARAMETER Experiment Name: At_Drought_Reproduction_P Parameter: Plant Line Value: WS
  misc_feature: MA Experiment 20001911 PARAMETER Experiment Name: At_Drought_Reproduction_P Parameter: Timepoint (day) Value: 10
  misc_feature: MA Experiment 20001911 PARAMETER Experiment Name: At_Drought_Reproduction_P Parameter: Tissue Value: Flowers
  misc_feature: MA Experiment 20001911 PARAMETER Experiment Name: At_Drought_Reproduction_P Parameter: Treatment Value: Drought vs. No Drought
aaattgaatcttcctcttcttcttgagtcttcagaacaacaacaaaaaacagaatcttgaaagaaagaaaaaaagaaaaaaacatgacagagaattctgaaaaaatcgatcgtttaaacgatctcacgacttttatctcgacgaagacaggagtgaaaggactcgtcgatgccgaaataaccgaagttcctagcatgtttcatgtcccttcttctattttatcaaacaacagaccttctgatatctccggcttaaacctcaccgtcccaatcatcgacctcggagatcgtaacacatcttcaagaaacgttgtcatttcgaagatcaaagacgcagctgagaattggggatttttccaagtgatcaatcatgatgttcctttaactgttcttgaagagatcaaagagagtgttcgaaggtttcatgaacaagatccagttgtcaagaaccaatatcttcctaccgataacaacaagagatttgtttataacaatgatttcgatctctatcattcttctcctttgaattggagagactctttcacttgttatattgctccagatcctccgaatccagaggaaatcccactagcttgcaggagtgcggtgatcgaatacacgaagcatgtaatggaattaggagctgtgctcttccaacttctctcagaagctttaggtttagactctgagacacttaagaggattgattgtcttaagggtttgtttatgctctgccattactatccaccttgcccacaacctgacctaactttaggtataagtaaacacaccgacaactctttcctcacgcttcttcttcaagaccaaatcggtggtcttcaagttcttcatgaagattattgggtcgatgtccctcctgtacctggagctcttgttgtcaacattggtgatttcatgcagctgataacgaacgataagttcttgagcgtggagcatagggtacgaccgaacaaagatagaccgcggatttcagttgcgtgcttctttagctcgagtctttctccaaattccacggtttatggaccgattaaagatcttttgtctgatgaaaaccctgctaagtacaaagatatcaccataccagagtacactgcaggatttcttgcgagcatttttgatgaaaagtcgtatttgactaattacatgatatgaagaaaatacttgtccgagtgcaaaatatatatttgtgcgttttgcatatgttacgctacattttctttgtacccgctatagagttcctcaaccattgtaccaataagaaaaaatgttttctacttcatgcttaaaacagcattctaggcttgtagctaacaagtcaaactataagttatctttttcaaac
